(19) United States
(12) Patent Application Publication
(10) Pub. No.: US 2020/0316221 A1
(43) Pub. Date: Oct. 8, 2020

(54) AAV CAPSID DESIGNS

(71) Applicant: University of Massachusetts, Boston, MA (US)

(72) Inventors: Guangping Gao, Westborough, MA (US); Guangchao Xu, Worcester, MA (US); Phillip Tai, Worcester, MA (US); Yuquan Wei, Chengdu, Sichuan (CN); Li Luo, Worcester, MA (US)

(73) Assignee: University of Massachusetts, Boston, MA (US)

(21) Appl. No.: 16/842,679

(22) Filed: Apr. 7, 2020

Related U.S. Application Data
(63) Continuation-in-part of application No. 16/341,504, filed on Apr. 12, 2019.
(60) Provisional application No. 62/486,642, filed on Apr. 18, 2017.
(60) Provisional application No. 62/417,756, filed on Nov. 4, 2016.
(60) Provisional application No. 62/408,022, filed on Oct. 13, 2016.
(60) Provisional application No. 63/003,143, filed on Mar. 31, 2020.

(51) Int. Cl. A61K 48/00; A61K 9/00; A61K 35/76

(52) U.S. Cl. CPC A61K 48/0008; A61K 35/76; A61K 9/0019; A61K 9/0085

(57) ABSTRACT

The disclosure in some aspects relates to recombinant adeno-associated viruses having distinct tissue targeting capabilities. In some aspects, the disclosure relates to gene transfer methods using the recombinant adeno-associated viruses. In some aspects, the disclosure relates to isolated AAV capsid proteins and isolated nucleic acids encoding the same.

### RELATED APPLICATIONS

[0001] This application is a continuation-in-part application of U.S. application Ser. No. 16/341,504, filed Apr. 12, 2019, entitled “AAV CAPSID DESIGNS”, which is a National Stage Application of PCT/US2017/056614, filed Oct. 13, 2017, entitled “AAV CAPSID DESIGNS”, which claims the benefit under 35 U.S.C. § 119(e) of the filing date of U.S. provisional application serial numbers U.S. Ser. No. 62/486,642, filed Apr. 18, 2017, entitled “AAV CAPSID DESIGNS”, 62/417,756, filed Nov. 4, 2016, entitled “AAV CAPSID DESIGNS”, and 62/408,022, filed Oct. 13, 2016, entitled “AAV CAPSID DESIGNS”; and claims the benefit under 35 U.S.C. § 119(e) of the filing date of U.S. provisional application Ser. No. 63/003,143, filed Mar. 31, 2020, entitled “CENTRAL NERVOUS SYSTEM TARGETING CAPSIDS”; the entire contents of each application which are incorporated herein by reference.

### FIELD OF THE DISCLOSURE

[0002] The disclosure in some aspects relates to isolated nucleic acids, compositions, and kits useful for identifying adeno-associated viruses in cells. In some aspects, the disclosure provides novel AAVs and methods of use thereof as well as related kits.

### BACKGROUND

[0003] Recombinant AAV adeno-associated viruses (rAAVs) are capable of driving stable and sustained transgene expression in target tissues without notable toxicity and host immunogenicity. Thus, rAAVs are promising delivery vehicles for long-term therapeutic gene expression. However, low transduction efficiency and restricted tissue tropisms by currently available rAAV vectors can limit their application as feasible and efficacious therapies. Additionally, faithful clinical translation of leading therapeutic AAV serotypes derived from non-human tissues is a concern. Accordingly, a need remains for new AAV vectors for gene delivery.

### SUMMARY

[0004] The disclosure in some aspects relates to novel AAVs for gene therapy applications. In some embodiments, AAVs described herein comprise amino acid variations in one or more capsid proteins that confer new or enhanced tissue tropism properties. According to some embodiments, variants of AAV2, AAV2/3 (e.g., AAV2/3 hybrid), and AAV8 have been identified and are disclosed herein that possess useful tissue targeting properties. For example, variants of AAV8 are provided that are useful for transducing cells, such as, human hepatocytes (e.g., present in liver tissue), central nervous system cells (CNS cells), and others. Variants of AAV2, AAV2/3 (e.g., AAV2/3 hybrid), and AAV8 are provided that, in some embodiments, are useful for targeting cells of the ocular tissue (e.g., the eye), gastrointestinal tract, respiratory system, breast tissue, pancreatic tissue, urinary tract tissue, uterine tissue, tissue associate with certain cancers (e.g., breast cancer, prostate cancer, etc.), and other tissues. In some embodiments, the variant AAVs described herein target tissue other than the tissue targeted by their corresponding wild-type AAVs.

[0005] The disclosure in some aspects provides an isolated nucleic acid comprising a sequence encoding a polypeptide selected from the group consisting of: SEQ ID NO: 1-409, 435-868, and 1726-1988, which encodes an AAV capsid protein. In some embodiments, a fragment of the isolated nucleic acid is provided. In certain embodiments, the fragment of the isolated nucleic acid does not encode a peptide that is identical to a sequence of any one of SEQ ID NOs: 869, 870, or 871.

[0006] In some aspects, the disclosure provides a nucleic acid comprising a sequence selected from the group consisting of SEQ ID NO: 410-434, 876-1718, and 1989-2251. In some embodiments, the nucleic acid encodes an AAV capsid protein, or a variant thereof and/or an AAV assembly-activating protein (AAP), or a variant thereof. In some embodiments, the AAP is in a different open reading frame of the nucleic acid than the AAV capsid protein. In some embodiments, the AAP is AAV2 AAP (AAP-2), or variant thereof.

[0007] The disclosure in some aspects provides an isolated AAV capsid protein comprising an amino acid sequence selected from the group consisting of: SEQ ID NOs: 1-409, 435-868, and 1726-1988. In some embodiments, the isolated AAV capsid protein comprises a sequence selected from: SEQ ID NOs: 1-409, 837-852 or 1726-1814, wherein an amino acid of the sequence that is not identical to a corresponding amino acid of the sequence set forth as SEQ ID NO: 869 is replaced with a conservative substitution.

[0008] In some aspects, the disclosure provides AAV2/3 hybrid capsid proteins. In some embodiments, the isolated AAV capsid protein comprises a sequence selected from: SEQ ID NOs: 435-628 and 1815-1988, wherein an amino acid of the sequence that is not identical to a corresponding amino acid of the sequence set forth as SEQ ID NO: 869 or 870 is replaced with a conservative substitution.

[0009] In some embodiments, the isolated AAV capsid protein comprises a sequence selected from: SEQ ID NOs: 629-836 or 853-868, wherein an amino acid of the sequence that is not identical to a corresponding amino acid of the sequence set forth as SEQ ID NO: 871 is replaced with a conservative substitution.

[0010] In certain aspects of the disclosure, a composition is provided that comprises any of the foregoing isolated AAV capsid proteins. In some embodiments, the composition further comprises a pharmaceutically acceptable carrier. In some embodiments a composition of one or more of the isolated AAV capsid proteins of the disclosure and a physiologically compatible carrier is provided.

[0011] In certain aspects of the disclosure, a recombinant AAV (rAAV) is provided that comprises any of the foregoing isolated AAV capsid proteins. In some embodiments, a composition comprising the rAAV is provided. In certain embodiments, the composition comprising the rAAV further comprises a pharmaceutically acceptable carrier. A recombinant AAV is also provided, wherein the recombinant AAV includes one or more of the isolated AAV capsid proteins of the disclosure.

[0012] In some aspects of the disclosure, a host cell is provided that contains a nucleic acid that comprises a coding sequence selected from the group consisting of: SEQ ID NO: 410-434, 876-1718 and 1989-2251, that is operably linked to a promoter. In some embodiments, a composition comprising the host cell and a sterile cell culture medium is provided. In some embodiments, a composition comprising the host cell and a cryopreservative is provided.

[0013] According to some aspects of the disclosure, a method for delivering a transgene to a subject is provided. In some embodiments, the method comprises administering any of the foregoing rAAVs to a subject, wherein the rAAV comprises at least one transgene, and wherein the rAAV infects cells of a target tissue of the subject. In some embodiments, subject is selected from a mouse, a rat, a rabbit, a dog, a cat, a sheep, a pig, and a non-human primate. In one embodiment, the subject is a human.

[0014] In some embodiments, the at least one transgene is a protein coding gene. In certain embodiments, the at least one transgene encodes a small interfering nucleic acid. In certain embodiments, the small interfering nucleic acid is a miRNA. In certain embodiments, the small interfering nucleic acid is a miRNA sponge or TuD RNA that inhibits the activity of at least one miRNA in the subject. In certain embodiments, the miRNA is expressed in a cell of the target tissue In certain embodiments, the target tissue is liver, central nervous system (CNS), ocular, gastrointestinal, respiratory, breast, pancreas, urinary tract, or uterine tissue.

[0015] In some embodiments, the transgene expresses a transcript that comprises at least one binding site for a miRNA, wherein the miRNA inhibits activity of the transgene, in a tissue other than the target tissue, by hybridizing to the binding site.

[0016] In certain embodiments, the rAAV is administered to the subject intravenously, transdermally, intraocularly, intrathecally, intracererbally, orally, intramuscularly, subcutaneously, intranasally, or by inhalation.

[0017] According to some aspects of the disclosure, a method for generating a somatic transgenic animal model is provided. In some embodiments, the method comprises administering any of the foregoing rAAVs to a non-human animal, wherein the rAAV comprises at least one transgene, and wherein the rAAV infects cells of a target tissue of the non-human animal.

[0018] In some embodiments, the transgene is at least one protein coding gene. In certain embodiments, the transgene encodes at least one small interfering nucleic acid. In some embodiments, the transgene encodes at least one reporter molecule. In certain embodiments, the small interfering nucleic acid is a miRNA. In certain embodiments, the small interfering nucleic acid is a miRNA sponge or TuD RNA that inhibits the activity of at least one miRNA in the animal. In certain embodiments, the miRNA is expressed in a cell of the target tissue.

[0019] In certain embodiments, the target tissue is liver, central nervous system (CNS), ocular, gastrointestinal, respiratory, breast, pancreas, urinary tract, or uterine tissue.

[0020] In some embodiments, the transgene expresses a transcript that comprises at least one binding site for a miRNA, wherein the miRNA inhibits activity of the transgene, in a tissue other than the target tissue, by hybridizing to the binding site.

[0021] According to some aspects of the disclosure, methods are provided for generating a somatic transgenic animal model that comprise administering any of the foregoing rAAVs to a non-human animal, wherein the rAAV comprises at least one transgene, wherein the transgene expresses a transcript that comprises at least one binding site for a miRNA, wherein the miRNA inhibits activity of the transgene, in a tissue other than a target tissue, by hybridizing to the binding site of the transcript.

[0022] In some embodiments, the transgene comprises a tissue specific promoter or inducible promoter. In certain embodiments, the tissue specific promoter is a liver-specific thyroxin binding globulin (TBG) promoter, an insulin promoter, a glucagon promoter, a somatostatin promoter, mucin-2 promoter, a pancreatic polypeptide (PPY) promoter, a synapsin-1 (Syn) promoter, a retinoschisin promoter, a K12 promoter, a CC10 promoter, a surfactant protein C (SP-C) promoter, a PRC1 promoter, a RRM2 promoter, uroplakin 2 (UPII) promoter, or a lactoferrin promoter.

[0023] In certain embodiments, the rAAV is administered to the animal intravenously, transdermally, intraocularly, intrathecally, orally, intramuscularly, subcutaneously, intranasally, or by inhalation. According to some aspects of the disclosure, a somatic transgenic animal model is provided that is produced by any of the foregoing methods.

[0024] In other aspects of the disclosure, a kit for producing a rAAV is provided. In some embodiments, the kit comprises a container housing an isolated nucleic acid having a sequence of any one of SEQ ID NO: 410-434, 876-1718, and 1989-2251. In some embodiments, the kit comprises a container housing an isolated nucleic acid encoding a polypeptide having a sequence of any one of SEQ ID NO: 1-409, 435-868, or 1726-1988. In some embodiments, the kit further comprises instructions for producing the rAAV. In some embodiments, the kit further comprises at least one container housing a recombinant AAV vector, wherein the recombinant AAV vector comprises a transgene.

[0025] In other aspects of the disclosure, a kit is provided that comprises a container housing a recombinant AAV having any of the foregoing isolated AAV capsid proteins. In some embodiments, the container of the kit is a syringe.

[0026] In other aspects, the disclosure relates to the use of AAV based vectors as vehicles for, delivery of genes, therapeutic, prophylactic, and research purposes as well as the development of somatic transgenic animal models.

[0027] In some aspects, the disclosure relates to AAV serotypes that have demonstrated distinct tissue/cell type tropism and can achieve stable somatic gene transfer in animal tissues at levels similar to those of adenoviral vectors (e.g., up to 100% in vivo tissue transduction depending upon target tissue and vector dose) in the absence of vector related toxicology. In other aspects, the disclosure relates to AAV serotypes having liver, central nervous system (CNS), ocular, gastrointestinal, respiratory, breast, pancreas, urinary tract, or uterine tissue-targeting capabilities. These tissues are associated with a broad spectrum of human diseases including neurological, metabolic, diabetic, ocular, respiratory, gastrointestinal, urinary tract, and reproductive diseases and certain cancers.

[0028] In some embodiments the rAAV includes at least one transgene. The transgene may be one which causes a pathological state. In some embodiments, the transgene encoding a protein that treats a pathological state.

[0029] In another aspect the novel AAVs of the disclosure may be used in a method for delivering a transgene to a subject. The method is performed by administering a rAAV of the disclosure to a subject, wherein the rAAV comprises at least one transgene. In some embodiments the rAAV targets a predetermined tissue of the subject.

[0030] In another aspect the AAVs of the disclosure may be used in a method for generating a somatic transgenic animal model. The method is performed by administering a rAAV of the disclosure to an animal, wherein the rAAV comprises at least one transgene, wherein the transgene causes a pathological state, and wherein the rAAV targets a predetermined tissue of the animal.

[0031] The transgene may express a number of genes including cancer related genes, pro-apoptotic genes and apoptosis-related genes. In some embodiments the transgene expresses a small interfering nucleic acid capable of inhibiting expression of a cancer related gene. In other embodiments the transgene expresses a small interfering nucleic acid capable of inhibiting expression of an apoptosis-related gene. The small interfering nucleic acid in other embodiments is a miRNA or shRNA. According to other embodiments the transgene expresses a toxin, optionally wherein the toxin is DTA. In other embodiments the transgene expresses a reporter gene that is optionally a reporter enzyme, such as Beta-Galactosidase or a Fluorescent protein, such as GFP or luciferase.

[0032] The transgene may express a miRNA. In other embodiments the transgene expresses a miRNA sponge, wherein miRNA sponge inhibits the activity of one or more miRNAs in the animal. The miRNA may be an endogenous miRNA or it may be expressed in a cell of a liver, central nervous system (CNS), ocular, gastrointestinal, respiratory, breast, pancreas, urinary tract, or uterine tissue, in some embodiments.

[0033] The rAAV may transduce many different types of tissue, such as neurons, squamous epithelial cells, renal proximal or distal convoluted tubular cells, mucosa gland cells, blood vessel endothelial cells, endometrial cells, retinal cells, or certain cancer cells (e.g., breast cancer cells, prostate cancer cells, etc.).

[0034] In some embodiments the rAAV is administered at a dose of 10¹⁰, 10¹¹, 10¹², 10¹³, 10¹⁴, or 10¹⁵ genome copies per subject. In some embodiments the rAAV is administered at a dose of 10¹⁰, 10¹¹, 10¹², 10¹³, or 10¹⁴ genome copies per kg. The rAAV may be administered by any route. For instance it may be administered intravenously (e.g., by portal vein injection) in some embodiments.

[0035] In some embodiments the transgene includes a tissue specific promoter such as a liver-specific thyroxin binding globulin (TBG) promoter, an insulin promoter, a glucagon promoter, a somatostatin promoter, mucin-2 promoter, a pancreatic polypeptide (PPY) promoter, a synapsin-1 (Syn) promoter, a retinoschisin promoter, a K12 promoter, a CC10 promoter, a surfactant protein C (SP-C) promoter, a PRC1 promoter, a RRM2 promoter, uroplakin 2 (UPII) promoter, or a lactoferrin promoter.

[0036] The somatic transgenic animal model may be a mammal, such as a mouse, a rat, a rabbit, a dog, a cat, a sheep, a pig, a non-human primate.

[0037] In some embodiments a putative therapeutic agent may be administered to the somatic transgenic animal model to determine the effect of the putative therapeutic agent on the pathological state in the animal.

[0038] In another aspect the disclosure is a somatic transgenic animal produced by the methods described herein.

[0039] A kit for producing a rAAV that generates a somatic transgenic animal having a pathological state in a predetermined tissue is provided according to another aspect of the disclosure. The kit includes at least one container housing a recombinant AAV vector, at least one container housing a rAAV packaging component, and instructions for constructing and packaging the recombinant AAV.

[0040] The rAAV packaging component may include a host cell expressing at least one rep gene and/or at least one cap gene. In some embodiments the host cell is a 293 cell. In other embodiments the host cell expresses at least one helper virus gene product that affects the production of rAAV containing the recombinant AAV vector. The at least one cap gene may encode a capsid protein from an AAV serotype that targets the predetermined tissue.

[0041] In other embodiments a rAAV packaging component includes a helper virus optionally wherein the helper virus is an adenovirus or a herpes virus.

[0042] The rAAV vector and components therein may include any of the elements described herein. For instance, in some embodiments the rAAV vector comprises a transgene, such as any of the transgenes described herein. In some embodiments the transgene expresses a miRNA inhibitor (e.g., a miRNA sponge or TuD RNA), wherein miRNA inhibitor inhibits the activity of one or more miRNAs in the somatic transgenic animal.

[0043] In some aspects, the disclosure provides a method for delivering a transgene to a target cell in a subject, the method comprising intracranially administering to the subject a recombinant adeno-associated virus (rAAV) comprising: an isolated nucleic acid comprising a transgene encoding one or more gene products of interest; and an adeno-associated acid (AAV) capsid protein having the sequence set forth in SEQ ID NO: 66.

[0044] In some embodiments, intracranial administration comprises intrahippocampal injection.

[0045] In some embodiments, a target cell is a central nervous system (CNS) cell. In some embodiments, a CNS cell is a neuron, oligodendrocyte, astrocyte, or microglial cell.

[0046] In some embodiments, a subject is a mammal. In some embodiments, a subject is a human. In some embodiments, a subject is characterized by production of anti-AAV2 antibodies. In some embodiments, administration of the rAAV does not result in a neutralizing immune response against the rAAV by the subject.

[0047] In some embodiments, an isolated nucleic acid comprises AAV inverted terminal repeats (ITRs) flanking the transgene. In some embodiments, the nucleic acid sequence encoding the one or more gene products is operably linked to a promoter. In some embodiments, the one or more gene products comprise a protein or an inhibitory nucleic acid.

[0048] In some aspects, the disclosure provides a method for delivering a transgene to a target cell in a subject, the method comprising intravenously administering to the subject a recombinant adeno-associated virus (rAAV) comprising: an isolated nucleic acid comprising a transgene encoding one or more gene products of interest; and an adeno-associated acid (AAV) capsid protein having the sequence set forth in SEQ ID NO: 66, wherein the administration results in the rAAV crossing the blood brain barrier (BBB) of the subject.

[0049] In some embodiments, a target cell is a central nervous system (CNS) cell. In some embodiments, a CNS cell is a neuron, oligodendrocyte, astrocyte, or microglial cell.

[0050] In some embodiments, a subject is a mammal. In some embodiments, a subject is a human. In some embodiments, a subject is characterized by production of anti-AAV2 antibodies. In some embodiments, administration of the rAAV does not result in a neutralizing immune response against the rAAV by the subject.

[0051] In some embodiments, an isolated nucleic acid comprises AAV inverted terminal repeats (ITRs) flanking the transgene. In some embodiments, the nucleic acid sequence encoding the one or more gene products is operably linked to a promoter. In some embodiments, the one or more gene products comprise a protein or an inhibitory nucleic acid.

[0052] In some embodiments, recombinant AAVs (rAAVs) comprising the capsid protein variants described herein (e.g., AAVv66, SEQ ID NO: 66) are more efficiently packaged (e.g., 2-fold, 3-fold, 4-fold, 5-fold, 10-fold, 20-fold, 30-fold, 50-fold, 100-fold, or more) than rAAVs having certain wild-type AAV capsid proteins (e.g., AAV2 capsid protein, SEQ ID NO: 869).

[0053] Each of the limitations of the disclosure can encompass various embodiments of the disclosure. It is, therefore, anticipated that each of the limitations of the disclosure involving any one element or combinations of elements can be included in each aspect of the disclosure. This disclosure is not limited in its application to the details of construction and the arrangement of components set forth in the following description or illustrated in the drawings. The disclosure is capable of other embodiments and of being practiced or of being carried out in various ways.

### BRIEF DESCRIPTION OF THE DRAWINGS

[0054] FIGS. 1A-1B show workflow schematics for the identification of AAV variants. FIG. 1A depicts high-throughput detection of novel AAV variants in selected human tissues. Proviral capsid sequences are amplified using high-cycle PCR, followed by low-cycle PCR to barcode the amplicon libraries for multiplexed single-molecule, real-time (SMRT) sequencing. FIG. 1B shows a summary of the pipeline for bioinformatics analysis of sequencing data.

[0055] FIGS. 2A-2D show data relating to in vivo detection of FFLuc transgene activity with different administrations of selected AAV8 variants. FIG. 2A shows luciferase activities of different AAV8 variants were evaluated at week 6 after IV (intravenous), IM (intramuscular), or IN (intranasal) injection. FIGS. 2B-2D data relating to evaluation of FFLuc activity for each variant, B2 (FIG. 2B), B3 (FIG. 2C), and B61 (FIG. 2D), compared to AAV8 (mean±SD, n=3, t test).

[0056] FIGS. 3A-3B show data relating to evaluation of FFLuc transgene activity delivered by the AAV8 variant B61 compared to AAV9 at day 21 after neonatal injection. Luciferase activities and genome copies of brain (FIG. 3A) and spinal cord (FIG. 3B) were detected (mean±SD, n=5, t test).

[0057] FIGS. 4A-4B show data relating to in vivo detection of FFLuc transgene activity after right hindlimb intramuscular (IM) injection of the AAV8 variant B44 compared to AAV8. FIG. 4A shows whole animal Luciferase expression of variant B44 was evaluated at week 6 after IM injection. FIG. 4B shows evaluation of muscle (RTA, right tibialis anterior; LTA, left tibialis anterior), liver, and heart. Luciferase activities (left bar graph) and relative ratios (right bar graph) for B44 compared to AAV8 (mean±SD, n=3).

[0058] FIG. 5 shows a phylogenic comparison of AAV8 variants (B2, B3, B61) to other AAV serotypes.

[0059] FIG. 6A shows a schematic depiction of a workflow for the in vivo characterization of novel AAV variants by high-throughput tropism screening.

[0060] FIG. 6B shows a schematic depiction of a workflow for the NHP characterization of novel AAV variants by high-throughput tropism screening.

[0061] FIG. 7 shows a scatter plot displaying the distribution of distinct AAV2 capsid variants (409 total) and AAV2/3 variants (194 total) harboring one or more single-amino-acid variants.

[0062] FIG. 8 shows diagrams of vector constructs used in the multiplexed screening of discovered capsid variants. Unique 6-bp barcodes were cloned into transgenes and packaged into candidate capsid variants.

[0063] FIG. 9 shows a schematic of an indexed transgene and high-throughput sequencing library design to assess capsid variant tropism profiling. The indexed and adapter cassette containing a 6-bp barcode (1° barcode) and a BstEII restriction site can be cloned into vector constructs using flanking BsrGI and SacI sites. Whole crude DNA from rAAV-treated tissues containing both host genome and vector genomes was cut with BstEII enzyme. The resulting 5′-overhang was used to specifically ligate to an adapter containing a second barcode, which allows for further multiplexed sequencing and streamlining; and a 5′-biotin modification, which can be used to select for adapter-containing fragments using magnetic bead enrichment. Enriched material can then undergo PCR amplification using primers specific to adapter and transgene sequences to produce libraries for high-throughput sequencing. SEQ ID NOs.: 1719-1725 are shown from top to bottom.

[0064] FIGS. 10A-10D show transduction spread of rAAV2 and rAAVv66 following intrahippocampal injection. FIG. 10A shows native EGFP expression following rAAV2-CB6-Egfp or rAAVv66-CB6-Egfp injection via unilateral intrahippocampal administration. Scale bars=700 μm. FIG. 10B shows quantification of EGFP-positive surface normalized to DAPI-positive surface. Data is presented as the mean±SD; n=3. ****P<0.0001. FIG. 10C shows coronal brain schematic depicting sub-anatomical regions of interest in both contralateral and ipsilateral hemispheres. Cornu ammonis (CA1, CA2, CA3, CA4), dentate gyrus (DG), corpus callosum (CC), and cortex (CTX). FIG. 10D shows high-magnification images of rAAVv66 transduced sub-anatomical regions. Scale bars=50 μm.

[0065] FIGS. 11A-11P show transduction of major cell types of the brain by rAAVv66. (FIGS. 11A, 11E, 11I, 11M) Coronal sections of rAAVv66-CB6-Egfp transduced mouse brains. IF-stained sections with antibodies against NEUN (FIG. 11A neurons), GFAP (FIG. 11E astrocytes), IBA1 (FIG. 11I microglia), or OLIG2 (FIG. 11M oligodendrocytes) indicate the distribution of cell types across the brain. Native EGFP expression that colocalize with IF staining indicate positively transduced cell types. Scale bars=700 μm. (FIGS. 11B, 11F, 11J, 11N) 3D rendering of sub-anatomical regions of single representative frames from dashed line rectangle boxes within coronal section views (top panels) with single-cell representations from fields defined by dashed lined square boxes (bottom three panels). Left panels, total area EGFP and cell marker IF stains; center panels, colocalized EGFP with total cell marker IF stains; right panels, colocalized EGFP and cell marker IF stains. Scale bars=50 μm (top panels), 5 μm (bottom three panels). (FIGS. 11C, 11G, 11K, 11O) Quantification of cell type-specific IF staining across indicated hippocampal regions (x axes), normalized to DAPI signal. (FIGS. 11D, 11H, 11L, 11P) Quantification of cell type-specific transduction across indicated regions, normalized to total cell-type IF and DAPI signal. Data is presented as the mean±SD; n=3. Cornu ammonis (CA1, CA2, CA3, CA4), dentate gyrus (DG), corpus callosum (CC), and cortex (CTX).

[0066] FIGS. 12A-12E show biophysical analyses of AAVv66. (FIGS. 12A-12B) Heatmap displays of differential scanning fluorimetry (DSF) analyses to query capsid protein unfolding (uncoating) and DNA accessibility (vector genome extrusion) at pHs 7, 6, 5, and 4. (FIGS. 12C-12E) Each defining amino acid residue of AAVv66 was converted to those of AAV2 by site-directed mutagenesis and examined for changes in (FIG. 12C) packaging yield, (FIG. 12D) capsid stability, and (FIG. 12E) genome release at pH 7. Values represent mean±SD. p values were determined by one-way ANOVA. *p<0.05, **p<0.01, ***p<0.001, ****p<0.0001. n³ 3.

[0067] FIGS. 13A-13E show cryo-EM primary metrics, map reconstruction, and model generation of AAVv66. (FIG. 13A) Density map of AAVv66. Color scheme demarcates the topological distance from the center (A). (FIG. 13B) Ribbon structure of the refined AAVv66 capsid monomer. Amino acids differentiating from AAV2 are highlighted. The 2-fold (oval), 3-fold (triangle), and 5-fold (pentagon) symmetries are annotated. Part of AAVv66 electron density (dark grey mesh) and residues are shown for regions close to (FIG. 13C) L583, R487, Y533, and K532, (FIG. 13D) S446, D499, and S501, and (FIG. 13E) N407-T414.

[0068] FIG. 14 shows structural differences between AAVv66 and AAV2. At the center is the AAVv66 60-mer structure (grey). Amino acid residues unique to AAVv66 are highlighted in green, while amino acid residues for a single monomer that are in common with AAV2 are colored. Atomic models showing residue side chains of select regions with substantial difference between AAVv66 and AAV2. The alignments were made with using monomers of AAV2 (11p3) and AAVv66, with modeled side chains from neighboring residues displayed in grey. Annotations for amino acids shown are indicated as those belonging to AAVv66, the position number, and then AAV2.

[0069] FIGS. 15A-15C show differential capsid surface electrostatics between AAV2 and AAVv66. (FIG. 15A) Surface positive and negative charges are displayed for AAV2 and AAVv66 60-mer, trimer (3-fold symmetry), and pentamers (exterior and interior of the 5-fold symmetry) structures. Black arrows at the AAV2 60-mer and trimer structures indicate the approximate positions of R585 and R588 at a single 3-fold protrusion. (FIG. 15B) Zoom-in of amino acid residues at 585-588 of AAV2 and AAVv66. (FIG. 15C) Bar graphs of the zeta potentials of purified vectors as measured by a zetasizer. Values represent mean±SD, n=3.

[0070] FIG. 16 shows amino acid sequence of the AAVs/AAVv66 capsid. Amino acid differences between AAV2 and AAVv66 are highlighted. Variable region (VR) residues are denoted by short bars. The aA domain is demarcated by the dotted bar, and residues forming the b-sheets are marked with black arrows. Start positions for VP1, VP2, and VP3 are marked by greater-than symbol (>). The PLA domain within VP1 is denoted by a bar. The AAV2 strand corresponds to SEQ ID NO: 869, and the AAVv66 strand corresponds to SEQ ID NO: 66.

[0071] FIG. 17 shows AAVv66 produces higher vector yields than AAV2. Crude lysate PCR assays were performed on media and cellular lysates of HEK239 cells subjected to triple-transfection of pAAV and packaging plasmids for AAV2 or AAVv66. Values represent mean genome copies±SD, n=3.

[0072] FIG. 18 shows AAVv66 lacks strong heparin binding. Heparin competition assay showing transduction efficiency of AAV2-CB6-FLuc and AAVv66-CB6-FLuc in HEK293 cells in the presence of increasing amounts of heparin (x-axis). Luminescence values were scaled to values obtained for wells lacking heparin and set to 1 (y-axis). Values represent mean±SD, n=3. **, p<0.01 by 2-way ANOVA.

[0073] FIG. 19 shows in vitro infection efficiencies of AAV2, AAV3b, and AAVv66 in HEK293 cells. Vectors were packaged with CB6-FLuc. Cells were lysed 48-hr post-infection to assess the infectivity of vectors via detection of luciferase activity (RLU, relative light units). Data is displayed in log-scale. Values represent mean±SD, ***p<0.0001 by one-way ANOVA, n=3.

[0074] FIGS. 20A-20D show intravenous administration of AAVv66 vector shows transduction of the liver. Systemic injection of AAVv66-CB6-Fluc resulted in the transduction of the liver. rAAV2-CB6-Fluc or AAVv66-CB6-Fluc (1.0E11 GC/mouse) was injected into mice by tail vein administration. (FIG. 20A) After 14 days, mice were injected with luciferin substrate intraperitoneally and imaged. Although quantification of whole-body live bioluminescence of luciferase activity did not reveal significant differences in transduction of the liver between AAVv66-CB6-Fluc and AAV2-CB6-Fluc, isolation of liver tissues and quantification of luciferase activity and detection of vector genome copy by qPCR showed that AAVv66 is a significantly weaker transducer of liver than AAV2. (FIG. 20B) Total flux of the abdomen in acquired images was recorded. Tissues were harvested and assayed for luciferase activity (FIG. 20C) and vector genome abundance by qPCR (FIG. 20D). Values represent mean±SD, n=3. *, p<0.05 by Student's t test.

[0075] FIGS. 21A-21D show intramuscular administration of AAVv66 vector shows transduction of muscle. Intramuscular injection of AAVv66 into the tibialis anterior resulted in very little difference in transduction capacity when compared with the transduction of AAV2. AAV2-CB6-FLuc or AAVv66-CB6-FLuc (4.0E10 GC/mouse) was injected into mice by intramuscular administration into one hindlimb (tibialis anterior). (FIG. 21A) After 14 days, mice were injected with luciferin substrate intraperitoneally and imaged. (FIG. 21B) Total flux of the injected hindlimb in acquired images was recorded. Tissues were harvested and assayed for luciferase activity (FIG. 21C) and vector genome abundance by qPCR (FIG. 21D). Values represent mean±SD, n=3. *, p<0.05 by Student's t test.

[0076] FIGS. 22A-22D show immunological characterization of AAVv66. Mice were intramuscularly administrated by AAV2-CB6-Egfp vector (1E11 GC/mouse). Four weeks after administration, sera were collected for testing neutralizing antibody (NAb) titers against AAV2 or AAVv66 infection. NAb50 values for AAV2 (FIG. 22A) and AAVv66 (FIG. 22B) are defined as the titer dilution that can block 50% of the total transduction achievable by the vector packaged with the LacZ reporter gene. Left, NAb table summaries of individual animals tested. Right, transduction efficiencies were plotted against various serum dilutions. Values represent mean±SD. Dashed lines indicate mean NAb50 serum titers. (FIG. 22C) After the four-week period, mice were intramuscularly administrated with AAV2-hA1AT or AAVv66-hA1AT (1E11 GC/mouse) on the contralateral hindlimb. Serum A1AT levels were measured by ELISA at weeks 5, 6, 7, and 8. Values represent mean±SD, n=3. n.s., not significant; *, p<0.05; **, p<0.01; and ***, p<0.001 by 2-way ANOVA on cross-sectional data points. (FIG. 22D) Rabbit anti-AAV serum cross-reactivity. Rabbit antisera raised against AAV serotypes was tested for NAb to AAVv66 versus the homologous AAV serotype to assess relative cross reactivity. Log 2 values represent highest antibody dilution to achieve 50% inhibition of transduction.

[0077] FIGS. 23A-23B show cryo-EM primary metrics, map reconstruction, and model generation of AAVv66. (FIG. 23A) Cryo-electron micrograph of AAVv66. The scale bar represents 100 Å. (FIG. 23B) Fourier shell correlation for even and odd particles (FSC_part) for AAVv66.

[0078] FIG. 24 shows RMSD (Å) statistics comparing AAVv66 to AAV2 or AAV3b. Summary of the total and regional RMSD (Å) between AAVv66 and AAV2 (1LP3) or AAV3b (3KIC) measured across all alpha-carbon pairs indicated (AAV2 numbering) calculated by the rms_cur function within PyMOL. Full capsid structures of AAV2, 3b, and AAVv66 were aligned through optimized fit within the cryo-EM density map of AAVv66. Using a custom script within PyMOL, the distance values (Å) between individual alpha-carbon pairs for either AAV2 (upper) or AAV3b (lower) were quantitatively transformed for representation as both color and radial thickness for the corresponding residues of AAVv66.

### DETAILED DESCRIPTION

[0079] Adeno-associated virus (AAV) is a small (˜26 nm) replication-defective, non-enveloped virus that generally depends on the presence of a second virus, such as adenovirus or herpes virus, for its growth in cells. AAV is not known to cause disease and induces a very mild immune response. AAV can infect both dividing and non-dividing cells and may incorporate its genome into that of the host cell. These features make AAV a very attractive candidate for creating viral vectors for gene therapy. Prototypical AAV vectors based on serotype 2 provided a proof-of-concept for non-toxic and stable gene transfer in murine and large animal models, but exhibited poor gene transfer efficiency in many major target tissues. The disclosure in some aspects seeks to overcome this shortcoming by providing novel AAVs having distinct tissue targeting capabilities for gene therapy and research applications.

[0080] In some aspects of the disclosure new AAV capsid proteins are provided that have distinct tissue targeting capabilities. In some embodiments, an AAV capsid protein is isolated from the tissue to which an AAV comprising the capsid protein targets. In some aspects, methods for delivering a transgene to a target tissue in a subject are provided. The transgene delivery methods may be used for gene therapy (e.g., to treat disease) or research (e.g., to create a somatic transgenic animal model) applications.

### Methods for Discovering AAVs

[0081] Much of the biology of AAV is influenced by its capsid. Consequently, methods for discovering novel AAVs have been largely focused on isolating DNA sequences for AAV capsids. A central feature of the adeno-associated virus (AAV) latent life cycle is persistence in the form of integrated and/or episomal genomes in a host cell. Methods used for isolating novel AAV include PCR based molecular rescue of latent AAV DNA genomes, infectious virus rescue of latent proviral genome from tissue DNAs in vitro in the presence of adenovirus helper function, and rescue of circular proviral genome from tissue DNAs by rolling-circle-linear amplification, mediated by an isothermal phage Phi-29 polymerase. All of these isolation methods take advantage of the latency of AAV proviral DNA genomes and focus on rescuing persistent viral genomic DNA.

[0082] In some aspects, the disclosure relates to the discovery that novel AAV variants with desirable tissue tropisms can be identified from in vivo tissues of a subject. Without wishing to be bound by any particular theory, the use of in vivo tissue exploits the natural reservoir of genomic diversity observed among viral genomic sequences isolated from both normal and tumor tissues of a subject. Thus in some embodiments, in vivo tissues act as natural incubators for viral (e.g., viral capsid protein) diversity through selective pressure and/or immune evasion.

[0083] In some aspects, the disclosure relates to the discovery that PCR products resulting from amplification of AAV DNA (e.g., AAV DNA isolated or extracted from a host cell or in vivo tissue of a subject) can be subjected to high-throughput single-molecule, real-time (SMRT) sequencing to identify novel capsid protein variants. As used herein, “single-molecule, real-time (SMRT) sequencing” refers to a parallelized single molecule sequencing method, for example as described by Roberts et al. (2013) Genome Biology 14:405, doi:10.1186/gb-2013-14-7-405. Without wishing to be bound by any particular theory, the use of SMRT sequencing removes the need to perform viral genome reconstruction and chimera prediction from aligned short-read fragments obtained from other conventional high-throughput genome sequencing methodologies.

[0084] Endogenous latent AAV genomes are transcriptionally active in mammalian cells (e.g., cells of nonhuman primate tissues such as liver, spleen and lymph nodes). Without wishing to be bound by theory, it is hypothesized that to maintain AAV persistence in host, low levels of transcription from AAV genes could be required and the resulting cap RNA could serve as more suitable and abundant substrates to retrieve functional cap sequences for vector development. Both rep and cap gene transcripts are detected with variable abundances by RNA detection methods (e.g., RT-PCR). The presence of cap gene transcripts and ability to generate cDNA of cap RNA through reverse transcription (RT) in vitro significantly increases abundance of templates for PCR-based rescue of novel cap sequences from tissues and enhances the sensitivity of novel AAV discovery.

[0085] Novel cap sequences may also be identified by transfecting cells with total cellular DNAs isolated from the tissues that harbor proviral AAV genomes at very low abundance, The cells may be further transfected with genes that provide helper virus function (e.g., adenovirus) to trigger and/or boost AAV gene transcription in the transfected cells. In some embodiments, novel cap sequences of the disclosure may be identified by isolating cap mRNA from the transfected cells, creating cDNA from the mRNA (e.g., by RT-PCR) and sequencing the cDNA.

### Isolated Capsid Proteins and Nucleic Acids Encoding the Same

[0086] AAVs isolated from mammals, particularly non-human primates, are useful for creating gene transfer vectors for clinical development and human gene therapy applications. The disclosure provides in some aspects novel AAVs that have been discovered in various in vivo tissues (e.g., liver, brain, gastric, respiratory, breast, pancreatic, rectal, prostate, urologic, and cervical tissues) using the methods disclosed herein. In some embodiments, the tissue(s) in which a novel AAV variant is discovered is a cancerous tissue (e.g., a tumor or a cancer cell). In some embodiments, nucleic acids encoding capsid proteins of these novel AAVs have been discovered in viral genomic DNA isolated from the human tissues. Examples of tissues in which novel AAV capsid proteins have been discovered are described in Table 1. Nucleic acid and protein sequences as well as other information regarding the AAVs are set forth in Tables 3-5 and 8, and in the sequence listing.

[0087] Isolated nucleic acids of the disclosure that encode AAV capsid proteins include any nucleic acid having a sequence as set forth in any one of SEQ ID NOs: 410-435, 876-1718, or 1989-2251, as well as any nucleic acid having a sequence with substantial homology thereto. In some embodiments, isolated nucleic acids of the disclosure include any nucleic acid having a sequence encoding a polypeptide having a sequence as set forth in any one of SEQ ID NOs: 1-409, 435-868, and 1726-1988. In some embodiments, the disclosure provides an isolated nucleic acid that has substantial homology with a nucleic acid having a sequence as set forth in any one of SEQ ID NOs: 410-435, 876-1718, and 1989-2251, but that does not encode a protein having an amino acid sequence as set forth in SEQ ID NOs: 869, 870, or 871.

[0088] In some embodiments, isolated AAV capsid proteins of the disclosure include any protein having an amino acid sequence as set forth in any one of SEQ ID NOs: 1-409, 837-852, or 1726-1814 as well as any protein having substantial homology thereto. In some embodiments, the disclosure provides an isolated capsid protein that has substantial homology with a protein having a sequence as set forth in any one of SEQ ID NOs 1-409, 837-852, or 1726-1814, but that does not have an amino acid sequence as set forth in SEQ ID NO: 869.

[0089] In some embodiments, isolated AAV capsid proteins of the disclosure include any protein having an amino acid sequence as set forth in any one of SEQ ID NOs: 435-628 or 1815-1988 as well as any protein having substantial homology thereto. In some embodiments, the disclosure provides an isolated capsid protein that has substantial homology with a protein having a sequence as set forth in any one of SEQ ID NOs 435-628 or 1815-1988, but that does not have an amino acid sequence as set forth in SEQ ID NO: 869 or 870.

[0090] In some embodiments, isolated AAV capsid proteins of the disclosure include any protein having an amino acid sequence as set forth in any one of SEQ ID NOs: 629-836 or 853-868 as well as any protein having substantial homology thereto. In some embodiments, the disclosure provides an isolated capsid protein that has substantial homology with a protein having a sequence as set forth in any one of SEQ ID NOs 629-836 or 853-868, but that does not have an amino acid sequence as set forth in SEQ ID NO: 871.

[0091] “Homology” refers to the percent identity between two polynucleotide or two polypeptide moieties. The term “substantial homology”, when referring to a nucleic acid, or fragment thereof, indicates that, when optimally aligned with appropriate nucleotide insertions or deletions with another nucleic acid (or its complementary strand), there is nucleotide sequence identity in about 90 to 100% of the aligned sequences. When referring to a polypeptide, or fragment thereof, the term “substantial homology” indicates that, when optimally aligned with appropriate gaps, insertions or deletions with another polypeptide, there is nucleotide sequence identity in about 90 to 100% of the aligned sequences. The term “highly conserved” means at least 80% identity, preferably at least 90% identity, and more preferably, over 97% identity. In some cases, highly conserved may refer to 100% identity. Identity is readily determined by one of skill in the art by, for example, the use of algorithms and computer programs known by those of skill in the art.

[0092] As described herein, alignments between sequences of nucleic acids or polypeptides are performed using any of a variety of publicly or commercially available Multiple Sequence Alignment Programs, such as “Clustal W”, accessible through Web Servers on the internet. Alternatively, Vector NTI utilities may also be used. There are also a number of algorithms known in the art that can be used to measure nucleotide sequence identity, including those contained in the programs described above. As another example, polynucleotide sequences can be compared using BLASTN, which provides alignments and percent sequence identity of the regions of the best overlap between the query and search sequences. Similar programs are available for the comparison of amino acid sequences, e.g., the “Clustal X” program, BLASTP. Typically, any of these programs are used at default settings, although one of skill in the art can alter these settings as needed. Alternatively, one of skill in the art can utilize another algorithm or computer program that provides at least the level of identity or alignment as that provided by the referenced algorithms and programs. Alignments may be used to identify corresponding amino acids between two proteins or peptides. A “corresponding amino acid” is an amino acid of a protein or peptide sequence that has been aligned with an amino acid of another protein or peptide sequence. Corresponding amino acids may be identical or non-identical. A corresponding amino acid that is a non-identical amino acid may be referred to as a variant amino acid. Table 6 provides examples of variant amino acids.

[0093] Alternatively for nucleic acids, homology can be determined by hybridization of polynucleotides under conditions that form stable duplexes between homologous regions, followed by digestion with single-stranded-specific nuclease(s), and size determination of the digested fragments. DNA sequences that are substantially homologous can be identified in a Southern hybridization experiment under, for example, stringent conditions, as defined for that particular system. Defining appropriate hybridization conditions is within the skill of the art.

[0094] A “nucleic acid” sequence refers to a DNA or RNA sequence. In some embodiments, the term nucleic acid captures sequences that include any of the known base analogues of DNA and RNA such as, but not limited to 4-acetylcytosine, 8-hydroxy-N6-methyladenosine, aziridinylcytosine, pseudoisocytosine, 5-(carboxyhydroxyl-methyl) uracil, 5-fluorouracil, 5-bromouracil, 5-carboxymethylaminomethyl-2-thiouracil, 5-carboxymethyl-aminomethyluracil, dihydrouracil, inosine, N6-isopentenyladenine, 1-methyladenine, 1-methylpseudo-uracil, 1-methylguanine, 1-methylinosine, 2,2-dimethyl-guanine, 2-methyladenine, 2-methylguanine, 3-methyl-cytosine, 5-methylcytosine, N6-methyladenine, 7-methylguanine, 5-methylaminomethyluracil, 5-methoxy-amino-methyl-2-thiouracil, beta-D-mannosylqueosine, 5′-methoxycarbonylmethyluracil, 5-methoxyuracil, 2-methylthio-N6-isopentenyladenine, uracil-5-oxyacetic acid methylester, uracil-5-oxyacetic acid, oxybutoxosine, pseudouracil, queosine, 2-thiocytosine, 5-methyl-2-thiouracil, 2-thiouracil, 4-thiouracil, 5-methyluracil, -uracil-5-oxyacetic acid methylester, uracil-5-oxyacetic acid, pseudouracil, queosine, 2-thiocytosine, and 2,6-diaminopurine.

[0095] In some embodiments, proteins and nucleic acids of the disclosure are isolated. As used herein, the term “isolated” means artificially obtained or produced. As used herein with respect to nucleic acids, the term “isolated” generally means: (i) amplified in vitro by, for example, polymerase chain reaction (PCR); (ii) recombinantly produced by cloning; (iii) purified, as by cleavage and gel separation; or (iv) synthesized by, for example, chemical synthesis. An isolated nucleic acid is one that is readily manipulable by recombinant DNA techniques well known in the art. Thus, a nucleotide sequence contained in a vector in which 5′ and 3′ restriction sites are known or for which polymerase chain reaction (PCR) primer sequences have been disclosed is considered isolated but a nucleic acid sequence existing in its native state in its natural host is not. An isolated nucleic acid may be substantially purified, but need not be. For example, a nucleic acid that is isolated within a cloning or expression vector is not pure in that it may comprise only a tiny percentage of the material in the cell in which it resides. Such a nucleic acid is isolated, however, as the term is used herein because it is readily manipulable by standard techniques known to those of ordinary skill in the art. As used herein with respect to proteins or peptides, the term “isolated” generally refers to a protein or peptide that has been artificially obtained or produced (e.g., by chemical synthesis, by recombinant DNA technology, etc.).

[0096] It should be appreciated that conservative amino acid substitutions may be made to provide functionally equivalent variants, or homologs of the capsid proteins. In some aspects the disclosure embraces sequence alterations that result in conservative amino acid substitutions. As used herein, a conservative amino acid substitution refers to an amino acid substitution that does not alter the relative charge or size characteristics of the protein in which the amino acid substitution is made. Variants can be prepared according to methods for altering polypeptide sequence known to one of ordinary skill in the art such as are found in references that compile such methods, e.g., Molecular Cloning: A Laboratory Manual, J. Sambrook, et al., eds., Second Edition, Cold Spring Harbor Laboratory Press, Cold Spring Harbor, N.Y., 1989, or Current Protocols in Molecular Biology, F. M. Ausubel, et al., eds., John Wiley & Sons, Inc., New York. Conservative substitutions of amino acids include substitutions made among amino acids within the following groups: (a) M, I, L, V; (b) F, Y, W; (c) K, R, H; (d) A, G; (e) S, T; (f) Q, N; and (g) E, D. Therefore, one can make conservative amino acid substitutions to the amino acid sequence of the proteins and polypeptides disclosed herein.

[0097] An example of an isolated nucleic acid that encodes a polypeptide comprising an AAV capsid protein is a nucleic acid having a sequence selected from the group consisting of: SEQ ID NO: 410-434, 876-1718, and 1989-2251. A fragment of an isolated nucleic acid encoding an AAV capsid sequence may be useful for constructing a nucleic acid encoding a desired capsid sequence. Fragments may be of any appropriate length. In some embodiments, a fragment (portion) of an isolated nucleic acid encoding an AAV capsid sequence may be useful for constructing a nucleic acid encoding a desired capsid sequence. Fragments may be of any appropriate length (e.g., at least 6, at least 9, at least 18, at least 36, at least 72, at least 144, at least 288, at least 576, at least 1152 or more nucleotides in length). For example, a fragment of nucleic acid sequence encoding a polypeptide of a first AAV capsid protein may be used to construct, or may be incorporated within, a nucleic acid sequence encoding a second AAV capsid sequence to alter the properties of the AAV capsid. In some embodiments, AAV capsid proteins that comprise capsid sequence fragments from multiple AAV serotypes are referred to as chimeric AAV capsids. The fragment may be a fragment that does not encode a peptide that is identical to a sequence of any one of SEQ ID NOs: 869, 870, or 871. For example, a fragment of nucleic acid sequence encoding a variant amino acid (compared with a known AAV serotype) may be used to construct, or may be incorporated within, a nucleic acid sequence encoding an AAV capsid sequence to alter the properties of the AAV capsid. In some embodiments, a nucleic acid sequence encoding an AAV variant may comprise about 1 to about 100 amino acid variants compared with a known AAV serotype (e.g., AAV serotype 2, AAV2/3 (e.g., AAV2/3 hybrid) or AAV8). In some embodiments, a nucleic acid sequence encoding an AAV variant may comprise about 5 to about 50 amino acid variants compared with a known AAV serotype (e.g., AAV serotype 2, AAV2/3 (e.g., AAV2/3 hybrid) or AAV8). In some embodiments, a nucleic acid sequence encoding an AAV variant may comprise about 10 to about 30 amino acid variants compared with a known AAV serotype (e.g., AAV serotype 2, AAV2/3 (e.g., AAV2/3 hybrid) or AAV8). In some embodiments, a nucleic acid sequence encoding an AAV variant may comprise 1, or 2, or 3, or 4, 5, or 6, or 7, or 8, or 9, or 10, or 11, or 12, or 13, or 14, or 15, or 16, or 17, or 18, or 19, or 20 amino acid variants compared with a known AAV serotype (e.g., AAV serotype 2, AAV2/3 (e.g., AAV2/3 hybrid) or AAV8). For example, a nucleic sequence encoding an AAV variant (e.g., SEQ ID NO: 861 may comprise 3 amino acid variants compared with a known AAV serotype (e.g., AAV8). A recombinant cap sequence may be constructed having one or more of the 3 amino acid variants by incorporating fragments of a nucleic acid sequence comprising a region encoding a variant amino acid into the sequence of a nucleic acid encoding the known AAV serotype. The fragments may be incorporated by any appropriate method, including using site directed mutagenesis. Thus, new AAV variants may be created having new properties.

[0098] In some aspects, the disclosure provides isolated nucleic acids encoding AAV assembly-activating proteins (AAPs), or variants thereof. As used herein, an “assembly activating protein” or “AAP” is a protein chaperone that functions to target newly synthesized capsid proteins (e.g., VP proteins, such as AAV VP1, VP2, and VP3) to the nucleolus of a cell thereby promoting encapsidation of viral genomes. Generally, an AAP is encoded in the cap gene of an adeno-associated virus. For example, AAP-2 is encoded in the cap gene of AAV2. Other examples of AAPs include but are not limited to AAP-1, AAP-3, AAP-4, AAP-5, AAP-8, AAP-9, AAP-11 and AAP-12, for example as described by Sonntag et al. J. Virol. 2011 December 85(23): 12686-12697. In some embodiments, an AAP is translated from a different open reading frame (ORF) of the cap gene than a capsid protein (e.g., VP1, VP2, VP3). For example, in some embodiments, a capsid protein (e.g., AAV2 VP1, VP2, VP3) is translated from ORF 1 of a cap gene and an AAP (e.g., AAP-2) is translated from ORF 2 of the cap gene. In some embodiments, an isolated nucleic acid encoding an AAP comprises or consists of a sequence selected from SEQ ID NO: 410-434 and 876-1718.

[0099] In some aspects, the disclosure relates to an AAVv66 capsid protein (e.g., an isolated nucleic acid encoding an AAVv66 capsid protein, a recombinant adeno-associated virus (rAAV) comprising an AAVv66 capsid protein, etc.), or a capsid protein having substantial homology to an AAVv66 capsid protein. In some embodiments, a capsid protein having substantial homology to an AAVv66 capsid protein is at least 50%, 60%, 70%, 80%, 90%, 95%, or 99% identical to the amino acid sequence set forth in SEQ ID NO: 66. In some embodiments, a capsid protein having substantial homology to an AAVv66 capsid protein comprises 1, 2, 3, 4, 5, 6, 7, 8, 9, 10, 11, 12, 13, 14, 15, 16, 17, 18, 19, 20, 21, 22, 23, 24, 25, 26, 27, 28, 29, 30, 31, 32, 33, 34, 35, 36, 37, 38, 39, 40, 41, 42, 43, 44, 45, 46, 47, 48, 49, or 50 amino acid substitutions, insertions, or deletions, relative to the amino acid sequence set forth in SEQ ID NO: 66. In some embodiments, a capsid protein having substantial homology to an AAVv66 capsid protein comprises more than 50 amino acid substitutions, insertions, or deletions, relative to the amino acid sequence set forth in SEQ ID NO: 66.

[0100] The disclosure relates, in some aspects, to the surprising discovery that rAAVs comprising AAVv66 capsid proteins are able to be produced in higher quantities in mammalian cell lines (e.g., HEK-293 cells) relative to rAAVs having certain other AAV capsid proteins (e.g., AAV2 capsid proteins, AAV3B capsid proteins, etc.). In some embodiments, transduced mammalian (e.g., HEK) producer cells yield between about 1.5-fold and about 5-fold (e.g., 1.5, 2, 3, 4, 5-fold) more rAAVs having AAVv66 capsid than mammalian (e.g., HEK) producer cells transduced with AAV2 capsid proteins. In some embodiments, transduced mammalian (e.g., HEK) producer cells yield between about 5% and about 50% (e.g., 5%, 10%, 15%, 20%, 25%, 30%, 35%, 40%, 45%, 50%, etc.) more rAAVs having AAVv66 capsid than mammalian (e.g., HEK) producer cells transduced with AAV3B capsid proteins.

[0101] Aspects of the disclosure relate to the unexpectedly improved central nervous system (CNS) cell transduction efficiency of AAVv66 capsid protein (e.g., rAAVs comprising AAVv66 capsid proteins) relative to rAAVs having AAV2 capsid proteins. In some embodiments, AAVv66-containing rAAVs transduce CNS cells at least 5%, 10%, 15%, 20%, 25%, 30%, 40%, 50%, 100%, 200%, 500%, 1000%, or more efficiently than AAV2-containing rAAVs. In some embodiments, the CNS cells are comprise neurons, oligodendrocytes, astrocytes, or microglial cells.

[0102] Aspects of the disclosure relate to certain AAV capsid proteins (e.g., AAVv66 capsid proteins) that are serologically distinct from other AAV capsid proteins (e.g., AAV1, AAV2, AAV3B, AAV8, AAV9, AAVrh.8, AAVrh.10, etc.). Without wishing to be bound by any particular theory, rAAVs comprising AAVv66 capsid proteins are not subject to the neutralizing antibody response in a subject that is sero-positive for antibodies against certain other AAV capsids. Accordingly, in some embodiments, rAAVs comprising AAVv66 capsid protein may be useful as a second-line therapy for delivery of transgenes to subjects that have previously been administered AAV therapies, or that are sero-positive for certain AAV capsid neutralizing antibodies.

[0103] In some aspects, the disclosure relates to rAAV capsid proteins (e.g., AAVv66 capsid protein) that exhibit increased thermostability relative to certain wild-type AAV capsid proteins (e.g., AAV2 capsid protein). In some embodiments, an AAVv66 capsid protein is more thermostable than an AAV2 capsid protein at a pH ranging from about pH 4 to about pH 7. In some embodiments, thermostability is determined by calculating the melting temperature of a capsid protein. In some embodiments, an AAVv66 capsid protein is characterized by a melting temperature that is between about 5° C. and about 10° C. above the melting temperature of an AAV2 capsid protein, at a given pH (e.g., between pH 4 and pH 7).

### Recombinant AAVs

[0104] In some aspects, the disclosure provides isolated AAVs. As used herein with respect to AAVs, the term “isolated” refers to an AAV that has been artificially obtained or produced. Isolated AAVs may be produced using recombinant methods. Such AAVs are referred to herein as “recombinant AAVs”. Recombinant AAVs (rAAVs) preferably have tissue-specific targeting capabilities, such that a transgene of the rAAV will be delivered specifically to one or more predetermined tissue(s). The AAV capsid is an important element in determining these tissue-specific targeting capabilities. Thus, an rAAV having a capsid appropriate for the tissue being targeted can be selected. In some embodiments, the rAAV comprises a capsid protein having an amino acid sequence as set forth in any one of SEQ ID NOs 1-409, 435-852, 859-874, or 1726-1988, or a protein having substantial homology thereto.

[0105] Methods for obtaining recombinant AAVs having a desired capsid protein are well known in the art. (See, for example, US 2003/0138772), the contents of which are incorporated herein by reference in their entirety). Typically the methods involve culturing a host cell which contains a nucleic acid sequence encoding an AAV capsid protein (e.g., a nucleic acid encoding a polypeptide having a sequence as set forth in any one of SEQ ID NOs 1-409, 435-868, or 1726-1988) or fragment thereof; a functional rep gene; a recombinant AAV vector composed of, AAV inverted terminal repeats (ITRs) and a transgene; and sufficient helper functions to permit packaging of the recombinant AAV vector into the AAV capsid proteins. In some embodiments, capsid proteins are structural proteins encoded by a cap gene of an AAV. In some embodiments, AAVs comprise three capsid proteins, virion proteins 1 to 3 (named VP1, VP2 and VP3), all of which may be expressed from a single cap gene. Accordingly, in some embodiments, the VP1, VP2 and VP3 proteins share a common core sequence. In some embodiments, the molecular weights of VP1, VP2 and VP3 are respectively about 87 kDa, about 72 kDa and about 62 kDa. In some embodiments, upon translation, capsid proteins form a spherical 60-mer protein shell around the viral genome. In some embodiments, the protein shell is primarily comprised of a VP3 capsid protein. In some embodiments, the functions of the capsid proteins are to protect the viral genome, deliver the genome and interact with the host. In some aspects, capsid proteins deliver the viral genome to a host in a tissue specific manner. In some embodiments, VP1 and/or VP2 capsid proteins may contribute to the tissue tropism of the packaged AAV. In some embodiments, the tissue tropism of the packaged AAV is determined by the VP3 capsid protein. In some embodiments, the tissue tropism of an AAV is enhanced or changed by mutations occurring in the capsid proteins.

[0106] In some aspects, the instant disclosure describes variants of wild-type AAV serotypes In some embodiments, the variants have altered tissue tropism. In some embodiments, the AAV variants described herein comprise amino acid variations (e.g., substitution, deletion, insertion) within the cap gene. As discussed above, all three capsid proteins are transcribed from a single cap gene. Accordingly, in some embodiments, an amino acid variation within a cap gene is present in all three capsid proteins encoded by said cap gene. Alternatively, in some embodiments, an amino acid variation may not be present in all three capsid proteins. In some embodiments, an amino acid variation occurs only in the VP1 capsid protein. In some embodiments, an amino acid variation occurs only in the VP2 capsid protein. In some embodiments, an amino acid variation occurs only within the VP3 capsid protein. In some embodiments, an AAV variant comprises more than one variation in a cap gene. In some embodiments, the more than one variation occur within the same capsid protein (e.g., within VP3). In some embodiments, the more than one variation occur within different capsid proteins (e.g., at least one variation in VP2 and at least one variation in VP3).

[0107] In some embodiments, the AAV variants described herein are variants of AAV2, AAV2/3 (e.g., AAV2/3 hybrid) or AAV8. AAV2 is known to efficiently transduce human central nervous system (CNS) tissue, kidney tissue, ocular tissue (e.g., photoreceptor cells and retinal pigment epithelium (RPE)), and other tissues. Accordingly, in some embodiments, the AAV3 variants described herein may be useful for delivering gene therapy to CNS tissue, kidney tissue, or ocular tissue. It is also known that AAV3 efficiently transduces cancerous human hepatocytes. Accordingly, in some embodiments, the AAV3 variants described herein may be useful for delivering gene therapy to cancerous and normal human hepatocytes. AAV8 is known to target tissue of the liver tissue, respiratory tissue, and the eye. Accordingly, in some embodiments, the AAV8 variants described herein may be useful for delivering gene therapy to the liver tissue, respiratory tissue or the eye.

[0108] It should be appreciated that the AAV2, AAV2/3 (e.g., AAV2/3 hybrid) and AAV8 variants described herein may comprise one or more variations within the cap gene compared with a corresponding wild-type AAV. Therefore, in some embodiments, the AAV2, AAV2/3 (e.g., AAV2/3 hybrid) and AAV8 variants described herein may have a tissue tropism useful for delivering gene therapy to additional tissue types that are not targeted by wild-type AAV2, AAV2/3 (e.g., AAV2/3 hybrid) or AAV8. For example, in some embodiments, AAV8 variants described herein (e.g., B61; SEQ ID NO: 865) may be useful for delivering gene therapy to the central nervous system (CNS). In some embodiments, AV2, AAV2/3 (e.g., AAV2/3 hybrid), or AAV8 variants described herein may be useful for targeting cells of the kidney or cells of the liver. In some embodiments, AAV2, AAV2/3 (e.g., AAV2/3 hybrid), or AAV8 variants described herein may be useful for targeting gene therapy to the liver, spleen, heart or brain.

[0109] In some aspects, AAV variants described herein may be useful for the treatment of CNS-related disorders. As used herein, a “CNS-related disorder” is a disease or condition of the central nervous system. A CNS-related disorder may affect the spinal cord (e.g., a myelopathy), brain (e.g., a encephalopathy) or tissues surrounding the brain and spinal cord. A CNS-related disorder may be of a genetic origin, either inherited or acquired through a somatic mutation. A CNS-related disorder may be a psychological condition or disorder, e.g., Attention Deficient Hyperactivity Disorder, Autism Spectrum Disorder, Mood Disorder, Schizophrenia, Depression, Rett Syndrome, etc. A CNS-related disorder may be an autoimmune disorder. A CNS-related disorder may also be a cancer of the CNS, e.g., brain cancer. A CNS-related disorder that is a cancer may be a primary cancer of the CNS, e.g., an astrocytoma, glioblastomas, etc., or may be a cancer that has metastasized to CNS tissue, e.g., a lung cancer that has metastasized to the brain. Further non-limiting examples of CNS-related disorders, include Parkinson's Disease, Lysosomal Storage Disease, Ischemia, Neuropathic Pain, Amyotrophic lateral sclerosis (ALS), Multiple Sclerosis (MS), and Canavan disease (CD).

[0110] In some embodiments, AAV variants described herein may be useful for delivering gene therapy to cardiac cells (e.g., heart tissue). Accordingly, in some embodiments, AAV variants described herein may be useful for the treatment of cardiovascular disorders. As used herein, a “cardiovascular disorder” is a disease or condition of the cardiovascular system. A cardiovascular disease may affect the heart, circulatory system, arteries, veins, blood vessels and/or capillaries. A cardiovascular disorder may be of a genetic origin, either inherited or acquired through a somatic mutation. Non-limiting examples of cardiovascular disorders include rheumatic heart disease, valvular heart disease, hypertensive heart disease, aneurysm, atherosclerosis, hypertension (e.g., high blood pressure), peripheral arterial disease (PAD), ischemic heart disease, angina, coronary heart disease, coronary artery disease, myocardial infarction, cerebral vascular disease, transient ischemic attack, inflammatory heart disease, cardiomyopathy, pericardial disease, congenital heart disease, heart failure, stroke, and myocarditis due to Chagas disease.

[0111] In some embodiments, AAV variants described herein may target the lung and/or tissue of the pulmonary system (e.g., respiratory system). Accordingly, in some embodiments, AAV variants described herein may be useful for treatment of pulmonary disease. As used herein a “pulmonary disease” is a disease or condition of the pulmonary system. A pulmonary disease may affect the lungs or muscles involved in breathing. A pulmonary disease may be of a genetic origin, either inherited or acquired through a somatic mutation. A pulmonary disease may be a cancer of the lung, including but not limited to, non-small cell lung cancer, small cell lung cancer, and lung carcinoid tumor. Further non-limiting examples of pulmonary diseases include acute bronchitis, acute respiratory distress syndrome (ARDS), asbestosis, asthma, bronchiectasis, bronchiolitis, bronchiolitis obliterans organizing pneumonia (BOOP), bronchopulmonary dysplasia, byssinosis, chronic bronchitis, coccidioidomycosis (Cocci), chronic obstructive pulmonary disorder (COPD), cryptogenic organizing pneumonia (COP), cystic fibrosis, emphysema, Hantavirus Pulmonary Syndrome, histoplasmosis, Human Metapneumovirus, hypersensitivity pneumonitis, influenza, lymphangiomatosis, mesothelioma, Middle Eastern Respiratory Syndrome, non-tuberculosis Mycobacterium, Pertussis, Pneumoconiosis (Black Lung Disease), pneumonia, primary ciliary dyskinesia, primary pulmonary hypertension, pulmonary arterial hypertension, pulmonary fibrosis, pulmonary vascular disease, Respiratory Syncytial Virus (RSV), sarcoidosis, Severe Acute Respiratory Syndrome (SARS), silicosis, sleep apnea, Sudden Infant Death Syndrome (SIDS), and tuberculosis.

[0112] In some embodiments, AAV variants described herein may target liver tissue. Accordingly, in some embodiments, AAV variants described herein may be useful for treatment of hepatic disease. As used herein a “hepatic disease” is a disease or condition of the liver. A hepatic disease may be of a genetic origin, either inherited or acquired through a somatic mutation. A hepatic disease may be a cancer of the liver, including but not limited to hepatocellular carcinoma (HCC), fibrolamellar carcinoma, cholangiocarcinoma, angiosarcoma and hepatoblastoma. Further non-limiting examples of pulmonary diseases include Alagille Syndrome, Alpha 1 Anti-Trypsin Deficiency, autoimmune hepatitis, biliary atresia, cirrhosis, cystic disease of the liver, fatty liver disease, galactosemia, gallstones, Gilbert's Syndrome, hemochromatosis, liver disease in pregnancy, neonatal hepatitis, primary biliary cirrhosis, primary sclerosing cholangitis, porphyria, Reye's Syndrome, sarcoidosis, toxic hepatitis, Type 1 Glycogen Storage Disease, tyrosinemia, viral hepatitis A, B, C, Wilson Disease, and schistosomiasis.

[0113] In some embodiments, AAV variants described herein may target kidney tissue. Accordingly, in some embodiments, AAV variants described herein may be useful for treatment of kidney disease. As used herein a “kidney disease” is a disease or condition of the liver. A kidney disease may be of a genetic origin, either inherited or acquired through a somatic mutation. A kidney disease may be a cancer of the kidney, including but not limited to renal cell cancer, clear cell cancer, papillary cancer type 1, papillary cancer type 2, chromophobe cancer, oncocytic cell cancer, collecting duct cancer, transitional cell cancer of the renal pelvis and Wilm's tumor. Further non-limiting examples of kidney disease include Abderhalden-Kaufmann-Lignac syndrome (Nephropathic Cystinosis), Acute Kidney Failure/Acute Kidney Injury, Acute Lobar Nephronia, Acute Phosphate Nephropathy, Acute Tubular Necrosis, Adenine Phosphoribosyltransferase Deficiency, Adenovirus Nephritis, Alport Syndrome, Amyloidosis, Angiomyolipoma, Analgesic Nephropathy, Angiotensin Antibodies and Focal Segmental Glomerulosclerosis, Antiphospholipid Syndrome, Anti-TNF-α Therapy-related Glomerulonephritis, APOL1 Mutations, Apparent Mneralocorticoid Excess Syndrome, Aristolochic Acid Nephropathy, Balkan Endemic Nephropathy, Bartter Syndrome, Beeturia, β-Thalassemia Renal Disease, Bile Cast Nephropathy, BK Polyoma, C1q Nephropathy, Cardiorenal syndrome, CFHR5 nephropathy, Cholesterol Emboli, Churg-Strauss syndrome, Chyluria, Collapsing Glomerulopathy, Collapsing Glomerulopathy Related to CMV, Congenital Nephrotic Syndrome, Conorenal syndrome (Mainzer-Saldino Syndrome or Saldino-Mainzer Disease), Contrast Nephropathy, Copper Sulfate Intoxication, Cortical Necrosis, Cryoglobuinemia, Crystal-Induced Acute Kidney injury, Cystic Kidney Disease, Acquired, Cystinuria, Dense Deposit Disease (MPGN Type 2), Dent Disease (X-linked Recessive Nephrolithiasis), Dialysis Disequilibrium Syndrome, Diabetic Kidney Disease, Diabetes Insipidus, EAST syndrome, Ectopic Ureter, Edema, Erdheim-Chester Disease, Fabry's Disease, Familial Hypocalciuric Hypercalcemia, Fanconi Syndrome, Fraser syndrome, Fibronectin Glomerulopathy, Fibrillary Glomerulonephritis and Immunotactoid Glomerulopathy, Fraley syndrome, Focal Segmental Glomerulosclerosis, Focal Sclerosis, Focal Glomerulosclerosis, Galloway Mowat syndrome, Gitelman Syndrome, Glomerular Diseases, Glomerular Tubular Reflux, Glycosuria, Goodpasture Syndrome, Hemolytic Uremic Syndrome (HUS), Atypical Hemolytic Uremic Syndrome (aHUS), Hemophagocytic Syndrome, Hemorrhagic Cystitis, Hemosiderosis related to Paroxysmal Nocturnal Hemoglobinuria and Hemolytic Anemia, Hepatic Veno-Occlusive Disease, Sinusoidal Obstruction Syndrome, Hepatitis C-Associated Renal Disease, Hepatorenal Syndrome, HIV-Associated Nephropathy (HIVAN), Horseshoe Kidney (Renal Fusion), Hunner's Ulcer, Hyperaldosteronism, Hypercalcemia, Hyperkalemia, Hypermagnesemia, Hypernatremia, Hyperoxaluria, Hyperphosphatemia, Hypocalcemia, Hypokalemia, Hypokalemia-induced renal dysfunction, Hypomagnesemia, Hyponatremia, Hypophosphatemia, IgA Nephropathy, IgG4 Nephropathy, Interstitial Cystitis, Painful Bladder Syndrome, Interstitial Nephritis, Ivemark's syndrome, Kidney Stones, Nephrolithiasis, Leptospirosis Renal Disease, Light Chain Deposition Disease, Monoclonal Immunoglobulin Deposition Disease, Liddle Syndrome, Lightwood-Albright Syndrome, Lipoprotein Glomerulopathy, Lithium Nephrotoxicity, LMX1B Mutations Cause Hereditary FSGS, Loin Pain Hematuria, Lupus, Systemic Lupus Erythematosis, Lupus Kidney Disease, Lupus Nephritis, Lyme Disease-Associated Glomerulonephritis, Malarial Nephropathy, Malignant Hypertension, Malakoplakia, Meatal Stenosis, Medullary Cystic Kidney Disease, Medullary Sponge Kidney, Megaureter, Melamine Toxicity and the Kidney, Membranoproliferative Glomerulonephritis, Membranous Nephropathy, MesoAmerican Nephropathy, Metabolic Acidosis, Metabolic Alkalosis, Microscopic Polyangiitis, Milk-alkalai syndrome, Minimal Change Disease, Multicystic dysplastic kidney, Multiple Myeloma, Myeloproliferative Neoplasms and Glomerulopathy, Nail-patella Syndrome, Nephrocalcinosis, Nephrogenic Systemic Fibrosis, Nephroptosis (Floating Kidney, Renal Ptosis), Nephrotic Syndrome, Neurogenic Bladder, Nodular Glomerulosclerosis, Non-Gonococcal, Nutcracker syndrome, Orofaciodigital Syndrome, Orthostatic Hypotension, Orthostatic Proteinuria, Osmotic Diuresis, Page Kidney, Papillary Necrosis, Papillorenal Syndrome (Renal-Coloboma Syndrome, Isolated Renal Hypoplasia), The Peritoneal-Renal Syndrome, Posterior Urethral Valve, Post-infectious Glomerulonephritis, Post-streptococcal Glomerulonephritis, Polyarteritis Nodosa, Polycystic Kidney Disease, Posterior Urethral Valves, Preeclampsia, Proliferative Glomerulonephritis with Monoclonal IgG Deposits (Nasr Disease), Proteinuria (Protein in Urine), Pseudohyperaldosteronism, Pseudohypoparathyroidism, Pulmonary-Renal Syndrome, Pyelonephritis (Kidney Infection), Pyonephrosis, Radiation Nephropathy, Refeeding syndrome, Reflux Nephropathy, Rapidly Progressive Glomerulonephritis, Renal Abscess, Peripnephric Abscess, Renal Agenesis, Renal Artery Aneurysm, Renal Artery Stenosis, Renal Cell Cancer, Renal Cyst, Renal Hypouricemia with Exercise-induced Acute Renal Failure, Renal Infarction, Renal Osteodystrophy, Renal Tubular Acidosis, Reset Osmostat, Retrocaval Ureter, Retroperitoneal Fibrosis, Rhabdomyolysis, Rhabdomyolysis related to Bariatric Sugery, Rheumatoid Arthritis-Associated Renal Disease, Sarcoidosis Renal Disease, Salt Wasting, Renal and Cerebral, Schimke immuno-osseous dysplasia, Scleroderma Renal Crisis, Serpentine Fibula-Polycystic Kidney Syndrome, Exner Syndrome, Sickle Cell Nephropathy, Silica Exposure and Chronic Kidney Disease, Kidney Disease Following Hematopoietic Cell Transplantation, Kidney Disease Related to Stem Cell Transplantation, Thin Basement Membrane Disease, Benign Familial Hematuria, Trigonitis, Tuberous Sclerosis, Tubular Dysgenesis, Tumor Lysis Syndrome, Uremia, Uremic Optic Neuropathy, Ureterocele, Urethral Caruncle, Urethral Stricture, Urinary Incontinence, Urinary Tract Infection, Urinary Tract Obstruction, Vesicointestinal Fistula, Vesicoureteral Reflux, Von Hippel-Lindau Disease, Warfarin-Related Nephropathy, Wegener's Granulomatosis, Granulomatosis with Polyangiitis, and Wunderlich syndrome.

[0114] In some embodiments, AAV variants described herein may be useful for delivering gene therapy to ocular tissue (e.g., tissue or cells of the eye). Accordingly, in some embodiments, AAV variants described herein may be useful for the treatment of ocular disorders. As used herein, an “ocular disorder” is a disease or condition of the eye. An ocular disease may affect the eye, sclera, cornea, anterior chamber, posterior chamber, iris, pupil, lens, vitreous humor, retina, or optic nerve. An ocular disorder may be of a genetic origin, either inherited or acquired through a somatic mutation. Non-limiting examples of ocular diseases and disorders include but are not limited to: age-related macular degeneration, retinopathy, diabetic retinopathy, macular edema, glaucoma, retinitis pigmentosa and eye cancer.

[0115] In some embodiments, AAV variants described herein may be useful for delivering gene therapy to gastrointestinal tissue (e.g., tissue of the gastrointestinal tract). Accordingly, in some embodiments, AAV variants described herein may be useful for the treatment of gastrointestinal tract disorders. As used herein, a “gastrointestinal tract disorder” is a disease or condition of the gastrointestinal tract. A gastrointestinal disease may affect the mucosa (e.g., epithelium, lamina propria, muscularis mucosae, etc.), submucosa (e.g., submucous plexus, enteric nervous plexis, etc.), muscular layer of the gastrointestinal tract, the serosa and/or adventitia, oral cavity, esophagus, pylorus, stomach duodenum, small intestine, caecum, appendix, colon, anal canal, or rectum. A gastrointestinal tract disorder may be of a genetic origin, either inherited or acquired through a somatic mutation. Non-limiting examples of gastrointestinal tract diseases and disorders include but are not limited to: inflammatory bowel disease (IBD), Crohn's disease, ulcerative colitis, irritable bowel syndrome, Celiac disease, gastroesophageal reflux disease (GERD), achakasua, diverticulitus, diarrhea, and certain cancers (e.g., bowel cancer, stomach cancer, colon cancer, rectal cancer, etc.).

[0116] In some embodiments, AAV variants described herein may be useful for delivering gene therapy to breast tissue (e.g., tissue of the breast). Accordingly, in some embodiments, AAV variants described herein may be useful for the treatment of breast disorders. As used herein, a “breast disorder” is a disease or condition of the breast. A breast disease may affect the fibrous tissue, fatty tissue, lobules, or ducts of the breast. A breast disorder may be of a genetic origin, either inherited or acquired through a somatic mutation. Non-limiting examples of breast diseases and disorders include but are not limited to: mastitis, breast calcification, fat necrosis, fibroadenoma, fibrosis and simple cysts, galactorrhea, hyperplasia and breast cancer.

[0117] In some embodiments, AAV variants described herein may be useful for delivering gene therapy to pancreatic tissue (e.g., tissue of the pancreas). Accordingly, in some embodiments, AAV variants described herein may be useful for the treatment of pancreatic disorders. As used herein, a “pancreatic disorder” is a disease or condition of the pancreas. A pancreatic disease may affect the head of the pancreas, neck of the pancreas, body of the pancreas, tail of the pancreas, pancreatic islets (e.g., islets of Langerhans), acini, or columnar epithelium. A pancreatic disorder may be of a genetic origin, either inherited or acquired through a somatic mutation. Non-limiting examples of pancreatic diseases and disorders include but are not limited to: diabetes (e.g., diabetes mellitus type 1 and diabetes mellitus type 2), pancreatitis (e.g., acute pancreatitis, chronic pancreatitis), and pancreatic cancer.

[0118] In some embodiments, AAV variants described herein may be useful for delivering gene therapy to urinary tract tissue (e.g., tissue of the urinary tract, such as bladder tissue). Accordingly, in some embodiments, AAV variants described herein may be useful for the treatment of urinary tract disorders. As used herein, a “urinary tract disorder” is a disease or condition of the urinary tract. A urinary tract disease may affect the bladder, ureters, urethera, or prostate. A urinary tract disorder may be of a genetic origin, either inherited or acquired through a somatic mutation. Non-limiting examples of urinary tract diseases and disorders include but are not limited to: urinary tract infections, kidney stones, bladder control problems (e.g., urinary retention, urinary incontinence, etc.), cystitis, and bladder cancer.

[0119] In some embodiments, AAV variants described herein may be useful for delivering gene therapy to uterine tissue (e.g., tissue of the uterus). Accordingly, in some embodiments, AAV variants described herein may be useful for the treatment of uterine disorders. As used herein, a “uterine disorder” is a disease or condition of the uterus. A uterine disease may affect the cervix, cervical canal, body of the uterus (fundus), endometrium, myometrium, or perimetrium. A uterine disorder may be of a genetic origin, either inherited or acquired through a somatic mutation. Non-limiting examples of uterine diseases and disorders include but are not limited to: adenomyosis, endometriosis, endometrial hyperplasia, Asherman's syndrome, and endometrial cancer.

[0120] The components to be cultured in the host cell to package a rAAV vector in an AAV capsid may be provided to the host cell in trans. Alternatively, any one or more of the required components (e.g., recombinant AAV vector, rep sequences, cap sequences, and/or helper functions) may be provided by a stable host cell which has been engineered to contain one or more of the required components using methods known to those of skill in the art. Most suitably, such a stable host cell will contain the required component(s) under the control of an inducible promoter. However, the required component(s) may be under the control of a constitutive promoter. Examples of suitable inducible and constitutive promoters are provided herein, in the discussion of regulatory elements suitable for use with the transgene. In still another alternative, a selected stable host cell may contain selected component(s) under the control of a constitutive promoter and other selected component(s) under the control of one or more inducible promoters. For example, a stable host cell may be generated which is derived from 293 cells (which contain E1 helper functions under the control of a constitutive promoter), but which contain the rep and/or cap proteins under the control of inducible promoters. Still other stable host cells may be generated by one of skill in the art.

[0121] The recombinant AAV vector, rep sequences, cap sequences, and helper functions required for producing the rAAV of the disclosure may be delivered to the packaging host cell using any appropriate genetic element (vector). In some embodiments, a single nucleic acid encoding all three capsid proteins (e.g., VP1, VP2 and VP3) is delivered into the packaging host cell in a single vector. In some embodiments, nucleic acids encoding the capsid proteins are delivered into the packaging host cell by two vectors; a first vector comprising a first nucleic acid encoding two capsid proteins (e.g., VP1 and VP2) and a second vector comprising a second nucleic acid encoding a single capsid protein (e.g., VP3). In some embodiments, three vectors, each comprising a nucleic acid encoding a different capsid protein, are delivered to the packaging host cell. The selected genetic element may be delivered by any suitable method, including those described herein. The methods used to construct any embodiment of this disclosure are known to those with skill in nucleic acid manipulation and include genetic engineering, recombinant engineering, and synthetic techniques. See, e.g., Sambrook et al, Molecular Cloning: A Laboratory Manual, Cold Spring Harbor Press, Cold Spring Harbor, N.Y. Similarly, methods of generating rAAV virions are well known and the selection of a suitable method is not a limitation on the present disclosure. See, e.g., K. Fisher et al, J. Virol., 70:520-532 (1993) and U.S. Pat. No. 5,478,745.

[0122] In some embodiments, recombinant AAVs may be produced using the triple transfection method (described in detail in U.S. Pat. No. 6,001,650). Typically, the recombinant AAVs are produced by transfecting a host cell with a recombinant AAV vector (comprising a transgene) to be packaged into AAV particles, an AAV helper function vector, and an accessory function vector. An AAV helper function vector encodes the “AAV helper function” sequences (e.g., rep and cap), which function in trans for productive AAV replication and encapsidation. Preferably, the AAV helper function vector supports efficient AAV vector production without generating any detectable wild-type AAV virions (e.g., AAV virions containing functional rep and cap genes). Non-limiting examples of vectors suitable for use with the present disclosure include pHLP19, described in U.S. Pat. No. 6,001,650 and pRep6cap6 vector, described in U.S. Pat. No. 6,156,303, the entirety of both incorporated by reference herein. The accessory function vector encodes nucleotide sequences for non-AAV derived viral and/or cellular functions upon which AAV is dependent for replication (e.g., “accessory functions”). The accessory functions include those functions required for AAV replication, including, without limitation, those moieties involved in activation of AAV gene transcription, stage specific AAV mRNA splicing, AAV DNA replication, synthesis of cap expression products, and AAV capsid assembly. Viral-based accessory functions can be derived from any of the known helper viruses such as adenovirus, herpesvirus (other than herpes simplex virus type-1), and vaccinia virus.

[0123] In some aspects, the disclosure provides transfected host cells. The term “transfection” is used to refer to the uptake of foreign DNA by a cell, and a cell has been “transfected” when exogenous DNA has been introduced inside the cell (e.g., across the cell membrane). A number of transfection techniques are generally known in the art. See, e.g., Graham et al. (1973) Virology, 52:456, Sambrook et al. (1989) Molecular Cloning, a laboratory manual, Cold Spring Harbor Laboratories, New York, Davis et al. (1986) Basic Methods in Molecular Biology, Elsevier, and Chu et al. (1981) Gene 13:197. Such techniques can be used to introduce one or more exogenous nucleic acids, such as a nucleotide integration vector and other nucleic acid molecules, into suitable host cells.

[0124] A “host cell” refers to any cell that harbors, or is capable of harboring, a substance of interest. Often a host cell is a mammalian cell. A host cell may be used as a recipient of an AAV helper construct, an AAV minigene plasmid, an accessory function vector, or other transfer DNA associated with the production of recombinant AAVs. The term includes the progeny of the original cell that has been transfected. Thus, a “host cell” as used herein may refer to a cell that has been transfected with an exogenous DNA sequence. It is understood that the progeny of a single parental cell may not necessarily be completely identical in morphology or in genomic or total DNA complement as the original parent, due to natural, accidental, or deliberate mutation.

[0125] As used herein, the term “cell line” refers to a population of cells capable of continuous or prolonged growth and division in vitro. Often, cell lines are clonal populations derived from a single progenitor cell. It is further known in the art that spontaneous or induced changes can occur in karyotype during storage or transfer of such clonal populations. Therefore, cells derived from the cell line referred to may not be precisely identical to the ancestral cells or cultures, and the cell line referred to includes such variants.

[0126] As used herein, the terms “recombinant cell” refers to a cell into which an exogenous DNA segment, such as DNA segment that leads to the transcription of a biologically-active polypeptide or production of a biologically active nucleic acid such as an RNA, has been introduced.

[0127] Cells may also be transfected with a vector (e.g., helper vector) that provides helper functions to the AAV. The vector providing helper functions may provide adenovirus functions, including, e.g., E1a, E1b, E2a, and E4ORF6. The sequences of adenovirus gene providing these functions may be obtained from any known adenovirus serotype, such as serotypes 2, 3, 4, 7, 12 and 40, and further including any of the presently identified human types known in the art. Thus, in some embodiments, the methods involve transfecting the cell with a vector expressing one or more genes necessary for AAV replication, AAV gene transcription, and/or AAV packaging.

[0128] As used herein, the term “vector” includes any genetic element, such as a plasmid, phage, transposon, cosmid, chromosome, artificial chromosome, virus, virion, etc., that is capable of replication when associated with the proper control elements and which can transfer gene sequences between cells. Thus, the term includes cloning and expression vehicles, as well as viral vectors. In some embodiments, useful vectors are contemplated to be those vectors in which the nucleic acid segment (e.g., nucleic acid sequence) to be transcribed is positioned under the transcriptional control of a promoter. A “promoter” refers to a DNA sequence recognized by the synthetic machinery of the cell, or introduced synthetic machinery, that is required to initiate the specific transcription of a gene. The phrases “operatively positioned,” “under control” or “under transcriptional control” means that the promoter is in the correct location and orientation in relation to the nucleic acid to control RNA polymerase initiation and expression of the gene. The term “expression vector or construct” means any type of genetic construct containing a nucleic acid in which part or all of the nucleic acid encoding sequence is capable of being transcribed. In some embodiments, expression includes transcription of the nucleic acid, for example, to generate a biologically-active polypeptide product or inhibitory RNA (e.g., shRNA, miRNA, miRNA inhibitor) from a transcribed gene.

[0129] In some cases, an isolated capsid gene can be used to construct and package recombinant AAVs, using methods well known in the art, to determine functional characteristics associated with the capsid protein encoded by the gene. For example, isolated capsid genes can be used to construct and package a recombinant AAV (rAAV) comprising a reporter gene (e.g., B-Galactosidase, GFP, Luciferase, etc.). The rAAV can then be delivered to an animal (e.g., mouse) and the tissue targeting properties of the novel isolated capsid gene can be determined by examining the expression of the reporter gene in various tissues (e.g., heart, liver, kidneys) of the animal. Other methods for characterizing the novel isolated capsid genes are disclosed herein and still others are well known in the art.

[0130] The foregoing methods for packaging recombinant vectors in desired AAV capsids to produce the rAAVs of the disclosure are not meant to be limiting and other suitable methods will be apparent to the skilled artisan.

Recombinant AAV vectors.

[0131] “Recombinant AAV (rAAV) vectors” of the disclosure are typically composed of, at a minimum, a transgene and its regulatory sequences, and 5′ and 3′ AAV inverted terminal repeats (ITRs). It is this recombinant AAV vector which is packaged into a capsid protein and delivered to a selected target cell. In some embodiments, the transgene is a nucleic acid sequence, heterologous to the vector sequences, that encodes a polypeptide, protein, functional RNA molecule (e.g., miRNA, miRNA inhibitor) or other gene product, of interest. The nucleic acid coding sequence is operatively linked to regulatory components in a manner that permits transgene transcription, translation, and/or expression in a cell of a target tissue.

[0132] The AAV sequences of the vector typically comprise the cis-acting 5′ and 3′ inverted terminal repeat sequences (See, e.g., B. J. Carter, in “Handbook of Parvoviruses”, ed., P. Tijsser, CRC Press, pp. 155 168 (1990)). The ITR sequences are about 145 bp in length. Preferably, substantially the entire sequences encoding the ITRs are used in the molecule, although some degree of minor modification of these sequences is permissible. The ability to modify these ITR sequences is within the skill of the art. (See, e.g., texts such as Sambrook et al, “Molecular Cloning. A Laboratory Manual”, 2d ed., Cold Spring Harbor Laboratory, New York (1989); and K. Fisher et al., J Virol., 70:520 532 (1996)). An example of such a molecule employed in the present disclosure is a “cis-acting” plasmid containing the transgene, in which the selected transgene sequence and associated regulatory elements are flanked by the 5′ and 3′ AAV ITR sequences. The AAV ITR sequences may be obtained from any known AAV, including presently identified mammalian AAV types.

[0133] In some embodiments, the disclosure provides a self-complementary AAV vector. As used herein, the term “self-complementary AAV vector” (scAAV) refers to a vector containing a double-stranded vector genome generated by the absence of a terminal resolution site (TR) from one of the ITRs of the AAV. The absence of a TR prevents the initiation of replication at the vector terminus where the TR is not present. In general, scAAV vectors generate single-stranded, inverted repeat genomes, with a wild-type (wt) AAV TR at each end and a mutated TR (mTR) in the middle.

[0134] In some embodiments, the rAAVs of the present disclosure are pseudotyped rAAVs. Pseudotyping is the process of producing viruses or viral vectors in combination with foreign viral envelope proteins. The result is a pseudotyped virus particle. With this method, the foreign viral envelope proteins can be used to alter host tropism or an increased/decreased stability of the virus particles. In some aspects, a pseudotyped rAAV comprises nucleic acids from two or more different AAVs, wherein the nucleic acid from one AAV encodes a capsid protein and the nucleic acid of at least one other AAV encodes other viral proteins and/or the viral genome. In some embodiments, a pseudotyped rAAV refers to an AAV comprising an inverted terminal repeat (ITR) of one AAV serotype and a capsid protein of a different AAV serotype. For example, a pseudotyped AAV vector containing the ITRs of serotype X encapsidated with the proteins of Y will be designated as AAVX/Y (e.g., AAV2/1 has the ITRs of AAV2 and the capsid of AAV1). In some embodiments, pseudotyped rAAVs may be useful for combining the tissue-specific targeting capabilities of a capsid protein from one AAV serotype with the viral DNA from another AAV serotype, thereby allowing targeted delivery of a transgene to a target tissue.

[0135] In addition to the major elements identified above for the recombinant AAV vector, the vector also includes conventional control elements necessary which are operably linked to the transgene in a manner which permits its transcription, translation and/or expression in a cell transfected with the plasmid vector or infected with the virus produced by the disclosure. As used herein, “operably linked” sequences include both expression control sequences that are contiguous with the gene of interest and expression control sequences that act in trans or at a distance to control the gene of interest.

[0136] Expression control sequences include appropriate transcription initiation, termination, promoter and enhancer sequences; efficient RNA processing signals such as splicing and polyadenylation (polyA) signals; sequences that stabilize cytoplasmic mRNA; sequences that enhance translation efficiency (e.g., Kozak consensus sequence); sequences that enhance protein stability; and when desired, sequences that enhance secretion of the encoded product. A great number of expression control sequences, including promoters that are native, constitutive, inducible and/or tissue-specific, are known in the art and may be utilized.

[0137] As used herein, a nucleic acid sequence (e.g., coding sequence) and regulatory sequences are said to be “operably” linked when they are covalently linked in such a way as to place the expression or transcription of the nucleic acid sequence under the influence or control of the regulatory sequences. If it is desired that the nucleic acid sequences be translated into a functional protein, two DNA sequences are said to be operably linked if induction of a promoter in the 5′ regulatory sequences results in the transcription of the coding sequence and if the nature of the linkage between the two DNA sequences does not (1) result in the introduction of a frame-shift mutation, (2) interfere with the ability of the promoter region to direct the transcription of the coding sequences, or (3) interfere with the ability of the corresponding RNA transcript to be translated into a protein. Thus, a promoter region would be operably linked to a nucleic acid sequence if the promoter region were capable of effecting transcription of that DNA sequence such that the resulting transcript might be translated into the desired protein or polypeptide. Similarly two or more coding regions are operably linked when they are linked in such a way that their transcription from a common promoter results in the expression of two or more proteins having been translated in frame. In some embodiments, operably linked coding sequences yield a fusion protein. In some embodiments, operably linked coding sequences yield a functional RNA (e.g., shRNA, miRNA, miRNA inhibitor).

[0138] For nucleic acids encoding proteins, a polyadenylation sequence generally is inserted following the transgene sequences and before the 3′ AAV ITR sequence. A rAAV construct useful in the present disclosure may also contain an intron, desirably located between the promoter/enhancer sequence and the transgene. One possible intron sequence is derived from SV-40, and is referred to as the SV-40 T intron sequence. Another vector element that may be used is an internal ribosome entry site (IRES). An IRES sequence is used to produce more than one polypeptide from a single gene transcript. An IRES sequence would be used to produce a protein that contains more than one polypeptide chains. Selection of these and other common vector elements are conventional and many such sequences are available [see, e.g., Sambrook et al, and references cited therein at, for example, pages 3.18 3.26 and 16.17 16.27 and Ausubel et al., Current Protocols in Molecular Biology, John Wiley & Sons, New York, 1989]. In some embodiments, a Foot and Mouth Disease Virus 2A sequence is included in polyprotein; this is a small peptide (approximately 18 amino acids in length) that has been shown to mediate the cleavage of polyproteins (Ryan, M D et al., EMBO, 1994; 4: 928-933; Mattion, N M et al., J Virology, November 1996; p. 8124-8127; Furler, S et al., Gene Therapy, 2001; 8: 864-873; and Halpin, C et al., The Plant Journal, 1999; 4: 453-459). The cleavage activity of the 2A sequence has previously been demonstrated in artificial systems including plasmids and gene therapy vectors (AAV and retroviruses) (Ryan, M D et al., EMBO, 1994; 4: 928-933; Mattion, N M et al., J Virology, November 1996; p. 8124-8127; Furler, S et al., Gene Therapy, 2001; 8: 864-873; and Halpin, C et al., The Plant Journal, 1999; 4: 453-459; de Felipe, P et al., Gene Therapy, 1999; 6: 198-208; de Felipe, P et al., Human Gene Therapy, 2000; 11: 1921-1931.; and Klump, H et al., Gene Therapy, 2001; 8: 811-817).

[0139] The precise nature of the regulatory sequences needed for gene expression in host cells may vary between species, tissues or cell types, but shall in general include, as necessary, 5′ non-transcribed and 5′ non-translated sequences involved with the initiation of transcription and translation respectively, such as a TATA box, capping sequence, CAAT sequence, enhancer elements, and the like. Especially, such 5′ non-transcribed regulatory sequences will include a promoter region that includes a promoter sequence for transcriptional control of the operably joined gene. Regulatory sequences may also include enhancer sequences or upstream activator sequences as desired. The vectors of the disclosure may optionally include 5′ leader or signal sequences. The choice and design of an appropriate vector is within the ability and discretion of one of ordinary skill in the art.

[0140] Examples of constitutive promoters include, without limitation, the retroviral Rous sarcoma virus (RSV) LTR promoter (optionally with the RSV enhancer), the cytomegalovirus (CMV) promoter (optionally with the CMV enhancer) [see, e.g., Boshart et al, Cell, 41:521-530 (1985)], the SV40 promoter, the dihydrofolate reductase promoter, the β-actin promoter, the phosphoglycerol kinase (PGK) promoter, and the EF1α promoter [Invitrogen].

[0141] Inducible promoters allow regulation of gene expression and can be regulated by exogenously supplied compounds, environmental factors such as temperature, or the presence of a specific physiological state, e.g., acute phase, a particular differentiation state of the cell, or in replicating cells only. Inducible promoters and inducible systems are available from a variety of commercial sources, including, without limitation, Invitrogen, Clontech and Ariad. Many other systems have been described and can be readily selected by one of skill in the art. Examples of inducible promoters regulated by exogenously supplied promoters include the zinc-inducible sheep metallothionine (MT) promoter, the dexamethasone (Dex)-inducible mouse mammary tumor virus (MMTV) promoter, the T7 polymerase promoter system (WO 98/10088); the ecdysone insect promoter (No et al, Proc. Natl. Acad. Sci. USA, 93:3346-3351 (1996)), the tetracycline-repressible system (Gossen et al, Proc. Natl. Acad. Sci. USA, 89:5547-5551 (1992)), the tetracycline-inducible system (Gossen et al, Science, 268:1766-1769 (1995), see also Harvey et al, Curr. Opin. Chem. Biol., 2:512-518 (1998)), the RU486-inducible system (Wang et al, Nat. Biotech., 15:239-243 (1997) and Wang et al, Gene Ther., 4:432-441 (1997)) and the rapamycin-inducible system (Magari et al, J. Clin. Invest., 100:2865-2872 (1997)). Still other types of inducible promoters that may be useful in this context are those that are regulated by a specific physiological state, e.g., temperature, acute phase, a particular differentiation state of the cell, or in replicating cells only.

[0142] In another embodiment, the native promoter for the transgene will be used. The native promoter may be preferred when it is desired that expression of the transgene should mimic the native expression. The native promoter may be used when expression of the transgene must be regulated temporally or developmentally, or in a tissue-specific manner, or in response to specific transcriptional stimuli. In a further embodiment, other native expression control elements, such as enhancer elements, polyadenylation sites or Kozak consensus sequences may also be used to mimic the native expression.

[0143] In some embodiments, the regulatory sequences impart tissue-specific gene expression capabilities. In some cases, the tissue-specific regulatory sequences bind tissue-specific transcription factors that induce transcription in a tissue specific manner. Such tissue-specific regulatory sequences (e.g., promoters, enhancers, etc.) are well known in the art. Exemplary tissue-specific regulatory sequences include, but are not limited to the following tissue specific promoters: a liver-specific thyroxin binding globulin (TBG) promoter, an insulin promoter, a glucagon promoter, a somatostatin promoter, a pancreatic polypeptide (PPY) promoter, a synapsin-1 (Syn) promoter, a creatine kinase (MCK) promoter, a mammalian desmin (DES) promoter, a α-myosin heavy chain (a-MHC) promoter, a gastrointestinal-specific mucin-2 promoter, an eye-specific retinoschisin promoter, an eye-specific K12 promoter, a respiratory tissue-specific CC10 promoter, a respiratory tissue-specific surfactant protein C (SP-C) promoter, a breast tissue-specific PRC1 promoter, a breast tissue-specific RRM2 promoter, a urinary tract tissue-specific uroplakin 2 (UPII) promoter, a uterine tissue-specific lactoferrin promoter, or a cardiac Troponin T (cTnT) promoter. Other exemplary promoters include Beta-actin promoter, hepatitis B virus core promoter, Sandig et al., Gene Ther., 3:1002-9 (1996); alpha-fetoprotein (AFP) promoter, Arbuthnot et al., Hum. Gene Ther., 7:1503-14 (1996)), bone osteocalcin promoter (Stein et al., Mol. Biol. Rep., 24:185-96 (1997)); bone sialoprotein promoter (Chen et al., J. Bone Miner. Res., 11:654-64 (1996)), CD2 promoter (Hansal et al., J. Immunol., 161:1063-8 (1998); immunoglobulin heavy chain promoter; T cell receptor α-chain promoter, neuronal such as neuron-specific enolase (NSE) promoter (Andersen et al., Cell. Mol. Neurobiol., 13:503-15 (1993)), neurofilament light-chain gene promoter (Piccioli et al., Proc. Natl. Acad. Sci. USA, 88:5611-5 (1991)), and the neuron-specific vgf gene promoter (Piccioli et al., Neuron, 15:373-84 (1995)), among others which will be apparent to the skilled artisan.

[0144] In some embodiments, one or more bindings sites for one or more of miRNAs are incorporated in a transgene of a rAAV vector, to inhibit the expression of the transgene in one or more tissues of an subject harboring the transgene. The skilled artisan will appreciate that binding sites may be selected to control the expression of a transgene in a tissue specific manner. For example, binding sites for the liver-specific miR-122 may be incorporated into a transgene to inhibit expression of that transgene in the liver. The target sites in the mRNA may be in the 5′ UTR, the 3′ UTR or in the coding region. Typically, the target site is in the 3′ UTR of the mRNA. Furthermore, the transgene may be designed such that multiple miRNAs regulate the mRNA by recognizing the same or multiple sites. The presence of multiple miRNA binding sites may result in the cooperative action of multiple RISCs and provide highly efficient inhibition of expression. The target site sequence may comprise a total of 5-100, 10-60, or more nucleotides. The target site sequence may comprise at least 5 nucleotides of the sequence of a target gene binding site.

### Recombinant AAV Vector: Transgene Coding Sequences

[0145] The composition of the transgene sequence of the rAAV vector will depend upon the use to which the resulting vector will be put. For example, one type of transgene sequence includes a reporter sequence, which upon expression produces a detectable signal. In another example, the transgene encodes a therapeutic protein or therapeutic functional RNA. In another example, the transgene encodes a protein or functional RNA that is intended to be used for research purposes, e.g., to create a somatic transgenic animal model harboring the transgene, e.g., to study the function of the transgene product. In another example, the transgene encodes a protein or functional RNA that is intended to be used to create an animal model of disease. Appropriate transgene coding sequences will be apparent to the skilled artisan.

[0146] Reporter sequences that may be provided in a transgene include, without limitation, DNA sequences encoding β-lactamase, β-galactosidase (LacZ), alkaline phosphatase, thymidine kinase, green fluorescent protein (GFP), chloramphenicol acetyltransferase (CAT), luciferase, and others well known in the art. When associated with regulatory elements which drive their expression, the reporter sequences, provide signals detectable by conventional means, including enzymatic, radiographic, colorimetric, fluorescence or other spectrographic assays, fluorescent activating cell sorting assays and immunological assays, including enzyme linked immunosorbent assay (ELISA), radioimmunoassay (RIA) and immunohistochemistry. For example, where the marker sequence is the LacZ gene, the presence of the vector carrying the signal is detected by assays for β-galactosidase activity. Where the transgene is green fluorescent protein or luciferase, the vector carrying the signal may be measured visually by color or light production in a luminometer. Such reporters can, for example, be useful in verifying the tissue-specific targeting capabilities and tissue specific promoter regulatory activity of an rAAV.

[0147] In some aspects, the disclosure provides rAAV vectors for use in methods of preventing or treating one or more genetic deficiencies or dysfunctions in a mammal, such as for example, a polypeptide deficiency or polypeptide excess in a mammal, and particularly for treating or reducing the severity or extent of deficiency in a human manifesting one or more of the disorders linked to a deficiency in such polypeptides in cells and tissues. The method involves administration of an rAAV vector that encodes one or more therapeutic peptides, polypeptides, siRNAs, microRNAs, antisense nucleotides, etc. in a pharmaceutically-acceptable carrier to the subject in an amount and for a period of time sufficient to treat the deficiency or disorder in the subject suffering from such a disorder.

[0148] Thus, the disclosure embraces the delivery of rAAV vectors encoding one or more peptides, polypeptides, or proteins, which are useful for the treatment or prevention of disease states in a mammalian subject. Exemplary therapeutic proteins include one or more polypeptides selected from the group consisting of growth factors, interleukins, interferons, anti-apoptosis factors, cytokines, anti-diabetic factors, anti-apoptosis agents, coagulation factors, anti-tumor factors. Other non-limiting examples of therapeutic proteins include BDNF, CNTF, CSF, EGF, FGF, G-SCF, GM-CSF, gonadotropin, IFN, IFG-1, M-CSF, NGF, PDGF, PEDF, TGF, VEGF, TGF-B2, TNF, prolactin, somatotropin, XIAP1, IL-1, IL-2, IL-3, IL-4, IL-5, IL-6, IL-7, IL-8, IL-9, IL-10, IL-10 (187A), viral IL-10, IL-11, IL-12, IL-13, IL-14, IL-15, IL-16 IL-17, and IL-18.

[0149] The rAAV vectors may comprise a gene to be transferred to a subject to treat a disease associated with reduced expression, lack of expression or dysfunction of the gene. Exemplary genes and associated disease states include, but are not limited to: glucose-6-phosphatase, associated with glycogen storage deficiency type 1A; phosphoenolpyruvate-carboxykinase, associated with Pepck deficiency; galactose-1 phosphate uridyl transferase, associated with galactosemia; phenylalanine hydroxylase, associated with phenylketonuria; branched chain alpha-ketoacid dehydrogenase, associated with Maple syrup urine disease; fumarylacetoacetate hydrolase, associated with tyrosinemia type 1; methylmalonyl-CoA mutase, associated with methylmalonic acidemia; medium chain acyl CoA dehydrogenase, associated with medium chain acetyl CoA deficiency; omithine transcarbamylase, associated with omithine transcarbamylase deficiency; argininosuccinic acid synthetase, associated with citrullinemia; low density lipoprotein receptor protein, associated with familial hypercholesterolemia; UDP-glucouronosyltransferase, associated with Crigler-Najjar disease; adenosine deaminase, associated with severe combined immunodeficiency disease; hypoxanthine guanine phosphoribosyl transferase, associated with Gout and Lesch-Nyan syndrome; biotinidase, associated with biotinidase deficiency; beta-glucocerebrosidase, associated with Gaucher disease; beta-glucuronidase, associated with Sly syndrome; peroxisome membrane protein 70 kDa, associated with Zellweger syndrome; porphobilinogen deaminase, associated with acute intermittent porphyria; alpha-1 antitrypsin for treatment of alpha-1 antitrypsin deficiency (emphysema); erythropoietin for treatment of anemia due to thalassemia or to renal failure; vascular endothelial growth factor, angiopoietin-1, and fibroblast growth factor for the treatment of ischemic diseases; thrombomodulin and tissue factor pathway inhibitor for the treatment of occluded blood vessels as seen in, for example, atherosclerosis, thrombosis, or embolisms; aromatic amino acid decarboxylase (AADC), and tyrosine hydroxylase (TH) for the treatment of Parkinson's disease; the beta adrenergic receptor, anti-sense to, or a mutant form of, phospholamban, the sarco(endo)plasmic reticulum adenosine triphosphatase-2 (SERCA2), and the cardiac adenylyl cyclase for the treatment of congestive heart failure; a tumor suppessor gene such as p53 for the treatment of various cancers; a cytokine such as one of the various interleukins for the treatment of inflammatory and immune disorders and cancers; dystrophin or minidystrophin and utrophin or miniutrophin for the treatment of muscular dystrophies; and, insulin for the treatment of diabetes.

[0150] In some embodiments, the disclosure relates to an AAV comprising a nucleic acid encoding a protein or functional RNA useful for the treatment of a condition, disease or disorder associated with the central nervous system (CNS). The following is a non-limiting list of genes associated with CNS disease: DRD2, GRIA1, GRIA2, GRIN1, SLC1A1, SYP, SYT1, CHRNA7, 3Rtau/4rTUS, APP, BAX, BCL-2, GRIK1, GFAP, IL-1, AGER, associated with Alzheimer's Disease; UCH-L1, SKP1, EGLN1, Nurr-1, BDNF, TrkB, gstm1, S106β, associated with Parkinson's Disease; IT15, PRNP, JPH3, TBP, ATXN1, ATXN2, ATXN3, Atrophin 1, FTL, TITF-1, associated with Huntington's Disease; FXN, associated with Freidrich's ataxia; ASPA, associated with Canavan's Disease; DMD, associated with muscular dystrophy; and SMN1, UBE1, DYNC1H1 associated with spinal muscular atrophy. In some embodiments, the disclosure relates to recombinant AAVs comprising nucleic acids that express one or more of the foregoing genes or fragments thereof. In some embodiments, the disclosure relates to recombinant AAVs comprising nucleic acids that express one or more functional RNAs that inhibit expression of one or more of the foregoing genes.

[0151] In some embodiments, the disclosure relates to a nucleic acid encoding a protein or functional RNA useful for the treatment of a condition, disease or disorder associated with the cardiovascular system. The following is a non-limiting list of genes associated with cardiovascular disease: VEGF, FGF, SDF-1, connexin 40, connexin 43, SCN4a, HIF1α, SERCa2a, ADCY1, and ADCY6. In some embodiments, the disclosure relates to recombinant AAVs comprising nucleic acids that express one or more of the foregoing genes or fragments thereof. In some embodiments, the disclosure relates to recombinant AAVs comprising nucleic acids that express one or more functional RNAs that inhibit expression of one or more of the foregoing genes.

[0152] In some embodiments, the disclosure relates to an AAV comprising a nucleic acid encoding a protein or functional RNA useful for the treatment of a condition, disease or disorder associated with the pulmonary system. The following is a non-limiting list of genes associated with pulmonary disease: TNFα, TGFβ1, SFTPA1, SFTPA2, SFTPB, SFTPC, HPS1, HPS3, HPS4, ADTB3A, IL1A, IL1B, LTA, IL6, CXCR1, and CXCR2. In some embodiments, the disclosure relates to recombinant AAVs comprising nucleic acids that express one or more of the foregoing genes or fragments thereof. In some embodiments, the disclosure relates to recombinant AAVs comprising nucleic acids that express one or more functional RNAs that inhibit expression of one or more of the foregoing genes.

[0153] In some embodiments, the disclosure relates to an AAV comprising a nucleic acid encoding a protein or functional RNA useful for the treatment of a condition, disease or disorder associated with the liver. The following is a non-limiting list of genes associated with liver disease: α1-AT, HFE, ATP7B, fumarylacetoacetate hydrolase (FAH), glucose-6-phosphatase, NCAN, GCKR, LYPLAL1, and PNPLA3. In some embodiments, the disclosure relates to recombinant AAVs comprising nucleic acids that express one or more of the foregoing genes or fragments thereof. In some embodiments, the disclosure relates to recombinant AAVs comprising nucleic acids that express one or more functional RNAs that inhibit expression of one or more of the foregoing genes.

[0154] In some embodiments, the disclosure relates to an AAV comprising a nucleic acid encoding a protein or functional RNA useful for the treatment of a condition, disease or disorder associated with the kidney. The following is a non-limiting list of genes associated with kidney disease: PKD1, PKD2, PKHD1, NPHS1, NPHS2, PLCE1, CD2AP, LAMB2, TRPC6, WT1, LMX1B, SMARCAL1, COQ2, PDSS2, SCARB3, FN1, COL4A5, COL4A6, COL4A3, COL4A4, FOX1C, RET, UPK3A, BMP4, SIX2, CDC5L, USF2, ROBO2, SLIT2, EYA1, MYOG, SIX1, SIXS, FRAS1, FREM2, GATA3, KAL1, PAX2, TCF2, and SALL1. In some embodiments, the disclosure relates to recombinant AAVs comprising nucleic acids that express one or more of the foregoing genes or fragments thereof. In some embodiments, the disclosure relates to recombinant AAVs comprising nucleic acids that express one or more functional RNAs that inhibit expression of one or more of the foregoing genes.

[0155] In some embodiments, the disclosure relates to an AAV comprising a nucleic acid encoding a protein or functional RNA useful for the treatment of a condition, disease or disorder associated with the eye. The following is a non-limiting list of genes associated with ocular disease: CFH, C3, MT-ND2, ARMS2, TIMP3, CAMK4, FMN1, RHO, USH2A, RPGR, RP2, TMCO, SIX1, SIX6, LRP12, ZFPM2, TBK1, GALC, myocilin, CYP1B1, CAV1, CAV2, optineurin and CDKN2B. In some embodiments, the disclosure relates to recombinant AAVs comprising nucleic acids that express one or more of the foregoing genes or fragments thereof. In some embodiments, the disclosure relates to recombinant AAVs comprising nucleic acids that express one or more functional RNAs that inhibit expression of one or more of the foregoing genes.

[0156] In some embodiments, the disclosure relates to an AAV comprising a nucleic acid encoding a protein or functional RNA useful for the treatment of a condition, disease or disorder associated with breast. The following is a non-limiting list of genes associated with breast disease: BRCA1, BRCA2, Tp53, PTEN, HER2, BRAF, and PARP1. In some embodiments, the disclosure relates to recombinant AAVs comprising nucleic acids that express one or more of the foregoing genes or fragments thereof. In some embodiments, the disclosure relates to recombinant AAVs comprising nucleic acids that express one or more functional RNAs that inhibit expression of one or more of the foregoing genes.

[0157] In some embodiments, the disclosure relates to an AAV comprising a nucleic acid encoding a protein or functional RNA useful for the treatment of a condition, disease or disorder associated with the gastrointestinal tract. The following is a non-limiting list of genes associated with gastrointestinal disease: CYP2C19, CCL26, APC, IL12, IL10, and IL-18. In some embodiments, the disclosure relates to recombinant AAVs comprising nucleic acids that express one or more of the foregoing genes or fragments thereof. In some embodiments, the disclosure relates to recombinant AAVs comprising nucleic acids that express one or more functional RNAs that inhibit expression of one or more of the foregoing genes.

[0158] In some embodiments, the disclosure relates to an AAV comprising a nucleic acid encoding a protein or functional RNA useful for the treatment of a condition, disease or disorder associated with the pancreas. The following is a non-limiting list of genes associated with pancreatic disease: PRSS1, SPINK1, STK11, MLH1, KRAS2, p16, p53, and BRAF. In some embodiments, the disclosure relates to recombinant AAVs comprising nucleic acids that express one or more of the foregoing genes or fragments thereof. In some embodiments, the disclosure relates to recombinant AAVs comprising nucleic acids that express one or more functional RNAs that inhibit expression of one or more of the foregoing genes.

[0159] In some embodiments, the disclosure relates to an AAV comprising a nucleic acid encoding a protein or functional RNA useful for the treatment of a condition, disease or disorder associated with the urinary tract. The following is a non-limiting list of genes associated with urinary tract disease: HSPA1B, CXCR1 & 2, TLR2, TLR4, TGF-1, FGFR3, RB1, HRAS, TP53, and TSC1. In some embodiments, the disclosure relates to recombinant AAVs comprising nucleic acids that express one or more of the foregoing genes or fragments thereof. In some embodiments, the disclosure relates to recombinant AAVs comprising nucleic acids that express one or more functional RNAs that inhibit expression of one or more of the foregoing genes.

[0160] In some embodiments, the disclosure relates to an AAV comprising a nucleic acid encoding a protein or functional RNA useful for the treatment of a condition, disease or disorder associated with the uterus. The following is a non-limiting list of genes associated with ocular disease: DN-ER, MLH1, MSH2, MSH6, PMS1, and PMS2. In some embodiments, the disclosure relates to recombinant AAVs comprising nucleic acids that express one or more of the foregoing genes or fragments thereof. In some embodiments, the disclosure relates to recombinant AAVs comprising nucleic acids that express one or more functional RNAs that inhibit expression of one or more of the foregoing genes.

[0161] The rAAVs of the disclosure can be used to restore the expression of genes that are reduced in expression, silenced, or otherwise dysfunctional in a subject (e.g., a tumor suppressor that has been silenced in a subject having cancer). The rAAVs of the disclosure can also be used to knockdown the expression of genes that are aberrantly expressed in a subject (e.g., an oncogene that is expressed in a subject having cancer). In some embodiments, an rAAV vector comprising a nucleic acid encoding a gene product associated with cancer (e.g., tumor suppressors) may be used to treat the cancer, by administering a rAAV harboring the rAAV vector to a subject having the cancer. In some embodiments, an rAAV vector comprising a nucleic acid encoding a small interfering nucleic acid (e.g., shRNAs, miRNAs) that inhibits the expression of a gene product associated with cancer (e.g., oncogenes) may be used to treat the cancer, by administering a rAAV harboring the rAAV vector to a subject having the cancer. In some embodiments, an rAAV vector comprising a nucleic acid encoding a gene product associated with cancer (or a functional RNA that inhibits the expression of a gene associated with cancer) may be used for research purposes, e.g., to study the cancer or to identify therapeutics that treat the cancer. The following is a non-limiting list of exemplary genes known to be associated with the development of cancer (e.g., oncogenes and tumor suppressors): AARS, ABCB1, ABCC4, ABI2, ABL1, ABL2, ACK1, ACP2, ACY1, ADSL, AK1, AKR1C2, AKT1, ALB, ANPEP, ANXA5, ANXA7, AP2M1, APC, ARHGAP5, ARHGEF5, ARID4A, ASNS, ATF4, ATM, ATP5B, ATP5O, AXL, BARD1, BAX, BCL2, BHLHB2, BLMH, BRAF, BRCA1, BRCA2, BTK, CANX, CAP1, CAPN1, CAPNS1, CAV1, CBFB, CBLB, CCL2, CCND1, CCND2, CCND3, CCNE1, CCT5, CCYR61, CD24, CD44, CD59, CDC20, CDC25, CDC25A, CDC25B, CDC2L5, CDK10, CDK4, CDK5, CDK9, CDKL1, CDKN1A, CDKN1B, CDKN1C, CDKN2A, CDKN2B, CDKN2D, CEBPG, CENPC1, CGRRF1, CHAF1A, CIB1, CKMT1, CLK1, CLK2, CLK3, CLNS1A, CLTC, COL1A1, COL6A3, COX6C, COX7A2, CRAT, CRHR1, CSF1R, CSK, CSNK1G2, CTNNA1, CTNNB1, CTPS, CTSC, CTSD, CUL1, CYR61, DCC, DCN, DDX10, DEK, DHCR7, DHRS2, DHX8, DLG3, DVL1, DVL3, E2F1, E2F3, E2F5, EGFR, EGR1, EIF5, EPHA2, ERBB2, ERBB3, ERBB4, ERCC3, ETV1, ETV3, ETV6, F2R, FASTK, FBN1, FBN2, FES, FGFR1, FGR, FKBP8, FN1, FOS, FOSL1, FOSL2, FOXG1A, FOXO1A, FRAP1, FRZB, FTL, FZD2, FZD5, FZD9, G22P1, GAS6, GCN5L2, GDF15, GNA13, GNAS, GNB2, GNB2L1, GPR39, GRB2, GSK3A, GSPT1, GTF2I, HDAC1, HDGF, HMMR, HPRT1, HRB, HSPA4, HSPA5, HSPA8, HSPB1, HSPH1, HYAL1, HYOU1, ICAM1, ID1, ID2, IDUA, IER3, IFITM1, IGF1R, IGF2R, IGFBP3, IGFBP4, IGFBP5, IL1B, ILK, ING1, IRF3, ITGA3, ITGA6, ITGB4, JAK1, JARID1A, JUN, JUNB, JUND, K-ALPHA-1, KIT, KITLG, KLK10, KPNA2, KRAS2, KRT18, KRT2A, KRT9, LAMB1, LAMP2, LCK, LCN2, LEP, LITAF, LRPAP1, LTF, LYN, LZTR1, MADH1, MAP2K2, MAP3K8, MAPK12, MAPK13, MAPKAPK3, MAPRE1, MARS, MAS1, MCC, MCM2, MCM4, MDM2, MDM4, MET, MGST1, MICB, MLLT3, MME, MMP1, MMP14, MMP17, MMP2, MNDA, MSH2, MSH6, MT3, MYB, MYBL1, MYBL2, MYC, MYCL1, MYCN, MYD88, MYL9, MYLK, NEO1, NF1, NF2, NFKB1, NFKB2, NFSF7, NID, NINJ1, NMBR, NME1, NME2, NME3, NOTCH1, NOTCH2, NOTCH4, NPM1, NQO1, NR1D1, NR2F1, NR2F6, NRAS, NRG1, NSEP1, OSM, PA2G4, PABPC1, PCNA, PCTK1, PCTK2, PCTK3, PDGFA, PDGFB, PDGFRA, PDPK1, PEA15, PFDN4, PFDN5, PGAM1, PHB, PIK3CA, PIK3CB, PIK3CG, PIM1, PKM2, PKMYT1, PLK2, PPARD, PPARG, PPIH, PPP1CA, PPP2R5A, PRDX2, PRDX4, PRKAR1A, PRKCBP1, PRNP, PRSS15, PSMA1, PTCH, PTEN, PTGS1, PTMA, PTN, PTPRN, RAB5A, RAC1, RAD50, RAF1, RALBP1, RAP1A, RARA, RARB, RASGRF1, RB1, RBBP4, RBL2, REA, REL, RELA, RELB, RET, RFC2, RGS19, RHOA, RHOB, RHOC, RHOD, RIPK1, RPN2, RPS6KB1, RRM1, SARS, SELENBP1, SEMA3C, SEMA4D, SEPP1, SERPINH1, SFN, SFPQ, SFRS7, SHB, SHH, SIAH2, SIVA, SIVA TP53, SKI, SKIL, SLC16A1, SLC1A4, SLC20A1, SMO, SMPD1, SNAI2, SND1, SNRPB2, SOCS1, SOCS3, SOD1, SORT1, SPINT2, SPRY2, SRC, SRPX, STAT1, STAT2, STAT3, STAT5B, STC1, TAF1, TBL3, TBRG4, TCF1, TCF7L2, TFAP2C, TFDP1, TFDP2, TGFA, TGFB1, TGFBI, TGFBR2, TGFBR3, THBS1, TIE, TIMP1, TIMP3, TJP1, TK1, TLE1, TNF, TNFRSF10A, TNFRSF10B, TNFRSF1A, TNFRSF1B, TNFRSF6, TNFSF7, TNK1, TOB1, TP53, TP53BP2, TP53I3, TP73, TPBG, TPT1, TRADD, TRAM1, TRRAP, TSG101, TUFM, TXNRD1, TYRO3, UBC, UBE2L6, UCHL1, USP7, VDAC1, VEGF, VHL, VIL2, WEE1, WNT1, WNT2, WNT2B, WNT3, WNT5A, WT1, XRCC1, YES1, YWHAB, YWHAZ, ZAP70, and ZNF9.

[0162] A rAAV vector may comprise as a transgene, a nucleic acid encoding a protein or functional RNA that modulates apoptosis. The following is a non-limiting list of genes associated with apoptosis and nucleic acids encoding the products of these genes and their homologues and encoding small interfering nucleic acids (e.g., shRNAs, miRNAs) that inhibit the expression of these genes and their homologues are useful as transgenes in certain embodiments of the disclosure: RPS27A, ABL1, AKT1, APAF1, BAD, BAG1, BAG3, BAG4, BAK1, BAX, BCL10, BCL2, BCL2A1, BCL2L1, BCL2L10, BCL2L11, BCL2L12, BCL2L13, BCL2L2, BCLAF1, BFAR, BID, BIK, NAIP, BIRC2, BIRC3, XIAP, BIRC5, BIRC6, BIRC7, BIRC8, BNIP1, BNIP2, BNIP3, BNIP3L, BOK, BRAF, CARD10, CARD11, NLRC4, CARD14, NOD2, NOD1, CARD6, CARD8, CARD9, CASP1, CASP10, CASP14, CASP2, CASP3, CASP4, CASP5, CASP6, CASP7, CASP8, CASP9, CFLAR, CIDEA, CIDEB, CRADD, DAPK1, DAPK2, DFFA, DFFB, FADD, GADD45A, GDNF, HRK, IGF1R, LTA, LTBR, MCL1, NOL3, PYCARD, RIPK1, RIPK2, TNF, TNFRSF10A, TNFRSF10B, TNFRSF10C, TNFRSF10D, TNFRSF11B, TNFRSF12A, TNFRSF14, TNFRSF19, TNFRSF1A, TNFRSF1B, TNFRSF21, TNFRSF25, CD40, FAS, TNFRSF6B, CD27, TNFRSF9, TNFSF10, TNFSF14, TNFSF18, CD40LG, FASLG, CD70, TNFSF8, TNFSF9, TP53, TP53BP2, TP73, TP63, TRADD, TRAF1, TRAF2, TRAF3, TRAF4, TRAF5 DRD2, GRIA1, GRIA2, GRIN1, SLC1A1, SYP, SYT1, CHRNA7, 3Rtau/4rTUS, APP, BAX, BCL-2, GRIK1, GFAP, IL-1, AGER, UCH-L1, SKP1, EGLN1, Nurr-1, BDNF, TrkB, gstm1, S106β, IT15, PRNP, JPH3, TBP, ATXN1, ATXN2, ATXN3, Atrophin 1, FTL, TITF-1, FXN, ASPA, DMD, and SMN1, UBE1, DYNC1H1.

[0163] The skilled artisan will also realize that in the case of transgenes encoding proteins or polypeptides, that mutations that results in conservative amino acid substitutions may be made in a transgene to provide functionally equivalent variants, or homologs of a protein or polypeptide. In some aspects the disclosure embraces sequence alterations that result in conservative amino acid substitution of a transgene. In some embodiments, the transgene comprises a gene having a dominant negative mutation. For example, a transgene may express a mutant protein that interacts with the same elements as a wild-type protein, and thereby blocks some aspect of the function of the wild-type protein.

[0164] Useful transgene products also include miRNAs. miRNAs and other small interfering nucleic acids regulate gene expression via target RNA transcript cleavage/degradation or translational repression of the target messenger RNA (mRNA). miRNAs are natively expressed, typically as final 19-25 non-translated RNA products. miRNAs exhibit their activity through sequence-specific interactions with the 3′ untranslated regions (UTR) of target mRNAs. These endogenously expressed miRNAs form hairpin precursors that are subsequently processed into a miRNA duplex, and further into a “mature” single stranded miRNA molecule. This mature miRNA guides a multiprotein complex, miRISC, which identifies target site, e.g., in the 3′ UTR regions, of target mRNAs based upon their complementarity to the mature miRNA.

[0165] The following non-limiting list of miRNA genes, and their homologues, are useful as transgenes or as targets for small interfering nucleic acids encoded by transgenes (e.g., miRNA sponges, antisense oligonucleotides, TuD RNAs) in certain embodiments of the methods: hsa-let-7a, hsa-let-7a*, hsa-let-7b, hsa-let-7b*, hsa-let-7c, hsa-let-7c*, hsa-let-7d, hsa-let-7d*, hsa-let-7e, hsa-let-7e*, hsa-let-7f, hsa-let-7f-1*, hsa-let-7f-2*, hsa-let-7g, hsa-let-7g*, hsa-let-7i, hsa-let-7i*, hsa-miR-1, hsa-miR-100, hsa-miR-100*, hsa-miR-101, hsa-miR-101*, hsa-miR-103, hsa-miR-105, hsa-miR-105*, hsa-miR-106a, hsa-miR-106a*, hsa-miR-106b, hsa-miR-106b*, hsa-miR-107, hsa-miR-10a, hsa-miR-10a*, hsa-miR-10b, hsa-miR-10b*, hsa-miR-1178, hsa-miR-1179, hsa-miR-1180, hsa-miR-1181, hsa-miR-1182, hsa-miR-1183, hsa-miR-1184, hsa-miR-1185, hsa-miR-1197, hsa-miR-1200, hsa-miR-1201, hsa-miR-1202, hsa-miR-1203, hsa-miR-1204, hsa-miR-1205, hsa-miR-1206, hsa-miR-1207-3p, hsa-miR-1207-5p, hsa-miR-1208, hsa-miR-122, hsa-miR-122*, hsa-miR-1224-3p, hsa-miR-1224-5p, hsa-miR-1225-3p, hsa-miR-1225-5p, hsa-miR-1226, hsa-miR-1226*, hsa-miR-1227, hsa-miR-1228, hsa-miR-1228*, hsa-miR-1229, hsa-miR-1231, hsa-miR-1233, hsa-miR-1234, hsa-miR-1236, hsa-miR-1237, hsa-miR-1238, hsa-miR-124, hsa-miR-124*, hsa-miR-1243, hsa-miR-1244, hsa-miR-1245, hsa-miR-1246, hsa-miR-1247, hsa-miR-1248, hsa-miR-1249, hsa-miR-1250, hsa-miR-1251, hsa-miR-1252, hsa-miR-1253, hsa-miR-1254, hsa-miR-1255a, hsa-miR-1255b, hsa-miR-1256, hsa-miR-1257, hsa-miR-1258, hsa-miR-1259, hsa-miR-125a-3p, hsa-miR-125a-5p, hsa-miR-125b, hsa-miR-125b-1*, hsa-miR-125b-2*, hsa-miR-126, hsa-miR-126*, hsa-miR-1260, hsa-miR-1261, hsa-miR-1262, hsa-miR-1263, hsa-miR-1264, hsa-miR-1265, hsa-miR-1266, hsa-miR-1267, hsa-miR-1268, hsa-miR-1269, hsa-miR-1270, hsa-miR-1271, hsa-miR-1272, hsa-miR-1273, hsa-miR-127-3p, hsa-miR-1274a, hsa-miR-1274b, hsa-miR-1275, hsa-miR-127-5p, hsa-miR-1276, hsa-miR-1277, hsa-miR-1278, hsa-miR-1279, hsa-miR-128, hsa-miR-1280, hsa-miR-1281, hsa-miR-1282, hsa-miR-1283, hsa-miR-1284, hsa-miR-1285, hsa-miR-1286, hsa-miR-1287, hsa-miR-1288, hsa-miR-1289, hsa-miR-129*, hsa-miR-1290, hsa-miR-1291, hsa-miR-1292, hsa-miR-1293, hsa-miR-129-3p, hsa-miR-1294, hsa-miR-1295, hsa-miR-129-5p, hsa-miR-1296, hsa-miR-1297, hsa-miR-1298, hsa-miR-1299, hsa-miR-1300, hsa-miR-1301, hsa-miR-1302, hsa-miR-1303, hsa-miR-1304, hsa-miR-1305, hsa-miR-1306, hsa-miR-1307, hsa-miR-1308, hsa-miR-130a, hsa-miR-130a*, hsa-miR-130b, hsa-miR-130b*, hsa-miR-132, hsa-miR-132*, hsa-miR-1321, hsa-miR-1322, hsa-miR-1323, hsa-miR-1324, hsa-miR-133a, hsa-miR-133b, hsa-miR-134, hsa-miR-135a, hsa-miR-135a*, hsa-miR-135b, hsa-miR-135b*, hsa-miR-136, hsa-miR-136*, hsa-miR-137, hsa-miR-138, hsa-miR-138-1*, hsa-miR-138-2*, hsa-miR-139-3p, hsa-miR-139-5p, hsa-miR-140-3p, hsa-miR-140-5p, hsa-miR-141, hsa-miR-141*, hsa-miR-142-3p, hsa-miR-142-5p, hsa-miR-143, hsa-miR-143*, hsa-miR-144, hsa-miR-144*, hsa-miR-145, hsa-miR-145*, hsa-miR-146a, hsa-miR-146a*, hsa-miR-146b-3p, hsa-miR-146b-5p, hsa-miR-147, hsa-miR-147b, hsa-miR-148a, hsa-miR-148a*, hsa-miR-148b, hsa-miR-148b*, hsa-miR-149, hsa-miR-149*, hsa-miR-150, hsa-miR-150*, hsa-miR-151-3p, hsa-miR-151-5p, hsa-miR-152, hsa-miR-153, hsa-miR-154, hsa-miR-154*, hsa-miR-155, hsa-miR-155*, hsa-miR-15a, hsa-miR-15a*, hsa-miR-15b, hsa-miR-15b*, hsa-miR-16, hsa-miR-16-1*, hsa-miR-16-2*, hsa-miR-17, hsa-miR-17*, hsa-miR-181a, hsa-miR-181a*, hsa-miR-181a-2*, hsa-miR-181b, hsa-miR-181c, hsa-miR-181c*, hsa-miR-181d, hsa-miR-182, hsa-miR-182*, hsa-miR-1825, hsa-miR-1826, hsa-miR-1827, hsa-miR-183, hsa-miR-183*, hsa-miR-184, hsa-miR-185, hsa-miR-185*, hsa-miR-186, hsa-miR-186*, hsa-miR-187, hsa-miR-187*, hsa-miR-188-3p, hsa-miR-188-5p, hsa-miR-18a, hsa-miR-18a*, hsa-miR-18b, hsa-miR-18b*, hsa-miR-190, hsa-miR-190b, hsa-miR-191, hsa-miR-191*, hsa-miR-192, hsa-miR-192*, hsa-miR-193a-3p, hsa-miR-193a-5p, hsa-miR-193b, hsa-miR-193b*, hsa-miR-194, hsa-miR-194*, hsa-miR-195, hsa-miR-195*, hsa-miR-196a, hsa-miR-196a*, hsa-miR-196b, hsa-miR-197, hsa-miR-198, hsa-miR-199a-3p, hsa-miR-199a-5p, hsa-miR-199b-5p, hsa-miR-19a, hsa-miR-19a*, hsa-miR-19b, hsa-miR-19b-1*, hsa-miR-19b-2*, hsa-miR-200a, hsa-miR-200a*, hsa-miR-200b, hsa-miR-200b*, hsa-miR-200c, hsa-miR-200c*, hsa-miR-202, hsa-miR-202*, hsa-miR-203, hsa-miR-204, hsa-miR-205, hsa-miR-206, hsa-miR-208a, hsa-miR-208b, hsa-miR-20a, hsa-miR-20a*, hsa-miR-20b, hsa-miR-20b*, hsa-miR-21, hsa-miR-21*, hsa-miR-210, hsa-miR-211, hsa-miR-212, hsa-miR-214, hsa-miR-214*, hsa-miR-215, hsa-miR-216a, hsa-miR-216b, hsa-miR-217, hsa-miR-218, hsa-miR-218-1*, hsa-miR-218-2*, hsa-miR-219-1-3p, hsa-miR-219-2-3p, hsa-miR-219-5p, hsa-miR-22, hsa-miR-22*, hsa-miR-220a, hsa-miR-220b, hsa-miR-220c, hsa-miR-221, hsa-miR-221*, hsa-miR-222, hsa-miR-222*, hsa-miR-223, hsa-miR-223*, hsa-miR-224, hsa-miR-23a, hsa-miR-23a*, hsa-miR-23b, hsa-miR-23b*, hsa-miR-24, hsa-miR-24-1*, hsa-miR-24-2*, hsa-miR-25, hsa-miR-25*, hsa-miR-26a, hsa-miR-26a-1*, hsa-miR-26a-2*, hsa-miR-26b, hsa-miR-26b*, hsa-miR-27a, hsa-miR-27a*, hsa-miR-27b, hsa-miR-27b*, hsa-miR-28-3p, hsa-miR-28-5p, hsa-miR-296-3p, hsa-miR-296-5p, hsa-miR-297, hsa-miR-298, hsa-miR-299-3p, hsa-miR-299-5p, hsa-miR-29a, hsa-miR-29a*, hsa-miR-29b, hsa-miR-29b-1*, hsa-miR-29b-2*, hsa-miR-29c, hsa-miR-29c*, hsa-miR-300, hsa-miR-301a, hsa-miR-301b, hsa-miR-302a, hsa-miR-302a*, hsa-miR-302b, hsa-miR-302b*, hsa-miR-302c, hsa-miR-302c*, hsa-miR-302d, hsa-miR-302d*, hsa-miR-302e, hsa-miR-302f, hsa-miR-30a, hsa-miR-30a*, hsa-miR-30b, hsa-miR-30b*, hsa-miR-30c, hsa-miR-30c-1*, hsa-miR-30c-2*, hsa-miR-30d, hsa-miR-30d*, hsa-miR-30e, hsa-miR-30e*, hsa-miR-31, hsa-miR-31*, hsa-miR-32, hsa-miR-32*, hsa-miR-320a, hsa-miR-320b, hsa-miR-320c, hsa-miR-320d, hsa-miR-323-3p, hsa-miR-323-5p, hsa-miR-324-3p, hsa-miR-324-5p, hsa-miR-325, hsa-miR-326, hsa-miR-328, hsa-miR-329, hsa-miR-330-3p, hsa-miR-330-5p, hsa-miR-331-3p, hsa-miR-331-5p, hsa-miR-335, hsa-miR-335*, hsa-miR-337-3p, hsa-miR-337-5p, hsa-miR-338-3p, hsa-miR-338-5p, hsa-miR-339-3p, hsa-miR-339-5p, hsa-miR-33a, hsa-miR-33a*, hsa-miR-33b, hsa-miR-33b*, hsa-miR-340, hsa-miR-340*, hsa-miR-342-3p, hsa-miR-342-5p, hsa-miR-345, hsa-miR-346, hsa-miR-34a, hsa-miR-34a*, hsa-miR-34b, hsa-miR-34b*, hsa-miR-34c-3p, hsa-miR-34c-5p, hsa-miR-361-3p, hsa-miR-361-5p, hsa-miR-362-3p, hsa-miR-362-5p, hsa-miR-363, hsa-miR-363*, hsa-miR-365, hsa-miR-367, hsa-miR-367*, hsa-miR-369-3p, hsa-miR-369-5p, hsa-miR-370, hsa-miR-371-3p, hsa-miR-371-5p, hsa-miR-372, hsa-miR-373, hsa-miR-373*, hsa-miR-374a, hsa-miR-374a*, hsa-miR-374b, hsa-miR-374b*, hsa-miR-375, hsa-miR-376a, hsa-miR-376a*, hsa-miR-376b, hsa-miR-376c, hsa-miR-377, hsa-miR-377*, hsa-miR-378, hsa-miR-378*, hsa-miR-379, hsa-miR-379*, hsa-miR-380, hsa-miR-380*, hsa-miR-381, hsa-miR-382, hsa-miR-383, hsa-miR-384, hsa-miR-409-3p, hsa-miR-409-5p, hsa-miR-410, hsa-miR-411, hsa-miR-411*, hsa-miR-412, hsa-miR-421, hsa-miR-422a, hsa-miR-423-3p, hsa-miR-423-5p, hsa-miR-424, hsa-miR-424*, hsa-miR-425, hsa-miR-425*, hsa-miR-429, hsa-miR-431, hsa-miR-431*, hsa-miR-432, hsa-miR-432*, hsa-miR-433, hsa-miR-448, hsa-miR-449a, hsa-miR-449b, hsa-miR-450a, hsa-miR-450b-3p, hsa-miR-450b-5p, hsa-miR-451, hsa-miR-452, hsa-miR-452*, hsa-miR-453, hsa-miR-454, hsa-miR-454*, hsa-miR-455-3p, hsa-miR-455-5p, hsa-miR-483-3p, hsa-miR-483-5p, hsa-miR-484, hsa-miR-485-3p, hsa-miR-485-5p, hsa-miR-486-3p, hsa-miR-486-5p, hsa-miR-487a, hsa-miR-487b, hsa-miR-488, hsa-miR-488*, hsa-miR-489, hsa-miR-490-3p, hsa-miR-490-5p, hsa-miR-491-3p, hsa-miR-491-5p, hsa-miR-492, hsa-miR-493, hsa-miR-493*, hsa-miR-494, hsa-miR-495, hsa-miR-496, hsa-miR-497, hsa-miR-497*, hsa-miR-498, hsa-miR-499-3p, hsa-miR-499-5p, hsa-miR-500, hsa-miR-500*, hsa-miR-501-3p, hsa-miR-501-5p, hsa-miR-502-3p, hsa-miR-502-5p, hsa-miR-503, hsa-miR-504, hsa-miR-505, hsa-miR-505*, hsa-miR-506, hsa-miR-507, hsa-miR-508-3p, hsa-miR-508-5p, hsa-miR-509-3-5p, hsa-miR-509-3p, hsa-miR-509-5p, hsa-miR-510, hsa-miR-511, hsa-miR-512-3p, hsa-miR-512-5p, hsa-miR-513a-3p, hsa-miR-513a-5p, hsa-miR-513b, hsa-miR-513c, hsa-miR-514, hsa-miR-515-3p, hsa-miR-515-5p, hsa-miR-516a-3p, hsa-miR-516a-5p, hsa-miR-516b, hsa-miR-517*, hsa-miR-517a, hsa-miR-517b, hsa-miR-517c, hsa-miR-518a-3p, hsa-miR-518a-5p, hsa-miR-518b, hsa-miR-518c, hsa-miR-518c*, hsa-miR-518d-3p, hsa-miR-518d-5p, hsa-miR-518e, hsa-miR-518e*, hsa-miR-518f, hsa-miR-518f*, hsa-miR-519a, hsa-miR-519b-3p, hsa-miR-519c-3p, hsa-miR-519d, hsa-miR-519e, hsa-miR-519e*, hsa-miR-520a-3p, hsa-miR-520a-5p, hsa-miR-520b, hsa-miR-520c-3p, hsa-miR-520d-3p, hsa-miR-520d-5p, hsa-miR-520e, hsa-miR-520f, hsa-miR-520g, hsa-miR-520h, hsa-miR-521, hsa-miR-522, hsa-miR-523, hsa-miR-524-3p, hsa-miR-524-5p, hsa-miR-525-3p, hsa-miR-525-5p, hsa-miR-526b, hsa-miR-526b*, hsa-miR-532-3p, hsa-miR-532-5p, hsa-miR-539, hsa-miR-541, hsa-miR-541*, hsa-miR-542-3p, hsa-miR-542-5p, hsa-miR-543, hsa-miR-544, hsa-miR-545, hsa-miR-545*, hsa-miR-548a-3p, hsa-miR-548a-5p, hsa-miR-548b-3p, hsa-miR-548b-5p, hsa-miR-548c-3p, hsa-miR-548c-5p, hsa-miR-548d-3p, hsa-miR-548d-5p, hsa-miR-548e, hsa-miR-548f, hsa-miR-548g, hsa-miR-548h, hsa-miR-548i, hsa-miR-548j, hsa-miR-548k, hsa-miR-548l, hsa-miR-548m, hsa-miR-548n, hsa-miR-548o, hsa-miR-548p, hsa-miR-549, hsa-miR-550, hsa-miR-550*, hsa-miR-551a, hsa-miR-551b, hsa-miR-551b*, hsa-miR-552, hsa-miR-553, hsa-miR-554, hsa-miR-555, hsa-miR-556-3p, hsa-miR-556-5p, hsa-miR-557, hsa-miR-558, hsa-miR-559, hsa-miR-561, hsa-miR-562, hsa-miR-563, hsa-miR-564, hsa-miR-566, hsa-miR-567, hsa-miR-568, hsa-miR-569, hsa-miR-570, hsa-miR-571, hsa-miR-572, hsa-miR-573, hsa-miR-574-3p, hsa-miR-574-5p, hsa-miR-575, hsa-miR-576-3p, hsa-miR-576-5p, hsa-miR-577, hsa-miR-578, hsa-miR-579, hsa-miR-580, hsa-miR-581, hsa-miR-582-3p, hsa-miR-582-5p, hsa-miR-583, hsa-miR-584, hsa-miR-585, hsa-miR-586, hsa-miR-587, hsa-miR-588, hsa-miR-589, hsa-miR-589*, hsa-miR-590-3p, hsa-miR-590-5p, hsa-miR-591, hsa-miR-592, hsa-miR-593, hsa-miR-593*, hsa-miR-595, hsa-miR-596, hsa-miR-597, hsa-miR-598, hsa-miR-599, hsa-miR-600, hsa-miR-601, hsa-miR-602, hsa-miR-603, hsa-miR-604, hsa-miR-605, hsa-miR-606, hsa-miR-607, hsa-miR-608, hsa-miR-609, hsa-miR-610, hsa-miR-611, hsa-miR-612, hsa-miR-613, hsa-miR-614, hsa-miR-615-3p, hsa-miR-615-5p, hsa-miR-616, hsa-miR-616*, hsa-miR-617, hsa-miR-618, hsa-miR-619, hsa-miR-620, hsa-miR-621, hsa-miR-622, hsa-miR-623, hsa-miR-624, hsa-miR-624*, hsa-miR-625, hsa-miR-625*, hsa-miR-626, hsa-miR-627, hsa-miR-628-3p, hsa-miR-628-5p, hsa-miR-629, hsa-miR-629*, hsa-miR-630, hsa-miR-631, hsa-miR-632, hsa-miR-633, hsa-miR-634, hsa-miR-635, hsa-miR-636, hsa-miR-637, hsa-miR-638, hsa-miR-639, hsa-miR-640, hsa-miR-641, hsa-miR-642, hsa-miR-643, hsa-miR-644, hsa-miR-645, hsa-miR-646, hsa-miR-647, hsa-miR-648, hsa-miR-649, hsa-miR-650, hsa-miR-651, hsa-miR-652, hsa-miR-653, hsa-miR-654-3p, hsa-miR-654-5p, hsa-miR-655, hsa-miR-656, hsa-miR-657, hsa-miR-658, hsa-miR-659, hsa-miR-660, hsa-miR-661, hsa-miR-662, hsa-miR-663, hsa-miR-663b, hsa-miR-664, hsa-miR-664*, hsa-miR-665, hsa-miR-668, hsa-miR-671-3p, hsa-miR-671-5p, hsa-miR-675, hsa-miR-7, hsa-miR-708, hsa-miR-708*, hsa-miR-7-1*, hsa-miR-7-2*, hsa-miR-720, hsa-miR-744, hsa-miR-744*, hsa-miR-758, hsa-miR-760, hsa-miR-765, hsa-miR-766, hsa-miR-767-3p, hsa-miR-767-5p, hsa-miR-768-3p, hsa-miR-768-5p, hsa-miR-769-3p, hsa-miR-769-5p, hsa-miR-770-5p, hsa-miR-802, hsa-miR-873, hsa-miR-874, hsa-miR-875-3p, hsa-miR-875-5p, hsa-miR-876-3p, hsa-miR-876-5p, hsa-miR-877, hsa-miR-877*, hsa-miR-885-3p, hsa-miR-885-5p, hsa-miR-886-3p, hsa-miR-886-5p, hsa-miR-887, hsa-miR-888, hsa-miR-888*, hsa-miR-889, hsa-miR-890, hsa-miR-891a, hsa-miR-891b, hsa-miR-892a, hsa-miR-892b, hsa-miR-9, hsa-miR-9*, hsa-miR-920, hsa-miR-921, hsa-miR-922, hsa-miR-923, hsa-miR-924, hsa-miR-92a, hsa-miR-92a-1*, hsa-miR-92a-2*, hsa-miR-92b, hsa-miR-92b*, hsa-miR-93, hsa-miR-93*, hsa-miR-933, hsa-miR-934, hsa-miR-935, hsa-miR-936, hsa-miR-937, hsa-miR-938, hsa-miR-939, hsa-miR-940, hsa-miR-941, hsa-miR-942, hsa-miR-943, hsa-miR-944, hsa-miR-95, hsa-miR-96, hsa-miR-96*, hsa-miR-98, hsa-miR-99a, hsa-miR-99a*, hsa-miR-99b, and hsa-miR-99b*.

[0166] A miRNA inhibits the function of the mRNAs it targets and, as a result, inhibits expression of the polypeptides encoded by the mRNAs. Thus, blocking (partially or totally) the activity of the miRNA (e.g., silencing the miRNA) can effectively induce, or restore, expression of a polypeptide whose expression is inhibited (derepress the polypeptide). In one embodiment, derepression of polypeptides encoded by mRNA targets of a miRNA is accomplished by inhibiting the miRNA activity in cells through any one of a variety of methods. For example, blocking the activity of a miRNA can be accomplished by hybridization with a small interfering nucleic acid (e.g., antisense oligonucleotide, miRNA sponge, TuD RNA) that is complementary, or substantially complementary to, the miRNA, thereby blocking interaction of the miRNA with its target mRNA. As used herein, an small interfering nucleic acid that is substantially complementary to a miRNA is one that is capable of hybridizing with a miRNA, and blocking the miRNA's activity. In some embodiments, a small interfering nucleic acid that is substantially complementary to a miRNA is a small interfering nucleic acid that is complementary to the miRNA at all but 1, 2, 3, 4, 5, 6, 7, 8, 9, 10, 11, 12, 13, 14, 15, 16, 17, or 18 bases. In some embodiments, a small interfering nucleic acid sequence that is substantially complementary to a miRNA, or is a small interfering nucleic acid sequence that is complementary to the miRNA with at least one base.

[0167] A “miRNA Inhibitor” is an agent that blocks miRNA function, expression and/or processing. For instance, these molecules include but are not limited to microRNA specific antisense, microRNA sponges, tough decoy RNAs (TuD RNAs) and microRNA oligonucleotides (double-stranded, hairpin, short oligonucleotides) that inhibit miRNA interaction with a Drosha complex. MicroRNA inhibitors can be expressed in cells from a transgenes of a rAAV vector, as discussed above. MicroRNA sponges specifically inhibit miRNAs through a complementary heptameric seed sequence (Ebert, M. S. Nature Methods, Epub Aug. 12, 2007). In some embodiments, an entire family of miRNAs can be silenced using a single sponge sequence. TuD RNAs achieve efficient and long-term-suppression of specific miRNAs in mammalian cells (See, e.g., Takeshi Haraguchi, et al., Nucleic Acids Research, 2009, Vol. 37, No. 6 e43, the contents of which relating to TuD RNAs are incorporated herein by reference). Other methods for silencing miRNA function (derepression of miRNA targets) in cells will be apparent to one of ordinary skill in the art.

[0168] In some embodiments, the cloning capacity of the recombinant RNA vector may limit a desired coding sequence and may require the complete replacement of the virus's 4.8 kilobase genome. Large genes may, therefore, not be suitable for use in a standard recombinant AAV vector, in some cases. The skilled artisan will appreciate that options are available in the art for overcoming a limited coding capacity. For example, the AAV ITRs of two genomes can anneal to form head to tail concatamers, almost doubling the capacity of the vector. Insertion of splice sites allows for the removal of the ITRs from the transcript. Other options for overcoming a limited cloning capacity will be apparent to the skilled artisan.

Somatic Transgenic Animal Models Produced Using rAAV-Based Gene Transfer

[0169] The disclosure also relates to the production of somatic transgenic animal models of disease using recombinant Adeno-Associated Virus (rAAV) based methods. The methods are based, at least in part, on the observation that AAV serotypes and variants thereof mediate efficient and stable gene transfer in a tissue specific manner in adult animals. The rAAV elements (capsid, promoter, transgene products) are combined to achieve somatic transgenic animal models that express a stable transgene in a time and tissue specific manner. The somatic transgenic animal produced by the methods of the disclosure can serve as useful models of human disease, pathological state, and/or to characterize the effects of gene for which the function (e.g., tissue specific, disease role) is unknown or not fully understood. For example, an animal (e.g., mouse) can be infected at a distinct developmental stage (e.g., age) with a rAAV comprising a capsid having a specific tissue targeting capability (e.g., liver, heart, pancreas) and a transgene having a tissue specific promoter driving expression of a gene involved in disease. Upon infection, the rAAV infects distinct cells of the target tissue and produces the product of the transgene.

[0170] In some embodiments, the sequence of the coding region of a transgene is modified. The modification may alter the function of the product encoded by the transgene. The effect of the modification can then be studied in vivo by generating a somatic transgenic animal model using the methods disclosed herein. In some embodiments, modification of the sequence of coding region is a nonsense mutation that results in a fragment (e.g., a truncated version). In other cases, the modification is a mis sense mutation that results in an amino acid substitution. Other modifications are possible and will be apparent to the skilled artisan.

[0171] In some embodiments, the transgene causes a pathological state. A transgene that causes a pathological state is a gene whose product has a role in a disease or disorder (e.g., causes the disease or disorder, makes the animal susceptible to the disease or disorder) and/or may induce the disease or disorder in the animal. The animal can then be observed to evaluate any number of aspects of the disease (e.g., progression, response to treatment, etc.). These examples are not meant to be limiting, other aspects and examples are disclosed herein and described in more detail below.

[0172] The disclosure in some aspects, provide methods for producing somatic transgenic animal models through the targeted destruction of specific cell types. For example, models of type 1 diabetes can be produced by the targeted destruction of pancreatic Beta-islets. In other examples, the targeted destruction of specific cell types can be used to evaluate the role of specific cell types on human disease. In this regard, transgenes that encode cellular toxins (e.g., diphtheria toxin A (DTA)) or pro-apoptotic genes (NTR, Box, etc.) can be useful as transgenes for functional ablation of specific cell types. Other exemplary transgenes, whose products kill cells are embraced by the methods disclosed herein and will be apparent to one of ordinary skill in the art.

[0173] The disclosure, in some aspects, provides methods for producing somatic transgenic animal models to study the long-term effects of over-expression or knockdown of genes. The long term over expression or knockdown (e.g., by shRNA, miRNA, miRNA inhibitor, etc.) of genes in specific target tissues can disturb normal metabolic balance and establish a pathological state, thereby producing an animal model of a disease, such as, for example, cancer. The disclosure in some aspects, provides methods for producing somatic transgenic animal models to study the long-term effects of over-expression or knockdown of gene of potential oncogenes and other genes to study tumorigenesis and gene function in the targeted tissues. Useful transgene products include proteins that are known to be associated with cancer and small interfering nucleic acids inhibiting the expression of such proteins. Other suitable transgenes may be readily selected by one of skill in the art provided that they are useful for creating animal models of tissue-specific pathological state and/or disease.

### Recombinant AAV Administration Methods

[0174] The rAAVs may be delivered to a subject in compositions according to any appropriate methods known in the art. The rAAV, preferably suspended in a physiologically compatible carrier (e.g., in a composition), may be administered to a subject, e.g., host animal, such as a human, mouse, rat, cat, dog, sheep, rabbit, horse, cow, goat, pig, guinea pig, hamster, chicken, turkey, or a non-human primate (e.g., Macaque). In some embodiments a host animal does not include a human.

[0175] Delivery of the rAAVs to a mammalian subject may be by, for example, intramuscular injection or by administration into the bloodstream of the mammalian subject. Administration into the bloodstream may be by injection into a vein, an artery, or any other vascular conduit. In some embodiments, the rAAVs are administered into the bloodstream by way of isolated limb perfusion, a technique well known in the surgical arts, the method essentially enabling the artisan to isolate a limb from the systemic circulation prior to administration of the rAAV virions. A variant of the isolated limb perfusion technique, described in U.S. Pat. No. 6,177,403, can also be employed by the skilled artisan to administer the virions into the vasculature of an isolated limb to potentially enhance transduction into muscle cells or tissue. Moreover, in certain instances, it may be desirable to deliver the virions to the CNS of a subject. By “CNS” is meant all cells and tissue of the brain and spinal cord of a vertebrate. Thus, the term includes, but is not limited to, neuronal cells, glial cells, astrocytes, cereobrospinal fluid (CSF), interstitial spaces, bone, cartilage and the like. Recombinant AAVs may be delivered directly to the CNS or brain by injection into, e.g., the ventricular region, as well as to the striatum (e.g., the caudate nucleus or putamen of the striatum), spinal cord and neuromuscular junction, or cerebellar lobule, with a needle, catheter or related device, using neurosurgical techniques known in the art, such as by stereotactic injection (see, e.g., Stein et al., J Virol 73:3424-3429, 1999; Davidson et al., PNAS 97:3428-3432, 2000; Davidson et al., Nat. Genet. 3:219-223, 1993; and Alisky and Davidson, Hum. Gene Ther. 11:2315-2329, 2000).

[0176] The compositions of the disclosure may comprise an rAAV alone, or in combination with one or more other viruses (e.g., a second rAAV encoding having one or more different transgenes). In some embodiments, a composition comprises 1, 2, 3, 4, 5, 6, 7, 8, 9, 10, or more different rAAVs each having one or more different transgenes.

[0177] Suitable carriers may be readily selected by one of skill in the art in view of the indication for which the rAAV is directed. For example, one suitable carrier includes saline, which may be formulated with a variety of buffering solutions (e.g., phosphate buffered saline). Other exemplary carriers include sterile saline, lactose, sucrose, calcium phosphate, gelatin, dextran, agar, pectin, peanut oil, sesame oil, and water. The selection of the carrier is not a limitation of the present disclosure.

[0178] Optionally, the compositions of the disclosure may contain, in addition to the rAAV and carrier(s), other conventional pharmaceutical ingredients, such as preservatives, or chemical stabilizers. Suitable exemplary preservatives include chlorobutanol, potassium sorbate, sorbic acid, sulfur dioxide, propyl gallate, the parabens, ethyl vanillin, glycerin, phenol, and parachlorophenol. Suitable chemical stabilizers include gelatin and albumin.

[0179] The rAAVs are administered in sufficient amounts to transfect the cells of a desired tissue and to provide sufficient levels of gene transfer and expression without undue adverse effects. Conventional and pharmaceutically acceptable routes of administration include, but are not limited to, direct delivery to the selected organ (e.g., intraportal delivery to the liver), oral, inhalation (including intranasal and intratracheal delivery), intraocular, intravenous, intramuscular, subcutaneous, intradermal, intratumoral, and other parental routes of administration. Routes of administration may be combined, if desired.

[0180] The dose of rAAV virions required to achieve a particular “therapeutic effect,” e.g., the units of dose in genome copies/per kilogram of body weight (GC/kg), will vary based on several factors including, but not limited to: the route of rAAV virion administration, the level of gene or RNA expression required to achieve a therapeutic effect, the specific disease or disorder being treated, and the stability of the gene or RNA product. One of skill in the art can readily determine a rAAV virion dose range to treat a patient having a particular disease or disorder based on the aforementioned factors, as well as other factors that are well known in the art.

[0181] An effective amount of an rAAV is an amount sufficient to target infect an animal, target a desired tissue. In some embodiments, an effective amount of an rAAV is an amount sufficient to produce a stable somatic transgenic animal model. The effective amount will depend primarily on factors such as the species, age, weight, health of the subject, and the tissue to be targeted, and may thus vary between animals or tissues. For example, an effective amount of the rAAV is generally in the range of from about 1 ml to about 100 ml of solution containing from about 10⁹ to 10¹⁶ genome copies. In some embodiments the rAAV is administered at a dose of 10¹⁰, 10¹¹, 10¹², 10¹³, 10¹⁴, or 10¹⁵ genome copies per subject. In some embodiments the rAAV is administered at a dose of 10¹⁰, 10¹¹, 10¹², 10¹³, or 10¹⁴ genome copies per kg. In some cases, a dosage between about 10¹¹ to 10¹² rAAV genome copies is appropriate. In certain embodiments, 10¹² rAAV genome copies is effective to target heart, liver, and pancreas tissues. In some cases, stable transgenic animals are produced by multiple doses of an rAAV.

[0182] In some embodiments, rAAV compositions are formulated to reduce aggregation of AAV particles in the composition, particularly where high rAAV concentrations are present (e.g., ˜10¹³ GC/ml or more). Methods for reducing aggregation of rAAVs are well-known in the art and, include, for example, addition of surfactants, pH adjustment, salt concentration adjustment, etc. (See, e.g., Wright F R, et al., Molecular Therapy (2005) 12, 171-178, the contents of which are incorporated herein by reference.)

[0183] Formulation of pharmaceutically-acceptable excipients and carrier solutions is well-known to those of skill in the art, as is the development of suitable dosing and treatment regimens for using the particular compositions described herein in a variety of treatment regimens.

[0184] Typically, these formulations may contain at least about 0.1% of the active compound or more, although the percentage of the active ingredient(s) may, of course, be varied and may conveniently be between about 1 or 2% and about 70% or 80% or more of the weight or volume of the total formulation. Naturally, the amount of active compound in each therapeutically useful composition may be prepared is such a way that a suitable dosage will be obtained in any given unit dose of the compound. Factors such as solubility, bioavailability, biological half-life, route of administration, product shelf life, as well as other pharmacological considerations will be contemplated by one skilled in the art of preparing such pharmaceutical formulations, and as such, a variety of dosages and treatment regimens may be desirable.

[0185] In certain circumstances it will be desirable to deliver the rAAV-based therapeutic constructs in suitably formulated pharmaceutical compositions disclosed herein either subcutaneously, intraopancreatically, intranasally, parenterally, intravenously, intramuscularly, intrathecally, or orally, intraperitoneally, or by inhalation. In some embodiments, the administration modalities as described in U.S. Pat. Nos. 5,543,158; 5,641,515 and 5,399,363 (each specifically incorporated herein by reference in its entirety) may be used to deliver rAAVs. In some embodiments, a preferred mode of administration is by portal vein injection.

[0186] The pharmaceutical forms suitable for injectable use include sterile aqueous solutions or dispersions and sterile powders for the extemporaneous preparation of sterile injectable solutions or dispersions. Dispersions may also be prepared in glycerol, liquid polyethylene glycols, and mixtures thereof and in oils. Under ordinary conditions of storage and use, these preparations contain a preservative to prevent the growth of microorganisms. In many cases the form is sterile and fluid to the extent that easy syringability exists. It must be stable under the conditions of manufacture and storage and must be preserved against the contaminating action of microorganisms, such as bacteria and fungi. The carrier can be a solvent or dispersion medium containing, for example, water, ethanol, polyol (e.g., glycerol, propylene glycol, and liquid polyethylene glycol, and the like), suitable mixtures thereof, and/or vegetable oils. Proper fluidity may be maintained, for example, by the use of a coating, such as lecithin, by the maintenance of the required particle size in the case of dispersion and by the use of surfactants. The prevention of the action of microorganisms can be brought about by various antibacterial and antifungal agents, for example, parabens, chlorobutanol, phenol, sorbic acid, thimerosal, and the like. In many cases, it will be preferable to include isotonic agents, for example, sugars or sodium chloride. Prolonged absorption of the injectable compositions can be brought about by the use in the compositions of agents delaying absorption, for example, aluminum monostearate and gelatin.

[0187] For administration of an injectable aqueous solution, for example, the solution may be suitably buffered, if necessary, and the liquid diluent first rendered isotonic with sufficient saline or glucose. These particular aqueous solutions are especially suitable for intravenous, intramuscular, subcutaneous and intraperitoneal administration. In this connection, a sterile aqueous medium that can be employed will be known to those of skill in the art. For example, one dosage may be dissolved in 1 ml of isotonic NaCl solution and either added to 1000 ml of hypodermoclysis fluid or injected at the proposed site of infusion, (see for example, “Remington's Pharmaceutical Sciences” 15th Edition, pages 1035-1038 and 1570-1580). Some variation in dosage will necessarily occur depending on the condition of the host. The person responsible for administration will, in any event, determine the appropriate dose for the individual host.

[0188] Sterile injectable solutions are prepared by incorporating the active rAAV in the required amount in the appropriate solvent with various other ingredients enumerated herein, as required, followed by filtered sterilization. Generally, dispersions are prepared by incorporating the various sterilized active ingredients into a sterile vehicle which contains the basic dispersion medium and the required other ingredients from those enumerated above. In the case of sterile powders for the preparation of sterile injectable solutions, the preferred methods of preparation are vacuum-drying and freeze-drying techniques which yield a powder of the active ingredient plus any additional desired ingredient from a previously sterile-filtered solution thereof.

[0189] The rAAV compositions disclosed herein may also be formulated in a neutral or salt form. Pharmaceutically acceptable salts, include the acid addition salts (formed with the free amino groups of the protein) and which are formed with inorganic acids such as, for example, hydrochloric or phosphoric acids, or such organic acids as acetic, oxalic, tartaric, mandelic, and the like. Salts formed with the free carboxyl groups can also be derived from inorganic bases such as, for example, sodium, potassium, ammonium, calcium, or ferric hydroxides, and such organic bases as isopropylamine, trimethylamine, histidine, procaine and the like. Upon formulation, solutions will be administered in a manner compatible with the dosage formulation and in such amount as is therapeutically effective. The formulations are easily administered in a variety of dosage forms such as injectable solutions, drug-release capsules, and the like.

[0190] As used herein, “carrier” includes any and all solvents, dispersion media, vehicles, coatings, diluents, antibacterial and antifungal agents, isotonic and absorption delaying agents, buffers, carrier solutions, suspensions, colloids, and the like. The use of such media and agents for pharmaceutical active substances is well known in the art. Supplementary active ingredients can also be incorporated into the compositions. The phrase “pharmaceutically-acceptable” refers to molecular entities and compositions that do not produce an allergic or similar untoward reaction when administered to a host.

[0191] Delivery vehicles such as liposomes, nanocapsules, microparticles, microspheres, lipid particles, vesicles, and the like, may be used for the introduction of the compositions of the present disclosure into suitable host cells. In particular, the rAAV vector delivered trangenes may be formulated for delivery either encapsulated in a lipid particle, a liposome, a vesicle, a nanosphere, or a nanoparticle or the like.

[0192] Such formulations may be preferred for the introduction of pharmaceutically acceptable formulations of the nucleic acids or the rAAV constructs disclosed herein. The formation and use of liposomes is generally known to those of skill in the art. Recently, liposomes were developed with improved serum stability and circulation half-times (U.S. Pat. No. 5,741,516). Further, various methods of liposome and liposome like preparations as potential drug carriers have been described (U.S. Pat. Nos. 5,567,434; 5,552,157; 5,565,213; 5,738,868 and 5,795,587).

[0193] Liposomes have been used successfully with a number of cell types that are normally resistant to transfection by other procedures. In addition, liposomes are free of the DNA length constraints that are typical of viral-based delivery systems. Liposomes have been used effectively to introduce genes, drugs, radiotherapeutic agents, viruses, transcription factors and allosteric effectors into a variety of cultured cell lines and animals. In addition, several successful clinical trials examining the effectiveness of liposome-mediated drug delivery have been completed.

[0194] Liposomes are formed from phospholipids that are dispersed in an aqueous medium and spontaneously form multilamellar concentric bilayer vesicles (also termed multilamellar vesicles (MLVs). MLVs generally have diameters of from 25 nm to 4 μm. Sonication of MLVs results in the formation of small unilamellar vesicles (SUVs) with diameters in the range of 200 to 500.ANG., containing an aqueous solution in the core.

[0195] Alternatively, nanocapsule formulations of the rAAV may be used. Nanocapsules can generally entrap substances in a stable and reproducible way. To avoid side effects due to intracellular polymeric overloading, such ultrafine particles (sized around 0.1 μm) should be designed using polymers able to be degraded in vivo. Biodegradable polyalkyl-cyanoacrylate nanoparticles that meet these requirements are contemplated for use.

[0196] In addition to the methods of delivery described above, the following techniques are also contemplated as alternative methods of delivering the rAAV compositions to a host. Sonophoresis (i.e., ultrasound) has been used and described in U.S. Pat. No. 5,656,016 as a device for enhancing the rate and efficacy of drug permeation into and through the circulatory system. Other drug delivery alternatives contemplated are intraosseous injection (U.S. Pat. No. 5,779,708), microchip devices (U.S. Pat. No. 5,797,898), ophthalmic formulations (Bourlais et al., 1998), transdermal matrices (U.S. Pat. Nos. 5,770,219 and 5,783,208) and feedback-controlled delivery (U.S. Pat. No. 5,697,899).

### Kits and Related Compositions

[0197] The agents described herein may, in some embodiments, be assembled into pharmaceutical or diagnostic or research kits to facilitate their use in therapeutic, diagnostic or research applications. A kit may include one or more containers housing the components of the disclosure and instructions for use. Specifically, such kits may include one or more agents described herein, along with instructions describing the intended application and the proper use of these agents. In certain embodiments agents in a kit may be in a pharmaceutical formulation and dosage suitable for a particular application and for a method of administration of the agents. Kits for research purposes may contain the components in appropriate concentrations or quantities for running various experiments.

[0198] The kit may be designed to facilitate use of the methods described herein by researchers and can take many forms. Each of the compositions of the kit, where applicable, may be provided in liquid form (e.g., in solution), or in solid form, (e.g., a dry powder). In certain cases, some of the compositions may be constitutable or otherwise proces sable (e.g., to an active form), for example, by the addition of a suitable solvent or other species (for example, water or a cell culture medium), which may or may not be provided with the kit. As used herein, “instructions” can define a component of instruction and/or promotion, and typically involve written instructions on or associated with packaging of the disclosure. Instructions also can include any oral or electronic instructions provided in any manner such that a user will clearly recognize that the instructions are to be associated with the kit, for example, audiovisual (e.g., videotape, DVD, etc.), Internet, and/or web-based communications, etc. The written instructions may be in a form prescribed by a governmental agency regulating the manufacture, use or sale of pharmaceuticals or biological products, which instructions can also reflects approval by the agency of manufacture, use or sale for animal administration.

[0199] The kit may contain any one or more of the components described herein in one or more containers. As an example, in one embodiment, the kit may include instructions for mixing one or more components of the kit and/or isolating and mixing a sample and applying to a subject. The kit may include a container housing agents described herein. The agents may be in the form of a liquid, gel or solid (powder). The agents may be prepared sterilely, packaged in syringe and shipped refrigerated. Alternatively it may be housed in a vial or other container for storage. A second container may have other agents prepared sterilely. Alternatively the kit may include the active agents premixed and shipped in a syringe, vial, tube, or other container. The kit may have one or more or all of the components required to administer the agents to an animal, such as a syringe, topical application devices, or iv needle tubing and bag, particularly in the case of the kits for producing specific somatic animal models.

[0200] The kit may have a variety of forms, such as a blister pouch, a shrink wrapped pouch, a vacuum sealable pouch, a sealable thermoformed tray, or a similar pouch or tray form, with the accessories loosely packed within the pouch, one or more tubes, containers, a box or a bag. The kit may be sterilized after the accessories are added, thereby allowing the individual accessories in the container to be otherwise unwrapped. The kits can be sterilized using any appropriate sterilization techniques, such as radiation sterilization, heat sterilization, or other sterilization methods known in the art. The kit may also include other components, depending on the specific application, for example, containers, cell media, salts, buffers, reagents, syringes, needles, a fabric, such as gauze, for applying or removing a disinfecting agent, disposable gloves, a support for the agents prior to administration etc.

[0201] The instructions included within the kit may involve methods for detecting a latent AAV in a cell. In addition, kits of the disclosure may include, instructions, a negative and/or positive control, containers, diluents and buffers for the sample, sample preparation tubes and a printed or electronic table of reference AAV sequence for sequence comparisons.

### EXAMPLES

### Example 1: Isolation of Transcriptionally Active, Novel AAV Capsid Sequences with Desired Tissue Tropisms and Properties from Human Tissues

[0202] This example describes novel AAV capsid sequences isolated by the following steps: 1) PCR amplification of wtAAV genomes present in normal and diseased human tissues; 2) high-throughput single-molecule, real-time (SMRT) sequencing of PCR amplicon libraries; 3) variant identification/profiling by bioinformatic analyses; and 4) the selection of high-confidence ORFs that can be translated into full length capsid proteins. Schematic depictions of workflows used in this example are shown in FIGS. 1A-1B.

[0203] This approach exploits the natural pool of genomic diversity observed among viral genomes isolated from both normal and tumor tissues. Conceptually, in vivo tissues act as natural incubators for viral genomic diversity through selective pressure and/or immune evasion. Thus, the discovery of inter- and intra-tissue variability, as well as inter-patient diversity benefit from methods that are able to profile the full spectrum of AAV variants found among tissues and organs of human origin.

PCR Amplification of AAV Genomes from Human Tissues.

[0204] To isolate diverse AAV variants with the potential for identifying new serotypes with unique tropisms, 844 human surgical specimens from 455 patients were collected from West China Hospital, Sichuan University, Chengdu, China. These tissues encompass a wide-range of tissue/organ types, as well as various tumors types (Table 1). In particular, AAV variants were identified from nine normal liver tissues, 7 liver tumors, four enlarged prostate tissues, two normal lung tissues, one pancreatic tumor tissue, one breast cancer tissue, one normal breast tissue, one gastric cancer tissue, one normal gastric tissue, one brain tissue and one glioma sample.

[0205] Total genomic DNA was extracted from human tissues and subjected to PCR amplification of AAV capsid sequence. PCR primers used in this example are described in Table 2. Briefly, either panAAV primers for the amplification of 4.1-kb AAV rep-cap sequence (e.g., RepF318, AV2cas), or panAAV primers for amplification of 2.3-kb AAV cap sequence (e.g., CapF, CapR) were used for PCR.

TABLE 1
Clinical specimens for wtAAV genome amplification

| | Tissue quantity | |
|---|---|---|
| Organ | Normal tissue | Tumor tissue |
| Liver | 100 | 101 |
| Brain | 4 | 50 |
| Gastric | 37 | 37 |
| Lung | 100 | 100 |
| Breast | 52 | 57 |
| Pancreatic | NA | 45 |
| Rectal | 50 | 50 |
| Prostate | 34 | NA |
| Urologic | 3 | 12 |
| Cervical | 2 | 10 |
| Sum | 378 | 466 |

TABLE 2
PCR primer sequences

| Primer | Sequence (5′-3′) | SEQ ID NO: |
|---|---|---|
| RepF318 | GCCATGCCGGGGTTCTACGAGAT | 872 |
| AV2cas | ACAGGAGACCAAAGTTCAACTGAAACGA | 873 |
| CapF | GACTGCATCTTTGAACAATAAATGA | 874 |
| CapR | GAAACGAATTAACCGGTTTATTGATTAA | 875 |

### High-Throughput Sequencing of AAV PCR Products and Bioinformatics Analysis

[0206] AAV PCR products were subjected to high-throughput single-molecule, real-time (SMRT) sequencing. This approach removes the need to perform viral genome reconstruction and chimera prediction from aligned short-read fragments obtained from other conventional high-throughput genome sequencing methodologies.

[0207] Using variant analysis pipelines developed from open source bioinformatic tools more than 600 previously undescribed, high-confidence AAV2, AAV2/3 hybrid, and AAV8 capsid sequence variants were identified. Specifically, 224 AAV8 variants (harboring 1 to 10 single amino acid variants); 425 AAV2 variants (harboring 1 to 20 single amino acid variants); and 194 AAV2/3 hybrid variants (harboring 10 to 50 single amino acid variants) were identified. Tables 3, 4 and 5 summarize the unique capsid protein variants. For purposes of comparison, wild-type AAV2, AAV3, and AAV8 capsid amino acid sequences are described in SEQ ID NOs: 869, 870, and 871, respectively. FIG. 7 is a scatter plot displaying the distribution of distinct AAV2 capsid variants and AAV2/3 variants harboring one or more single-amino-acid variants.

TABLE 3
Unique AAV2 and AAV2/3 hybrid variants (amino acid sequences)
identified by SMRT sequencing and bioinformatics analyses.

| | | | | | Total |
|---|---|---|---|---|---|
| Unique AAV2 variants | | | Unique | | unique |
| | Patient | Size of | variants | | variants |
| Sample Source | No. | DNA (kb) | (a.a.) | SEQ ID NOs: | (a.a.) |
| Liver | 7927N | 2.3 kb | 85 | 325-409 | 409 |
| Liver Tumor | 37HCC | (cap) | 3 | 322-324 | |
| Breast | 18B | | 26 | 118-143 | |
| Breast cancer | 19B | | 21 | 211-231 | |
| Lung | 18L | | 55 | 144-198 | |
| Prostate | 5 | | 24 | 1-24 | |
| | 17 | | 12 | 106-117 | |
| | 18 | | 12 | 199-210 | |
| | 27 | | 90 | 232-321 | |
| Pancreatic | 10 | | 81 | 25-105 | |
| cancer | | | | | |
| Liver | 1178N | 4.1 kb | 4 | 410-414; | 16 |
| | | (rep + cap) | | 837-840 | |
| | 9955N | | 3 | 429-434; | |
| | | | | 850-852 | |
| Liver tumor | 9955C | | 9 | 415-428; | |
| | | | | 841-849 | |
| | | | | | Total |
| Unique AAV2/3 variants | | | Unique | | unique |
| | Patient | variants | variants | | variants |
| Sample Source | No. | (a.a.) | (a.a.) | | (a.a.) |
| Liver | 42 | 2.3 kb | 6 | 512-517 | 194 |
| | 74 | (cap) | 11 | 543-553 | |
| Liver Tumor | 37HCC | | 6 | 506-511 | |
| | 65 | | 4 | 539-542 | |
| | 7449C | | 15 | 554-568 | |
| Breast | 18B | | 23 | 435-457 | |
| Breast cancer | 19B | | 44 | 462-505 | |
| Prostate | 5 | | 60 | 569-628 | |
| | 17 | | | | |
| | 18 | | 4 | 458-461 | |
| Gastric cancer | 17G | | N/A (420 | — | |
| | | | in DNA) | | |
| Gastric | 50G | | 21 | 518-538 | |

DNA sequences are provided for 4.1 kb libraries.

TABLE 4
Unique AAV8 variants (amino acid sequences) identified by SMRT
sequencing and bioinformatics analyses.

| | | | | | Total |
|---|---|---|---|---|---|
| | | | Unique | | unique |
| Sample | | Size of | variants | | variants |
| Source | Patient No. | DNA(kb) | (a.a.) | SEQ ID NOs: | (a.a.) |
| Liver | 0067N | 2.3kb(cap) | 12 | 647-658 | 208 |
| | 3522N | | 73 | 674-746 | |
| | 5110N | | 3 | 747-749 | |
| | 7427N | | 6 | 750-755 | |
| Liver Tumor | 0067C | | 9 | 638-646 | |
| | 7803C | | 9 | 756-764 | |
| | 8818C | | 63 | 765-827 | |
| Brain | G5 | | 9 | 828-836 | |
| Glioma | 2236 | | 14 | 659-672 | |
| Lung | 24 | | 10 | 629-637; 673 | |

TABLE 5
Additional AAV8 variant capsid proteins

| AAV8 Variant Name | SEQ ID NO: |
|---|---|
| B1 | 853 |
| B2 | 854 |
| B3 | 855 |
| B4 | 856 |
| B12 | 857 |
| B18 | 858 |
| B24 | 859 |
| B41 | 860 |
| B44 | 861 |
| B45 | 862 |
| B46 | 863 |
| B60 | 864 |
| B61 | 865 |
| B62 | 866 |
| B63 | 867 |
| B64 | 868 |

### Example 2: Identification of AAV8 Variants with Improved In Vivo Tropism

[0208] A subset of candidate AAV8 variants (e.g., B2, B3, B44 and B61) were cloned into AAV packaging vectors by standard molecular cloning methods, and packaged with luciferase reporter genes driven by the CB6 promoter. Produced vectors were injected into mice and in vivo levels of luciferase transgene expression were analyzed by whole animal imaging and quantification of relative luminescence. It was observed that the B2 (SEQ ID NO: 854) and B3 (SEQ ID NO: 855) variants have higher expression in liver after intramuscular injection (FIGS. 2A-2D), while after IV injection in neonatal mice, the B61 (SEQ ID NO: 865) variant has higher transduction efficiencies in brain and spinal cord compared to AAV9 (FIGS. 3A-3B). This is notable since wild-type AAV8 has been observed to cross the blood brain barrier less than AAV9. One AAV8 variant, B44 (SEQ ID NO: 861) has better ability transduced to liver after IM injection compared to AAV8 (FIGS. 4A-4B).

[0209] Phylogenic analysis was performed to compare AAV8 capsid variants B2, B3, B44, and B61 to other AAV serotypes. Briefly, amino acid sequences of AAV8 variants were aligned with other published AAV sequences using ClustalW and Phylogenetic trees were inferred using the Minimum Evolution method in MEGA6.06. Results of the bioinformatics analysis indicate that B2, B3, B44, and B61 sequences are related to Clade E [AAV8] capsid proteins. FIG. 5. Representative amino acid substitutions in AAV8 variants are shown in Table 6.

TABLE 6
Representative amino acid substitutions in AAV8 variants relative to
wild-type AAV8

| AAV Variant | Representative Substitutions (relative to wt AAV8) |
|---|---|
| B2 | E63G |
| B3 | K259R |
| B44 | L91Q, T234A, M374T |
| B61 | M374T, M561V |

### Example 3: In Vitro Assessment of rAAV Genome Packaging Efficiency and Initial Characterization of Candidate Capsid Variants

### Molecular Cloning of Packaging Plasmid Constructs Containing Selected AAV Capsid Variants

[0210] AAV2 and AAV2/3 hybrid capsid variants identified by SMRT sequencing are cloned into packaging plasmids by replacing the conventional viral capsid genes using standard molecular cloning strategies (e.g., site-directed mutagenesis of parental AAV2 or AAV2/3 capsid expression plasmids, PCR-based cloning and Gibson Assembly, or synthesized by outsourcing). FIG. 8 shows vector constructs to be used in multiplexed screening of discovered capsid variants. A summary of the proposed transgene cassettes to be used for various diagnostic strategies is shown in Table 7.

TABLE 7
Transgene cassettes for various diagnostic strategies

| Promoter | Transgene | Reporter/therapeutic gene analysis |
|---|---|---|
| CMV enhancer | EGFP | Tissue or cell-type specific |
| Chicken β-actin | | transduction efficiency |
| CMV enhancer | Luciferase | Whole-animal tropism profiling and |
| Chicken β-actin | | individual tissue quantification |
| Thyroxin | Factor IX | Liver-specific transduction of secreted |
| binding globulin | | factors. Pre-clinical testing |

### Multiplex Assessment of Packaging Efficiency by High-Throughput Small-Scale Vector Production and Titration for Vector Genomes

[0211] Quantification of vector genomes of rAAV in crude lysate is used to directly test rAAV variant packaging efficiency of both first-generation (single-strand AAV) and second-generation (self-complementary AAV) vectors directly following triple-transfection of HEK 293 packaging cells. This provides a streamlined alternative to performing the full workflow for small-scale vector production followed by silver staining and conventional PCR titration of vector genomes to assess virus quality for all discovered variants. Since this method can be scaled for performance in 96-well formats, it us used to quickly identify variants that produce high titer vectors.

### Serological Evaluation of Novel AAV Variants

[0212] Candidate variants with high packaging efficiency are screened for antibody cross-reactivity to current AAVs by standard means, such as capsid immunology assays to test novel rAAVs against serum from AAV-immunized rabbits. In addition, pooled human IgG (IVIG) neutralizing assays are performed for each candidate variant to determine the potential for pre-existing humoral immunity in the human population.

### Example 4: In Vivo Analyses of rAAV2 and rAAV2/3 Variants to Study Vector Transduction Biology, Prevalence of Pathotoxicity, Tissue/Organ Tropism, and Bio-Distribution Profiles

### Mouse Studies

[0213] Candidate capsid variants are grouped based on tissue distribution, and prioritized by organs of interest. Groups of candidate variants are subjected to clustered-indexing (FIG. 6A), whereby multiple packaging plasmids expressing candidate capsid variants are mixed and expressed to package uniquely DNA barcoded transgenes by triple-transfection (e.g., F9 coagulation factor IX (F.IX), to assess liver targeting and expression efficacy of secreted factors; EGFP, to assess bio-distribution and the extent of tissue-specific transduction via organ/tissue sectioning and comparative immunofluorescence microscopy; or Luciferase (Luc), to assess the quality of CNS and liver transduction via live animal imaging

[0214] For studies that gauge the capacity of rAAV variants for liver-targeted transgene expression and secretion, rAAV constructs comprising the thyroxine-binding globulin (TGB), a liver specific promoter, are designed. For studies that profile whole-animal vector transduction, constructs comprising the CMV-enhancer, chicken β-actin promoter (CB6) regulatory cassette are designed.

[0215] Vectors encapsidating indexed transgenes are injected into adult and newborn mice by different routes of administration, and screened for secreted F.IX expression, EGFP expression, or Luc expression in 1-month longitudinal studies to profile AAV variant-mediated transgene expression. Routes of administration for the CNS/brain include peripheral intravascular (IV, to test transduction across the blood-brain barrier), intracerebroventricular (ICV), intraparenchymal, and intrathecal. Administration for retina is performed via subretinal injection. In some embodiments, IV injections also target the liver.

[0216] Animals that exhibit unique transgene expression compared to control animals (e.g., transgenes delivered by AAV2, AAV2/3, or AAV8) are sacrificed and harvested for organs. Individual organs are assayed for the presence and abundance of barcoded transgenes by conventional PCR amplification of bulk DNA extracts or cDNA libraries containing transgene message, followed by Illumina sequencing to trace barcoded transgenes enriched in each tissue. FIG. 9 outlines the general design strategy for transgene indexing. The abundance and tissue/organ distribution of detectable barcoded transgenes reflects candidate rAAV variant tropism and transduction efficacy of each group. Highly efficacious candidate groups with desirable vector properties are selected. Individual candidate variants from selected groups are used to package barcoded transgenes for a second round of screening for the purpose of identifying individual, highly efficacious variants. Clustered-indexing can be carried out iteratively in multiple rounds of hierarchical selection to reduce the workload.

### Non-Human Primate (NHP) Studies

[0217] Candidate rAAV variants are screened for bio-distribution in non-human primates by a modality similar to the clustered-indexing methodology outlined for mouse studies (FIG. 6B). The transduction efficiencies to target organs via different routes of administration are re-assessed in NHPs to validate rAAV variant profiles observed in precursor mouse studies.

[0218] Immunogenicity, prevalence of neutralization antibody in human populations, capacity for genotoxicity, and general aspects of pathogenicity are gauged alongside primary assessments, for example histopathology of multiple tissues and organs to scrutinize T-cell or neutrophil infiltrates, monitoring hepatotoxicity by ALT/AST activity, and analyzing inflammation by examination of histological sections, to determine transduction profiles in non-human primate (NHP) animals.

### Example 5: Isolation of Novel AAV Capsid Sequences

[0219] Additional AAV capsid sequences were isolated. Using variant analysis pipelines developed from bioinformatic tools, an additional 263 previously undescribed, high-confidence AAV2 and AAV2/3 hybrid capsid sequence variants were identified. For purposes of comparison, wild-type AAV2 and AAV3 capsid amino acid sequences are described in SEQ ID NOs: 869 and 870, respectively.

TABLE 8
Additional unique AAV2 and AAV2/3 hybrid variants (amino acid
sequences) identified by SMRT sequencing and bioinformatics
analyses.

| | | | | Total |
|---|---|---|---|---|
| | | Unique | | unique |
| Unique AAV2 variants | Size of | variants | SEQ ID NOs | variants |
| Sample Source | DNA (kb) | (a.a.) | (aa): | (a.a.) |
| Breast Cancer | 2.2 kb | 8 | 1726-1733 | 89 |
| Gastric Tumor | | 15 | 1734-1748 | |
| Glioma | | 2 | 1749-1750 | |
| Liver | | 25 | 1751-1775 | |
| Liver Tumor | | 36 | 1776-1811 | |
| Lung Tumor | | 3 | 1812-1814 | |
| | | | | Total |
| | | Unique | | unique |
| Unique AAV2/3 variants | Size of | variants | | variants |
| Sample Source | DNA (kb) | (a.a.) | | (a.a.) |
| Breast Cancer | 2.2 kb | 18 | 1815-1832 | 174 |
| Gastric | | 17 | 1833-1849 | |
| Liver | | 117 | 1850-1966 | |
| Liver Tumor | | 22 | 1967-1988 | |

[0220] The corresponding DNA sequences are provided for all libraries. The nucleic acid sequences for the AAV2 capsid variants correspond to SEQ ID NOs: 1989-2077. The nucleic acid sequences for the AAV2/3 capsid variants correspond to SEQ ID NOs: 2078-2251.

### Example 6: AAVv66

[0221] Recombinant adeno-associated viruses (rAAVs) have recently gained a lot of attention within the human gene therapy field, as safe and reliable gene delivery vehicles. AAV2 is currently most commonly used in preclinical and clinical studies. However, AAV2-based drug Luxturna is the only FDA approved virus-based biotherapeutic, so it is critical to improve the pharmaceutical properties of AAV.

[0222] AAV2 is known to be a “poor producer” for vector production and “underperforms” in many tissue- and cell-types. A virus variant with improved properties was isolated.

[0223] A variant named AAVv66 was identified as the most abundant pro-viral capsid variant in a clinical pancreatic neoplasm sample. The AAVv66 capsid harbors 13 residues that differ from AAV2. The variant exhibits favorable tropism in the CNS following subcranial injections. Furthermore, AAVv66 demonstrates better packaging efficiencies than prototypical AAV2. Using differential scanning fluorimetry (DSF), it was observed that the melting temperature of AAVv66 is ˜6° C. higher than AAV2 across a pH range spanning pH4-pH7. Furthermore, DSF analysis shows that at pH4, AAVv66 expunges its vector DNA at higher temperatures than AAV2.

[0224] It was also observed that AAVv66 confers superior CNS transduction relative to AAV2. Cryo-EM structure at 2.9 Å resolution reveals structural differences between AAV2 and AAVv66 at the 3-fold protrusions and at the interface of the 5-fold axis of symmetry, indicating that residues at these positions confer improved stability and function for vector transduction.

### Example 7: AAVv66 Experiments

[0225] AAVs have recently attracted attention as effective and proven gene therapy vectors. The current class of AAV vectors confer stable, long-term gene expression, have a broad range of tissue tropisms, and exhibit relatively low pathogenicity. To date, three serotype capsids (AAV1, AAV2, and AAV9) have gained regulatory approval for commercial use in patients. Unfortunately, the current library of discovered and engineered AAV capsids falls short for certain clinical applications that require targeting of specific tissues or cell types. Furthermore, patients may have pre-existing immunity to the vector via neutralizing antibodies that would limit therapeutic efficacy. Additionally, certain capsids are known to be problematic under standard production schemes for generating high-yield titers needed to meet therapeutic doses. In response to these shortcomings, there is a need to discover and develop novel capsids that exhibit better vector yields, can escape innate immunity, and possess unique tropism profiles.

[0226] This example describes a capsid protein variant, AAVv66 (SEQ ID NO: 66) that was identified by high-throughput single molecule real-time (SMRT) sequencing and whose properties substantially differ from those of AAV2 despite high (98%) sequence similarity. First, AAVv66 exhibits better vector yield and is more thermostable than prototypical AAV2. Second, AAVv66 has a better spread of distribution within brain tissue when administrated by intracranial injections. Finally, AAVv66 is antigenically distinct from AAV2.

[0227] To better understand how AAVv66 differs from AAV2, cryogenic electron microscopy (cryo-EM) was performed to explore the structural and functional characteristics that define AAVv66. Our 2.5-Å resolution structure of the AAVv66 capsid reveals differences from the structure of AAV2 and provides insights into the functional properties the capsids. Together, these observations describe the mechanistic properties of AAVv66.

### Materials and Methods

### DNA Extraction

[0228] A pancreatic neoplasm sample was acquired from a 71-year-old female patient following tumorectomy and pathology of the tissue by frozen section examination and intraoperative frozen section diagnosis. The sample was stored in liquid nitrogen until DNA extraction. To avoid AAV DNA cross-contamination, DNA extraction, and PCR procedures were performed in a sterile UV-irradiated biosafety cabinet. All surfaces and equipment were sprayed with DNA-Exitus Plus (Applichem, Cat No: A7089) and wiped clean with milli-Q water after 15 minutes. Frozen tissues were then thawed at room temperature, quickly cut to about 25 mg of tissue with disposable scalpels and placed in a 2 mL tube. Extractions of DNA from tissues were performed using the QIAamp DNA Mini Kit (Qiagen, #51306) according to manufacturer's recommended procedures.

### SMRT Sequencing

[0229] Amplicon libraries were generated from genomic DNA by standard PCR procedures. To amplify AAV genomes, PCR was performed using Platinum™ PCR SuperMix High Fidelity (Invitrogen) with the following cycle conditions: 97° C. for 1 min, 46 cycles of 98° C. for 10 s, 60° C. for 15 s, and 68° C. for 2 min 30 s; and 68° C. for 10 min. Correctly-sized PCR products were gel-purified with PureLink™ PCR Purification Kit (Thermo Fisher) and used for a second round of 15-cycle PCR for barcoding. The primer pairs used were:

First Round Primers:
(SEQ ID NO: 2252)
CapF 5′-GACTGCATCTTTGAACAATAAATGA-3′
and
(SEQ ID NO: 2253)
CapR 5′-GAAACGAATTAACCGGTTTATTGATTAA-3′
Second Round Primers: EF 5′-
(SEQ ID NO: 2254)
CATCACTACGCTAGATGACTGCATCTTTGAACAATAAATGA-3′
and
(SEQ ID NO: 2255)
ER 5′-TAGTATATCGAGACTCGAAACGAATTAACCGGTTTATTG
ATTAA-3′

Amplicons representing the capsid variant ORFs were subjected to standard SMRT sequencing library generation. Sequencing was performed on the RSII platform. SMRT sequencing returned 17,727 DNA reads that mapped to the AAV2 Cap ORF using the BWA-MEM algorithm. To rule out artifactual sequences, reads were then filtered to exclude those that were less than 1,800 nt and more than 2,500 nt in length, and then filtered on the quality of reads (Phred score>30). This filtering reduced the reads to 14,500. Finally, reads were processed through InDelFixer to remove single nucleotide insertions and deletions that may result from error-prone PCR or sequencing error. In order to consider only unique capsid sequences and to rule out low-confidence variants, de novo assembly (Geneious R9) was performed on the filtered reads to cluster reads with 99% of sequence similarity. Only read clusters represented by at least 10 reads were considered unique DNA capsid sequences. DNA sequences were then translated to amino acid sequences to define the final list of unique AAV capsids.

[0230] Full AAV Cap ORFs from contemporary AAV serotypes (hu.2 used for AAV2/3) were obtained from NCBI and the predicted amino acid sequences were aligned using the MUSCLE algorithm, iterating until convergence was achieved. PhyML was then used to generate the phylogenetic tree using default parameters from within SeaView55 and then visualized via the Interactive Tree of Life online tool.

### Viral Vector Production

[0231] Viruses were produced using the triple-transfection method in HEK293 cells and purified by CsCl gradient centrifugation. All vectors described were packaged with either the self-complementary AAV vector expressing enhanced green fluorescence protein (scAAV-CB6-EGFP), single-strand vector expressing Firefly luciferase (ssAAV-CB6-Fluc), single-strand vector expressing secreted human alpha1-anti-trypsin (ssAAV-CB6-hA1AT), or single-strand vector expressing LacZ. All transgenes are driven by the CMV early enhancer/chicken β actin (CB6) ubiquitous promoter.

### Animals

[0232] Six- to eight-week-old male C57BL/6J mice (The Jackson Laboratory) were injected by IV, IM, or intracranial administration of test vectors. Mice subjected to IV injections were administered with vectors packaged with ssAAV-CB6-Fluc transgenes (1.0E11 vg/mouse), and mice were sacrificed 14 days post-injection. Mice subjected to IM injections of the TA muscle, were administered with vectors packaged with ssAAV-CB6-Fluc transgenes (4.0E10 vg/mouse), and mice were sacrificed 28-days post-injection. Every week, up until, and at time of sacrifice, animals were injected intraperitoneally with D-luciferin substrate and sedated with isoflurane and luciferase activity was quantified using the IVIS SpectrumCT imaging platform with 1 min exposures. Image acquisition was performed using Living Image software. Mice subjected to intrahippocampal injections were administered with vectors packaged with scAAV-CB6-Egfp transgenes (3.6E9 vg/mouse). Unilateral injections were performed in the right hemisphere using a stereotaxic frame (Stoelting Co. Wood Dale, Ill.), Hamilton Syringe (1207K95, Thomas Scientific), and Hamilton Needle (77602-06, Hamilton). The following relative coordinates were used for all intra-hippocampal injections: x: −1.5 mm, y: −2 mm, z: −2 mm.

### Immunostaining

[0233] Four-weeks post-injection, animals were transcardially perfused with 1× phosphate buffered saline (PBS), followed by 4% paraformaldehyde (PFA). Brains were extracted and subsequently fixed in 4% PFA overnight at 4° C. Brains were then immersed in 30% sucrose (prepared in 1×PBS), at 4° C., until equilibrated in sucrose mixture. Brains were embedded in a 1:2 OCT (Tissue Tek, Torrance, Calif.) and 30% sucrose mixture, and cryo-sectioned at 40 μm (Cryostar NX70, ThermoScientific, Waltham, Mass.). Sections were permeabilized in 0.5% TritonX-100 for 1 hr, blocked in 5% goat serum (10% normal goat serum, 50062Z, Life Technologies) for 1 hr, and then incubated in primary antibody (anti-NeuN, 1:1000, EMD Millipore MAB377; anti-Gfap, 1:500, EMD Millipore MAB360; anti-Olig2, 1:200, Abcam ab109186; anti-Ibal, 1:1000, Wako Chemicals NC9288364) overnight at 4° C. Sections were washed three times in 1×PBS and incubated in secondary antibody (anti-mouse, Invitrogen A32744; or anti-rabbit, Invitrogen A32740) for 1 hour at room temperature. Sections were washed three times in 1×PBS and mounted with Vectashield containing DAPI (Vector Laboratories, Burlingame, Calif.).

### Microscopy

[0234] Brain section images were acquired on a Leica SP8 Lightning High Resolution Confocal (Leica Microsystems, Wetzlar, Germany). Global brain images (10× tiled brain sections) and high-magnification images (63× region specific areas) were collected at the same intensity and exposure thresholds for each respective magnification. For high-magnification images, 40-50 z-stack steps were collected at a 0.29 z-size. Analysis was performed using Imaris 9.3 Software (Bitplane Inc., Zurich, Switzerland). Each image was 3D rendered and thresholds were manually established. To ensure consistency, non-biased 3D rendering of total sub-anatomical EGFP volumes colocalized with DAPI volumes and cell type-specific stains were used as proxies for cellular counts and the number of positively transduced cells. Percent quantifications of the different cell types within each ipsilateral sub-anatomical region was conducted, followed by percentage quantification of each cell type. Percent transduction was determined by normalizing colocalized EGFP volume to total volume of cell type-specific staining within each region. Per cell-specific stain, n=3 mice were analyzed. Statistical calculations for FIG. 2b was conducted in Prism 7 (GraphPad Software, Inc., San Diego, Calif.) and analysis was performed using Student's unpaired t-test.

### DSF Analysis

[0235] For capsid stability experiments, 5 μL SYPRO Orange 5000× (Thermo Fisher Scientific) was diluted in 495 μL PBS (Corning) to make a 50× stock. 45 μL of virus was mixed with 5 μL of 50×SYPRO Orange (final SYPRO Orange concentration was 5×). Fluorescence was quantified using a ViiA 7 real-time PCR instrument (Thermo Fisher Scientific) with the following parameters: samples were incubated at 25° C. for 2 min, followed by a temperature gradient (25° C. to 99° C., 0.4° C. per step and held at each step for 2 min). To monitor the fluorescence of the SYPRO Orange at each temperature step, the ROX filter was used with no passive reference. To investigate the effect of pH on the melting temperature of AAV vectors, 5 μL of the virus vectors, 5 μL of 50× SYBR Orange, and 40 μL of 0.6M acetate buffer pH-adjusted from pH7 to pH4 were mixed. Tm values reported in this study is defined as the max Dsignal/Dtemp detected between 25 and 95° C. To investigate vector genome release, the SYBRO Orange dye was switched to SYBR Gold (Thermo Fisher Scientific).

### Site-Directed Mutagenesis

[0236] To generate point mutations in the AAVv66 capsid ORF, the Q5 site-directed mutagenesis kit (New England Biolabs) and following pairs of mutagenesis primers were used:

TABLE 9

| Mutation | F. Primer (lowercase = mutated | R. Primer (SEQ ID NOs: |
|---|---|---|
| in AAVv66 | bases) (SEQ ID NOs: 2256-2268) | 2269-2281) |
| Q39K | AGAGCGGCATaagGACGACAGCA | GCGGGCTTTGGTGGTGGT |
| A151V | GCATTCTCCTgtgGAGCCAGACT | TCTACCGGCCTCTTTTTTCC |
| K447R | TTACTTGAGCagaACAAACGCTC | TACAGATACTGGTCGATC |
| A450T | CAAAACAAACactCCAAGCGGAAC | CTCAAGTAATACAGATACTGG |
| M457Q | AACCACCACGcagTCCAGGCTTC | CCGCTTGGAGCGTTTGTT |
| A492S | ATCAAAAACAtctGCGGATAAC | ACTCGCTGCTGGCGGTAA |
| | AACAACAGTG | |
| D499E | CAACAACAGTgaaTATTCGTGGAC | TTATCCGCAGCTGTTTTTG |
| Y533F | TGAAGAAAAAtttTTTCCTCAGA | TCGTCCTTGTGGCTGGCC |
| | GCGGGGTTC | |
| D546G | TGGAAAACAAggcTCGGGAAAAA | AAGATGAGAACCCCGCTC |
| G548E | ACAAGACTCGgagAAAACTAATGTG | TTTCCAAAGATGAGAACC |
| S585R | CAACCTCCAGagaGGCAACACAC | GTAGATACAGAACCATACTGCTC |
| T588R | GAGCGGCAACagaCAGGCAGCCA | TGGAGGTTGGTAGATACAGA |
| | | ACCATACTG |
| T593A | GGCAGCCACCgcaGATGTCAACA | TGTGTGTTGCCGCTCTGG |

### Cryo-EM

[0237] AAVv66 was prepared for cryo-EM on grids with a lacey carbon support film (01824G, Ted Pella, Inc.). First, the grids were washed with acetyl acetate and allowed to dry overnight. Next, the grids were glow discharged with 20 mA current with negative polarity for 60 sec in a PELCO easiGlow glow discharge unit. 3 μL of 1E13 vg/mL AAVv66-CB6-Egfp vector in buffer (5% sorbitol, 0.001% pluronic acid F68 in PBS) was placed onto the grids loaded on a Vitrobot Mark IV (ThermoFisher) cryo-EM plunging apparatus. The grids were blotted for 6 to 6.5 seconds with Whatman #1 filter paper at 10° C. and 95% relative humidity prior to rapid freezing in liquid ethane.

[0238] A data set consisting of 2,033 movies was collected using SerialEM on a Titan Krios electron microscope (FEI) operating at 300 kV and equipped with a Gatan Image Filter (GIF) and a K2 Summit direct electron detector (Gatan Inc.) using 0.5-2.2 μm underfocus. 50 frames per movie were collected, and 34 frames were used at 1.43 e-/Å2 per frame for a total dose of 48.62 e-/Å2 on the sample. Pixel size was 1.0588 Å on the sample. Movies were imported into cisTEM and were aligned with dose filtering and CTF parameters were determined. Next, a total of 52,874 particles were automatically picked within cisTEM (characteristic and maximum radius: 130 and 140 Å). We note that both particles encapsulating vector transgenes and the small percentage of empty capsids were used to determine the final structure. Within cisTEM, an initial reference for alignment was generated from all particles using the Ab initio 3D reconstruction function. This reference and all particles were iteratively refined using auto refine to obtain a 2.95-Å resolution map as determined from the FSC_part cutoff at 0.143. One round of per-particle CTF refinement in manual mode improved map resolution to 2.62 Å. Lastly, one round of beam tilt refinement and reconstruction improved map resolution to 2.46 Å. 3D classification did not improve the maps. The final map was B-factor sharpened by applying a B-factor of −32.92 Å2 using the PHENIX auto sharpen function.

[0239] Cryo-EM structure of AAV2 (PDB ID: 1LP3) was used as a starting model for structure refinement. Variant residues were modeled using PyMOL (The PyMOL Molecular Graphics System, Version 2.0 Schrödinger, LLC.). The resulting AAVv66 model, containing 60 copies of VP3, was refined using PHENIX59 against the cryo-EM map. Real-space simulated annealing and B-factor refinement in PHENIX resulted in a stereochemically optimal model. The refinement results are summarized in Table 10. The model was inspected, and figures were prepared using PyMOL.

[0240] Vectors were diluted to a concentration of ˜1.0E9 vg/mL for zeta potential analysis using the Zetasizer Nano ZS system (Malvern). 500 μL of sample was added into a universal dip cell (Malvern). Before measurement, the system was stabilized for 2 min. Three measurements were recorded for each sample.

TABLE 10
Cryo-EM data collection, refinement and
validation statistics

| | #1 name |
|---|---|
| | (EMDB-20630) |
| | (PDB 6U3Q) |
| Data collection and processing | |
| Magnification | 47,214 |
| Voltage (kV) | 300 |
| Electron exposure (e-/A²) | 48.62 |
| Defocus range (μm) | 0.4-5.0 |
| Pixel size (A) | 1.059 |
| Symmetry imposed | I |
| Initial particle images (no.) | 52,874 |
| Final particle images (no.) | 52,874 |
| Map resolution (A) | 2.46 |
| FSC threshold | 0.143 |
| Refinement | |
| Initial model used (PDB code) | 1LP3 |
| Model resolution (A) | 2.6 |
| FSC threshold | 0.5 |
| Map sharpening B factor (A²) | 32.92 |
| Model composition | |
| Non-hydrogen atoms | 248,280 |
| Protein residues | 31,140 |
| Ligands | 0 |
| B factors (A²) | |
| Protein | 86.48 |
| Ligand | 0 |
| r.m.s. deviations | |
| Bond lengths (A) | 0.009 |
| Bond angles (°) | 0.603 |
| Validation | |
| MolProbity score | 1.66 |
| Clashscore | 2.25 |
| Poor rotamers (%) | 4.15 |
| Ramachandran plot | |
| Favored (%) | 96.91 |
| Allowed (%) | 4.15 |
| Disallowed (%) | 0.00 |

### Immunological Studies

[0241] 1.0E11 vg/mice of scAAV-CB6-Egfp were intramuscularly administrated into the left/right tibialis anterior of C57BL/6J mice. Four weeks later, 1.0E11 vg/mice of ssAAVv66-CB6-hA1AT or ssAAV2-CB6-hA1AT was delivered to the contralateral leg. Serum was collected at weeks 4, 5, 6, 7, and 8 by facial vein bleeds to assess neutralizing antibody titers and A1AT levels by ELISA.

[0242] Huh-7.5 (5.0E4 cells/well) were seeded onto a 96-well plate 24 hr prior to transduction at 37° C. Ad helper virus was then added at a multiplicity of infection (MOI) of 100:1 to the cell monolayer and incubated for at least an hour. Serial dilutions of serum and ssAAV2-LacZ or ssAAVv66-LacZ mixed solution were prepared in a V-bottom 96-well plate and incubated at 37° C. for 1 hr. The serum-AAV mixed solution was then added to cells and incubated at 37° C. for 24 hr. Cells were lysed and treated with beta-galactosidase substrate using the Galacto-Star One-Step Assay System (Invitrogen). Luminescence signal was detected by Synergy HT microplate reader (BioTek, Winooski, Vt.).

### A1AT ELISA

[0243] A 96-well plate was first coated with anti-A1AT antibody at 4° C. overnight, and wells were incubated with blocking buffer (1% non-fat milk and 0.05% Tween-20 in PBS buffer) for 1 hr at room temperature. 1/20, 1/200 and 1/2,000 serum dilutions were performed using sample buffer (0.05% Tween-20 in PBS buffer) in a 96-well plate along with positive control (100, 50, 25, 12.5, 6.25, and 3.125 ng/mL A1AT). After the plate was washed 3 times, sera were added into each well and incubated at 4° C. overnight. The plate was then washed 3 times and incubated with goat anti-trypsin-HRP antibody (1:5,500 dilution in sample buffer) for 2 hr. Before reacting with substrate, the plate was washed 6 times to remove all residual proteins. Lastly, ABTS substrates were added into wells and the signal was read by a Synergy HT microplate reader (BioTek).

### Identification of Novel AAV Variants in a Human Tissue Sample by Long-Read Sequencing

[0244] To identify novel full-length capsid sequences from human tissues, SMRT sequencing was performed to obtain long DNA reads that span the entire capsid open reading frame. This method can resolve sequences of long DNA fragments without the need for sequence assembly, which is necessary in short-read sequencing approaches. In this way, capsid diversity that is defined by both point mutations and recombination events can be assessed on individual intact molecules that span the entire capsid ORF. To explore AAV diversity, a single tissue was selected from about 800 human surgical samples. Using primers that flank the capsid ORF at conserved sequence across known serotypes, target PCR amplicons were produced for SMRT sequencing analysis. One capsid sequence that made up ˜45% of all sequences identified from the single tissue was isolated. This predominant capsid, named “variant 66” (AAVv66), exhibits closest homology to AAV2 (98% sequence similarity). It was observed that AAVv66 contains 13 amino acid residues that differ from AAV2 (FIG. 16): one within the VP1u region (K39Q), one within the VP2 domain (V151A), and eleven within VP3 (R447K, T450A, Q457M, S492A, E499D, F533Y, G546D, E548G, R585S, R588T and A593T). Notably, the unique amino acid residues within VP3 are all within or near variable regions VR-IV through VR-VIII.

[0245] The VP3 region of AAVv66 was compared with those of other contemporary AAV serotypes (AAV1-AAV9). The most notable differences occur at four positions (499, 533, 585, and 588), which are highly conserved among AAV serotypes (FIG. 16). At position 499, most serotypes harbor an asparagine, while AAVv66, AAV2, AAV4, and AAV9 have a negatively charged aspartic acid or glutamic acid. The highly conserved phenylalanine at position 533 is a tyrosine in AAVv66 (also, T533 in AAV5). Finally, unlike AAV2, which harbors positively charged arginine residues that define AAV2's capacity to bind heparan sulfate proteoglycans (HSPG) at positions 585 and 58823, AAVv66 contains 5585 and T588 (identical to AAV1, AAV3, AAV5, and AAV6).

AAVv66 Vector Production and Cell Infectivity Differ from Those of AAV2

[0246] The strong affinity of AAV2 for heparin and its resulting strong cell-surface association is proposed to lead to the virus' relatively poor packaging titers. The limited vector yield by AAV2 is thought to result from non-productive binding and re-infection of the packaging cells by vector particles during production. Vector production and cell infectivity of AAVv66 was compared with those of AAV2 and AAV3b. Of note, AAV3b is the closest distinct cousin to AAV2 (89% sequence similarity), but uses different electrostatic surface charges at the 3-fold protrusions to weakly bind heparin. This difference between AAV3b and AAV2 likely explains AAV3b's increased packaging titers that result from transduction of HEK producer cells.

[0247] The packaging profiles of AAVv66 were compared with those of AAV2 and AAV3b by measuring the yields of encapsidated vector genomes in cell lysates. To this end, the AAVv66 capsid ORF was synthesized and cloned into a trans-plasmid expressing AAV2 Rep under the AAV2 p5 promoter (pAAV2/v66). Small-scale vector preparations of AAVv66, AAV2, and AAV3b were used to package a single-stranded vector consisting of the firefly luciferase transgene driven by the ubiquitous chicken-beta actin promoter (AAV-CB6-Fluc). Quantification of viral vector yields by crude lysate qPCR29 revealed that the yield of encapsidated, DNase-resistant genomes of AAVv66 vectors is ˜2.4-fold higher than AAV2 yields and is ˜30% higher than AAV3b yields (FIG. 17, “combined” samples).

[0248] Whether the higher abundance of AAVv66 in crude lysate is due to non-productive binding of particles to the packaging cells, which would be manifested by a predominance of AAVv66 particles in the media rather than in the cell lysate fraction, was investigated next. PCR analysis revealed that encapsidated genomes of AAVv66 within the media are ˜3-fold more abundant than in cell lysates (FIG. 17). In contrast, very few AAV2 particles were detected in the media of packaging cells. To test whether AAVv66's ability to produce more DNase-resistant genomes is related to weak re-infectivity of packaging cells due to poor HSPG binding, a heparin competition assay was performed (FIG. 18). For this purpose, large-scale AAVv66 and AAV2 vectors, again packaging CB6-Fluc, were produced using the standard cesium chloride purification protocol. Transduction of AAVv66 is not affected by the presence of heparin, whereas 1.25 μg/well of heparin blocked AAV2 transduction by 50% and 5 μg/well of heparin completely abolished transduction. These results indicate that the improved production efficiency of AAVv66 is at least in part due to poor heparin binding.

[0249] To determine whether AAVv66's lower affinity to heparin coincides with reduced cell transduction compared to AAV2, purified AAVv66, AAV2, and AAV3b vectors were used to infect HEK293 cells. Data indicate that AAV2 exhibits greater transduction than AAVv66 (˜65-fold) and AAV3b (˜7.5-fold) (FIG. 19). Vectorized AAVv66 proviral capsid sequence is able to efficiently transduce cells in vitro, but its vector production and cell infectivity properties are distinct from those of its closest serotype relative, AAV2.

AAVv66 Exhibits CNS Transduction that is Distinct from that of AAV2

[0250] AAVv66 was tested for its capacity to transduce selected target tissues via different routes of administration. To this end, biodistribution of AAVv66 was assessed in mice via multiple routes of delivery (FIGS. 20A-21D). Among all routes tested, the most striking was AAVv66's transduction profile following intracranial delivery to target cells of the central nervous system (CNS) (FIGS. 10A-10D). To determine whether AAVv66 has increased tropism in the CNS, relative to that of AAV2, the Egfp transgene, driven by the ubiquitous chicken-beta actin promoter, was packaged into AAVv66 and AAV2 capsids. Vectors were unilaterally injected into the right hemisphere of the hippocampus at a dose of 3.6E9 vg/animal. Four-weeks post-injection, cryo-sections of treated brains showed that AAVv66 transduced ˜13-fold more cells of the CNS than AAV2, as demonstrated by the enhanced spread throughout the tissue, while AAV2 tended to stay localized to the site of injection (FIGS. 10A-10B). High-magnification imaging of contralateral regions to the site of injection showed that all sub-anatomical regions of the brain (cornu ammonis [CA1, CA2, CA3, and CA4], dentate gyrus, and corpus callosum, FIG. 10C), exhibited detectable levels of EGFP expression (FIG. 10D), indicating that AAVv66 can spread efficiently throughout the hippocampal hemispheres.

[0251] The specific cell types that are transduced by AAVv66 were investigated. Antibody staining was performed with cell type-specific markers; anti-NEUN (neurons), anti-GFAP (astrocytes), anti-IBA1 (microglia), and anti-OLIG2 (oligodendrocytes) (FIGS. 11A, 11E, 11I, and 11M). 3D-volume reconstruction of sub-anatomical CNS regions demonstrates that EGFP expression colocalized with each investigated cell type (FIGS. 11B, 11J, 11F, 11N). Neurons were the predominant cell type found in the cortex and CA1 regions (FIG. 11C). Interestingly, CA2-4 regions and the dentate gyrus exhibited the greatest transduction (˜20-40%). Astrocytes and microglia shared a similar distribution pattern, showing the highest enrichment in the dentate gyrus (FIGS. 11G and 11K). Astrocytes showed approximately 1-7% transduction across all regions (FIG. 11H), while microglia exhibited slightly higher transduction efficiencies (2-12%) (FIG. 11L). Oligodendrocytes were enriched in the corpus callosum (FIG. 110) and had approximately 1-7% transduction by AAVv66 across all regions (FIG. 11P). These data indicate that AAVv66 can transduce all major cell types of the CNS following intrahippocampal injection.

AAVv66 is Serologically Distinct from AAV2

[0252] Neutralization of AAV by the host immune system is a major limiting factor for AAV vector transduction efficacy. Individuals harboring pre-existing antibodies against AAV serotypes that are used as capsids in therapeutic vectors are at greater risk to adverse effects and ineffectual treatment. Furthermore, patients requiring repeated administration of an AAV gene therapy, risk poorer transduction efficiencies and stronger immune responses, necessitating alternative vectors.

[0253] The question of whether AAVv66 transduction can be blocked by pre-immunization with AAV2 was investigated. To create pre-existing anti-AAV2 antibodies in circulation, AAV2-Egfp vectors (1E11 vg/mouse) were intramuscularly delivered to mice. Sera were collected after four weeks to assess neutralizing antibody (NAb) titers in vitro (FIGS. 21A-21D and FIGS. 22A-22B). Low NAb titers were needed to achieve 50% neutralization (NAb50) of AAV2 infection in Huh-7.5 cells (1/1,280˜1/2,560), indicating that antibodies generated from AAV2 pre-immunization are sufficient to inhibit AAV2 transduction. By contrast, the NAb50 for AAVv66 infection with AAV2-treated mouse sera was 1/20˜1/40, indicating that AAVv66 is able to infect cells despite the presence of NAbs generated against AAV2.

[0254] To test these findings with a secreted therapeutic transgene product in vivo, we re-dosed AAV2-immunized mice with AAV2 or AAVv66 packaged with the alpha-1 antitrypsin transgene (AAV2-A1AT or AAVv66-A1AT). Sera were collected at weeks 5, 6, 7, and 8, and secreted A1AT levels were quantified by ELISA31 (FIG. 22C). Low A1AT expression would suggest that NAbs generated from the first vector dose were preventing the transduction of the second vector dose. To establish a baseline of “maximal” A1AT expression, naïve mice were also treated in the same fashion. At weeks six and seven, A1AT expression in mice treated with AAV2-Egfp and then AAVv66-A1AT reached ˜90% of A1AT expression as compared to naïve mice, whereas mice re-dosed with AAV2-A1AT reached only ˜40% of naïve levels (FIG. 22C). These results concur with in vitro observations of robust infectivity by AAVv66 in the presence of sera from mice pre-immunized with AAV2 capsids.

[0255] Pre-immunity was also tested to investigate whether a broad range of AAV serotypes (AAV1, AAV2, AAV3b, AAV8, AAV9, AAV-DJ, AAVrh.8, and AAVrh.10) can compromise AAVv66 vector transduction. Antisera of rabbits separately pre-immunized with the eight serotypes were screened for AAVv66-vector neutralization. It was observed that, AAV1, AAV3b, and AAV-DJ exhibit about an order of magnitude difference in NAb50 titers compared to AAVv66, whereas AAV2, AAV8, AAVrh.8 and AAVrh.10 exhibit a two-order magnitude difference, and AAV9 had a three-order magnitude difference (FIG. 22D). Taken together, these data indicate that AAVv66 is serologically distinct from AAV2 and some other contemporary AAV capsids.

The AAVv66 Capsid is More Thermostable than AAV2 Across a Range of pHs

[0256] The efficient formation and structural stability of the capsid is essential to the production, purification, and storage of viral vectors. Additionally, for productive infection to take place, vector particles must also maintain stability throughout the entry process and uncoat only under conditions in which delivery of the genomic payload can result in transduction of the cell. Although AAV vectors have been studied widely and are utilized for their strong transduction profiles in a range of tissues, the processes of intracellular trafficking, endosomal escape, and transportation of capsids into the nucleus are not fully understood. Among the presumed intracellular checkpoints impacting AAV intracellular trafficking and transduction that are dependent on capsid dynamics, endosomal escape is best understood. This process is believed to be triggered by a pH-dependent structural change of the capsid. Acidification of the endosomal lumen leads to a conformational change of the VP1 domain and exposure of the PLA2 domain within VP1, which triggers escape from the endosome compartment. In principle, vector capsids that can retain stability throughout intracellular trafficking are desirable and may exhibit high transduction capacity.

[0257] To determine the overall stability of AAVv66 capsids, differential scanning fluorimetry (DSF) analysis was used to measure the thermostability of the AAVv66 capsid across a range of physiological pHs (pH7-pH4) (FIGS. 12A-12E). This range includes pH 4.5, which is observed in the lumen of late endosomes and lysosomes. In this assay, vector particles are suspended in SYPRO Orange dye, which fluoresces upon binding to hydrophobic residues in proteins. Thus, peak fluorescence signals are an indirect readout for maximally bound hydrophobic regions exposed upon protein unfolding. The melting temperatures (maximum slope values [Dsignal/Dtemp], Tm) for AAVv66 are more than five degrees higher than for AAV2 across all pH conditions tested. The most extreme difference was observed at pH 7, where the Tm of AAVv66 (75.29±0.34° C.) is nearly 10 degrees higher than that of AAV2 (65.85±0.18° C.) (FIG. 12A). Thus, the AAVv66 capsid is more thermally stable and resistant to pH than AAV2.

[0258] The effect of stability of AAVv66 capsid on vector genome release was investigated. Gauging vector genome release as a function of temperature range has been used as a proxy for pressure-driven DNA extrusion exerted by the nucleolar environment. The temperature dependence of AAVv66 genome release was compared with that of AAV2 under different pHs. To this end, DSF analysis was employed with SYBR Gold dye, which fluoresces upon binding to DNA. Peak fluorescence is an indirect measure of maximal accessibility of the encapsidated genomes to the dye solution. Vector genome release at pH 7 was observed to be concomitant with capsid stability, showing signal peaks at ˜65° C. for AAV2 and ˜74° C. for AAVv66. At lower pHs, however, peak fluorescence for dye-accessible DNA was detected at lower temperatures than peak fluorescence for unfolded capsid protein (FIG. 12B). Furthermore, DNA accessibility for AAVv66 was more evident than that for AAV2—where peak DNA accessibility at pHs 5 and 4 for AAV2 occurred at ˜53° C. and ˜42° C., respectively; and AAVv66 exhibited peak signals at 25° C. This surprising observation shows that in AAVv66 capsids DNA is especially accessible at low pHs (4-5) even at room temperature.

[0259] The question of whether AAVv66-specific amino acid residues contribute to the structural and functional differences observed between AAVv66 and AAV2 was then investigated. The thirteen AAVv66-defining amino acid residues were mutated to those of AAV2 and their impact on packaging vector genomes during production with HEK293 cells was tested (FIG. 12C). Additionally, thermal capsid stability and vector genome release were assessed for the mutant capsids (FIGS. 12D and 12E). All but four mutations (A151V, K447R, Y533F, and S585R) resulted in lower yields of DNase-resistant genomes, similar to or lower than those of AAV2 (FIG. 12C). Remarkably, the relatively conservative mutation D499E, which does not involve a charge change, lowered the packaging yield to −5% of AAV2 yields. The modification also affected capsid stability, as D499E along with S585R and the S585R/T588R double mutation lowered Tm by 5.9° C., 3.8° C., and 5.4° C., respectively (FIG. 12D), while other mutations affected the Tm by only 1-2° C. Vector genome accessibilities of the same amino acid mutations exhibit lowered peak signal temperatures, while other mutations led to little or no change (FIG. 12E). Notably, the overall titers of purified vector were not drastically impacted (Table 11). Thus, the packaging yield of AAVv66 is only partially dependent on capsid stability, suggesting that partial capsid destabilization may be sufficient to facilitate genome release. Only residue D499 drastically affects both packaging and capsid stability.

TABLE 11
Virus titer after large-scale production and
purification

| Vector name | Titer GC/mL |
|---|---|
| ssAAV2-CB6-FLuc | 1.60E+12 |
| ssAAVv66-CB6-FLuc | 6.00E+12 |
| ssAAVv66-Q39K-CB6-FLuc | 7.70E+12 |
| ssAAVv66-A151V-CB6-FLuc | 9.00E+12 |
| ssAAVv66-K477R-CB6-FLuc | 6.60E+12 |
| ssAAVv66-A450T-CB6-FLuc | 8.80E+12 |
| ssAAVv66-M457Q-CB6-FLuc | 1.00E+13 |
| ssAAVv66-A492S-CB6-FLuc | 1.40E+13 |
| ssAAVv66-D499E-CB6-FLuc | 9.00E+12 |
| ssAAVv66-Y533F-CB6-FLuc | 7.10E+12 |
| ssAAVv66-D546F-CB6-FLuc | 1.20E+13 |
| ssAAVv66-G548E-CB6-FLuc | 7.80E+12 |
| ssAAVv66-S585R-CB6-FLuc | 7.00E+12 |
| ssAAVv66-T588R-CB6-FLuc | 1.30E+13 |
| ssAAVv66-T593A-CB6-FLuc | 8.10E+12 |
| ssAAVv66-S585R/T588R-CB6-FLuc | 1.85E+12 |

### Cryo-EM Structure Analysis of Capsid Differences Between AAVv66 and AAV2

[0260] To characterize the structural properties of AAVv66, AAV2v66-Egfp vector was purified for cryo-EM analysis. 52,874 particle images were obtained, which yielded a cryo-EM map at 2.5 Å resolution (FIG. 13E and FIG. 24), and obtained a structural model with optimal real-space fit and stereochemical parameters (Table 9). Overall, the AAVv66 structure is similar to AAV2 (root-mean-square deviation (RMSD) of atomic coordinates=0.456 Å) (FIG. 24). Thus, AAVv66 exhibits the characteristic features of an AAV capsid, which include the depression at two-fold axis, the three-fold symmetry that is defined by the three-fold protrusions, and the five-fold pore that is comprised of five monomers that form the interface and pore for Rep binding (FIG. 13A). Of note, VP1u and VP2 domains are each represented at approximately a twelfth of the VP3 domains for each particle, and similar to other AAV structures before, were not resolved in our symmetrized cryo-EM map. Therefore, only residues 219-736 are definitively resolved within the cryo-EM map, including eleven of thirteen AAVv66-defining residues (FIG. 13B).

[0261] Comparison of the AAVv66 structure with that of AAV2 reveals several structural differences, which may contribute to the improved DNA packaging and/or capsid stability. Key differences occur at the interfaces between monomers of VP3 at the protrusions around the 3-fold axis. D499, whose mutation to the longer glutamate residue resulted in dramatic defects in vector genome packaging (FIG. 12C), forms electrostatic interactions and/or hydrogen bonding with S501 (FIG. 13D). This region is tightly packed against the neighboring VP3 monomer (FIG. 13D). Here, the backbone atoms of D499 and 5501 interact with the side chains of the symmetry-related N449 and T448, respectively, whereas the hydroxyl group of S501 hydrogen-bonds with the backbone carbonyl of the symmetry-related S446. The strong effect of D499 mutation is therefore likely due to the disruption of the interface between VP3 monomers, leading to destabilization of the capsid. In the same region, residues K447 and A450 of the neighboring monomer eliminate potential for electrostatic interaction between corresponding AAV2-R447 and T450 side chains (FIG. 14). Amino acid M457 is located on the three-fold protrusion of AAVv66 at variable region IV, with the sidechain poised toward the solvent (FIG. 14). Interestingly, this methionine is a unique feature among other serotypes (FIG. 16), suggesting at potential unique capsid interactions with cellular receptors, host factors, or antibodies. The polar hydroxyl group in AAVv66-Y533 (AAV2-F533) likely stabilizes the polar environment between the side chains of R487 and K532 and may contribute to the interaction with L583 of the symmetry-related monomer (FIG. 14). AAVv66-D546 and G548 redistribute the surface charge conferred by AAV2-G546 and E548 (FIG. 14) and is yet another defining feature of AAVv66.

[0262] A key functional region of AAV2 involves the positively charged arginine residues at position 585 and 588. These residues are at the surface of the three-fold protrusions and govern the capsid's interaction with HSPG receptors, which are vital to attachment and entry in many cell types. By contrast, S585 and T588 in the AAVv66 capsid are neutral charged polar residues (FIG. 13D and FIG. 14), similar to S586 and T589 of AAV3b (FIG. 16). AAV3b's physical and functional interactions with HSPG rely on electrostatic interactions conferred by residues R447 and R594 (R447 and A593 in AAV2)7, but AAVv66 also lacks these arginine residues (K447 and T593). These differences from AAV2 and AAV3b suggest that AAVv66 associates differently with the canonical cell surface receptor commonly utilized by AAV clade B and C capsids, consistent with our findings that AAVv66 lacks heparin binding.

### AAV2 and AAVv66 Show Surface Charge Differences

[0263] Because electrostatic properties of the virus are important for capsid-receptor interaction 7,43, how the net loss of positive charge for the AAVv66 capsid in relation to AAV2 affects the electrostatic properties of the capsid was investigated. First, the calculated electrostatic potential values for AAV2 and AAVv66 structures were compared (FIG. 15A). The distribution of electrostatic potential on the surface of AAVv66 differs from that of AAV2. The most notable difference is at the three-fold protrusions, where the positive charge conferred by R585 and R588 in AAV2 is drastically reduced by S585 and T588 in AAVv66 (FIG. 15B).

[0264] Whether the distinct structure and surface electrostatics of AAVv66 affects the charge-dependent particle migration (zeta potential) of the capsid was then investigated (FIG. 15C). The zeta potential of AAVv66 (−10 mV) is remarkably different from that of AAV2 (−3.5 mV), consistent with differences in electrostatic potential between the capsids. To test the contributions of individual substitutions, particle migration of AAVv66 harboring single amino acid substitutions that convert residues to the corresponding residues of AAV2 was measured (FIG. 15C). Single mutations S585R and T588R resulted in the most dramatic change of the zeta potential (by ˜3 mV each), bringing the zeta potential closer to that of AAV2 (FIG. 15C). These observations indicate that the electrostatic properties of AAVv66 differ from those of AAV2 and the difference is predominantly due to substitutions at positions 585 and 588. Thus, interactions of capsid AAVv66 with receptors, antibodies and other proteins likely differ substantially from those of other closely related capsids.

[0265] This disclosure is not limited in its application to the details of construction and the arrangement of components set forth in this description or illustrated in the drawings. The disclosure is capable of other embodiments and of being practiced or of being carried out in various ways. Also, the phraseology and terminology used herein is for the purpose of description and should not be regarded as limiting. The use of “including,” “comprising,” or “having,” “containing,” “involving,” and variations thereof herein, is meant to encompass the items listed thereafter and equivalents thereof as well as additional items.

[0266] Having thus described several aspects of at least one embodiment of this disclosure, it is to be appreciated various alterations, modifications, and improvements will readily occur to those skilled in the art. Such alterations, modifications, and improvements are intended to be part of this disclosure, and are intended to be within the spirit and scope of the disclosure. Accordingly, the foregoing description and drawings are by way of example only.

What is claimed is:

1. A method for delivering a transgene to a target cell in a subject, the method comprising intracranially administering to the subject a recombinant adeno-associated virus (rAAV) comprising:
(i) an isolated nucleic acid comprising a transgene encoding one or more gene products of interest; and
(ii) an adeno-associated acid (AAV) capsid protein having the sequence set forth in SEQ ID NO: 66.

2. The method of claim 1, wherein the intracranial administration comprises intrahippocampal injection.

3. The method of claim 1, wherein the target cell is a central nervous system (CNS) cell.

4. The method of claim 3 wherein the CNS cell is a neuron, oligodendrocyte, astrocyte, or microglial cell.

5. The method of claim 1, wherein the subject is a mammal, optionally wherein the mammal is a human.

6. The method of claim 1, wherein the subject is characterized by production of anti-AAV2 antibodies.

7. The method of claim 6, wherein after administration of the rAAV, the subject does not elicit a neutralizing immune response against the rAAV.

8. The method of claim 1, wherein the isolated nucleic acid comprises AAV inverted terminal repeats (ITRs) flanking the transgene.

9. The method of claim 1, wherein the nucleic acid sequence encoding the one or more gene products is operably linked to a promoter.

10. The method of claim 1, wherein the one or more gene products comprise a protein or an inhibitory nucleic acid.

11. A method for delivering a transgene to a target cell in a subject, the method comprising intravenously administering to the subject a recombinant adeno-associated virus (rAAV) comprising:
(i) an isolated nucleic acid comprising a transgene encoding one or more gene products of interest; and
(ii) an adeno-associated acid (AAV) capsid protein having the sequence set forth in SEQ ID NO: 66,
wherein the administration results in the rAAV crossing the blood brain barrier (BBB) of the subject.

12. The method of claim 11, wherein the target cell is a central nervous system (CNS) cell.

13. The method of claim 12 wherein the CNS cell is a neuron, oligodendrocyte, astrocyte, or microglial cell.

14. The method of claim 11, wherein the administration results in decreased transduction of liver cells relative to administration of an rAAV having an AAV2 capsid protein

15. The method of claim 11, wherein the subject is a mammal, optionally wherein the mammal is a human.

16. The method of claim 11, wherein the subject is characterized by production of anti-AAV2 antibodies.

17. The method of claim 16, wherein after administration of the rAAV, the subject does not elicit a neutralizing immune response against the rAAV.

18. The method of claim 11, wherein the isolated nucleic acid comprises AAV inverted terminal repeats (ITRs) flanking the transgene.

19. The method of claim 11, wherein the nucleic acid sequence encoding the one or more gene products is operably linked to a promoter.

20. The method of claim 11, wherein the one or more gene products comprise a protein or an inhibitory nucleic acid.

The application's sequence listing, which the Patent Office published only in electronic form, follows.

SEQUENCE LISTING (2281 sequences)

SEQ ID NO: 1 - protein, 735 aa, Artificial Sequence
  Synthetic Polypeptide
MAADGYLPDWLEDTLSEGIRQWWKLKPGPPPPKPAERHKDDSRGLVLPGYKYLGPFNGLDKGEPVNEADAAALEHDKAYDRQLDSGDNPYLKYNHADAEFQERLKEDTSFGGNLARAVFQAKKRVLEPLGLVEEPVKTAPGKKRPVEHSPAEPDSSSGTGKSGQQPARKRLNFGQTGDADSVPDPQPLGQPPAAPSGLGTNTMASGSGAPMADNNEGADGVGNSSGNWHCDSTWMGDRVITTSTRTWALPTYNNHLYKQISSQSGASNDNHYFGYSTPWGYFDFNRFHCHFSPRDWQRLINNNWGFRPKRLNFKLFNIQVKEVTQNDGTTTIANNLTSTVQVFTDSEYQLPYVLGSAHQGCLPPFPADVFMVPQYGYLTLNNGSQAVGRSSFYCLEYFPSQMLRTGNNFTFSYTFEDVPFHSSYAHSQSLDRLMNPLIDQYLYYLSRTNTPSGTTTQSRLQFSQAGASDIRDQSRNWLPRPCYRQQRVSKTAADNNNSDYSWTGATKYHLNGRDSLVNPGTAMASHKDDEEKYFPQSGVLIFGKQDSGKTNVDIEKVMITDEEEIRTTNPVATEQYGSVSTNLQSGNTQAATSDVNTQGVLPGMVRQDRDVYLQGPIWAKIPHTDGHFHPSPLMGGFGLKHPPPQILIKNTPVPANPSTTFSAAKFASFITQYSTGQVSVEIEWEPQKENSKRWNPEIQYTSNYNKSVNVDFTVDTNGVYSEPRPIGTRYLTRNL

SEQ ID NO: 2 - protein, 735 aa, Artificial Sequence
  Synthetic Polypeptide
MAADGYLPDWLEDTLSEGIRQWWKLKPGPPPPKPAERHKDDSRGLVLPGYKYLGPFNGLDKGEPVNEADAAALEHDKAYDRQLDSGDNPYLKYNHADAEFQERLKEDTSFGGNLARAVFQAKKRVLEPLGLVEEPVKTAPGKKRPVEHSPAEPDSSSGTGKSGQQPARKRLNFGQTGDADSVPDPQPLGQPPAAPSGLGTNTMASGSGAPMADNNEGADGVGNSSGNWHCDSTWMGDRVITTSTRTWALPTYNNHLYKQISSQSGASNDNHYFGYSTPWGYFDFNGFHCHFSPRDWQRLINNNWGFRPKRLNFKLFNIQVKEVTQNDGTTTIANNLTSTVQVFTDSEYQLPYVLGSAHQGCLPPFPADVFMVPQYGYLTLNNGSQAVGRSSFYCLEYFPSQMLRTGNNFTFSYTFEDVPFHSSYAHSQSLDRLMNPLIDQYLYYLSRTNTPSGTTTQSRLQFSQAGASDIRDQSRNWLPGPCYRQQRVSKTAADNNNSDYSWTGATKYHLNGRDSLVNPGTAMASHKDDEEKYFPQSGVLIFGKQDSGKTNVDIEKVMITDEEEIRTTNPVATEQYGSVSTNLQSGDTQAATSDVNTQGVLPGMARQDRDVYLQGPIWAKIPHTDGHFHPSPLMGGFGLKHPPPQILIKNTPVPANPSTTFSAAKFASFITQYSTGQVSVEIEWEPQKENSKRWNPEIQYTSNYNKSVNVDFTVDTNGVYSEPRPIGTRYLTRNL

SEQ ID NO: 3 - protein, 735 aa, Artificial Sequence
  Synthetic Polypeptide
MAADGYLPDWLEDTLSEGIRQWWKLKPGPPPPKPAERHKDDSRGLVLPGYKYLGPFNGLDKGEPVNEADAAALEHDKAYDRQLDSGDNPYLKYNRADAEFQERLKEDTSFGGNLARAVFQAKKRVLEPLGLVEEPVKTAPGKKRPVEHSPAEPDSSSGTGKSGQQPARKRLNFGQTGDADSVPDPQPLGQPPAAPSGLGTNTMASGSGAPMADNNEGADGVGNSSGNWHCDSTWMGDRVITTSTRTWALPTYNNHLYKQISSQSGASNDNHYFGYSTPWGYFDFNRFHCHFSPRDWQRLINNNWGFRPKRLNFKLFNIQVKEVTQNDGTTTIANNLTSTVQVFTDSEYQLPYVLGSAHQGCLPPFPADVFMVPQYGYLTLNNGSQAVGRSSFYCLEYFPSQMLRTGNNFTFSYTFEDVPFHSSYAHSQSLDRLMNPLIDQYLYYLSRTNTPSGTTTQSRLQFSQAGASDIRDQSRNWLPGPCYRQQRVSKTAADNNNSDYSWTGATKYHLNGRDSLVNPGTAMASHKDDEEKYFPQSGVLIFGKQDSGKTNVDIEKVMITDEEEIRTTNPVATEQYGSVSTNLQSGNTQAATSDVNTQGVLPGMVRQDRDVYLQGPIWAKIPHTDGHFHPSPLMGGFGLKHPPPQILIKNTPVPANPSTTFSAAKFASFITQYSTGQVSVEIEWEPQKENSKRWNPEIQYTSNYNKSVNVDFTVDTNGVYSEPRPIGTRYLTRNL

SEQ ID NO: 4 - protein, 735 aa, Artificial Sequence
  Synthetic Polypeptide
MAADGYLPDWLEDTLSEGIRQWWKLKPGPPPPKPAERHKDDSRGLVLPGYKYLGPFNGLDKGEPVNEADAAALEHDKAYDRQLDSGDNPYLKYNHADAEFQERLKEDTSFGGNLARAVFQAKKRVLEPLGLVEEPVKTAPGKKRPVEHSPAEPDSSSGTGKSGQQPARKRLNFGQTGDADSVPDPQPLGQPPAAPSGLGTNTMASGSGAPMADNNEGADGVGNSSGNWHCDSTWMGDRVITTSTRTWALPTYNNHLYKQISSQSGASNDNHYFGYSTPWGYFDFNRFHCHFSPRDWQRLINNNWGFRPKRLNFKLFNIQVKEVTQNDGTTTIANNLTSTVQVFTDSEYQLPYVLGSAHQGCLPPFPADVFMVPQYGYLTLNNGSQAVGRSSFYCLEYFPSQMLRTGNNFTFSYTFEDVPFHSSYAHSQSLDRLMNPLIDQYLYYLSRTNTPSGTTTQSRLQFSQAGASDIRDQSRNWLPGPCYRQQRVSKTAADNNNSDYSWTGATKYHLNGRDSLVNPGTAMASHKDDEEKYFPQSGVLIFGKQDSGKTNVDIEKVMITDEEEVRTTNPVATEQYGSVSTNLQSGNTQAATSDVNTQGVLPGMVRQDRDVYLQGPIWAKIPHTDGHFHPSPLMGGFGLKHPPPQILIKNTPVPANPSTTFSAAKFASFITQYSTGQVSVEIEWEPQKENSKRWNPEIQYTSNYNKSVNVDFTVDTNGVYSEPRPIGTRYLTRNL

SEQ ID NO: 5 - protein, 735 aa, Artificial Sequence
  Synthetic Polypeptide
MAADGYLPDWLEDTLSEGIRQWWKLKPGPPPPKPAERHKDDSRGLVLPGYKYLGPFNGLDKGEPVNEADAAALEHDKAYDRQLDSGDNPYLKYNHADAEFQERLKEDTSFGGNLARAVFQAKKRVLEPLGLVEEPVKTAPGKKRPVEHSPAGPDSSSGTGKSGQQPARKRLNFGQTGDADSVPDPQPLGQPPAAPSGLGTNTMASGSGAPMADNNEGADGVGNSSGNWHCDSTWMGDRVITTSTRTWALPTYNNHLYKQISSQSGASNDNHYFGYSTPWGYFDFNRFHCHFSPRDWQRLINNNWGFRPKRLNFELFNIQVKEVTQNDGTTTIANNLTSTVQVFTDSEYQLPYVLGSAHQGCLPPFPADVFMVPQYGYLTLNNGSQAVGRSSFYCLEYFPSQMLRTGNNFTFSYTFEDVPFHSSYAHSQSLDRLMNPLIDQYLYYLSRTNTPSGTTTQSRLQFSQAGASDIRDQSRNWLPGPCYRQQRVSKTAADNNNSDYSWTGATKYHLNGRDSLVNPGTAMASHKDDEEKYFPQSGVLIFGKQDSGKTNVDIEKVMITDEEEIRTTNPVATEQYGSVSTNLQSGNTQAATSDVNTQGVLPGMVWQDRDVYLQGPIWAKIPHTDGHFHPSPLMGGFGLKHPPPQILIKSTPVPANPSTTFSAAKFASFITQYSTGQVSVEIEWELQKENSKRWNPEIQYTSNYNKSVNVDFTVDTNGVYSEPRPIGTRYLTRNL

SEQ ID NO: 6 - protein, 735 aa, Artificial Sequence
  Synthetic Polypeptide
MAADGYLPDWLEDTLSEGIRQWWKLKPGPPPPKPAERHKDDSRGLVLPGYKYLGPFNGLDKGEPVNEADAAALEHDKAYDRQLDSGDNPYLKYNHADAEFQERLKEDTSFGGNLARAVFQAKKRVLEPLGLVEEPVKTAPGKKRPVEHSPAGPDSSSGTGKSGQQPARKRLNFGQTGDADSVPDPQPLGQPPAAPSGLGTNTMASGSGAPMADNNEGADGVGNSSGNWHCDSTWMGDRVITTSTRTWALPTYNNHLYKQISSQSGASNDNHYFGYSTPWGYFDFNRFHCYFSPRDWQRLINNNWGFRPKRLNFELFNIQVKEVTQNDGTTTIANNLTSTVQVFTDSEYQLPYVLGSAHQGCLPPFPADVFMVPQYGYLTLNNGSQAVGRSSFYCLEYFPSQMLRTGNNFTFSYTFEDVPFHSSYAHSQSLDRLMNPLIDQYLYYLSRTNTPSGTTTQSRLQFSQAGASDIRDQSRNWLPGPCYRQQRVSKTAADNNNSDYSWTGATKYHLNGRDSLVNPGTAMASHKDDEEKYFPQSGVLIFGKQDSGKTNVDIEKVMITDEEEIRTTNPVATEQYGSVSTNLQSGNTQAATSDVNTQGVLPGMVWQDRDVYLQGPIWAKIPHTDGHFHPSPLMGGFGLKHPPPQILIKSTPVPANPSTTFSAAKFASFITQYSTGQVSVEIEWELQKENSKRWNPEIQYTSNYNKSVNVDFTVDTNGVYSEPRPIGTRYLTRNL

SEQ ID NO: 7 - protein, 734 aa, Artificial Sequence
  Synthetic Polypeptide
MAADGYLPDWLEDTLSEGIRQWWKLKPGPPPPKPAERHKDDSRGLVLPGYKYLGPFNGLDKGEPVNEADAAALEHDKAYDRQLDSGDNPYLKYNHADAEFQERLKEDTSFGGNLARAVFQAKKRVLEPLGLVEEPVKTAPGKKRPVEHSPAEPDSSSGTGKSGQQPARKRLNFGQTGDADSVPDPQPLGQPPAAPSGLGTNTMASGSGAPMADNNEGADGVGNSSGNWHCDSTWMGDRVITTSTRTWALPTYNNHLYKQISSQSGASNDNHYFGYSTPWGYFDFNRFHCHFSPRDWQRLINNNWGFRPKRLNFKLFNIQVKEVTQNDGTTTIANNLTSTVQVFTDSEYQLPYVLGSAHQGCLPPFPADVFMVPQYGYLTLNNGSQAVGRSSFYCLEYFPSQMLRTGNNFTFSYTFEDVPFHSSYAHSQSLDRLMNPLIDQYLYYLSRTNTPSGTTTQSRLQFSQAGASDIRDQSRNWLPGPCYRQQRVSKTAADNNSDYSWTGATKYHLNGRDSLVNPGTAMASHKDDEEKYFPQSGVLIFGKQDSGKTNVDIEKVMITDEEEIRTTNPVATEQYGSVSTNLQSGNTQAATSDVNTQGVLPGMVRQDRDVYLQGPIWAKIPHTDGHFHPSPLMGGFGLKHPPPQILIKNTPVPANPSTTFSAAKFASFITQYSTGQVSVEIEWEPQKENSKRWNPEIQYTSNYNKSVNVDFTVDTNGVYSEPRPIGTRYLTRNL

SEQ ID NO: 8 - protein, 735 aa, Artificial Sequence
  Synthetic Polypeptide
MAADGYLPDWLEDTLSEGIRQWWKLKPGPPPPKPAERHKDDSRGLVLPGYKCLGPFNGLDKGEPVNEADAAALEHDKAYDRQLDSGDNPYLKYNHADAEFQERLKEDTSFGGNLARAVFQAKKRVLEPLGLVEEPVKTAPGKKRPVEHSPAESDSSSGTGKSGQQPARKRLNFGQTGDADSVPDPQPLGQPPAAPSGLGTNTMASGSGAPMADNNEGADGVGNSSGNWHCDSTWMGDRVITTSTRTWALPTYNNHLYKQISSQSGASNDNHYFGYSTPWGYFDFNRFHCHFSPRDWQRLINNNWGFRPKRLNFKLFNIQVKEVTQNDGTTTIANNLTSTVQVFTDSEYQLPYVLGSAHQGCLPPFPADVFMVPQYGYLTLNNGSQAVGRSSFYCLEYFPSQMLRTGNNFTFSYTFEDVPFHSSYAHSQSLDRLMNPLIDQYLYYLSRTNTPSGTTTQSRLQFSQAGASDIRDQSRNWLPGPCYRQQRVSKTAADNNNSDYSWTGATKYHLNGRDSLVNPGTAMASHKDDEEKYFPQSGVLIFGKQDSGKTNVDIEKVMITDEEEIRTTNPVATEQYGSVSTNLQSGNTQAATSDVNTQGVLPGMVWQDRDVYLQGPIWAKIPHTDGHFHPSPLMGGFGLKHPPPQILIKNTPVPANPSTTFSAAKFASFITQYSTGQVSVEIEWELQKENSKRWNPEIQYTSNYNKSVNVDFTVDTNGVYSEPRPIGTRYLTRNL

SEQ ID NO: 9 - protein, 735 aa, Artificial Sequence
  Synthetic Polypeptide
MAADGYLPDWLEDILSEGIRQWWKLKPGPPPPKPAERHKDDSRGLVLPGYKYLGPFNGLDKGEPVNEADAAALEHDKAYDRQLDSGDNPYLKYNHADAEFQERLKEDTSFGGNLGRAVFQAKKRVLEPLGLVEEPVKTAPGKKRPVEQSPAEPDSSSGTGKAGNQPARKRLNFGQTGDADSVPDPQPLGQPPAAPSGLGTNTMASGSGAPMADNNEGADGVGNSSGNWHCDSTWMGDRVITTSTRTWALPTYNNHLYKQISSQSGASNDNHYFGYSTPWGYFDFNRFHCHFSPRDWQRLINNNWGFRPKRLNFKLFNIQVKEVTQNDGTTTIANNLTSTVQVFTDSEYQLPYVLGSAHQGCLPPFPADVFMVPQYGYLTLNNGSQAVGRSSFYCLEYFPSQMLRTGNNFTFSYTFEDVPFHSSYAHSQSLDRLMNPLIDQYLYYLSRTNTPSGTTTQSRLQFSQAGASDIRDQSRNWLPGPCYRQQRVSKTAADNNNSDYSWTGATKYHLNGRDSLVNPGTAMASHKDDEEKYFPQSGVLIFGKQDSGKTNVDIEKVMITDEEEIRTTNPVATEQYGSVSTNLQSGNTQAATSDVNTQGVLPGMVRQDRDVYLQGPIWAKIPHTDGHFHPSPLMGGFGLKHPPPQILIKNTPVPANPSTTFSAAKFASFITQYSTGQVSVEIEWEPQKENSKRWNPEIQYTSNYNKSVNVDFTVDTNGVYSEPRPIGTRYLTRNL

SEQ ID NO: 10 - protein, 735 aa, Artificial Sequence
  Synthetic Polypeptide
MAADGYLPDWLEDTLSEGIRQWWKLKPGPPPPKPAERHKDDSRGLVLPGYKYLGPFNGLDKGEPVNEADAAALEHDKAYDRQLDSGDNPYLKYNHADAEFQERLKEDTSFGGNLARAVFQAKKRVLEPLGLVEEPVKTAPGKKRPVEHSPAEPDSSSGTGKSGQQPARKRLNFGQTGDADSVPDPQPLGQPPAAPSGLGTNTMASGSGAPMADNNEGADGVGNSSGNWHCDSTWMGDRVITTSTRTWALPTYNNHLYKQISSQSGASNDNHYFGYSTPWGYFDFNRFHCHFSPRDWQRLINNNWGFRPKRLNFKLFNIQVKEVTQNDGTTTIANNLTSTVQVFTDSEYQLPYVLGSAHQGCLPPFPADVFMVPQYGYLTLNNGSQAVGRSSFYCLEYFPSQMLRTGNNFTFSYTFEDVPFHSSYAHSQSLDRLMNPLIDQYLYYLSRTNTPSGTTTQSRLQFSQAGASDIRDQSRNWLPGPCYRQQRVSKTAADNNNSDYSWTGATKYHLNGRDSLVNPGTAMASHKDDEEKYFPQSGVLIFGKQDSGKTNVDIEKVMITDEEEIRTTNPVATEQYGSVSTNLQSGNTQAATSDVNTQGVLPGMVRQDRDVYLQGPIWAKIPHTDGHFHPSPLMGGFGLKHPPPQILIKNTPVPANPSTTFSAAKFASFITQYSTGQVSVEIEWEPQKENSKRWNPEIQYTSNYNKSVNVDFTVDTNGVYSEPRPIGTRCLTRNL

SEQ ID NO: 11 - protein, 735 aa, Artificial Sequence
  Synthetic Polypeptide
MAADGYLPDWLEDTLSEGIRQWWKLKPGPPPPKPAERHKDDSRGLVLPGYKYLGPFNGLDKGEPVNEADAAALEHDKAYDRQLDSGDNPYLKYNHADAEFQERLKEDTSFGGNLARAVFQAKKRVLEPLGLVEEPVKTAPGKKRPVEHSPAEPDSSSGTGKSGQQPARKRLNFGQTGDADSVPDPQPLGQPPAAPSGLGTNTMASGSGAPMADNNEGADGVGNSSGNWHCDSTWMGDRVITTSTRTWALPTYNNHLYKQISSQSGASNDNHYFGYSTPWGYFDFNRFHCHFSPRDWQRLINNNWGFRPKRLNFKLFNIQVKEVTQNDGTTTIANNLTSTVQVFTDSEYQLPYVLGSAHQGCLPPFPADVFMVPQYGYLTLNNGSQAVGRSSFYCLEYFPSQMLRTGNNFTFSYTFEDVPFHSSYAHSQSLDRLMNPLIDQYLYYLSRTNTPSGTTTQSRLQFSQAGASDIRDQSRNWLPGPCYRQQRVSKTAADNNNSDYSWTGATKYHLNGRDSLVNPGTAMASHKDDEEKYFPQSGVLIFGKQDSGKTNVDIEKVMITDEEEIRTTNPVATEQYGSVSTNLQSGNTQAATSDVNTQGVLPGMVRQGRDVYLQGPIWAKIPHTDGHFHPSPLMGGFGLKHPPPQILIKNTPVPANPSTTFSAAKFASFITQYSTGQVSVEIEWEPQKENSKRWNPEIQYTSNYNKSVNVDFTVDTNGVYSEPRPIGTRYLTRNL

SEQ ID NO: 12 - protein, 735 aa, Artificial Sequence
  Synthetic Polypeptide
MAADGYLPDWLEDTLSEGIRQWWKLKPGPPPPKPAERHKDDSRGLVLPGYKYLGPFNGLDKGEPVNEADAAALEHDKAYDRQLDSGDNPYLKYNHADAEFQERLKEDTSFGGNLARAVFQAKKRVLEPLGLVEEPVKTAPGKKRPVEHSPAEPDSSSGTGKSGQQPARKRLNFGQTGDADSVPDPQPLGQPPAAPSGLGTNTMASGSGAPMADNNEGADGVGNSSGNWHCDSTWMGDRVITTSTRTWALPTYNNHLYKQISSQSGASNDNHYFGYSTPWGYFDFNRFHCHFSPRDWQRLINNNWGFRPKRLNFKLFNIQVKEVTQNDGTTTIANNLTSTVQVFTDSEYQLPYVLGSAHQGCLPPFPADVFMVPQYGYLTLNNGSQAVGRSSFYCLEYFPSQMLRTGNNFTFSYTFEDVPFHSSYAHSQSLDRLMNPLIDQYLYYLSRTNTPSGTTTQSRLQFSQAGASDIRDQSRNWLPGPCYRQQRVSKTAADNNNSDYSWTGATKYHLNGRDSLVNPGTAMASHKDDEEKYFPQSGVLIFGKQDSGKTNVDIEKVMITDEGEIRTTNPVATEQYGSVSTNLQSGNTQAATSDVNTQGVLPGMVRQDRDVYLQGPIWAKIPHTDGHFHPSPLMGGFGLKHPPPQILIKNTPVPANPSTTFSAAKFASFITQYSTGQVSVEIEWEPQKENSKRWNPEIQYTSNYNKSVNVDFTVDTNGVYSEPRPIGTRYLTRNL

SEQ ID NO: 13 - protein, 735 aa, Artificial Sequence
  Synthetic Polypeptide
MAADGYLPDWLEDTLSEGIRQWWKLKPGPPPPKPAERHKDDSRGLVLPGYKYLGPFNGLDKGEPVNEADAAALEHDKAYDRQLDSGDNPYLKYNHADAEFQERLKEDTSFGGNLARAVFQAKKRVLEPLGLVEEPVKTAPGKKRPVEHSPAEPDSSSGTGKSGQQPARKRLNFGQTGDADSVPDPQPLGQPPAAPSGLGTNTMASGSGAPMADNNEGADGVGNSSGNWHCDSTWMGDRVITTSTRTWALPTYNNHLYKQISSQSGASNDNHYFGYSTPWGYFDFNRFHCHFSPRDWQRLINNNWGFRPKRLNFELFNIQVKEVTQNDGTTTIANNLTSTVQVFTDSEYQLPYVLGSAHQGCLPPFPADVFMVPQYGYLTLNNGSQAVGRSSFYCLEYFPSQMLRTGNNFTFSYTFEDVPFHSSYAHSQSLDRLMNPLIDQYLYYLSRTNTPSGTTTQSRLQFSQAGASDIRDQSRNWLPGPCYRQQRVSKTAADNNNSDYSWTGATKYHLNGRDSLVNPGTAMASHKDDEEKYFPQSGVLIFGKQDSGKTNVDIEKVMITDEEEIRTTNPVATEQYGSVSTNLQSGNTQAATSDVNTQGVLPGMVWQDRDVYLQGPIWAKIPHTDGHFHPSPLMGGFGLKHPPPQILIKSTPVPANPSTTFSAAKFASFITQYSTGQVSVEIEWELQKENSKRWNPEIQYTSNYNKSVNVDFTVDTNGVYSEPRPIGTRYLTRNL

SEQ ID NO: 14 - protein, 735 aa, Artificial Sequence
  Synthetic Polypeptide
MAADGYLPDWLEDILSEGIRQWWKLKPGPPPPKPAERHKDDSRGLVLPGYKYLGPFNGLDKGEPVNEADAAALEHDKAYDRQLDSGDNPYLKYNHADAEFQERLKEDTSFGGNLGRAVFQAKKRVLEPLGLVEEPVKTAPGKKRPVEQSPAEPDSSSGTGKAGNQPARKRLNFGQTGDADSVPDPQPLGQPPAAPSGLGSTTMATGSGAPMADNNEGADGVGNSSGNWHCDSTWMGDRVITTSTRTWALPTYNNHLYKQISSQSGASNDNHYFGYSTPWGYFDFNRFHCHFSPRDWQRLINNNWGFRPKRLNFKLFNIQVKEVTQNDGTTTIANNLTSTVQVFTDSEYQLPYVLGSAHQGCLPPFPADVFMVPQYGYLTLNNGSQAVGRSSFYCLEYFPSQMLRTGNNFTFSYTFEDVPFHSSYAHSQSLDRLMNPLIDQYLYYLSRTNTPSGTTTQSRLQFSQAGASDIRDQSRNWLPGPCYRQQRVSKTAADNNNSDYSWTGATKYHLNGRDSLVNPGTAMASHKDDEEKYFPQSGVLIFGKQDSGKTNVDIEKVMITDEEEIRTTNPVATEQYGSVSTNLQSGNTQAATSDVNTQGVLPGMVRQDRDVYLQGPIWAKIPHTDGHFHPSPLMGGFGLKHPPPQILIKNTPVPANPSTTFSAAKFASFITQYSTGQVSVEIEWEPQKENSKRWNPEIQYTSNYNKSVNVDFTVDTNGVYSEPRPIGTRYLTRNL

SEQ ID NO: 15 - protein, 735 aa, Artificial Sequence
  Synthetic Polypeptide
MAADGYLPDWLEDTLSEGIRQWWKLKPGPPPPKPAERHKDDSRGLVLPGYKYLGPFNGLDKGEPVNEADAAALEHDKAYDRQLDSGDNPYLKYNHADAEFQERLKEDTSFGGNLARAVFQAKKRVLEPLGLVEEPVKTAPGKKRPVEHSPAEPDSSSGTGKSGQQPARKRLNFGQTGDADSVPDPQPLGQPPAAPSGLGTNTMASGSGAPMADNNEGADGVGNSSGNWHCDSTWMGDRVITTSTRTWALPTYNNHLYKQISSQSGASNDNHYFGYSTPWGYFDFNRFHCHFSPRDWQRLINNNWGFRPKRLNFKLFNIQVKEVTQNDGTTTIANNLTSTVQVFTDSEYQLPYVLGSAHQGCLPPFPADVFMVPQYGYLTLNNGSQAVGRSSFYCLEYFPSQMLRTGNNFTFSYTFEDVPFHSSYAHSQSLDRLMNPLIDQYLYYLSRTNTPSGTTTQSRLQFSQAGASDIRDQSRNWLPGPCYRQQRVSKTAADNNNSDYSWTGATKYHLNGRDSLVNPGTAMASHKDDEEKYFPQSGVLIFGKQDSGKTNVDIEKVMITDEEEIRTTNPVATEQYGSVSTNLQSGNTQAATSDVNTQGVLPGMVRQDRDVYLQGPIWAKIPHTDGHFHPSPLMGGFGLKHPPPQILIKNTPVPANPSTTFSAAKFASFITQYSTGQVSVEIEWEPQKENSKRWNPEIQYTSNYNKSVNVDFTVDTNGVYSEPRPIGTRYLTRNL

SEQ ID NO: 16 - protein, 735 aa, Artificial Sequence
  Synthetic Polypeptide
MAADGYLPDWLEDTLSEGIRQWWKLKPGPPPPKPAERHKDDSRGLVLPGYKYLGPFNGLDKGEPVNEADAAALEHDKAYDRQLDSGDNPYLKYNHADAEFQERLKEDTSFGGNLARAVFQAKKRVLEPLGLVEEPVKTAPGKKRPVEHSPAEPDSSSGTGKSGQQPARKRLNFGQTGDADSVPDPQPLGQPPAAPSGLGTNTMASGSGAPMADNNEGADGVGNSSGNWHCDSTWMGDRVITTSTRTWALPTYNNHLYKQISSQSGASNDNHYFGYSTPWGYFDFNRFHCHFSPRDWQRLINNNWGFRPKRLNFKLFNIQVKEVTQNDGTTTIANNLTSTVQVFTDSEYQLPYVLGSAHQGCLPPFPADVFMVPQYGYLTQNNGSQAVGRSSFYCLEYFPSQMLRTGNNFTFSYTFEDVPFHSSYAHSQSLDRLMNPLIDQYLYYLSRTNTPSGTTTQSRLQFSQAGASDIRDQSRNWLPGPCYRQQRVSKTAADNNNSDYSWTGATKYHLNGRDSLVNPGTAMASHKDDEEKYFPQSGVLIFGKQDSGKTNVDIEKVMITDEEEIRTTNPVATEQYGSVSTNLQSGNTQAATSDVNTQGVLPGMVRQDRDVYLQGPIWAKIPHTDGHFHPSPLMGGFGLKHPPPQILIKNTPVPANPSTTFSAAKFASFITQYSTGQVSVEIEWEPQKENSKRWNPEIQYTSNYNKSVNVDFTVDTNGVYSEPRPIGTRYLTRNL

SEQ ID NO: 17 - protein, 735 aa, Artificial Sequence
  Synthetic Polypeptide
MAADGYLPDWLEDTLSEGIRQWWKLKPGPPPPKPAERHKDDSRGLVLPGYKYLGPFNGLDKGEPVNEADAAALEHDKAYDRQLDSGDNPYLKYNRADAEFQERLKEDTSFGGNLARAVFQAKKRVLEPLGLVEEPVKTAPGKKRPVEHSPAGPDSSSGTGKSGQQPARKRLNFGQTGDADSVPDPQPLGQPPAAPSGLGTNTMASGSGAPMADNNEGADGVGNSSGNWHCDSTWMGDRVITTSTRTWALPTYNNHLYKQISSQSGASNDNHYFGYSTPWGYFDFNRFHCHFSPRDWQRLINNNWGFRPKRLNFELFNIQVKEVTQNDGTTTIANNLTSTVQVFTDSEYQLPYVLGSAHQGCLPPFPADVFMVPQYGYPTLNNGSQAVGRSSFYCLEYFPSQMLRTGNNFTFSYTFEDVPFHSSYAHSQSLDRLMNPLIDQYLYYLSRTNTPSGTTTQSRLQFSQAGASDIRDQSRNWLPGPCYRQQRVSKTAADNNNSDYSWTGATKYHLNGRDSLVNPGTAMASHKDDEEKYFPQSGVLIFGKQDSGKTNVDIEKVMITDEEEIRTTNPVATEQYGSVSTNLQSGNTQAATSDVNTQGVLPGMVWQDRDVYLQGPIWAKIPHTDGHFHPSPLMGGFGLKHPPPQILIKSTPVPANPSTTFSAAKFASFITQYSTGQVSVEIEWELQKENSKRWNPEIQYTSNYNKSVNVDFTVDTNGVYSEPRPIGTRYLTRNL

SEQ ID NO: 18 - protein, 735 aa, Artificial Sequence
  Synthetic Polypeptide
MAADGYLPDWLEDTLSEGIRQWWKLKPGPPPPKPAERHKDDSRGLVLPGYKYLGPFNGLDKGEPVNEADAAALEHDKAYDRQLDSGDNPYLKYNHADAEFQERLKEDTSFGGNLARAVFQAKKRVLEPLGLVEEPVKTAPGKKRPVEHSPAEPDSSSGTGKSGQQPARKRLNFGQTGDADSVPDPQPLGQPPAAPSGLGTNTMASGSGAPMADNNEGADGVGNSSGNWHCDSTWMGDRVITTSTRTWALPTYNNHLYKQISSQSGASNDNHYFGYSTPWGYFDFNGFHCHFSPRDWQRLINNNWGFRPKRLNFKLFNIQVKEVTQNDGTTTIANNLTSTVQVFTDSEYQLPYVLGSAHQGCLPPFPADVFMVPQYGYLTLNNGSQAVGRSSFYCLEYFPSQMLRTGNNFTFSYTFEDVPFHSSYAHSQSLDRLMNPLIDQYLYYLSRTNTPSGTTTQSRLQFSQAGASDIRDQSRNWLPGPCYRQQRVSKTAADNNNSDYSWTGATKYHLNGRDSLVNPGTAMASHKDDEEKYFPQSGVLIFGKQDSGKTNVDIEKVMITDEEEIRTTNPVATEQYGSVSTNLQSGNTQAATSDVNTQGVLPGMVRQDRDVYLQGPIWAKIPHTDGHFHPSPLMGGFGLKHPPPQILIKNTPVPANPSTTFSAAKFASFITQYSTGQVSVEIEWEPQKENSKRWNPEIQYTSNYNKSVNVDFTVDTNGVYSEPRPIGTRYLTRNL

SEQ ID NO: 19 - protein, 735 aa, Artificial Sequence
  Synthetic Polypeptide
MAADGYLPDWLEDTLSEGIRQWWKLKPGPPPPKPAERHKDDSRGLVLPGYKYLGPFNGLDKGEPVNEADAAALEHDKAYDRQLDSGDNPYLKYNHADAEFQERLKEDTSFGGNLARAVFQAKKRVLEPPGLVEEPVKTAPGKKRPVEHSPAEPDSSSGTGKSGQQPARKRLNFGQTGDADSVPDPQPLGQPPAAPSGLGTNTMASGSGAPMADNNEGADGVGNSSGNWHCDSTWMGDRVITTSTRTWALPTYNNHLYKQISSQSGASNDNHYFGYSTPWGYFDFNRFHCHFSPRDWQRLINNNWGFRPKRLNFKLFNIQVKEVTQNDGTTTIANNLTSTVQVFTDSEYQLPYVLGSAHQGCLPPFPADVFMVPQYGYLTLNNGSQAVGRSSFYCLEYFPSQMLRTGNNFTFSYTFEDVPFHSSYAHSQSLDRLMNPLIDQYLYYLSRTNTPSGTTTQSRLQFSQAGASDIRDQSRNWLPGPCYRQQRVSKTAADNNNSDYSWTGATKYHLNGRDSLVNPGTAMASHKDDEEKYFPQSGVLIFGKQDSGKTNVDIEKVMITDEGEIRTTNPVATEQYGSVSTNLQSGNTQAATSDVNTQGVLPGMVRQDRDVYLQGPIWAKIPHTDGHFHPSPLMGGFGLKHPPPQILIKNTPVPANPSTTFSAAKFASFITQYSTGQVSVEIEWEPQKENSKRWNPEIQYTSNYSKSVNVDFTVDTNGVYSEPRPIGTRYLTRNL

SEQ ID NO: 20 - protein, 735 aa, Artificial Sequence
  Synthetic Polypeptide
MAADGYLPDWLEDILSEGIRQWWKLKPGPPPPKPAERHKDDSRGLVLPGYKYLGPFNGLDKGEPVNEADAAALEHDKAYDRQLDSGDNPYLKYNHADAEFQERLKEDTSFGGNLGRAVFQAKKRVLEPLGLVEEPVKTAPGKKRPVEQSPAEPDSSSGTGKAGNQPARKRLNFGQTGDADSVPDPQPLGQPPAAPSGLGSTTMATGSGAPMADNNEGADGVGNSSGNWHCDSQWLGDRVITTSTRTWALPTYNNHLYKQISSQSGASNDNHYFGYSTPWGYFDFNRFHCHFSPRDWQRLINNNWGFRPKRLNFKLFNIQVKEVTQNDGTTTIANNLTSTVQVFTDSEYQLPYVLGSAHQGCLPPFPADVFMVPQYGYLTLNNGSQAVGRSSFYCLEYFPSQMLRTGNNFTFSYTFEDVPFHSSYAHSQSLDRLMNPLIDQYLYYLSRTNTPSGTTTQSRLQFSQAGASDIRDQSRNWLPGPCYRQQRVSKTAADNNNSDYSWTGATKYHLNGRDSLVNPGTAMASHKDDEEKYFPQSGVLIFGKQDSGKTNVDIEKVMITDEEEIRTTNPVATEQYGSVSTNLQSGNTQAATSDVNTQGVLPGMVRQDRDVYLQGPIWAKIPHTDGHFHPSPLMGGFGLKHPPPQILIKNTPVPANPSTTFSAAKFASFITQYSTGQVSVEIEWEPQKENSKRWNPEIQYTSNYNKSVNVDFTVDTNGVYSEPRPIGTRYLTRNL

SEQ ID NO: 21 - protein, 735 aa, Artificial Sequence
  Synthetic Polypeptide
MAADGYLPDWLEDTLSEGIRQWWKLKPGPPPPKPAERHKDDSRGLVLPGYKYLGPFNGLDKGEPVNEADAAALEHDKAYDRQLDSGDNPYLKYNHADAEFQERLKEDTSFGGNLARAVFQAKKRVLEPLGLVEEPVKTAPGKKRPVEHSPAEPDSSSGTGKSGQQPARKRLNFGQTGDADSVPDPQPLGQPPAAPSGLGTNTMASGSGAPMADNNEGADGVGNSSGNWHCDSTWMGDRVITTSTRTWALPTYNNHLYKQISSQSGASNDNHYFGYSTPWGYFDFNRFHCHFSPRDWQRLINNNWGFRPKRLNFKLFNIQVKEVTQNDGTTTIANNLTSTVQVFTDSEYQLPYVLGSAHQGCLPPFPADVFMVPQYGYLTLNNGSQAVGRSSFYCLEYFPSQMLRTGNNFTFSYTFEDVPFHSSYAHSQSLDRLMNPLIDQYLYYLSRTNTPSGTTTQSRLQFSQAGASDIRDQSRNWLPGPCYRQQRVSKTAADNNNSDYSWTGATKYHLNGRDSLVNPGTAMASHKDDEEKYFPQSGVLIFGKQDSGKTNVDIEKVMITDEEEIRTTNPVATEQYGSVSTNLQSGNTQAATSDVNTQGVLPGTVRQDRDVYLQGPIWAKIPHTDGHFHPSPLMGGFGLKHPPPQILIKNTPVPANPSTTFSAAKFASFITQYSTGQVSVEIEWEPQKENSKRWNPEIQYTSNYNKSVNVDFTVDTNGVYSEPRPIGTRYLTRNL

SEQ ID NO: 22 - protein, 735 aa, Artificial Sequence
  Synthetic Polypeptide
MAADGYLPDWLEDILSEGIRQWWKLKPGPPPPKPAERHKDDSRGLVLPGYKYLGPFNGLDKGEPVNEADAAALEHDKAYDRQLDSGDNPYLKYNHADAEFQERLKEDTSFGGNLGRAVFQAKKRVLEPLGLVEEPVKTAPGKKRPVEHSPAEPDSSSGTGKSGQQPARKRLNFGQTGDADSVPDPQPLGQPPAAPSGLGTNTMASGSGAPMADNNEGADGVGNSSGNWHCDSTWMGDRVITTSTRTWALPTYNNHLYKQISSQSGASNDNHYFGYSTPWGYFDFNRFHCHFSPRDWQRLINNNWGFRPKRLNFKLFNIQVKEVTQNDGTTTIANNLTSTVQVFTDSEYQLPYVLGSAHQGCLPPFPADVFMVPQYGYLTLNNGSQAVGRSSFYCLEYFPSQMLRTGNNFTFSYTFEDVPFHSSYAHSQSLDRLMNPLIDQYLYYLSRTNTPSGTTTQSRLQFSQAGASDIRDQSRNWLPGPCYRQQRVSKTAADNNNSDYSWTGATKYHLNGRDSLVNPGTAMASHKDDEEKYFPQSGVLIFGKQDSGKTNVDIEKVMITDEEEIRTTNPVATEQYGSVSTNLQSGNTQAATSDVNTQGVLPGMVRQDRDVYLQGPIWAKIPHTDGHFHPSPLMGGFGLKHPPPQILIKNTPVPANPSTTFSAAKFASFITQYSTGQVSVEIEWEPQKENSKRWNPEIQYTSNYNKSVNVDFTVDTNGVYSEPRPIGTRYLTRNL

SEQ ID NO: 23 - protein, 735 aa, Artificial Sequence
  Synthetic Polypeptide
MAADGYLPDWLEDTLSEGIRQWWKLKPGPPPPKPAERHKDDSRGLVLPGYKYLGPFNGLDKGEPVNEADAAALEHDKAYDRQLDSGDNPYLKYNHADAEFQERLKEDTSFGGNLARAVFQAKKRVLEPLGLVEEPVKTAPGKKRPVEHSPAESDSSSGTGKSGQQPARKRLNFGQTGDADSVPDPQPLGQPPAAPSGLGTNTMASGSGAPMADNNEGADGVGNSSGNWHCDSTWMGDRVITTSTRTWALPTYNNHLYKQISSQSGASNDNHYFGYSTPWGYFDFNRFHCHFSPRDWQRLINNNWGFRPKRLNFKLFNIQVKEVTQNDGTTTIANNLTSTVQVFTDSEYQLPYVLGSAHQGCLPPFPADVFMVPQYGYLTLNNGSQAVGRSSFYCLEYFPSQMLRTGNNFTFSYTFEDVPFHSSYAHSQSLDRLMNPLIDQYLYYLSRTNTPSGTTTQSRLQFSQAGASDIRDQSRNWLPGPCYRQQRVSKTAADNNNSDYSWTGATKYHLNGRDSLVNPGTAMASHKDDEEKYFPQSGVLIFGKQDSGKTNVDIEKVMITDEEEIRTTNPVATEQYGSVSTNLQSGNTQAATSDVNTQGVLPGMVWQDRDVYLQGPIWAKIPHTDGHFHPSPLMGGFGLKHPPPQILIKNTPVPANPSTTFSAAKFASFITQYSTGQVSVEIEWELQKENSKRWNPEIQYTSNYNKSVNVDFTVDTNGVYSEPRPIGTRYLTRNL

SEQ ID NO: 24 - protein, 735 aa, Artificial Sequence
  Synthetic Polypeptide
MAADGYLPDWLEDTLSEGIRQWWKLKPGPPPPKPAERHKDDSRGLVLPGYKYLGPFNGLDKGEPVNEADAAALEHDKAYDRQLDSGDNPYLKYNHADAEFQERLKEDTSFGGNLARAVFQAKKRVLEPLGLVEEPVKTAPGKKRPVEHSPAEPDSSSGTGKSGQQPARKRLNFGQTGDADSVPDPQPLGQPPAAPSGLGTNTMASGSGAPMADNNEGADGVGNSSGNWHCDSTWMGDRVITTSTRTWALPTYNNHLYKQISSQSGASNDNHYFGYSTPWGYFDFNRFHCHFSPRDWQRLINNNWGFRPKRLNFKLFNIQVKEVTQNDGTTTIANNLTSTVQVFTDSEYQLPYVLGSAHQGCLPPFPADVFMVPQYGYLTLNNGSQAVGRSSFYCLEYFPSQMLRTGNNFTFSYTFEDVPFHSSYAHSQSLDRLMNPLIDQYLYYLSRTNTPSGTTTQSRLQFSQAGASDIRDQSRNWLPGPCYRQQRVSKTAADNNNSDYSWTGATKYHLNGRDSLVNPGTAMASHKDDEEKYFPQSGVLIFRKQDSGKTNVDIEKVMITDEEEIRTTNPVATEQYGSVSTNLQSGNTQAATSDVNTQGVLPGMVRQDRDVYLQGPIWAKIPHTDGHFHPSPLMGGFGLKHPPPQILIKNTPVPANPSTTFSAAKFASFITQYSTGQVSVEIEWEPQKENSKRWNPEIQYTSNYNKSVNVDFTVDTNGVYSEPRPIGTRYLTRNL

SEQ ID NO: 25 - protein, 735 aa, Artificial Sequence
  Synthetic Polypeptide
MAADGYLPDWLEDTLSEGIRQWWKLKPGPPPPKPAERHQDDSRGLVLPGYKYLGPFNGLDKGEPVNEADAAALEHDKAYDRQLDSGDNPYLKYNHADAEFQERLKEDTSFGGNLGRAVFQAKKRVLEPLGLVEEPVKTAPGKKRPVEHSPAEPDSSSGTGKAGQQPARKRLNFGQTGDADSVPDPQPLGQPPAAPSGLGTNTTATGSGAPMADNNEGADGVGNSSGNWHCDSTWMGDRVITTSTRTWALPTYNNHLYKQISSQSGASNDNHYFGYSTPWGYFDFNRFHCHFSPRDWQRLINNNWGFRPKRLNFKLFNIQVKEVTQNDGTTTIANNLTSTVQVFADSEYQLPYVLGSAHQGCLPPFPADVFMVPQYGYLTLNNGSQAVGRSSFYCLEYFPSQMLRTGNNFTFSYTFEDVPFHSSYAHSQSLDRLMNPLIDQYLYYLSKTNAPSGTTTMSRLQFSQAGASDIRDQSRNWLPGPCYRQQRVSKTAADNNNSDYSWTGATKYHLNGRDSLVNPGPAMASHKDDEEKYFPQSGVLIFGKQDSGKTNVDIEKVMITDEEEIRTTNPVATEQYGSVSTNLQSGNTQAATTDVNTQGVLPGMVWQDRDVYLQGPIWAKIPHTDGHFHPSPLMGGFGLKHPPPQILIKNTPVPANPSTTFSAAKFASFITQYSTGQVSVEIEWELQKENSKRWNPEIQYTSNYNKSVNVDFTVDTNGVYSEPRPIGTRYLTRNL

SEQ ID NO: 26 - protein, 735 aa, Artificial Sequence
  Synthetic Polypeptide
MAADGYLPDWLEDTLSEGIRQWWKLKPGPPPPKPAERHQDDSRGLVLPGYKYLGPFNGLDKGEPVNEADAAALEHDKAYDRQLDSGDNPYLKYNHADAEFQERLKEDTSFGGNLGRAVFQAKKRVLEPLGLVEEPVKTAPGKKRPVEHSPAEPDSSSGTGKAGQQPARKRLNFGQTGDADSVPDPQPLGQPPAAPSGLGTNTMATGSGAPMADNNEGADGVGNSSGNWHCDSTWMGDRVITTSTRTWALPTYNNHLYKQISSQSGASNDNHYFGYSTPWGYFDFNRFHCHFSPRDWQRLINNNWGFRPKRLNFKLFNIQVKEVTQNDGTTTIANNLTSTVQVFTDSEYQLPYVLGSAHQGCLPPFPADVFMVPQYGYLTLNNGSQAVGRSSFYCLEYFPSQMLRTGNNFTFSYTFEDVPFHSSYAHSQSLDRLMNPLIDQYLYYLSKTNAPSGTTTMSRLQFSQAGASDIRDQSRNWLPGPCYRQQRVSKTAADNNNSDYSWTGATKYHPNGRDSLVNPGPAMASHKDDEEKYFPQSGVLIFGKQDSGKTNVDIEKVMITDEEEIRTTNPVATEQYGSVSTNLQSGNTQAATTDVNTQGVLPGMVWQDRDVYLHGPIWAKIPHTDGHFHPSPLMGGFGLKHPPPQILIKNTPVPANPSTTFSAAKFASFITQYSTGQVSVEIEWELQKENSKRWNPEIQYTSNYNKSVNVDFTVDTNGVYSEPRPIGTRYLTRNL

SEQ ID NO: 27 - protein, 735 aa, Artificial Sequence
  Synthetic Polypeptide
MAADGYLPDWLEDTLSEGIRQWWKLKPGPPPPKPAERHQDDSRGLVLPGYKYLGPFNGLDKGEPVNEADAAALEHDKAYDRQLDSGDNPYLKYNHADAEFQERLKEDTSFGGNLGRAVFQAKKRVLEPLGLVEEPVKTAPGKKRPVEHSPAEPDSSSGTGKAGQQPARKRLNFGQTGDADSVPDPQPLGQPPAAPSGLGTNTMATGSGAPMADNNEGADGVGNSSGNWHCDSTWMGDRAITTSTRTWALPTYNNHLYKQISSQSGASNDNHYFGYSTPWGYFDFNRFHCHFSPRDWQRLINNNWGFRPKRLNFKLFNIQVKEVTQNDGTTTIANNLTSTVQVFTDSEYQLPYVLGSAHQGCLPPFPADVFMVPQYGYLTLNNGSQAVGRSSFYCLEYFPSQMLRTGNNFTFSYTFEDVPFHSSYAHSQSLDRLMNPLIDQYLYYLSKTNAPSGTTTMSRLQFSQAGASDIRDQSRNWLPGPCYRQQRVSKTAADNNNSDYSWTGATKYHLNGRDSLVNPGPAMASHKDDEEKYFPQSGVLIFGKQDSGKTNVDIEKVMITDEEEIRTTNPVATEQYGSVSTNLQSGNTQAATTDVNTQGVLPGMVWQDRDVYLQGPIWAKIPHTDGHFHPSPLMGGFGLKHPPPQILIKNTPVPANPSTTFSAAKLASFITQYSTGQVSVEIEWELQKENSKRWNPEIQYTSNYNKSVNVDFTVDTNGVYSEPRPIGTRYLTRNL

SEQ ID NO: 28 - protein, 735 aa, Artificial Sequence
  Synthetic Polypeptide
MAADGYLPDWLEDTLSEGIRQWWKLKPGPPPPKPAERHQDDSRGLVLPGYKYLGPFNGLDKGEPVNEADAAALEHDKAYDRQLDSGDNPYLKYNHADAEFQERLKEDTSFGGNLGRAVFQAKKRVLEPLGLVEEPVKTAPGKKRPVEHSPAEPDSSSGTGKAGQQPARKRLNFGQTGDADSVPDPQPPGQPPAAPSGLGTNTMATGSGAPMADNNEGADGVGNSSGNWHCDSTWMGDRVITTSTRTWALPTYNNHLYKQISSQSGASNDNHYFGYSTPWGYFDFNRFHCHFSPRDWQRLINNNWGFRPKRLNFKLFNIQVKEVTQNDGTTTIANNLTSTVQVFTDSEYQLPYVLGSAHQGCLPPFPADVFMVPQYGYLTLNNGSQAVGRSSFYCLEYFPSQMLRTGNNFTFSYTFEDVPFHSSYAHSQSLDRLMNPLIDQYLYYLSKTNAPSGTTTMSRLQFSQAGASDIRDQSRNWLPGPCYRQQRVSKTAADNNNSDYSWTGATKYHLNGRDSLVNPGPAMASHKDDEEKYFPQSGVLIFGKQDSGKTNVDIEKVMITDEEEVRTTNPVATEQYGSVSTNLQSGNTQAATTDVNTQGVLPGMVWQDRDVYLQGPIWAKIPHTDGHFHPSPLMGGFGLKHPPPQILIKNTPVPANPSTTFSAAKFASFITQYSTGQVSVEIEWELQKENSKRWNPEIQYTSNYNKSVNVDFTVDTNGVYSEPRPIGTGYLTRNL

SEQ ID NO: 29 - protein, 735 aa, Artificial Sequence
  Synthetic Polypeptide
MAADGYLPDWLEDTLSEGIRQWWKLKPGPPPPKPAERHQDDSRGLVLPGYKYLGPFNGLDKGEPVNEADAAALEHDKAYDRQLDSGDNPYLKYNHADAEFQERLKEDTSFGGNLGRAVFQAKKRVLEPLGLVEEPVKTAPGKKRPVEHSPAEPDSSSGTGKAGQQPARKRLNFGQTGDADSVPDPQPLGQPPAAPSGLGTNTVATGSGAPMADNNEGADGVGNSSGNWHCDSTWMGDRVITTSTRTWALPTYNNHLYKQISSQSGASNDNHYFGYSTPWGYFDFNRFHCHFSPRDWQRLINNNWRFRPKRLNFKLFNIQVKEVTQNDGTTTIADNLTSTVQVFTDSEYQLPYVLGSAHQGCLPPFPADVFMVPQYGYLTLNNGSQAVGRSSFYCLEYFPSQMLRTGNNFTFSYTFEDVPLHSSYAHSQSLDRLMNPLIDQYLYYLSKTNAPSGTTTMSRLQFSQAGASDIRDQSRNWLPGPCYRQQRVSKTAADNNNSDYSWTGATKYHLNGRDSLVNPGPAMASHKDDEEKYFPQSGVLIFGKQDSGKTNVDIEKVMITDEEEIRTTNPVATEQYGSVSTNLQSGNTQAATTDVNTQGVLPGMVWQDRDVYLQGPIWAKIPHTDGHFHPSPLMGGFGLKHPPPQILIKNTPVPANPSTTFSAAKLASFITQYSTGQVSVEIEWELQKENSKRWNPEIQYTSNYNKSVNVDFTADTNGVYSEPRPIGTRYLTRNL

SEQ ID NO: 30 - protein, 735 aa, Artificial Sequence
  Synthetic Polypeptide
MAADGYLPDWLEDTLSEGIRQWWKLKPGPPPPKPAERHQDDSRGLVLPGYKYLGPFNGLDKGEPVNEADAAALEHDKAYDRQLDSGDNPYLKYNHADAEFQERLKEDTSFGGNLGRAVFQAKKRVLEPLGLVEEPVKTAPGKKRPVEHSPAEPDSSSGTGKAGQQPARKRSNFGQTGDADSVPDPQPLGQPPAAPSGLGTNTMATGSGAPMADNNEGADGVGNSSGNWHCDSTWMGDRVITTSTRTWALPTYNNHLYKQISSQSGASNDNHYFGYSTPWGYFDFNRFHCHFSPRDWQRLINNNWGFRPKRLNFKLFNIQVKEVAQNDGTTTIANNLTSTVQVFTDSEYQLPYVLGSAHQGCLPPFPADVFMVPQYGYLTLNNGSQAVGRSSFYCLEYFPSQMLRTGNNFTFSYTFEDVPFHSSYAHSQSLDRLMNPLIDQYLYYLSKTNAPSGTTTMSRLQFSQAGASDIRDQSRNWLPGPCYRQQRVSKTAADNNNSDYSWTGATKYHLNGRDSLVNPGPAMASHKDDEEKYFPQSGVLIFGKQDSGKTNVDIKKVMITDEEEIRTTNPVATEQYGSVSTNLQSGNTQAATTDVNTQGVLPGMVWQDRDVYLQGPIWAKIPHTDGHFHPSPLMGGFGLKHPPPQILIKNTPVPANPSTTFSAAKFASFITQYSTGQVSVEIEWELQKENSKRWNPEIQYTSNYNKSVNVDFTVDTNGVYSEPRPIGTRYLTRNL

SEQ ID NO: 31 - protein, 734 aa, Artificial Sequence
  Synthetic Polypeptide
MAADGYLPDWLEDTLSEGIRQWWKLKPGPPPPKPAERHQDDSRGLVLPGYKYLGPFNGLDKGEPVNEADAAALEHDKAYDRQLDSGDNPYLKYNHADAEFQERLKEDTSFGGNLGRAVFQAKKRVLEPLGLVEEPVKTAPGKKRPVEHSPAEPDSSSGTGKAGQQPARKRLNFGQTGDADSVPDPQPLGQPPAAPSGLGTNTMATGSGAPMADNNEGADGVGNSSGNWHCDSTWMGDRVITTSTRTWALPTYNNHLYKQISSQSGASNDNHYFGYSTPWGYFDFNRFHCHFSPRDWQRLINNWGFRPKRLNFKLFNIQVKEVTQNDGTTTIANNLTSTVQVFTDSEYQLPYVLGSAHQGCLPPFPADVFMVPQYGYLTLNNGSQAVGRSSFYCLEYFPSQMLRTGNNFTFSYTFEDVPFHSSYAHSQSLDRLMNPLIDQYLYYLSKTNAPSGTTTMSRLQFSQAGASDIRDQSRNWLPGPCYRQQRVSKTAADNNNSDYSWTGATKYHLNGRDSLVNPGPAMASHKDDEEKYFPQSGVLIFGKQDSGKTNVDIEKVMITDEEEIRTTNPVATEQYGSVSTNLQSGNTQAATTDVNTQGVLPGMVWQDRDVYLQGPIWAKIPHTDGHFHPSPLMGGFGLKHPPPQILIKNTPVPANPSTTFSAAKFASFITQYSTGQVSVEIEWELQKENSKRWNPEIQYTSNYNKSVNVDFTVDTNGVYSEPRPIGTRYLTRNL

SEQ ID NO: 32 - protein, 735 aa, Artificial Sequence
  Synthetic Polypeptide
MAADGYLPDWLEDTLSEGIRQWWKLKPGPPPPKPAERHQDDSRGLVLPGYKYLGPFNGLDKGEPVNEADAAALEHDKAYDRQLDSGDNPYLKYNHADAEFQERLKEDTSFGGNLGRAVFQAKKRVLEPLGLVEEPVKTAPGKKRPVEHSPAEPDSSSGTGKAGQQPARKRLNFGQTGDADSVPDPQPLGQPPAAPSGLGTNTMATGSGAPMADNNEGADGVGNSSGNWHCDSTWMGDRVITTSTRTWALPTYNNHLYKQISSQSGASNDNHYFGYSTPWGYFDFNRFHCHFSPRDWQRLINNNWGFRPKRLNFKLFNIQVKEVTQNDGTTTIANNLTSTVQVFTDSEYQLPYVLGSAHQGCLPPFPADVFMVPQYGYLTLNNGSQAVGRSSFYCLEYFPSQMLRTGNNFTFSYTFEDVPFHSSYAHSQSLDRLMNPLIDQYLYYLSKTNAPSGTTTMSRLQFSQAGASDIRDQSRNWLPGPCYRQQRVSKTAADNNNSDYSWTGATKYHLNGRDSLVNPGPAMASHKDDEEKYFPQSGVLIFGKQDSGKTNVDIEKVMITDEEEIRTTNPVATEQYGSVSTNLQSGNTQAATTDVNTQGVLPGMVWQDRDVYLQGPIWAKIPHTDGHFHPSPLMGGFGLKHPPPQILIKNTPVPANPSTTFSAAKFASFITQYSTGQVSVEIEWELQKENSKRWNPEIQYTSNYNKSVNVDFTVDTNGVYSEPRPIDTRYLTRNL

SEQ ID NO: 33 - protein, 735 aa, Artificial Sequence
  Synthetic Polypeptide
MAADGYLPDWLEDTLSEGIRQWWKLKPGPPPPKPAERHQDDSRGLVLPGYKYLGPFNGLDKGEPVNEADAAALEHDKAYDRQLDSGDNPYLKYNHADAEFQERLKEDTSFGGNLGRAVFQAKKRVLEPLGLVEEPVKTAPGKKRPVEHSPAEPDSSSGTGKAGQQPARKRLNFGQTGDADSVPDPQPLGQPPAAPSGLGTNTMATGSGAPMADNNEGADGVGNSSGNWHCDSTWMGDRVITTSTRTWALPTYNNHLYKQISSQSGASNDNHYFGYSTPWGYFDFNRFHCHFSPRDWQRLINNNWGFRPKRLNFKLFNIQVKEVTQNDGTTTIANNLTSTVQVFTDSEYQLPYVLGSAHQGCLPPFPADVFMVPQYGYLTLNNGSQAVGRSSFYCLEYFPSQMLRTGNNFTFSYTFEDVPFHSSYAHSQSLDRLMNPLINQYLYYLSKTNAPSGTTTMSRLQFSQAGASDIRDQSRNWLPGPCYRQQRVSKTAADNNNSDYSWTGATKYHLNGRDSLVNPGPAMASHKDDEEKYFPQSGVLIFGKQDSGKTNVDIEKVMITDEEEIRTTNPVATEQYGSVSTNLQSGNTQAATTDVNTQGVLPGMVWQDRDVYLQGPIWAKIPHTDGHFHPSPLMGGFGLKHPPPQILIKNTPVPANPSTTFSAAKFASFITQYSTGQVSVEIEWELQKENSKRWNPEIQYTSNYNKSVNVDFTVDTNGVYSEPRPIGTRYLTRNL

SEQ ID NO: 34 - protein, 735 aa, Artificial Sequence
  Synthetic Polypeptide
MAADGYLPDWLEDTLSEGIRQWWKLKPGPPPPKPAERHQDDSRGLVLPGYKYLGPFNGLDKGEPVNEADAAALEHDKAYDRQLDSGDNPYLKYNHADAEFQERLKEDTSFGGNLGRAVFQAKKRVLEPLGLVEEPVKMAPGKKRPVEHSPAEPDSSSGTGKAGQQPARKRLNFGQTGDADSVPDPQPLGQPPAAPSGLGTNTTATGSGAPMADNNEGADGVGNSSGNWHCDSTWMGDRVITTSTRTWALPTYNNHLYKQISSQSGASNDNHYFGYSTPWGYFDFNRFHCHFSPRDWQRLINNNWGFRPKRLNFKLFNIQVKEVTQNDGTTTIANNLTSTVQVFTDSEYQLPYVLGSAHQGCLPPFPADVFMVPQYGYLTLNNGSQAVGRSSFYCLEYFPSQMLRTGNNFTFSYTFEDVPFHSSYAHSQSLDRLMNPLIDQYLYYLSKTNAPSGTTTMSRLQFSQAGASDIRDQSRNWLPGPCYRQQRVSKTAADNNNSDYSWTGATKYHLNGRDSLVNPGPAMASHKDDEEKYFPQSGVLIFGKQDSGKTNVDIEKVMITDEEEIRTTNPVATEQYGSVSTNLQSGNTQAATTDVNTQGVLPGMVWQDRDVYLQGPIWAKIPHTDGHFHPSPLMGGFGLKHPPPQILIKNTPVPANPSTTFSAAKFASFITQYSTGQVSVEIEWELQKENSKRWNPEIQYTSNYNKSVNVDFTVDTNGVYSEPRPIGTRYLTRNL

SEQ ID NO: 35 - protein, 735 aa, Artificial Sequence
  Synthetic Polypeptide
MAADGYLPDWLEDTLSEGIRQWWKLKPGPPPPKPAERHQDDSRGLVLPGYKYLGPFNGLDKGEPVNEADAAALEHDKAYDRQLDSGDNPYLKYNHADAEFQERLKEDTSFGGNLGRAVFQAKKRVLEPLGLVEEPVKTAPGKKRPVEHSPAEPDSSSGTGKAGQQPARKRLNFGQTGDADSVPDPQPLGQPPAAPSGLGTNTMATGSGAPMADNNEGADGVGNSSGNWHCDSTWMGDRVITTSTRTWALPTYNNHLYKQISSQSGASNDNHYFGYSTPWGYFDFNRFHCHFSPRDWQRLINNNWGFRPKRLNFKLFNIQVKEVTQNDGTTTIANNLTSTVQVFTDSEYQLPYVLGSAHQGCLPPFPADVFMVPQYGYLTLNNGSQAVGRSSFYCLEYFPSQMLRTGNNFTFSYTFEDVPFHSSYAHSQSLDRLMNPLIDQYLYYLSKTNAPSGTTTMSRLQFSQAGASDIRDQSRNWLPGPCYRQQRVSKTAADNNNSDYSWTGATKYHLNGRDSLVNPGPAMASHKDDEEKYFPQSGVLIFGKQDSGKTNVDIEKVMITDEEEIRTTNPMATEQYGSVSTNLQSGNTQAATTDVNTQGVLPGMVWQDRDVYLQGPIWAKIPHTDGHFHPSPLMGGFGLKHPPPQILIKNTPVPANPSTTFSAAKFASFITQYSTGQVSVEIEWELQKENSKRWNPEIQYTSNYNKSVNVDFTVDTNGVYSEPRPIGTRYLTRNL

SEQ ID NO: 36 - protein, 735 aa, Artificial Sequence
  Synthetic Polypeptide
MAADGYLPDWLEDTLSEGIRQWWKLKPGPPPPKPAERHQDDSRGLVLPGYKYLGPFNGLDKGEPVNEADAAALEHDKAYDRQLDSGDNPYLKYNHADAEFQERLKEDTSFGGNLGRAVFQAKKRVLEPLGLVEEPVKTAPGKKRPVEHSPAEPDSSSGTGKAGQQPARKRLNFGQTGDADSVPDPQPLGQPPAAPSGLGTNTMATGSGAPMADNNEGADGVGNSSGNWHCDSTWMGDRVITTSTRTWALPTYNNHLYKQISSQSGASNDNHYFGYSTPWGYFDFNRFHCHFSPRDWQRLINNNWGFRPKRLNFKLFNIQVKEVTQNDGTTTIANNLTSTVQVFTDSEYQLPYVLGSAHQGCLPPFPADVSMVPQYGYLTLNNGSQAVGRSSFYCLEYFPSQMLRTGNNFTFSYTFEDVPFHSSYAHSQSLDRLMNPLIDQYLYYLSKTNAPSGTTTMSRLQFSQAGASDIRDQSRNWLPGPCYRQQRVSKTAADNNNSDYSWTGATKYHLNGRDSLVNPGPAMASHKDDEEKYFPQSGVLIFGKQDSGKTNVDIEKVMITDEEEIRTTNPVATEQYGSVSTNLQSGNTQAATTDVNTQGVLPGMVWQDRDVYLQGPIWAKIPHTDGHFHPSPLMGGFGLKHPPPQILIKNTPVPANPSTTFSAAKLASFITQYSTGQVSVEIEWELQKENSKRWNPEIQYTSNYNKSVNVDFTVDTNGVYSEPRPIGTRYLTRNL

SEQ ID NO: 37 - protein, 735 aa, Artificial Sequence
  Synthetic Polypeptide
MAADGYLPDWPEDTLSEGIRQWWKLKPGPPPPKPAERHQDDSRGLVLPGYKYLGPFNGLDKGEPVNEADAAALEHDKAYDRQLDSGDNPYLKYNHADAEFQERLKEDTSFGGNLGRAVFQAKKRVLEPLGLVEEPVKTAPGKKRPVEHSPAEPDSSSGTGKAGQQPARKRLNFGQTGDADSVPDPQPLGQPPAAPSGLGTNTMATGSGAPMADNNEGADGVGNSSGNWHCDSTWMGDRVITTSTRTWALPTYNNHLYKQISSQSGASNDNHYFGYSTPWGYFDFNRFHCHFSPRDWQRLINNNWGFRPKRLNFKLFNIQVKEVTQNDGTTTIANNLTSTVQVFTDSEYQLPYVLGSAHQGCLPPFPADVFMVPQYGYLTLNNGSQAVGRSSFYCLEYFPSQMLRTGNNFTFSYTFEDVPFHSSYAHSQSLDRLMNPLIDQYLYYLSKTNAPSGTTTMSRLQFSQAGASDIRDQSRNWLPGPCYRQQRVSKTAADNNNSDYSWTGATKYHLNGRDSLVNPGPAMASHKDDEEKYFPQSGVLIFGKQDSGKTNVDIEKVMITDEEEIRTTNPVATEQYGSVSTNLQSGNTQAATTDVNTQGVLPGMVWQDRDVYLQGPIWAKIPHTDGHFHPSPLMGGFGLKHPPPQILIKNTPVPANPSTTFSAAKFASFITQYSTGQVSVEIEWELQKENSKRWNPEIQYTSNYNKSVNVDFTVDTNGVYSEPRPIGTRYLTRNL

SEQ ID NO: 38 - protein, 735 aa, Artificial Sequence
  Synthetic Polypeptide
MAADGYLPDWLEDTLSEGIRQWWKLKPGPPPPKPAERHQDDSRGLVLPGYKYLGPFNGLDKGEPVNEADAAALEHDKAYDRQLDSGDNPYLKYNHADAEFQERLKEDTSFGGNLGRAVFQAKKRVLEPLGLVEEPVKTAPGKKRPVEHSPAEPDSSSGTGKAGQQPARKRLNFGQTGDADSVPDPQPLGQPPAAPSGLGTNTMATGSGAPMADNNEGADGVGNSSGNWHCDSTWMGDRVITTSTRTWALPTYNNHLYKQISSQSGASNDNHYFGYSTPWGYFDFNRFHCHFSPRDWQRLINNNWGFRPKRLNFKLFNIQVKEVTQNDGTTTIANNLTSTVQVFTDSEYQLPYVLGSAHQGCLPPFPADVFMVPQYGYLTLNNGSQAVGRSSFYCLEYFPSQMLRTGNNFTFSYTFEDVPFHSSYAHSQSLDRLMNPLIDQYLYYLSKTNAPSGTTTMSRLQFSQAGASDIRDQSRNWLPGPCYRQQRVSKTAADNNNSDYSWTGATKYHLNGRDSLVNPGPAMASHKDDEEKFFPQSGVLIFGKQDSGKTNVDIEKVMITDEEEIRTTNPVATEQYGSVSTNLQSGNTQAATTDVNTQGVLPGMVWQDRDVYLQGPIWAKIPHTDGHFHPSPLMGGFGLKHPPPQILIKNTPVPANPSTTFSAAKFASFITQYSTGQVSVEIEWELQKENSKRWNPEIQYTSNYNKSVNVDFTVDTNGVYSEPRPIGTRYLTRNL

SEQ ID NO: 39 - protein, 735 aa, Artificial Sequence
  Synthetic Polypeptide
MAADGYLPDWLEDTLSEGIRQWWKLKPGPPPPKPAERHQDDSRGLVLPGYKYLGPFNGLDKGEPVNEADAAALEHDKAYDRQLDSGDNPYLKYNHADAEFQERLKEDTSFGGNLGRAVFQAKKRVLEPLGLVEEPVKTAPGKKRPVEHSPAEPDSSSGIGKAGQQPARKRLNFGQTGDADSVPDPQPLGQPPAAPSGLGTNTMATGSGAPMADNNEGADGVGNSSGNWHCDSTWMGDRVITTSTRTWALPTYNNHLYKQISSQSGASNDNHYFGYSTPWGYFDFNRFHCHFSPRDWQRLINNNWGFRPKRLNFKLFNIQVKEVTQNDGTTTIANNLTSTVQVFTDSEYQLPYVLGSAHQGCLPPFPADVFMVPQYGYLTLNNGSQAVGRSSFYCLEYFPSQMLRTGNNFTFSYTFEDVPFHSSYAHSQSLDRLMNPLIDQYLYYLSKTNAPSGTTTMSRLQFSQAGASDIRDQSRNWLPGPCYRQQRVSKTAADNNNSDYSWTGATKYHLNGRDSLVNPGPAMASHKDDEEKYFPQSGVLIFGKQDSGKTNVDIEKVMITDEEEIRTTNPVATEQYGSVSTNLQSGNTQAATTDVNTQGVLPGMVWQDRDVYLQGPIWAKIPHTDGHFHPSPLMGGFGLKHPPPQILIKNTPVPANPSTTFSAAKFASFITQYSTGQVSVEIEWELQKENSKRWNPEIQYTSNYNKSVNVDFTVDTNGVYSEPRPIGTRYLTRNL

SEQ ID NO: 40 - protein, 735 aa, Artificial Sequence
  Synthetic Polypeptide
MAADGYLPDWLEDTLSEGIRQWWKLKPGPPPPKPAERHQDDSRGLVLPGYKYLGPFNGLDKGEPVNEADAAALEHDKAYDRQLDSGDNPYLKYNHADAEFQERLKEDTSFGGNLGRAVFQAKKRVLEPLGLVEEPVKTAPGKKRPVEHSPAEPDSSSGTGKAGQQPARKRLNFGQTGDADSVPDPQPLGQPPAAPSGLGTNTMATGSGAPMADNNEGADGVGNSSGNWHCDSTWMGDRVITTSTRTWALPTYNNHLYKQISSQSGASNDNHYFGYSTPWGYFDFNRFHCHFSPRDWQRLINNNWRFRPKRLNFKLFNIQVKEVTQNDGTTTIANNLTSTVQVFTDSEYQLPYVLGSAHQGCLPPFPADVFMVPQYGYLTLNNGSQAVGRSSFYCLEYFPSQMLRTGNNFTFSYTFEDVPFHSSYAHSQSLDRLMNPLIDQYLYYLSKTNAPSGTTTMSRLQFSQAGASDIRDQSRNWLPGPCYRQQRVSKTAADNNNSDYSWTGATKYHLNGRDSLVNPGPAMASHKDDEEKYFPQSGVLIFGKQDSGKTNVDIEKVMITDEEEIRTTNPVATEQYGSVSTNLQSGNTQAATTDVNTQGVLPGMVWQDRDVYLQGPIWAKIPHTDGHFHPSPLMGGFGLKHPPPQILIKNTPVPANPSTTFSAAKLASFITQYSTGQVSVEIEWELQKENSKRWNPEIQYTSNYNKSVNVDFTVDTNGVYSEPRPIGTRYLTRNL

SEQ ID NO: 41 - protein, 735 aa, Artificial Sequence
  Synthetic Polypeptide
MAADGYLPDWLEDTLSEGIRQWWKLKPGPPPPKPAERHQDDSRGLVLPGYKYLGPFNGLDKGEPVNEADAAALEHDKAYDRQLDSGDNPYLKYNHADAEFQERLKEDTSFGGNLGRAVFQAKKRVLEPLGLVEEPVKTAPGKKRPVEHSPAEPDSSSGTGKAGQQPARKRLNFGQTGDADSVPDPQPLGQPPAAPSGLGTNTMATGSGAPMADNNEGADGVGNSSGNWHCDSTWMGDRVITTSTRTWALPTYNNHLYKQISSQSGASNDNHYFGYSTPWGYFDFNRFHCHFSPRDWQRLINNNWGFRPKRLNFKLFNIQVKEVTQNDGTTTIANNLTSTVQVFTDSEYQLPYVLGSAHQGCLPPFPADVFMVPQYGYLTLNNGSQAVGRSSFYCLEYFPSQMLRTGNNFTFSYTFEDVPFHSSYAHSQSLDRLMNPLIDQYLYYLSKTNAPSGTTTMSRLQFSQAGASDIRDQSRNWLPGPCYRQQRVSKTAADNNNSDYSWTGATKYHLNGRDSLVNPGPAMASHKDDEEKYFPQSGVLIFGKQDSGKTNVDIEKVMITDEEEIRTTNPVATEQYGSVSTNLQSGNTQAATTDVNTQGVLPGMVWQDRDVYLQGPIWAKIPHTDGHFHPSPLMGGFGLKHPPPQILIKNTPVPANPSTTFSAAKFASFITQYSTGQVSVEIEWELQKENSKRWNPEIQYTSNYNKSVNVDFTVDTNGVYSEPRPIGTRYLARNL

SEQ ID NO: 42 - protein, 735 aa, Artificial Sequence
  Synthetic Polypeptide
MAADGYLPDWLEDTLSEGIRQWWKLKPGPPPPKPAERHQDDSRGLVLPGYKYLGPFNGLDKGEPVNEADAAALEHDKAYDRQLDSGDNPYLKYNHADAEFQERLKEDTSFGGNLGRAVFQAKKRVLEPLGLVEEPVKTAPGKKRPVEHSPAEPDSSSGTGKAGQQPARKRLNFGQTGDADSVPDPQPLGQPPAAPSGLGTNTMATGSGAPMADNNEGADGVGNSSGNWHCDSTWMGDRVITTSTRTWALPTYNNHLYKQISSQSGASNDDHYFGYSTPWGYFDFNRFHCHFSPRDWQRLINNNWGFRPKRLNFKLFNIQVKEVTQNDGTTTIANNLTSTVQVFTDSEYQLPYVLGSAHQGCLPPFPADVFMVPQYGYLTLNNGSQAVGRSSFYCLEYFPSQMLRTGNNFTFSYTFEDVPFHSSYAHSQSLDRLMNPLIDQYLYYLSKTNAPSGTTTMSRLQFSQAGASDIRDQSRNWLPGPCYRQQRVSKTAADNNNSDYSWTGATKYHLNGRDSLVNPGPAMASHKDDEEKYFPQSGVLIFGKQDSGKTNVDIEKVMITDEEEIRTTNPVATEQYGSVSTNLQSGNTQAATTDVNTQGVLPGMVWQDRDVYLQGPIWAKIPHTDGHFHPSPLMGGFGLKHPPPQILIKNTPVPANPSTTFSAAKFASFITQYSTGQVSVEIEWELQKENSKRWNPEIQYTSNYNKSVNVDFTVDTNGVYSEPRPIGTRYLTRNL

SEQ ID NO: 43 - protein, 735 aa, Artificial Sequence
  Synthetic Polypeptide
MAADGYLPDWLEDTLSEGIRQWWKLKPGPPPPKPAERHQDDSRGLVLPGYKYLGPFNGLDKGEPVNEADAAALEHDKAYDRQLDSGDNPYLKYNHADAEFQERLKEDTSFGGNLGRAVFQAKKGVLEPLGLVEEPVKTAPGKKRPVEHSPAEPDSSSGTGKAGQQPARKRLNFGQTGDADSVPDPQPLGQPPAAPSGLGTNTMATGSGAPMADNNEGADGVGNSSGNWHCDSTWMGDRVITTSTRTWALPTYNNHLYKQISSQSGASNDNHYFGYSTPWGYFDFNRFHCHFSPRDWQRLINNNWGFRPKRLNFKLFNIQVKEVTQNDGTTTIANNLTSTVQVFTDSEYQLPYVLGSAHQGCLPPFPADVFMVPQYGYLTLNNGSQAVGRSSFYCLEYFPSQMLRTGNNFTFSYTFEDVPFHSSYAHSQSLDRLMNPLIDQYLYYLSKTNAPSGTTTMSRLQFSQAGASDIRDQSRNWLPGPCYRQQRVSKTAADNNNSDYSWTGATKYHLNGRDSLVNPGPAMASHKDDEEKYFPQSGVLIFGKQDSGKTNVDIEKVMITDEEEIRTTNPVATEQYGSVSTNLQSGNTQAATTDVNTQGVLPGMVWQDRDVYLQGPIWAKIPHTDGHFHPSPLMGGFGLKHPPPQILIKNTPVPANPSTTFSAAKLASFITQYSTGQVSVEIEWELQKENSKRWNPEIQYTSNYNKSVNVDFTVDTNGVYSEPRPIGTRYLTRNL

SEQ ID NO: 44 - protein, 735 aa, Artificial Sequence
  Synthetic Polypeptide
MAADGYLPDWLEDTLSEGIRQWWKLKPGPPPPKPAERHQDDSRGLVLPGYKYLGPFNGLDKGEPVNEADAAALEHDKAYDRQLDSGDNPYLKYNHADAEFQERLKEDTSFGGNLGRAVFQAKKRVLEPLGLVEEPVKTAPGKKRPVEHSPAEPDSPSGTGKAGQQPARKRLNFGQTGDADSVPDPQPLGQPPAAPSGLGTNTMATGSGAPMADNNEGADGVGNSSGNWHCDSTWMGDRVITTSTRTWALPTYNNHLYKQISSQSGASNDNHYFGYSTPWGYFDFNRFHCHFSPRDWQRLINNNWGFRPKRLNFKLFNIQVKEVTQNDGTTTIANNLTSTVQVFTDSEYQLPYVLGSAHQGCLPPFPADVFMVPQYGYLTLNNGSQAVGRSSFYCLEYFPSQMLRTGNNFTFSYTFEDVPFHSSYAHSQSLDRLMNPLIDQYLYYLSKTNAPSGTTTMSRLQFSQAGASDIRDQSRNWLPGPCYRQQRVSKTAADNNNSDYSWTGATKYHLNGRDSLVNPGPAMASHKDDEEKYFPQSGVLIFGKQDSGKTNVDIEKVMITDEEEIRTTNPVATEQYGSVSTNLQSGNTQAATTDVNTQGVLPGMVWQDRDVYLQGPIWAKIPHTDGHFHPSPLMGGFGLKHPPPQILIKNTPVPANPSTTFSAAKFASFITQYSTGQVSVEIEWELQKENSKRWNPEIQYTSNYNKSVNVDFTVDTNGVYSEPRPIGTRYLTRNL

SEQ ID NO: 45 - protein, 735 aa, Artificial Sequence
  Synthetic Polypeptide
MAADGYLPDWLEDTLSEGIRQWWKLKPGPPPPKPAERHQDDSRGLVLPGYKYLGPFNGLDKGEPVNEADAAALEHDKAYDRQLDSGDNPYLKYNHADAEFQERLKEDTSFGGNLGRAVFQAKKRVLEPLGLVEEPVKTAPGKKRPVEHSPAEPDSSSGTGKAGQQPARKRLNFGQTGDADSVPDPQPLGQPPAAPSGLGTNTMATGSGAPMADNNEGADGVGNSSGNWHCDSTWMGDRVITTSTRTWALPTYNNHPYKQISSQSGASNDNHYFGYSTPWGYFDFNRFHCHFSPRDWQRLINNNWGFRPKRLNFKLFNIQVKEVTQNDGTTTIANNLTSTVQVFTDSEYQLPYVLGSAHQGCLPPFPADVFMVPQYGYLTLNNGSQAVGRSSFYCLEYFPSQMLRTGNNFTFSYTFEDVPFHSSYAHSQSLDRLMNPLIDQYLYYLSKTNAPSGTTTMSRLQFSQAGASDIRDQSRNWLPGPCYRQQRVSKTAADNNNSDYSWTGATKYHLNGRDSLVNPGPAMASHKDDEEKYFPQSGVLIFGKQDSGKTNVDIEKVMITDEEEIRTTNPVATEQYGSVSTNLQSGNTQAATTDVNTQGVLPGMVWQDRDVYLQGPIWAKIPHTDGHFHPSPLMGGFGLKHPPPQILIKNTPVPANPSTTFSAAKFASFITQYSTGQVSVEIEWELQKENSKRWNPEIQYTSNYNKSVNVDFTVDTNGVYSEPRPIGTRYLTRNL

SEQ ID NO: 46 - protein, 735 aa, Artificial Sequence
  Synthetic Polypeptide
MAADGYLPDWLEDTLSEGIRQWWKLKPGPPPPKPAERHQDDSRGLVLPGYKYLGPFNGLDKGEPVSEADVAALEHDKAYDRQLDSGDNPYLKYNHADAEFQERLKEDTSFGGNLGRAVFQAKKRVLEPLGLVEEPVKTAPGKKRPVEHSPAEPDSSSGTGKAGQQPARKRLNFGQTGDADSVPDPQPLGQPPAAPSGLGTNTMATGSGAPMADNNEGADGVGNSSGNWHCDSTWMGDRVITTSTRTWALPTYNNHLYKQISSQSGASNDNHYFGYSTPWGYFDFNRFHCHFSPRDWQRLINNNWGFRPKRLNFKLFNIQVKEVTQNDGTTTIANNLTSTVQVFTDSEYQLPYVLGSAHQGCLPPFPADVFMVPQYGYLTLNNGSQAVGRSSFYCLEYFPSQMLRTGNNFTFSYTFEDVPFHSSYAHSQSLDRLMNPLIDQYLYYLSKTNAPSGTTTMSRLQFSQAGASDIRDQSRNWLPGPCYRQQRVSKTAADNNNSDYSWTGATKYHLNGRDSLVNPGPAMASHKDDEEKYFPQSGVLIFGKQDSGKTNVDIEKVMITDEEEIRTTNPVATEQYGSVSTNLQSGNTQAATTDVNTQGVLPGMVWQDRDVYLQGPIWAKIPHTDGHFHPSPLMGGFGLKHPPPQILIKNTPVPANPSTTFSAAKFASFITQYSTGQVSVEIEWELQKENSKRWNPEIQYTSNYNKSVNVDFTVDTNGVYSEPRPIGTRYLTRNL

SEQ ID NO: 47 - protein, 735 aa, Artificial Sequence
  Synthetic Polypeptide
MAADGYLPDWLEDTLSEGIRQWWKLKPGPPPPKPAERHQDDSRGLVLPGYKYLGPFNGLDKGEPVNEADAAALEHDKAYDRQLDSGDNPYLKYNHADAEFQERLKEDTSFGGNLGRAVFQAKKRVLEPLGLVEEPVKTAPGKKRPVEHSPAEPDSSSGTGKAGQQPARKRLNFGQTGDADSVPDPQPLGQPPAAPSGLGTNTMATGSGAPMADNNEGADGVGNSSGNWHCDSTWMGDRVITTSTRTWALPTYNNHLYKQISSQSGASNDNHYFGYSTPWGYFDFNRFHCHFSPRDWQRLINNNWGFRPKRLNFKLFNIQVKEVTQNDGTTTIANNLTSTVQVFTDSEYQLPYVLGSAHQGCLPPFPADVFMVPQYGYLTLNNGSQAVGRSSFYCLEYFPSQMLRTGNNFTFSYTFEDVPFHSSYAHSQSLDRLMNPLIDQYLYYLSKTNAPSGTTTMSRLQFSQAGASDIRDQSRNWLPGPCYRQQRVSKTAADNNNSDYSWTGATKYHLNGRDSLVNPGPAMASHKDDEEKYFPQSGVLIFGKQDSGKINVDIEKVMITDEEEIRTTNPVATEQYGSVSTNLQSGNTQAATTDVNTQGVLPGMVWQDRDVYLQGPIWAKIPHTDGHFHPSPLMGGFGLKHPPPQILIKNTPVPANPSTTFSAAKFASFITQYSTGQVSVEIEWELQKENSKRWNPEIQYTSNYNKSVNVDFTVDTNGVYSEPRPIGTRYLTRNL

SEQ ID NO: 48 - protein, 735 aa, Artificial Sequence
  Synthetic Polypeptide
MAADGYLPDWLEDTLSEGIRQWWKLKPGPPPLKPAERHQDDSRGLVLPGYKYLGPFNGLDKGEPVNEADAAALEHDKAYDRQLDSGDNPYLKYNHADAEFQERLKEDTSFGGNLGRAVFQAKKRVLEPLGLVEEPVKTAPGKKRPVEHSPAEPDSSSGTGKAGQQPARKRLNFGQTGDADSVPDPQPLGQPPAAPSGLGTNTMATGSGAPMADNNEGADGVGNSSGNWHCDSTWMGDRVITTSTRTWALPTYNNHLYKQISSQSGASNDNHYFGYSTPWGYFDFNRFHCHFSPRDWQRLINNNWGFRPKRLNFKLFNIQVKEVTQNDGTTTIANNLTSTVQVFTDSEYQLPYVLGSAHQGCLPPFPADVFMVPQYGYLTLNNGSQAVGRSSFYCLEYFPSQMLRTGNNFTFSYTFEDVPFHSSYAHSQSLDRLMNPLIDQYLYYLSKTNAPSGTTTMSRLQFSQAGASDIRDQSRSWLPGPCYRQQRVSKTAADNNNSDYSWTGATKYHLNGRDSLVNPGPAMASHKDDEEKYFPQSGVLIFGKQDSGKTNVDIEKVMITDEEEIRTTNPVATEQYGSVSTNLQSGNTQAATTDVNTQGVLPGMVWQDRDVYLQGPIWAKIPHTDGHFHPSPLMGGFGLKHPPPQILIKNTPVPANPSTTFSAAKFASFITQYSTGQVSVEIEWELQKENSKRWNPEIQYTSNYNKSVNVDFTVDTNGVYSEPRPIGTRYLTRNL

SEQ ID NO: 49 - protein, 735 aa, Artificial Sequence
  Synthetic Polypeptide
MAADGYLPDWLEDTLSEGIRQWWKLKPGPPPPKPAERHQDDSRGLVLPGYKYLGPFNGLDKGEPVNEADAAALEHDKAYDRQLDSGDNPYLKYNHADAEFQERLKEDTSFGGNLGRAVFQAKKRVLEPLGLVEEPVKTAPGKKRPVEHSPAEPDSSSGTGKAGQQPARKRLNFGQTGDADSVPDPQPLGQPPAAPSGLGTNTMATGSGAPMADNNEGADGVGNSSGNWHCDSTWMGDRVITTSTRTWALPTYNNHLYKQISSQSGASNDNHYFGYSTPWGYFDFNRFHCHFSPRDWQRLINNNWGFRPKRLNFKLFNIQVKEVTQNDGTTTIANNLTSTVQVFTDSEYQLPYVLGSAHQGCLPPFPADVFMVPQYGYLTLNNGSQAVGRSSFYCLEYFPSQMLRTGNNFTFSYTFEDVPFHSSYAHSQSLDRLMNPLIDQYLYYLSKTNAPSGTTTMSRLQFSQAGASDIRDQSRNWLPGPCYRQQRVSKTAADNNNSDYSWTGATKYHLNGRDSLVNPGPAMASHKDDEEKYFPQSGVLIFGKQDSGKTNVDIEKVMITDEEEIGTTNPVATEQYGSVSTNLQSGNTQAATTDVNTQGVLPGMVWQDRDVYLQGPIWAKIPHTDGHFHPSPLMGGFGLKHPPPQILIKNTPVPANPSTTFSAAKFASFITQYSTGQVSVEIEWELQKENSKRWNPEIQYTSNYNKSVNVDFTVDTNGVYSEPRPIGTRYLTRNL

SEQ ID NO: 50 - protein, 735 aa, Artificial Sequence
  Synthetic Polypeptide
MAADGYLPDWLEDTLSEGIRQWWKLKPGPPPPKPAERHQDDSRGLVLPGYKYLGPFNGLDKGEPVNEADAAALEHDKAYDRQLDSGDNPYLKYNHADAEFQERLKEDTSFGGNLGRAVFQAKKRVLEPLGLVEEPVKTAPGKKRPVEHSPAEPDSSSGTGKAGQQPARKRLNFGQTGDADSVPDPQPLGQPPAAPSGLGTNTMATGSGAPMADNNEGADGVGNSSGNWHCDSTWMGDRVITTSTRTWALPTYNNHLYKQISSQSGASNDNHYFGYSTPWGYFDFNRFHCHFSPRDWQRLINNNWGFRPKRLNFKLFNIQVKEVTQNDGTTTIANNLTSTVQVFTDSEYRLPYVLGSAHQGCLPPFPADVFMVPQYGYLTLNNGSQAVGRSSFYCLEYFPSQMLRTGNNFTFSYTFEDVPFHSSYAHSQSLDRLMNPLIDQYLYYLSKTNAPSGTTTMSRLQFSQAGASDIRDQSRNWLPGPCYRQQRVSKTAADNNNSDYSWTGATKYHLNGRDSLVNPGPAMASHKDDEEKYFPQSGVLIFGKQDSGKTNVDIEKVMITDEEEIRTTNPVATEQYGSVSTNLQSGNTQAATTDVNTQGVLPGMVWQDRDVYLQGPIWAKIPHTDGHFHPSPLMGGFGLKHPPPQILIKNTPVPANPSTTFSAAKFASFITQYSTGQVSVEIEWELQKENSKRWNPEIQYTSNYNKSVNVDFTVDTNGVYSEPRPIGTRYLTRNL

SEQ ID NO: 51 - protein, 735 aa, Artificial Sequence
  Synthetic Polypeptide
MAADGYLPDWLEDTLSEGIRQWWKLKPGPPPPKPAERHQDDSRGLVLPGYKYLGPFNGLDKGEPVNEADAAALEHDKAYDRQLDSGDNPYLKYNHADAEFQERLKEDTSFGGNLGRAVFQAKKRVLEPLGLVEEPVKTAPGKKRPVEHSPAEPDSSSGTGKAGQQPARKRLNFGQTGDADSVPDPQPLGQPPAAPSGLGTNTMATGSGAPMADNNEGADGVGNSSGNWHCDSTWMGDRVITTSTRTWALPTYNNHLYKQISSQSGASNDNHYFGYSTPWGYFDFNRFHCHFSPRDWQRLINNNWGFRPKRLNFKLFNIQVKEVTQNDGTTTIANNLTSTVQVFTDSEYQLPYVLGSAHQGCLPPFPADVFMVPQYGYLTLNNGSQAVGRSSFYCLEYFPSQMLRTGNNFTFSYTFEDVPFHSSYAHSQSLDRLMNPLIDQYLYYLSKTNAPSGTTTMSRLQFSQAGASDIRDQSRNWLPGPCYRQQRVSKTAADNNNSDYSWTGATKYHLNGRDSLVNPGPAMASHKDDEEKYFPQSGVLIFGKQDSGKTNVDIEKVMITDEEEIRTTNPVATEQYGSVSTNLQSGNTQAATTDVNTQGVLPGMVWQDRDVYLQGPIWAKIPHTDGHFHPSPLMGGFGLKHPPPQILIKNTPVPANPSTTFSAAKFASFITQYSTGQVSVEIEWELQKENSKRWNPKIQYTSNYNKSVNVDFTVDTNGVYSEPRPIGTRYLTRNL

SEQ ID NO: 52 - protein, 735 aa, Artificial Sequence
  Synthetic Polypeptide
MAADGYLPDWLEDTLSEGIRQWWKLKPGPPPPKPAERHQDDSRGLVLPGYKYLGPFNGLDKGEPVNEADAAALEHDKAYDRQLDSGDNPYLKYNHADAESQERLKEDTSFGGNLGRAVFQAKKRVLEPLGLVEEPVKTAPGKKRPVEHSPAEPDSSSGTGKAGQQPARKRLNFGQTGDADSVPDPQPLGQPPAAPSGLGTNTMATGSGAPMADNNEGADGVGNSSGNWHCDSTWMGDRVITTSTRTWALPTYNNHLYKQISSQSGASNDNHYFGYSTPWGYFDFNRFHCHFSPRDWQRLINNNWGFRPKRLNFKLFNIQVKEVTQNDGTTTIANNLTSTVQVFTDSEYQLPYVLGSAHQGCLPPFPADVFMVPQYGYLTLNNGSQAVGRSSFYCLEYFPSQMLRTGNNFTFSYTFEDVPFHSSYAHSQSLDRLMNPLIDQYLYYLSKTNAPSGTTTMSRLQFSQAGASDIRDQSRNWLPGPCYRQQRVSKTAADNNNSDYSWTGATKYHLNGRDSLVNPGPAMASHKDDEEKYFPQSGVLIFGKQDSGKTNVDIEKVMITDEEEIRTTNPVATEQYGSVSTNLQSGNTQAATTDVNTQGVLPGMVWQDRDVYLQGPIWAKIPHTDGHFHPSPLMGGFGLKHPPPQILIKNTPVPANPSTTFSAAKFASFITQYSTGQVSVEIEWELQKENSKRWNPEIQYTSNYNKSVNVDFTVDTNGVYSEPRPIGTRYLTRNL

SEQ ID NO: 53 - protein, 735 aa, Artificial Sequence
  Synthetic Polypeptide
MAADGYLPDWLEDTLSEGIRQWWKLKPGPPPPKPAERHQDDSRGLVLPGYKYLGPFNGLDKGEPVNEADAAALEHDKAYDRQLDSGDNPYLKYNHADAEFQERLKEDTSFGGNLGRAVFQAKKRVLEPLGLVEEPVKTAPGKKRPVEHSPAEPDSSSGTGKAGQQPARKRLNFGQTGDADSVPDPQPLGQPPAAPSGLGTNTMATGSGAPTADNNEGADGVGNSSGNWHCDSTWMGDRVITTSTRTWALPTYNNHLYKQISSQSGASNDNHYFGYSTPWGYFDFNRFHCHFSPRDWQRLINNNWGFRPKRLNFKLFNIQVKEVTQNDGTTTIANNLTSTVQVFTDSEYQLPYVLGSAHQGCLPPFPADVFMVPQYGYLTLNNGSQAVGRSSFYCLEYFPSQMLRTGNNFTFSYTFEDVPFHSSYAHSQSLDRLMNPLIDQYLYYLSKTNAPSGTTTMSRLQFSQAGASDIRDQSRNWLPGPCYRQQRVSKTAADNNNSDYSWTGATKYHLNGRDSLVNPGPAMASHKDDEEKYFPQSGVLIFGKQDSGKTNVDIEKVMITDEEEIRTTNPVATEQYGSVSTNLQSGNTQAATTDVNTQGVLPGMVWQDRDVYLQGPIWAKIPHTDGHFHPSPLMGGFGLKHPPPQILIKNTPVPANPSTTFSAAKFASFITQYSTGQVSVEIEWELQKENSKRWNPEIQYTSNYNKSVNVDFTVDTNGVYSEPRPIGTRYLTRNL

SEQ ID NO: 54 - protein, 735 aa, Artificial Sequence
  Synthetic Polypeptide
MAADGYLPDWLEDTLSEGIRQWWKLKPGPPPPKPAERHQDDSRGLVLPGYKYLGPFNGLDKGEPVNEADAAALEHDKAYDRQLDSGDNPYLKYNHADAEFQERLKEDTSFGGNLGRAVFQAKKRVLEPLGLVEEPVKTAPGKKRPVEHSPAEPDASSGTGKAGQQPARKRLNFGQTGDADSVPDPQPLGQPPAAPSGLGTNTMATGSGAPMADNNEGADGVGNSSGNWHCDSTWMGDRVITTSTRTWALPTYNNHLYKQISSQSGASNDNHYFGYSTPWGYFDFNRFHCHFSPRDWQRLINNNWGFRPKRLNFKLFNIQVKEVTQNDGTTTIANNLTSTVQVFTDSEYQLPYVLGSAHQGCLPPFPADVFMVPQYGYLTLNNGSQAVGRSSFYCPEYFPSQMLRTGNNFTFSYTFEDVPFHSSYAHSQSLDRLMNPLIDQYLYYLSKTNAPSGTTTMSRLQFSQAGASDIRDQSRNWLPGPCYRQQRVSKTAADNNNSDYSWTGATKYHLNGRDSLVNPGPAMASHKDDEEKYFPQSGVLIFGKQDSGKTNVDIEKVMITDEEEIRTTNPVATEQYGSVSTNLQSGNTQAATTDVNTQGVLPGMVWQDRDVYLQGPIWAKIPHTDGHFHPSPLMGGFGLKHPPPQILIKNTPVPANPSTTFSAAKFASFITQYSTGQVSVEIEWELQKENSKRWNPEIQYTSNYNKSVNVDFTVDTNGVYSEPRPIGTRYLTRNL

SEQ ID NO: 55 - protein, 735 aa, Artificial Sequence
  Synthetic Polypeptide
MAADGYLPDWLEDTLSEGIRQWWKLKPGPPPPKPAERHQDDSRGLVLPGYKYLGPFNGLDKGEPVNEADAAALEHDKAYDRQLDSGDNPYLKYNHADAEFQERLKEDTSFGGNLGRAVFQAKKRVLEPLGLVEEPVKTAPGKKRPVEHSPAEPDSSSGTGKAGQQPARKRLNFGQTGDADSVPDPQPLGQPPAAPSGLGTNTMATGSGAPMADNNEGADGVGNSSGNWHCDSTWMGDRVITTSTRTWALPTYNNHLYKQISSQSGASNDNHYFGYSTPWGYFDFNRFHCHFSPRDWQRLINNNWGLRPKRLNFKLFNIQVKEVTQNDGTTTIANNLTSTVQVFTDSEYQLPYVLGSAHQGCLPPFPADVFMVPQYGYLTLNNGSQAVGRSSFYCLEYFPSQMLRTGNNFTFSYTFEDVPFHSSYAHSQSLDRLMNPLIDQYLYYLSKTNAPSGTTTMSRLQFSQAGASDIRDQSRNWLPGPCYRQQRVSKTAADNNNSDYSWTGATKYHLNGRDSLVNPGPAMASHKDDEEKYFPQSGVLIFGKQDSGKTNVDIEKVMITDEEEIRTTNPVATEQYGSVSTNLQSGNTQAATTDVNTQGVLPGMVWQDRDVYLQGPIWAKIPHTDGHFHPSPLMGGFGLKHPPPQILIKNTPVPANPSTTFSAAKFASFITQYSTGQVSVEIEWELQKENSKRWNPEIQYTSNYNKSVNVDFTVDTNGVYSEPRPIGTRYLTRNL

SEQ ID NO: 56 - protein, 735 aa, Artificial Sequence
  Synthetic Polypeptide
MAADGYLPDWLEDTLSEGIRQWWKLKPGPPPPKPAERHQDDSRGLVLPGYKYLGPFNGLDKGEPVNEADAAALEHDKAYDRQLDSGDNPYLKYNHADAEFQERLKEDTSFGGNLGRAVFQAKKRVLEPLGLVEEPVKTAPGKKRPVEHFPAEPDSSSGTGKAGQQPARKRLNFGQTGDADSVPDPQPLGQPPAAPSGLGTNTMATGSGAPMADNNEGADGVGNSSGNWHCDSTWMGDRVITTSTRTWALPTYNNHLYKQISSQSGASNDNHYFGYSTPWGYFDFNRFHCHFSPRDWQRLINNNWGFRPKRLNFKLFNIQVKEVTQNDGTTTIANNLTSTVQVFTDSEYQLPYVLGSAHQGCLPPFPADVFMVPQYGYLTLNNGSQAVGRSSFYCLEYFPSQMLRTGNNFTFSYTFEDVPFHSSYAHSQSLDRLMNPLIDQYLYYLSKTNAPSGTTTMSRLQFSQAGASDIRDQSRNWLPGPCYRQQRVSKTAADNNNSDYSWTGATKYHLNGRDSLVNPGPAMASHKDDEEKYFPQSGVLIFGKQDSGKTNVDIEKVMITDEEEIRTTNPVATEQYGSVSTNLQSGNTQAATTDVNTQGVLPGMVWQDRDVYLQGPIWAKIPHTDGHFHPSPLMGGFGLKHPPPQILIKNTPVPANPSTTFSAAKFASFITQYSTGQVSVEIEWELQKENSKRWNPEIQYTSNYNKSVNVDFTVDTNGVYSEPRPIGTRYLTRNL

SEQ ID NO: 57 - protein, 735 aa, Artificial Sequence
  Synthetic Polypeptide
MAADGYLPDWLKDTLSEGIRQWWKLKPGPPPPKPAERHQDDSRGLVLPGYKYLGPFNGLDKGEPVNEADAAALEHDKAYDRQLDSGDNPYLKYNHADAEFQERLKEDTSFGGNLGRAVFQAKKRVLEPLGLVEEPVKTAPGKKRPVEHSPAEPDSSSGTGKAGQQPARKRLNFGQTGDADSVPDPQPLGQPPAAPSGLGTNTMATGSGAPMADNNEGADGVGNSSGNWHCDSTWMGDRVITTSTRTWALPTYNNHLYKQISSQSGASNDNHYFGYSTPWGYFDFNRFHCHFSPRDWQRLINNNWGFRPKRLNFKLFNIQVKEVTQNDGTTTIANNLTSTVQVFTDSEYQLPYVLGSAHQGCLPPFPADVFMVPQYGYLTLNNGSQAVGRSSFYCLEYFPSQMLRTGNNFTFSYTFEDVPFHSSYAHSQSLDRLMNPLIDQYLYYLSKTNAPSGTTTMSRLQFSQAGASDIRDQSRNWLPGPCYRQQRVSKTAADNNNSDYSWTGATKYHLNGRDSLVNPGPAMASHKDDEEKYFPQSGVLIFGKQDSGKTNVDIEKVMITDEEEIRTTNPVATEQYGSVSTNLQSGNTQAATTDVNTQGVLPGMVWQDRDVYLQGPIWAKIPHTDGHFHPSPLMGGFGLKHPPPQILIKNTPVPANPSTTFSAAKFASFITQYSTGQVSVEIEWELQKENSKRWNPEIQYTSNYNKSVNVDFTVDTNGVYSEPRPIGTRYLTRNL

SEQ ID NO: 58 - protein, 735 aa, Artificial Sequence
  Synthetic Polypeptide
MAADGYLPDWLEDTLSEGIRQWWKLKPGPPPPKPAERHQDDSRGLVLPGYKYLGPFNGLDKGEPVNEADVAALEHDKAYDRQLDSGDNPYLKYNHADAEFQERLKEDTSFGGNLGRAVFQAKRRVLEPLGLVEEPVKTAPGKKRPVEHSPAEPDSSSGTGKAGQQPARKRLNFGQTGDADSVPDPQPLGQPPAAPSGLGTNTMATGSGAPMADNNEGADGVGNSSGNWHCDSTWMGDRVITTSTRTWALPTYNNHLYKQISSQSGASNDNHYFGYSTPWGYFDFNRFHCHFSPRDWQRLINNNWGFRPKRLNFKLFNIQVKEVTQNDGTTTIANNLTSTVQVFTDSEYQLPYVLGSAHQGCLPPFPADVFMVPQYGYLTLNNGSQAVGRSSFYCLEYFPSQMLRTGNNFTFSYTFEDVPFHSSYAHSQSLDRLMNPLIDQYLYYLSKTNAPSGTTTMSRLQFSQAGASDIRDQSRNWLPGPCYRQQRVSKTAADNNNSDYSWTGATKYHLNGRDSLVNPGPAMASHKDDEEKYFPQSGVLIFGKQDSGKTNVDIEKVMITDEEEIRTTNPVATEQYGSVSTNLQSGNTQAATTDVNTQGVLPGMVWQDRDVYLQGPIWAKIPHTDGHFHPSPLMGGFGLKHPPPQILIKNTPVPANPSTTFSAAKFASFITQYSTGQVSVEIEWELQKENSKRWNPEIQYTSNYNKSVNVDFTVDTNGVYSEPRPIGTRYLTRNL

SEQ ID NO: 59 - protein, 735 aa, Artificial Sequence
  Synthetic Polypeptide
MAADGYLPDWLEDTLSEGIRQWWKLKPGPPPPKPAERHQDDSRGLVLPGYKYLGPFNGLDKGEPVNEADAAALEHDKAYDRQLDSGDNPYLKYNHADAEFQERLKEDTSFGGNLGRAVFQAKKRVLEPLGLVEEPVKTAPGKKRPVEHSPAEPDSSSGTGKAGQQPARKRLNFGQTGDADSVPDPQPLGQPPAAPSGLGTNTMATGSGAPMADNNEGADGVGNSSGNWHCDSTWMGDRVITTSTRTWALPTYNNHLYKQISSQSGASNDNHYFGYSTPWGYFDFNRFHCHFSPRDWQRLINNNWGFRPKRLNFKLFNIQVKEVTQNDGTTTIANNLTSTVQVFTDSEYQLPYVLGSAHQGCLPPFPADVFMVPQYGYLTLNNGSQAVGRSSFYCLEYFPSQMLRTGNNFTFSYTFEDVPFHSSYAHSQSLDRLMNPLIDQYLYYLSKTNALSGTTTMSRLQFSQAGASDIRDQSRNWLPGPCYRQQRVSKTAADNNNSDYSWTGATKYHLNGRDSLVNPGPAMASHKDDEEKYFPQSEVLIFGKQDSGKTNVDIEKVMITDEEEIRTTNPVATEQYGSVSTNLQSGNTQAATTDVNTQGVLPGMVWQDRDVYLQGPIWAKIPHTDGHFHPSPLMGGFGLKHPPPQILIKNTPVPANPSTTFSAAKLASFITQYSTGQVSVEIEWELQKENSKRWNPEIQYTSNYNKSVNVDFTVDTNGVYSEPRPIGTRYLTRNL

SEQ ID NO: 60 - protein, 735 aa, Artificial Sequence
  Synthetic Polypeptide
MAADGYLPDWLEDTLSEGIRQWWKLKPGPPPPKPAERHQDDSRGLVLPGYKYLGPFNGLDKGEPVNEADAAALEHDKAYDRQLDSGDNPYLKYNHADAEFQERLKEDTSFGGNLGRAVFQAKKRVLEPLGLVEEPVKTAPGKKRPVEHSPAEPDSSSGTGKAGQQPARKRLNFGQTGDADSVPDPQPLGQPPAAPSGLGTNTMATGSGAPMADNNEGADGVGNSSGNWHCDSTWMGDRVITTSTRTWALPTYNNHLYKQISSQSGASNDNHYFGYSTPWGYFDFNRFHCHFSPRDWQRLINNNWGFRPKRLNFKLFNIQVKEVTQNDGTTTIANNLTSTVQVFTDSEYQLPYALGSAHQGCLPPFPADVFMVPQYGYLTLNNGSQAVGRSSFYCLEYFPSQMLRTGNNFTFSYTFEDVPFHSSYAHSQSLDRLMNPLIDQYLYYLSKTNAPSGTTTMSRLQFSQAGASDIRDQSRNWLPGPCYRQQRVSKTAADNNNSDYSWTGATKYHLNGRDSLVNPGPAMASHKDDEEKYFPQSGVLIFGKQDSGKTNVDIEKVMITDEEEIRTTNPVATEQYGSVSTNLQSGNTQAATTDVNTQGVLPGMVWQDRDVYLQGPIWAKIPHTDGHFHPSPLMGGFGLKHPPPQILIKNTPVPANPSTTFSAAKFASFITQYSTGQVSVEIEWELQKENSKRWNPEIQYTSNYNKSVNVDFTVDTNGVYSEPRPIGTRYLTRNL

SEQ ID NO: 61 - protein, 735 aa, Artificial Sequence
  Synthetic Polypeptide
MAADGYLPDWLEDTLSEGIRQWWKLKPGPPPPKPAERHQDDSRGLVLPGYKYLGPFNGLDKGEPVNEADAAALEHDKAYDRQLDSGDNPYLKYNHADAEFQERLKEDTSFGGNLGRAVFQAKKRVLEPLGLVEEPVKTAPGKKRPVEHSPAEPDSSSGTGKAGQQPARKRLNFGQTGDADSVPDPQPLGQPPAAPSGLGTNTMATGSGAPMADNNEGADGVGNSSGNWHCDSTWMGDRVITTSTRTWALPTYNNHLYKQISSQSGASNDNHYFGYSTPWGYFDFSRFHCHFSPRDWQRLINNNWGFRPKRLNFKLFNIQVKEVTQNDGTTTIANNLTSTVQVFTDSEYQLPYVLGSAHQGCLPPFPADVFMVPQYGYLTLNNGSQAVGRSSFYCLEYFPSQMLRTGNNFTFSYTFEDVPFHSSYAHSQSLDRLMNPLIDQYLYYLSKTNAPSGTTTMSRLQFSQAGASDIRDQSRNWLPGPCYRQQRVSKTAADNNNSDYSWTGATKYHLNGRDSLVNPGPAMASHKDDEEKYFPQSGVLIFGKQDSGKTNVDIEKVMITDEEEIRTTNPVATEQYGSVSTNLQSGNTQAATTDVNTQGVLPGMVWQDRDVYLQGPIWAKIPHTDGHFHPSPLMGGFGLKHPPPQILIKNTPVPANPSTTFSAAKFASFITQYSTGQVSVEIEWELQKENSKRWNPEIQYTSNYNKSVNVDFTVDTNGVYSEPRPIGTRYLTRNL

SEQ ID NO: 62 - protein, 735 aa, Artificial Sequence
  Synthetic Polypeptide
MAADGYLPDWLEDTLSEGIRQWWKLKPGPPPPKPAERHQDDSRGLVLPGYKYLGPFNGLDKGEPVNEADAAALEHDKAYDRQLDSGDNPYLKYNHADAEFQERLKEDTSFGGNLGRAVFQAKKRVLEPLGLVEEPVKTAPGKKRPVEHSPAEPDSSSGTGKAGQQPARKRLNFGQTGDADSVPDPQPLGQPPAAPSGLGTNTMATGSGAPMADNNEGADGVGNSSGNWHCDSTWMGDRVITTSTRTWALPTYNNHLYKQISSQSGASNDNHYVGYSTPWGYFDFNRFHCHFSPRDWQRLINNNWGFRPKRLNFKLFNIQVKEVTQNDGTTTIANNLTSTVQVFTDSEYQLPYVLGSAHQGCLPPFPADVFMVPQYGYLTLNNGSQAVGRSSFYCLEYFPSQMLRTGNNFTFSYTFEDVPFHSSYAHSQSLDRLMNPLIDQYLYYLSKTNAPSGTTTMSRLQFSQAGASDIRDQSRNWLPGPCYRQQRVSKTAADNNNSDYSWTGATKYHLNGRDSLVNPGPAMASHKDDEEKYFPQSGVLIFGKQDSGKTNVDIEKVMITDEEEIRTTNPVATEQYGSVSTNLQSGNTQAATTDVNTQGVLPGMVWQDRDVYLQGPIWAKIPHTDGHFHPSPLMGGFGLKHPPPQILIKNTPVPANPSTTFSAAKFASFITQYSTGQVSVEIEWELQKENSKRWNPEIQYTSNYNKSVNVDFTVDTNGVYSEPRPIGTRYLTRNL

SEQ ID NO: 63 - protein, 735 aa, Artificial Sequence
  Synthetic Polypeptide
MAADGYLPDWLEDTLSEGIRQWWKLKPGPPPPKPAERHQDDSRGLVLPGYKYLGPFNGLDKGEPVNEADAAALEHDKAYDRQLDSGDNPYLKYNHADAEFQERLKEDTSFGGNLGRAVFQAKKRVLEPLGLVEEPVKTAPGKKRPVEHSPAEPDSSSGTGKAGQQPARKRLNFGQTGDADSVPDPQPLGQPPAAPSGLGTNTMATGSGAPMADNNEGADGVGNSSGNWHCDSTWMGDRVITTSTRTWALPTYNNHLYKQISSQSGASNDNHYFGYSTPWGHFDFNRFHCHFSPRDWQRLINNNWGFRPKRLNFKLFNIQVKEVTQNDGTTTIANNLTSTVQVFTDSEYQLPYVLGSAHQGCLPPFPADVFMVPQYGYLTLNNGSQAVGRSSFYCLEYFPSQMLRTGNNFTFSYTFEDVPFHSSYAHSQSLDRLMNPLIDQYLYYLSKTNAPSGTTTMSRLQFSQAGASDIRDQSRNWLPGPCYRQQRVSKTAADNNNSDYSWTGATKYHLNGRDSLVNPGPAMASHKDDEEKYFPQSGVLIFGKQDSGKTNVDIEKVMITDEEEIRTTNPVATEQYGSVSTNLQSGNTQAATTDVNTQGVLPGMVWQDRDVYLQGPIWAKIPHTDGHFHPSPLMGGFGLKHPPPQILIKNTPVPANPSTTFSAAKFASFITQYSTGQVSVEIEWELQKENSKRWNPEIQYTSNYNKSVNVDFTVDTNGVYSEPRPIGTRYLTRNL

SEQ ID NO: 64 - protein, 735 aa, Artificial Sequence
  Synthetic Polypeptide
MAADGYLPDWLEDTLSEGIRQWWKLKPGPPPPKPAERHQDDSRGLVLPGYKYLGPFNGLDKGEPVNEADVAALEHDKAYDRQLDSGDNPYLKYNHADAEFQERLKEDTSFGGNLGRAVFQAKKRVLEPLGLVEEPVKTAPGKKRPVEHSPAEPDSSSGTGKAGQQPARKRLNFGQTGDADSVPDPQPLGQPPAAPSGLGTNTMATGSGAPMADNNEGADGVGNSSGNWHCDSTWMGDRVITTSTRTWALPTYNNHLYKQISSQSGASNDNHYFGYSTPWGYFDFNRFHCHFSPRDWQRLINNDWGFRPKRLNFKLFNIQVKEVTQNDGTTTIANNLTSTVQVFTDSEYQLPYVLGSAHQGCLPPFPADVFMVPQYGYLTLNNGSQAVGRSSFYCLEYFPSQMLRTGNNFTFSYTFEDVPFHSSYAHSQSLDRLMNPLIDQYLYYLSKTNAPSGTTTMSRLQFSQAGASDIRDQSRNWLPGPCYRQQRVSKTAADNNNSDYSWTGATKYHLNGRDSLVNPGPAMASHKDDEEKYFPQSGVLIFGKQDSGKTNVDIEKVMITDEEEIRTTNPVATEQYGSVSTNLQSGNTQAATTDVNTQGVLPGMVWQDRDVYLQGPIWAKIPHTDGHFHPSPLMGGFGLKHPPPQILIKNTPVPANPSTTFSAAKFASFITQYSTGQVSVEIEWELQKENSKRWNPEIQYTSNYNKSVNVDFTVDTNGVYSEPRPIGTRYLTRNL

SEQ ID NO: 65 - protein, 735 aa, Artificial Sequence
  Synthetic Polypeptide
MAADGYLPDWLEDTLSEGIRQWWKLKPGPPPPKPAERHQDDSRGLVLPGYKYLGPFNGLDKGEPVNEADAAALEHDKAYDRQLDSGDNPYLKYNHADAEFQERLKEDTSFGGNLGRAVFQAKKRVLEPLGLVEEPVKTAPGKKRPVEHSPAEPDSSSGTGKAGQQPARKRLNFGQTGDADSVPDPQPLGQPPAAPSGLGTNTMATGSGAPMADNNEGADGVGNSSGNWHCDSTWMGDRVITTSTRTWALPTYNNHLYKQISSQSGASNDNHYFGYSTPWGYFDFNRFHCHFSPRDWQRLINNNWGFRPKRLNFKLFNIQVKEVTQNDGTTTIANNLTSTVQVFTDSEYQLPYVLGSAHQGCLPPFPADVFMVPQYGYLTLNNGSQAVGRSSFYCLEYFPSQMLRTGNNFTFSYTFEDVPFHSSYAHSQSLDRLMNPLIDQYLYYLSKTNAPSGTTTMSRLQFSQAGASDIRDQSRNWLPGPCYRQQRVSKTAADNNNSDYSWTGATKYHLNGRDSLVNPGPAMASHKDDEEKYFPQSGVLIFGKQDSEKTNVDIEKVMITDEEEIRTTNPVATEQYGSVSTNLQSGNTQAATTDVNTQGVLPGMVWQDRDVYLQGPIWAKIPHTDGHFHPSPLMGGFGLKHPPPQILIKNTPVPANPSTTFSAAKFASFITQYSTGQVSVEIEWELQKENSKRWNPEIQYTSNYNKSVNVDFTVDTNGVYSEPRPIGTRYLTRNL

SEQ ID NO: 66 - protein, 735 aa, Artificial Sequence
  Synthetic Polypeptide
MAADGYLPDWLEDTLSEGIRQWWKLKPGPPPPKPAERHQDDSRGLVLPGYKYLGPFNGLDKGEPVNEADAAALEHDKAYDRQLDSGDNPYLKYNHADAEFQERLKEDTSFGGNLGRAVFQAKKRVLEPLGLVEEPVKTAPGKKRPVEHSPAEPDSSSGTGKAGQQPARKRLNFGQTGDADSVPDPQPLGQPPAAPSGLGTNTMATGSGAPMADNNEGADGVGNSSGNWHCDSTWMGDRVITTSTRTWALPTYNNHLYKQISSQSGASNDNHYFGYSTPWGYFDFNRFHCHFSPRDWQRLINNNWGFRPKRLNFKLFNIQVKEVTQNDGTTTIANNLTSTVQVFTDSEYQLPYVLGSAHQGCLPPFPADVFMVPQYGYLTLNNGSQAVGRSSFYCLEYFPSQMLRTGNNFTFSYTFEDVPFHSSYAHSQSLDRLMNPLIDQYLYYLSKTNAPSGTTTMSRLQFSQAGASDIRDQSRNWLPGPCYRQQRVSKTAADNNNSDYSWTGATKYHLNGRDSLVNPGPAMASHKDDEEKYFPQSGVLIFGKQDSGKTNVDIEKVMITDEEEIRTTNPVATEQYGSVSTNLQSGNTQAATTDVNTQGVLPGMVWQDRDVYLQGPIWAKIPHTDGHFHPSPLMGGFGLKHPPPQILIKNTPVPANPSTTFSAAKFASFITQYSTGQVSVEIEWELQKENSKRWNPEIQYTSNYNKSVNVDFTVDTNGVYSEPRPIGTRYLTRNL

SEQ ID NO: 67 - protein, 735 aa, Artificial Sequence
  Synthetic Polypeptide
MAADGYLPDWLEDTLSEGIRQWWKLKPGPPPPKPAERHQDDSRGLVLPGYKYLGPFNGLDKGEPVNEADVAALEHDKAYDRQLDSGDNPYLKYNHADAEFQERLKEDTSFGGNLGRAVFQAKKRVLEPLGLVEEPVKTAPGKKRPVEHSPAEPDSSSGTGKAGQQPARKRLNFGQTGDADSVPDPQPLGQPPAAPSGLGTNTMATGSGAPMADNNEGADGVGNSSGNWHCDSTWMGDRVITTSTRTWALPTYNNHLYKQISSQSGASNDNHYFGYSTPWGYFDFNRFHCHFSPRDWQRLINNNWGFRPKRLNFKLFNIQVKEVTQNDGTTTIANNLTSTVQVFTDSEYQLPYVLGSAHQGCLPPFPADVFMVPQYGYLTLNNGSQAVGRSSFYCLEYFPSQMLRTGNNFTFSYTFEDVPFHSSYAHSQSLDRLMNPLIDQYLYYLSKTNAPSGTTTMSRLQFSQAGASDIRDQSRNWLPGPCYRQQRVSKTAADNNNSDYSWTGATKYHLNGRDSLVNPGPAMASHKDDEEKYFPQSGVLIFGKQDSGKTNVDIEKVMITDEEEIRTTNPVATEQYGSVSTNLQSGNTQAATTDVNTQGVLPGMVWQDRDVYLQGPIWAKIPHTDGHFHPSPLMGGFGLKHPPPQILIKNTPVPANPSTTFSAAKFASFITQYSTGQVSVEIEWELQKENSKRWNPEIQYTSNYNKSVNVDFTVDTNGVYSEPRPIGTRYLTRNL

SEQ ID NO: 68 - protein, 735 aa, Artificial Sequence
  Synthetic Polypeptide
MAADGYLPDWLEDTLSEGIRQWWKLKPGPPPPKPAERHQDDSRGLVLPGYKYLGPFNGLDKGEPVNEADAAALEHDKAYDRQLDSGDNPYLKYNHADAEFQERLKEDTSFGGNLGRAVFQAKKRVLEPLGLVEEPVKTAPGKKRPVEHSPAEPDSSSGTGKAGQQPARKRLNFGQTGDADSVPDPQPLGQPPAAPSGLGTNTMATGSGAPMADNNEGADGVGNSSGNWHCDSTWMGDRVITTSTRTWALPTYNNHLYKQISSQSGASNDNHYFGYSTPWGYFDFNRFHCHFSPRDWQRLINNNWGFRPKRLNFKLFNIQVKEVTQNDGTTTIANNLTSTVQVFTDSEYQLPYVLGSAHQGCLPPFPADVFMVPQYGYLTLNNGSQAVGRSSFYCLEYFPSQMLRTGNNFTFSYTFEDVPFHSSYAHSQSLDRLMNPLIDQYLYYLSKTNAPSGTTTMSRLQFSQAGASDIRDQSRNWLPGPCYRQQRVSKTAADNNNSDYPWTGATKYHLNGRDSLVNPGPAMASHKDDEEKYFPQSGVLIFGKQDSGKTNVDIEKVMITDEEEIRTTNPVATEQYGSVSTNLQSGNTQAATTDVNTQGVLPGMVWQDRDVYLQGPIWAKIPHTDGHFHPSPLMGGFGLKHPPPQILIKNTPVPANPSTTFSAAKFASFITQYSTGQVSVEIEWELQKENSKRWNPEIQYTSNYNKSVNVDFTVDTNGVYSEPRPIGTRYLTRNL

SEQ ID NO: 69 - protein, 735 aa, Artificial Sequence
  Synthetic Polypeptide
MAADGYLPDWLEDTLSEGIRQWWKLKPGPPPPKPAERHQDDSRGLVLPGYKYLGPFNGLDKGEPVNEADAAALEHDKAYDRQLDSGDNPYLKYNHADAEFQERLKEDTSFGGNLGRAVFQAKKRVLEPLGLVEEPVKTAPGKKRPVEHSPAEPDSSSGTGKAGQQPARKRLNFGQTGDADSVPDPQPLGQPPAAPSGLGTNTMATGSGAPMADNNEGADGVGNSSGNWHCDSTWMGDRVITTSTRTWALPTYNNHLYKQISSQSGASNDNHYFGYSTPWGYFDFNRFHCHFSPRDWQRLINNNWGFRPKRLNFKLFNIQVKEVTQNDGTTTIANNLTSTVQVFTDSEYQLPYVLGSAHQGCLPPFPADVFMVPQYGYLTLNNGSQAVGRSSFYCLEYFPSQMLRTGNNFTFSYTFEDVPFHSSYAHSQSLDRLMNPLIDQYLYYLSKTNAPSGTTTMSRLQFSQAGASDIRDQSRNWLPGPCYRQQRVSKTAADNNNSDYSWTGATKYHLNGRDSLVNPGPAMASHKDDEEKYFPQSGVLIFGKQDSGKTNVDIEKVMITDEEEIRTTNPVATEQYGSVSTNLQSGNTQAATTDVNTQGALPGMVWQDRDVYLQGPIWAKIPHTDGHFHPSPLMGGFGLKHPPPQILIKNTPVPANPSTTFSAAKFASFITQYSTGQVSVEIEWELQKENSKRWNPEIQYTSNYNKSVNVDFTVDTNGVYSEPRPIGTRYLTRNL

SEQ ID NO: 70 - protein, 735 aa, Artificial Sequence
  Synthetic Polypeptide
MAADGYLPDWLEDTLSEGIRQWWKLKPGPPPPKPAERHQDDSRGLVLPGYKYLGPFNGLDKGEPVNEADAAALEHDKAYDRQLDSGDNPYLKYNHADAEFQERLKEDTSFGGNLGRAVFQAKKRVLEPLGLVEEPVKTAPGKKRPVEHSPAEPDSSSGTGKAGQQPARKRLNFGQTGDADSVPDPQPLGQPPAAPSGLGTNTMATGSGAPMADNNEGADGVGNSSGNWHCDSTWMGDRVITTSTRTWALPTYNNHLYKQISSQSGASNDNHYFGYSTPWGYFDFNRFHCHFSPRDWQRLINNNWGFRPKRLNFKLFNIQVKEVTQNDGTTTIANNLTSTVQVFTDSEYQLPYVLGSAHQGCLPPFPADVFMVPQYGYLTLNNGSQAVGRSSFYCLEYFPSQMLRTGNNFTFSYTFEDVPFHSSYAHSQSLDRLMNPLIDQYLYYLSKTNAPSGTTTMSRLQFSQAGASDIRDQSRNWLPGPCYRQQRVSKTAADNNNSDYSWTGATKYHLNGRDSLVNPGPAMASHKDDEEKYFPQSGVLIFGKQDSGKTNVDIEKVMITDEEEIRTTNPVATEQYGSVSTNLQSGNTQAATTDVNTQGVLPGMVWQDRDVYLQGPIWAKIPHTDGHFHPSPLMGGFGLKHPPPQILIKNTPVPANPSTTFSAAKLASFITQYSTGQVSVEVEWELQKENSKRWNPEIQYTSNYNKSVNVDFTVDTNGVYSEPRPIGTRYLTRNL

SEQ ID NO: 71 - protein, 735 aa, Artificial Sequence
  Synthetic Polypeptide
MAADGYLPDWLEDTLSEGIRQWWKLKPGPPPPKPAERHQDDSRGLVLPGYKYLGPFNGLDKGEPVNEADVAALEHDKAYDRQLDSGDNPYLKYNHADAEFQERLKEDTSFGGNLGRAVFQAKKRVLEPLGLVEEPVKTAPGKKRPVEHSPAEPDSSSGTGKAGQQPARKRLNFGQTGDADSVPDPQPLGQPPAAPSGLGTNTMATGSGAPMADNNEGADGVGNSSGNWHCDSTWMGDRVITTSTRTWALPTYNNHLYKQISSQSGASNDNHYFGYSTPWGYFDFNRFHCHFSPRDWQRLINNNWGFRPKRLNFKLFNIQVKEVTQNDGTTTIANNLTSTVQVFTDSEYQLPYVLGSAHQGCLPPFPADVFMVPQYGYLTLNSGSQAVGRSSFYCLEYFPSQMLRTGNNFTFSYTFEDVPFHSSYAHSQSLDRLMNPLIDQYLYYLSKTNAPSGTTTMSRLQFSQAGASDIRDQSRNWLPGPCYRQQRVSKTAADNNNSDYSWTGATKYHLNGRDSLVNPGPAMASHKDDEEKYFPQSGVLIFGKQDSGKTNVDIEKVMITDEEEIRTTNPVATEQYGSVSTNLQSGNTQAATTDVNTQGVLPGMVWQDRDVYLQGPIWAKIPHTDGHFHPSPLMGGFGLKHPPPQILIKNTPVPANPSTTFSAAKFASFITQYSTGQVSVEIEWELQKENSKRWNPEIQYTSNYNKSVNVDFTVDTNGVYSEPRPIGTRYLTRNL

SEQ ID NO: 72 - protein, 735 aa, Artificial Sequence
  Synthetic Polypeptide
MAADGYLPDWLEDTLSEGIRQWWKLKPGPPPPKPAERHQDDSRGLVLPGYKYLGPFNGLDKGEPVNEADVAALEHDKAYDRQLDSGDNPYLKYNHADAEFQERLKEDTSFGGNLGRAVFQAKKRVLEPLGLVEEPVKTAPGKKRPVEHSPAEPDSSSGTGKAGQQPARKRLNFGQTGGADSVPDPQPLGQPPAAPSGLGTNTMATGSGAPMADNNEGADGVGNSSGNWHCDSTWMGDRVITTSTRTWALPTYNNHLYKQISSQSGASNDNHYFGYSTPWGYFDFNRFHCHFSPRDWQRLINNNWGFRPKRLNFKLFNIQVKEVTQNDGTTTIANNLTSTVQVFTDSEYQLPYVLGSAHQGCLPPFPADVFMVPQYGYLTLNNGSQAVGRSSFYCLEYFPSQMLRTGNNFTFSYTFEDVPFHSSYAHSQSLDRLMNPLIDQYLYYLSKTNAPSGTTTMSRLQFSQAGASDIRDQSRNWLPGPCYRQQRVSKTAADNNNSDYSWTGATKYHLNGRDSLVNPGPAMASHKDDEEKYFPQSGVLIFGKQDSGKTNVDIEKVMITDEEEIRTTNPVATEQYGSVSTNLQSGNTQAATTDVNTQGVLPGMVWQDRDVYLQGPIWAKIPHTDGHFHPSPLMGGFGLKHPPPQILIKNTPVPANPSTTFSAAKFASFITQYSTGQVSVEIEWELQKENSKRWNPEIQYTSNYNKSVNVDFTVDTNGVYSEPRPIGTRYLTRNL

SEQ ID NO: 73 - protein, 735 aa, Artificial Sequence
  Synthetic Polypeptide
MAADGYLPDWLEDTLSEGIRQWWKLKPGPPPPKPAERHQDDSRGLVLPGYKYLGPFNGLDKGEPVNEADAAALEHDKAYDRQLDSGDNPYLKYNHADAEFQERLKEDTSFGGNLGRAVFQAKKRVLEPLGLVEEPVKTAPGKKRPVEHSPAEPDSSSGTGKAGQQPARKRLNFGQTGDADSVPDPQPLGQPPAAPSGLGTNTMATGSGAPMADNNEGADGVGNSSGNWHCDSTWMGDRVITTSTRTWALPTYNNHLYKQISSQSGASNDNHYFGYSTPWGYFDFNRFHCHFSPRDWQRLINNNWGFRPKRLNFKLFNIQVKEVTQNDGTTTIANNLTSTVQVFTDSEYQLPYALGSAHQGCLPPFPADVFMVPQYGYLTLNNGSQAVGRSSFYCLEYFPSQMLRTGNNFTFSYTFEDVPFHSSYAHSQSLDRLMNPLIDQYLYYLSKTNAPSGTTTMSRLQFSQAGASDIRDQSRNWLPGPCYRQQRVSKTAADNNNSDYSWTGATKYHLNGRDSLVNPGPAMASHKDDEEKYFPQSGVLIFGKQDSGKTNVDIEKVMITDEEEIRTTNPVATEQYGSVSTNLQSGNTQAATTDVNTQGVLPGMVWQDRDVYLQGPIWAKIPHTDGHFHPSPLMGGFGLKHPPPQILIKNTPVPANPSTTFSAAKFASFITQYSTGQVSVEIEWELQKEDSKRWNPEIQYTSNYNKSVNVDFTVDTNGVYSEPRPIGTRYLTRNL

SEQ ID NO: 74 - protein, 735 aa, Artificial Sequence
  Synthetic Polypeptide
MAADGYLPDWLEDTLSEGIRQWWKLKPGPPPPKPAERHQDDSRGLVLPGYKYLGPFNGLDKGEPVNEADAAALEHDKAYDRQLDSGDNPYLKYNHADAEFQERLKEDTSFGGNLGRAVFQAKKRVLEPLGLVEEPVKTAPGKKRPVEHSPAEPDSSSGTGKAGQQPARKRLNFGQTGDADSVPDPQPLGQPPAAPSGLGTNTMATGSGAPMADNNEGADGVGNSSGNWHCDSTWMGDRVITTSTRTWALPTYNNHLYKQISSQSGASNDNHYFGYSTPWGYFDFNRFHCHFSPRDWQRLINNNWGFRPKRLNFKLFNIQVKEVTQNDGTTTIANNLTSTVQVFTDSEYQLPYVLGSAHQGCLPPFPADVFMVPQYGYLTLNNGSQAVGRSSFYCLEYFPSQMLRTGNNFTFSYTFEDVPFHSSYAHSQSLDRLMNPLIDQYLYYLSKTNAPSGTTTMSRLQFSQAGASDIRDQSRNWLPGPCYRQQRVSKTAADNNNSDYSWTGATKYHLNGRDSLVNPGPAMASHKDDEEKYFPQSGVLIFGKQDSGKTNVDIEKVMITDEEEIRTTNPVATEQYGSVSTNLQSGNTQAATTDVNTQGVLPGMVWQDRDVYLQGPIWAKIPHTDGHFHPSPLMGGFGLKHPPPQILIKNTPVPANPSTTSSAAKFASFITQYSTGQVSVEIEWELQKENSKRWNPEIQYTSNYNKSVNVDFTVDTNGVYSEPRPIGTRYLTRNL

SEQ ID NO: 75 - protein, 735 aa, Artificial Sequence
  Synthetic Polypeptide
MAADGYLPDWLEDTLSEGIRQWWKLKPGPPPLKPAERHQDDSRGLVLPGYKYLGPFNGLDKGEPVNEADAAALEHDKAYDRQLDSGDNPYLKYNHADAEFQERLKEDTSFGGNLGRAVFQAKKRVLEPLGLVEEPVKTAPGKKRPVEHSPAEPDSSSGTGKAGQQPARKRLNFGQTGDADSVPDPQPLGQPPAAPSGLGTNTMATGSGAPMADNNEGADGVGNSSGNWHCDSTWMGDRVITTSTRTWALPTYNNHLYKQISSQSGASNDNHYFGYSTPWGYFDFNRFHCHFSPRDWQRLINNNWGFRPKRLNFKLFNIQVKEVTQNDGTTTIANNLTSTVQVFTDSEYQLPYVLGSAHQGCLPPFPADVFMVPQYGYLTLNNGSQAVGRSSFYCLEYFPSQMLRTGNNFTFSYTFEDVPFHSSYAHSQSLDRLMNPLIDQYLYYLSKTNAPSGTTTMSRLQFSQAGASDIRDQSRNWLPGPCYRQQRVSKTAADNNNSDYSWTGATKYHLNGRDSLVNPGPAMASHKDDEEKYFPQSGVLIFGKQDSGKTNVDIEKVMITDEEEIRTTNPVATEQYGSVSTNLQSGNTQAATTDVNTQGVLPGMVWQDRDVYLQGPIWAKIPHTDGHFHPSPLMGGFGLKHPPPPILIKNTPVPANPSTTFSAAKFASFITQYSTGQVSVEIEWELQKENSKRWNPEIQYTSNYNKSVNVDFTVDTNGVYSEPRPIGTRYLTRNL

SEQ ID NO: 76 - protein, 735 aa, Artificial Sequence
  Synthetic Polypeptide
MAADGYLPDWLEDTLSEGIRQWWKLKPGPPPPKPAERHQDDSRGLVLPGYKYLGPFNGLDKGEPVNEADAAALEHDKAYDRQLDSGDNPYLKYNHADAEFQERLKEDTSFGGNLGRAVFQAKKRVLEPLGLVEEPVKTAPGKKRPVEHSPAEPDSSSGTGKAGQQPARKRLNFGQTGDADSVPDPQPLGQPPAAPSGLGTNTMATGSGAPMADNNEGADGVGNSSGNWHCDSTWMGDRVITTSTRTWALPTYNNHLYKQISSQSGASNDNHYFGYSTPWGYFDFNRFHCHFSPRDWQRLINNNWGFRPKRLNFKLFNIQVKEVTQNDGTTTIANNLTSTVQVFTDSEYQLPYVLGSAHQGCLPPFPADVFMVPQYGYLTLNNGSQAVGRSSFYCLEYFPSQMLRTGNNFTFSYTFEDVPFHSSYAHSQSLDRLMNPLIDQYLYYLSKTNAPSGTTTMSRLQFSQAGASDIRDQSRNWLPGPCYRQQRVSKTAADNNNSDYSWTGATKYHLNGRDSLVNPGPAMASHKDDEEKYFPQSGVLIFGKQDSGKTNVDIEKVMITDEEEIRATNPVATEQYGSVSTNLQSGNTQAATTDVNTQGVLPGMVWQDRDVYLQGPIWAKIPHTDGHFHPSPLMGGFGLKHPPPQILIKNTPVPANPSTTFSAAKFASFITQYSTGQVSVEIEWELQKENSKRWNPEIQYTSNYNKSVNVDFTVDTNGVYSEPRPIGTRYLTRNL

SEQ ID NO: 77 - protein, 735 aa, Artificial Sequence
  Synthetic Polypeptide
MAADGYLPDWLEDTLSEGIRQWWKLKPGPPPPKPAERHQDDSRGLVLPGYKYLGPFNGLDKGEPVNEADAAALEHDKAYDRQLDSGDNPYLKYNHADAEFQERLKEDTSFGGNLGRAVFQAKKRVLEPLGLVEEPVKTAPGKKRPVEHSPAEPDSSSGTGKAGQQPARKRLNFGQTGDADSVPDPQPLGQPPAAPSGLGTNTMATGSGAPMADNNEGADGVGNSSGNWHCDSTWMGDRVITTSTRTWALPTYNNHLYKQISSQSGASNDNHYFGYSTPWGYFDFNRFHCHFSPRDWQRLISNNWGFRPKRLNFKLFNIQVKEVTQNDGTTTIANNLTSTVQVFTDSEYQLPYVLGSAHQGCLPPFPADVFMVPQYGYLTLNNGSQAVGRSSFYCLEYFPSQMLRTGNNFTFSYTFEDVPFHSSYAHSQSLDRLMNPLIDQYLYYLSKTNAPSGTTTMSRLQFSQAGASDIRDQSRNWLPGPCYRQQRVSKTAADNNNSDYSWTGATKYHLNGRDSLVNPGPAMASHKDDEEKYFPQSGVLIFGKQDSGKTNVDIEKVMITDEEEIRTTNPVATEQYGSVSTNLQSGNTQAATTDVNTQGVLPGMVWQDRDVYLQGPIWAKIPHTDGHFHPSPLMGGFGLKHPPPQILIKNTPVPANPSTTFSAAKFASFITQYSTGQVSVEIEWEPQKENSKRWNPEIQYTSNYNKSVNVDFTVDTNGVYSEPRPIGTRYLTRNL

SEQ ID NO: 78 - protein, 735 aa, Artificial Sequence
  Synthetic Polypeptide
MAADGYLPDWLEDTLSEGIRQWWKLKPGPPPPKPAERHQDDSRGLVLPGYKYLGPFNGLDKGEPVNEADAAALEHDKAYDRQLDSGDNPYLKYNHADAEFQERLKEDTSFGGNLGRAVFQAKKGVLEPLGLVEEPVKTAPGKKRPVEHSPAEPDSSSGTGKAGQQPARKRLNFGQTGDADSVPDPQPLGQPPAAPSGLGTNTMATGSGAPMADNNEGADGVGNSSGNWHCDSTWMGDRVITTSTRTWALPTYNNHLYKQISSQSGASNDNHYFGYSTPWGYFDFNRFHCHFSPRDWQRLINNNWGFRPKRLNFKLFNIQVKEVTQNDGTTTIANNLTSTVQVFTDSEYQLPYVLGSAHQGCLPPFPADVFMVPQYGYLTLNNGSQAVGRSSFYCLEYFPSQMLRTGNNFTFSYTFEDVPFHSSYAHSQSLDRLMNPLIDQYLYYLSKTNAPSGTTTMSRLQFSQAGASDIRDQSRNWLPGPCYRQQRVSKTAADNNNSDYSWTGATKYHLNGRDSLVNPGPAMASHKDDEEKYFPQSGVLIFGKQDSGKTNVDIEKVMITDEEEIRTTNPVATEQYGSVSTNLQSGNTQAATTDVNTQGVLPGMVWQDRDVYLQGPIWAKIPHTDGHFHPSPLMGGFGLKHPPPQILIKNTPVPANPSTTFSAAKFASFITQYSTGQVSVEIEWELQKENSKRWNPEIQYTSNYNKSVNVDFTVDTNGVYSEPRPIGTRYLTRNL

SEQ ID NO: 79 - protein, 735 aa, Artificial Sequence
  Synthetic Polypeptide
MAADGYLPDWLEDTLSEGIRQWWKLKPGPPPPKPAERHQDDSRGLVLPGYKYLGPFNGLDKGEPVNEADAAALEHDKAYDRQLDSGDNPYLKYNHADAEFQERLKEDTSFGGNLGRAVFQAKKRVLEPLGLVEEPVKTAPGKKRPVEHSPAEPDSSSGTGKAGQQPARKRLNFGQTGDADSVPDPQPLGQPPAAPSGLGTNTMATGSGAPMADNNEGADGVGNSSGNWHCDSTWMGDRVITTSTRTWALPTYNNHLYKQISSQSGASNDNHYFGYSTPWGYFDFNRFHCHFSPRDWQRLINNNWGFRPKRLNFKLFNIQVKEVTQNDGTTTIANNLTSTVQVFTDSEYQLPYVLGSAHQGCLPPFPADVFMVPQYGYLTLNNGSQAVGRSSFYCLEYFPSQMLRTGNNFTFSYTFEDVPFHSSYAHSQSLDRLMNPLIDQYLYYLSRTNAPSGTTTMSRLQFSQAGASDIRDQSRNWLPGPCYRQQRVSKTAADNNNSDYSWTGATKYHLNGRDSLVNPGPAMASHKDDEEKYFPQSGVLIFGKQDSGKTNVDIEKVMITDEEEIRTTNPVATEQYGSVSTNLQSGNTQAATTDVNTQGVLPGMVWQDRDVYLQGPIWAKIPHTDGHFHPSPLMGGFGLKHPPPQILIKNTPVPANPSTTFSAAKFASFITQYSTGQVSVEIEWELQKENSKRWNPEIQYTSNYNKSVNVDFTVDTNGVYSEPRPIGTRYLTRNL

SEQ ID NO: 80 - protein, 735 aa, Artificial Sequence
  Synthetic Polypeptide
MAADGYLPDWLEDTLSEGIRQWWKLKPGPPPPKPAERHQDDSRGLVLPGYKYLGPFNGLDKGEPVNEADAAALEHDKAYDRQLDSGDNPYLKYNHADAEFQERLKEDTSFGGNLGRAVFQAKKRVLEPLGLVEEPVKTAPGKKRPVEHSPAEPDSSSGTGKAGQQPARKRLNFGQTGDADSVPDPQPLGQPPAAPSGLGTNTMATGSGAPMADNNEGADGVGNSSGNWHCDSTWMGDRVITTSTRTWALPTYNNHLYKQISSQSGASNDNHYFGYSTPWGYFDFNRFHCHFSPRDWQRLINNNWGFRPKRLNFKLFNIQVKEVTQNDGTTTIANNLTSTVQVFTDSEYQLPYVLGSAHQGCLPPFPADVFMVPQYGYLTLNNGSQAVGRSSFYCLEYFPSQMLRTGNNFTFSYTFEDVPFHSSYAHSQSLDRLMNPLIDQYLYYLSKTNAPSGTTTMSRLQFSQAGASDIRDQSRNWLPGPCYRQQRVSKTAADNNNSDYSWTGATKYHLNGRDSLVNPGPAMASHKDDEEKYFPQSGVLIFGKQDSGKTNVDIEKVMITDEEEIRTTNPVATEQYGSVSTNLQSGNTQAATTDVNTQGVLPGMVWQDRDVYLQGPIWAKIPHTDGHFHPSPLMGGFGLKHPPPQILIKNTPVPANPSTTFSAAKFASFITQYSTGQVSVEIEWELQKENSKRWNPEIQYTSNYNKSVNVDLTVDTNGVYSEPRPIGTRYLTRNL

SEQ ID NO: 81 - protein, 735 aa, Artificial Sequence
  Synthetic Polypeptide
MAADGYLPDWLEDTLSEGIRQWWKLKPGPPPLKPAERHQDDSRGLVLPGYKYLGPFNGLDKGEPVNEADAAALEHDKAYDRQLDSGDNPYLKYNHADAEFQERLKEDTSFGGNLGRAVFQAKKRVLEPLGLVEEPVKTAPGKKRPVEHSPAEPDSSSGTGKAGQQPARKRLNFGQTGDADSVPDPQPLGQPPAAPSGLGTNTMAAGSGAPMADNNEGADGVGNSSGNWHCDSTWMGDRVITTSTRTWALPTYNNHLYKQISSQSGASNDNHYFGYSTPWGYFDFNRFHCHFSPRDWQRLINNNWGFRPKRLNFKLFNIQVKEVTQNDGTTTIANNLTSTVQVFTDSEYQLPYVLGSAHQGCLPPFPADVFMVPQYGYLTLNNGSQAVGRSSFYCLEYFPSQMLRTGNNFTFSYTFEDVPFHSSYAHSQSLDRLMNPLIDQYLYYLSKTNAPSGTTTMSRLQFSQAGASDIRDQSRNWLPGPCYRQQRVSKTAADNNNSDYSWTGATKYHLNGRDSLVNPGPAMASHKDDEEKYFPQSGVLIFGKQDSGKTNVDIEKVMITDEEEIRTTNPVATEQYGSVSTNLQSGNTQAATTDVNTQGVLPGMVWQDRDVYLQGPIWAKIPHTDGHFHPSPLMGGFGLKHPPPQILIKNTPVPANPSTTFSAAKFASFITQYSTGQVSVEIEWELQKENSKRWNPEIQYTSNYNKSVNVDFTVDTNGVYSEPRPIGTRYLTRNL

SEQ ID NO: 82 - protein, 735 aa, Artificial Sequence
  Synthetic Polypeptide
MAADGYLPDWLEDTLSEGIRQWWKLKPGPPPPKPAERHQDDSRGLVLPGYKYLGPFNGLDKGEPVNEADAAALEHDKAYDRQLDSGDNPYLKYNHADAEFQERLKEDTSFGGNLGRAVFQAKKRVLEPLGLVEEPVKTAPGKKRPVEHSPAEPDSSSGTGKAGQQPARKRLNFGQTGDADSVPDPQPLGQPPAAPSGLGTNTMATGSGAPMADNNEGADGVGNSSGNWHCDSTWMGDRVITTSTRTWALPTYNNHLYKQISSQSGASNDNHYFGYSTPWGYFDFNRFHCHFSPRDWQRLINNNWGFRPKRLNFKLFNIQVKEVTQNDGTTTIANNLTSTVQVFTDSEYQLPYVLGSAHQGCLPPFPADVFMVPQYGYLTLNNGSQAVGRSSFYCLEYFPSQMLRTGNNFTFSYTFEDVPFHSSYAHSQSLDRLMNPLIDQYLYYLSKTNAPSGTTTMSRLQFSQAGASDIRDQSRNWLPGPCYRQQRVSKTAADNNNSDYSWTGATKYHLNGRDSLVNPGPAMASHKDDEEKYFPQSGVLIFGKQDSGKTNVDIEKVMITDEEEIRTTNPVATEQYGSVSTNLQSGDTQAATTDVNTQGVLPGMVWQDRDVYLQGPIWAKIPHTDGHFHPSPLMGGFGLKHPPPQILIKNTPVPANPSTTFSAAKFASFITQYSTGQVSVEIEWELQKENSKRWNPEIQYTSNYNKSVNVDFTVDTNGVYSEPRPIGTRYLTRNL

SEQ ID NO: 83 - protein, 735 aa, Artificial Sequence
  Synthetic Polypeptide
MAADGYLPDWLEDTLSEGIRQWWKLKPGPPPPKPAERHQDDSRGLVLPGYKYLGPFNGLDKGEPVNEADAAALEHDKAYDRQLDSGGNPYLKYNHADAEFQERLKEDTSFGGNLGRAVFQAKKRVLEPLGLVEEPVKTAPGKKRPVEHSPAEPDSSSGTGKAGQQPARKRLNFGQTGDADSVPDPQPLGQPPAAPSGLGTNTMATGSGAPMADNNEGADGVGNSSGNWHCDSTWMGDRVITTSTRTWALPTYNNHLYKQISSQSGASNDNHYFGYSTPWGYFDFNRFHCHFSPRDWQRLINNNWGFRPKRLNFKLFNIQVKEVTQNDGTTTIANNLTSTVQVFTDSEYQLPYVLGSAHQGCLPPFPADVFMVPQYGYLTLNNGSQAVGRSSFYCLEYFPSQMLRTGNNFTFSYTFEDVPFHSSYAHSQSLDRLMNPLIDQYLYYLSKTNAPSGTTTMSRLQFSQAGASDIRDQSRNWLPGPCYRQQRVSKTAADNNNSDYSWTGATKYHLNGRDSLVNPGPAMASHKDDEEKYFPQSGVLIFGKQDSGKTNVDIEKVMITDEEEIRTTNPVATEQYGSVSTNLQSGNTQAATTDVNTQGVLPGMVWQDRDVYLQGPIWAKIPHTDGHFHPSPLMGGFGLKHPPPQILIKNTPVPANPSTTFSAAKFASFITQYSTGQVSVEIEWELQKENSKRWNPEIQYTSNYNKSVNVDFTVDTNGVYSEPRPIGTRYLTRNL

SEQ ID NO: 84 - protein, 735 aa, Artificial Sequence
  Synthetic Polypeptide
MAADGYLPDWLEDTLSEGIRQWWKLKPGPPPPKPAERHQDDSRGLVLPGYKYLGPFNGLDKGEPVNEADAAALEHDKAYDRQLDSGDNPYLKYNHADAEFQERLKEDTSFGGNLGRAVFQAKKRVLEPLGLVEEPVKTAPGKKRPVEHSPAEPDSSSGTGKAGQQPARKRLNFGQTGDADSVPDPQPLGQPPAAPSGLGTNTMATGSGAPMADNNEGADGVGNSSGNWHCDSTWMGDRVITTSTRTWALPTYNNHLYKQISSQSGASNDNHYFGYSTPWGYFDFNRFHCHFSPRDWQRLINNNWGFRPKRLNFKLFNIQVKEVTQNDGTTTIANNLTSTVQVFTDSEYQLPYVLGSAHQGCLPPFPADVFMVPQYGYLTLNNGSQAVGRSSFYCLEYFPSQMLRTGNNFTFSYTFEDVPFHSSYAHSQSLDRLMNPLIDQYLYYLSKTNAPSGTTTMSRLQFSQAGASDIRDQSRNWLPGPCYRQQRVSKTAADNNNSDYSWTGATKYHLNGRDSLVNPGPAMASHKDDEEKYFPQSGVLIFGKQDSGKTNVDIEKVMITDEEEIRTTNPVATEQYGSVSTNLQSGNTQAATTDVNTQGVLPGMVWQDRDVYLQGPIWAKIPHTDGHFHPSPLMGGFGLKHPPPQILIKNTPVPANPSTTFSAAKLASFITQYSTGQVSVEIEWELQKENSKRWNPEIQYTSNYNKSVNVDFTVDTNGVYSEPRPIGTRYLTRNL

SEQ ID NO: 85 - protein, 735 aa, Artificial Sequence
  Synthetic Polypeptide
MAADGYLPDWLEDTLSEGIRQWWKLKPGPPPPKPAERHQDDSRGLVLPGYKYLGPFNGLDKGEPVNEADAAALEHDKAYDRQLDSGDNPYLKYNHADAEFQERLKEDTSFGGNLGRAVFQAKKRVLEPLGLVEEPVKTAPGKKRPVEHSPAEPDSSSGTGKAGQQPARKRLNFGQTGDADSVPDPQPLGQPPAAPSGLGTNTMATGSGAPMADNNEGADGVGNSSGNWHCDSTWMGDRVITTSTRTWALPTYNNHLYKQISSQSGASNDNHYFGYSTPWGYFDFNRFHCHFSPRDWQRLINNNWGFRPKRLNFKLFNIQVKEVTQSDGTTTIANNLTSTVQVFTDSEYQLPYVLGSAHQGCLPPFPADVFMVPQYGYLTLNNGSQAVGRSSFYCLEYFPSQMLRTGNNFTFSYTFEDVPFHSSYAHSQSLDRLMNPLIDQYLYYLSKTNAPSGTTTMSRLQFSQAGASDIRDQSRNWLPGPCYRQQRVSKTAADNNNSDYSWTGATKYHLNGRDSLVNPGPAMASHKDDEEKYFPQSGILIFGKQDSGKTNVDIEKVMITDEEEIRTTNPVATEQYGSVSTNLQSGNTQAATTDVNTQGVLPGMVWQDRDVYLQGPIWAKIPHTDGHFHPSPLMGGFGLKHPPPQILIKNTPVPANPSTTFSAAKFASFITQYPTGQVSVEIEWELQKENSKRWNPEIQYTSNYNKSVNVDFTVDTNGVYSEPRPIGTRYLTRNL

SEQ ID NO: 86 - protein, 735 aa, Artificial Sequence
  Synthetic Polypeptide
MAADGYLPDWLEDTLSEGIRQWWKLKPGPPPPKPAERHQDDSRGLVLPGYKYLGPFNGLDKGEPVNEADAAALEHDKAYDRQLDSGDNPYLKYNHADAEFQERLKEDTSFGGNLGRAVFQAKKRVLEPLGLVEEPVKTAPGKKRPVEHSPAEPDASSGTGKAGQQPARKRLNFGQTGDADSVPDPQPLGQPPAAPSGLGTNTMATGSGAPMADNNEGADGVGNSSGNWHCDSTWMGDRVITTSTRTWALPTYNNHLYKQISSQSGASNDNHYFGYSTPWGYFDFNRFHCHFSPRDWQRLINNNWGFRPKRLNFKLFNIQVKEVTQNDGTTTIANNLTSTVQVFTDSEYQLPYVLGSAHQGCLPPFPADVFMVPQYGYLTLNNGSQAVGRSSFYCLEYFPSQMLRTGNNFTFSYTFEDVPFHSSYAHSQSLDRLMNPLIDQYLYYLSKTNAPSGTTTMSRLQFSQAGASDIRDQSRNWLPGPCYRQQRVSKTAADNNNSDYSWTGATKYHLNGRDSLVNPGPAMASHKDDEEKYFPQSGVLIFGKQDSGKTNVDIEKVMITDEEEIRTTNPVATEQYGSVSTNLQSGNTQAATTDVNTQGVLPGMVWQDRDVYLQGPIWAKIPHTDGHFHPSPLMGGFGLKHPPPQILIKNTPVPANPSTTFSAAKFASFITQYSTGQVSVEIEWELQKENSKRWNPEIQYTSNYNKSVNVDFTVDTNGVYSEPRPIGTRYLTRNL

SEQ ID NO: 87 - protein, 735 aa, Artificial Sequence
  Synthetic Polypeptide
MAADGYLPDWLEDTLSEGIRQWWKLKPGPPPPKPAERHQDDSRGLVLPGYKYLGPFNGLDKGGPVNEADAAALEHDKAYDRQLDSGDNPYLKYNHADAEFQERLKEDTSFGGNLGRAVFQAKKRVLEPLGLVEEPVKTAPGKKRPVEHSPAEPDSSSGTGKAGQQPARKRLNFGQTGDADSVPDPQPLGQPPAAPSGLGTNTMATGSGAPMADNNEGADGVGNSSGNWHCDSTWMGDRVITTSTRTWALPTYNNHLYKQISSQSGASNDNHYFGYSTPWGYFDFNRFHCHFSPRDWQRLINNNWGFRPKRLNFKLFNIQVKEVTQNDGTTTIANNLTSTVQVFTDSEYQLPYVLGSAHQGCLPPFPADVFMVPQYGYLTLNNGSQAVGRSSFYCLEYFPSQMLRTGNNFTFSYTFEDVPFHSSYAHSQSLDRLMNPLIDQYLYYLSKTNAPSGTTTMSRLQFSQAGASDIRDQSRNWLPGPCYRQQRVSKTAADNNNSDYSWTGATKYHLNGRDSLVNPGPAMASHKDDEEKYFPQSGVLIFGKQDSGKTNVDIEKVMITDEEEIRTTNPVATEQYGSVSTNLQSGNTQAATTDVNTQGVLPGMVWQDRDVYLQGPIWAKIPHTDGHFHPSPLMGGFGLKHPPPQILIKNTPVPANPSTTFSAAKFASFITQYSTGQVSVEIEWELQKENSKRWNPEIQYTSNYNKSVNVDFTVDTNGVYSEPRPIGTRYLTRNL

SEQ ID NO: 88 - protein, 735 aa, Artificial Sequence
  Synthetic Polypeptide
MAADGYLPDWLEDTLSEGIRQWWKLKPGPPPPKPAERHQDDSRGLVLPGYKYLGPFNGLDKGEPVNEADAAALEHDKAYDRQLDSGDNPYLKHNHADAEFQERLKEDTSFGGNLGRAVFQAKKRVLEPLGLVEEPVKTAPGKKRPVEHSPAEPDSSSGTGKAGQQPARKRLNFGQTGDADSVPDPQPLGQPPAAPSGLGTNTMATGSGAPMADNNEGADGVGNSSGNWHCDSTWMGDRVITTSTRTWALPTYNNHLYKQISSQSGASNDNHYFGYSTPWGYFDFNRFHCHFSPRDWQRLINNNWGFRPKRLNFKLFNIQVKEVTQNDGTTTIANNLTSTVQVFTDSEYQLPYVLGSAHQGCLPPFPADVFMVPQYGYLTLNNGSQAVGRSSFYCLEYFPSQMLRTGNNFTFSYTFEDVPFHSSYAHSQSLDRLMNPLIDQYLYYLSKTNAPSGTTTMSRLQFSQAGASDIRDQSRNWLPGPCYRQQRVSKTAADNNNSDYSWTGATKYHLNGRDSLVNPGPAMASHKDDEEKYFPQSGVLIFGKQDSGKTNVDIEKVMITDEEEIRTTNPVATEQYGSVSTNLQSGNTQAATTDVNTQGVLPGMVWQDRDVYLQGPIWAKIPHTDGHFHPSPLMGGFGLKHPPPQILIKNTPVPANPSTTFSAAKFASFITQYSTGQVSVEIEWELQKENSKRWNPEIQYTSNYNKSVNVDFTVDTNGVYSEPRPIGTRYLTRNL

SEQ ID NO: 89 - protein, 735 aa, Artificial Sequence
  Synthetic Polypeptide
MAADGYLPDWLEDTLSEGIRQWWKLKPGPPPPKPAERHQDDSRGLVLPGYKYLGPFNGLDKGEPVNEADAAALEHDKAYDRQLDSGDNPYLKYNHADAEFQERLKEDTSFGGNLGRAVFQAKKRVLEPLGLVEEPVKTAPGKKRPVEHSPAEPDSSSGTGKAGQQPARKRLNFGQTGDADSVPDPQPLGQPPAAPSGLGTNTMATGSGAPMADNNEGADGVGNSSGNWHCDSTWMGDRVITTSTRTWALPTYNNHLYKQISSQSGASNDNHYFGYSTPWGYFDFNRFHCHFSPRDWQRLINNNWGFRPKRLNFKLFNIQVKEVTQNDGTTTIANNLTSTVQVFTDSEYQLPYVLGSAHQGCLPPFPAGVFMVPQYGYLTLNNGSQAVGRSSFYCLEYFPSQMLRTGNNFTFSYTFEDVPFHSSYAHSQSLDRLMNPLIDQYLYYLSKTNAPSGTTTMSRLQFSQAGASDIRDQSRNWLPGPCYRQQRVSKTAADNNNSDYSWTGATKYHLNGRDSLVNPGPAMASHKDDEEKYFPQSGVLIFGKQDSGKTNVDIEKVMITDEEEIRTTNPVATEQYGSVSTNLQSGNTQAATTDVNTQGVLPGMVWQDRDVYLQGPIWAKIPHTDGHFHPSPLMGGFGLKHPPPQILIKNTPVPANPSTTFSAAKFASFITQYSTGQVSVEIEWELQKENSKRWNPEIQYTSNYNKSVNVDFTVDTNGVYSEPRPIGTRYLTRNL

SEQ ID NO: 90 - protein, 735 aa, Artificial Sequence
  Synthetic Polypeptide
MAADGYLPDWLEDTLSEGIRQWWKLKPGPPPPKPAERHQDDSRGLVLPGYKYLGPFNGLDKGEPVNEADAAALEHDKAYDRQLDSGDNPYLKYNHADAEFQERLKEDTSFGGNLGRAVFQAKKRVLEPLGLVEEPVKTAPGKKRPVEHSPAEPDSSSGTGKAGQQPARKRLNFGQTGDADSVPDPQPLGQPPAAPSGLGTNTTATGSGAPMADNNEGADGVGNSSGNWHCDSTWMGDRVITTSTRTWALPTYNNHLYKQISSQSGASNDNHYFGYSTPWGYFDFNRFHCHFSPRDWQRLINNNWGFRPKRLNFKLFNIQVKEVTQNDGTTTIANNLTSTVQVFTDSEYQLPYVLGSAHQGCLPPFPADVFMVPQYGYLTLNNGSQAVGRSSFYCLEYFPSQMLRTGNNFTFSYTFEDVPFHSSYAHSQSLDRLMNPLIDQYLYYLSKTNAPSGTTTMSRLQFSQAGASDIRDQSRNWLPGPCYRQQRVSKTAADNNNSDYSWTGATKYHLNGRDSLVNPGPAMASHKDDEEKYFPQSGVLIFGKQDSGKTNVDIEKVMITDEEEIRTTNPVATEQYGSVSTNLQSGNTQAATTDVNTQGVLPGMVWQDRDVYLQGPIWAKIPHTDGHFHPSPLMGGFGLKHPPPQILIKNTPVPANPSTTFSAAKFASFITQYSTGQVSVEIEWELQKENSKRWNPEIQYTSNYNKSVNVDFTVDTNGVYSEPRPIGTRYLTRNL

SEQ ID NO: 91 - protein, 735 aa, Artificial Sequence
  Synthetic Polypeptide
MAADGYLPDWLEDTLSEGIRQWWKLKPGPPPPKPAERHQDDSRGLVLPGYKYLGPFNGLDKGEPVNEADAAALEHDKAYDRQLDSGDNPYLKYNHADAEFQERLKEDTSFGGNLGRAVFQAKKRVLEPLGLVEEPVKTAPGKKRPVEHSPAEPDSSSGTGKAGQQPARKRLNFGQTGDADSVPDPQPLGQPPAAPSGLGTNTMATGSGAPMADNNEGADGVGNSSGNWHCDSTWMGDRVITTSTRTWALPTYNNHLYKQISSQSGASNDNHYFGYSTPWGYFDFNRFHCHFSPRDWQRLIINNWGFRPKRLNFKLFNIQVKEVTQNDGTTTIANNLTSTVQVFTDSEYQLPYVLGSAHQGCLPPFPADVFMVPQYGYLTLNNGSQAVGRSSFYCLEYFPSQMLRTGNNFTFSYTFEDVPFHSSYAHSQSLDRLMNPLIDQYLYYLSKTNAPSGTTTMSRLQFSQAGASDIRDQSRNWLPGPCYRQQRVSKTAADNNNSDYSWTGATKYHLNGRDSLVNPGPAMASHKDDEEKYFPQSGVLIFGKQDSGKTNVDIEKVMITDEEEIRTTNPVATEQYGSVSTNLQSGNTQAATTDVNTQGVLPGMVWQDRDVYLQGPIWAKIPHTDGHFHPSPLMGGFGLKHPPPQILIKNTPVPANPSTTFSAAKFASFITQYSTGQVSVEIEWELQKENSKRWNPEIQYTSNYNKSVNVDFTVDTNGVYSEPRPIGTRYLTRNL

SEQ ID NO: 92 - protein, 735 aa, Artificial Sequence
  Synthetic Polypeptide
MAADGYLPDWLEDTLSEGIRQWWKLKPGPPPPKPAERHQDDSRGLVLPGYKYLGPFNGLDKGEPVNEADAAALEHDKAYDRQLDSGDNPYLKYNHADAEFQERLKEDTSFGGNLGRAVFQAKKRVLEPLGLVEEPVKTAPGKKRPVEHSPAEPDSSSGTGKAGQQPARKRLNFGQTGDADSVPDPQPLGQPPAAPSGLGTNTMATGSGAPMADNNEGADGVGNSSGNWHCDSTWMGDRVITTSTRTWALPTYNNHLYKQISSQSGASNDNHYFGYSTPWGYFDFNRFHCHFSPRDWQRLINNNWGFRPKRLNFKLFNIQVKEVTQNDGTTTIANNLTSTVQVFTDSEYQLPYVLGSAHQGCLPPFPADVFMVPQYGYLTLNNGSQAVGRSSFYCLEYFPSQMLRTGNNFTFSYTFEDVPFHSSYAHSQSLDRLMNPLIDQYLYYLSKTNAPSGTTTMSRLQFSQAGASDIRDQSRNWLPGPCYRQQRVSKTAADNNNSDYSWTGATKYHLNGRDSLVNPGPAMASHKDDEEKYFPQSGVLIFGKQDSGKTNVDIEKVMITDEEEIRTTNPVATEQYGSVSTNLQSGNTQAATTDVNTQGVLPGMVWQDRDVYQQGPIWAKIPHTDGHFHPSPLMGGFGLKHPPPQILIKNTPVPANPSTTFSAAKLASFITQYSTGQVSVEVEWELQKENSKRWNPEIQYTSNYNKSVNVDFTVDTNGVYSEPRPIGTRYLTRNL

SEQ ID NO: 93 - protein, 735 aa, Artificial Sequence
  Synthetic Polypeptide
MAADGYLPDWLEDTLSEGIRQWWKLKPGPPPPKPAERHQDDSRGLVLPGYKYLGPFNGLDKGEPVNEADAAALEHDKAYDRQLDSGDNPYLKYNHADAEFQERLKEDTSFGGNLGRAVFQAKKRVLEPLGLVEEPVKTAPGKKRPVEHSPAEPDSSSGTGKAGQQPARKRLNFGQTGDADSVPDPQPLGQPPAAPSGLGTNTMATGSGAPMADSNEGADGVGNSSGNWHCDSTWMGDRVITTSTRTWALPTYNNHLYKQISSQSGASNDNHYFGYSTPWGYFDFNRFHCHFSPRDWQRLINNNWGFRPKRLNFKLFNIQVKEVTQNDGTTTIANNLTSTVQVFTDSEYQLPYVLGSAHQGCLPPFPADVFMVPQYGYLTLNNGSQAVGRSSFYCLEYFPSQMLRTGNNFTFSYTFEDVPFHSSYAHSQSLDRLMNPLIDQYLYYLSKTNAPSGTTTMSRLQFSQAGASDIRDQSRNWLPGPCYRQQRVSKTAADNNNSDYSWTGATKYHLNGRDSLVNPGPAMASHKDDEEKYFPQSGVLIFGKQDSGKTNVDIEKVMITDEEEIRTTNPVATEQYGSVSTNLQSGNTQAATTDVNTQGVLPGMVWQDRDVYLQGPIWAKIPHTDGHFHPSPLMGGFGLKHPPPQILIKNTPVPANPSTTFSAAKFASFITQYSTGQVSVEIEWELQKENSKRWNPEIQYTSNYNKSVNVDFTVDTNGVYSEPRPIGTRYLTRNL

SEQ ID NO: 94 - protein, 735 aa, Artificial Sequence
  Synthetic Polypeptide
MAADGYLPDWLEDTLSEGIRQWWKLKPGPPPPKPAERHQDDSRGLVLPGYKYLGPFNGLDKGEPVNEADAAALEHDKAYDRQLDSGDNPYLKYNHADAEFQERLKEDTSFGGNLGRAVFQAKKRVLEPLGLVEEPVKTAPGKKRPVEHSPAEPDSSSGTGKAGQQPARKRLNFGQTGDADSVPDPQPLGQPPAAPSGLGTNTMATGSGAPMADNNEGADGVGNSSGNWHCDSTWMGDRVITTSTRTWALPTYNNHLYKQISSQSGASNDNHYFGYSTPWGYFDFNRFHCHFSPRDWQRLINNNWGFRPKRLNFKLFNIQVKEVTQNDGTTTIANNLTSTVQVFTDSEYQLPYVLGSAHQGCLPPFPADVSMVPQYGYLTLNNGSQAVGRSSFYCLEYFPSQMLRTGNNFTFSYTFEDVPFHSSYAHSQSLDRLMNPLIDQYLYYLSKTNAPSGTTTMSRLQFSQAGASDIRDQSRNWLPGPCYRQQRVSKTAADNNNSDYSWTGATKYHLNGRDSLVNPGPAMASHKDDEEKYFPQSGVLIFGKQDSGKTNVDIEKVMITDEEEIRTTNPVATEQYGSVSTNLQSGNTQAATTDVNTQGVLPGMVWQDRDVYLQGPIWAKIPHTDGHFHPSPLMGGFGLKHPPPQILIKNTPVPANPSTTFSAAKFASFITQYSTGQVSVEIEWELQKENSKRWNPEIQYTSNYNKSVNVDFTVDTNGVYSEPRPIGTRYLTRNL

SEQ ID NO: 95 - protein, 735 aa, Artificial Sequence
  Synthetic Polypeptide
MAADGYLPDWLEDTLSEGIRQWWKLKPGPPPPKPAERHQDDSRGLVLPGYKYLGPFNGLDKGEPVNEADVAALEHDKAYDRQLDSGDNPYLKYNHADAEFQERLKEDTSFGGNLGRAVFQAKKRVLEPLGLVEEPVKTAPGKKRPVEHSPAEPDSSSGTGKAGQQPARKRLNFGQTGDADSVPDPQPLGQPPAAPSGLGTNTMATGSGAPMADNNEGADGVGNSSGNWHCDSTWMGDRVITTSTRTWALPTYNNHLYKQISSQSGASNDNHYFGYSTPWGYFDFNRFHCHFSPRDWQRLINNNWGFRPKRLNFKLFNIQVKEVTQNDGTTTIANNLTSTVQVFTDSEYQLPYVLGSAHQGCLPPFPADVFMVPQYGYLTLNNGSQAVGRSSFYCLEYFPSQMLRTGNNFTFSYTFEDVPFHSSYAHSQSLDRLMNPLIDQYLYYLSKTNAPSGTTTMSRLQFSQAGASDIRDQSRNWLPGPCYRQQRVSKTAADNNNSDYSWTGATKYHLNGRDSLVNPGPAMASHKDDEEKYFPQSGVLIFGKQDSGKTNVDIEKVMITDEEEIRTTNPVATEQYGPVSTNLQSGNTQAATTDVNTQGVLPGMVWQGRDVYLQGPIWAKIPHTDGHFHPSPLMGGFGLKHPPPQILIKNTPVPANPSTTFSAAKFASFITQYSTGQVSVEIEWELQKENSKRWNPEIQYTSNYNKSVNVDFTVDTNGVYSEPRPIGTRYLTRNL

SEQ ID NO: 96 - protein, 735 aa, Artificial Sequence
  Synthetic Polypeptide
MAADGYLPDWLEGTLSEGIRQWWKLKPGPPPPKPAERHQDDSRGLVLPGYKYLGPFNGLDKGEPVNEADAAALEHDKAYDRQLDSGDNPYLKYNHADAEFQERLKEDTSFGGNLGRAVFQAKKRVLEPLGLVEEPVKTAPGKKRPVEHSPAEPDSSSGTGKAGQQPARKRLNFGQTGDADSVPDPQPLGQPPAAPSGLGTNTMATGSGAPMADNNEGADGVGNSSGNWHCDSTWMGDRVITTSTRTWALPTYNNHLYKQISSQSGASSDNHYFGYSTPWGYFDFNRFHCHFSPRDWQRLINNNWGFRPKRLNFKLFNIQVKEVTQNDGTTTIANNLTSTVQVFTDSEYQLPYVLGSAHQGCLPPFPADVFMVPQYGYLTLNNGSQAVGRSSFYCLEYFPSQMLRTGNNFTFSYTFEDVPFHSSYAHSQSLDRLMNPLIDQYLYYLSKTNAPSGTTTMSRLQFSQAGASDIRDQSRNWLPGPCYRQQRVSKTAADNNNSDYSWTGATKYHLNGRDSLVNPGPAMASHKDDEEKYFPQSGVLIFGKQDSGKTNVDIEKVMITDEEEIRTTNPVATEQYGSVSTNLQSGNTQAATTDVNTQGVLPGMVWQDRDVYLQGPIWAKIPHTDGHFHPSPLMGGFGLKHPPPQILIKNTPVPANPSTTFSAAKLASFITQYSTGQVSVEIEWELQKENSKRWNPEIQYTSNYNKSVNVDFTVDTNGVYSEPRPIGTRYLTRNL

SEQ ID NO: 97 - protein, 735 aa, Artificial Sequence
  Synthetic Polypeptide
MAADGYLPDWLEDTLSEGIRQWWKLKPGPPPPKPAERHQDDSRGLVLPGYKYLGPFNGLDKGEPVNEADVAALEHDKAYDRQLDSGDNPYLKYNHADAEFQERLKEDTSFGGNLGRAVFQAKKRVLEPLGLVEEPVKTAPGKKRPVEHSPAEPDSSSGTGKAGQQPARKRLNFGQTGDADSVPDPQPLGQPPAAPSGLGTNTMATGSGAPMADNNEGADGVGNSSGNWHCDSTWMGDRVITTSTRTWALPTYNNHLYKQISSQSGASNDNHYFGYSTPWGYFDFNRFHCHFSPRDWQRLINNNWGFRPKRPNFKLFNIQVKEVTQNDGTTTIANNLTSTVQVFTDSEYQLPYVLGSAHQGCLPPFPADVFMVPQYGYLTLNNGSQAVGRSSFYCLEYFPSQMLRTGNNFTFSYTFEDVPFHSSYAHSQSLDRLMNPLIDQYLYYLSKTNAPSGTTTMSRLQFSQAGASDIRDQSRNWLPGPCYRQQRVSKTAADNNNSDYSWTGATKYHLNGRDSLVNPGPAMASHKDDEEKYFPQSGVLIFGKQDSGKTNVDIEKVMITDEEEIRTTNPVATEQYGSVSTNLQSGNTQAATTDVNTQGVLPGMVWQDRDVYLQGPIWAKIPHTDGHFHPSPLMGGFGLKHPPPQILIKNTPVPANPSTTFSAAKFASFITQYSTGQVSVEIEWELQKENSKRWNPEIQYTSNYNKSVNVDFTVDTNGVYSEPRPIGTRYLTRNL

SEQ ID NO: 98 - protein, 735 aa, Artificial Sequence
  Synthetic Polypeptide
MAADGYLPDWLEDTLSEGIRQWWKLKPGPPPPKPAERHQDDSRGLELPGYKYLGPFNGLDKGEPVNEADAAALEHDKAYDRQLDSGDNPYLKYNHADAEFQERLKEDTSFGGNLGRAVFQAKKRVLEPLGLVEEPVKTAPGKKRPVEHSPAEPDSSSGTGKAGQQPARKRLNFGQTGDADSVPDPQPLGQPPAAPSGLGTNTMATGSGAPMADNNEGADGVGNSSGNWHCDSTWMGDRVITTSTRTWALPTYNNHLYKQISSQSGASNDNHYFGYSTPWGYFDFNRFHCHFSPRDWQRLINNNWGFRPKRLNFKLFNIQVKEVTQNDGTTTIANNLTSTVQVFTDSEYQLPYVLGSAHQGCLPPFPADVFMVPQYGYLTLNNGSQAVGRSSFYCLEYFPSQMLRTGNNFTFSYTFEDVPFHSSYAHSQSLDRLMNPLIDQYLYYLSKTNAPSGTTTMSRLQFSQAGASDIRDQSRNWLPGPCYRQQRVSKTAADNNNSDYSWTGATKYHLNGRDSLVNPGPAMASHKDDEEKYFPQSGVLIFGKQDSGKTNVDIEKVMITDEEEIRTTNPVATEQYGSVSTNLQSGNTQAATTDVNTQGVLPGMVWQDRDVYLQGPIWAKIPHTDGHFHPSPLMGGFGLKHPPPQILIKNTPVPANPSTTFSAAKFASFITQYSTGQVSVEIEWELQKENSKRWNPEIQYTSNYNKSVNVDFTVDTNGVYSEPRPIGTRYLTRNL

SEQ ID NO: 99 - protein, 735 aa, Artificial Sequence
  Synthetic Polypeptide
MAADGYLPDWLEDTLSEGIRQWWKLKPGPPPPKPAERHQDDSRGLVLPGYKYLGPFNGLDKGEPVNEADAAALEHDKAYDRQLDSGDNPYLKYNHADAEFQERLKEDTSFGGNLGRAVFQAKKRVLEPLGLVEEPVKTAPGKKRPVEHSPAEPDSSSGTGKAGQQPARKRLNFGQTGDADSVPDPQPLGQPPAAPSGLGTNTMATGSGAPMADNNEGADGVGNSSGNWHCDSTWMGDRVITTSTRTWALPTYNNHLYKQISSQSGASNDNHYFGYSTPWGYFDFNRFHCHFSPRDWQRLINNNWGFRPKRLNFKLFNIQVKEVTQNDGMTTIANNLTSTVQVFTDSEYQLPYVLGSAHQGCLPPFPADVFMVPQYGYLTLNNGSQAVGRSSFYCLEYFPSQMLRTGNNFTFSYTFEDVPFHSSYAHSQSLDRLMNPLIDQYLYYLSKTNAPSGTTTMSRLQFSQAGASDIRDQSRNWLPGPCYRQQRVSKTAADNNNSDYSWTGATKYHLNGRDSLVNPGPAMASHKDDEEKYFPQSGVLIFGKQDSGKTNVDIEKVMITDEEEIRTTNPVATEQYGSVSTNLQSGNTQAATTDVNTQGVLPGMVWQDRDVYLQGPIWAKIPHTDGHFHPSPLMGGFGLKHPPPQILIKNTPVPANPSTTFSAAKFASFITQYSTGQVSVEIEWELQKENSKRWNPEIQYTSNYNKSVNVDFTVDTNGVYSEPRPIGTRYLTRNL

SEQ ID NO: 100 - protein, 735 aa, Artificial Sequence
  Synthetic Polypeptide
MAADGYLPDWLEDTLSEGIRQWWKLKPGPPPLKPAERHQDDSRGLVLPGYKYLGPFNGLDKGEPVNEADAAALEHDKAYDRQLDSGDNPYLKYNHADAEFQERLKEDTSFGGNLGRAVFQAKKRVLEPLGLVEEPVKTAPGKKRPVEHSPAEPDSSSGTGKAGQQPARKRLNFGQTGDADSVPDPQPLGQPPAAPSGLGTNTMATGSGAPMADNNEGADGVGNSSGNWHCDSTWMGDRVITTSTRTWALPTYNNHLYKQISSQSGASNDNHYFGYSTPWGYFDFNRFHCHFSPRDWQRLINNNWGFRPKRLNFKLFNIQVKEVTQNDGTTTIANNLTSTVQVFTDSEYQLPYVLGSAHQGCLPPFPADVFMVPQYGYLTLNNGSQAVGRSSFYCLEYFPSQMLRTGNNFTFSYTFEDVPFHSSYAHSQSLDRLMNPLIDQYLYYLSKTNAPSGTTTMSRLQFSQAGASDIRDQSRNWLPGPCYRQQRVSKTAADNNNSDYSWTGATKYHLNGRDSLVNPGPAMASHKDDEEKYFPQSGVLIFGKQDSGKTNVDIEKVMITDEEEIRTTNPVATEQYGSVSTNLQSGNTQAATTDVNTQGVPPGMVWQDRDVYLQGPIWAKIPHTDGHFHPSPLMGGFGLKHPPPQILIKNTPVPANPSTTFSAAKFASFITQYSTGQVSVEIEWELQKENSKRWNPEIQYTSNYNKSVNVDFTVDTNGVYSEPRPIGTRYLTRNL

SEQ ID NO: 101 - protein, 735 aa, Artificial Sequence
  Synthetic Polypeptide
MAADGYLPDWLEDTLSEGIRQWWKLKPGPPPPKPAERHQDDSRGLVLPGYKYLGPFNGLDKGEPVNEADAAALEHDKAYDRQLDSGDNPYLKYNHADAEFQERLKEDTSFGGNLGRAVFQAKKRVLEPLGLVEEPVKTAPGKKRPVEHSPAEPDSSSGTGKAGQQPARKRLNFGQTGDADSVPDPQPLGQPPAAPSGLGTNTMATGSGAPMADNNEGADGVGNSSGNWHCDSTWMGDRVITTSTRTWALPTYNNHLYKQISSQSGASNDNHYFGYSTPWGYFDFNRFHCHFSPRDWQRLINNNWGFRPKRLNFKLFNIQVKEVTQNDGTTTIANNLTSTVQVFTDSEYQLPYVLGSAHQGCLPPFPADVFMVPQYGYLTLNNGSQAVGRSSFYCLEYFPSQMLRTGNNFTFSYTFEDVPFHSSYAHSQSLDRLMNPLIDQYLYYLSKTNAPSGTTTMSRLQFSQAGASDIRDQSRNWLPGPCYRQQRVSKTAADNNNSDYSWTGATKYHLNGRDSLVNPGPAMASHKDDEEKYFPQSGVLIFGKQDSGKTNVDIEKVMITDEEEIRTTNPVATEQYGSVSTNLQSGNTQAATTDVNTQGVLPGMAWQDRDVYLQGPIWAKIPHTDGHFHPSPLMGGFGLKHPPPQILIKNTPVPANPSTTLSAAKFASFITQYSTGQVSVEIEWELQKENSKRWNPEIQYTSNYNKSVNVDFTVDTNGVYSEPRPIGTRYLTRNL

SEQ ID NO: 102 - protein, 735 aa, Artificial Sequence
  Synthetic Polypeptide
MAADGYLPDWLEDTLSEGIRQWWKLKPGPPPPKPAERHQDDSRGLVLPGYKYLGPFNGLDKGEPVNEADAAALEHDKAHDRQLDSGDNPYLKYNHADAEFQERLKEDTSFGGNLGRAVFQAKKRVLEPLGLVEEPVKTAPGKKRPVEHSPAEPDSSSGTGKAGQQPARKRLNFGQTGDADSVPDPQPLGQPPAAPSGLGTNTMATGSGAPMADNNEGADGVGNSSGNWHCDSTWMGDRVITTSTRTWALPTYNNHLYKQISSQSGASNDNHYFGYSTPWGYFDFNRFHCHFSPRDWQRLINNNWGFRPKRLNFKLFNIQVKEVTQNDGTTTIANNLTSTVQVFTDSEYQLPYVLGSAHQGCLPPFPADVFMVPQYGYLTLNNGSQAVGRSSFYCLEYFPSQMLRTGNNFTFSYTFEDVPFHSSYAHSQSLDRLMNPLIDQYLYYLSKTNAPSGTTTMSRLQFSQAGASDIRDQSRNWLPGPCYRQQRVSKTAADNNNSDYSWTGATKYHLNGRDSLVSPGPAMASHKDDEEKYFPQSGVLIFGKQDSGKTNVDIEKVMITDEEEIRTTNPVATEQYGSVSTNLQSGNTQAATTDVNTQGVLPGMVWQDRDVYLQGPIWAKIPHTDGHFHPSPLMGGFGLKHPPPQILIKNTPVPANPSTTFSAAKFASFITQYSTGQVSVEIEWELQKENSKRWNPEIQYTSNYNKSVNVDFTVDTNGVYSEPRPIGTRYLTRNL

SEQ ID NO: 103 - protein, 735 aa, Artificial Sequence
  Synthetic Polypeptide
MAADGYLPDWLEDTLSEGIRQWWKLKPGPPPLKPAERHQDDSRGLVLPGYKYLGPFNGLDKGEPVNEADAAALEHDKAYDRQLDSGDNPYLKYNHADAEFQERLKEDTSFGGNLGRAVFQAKKRVLEPLGLVEEPVKTAPGKKRPVEHSPAEPDSSSGTGKAGQQPARKRLNFGQTGDADSVPDPQPLGQPPAAPSGLGTNTMATGSGAPMADNNEGADGVGNSSGNWHCDSTWMGDRVITTSTRTWALPTYNNHLYKQISSQSGASNDNHYFGYSTPWGYFDFNRFHCHFSPRDWQRLINNNWGFRPKRLNFKLFNIQVKEVTQNDGTTTIANNLTSTVQVFTDSEYQLPYVLGSAHQGCLPPFPADVFMVPQYGYLTLNNGSQAVGRSSFYCLEYFPSQMLRTGNNFTFSYTFEDVPFHSSYAHSQSLDRLMNPLIDQYLYYLSKTNAPSGTTTMSRLQFSQAGASDIRDQSRNWLPGPCYRQQRVSKTAADNNNSDYSWTGATKYHLNGRDSLVNPGPAMASHKDDEEKYFPQSGVLIFGKQDSGKTNVDIEKVMITDEEEIRTTNPVATEQYGSVSTNLQSGNTQAATTDVNTQGVLPGMVWQDRDVYLQGPIWAKIPHTDGHFHPSPLMGGFGLKHPPPQILIKNTPVPANPSTTFSAAKFASFITQYSTGQVSVGIEWELQKENSKRWNPEIQYTSNYNKSVNVDFTVDTNGVYSEPRPIGTRYLTRNL

SEQ ID NO: 104 - protein, 735 aa, Artificial Sequence
  Synthetic Polypeptide
MAADGYLPDWLEDTLSEGIRQWWKLKPGPPPPKPAERHQDDSRGLVLPGYKYLGPFNGLDKGEPVNEADAAALEHDKAYDRQLDSGDNPYLKYNHADAEFQERLKEDTSFGGNLGRAVFQAKKRVLEPLGLVEEPVKTAPGKKRPVEHSPAEPDSSSGTGKAGQQPARKRLNFGQTGDADSVPDPQPLGQPPAAPSGLGTNTMATGSGAPMADNNEGADGVGNSSGNWHCDSTWMGDRVITTSTRTWALPTYNNHLYKQISSQSGASNDNHYFGYSTPWGYFDFNRFHCHFSPRDWQRLINNNWGFRPKRLNFKLFNIQVKEVTQNDGTTTIANNLTSTVQVFTDSEYQLPYVLGSAHQGCLPPFPADVFMVPQYGYLTLNNGSQAVGRSSFYCLEYFPSQMLRTGNNFTFSYTFEDVPFHSSYAHSQSLDRLMNPLIDQYLYYLSKTNAPSGTTTMSRLQFSQAGASDIRDQSRNWLPGPCYRQQRVSKTAADNNNSDYSWTGATKYHLNGRDSLVNPGPAMASHKDDEEKYFPQSGVLIFGKQDSGKTNVDIEKVMITDEEEIRTTNPVATEQYGSVSTNLQSGNTQAATTDVNTQGVLPGMVWQDRDVCLQGPIWAKIPHTDGHFHPSPLMGGFGLKHPPPQILIKNTPVPANPSTTFSAAKFASFITQYSTGQVSVEIEWELQKENSKRWNPEIQYTSNYNKSVNVDFTVDTNGVYSEPRPIGTRYLTRNL

SEQ ID NO: 105 - protein, 735 aa, Artificial Sequence
  Synthetic Polypeptide
MAADGYLPDWLEDTLSEGIRQWWKLKPGPPPPKPAERHQDDSRGLVLPGYKYLGPFNGLDKGEPVNEADAAALEHDKAYDRQLDSGDNPYLKYNHADAEFQERLKEDTSFGGNLGRAVFQAKKRVLEPLGLVEEPVKTAPGKKRPVEHSPAEPDSSSGTGKAGQQPARKRLNFGQTGDADSVPDPQPLGQPPAAPSGLGTNTMATGSGAPMADNNEGADGVGNSSGNWHCDSTWMGDRVITTSTRTWALPTYNNHLYKQISSQSGASNDNHYFGYSTPWGYFDFNRFHCHFSPRDWQRLINNNWGFRPKRLNFKLFNIQVKEVAQNDGTTTIANNLTSTVQVFTDSEYQLPYVLGSAHQGCLPPFPADVFMVPQYGYLTLNNGSQAVGRSSFYCLEYFPSQMLRTGNNFTFSYTFEDVPFHSSYAHSQSLDRLMNPLIDQYLYYLSKTNAPSGTTTMSRLQFSQAGASDIRDQSRNWLPGPCYRQQRVSKTAADNNNSDYSWTGATKYHLNGRDSLVNPGPAMASHKDDEEKYFPQSGVLIFGKQDSGKTNVDIEKVMITDEEEIRTTNPVATEQYGSVSTNLQSGNTQAATTDVNTQGVLPGMVWQDRDVYLQGPIWAKIPHTDGHFHPSPLMGGFGLKHPPPQILIKNTPVPANPSTTFSAAKFASFITQYSTGQVSVEIEWELQKENSKRWNPEIQYTSNYNKSVNVDFTVDTNGVYSEPRPIGTRYLTRNL

SEQ ID NO: 106 - protein, 735 aa, Artificial Sequence
  Synthetic Polypeptide
MAADGYLPDWLEDTLSEGIRQWWKLKPGPPPPKPAERHKDDSRGLVLPGYKYLGPFNGLDKGEPVNEADAAALEHDKAYDRQLDSGDNPYLKYNHADAEFQERLKEDTSFGGNLARAVFQAKKRVLEPLGLVEEPVKTAPGKKRPVEHSPAEPDSSSGTGKSGQQPARKRLNFGQTGDADSVPDPQPLGQPPAAPSGLGTNTMASGSGAPMADNNEGADGVGNSSGNWHCDSTWMGDRVITTSTRTWALPTYNNHLYKQISSQSGASNDNHYFGYSTPWGYFDFNRFHCHFSPRDWQRLINNNWGFRPKRLNFKLFNIQVKEVTQNDGTTTIANNLTSTVQVFTDSEYQLPYVLGSAHQGCLPPFPADVFMVPQYGYLTLNNGSQAVGRSSFYCPEYLPSQMLRTGNNFTFSYTFEDVPFHSSYAHSQSLDRLMNPLIDQYLYYLSRTNTPSGTTTQSRLQFSQAGASDIRDQSRNWLPGPCYRQQRVSKTAADNNNSDYSWTGATKYHLNGRDSLVNPGTAMASHKDDEEKYFPQSGVLIFGKQDSGKTNVDIEKVMITDEEETRTTNPVATEQYGSVSTNLQSGNTQAATSDVNTQGVLPGMVWQDRDVYLQGPIWAKIPHTDGHFHPSPLMGGFGLKHPPPQILIKNTPVPANPSTAFSAAKFASFITQYSTGQVSVEIEWELQKENSERWNPEIQYTSNYNKSVNVDFTVDTNGVYSEPRPIGTRYLTRNL

SEQ ID NO: 107 - protein, 735 aa, Artificial Sequence
  Synthetic Polypeptide
MAADGYLPDWLEDTLSEGIRQWWKLKPGPPPPKPAERHKDDSRGLVLPGYKYLGPFNGLDKGEPVNEADAAALEHDKAYDRQLDSGDNPYLKYNHADAEFQERLKEDTSFGGNLARAVFQAKKRVLEPLGLVEEPVKTAPGKKRPVEHSPAEPDSSSGTGKSGQQPARKRLNFGQTGDADSVPDPQPLGQPPAAPSGLGTNTMASGSGAPMADNNEGADGVGNSSGNWHCDSTWMGDRVITTSTRTWALPTYNNHLYKQISSQSGASNDNHYFGYSTPWGYFDFNRFHCHFSPRDWQRLINNNWGFRPKRLNFKLFNIQVKEVTQNDGTTTIANNLTSTVQVFTDSEYQLPYVLGSAHQGCLPPFPADVLMVPQYGYLTLNNGSQAVGRSSFYCPEYLPSQMLRTGNNFTFSYTFEDVPFHSSYAHSQSLDRLMNPLIDQYLYYLSRTNTPSGTTTQSRLQFSQAGASDIRDQSRNWLPGPCYRQQRVSKTAADNNNSDYSWTGATKYHLNGRDSLVNPGTAMASHKDDEEKYFPQSGVLIFGKQDSGKTNVDIEKVMITDEEEIRTTNPVATEQYGSVSTNLQSGNTQAATSDVNTQGVLPGMVWQDRDVYLQGPIWAKIPHTDGHFHPSPLMGGFGLKHPPPQILIKNTPVPANPSTAFSAAKFASFITQYSTGQVSVEIEWELQKENSERWNPEIQYTSNYNKSVNVDFTADTNGVYSEPRPIGTRYLTRNL

SEQ ID NO: 108 - protein, 735 aa, Artificial Sequence
  Synthetic Polypeptide
MAADGYLPDWLEDTLSEGIRQWWKLKPGPPPPKPAERHKDDSRGLVLPGYKYLGPFNGLDKGEPVNEADAAALEHDKAYDRQLDSGDNPYLKYNHADAEFQERLKEDTSFGGNLARAVFQAKKRVLEPLGLVEEPVKTAPGKKRPVEHSPAEPDSSSGTGKSGQQPARKRLNFGQTGDADSVPDPQPLGQPPAAPSGLGTNTMASGSGAPMADNNEGADGVGNSSGNWHCDSTWMGDRVITTSTRAWALPTYNNHLYKQISSQSGASNDNHYFGYSTPWGYFDFNRFHCHFSPRDWQRLINNNWGFRPKRLNFKLFNIQVKEVTQNDGTTTIANNLTSTVQVFTDSEYQLPYVLGSAHQGCLPPFPADVLMVPQYGYLTLNNGSQAVGRSSFYCPEYLPSQMLRTGNNFTFSYTFEDVPFHSSYAHSQSLDRLMNPLIDQYLYYLSRTNTPSGTTTQSRLQFSQAGASDIRDQSRNWLPGPCYRQQRVSKTAADNNNSDYSWTGATKYHLNGRDSLVNPGTAMASHKDDEEKYFPQSGVLIFGKQDSGKTNVDIEKVMITDEEEIRTTNPVATEQYGSVSTNLQSGNTQAATSDVNTQGVLPGMVWQDRDVYLQGPIWAKIPHTDGHFHPSPLMGGFGLKHPPPQILIKNTPVPANPSTAFSAAKFASFITQYSTGQVSVEIEWELQKENSERWNPEIQYTSNYNKSVNVDFTVDTNGVYSEPRPIGTRYLTRNL

SEQ ID NO: 109 - protein, 735 aa, Artificial Sequence
  Synthetic Polypeptide
MAADGYLPDWLEDTLSEGIRQWWKLKPGPPPPKPAERHKDDSRGLVLPGYKYLGPFNGLDKGEPVNEADAAALEHDKAYDRQLDSGDNPYLKYNHADAEFQERLKEDTSFGGNLARAVFQAKKRVLEPLGLVEEPVKTAPGKKRPVEHSPAEPDSSSGTGKSGQQPARKRLNFGQTGDADSVPDPQPLGQPPAAPSGLGTNTMASGSGAPMADNNEGADGVGNSSGNWHCDSTWMGDRVITTSTRTWALPTYNNHLYKQISSQSGASNDNHYFGYSTPWGYFDFNRFHCHFSPRDWQRLINNNWGFRPKRLNFKLFNIQVKEVTQNDGTTTIANNLTSTVQVFTDSEYQLPYVLGSAHQGCLPPFPADVFMVPQYGYLTLNNGSQAVGRSSFYCPEYLPSQMLRTGNNFTFSYTFEDVPFHSSYAHSQSLDRLMNPLIDQYLYYLSRTNTPSGTTTQSRLQFSQAGASDIRDQSRNWLPGPCYRQQRVSKTAADNNNSDYSWTGATKYHLNGRDSLVNPGTATASHKDDEEKYFPQSGVLIFGKQDSGKTNVDIEKVMITDEEEIRTTNPVATEQYGSVSTNLQSGNTQAATSDVNTQGVLPGMVWQDRDVYLQGPIWAKIPHTDGHFHPSPLMGGFGLKHPPPQILIKNTPVPANPSTAFSAAKFASFITQYSTGQVSVEIEWELQKENSERWNPEIQYTSNYNKSVNVDFTVDTNGVYSEPRPIGTRYLTRNL

SEQ ID NO: 110 - protein, 734 aa, Artificial Sequence
  Synthetic Polypeptide
MAADGYLPDWLEDTLSEGIRQWWKLKPGPPPPKPAERHKDDSRGLVLPGYKYLGPFNGLDKGEPVNEADAAALEHDKAYDRQLDSGDNPYLKYNHADAEFQERLKEDTSFGGNLARAVFQAKKRVLEPLGLVEEPVKTAPGKKRPVEHSPAEPDSSSGTGKSGQQPARKRLNFGQTGDADSVPDPQPLGQPPAAPSGLGTNTMASGSGAPMADNNEGADGVGNSSGNWHCDSTWMGDRVITTSTRTWALPTYNNHLYKQISSQSGASNDNHYFGYSTPWGYFDFNRFHCHFSPRDWQRLINNNWGFRPKRLNFKLFNIQVKEVTQNDGTTTIANNLTSTVQVFTDSEYQLPYVLGSAHQGCLPPFPADVFMVPQYGYLTLNNGSQAVGRSSFYCPEYLPSQMLRTGNNFTFSYTFEDVPFHSSYAHSQSLDRLMNPLIDQYLYYLSRTNTPSGTTTQSRLQFSQAGASDIRDQSRNWLPGPCYRQQRVSKTAADNNSDYSWTGATKYHLNGRDSLVNPGTAMASHKDDEEKYFPQSGVLIFGKQDSGKTNVDIEKVMITDEEEIRTTNPVATEQYGSVSTNLQSGNTQAATSDVNTQGVLPGMVWQDRDVYLQGPIWAKIPHTDGHFHPSPLMGGFGLKHPPPQILIKNTPVPANPSTAFSAAKFASFITQYSTGQVSVEIEWELQKENSERWNPEIQYTSNYNKSVNVDFTVDTNGVYSEPRPIGTRYLTRNL

SEQ ID NO: 111 - protein, 735 aa, Artificial Sequence
  Synthetic Polypeptide
MAADGYLPDWLEDTLSEGIRQWWKLKPGPPPPKPAERHKDDSRGLVLPGYKYLGPFNGLDKGEPVNEADAAALEHDKAYDRQLDSGDNPYLKYNHADAEFQERLKEDTSFGGNLARAVFQAKKRVLDPLGLVEEPVKTAPGKKRPVEHSPAEPDSSSGTGKSGQQPARKRLNFGQTGDADSVPDPQPLGQPPAAPSGLGTNTMASGSGAPMADNNEGADGVGNSSGNWHCDSTWMGDRVITTSTRTWALPTYNNHLYKQISSQSGASNDNHYFGYSTPWGYFDFNRFHCHFSPRDWQRLINNNWGFRPKRLNFKLFNIQVKEVTQNDGTTTIANNLTSTVQVFTDSEYQLPYVLGSAHQGCLPPFPADVFMVPQYGYLTLNNGSQAVGRSSFYCPEYLPSQMLRTGNNFTFSYTFEDVPFHSSYAHSQSLDRLMNPLIDQYLYYLSRTNTPSGTTTQSRLQFSQAGASDIRDQSRNWLPGPCYRQQRVSKTAADNNNSDYSWTGATKYHLNGRDSLVNPGTAMASHKDDEEKYFPQSGVLIFGKQDSGKTNVDIEKVMITDEEEIRTTNPVATEQYGSVSTNLQSGNTQAATSDVNTQGVLPGMVWQDRDVYLQGPIWAKIPHTDGHFHPSPLMGGFGLKHPPPQILIKNTPVPANPSTAFSAAKFASFITQYSTGQVSVEIEWELQKENSERWNPEIQYTSNYNKSVNVDFTVDTNGVYSEPRPIGTRYLTRNL

SEQ ID NO: 112 - protein, 735 aa, Artificial Sequence
  Synthetic Polypeptide
MAADGYLPDWLEDTLSEGIRQWWKLKPGPPPPKPAERHKDDSRGLVLPGYKYLGPFNGLDKGEPVNEADAAALEHDKAYDRQLDSGDNPYLKYNHADAEFQERLKEDTSFGGNLARAVFQAKKRVLEPLGLVEEPVKTAPGKKRPVEHSPAEPDSSSGTGKSGQQPARKRLNFGQTGDADSVPDPQPLGQPPAAPSGLGTNTMASGSGAPMADNNEGADGVGNSSGNWHCDSTWMGDRVITTSTRTWALPTYNNHLYKQISSQSGASNDNHYFGYSTPWGYFDFNRFHCHFSPRDWQRLINNNWGFRPKRLNFKLFNIQVKEVTQNDGTTTIANNLTSTVQVFTDSEYQLPYVLGSAHQGCLPPFPADVFMVPQYGYLTLNNGSQAVGRSSFYCPEYLPSQMLRTGNNFTFSYTFEDVPFHSSYAHSQSLDRLMNPLIDQYLYYLSRTNTPSGTTTQSRLQFSQAGASDIRDQSRNWLPGPCYRQQRVSKTAADNNNSDYSWTGATKYHLNGRDSLVNPGTAMASHKDDEEKYFPQSGVLIFRKQDSGKTNVDIEKVMITDEEEIRTTNPVATEQYGSVSTNLQSGNTQAATSDVNTQGVLPGMVWQDRDVYLQGPIWAKIPHTDGHFHPSPLMGGFGLKHPPPQILIKNTPVPANPSTAFSAAKFASFITQYSTGQVSVEIEWELQKENSERWNPEIQYTSNYNKSVNVDFTVDTNGVYSEPRPIGTRYLTRNL

SEQ ID NO: 113 - protein, 735 aa, Artificial Sequence
  Synthetic Polypeptide
MAADGYLPDWLEDTLSEGIRQWWKLKPGPPPPKPAERHKDDSRGLVLPGYKYLGPFNGLDKGEPVNEADAAALEHDKAYDRQLDSGDNPYLKYNHADAEFQERLKEDTSFGGNLARAVFQAKKRVLEPLGLVEEPVKTAPGKKRPVEHSPAEPDSSSGTGKSGQQPARKRLNFGQTGDADSVPDPQPLGQPPAAPSGLGTNTMASGSGAPMADNNEGADGVGNSSGNWHCDSTWMGDRVITTSTRTWALPTYNNHLYKQISSQSGASNDNHYFGYSTPWGYFDFNRFHCHFSPRDWQRLINNNWGFRPKRLNFKLFNIQVKEVTQNDGTTTIANNLTSTVQVFTDSEYQLPYVLGSAHQGCLPPFPADVLMVPQYGYLTLNNGSQAVGRSSFYCPEYLPSQMLRTGNNFTFSYTFEDVPFHSSYAHSQSLDRLMNPLIDQYLYYLSRTNTPSGTTTQSRLQFSQAGASDIRDQSRNWLPGPCYRQQRVSKTAADNNNSDYSWTGATKYHLNGRDSLVNPGTAMASHKDDEEKYFPQSGVLIFRKQDSGKTNVDIEKVMITDEEEIRTTNPVATEQYGSVSTNLQSGNTQAATSDVNTQGVLPGMVWQDRDVYLQGPIWAKIPHTDGHFHPSPLMGGFGLKHPPPQILIKNTPVPANPSTAFSAAKFASFITQYSTGQVSVEIEWELQKENSERWNPEIQYTSNYNKSVNVDFTVDTNGVYSEPRPIGTRYLTRNL

SEQ ID NO: 114 - protein, 735 aa, Artificial Sequence
  Synthetic Polypeptide
MAADGYLPDWLEDTLSEGIRQWWKLKPGPPPPKPAERHKDDSRGLVLPGYKYLGPFNGLDKGEPVNEADAAALEHDKAYDRQLDSGDNPYLKYNHADAEFQERLKEDTSFGGNLARAVFQAKKRVLEPLGLVEEPVKTAPGKKRPVEHSPAEPDSSSGTGKSGQQPARKRLNFGQTGDADSVPDPQPLGQPPAAPSGLGTNTMASGSGAPMADNNEGADGVGNSSGNWHCDSTWMGDRVITTSTRTWALPTYNNHLYKQISSQSGASNDNHYFGYSTPWGYFDFNRFHCHFSPRDWQRLINNNWGFRPKRLNFKLFNIQVKEVTQNDGTTTIANNLTSTVQVFTDSEYQLPYVLGSAHQGCLPPFPADVLMVPQYGYLTLNNGSQAVGRSSFYCPEYLPSQMLRTGNNFTFSYTFEDVPFHSSYAHSQSLDRLMNPLIDQYLYYLSRTNTPSGTTTQSRLQFSQAGASDIRDQSRNWLPGPCYRQQRVSKTAADNNNSDYSWTGATKYHLNGRDSLVNPGTAMASHKDDEEKYFPQSGVLIFGKQDSGKTNVDIEKVMITDEEEIRTTNPVATEQYGSVSTNLQSGNTQAATSDVNTQGVLPGMVWQDRDVYLQGPIWAKIPHTDGHFHPSPLMGGFGLKHPPPQILIKNTPVPANPSTAFSAAKFASFITQYSTGQVSVEIEWELQKENSERWNPEIQYTSNYNKSVNVDFTVDTNGVYSEPRPIGTRYLTRNL

SEQ ID NO: 115 - protein, 735 aa, Artificial Sequence
  Synthetic Polypeptide
MAADGYLPDWLEDTLSEGIRQWWKLKPGPPPPKPAERHKDDSRGLVLPGYKYLGPFNGLDKGEPVNEADAAALEHDKAYDRQLDSGDNPYLKYNHADAEFQERLKEDTSFGGNLARAVFQAKKRVLEPLGLVEEPVKTAPGKKRPVEHSPAEPDSSSGTGKSGQQPARKRLNFGQTGDADSVPDPQPLGQPPAAPSGLGTNTMASGSGAPMADNNEGADGVGNSSGNWHCDSTWMGDRVITTSTRTWALPTYNNHLYKQISSQSGASNDNHYFGYSTPWGYFDFNRFHCHFSPRDWQRLINNNWGFRPKRLNFKLFNIQVKEVTQNDGTTTIANNLTSTVQVFTDSEYQLPYVLGSAHQGCLPPFPADVFMVPQYGYLTLNNGSQAVGRSSFYCPEYLPSQMLRTGNNFTFSYTFEDVPFHSSYAHSQSLDRLMNPLIDQYLYYLSRTNTPSGTTTQSRLQFSQAGASDIRDQSRNWLPGPCYRQQRVSKTAADNNNSDYSWTGATKYHLNGRDSLVNPGTAMASHKDDEEKYFPQSGVLIFGKQDSGKTNVDIEKVMITDEEEIRTTNPVATEQYGSVSTNLQSGNTQAATSDVNTQGVLPGMVWQDRDVYLQGPIWAKIPHTDGHFHPSPLMGGFGLKHPPPQILIKNTPVPANPSTAFSAAKFASFITQYSTGQVSVEIEWELQKENSERWNPEIQYTSNYNKSVNVDFTVDTNGVYSEPRPIGTRYLTRNL

SEQ ID NO: 116 - protein, 735 aa, Artificial Sequence
  Synthetic Polypeptide
MAADGYLPDWLEDTLSEGIRQWWKLKPGPPPPKPAERHKDDSRGLVLPGYKYLGPFNGLDKGEPVNEADAAALEHDKAYDRQLDSGDNPYLKYNHADAEFQERLKEDTSFGGNLARAVFQAKKRVLEPLGLVEEPVKTAPGKKRPVEHSPAEPDSSSGTGKSGQQPARKRLNFGQTGDADSVPDPQPLGQPPAAPSGLGTNTMASGSGAPMADNNEGADGVGNSSGNWHCDSTWMGDRVITTSTRTWALPTYNNHLYKQISSQSGASNDNHYFGYSTPWGYFDFNRFHCHFSPRDWQRLINNNWGFRPKRLNFKLFNIQVKEVTQNDGTTTIANNLTSTVQVFTDSEYQLPYVLGSAHQGCLPPFPADVLMVPQYGYLTLNNGSQAVGRSSFYCPEYLPSQMLRTGNNFTFSYTFEDVPFHSSYAHSQSLDRLMNPLIDQYLYYLSRTNTPSGTTTQSRLQFSQAGASDIRDQSRNWLPGPCYRQQRVSKTAADNNNSDYSWTGATKYHLNGRDSLVNPGTATASHKDDEEKYFPQSGVLIFGKQDSGKTNVDIEKVMITDEEEIRTTNPVATEQYGSVSTNLQSGNTQAATSDVNTQGVLPGMVWQDRDVYLQGPIWAKIPHTDGHFHPSPLMGGFGLKHPPPQILIKNTPVPANPSTAFSAAKFASFITQYSTGQVSVEIEWELQKENSERWNPEIQYTSNYNKSVNVDFTVDTNGVYSEPRPIGTRYLTRNL

SEQ ID NO: 117 - protein, 735 aa, Artificial Sequence
  Synthetic Polypeptide
MAADGYLPDWLEDTLSEGIRQWWKLKPGPPPPKPAERHKDDSRGLVLPGYKYLGPFNGLDKGEPVNEADAAALEHDKAYDRQLDSGDNPYLKYNHADAEFQERLKEDTSFGGNLARAVFQAKKRVLEPLGLVEEPVKTAPGKKRPVEHSPAEPDSSSGTGKSGQQPARKRLNFGQTGDADSVPDPQPLGQPPAAPSGLGTNTMASGSGAPMADNNEGADGVGNSSGNWHCDSTWMGDRVITTSTRTWALPTYNNHLYKQISSQSGASNDNHYFGYSTPWGYFDFNRFHCHFSPRDWQRLINNNWGFRPKRLNFKLFNIQVKEVTQNDGTTTIANNLTSTVQVFTDSEYQLPYVLGSAHQGCLPPFPADVFMVPQYGYLTLNNGSQAVGRSSFYCPEYLPSQMLRTGNNFTFSYTFEDVPFHSSYAHSQSLDRLMNPLIDQYLYYLSRTNTPSGTTTQSRLQFSQAGASDIRDQSRNWLPGPCYRQQRVSKTAADNNNSDYSWTGATKYHLNGRDSLVNPGTAMASHKDDGEKYFPQSGVLIFGKQDSGKTNVDIEKVMITDEEEIRTTNPVATEQYGSVSTNLQSGNTQAATSDVNTQGVLPGMVWQDRDVYLQGPIWAKIPHTDGHFHPSPLMGGFGLKHPPPQILIKNTPVPANPSTAFSAAKFASFITQYSTGQVSVEIEWELQKENSERWNPEIQYTSNYNKSVNVDLTVDTNGVYSEPRPIGTRYLTRNL

SEQ ID NO: 118 - protein, 735 aa, Artificial Sequence
  Synthetic Polypeptide
MAADGYLPDWLEDTLSEGIRQWWKLKPGPPPPKPAERHKDDSRGLVLPGYKYLGPFNGLDKGEPVNEADAAALEHDKAYDRQLDSGDNPYLKYNHADAEFQERLKEDTSFGGNLARAVFQAKKRVLEPLGLVEEPVKTAPGKKGPVEHSPAEPDSSSGTGKSGQQPARKRLNFGQTGDADSVPDPQPLGQPPAAPSGLGTNTMASGSGAPMADNNEGADGVGNSSGNWHCDSTWMGDRVITTSTRTWALPTYNNHLYKQISSQSGASNDNHYFGYSTPWGYFDFNRFHCHFSPRDWQRLINNNWGFRPKRLNFKLFNIQVKEVTQNDGTTTIANNLTSTVQVFTDSEYQLPYVLGSAHQGCLPPFPADVFMVPQYGYLTLNNGSQAVGRSSFYCLEYFPSQMLRTGNNFTFSYTFEDVPFHSSYAHSQSLDRLMNPLIDQYLYYLSRTNTPSGTTTQSRLRFSQAGASDIRDQSRNWLPGPCYRQQRVSKTAADNNNSDYSWTGATKYHLNGRDSLVNPGTAMASHKDDEEKYFPQSGVLIFGKQDSGKTNVDIERVMITDEEEIRTTNPVATEQYGSVSTNLQSGNTQAATSDVNTQGVLPGMVWQDRDVYLQGPIWAKIPHTDGHFHPSPLMGGFGLKHPPPQILIKNTPVPANPSTTFSAAKFASFITQYSTGQVSVEIEWELQKENSKRWNPEIQYTSNYNKSVNVDFTVDTNGVYSEPRPIGTRYLTRNL

SEQ ID NO: 119 - protein, 735 aa, Artificial Sequence
  Synthetic Polypeptide
MAADGYLPDWLEDTLSEGIRQWWKLKPGPPPPKPAERHKDDSRGLVLPGYKYLGPFNGLDKGEPVNEADAAALEHDKAYDRQLDSGDNPYLKYNHADAEFQERLKEDTSFGGNLARAVFQAKKRVLEPLGLVEEPVKTAPGKKRPVEHSPAGPDSSSGTGKSGQQPARKRLNFGQTGDADSVPDPQPLGQPPAAPSGLGTNTMASGSGAPMADNNEGADGVGNSSGNWHCDSTWMGDRVITTSTRTWALPTYNNHLYKQISSQSGASNDNHYFGYSTPWGYFDFNRFHCHFSPRDWQRLINNNWGFRPKRLNFELFNIQVKEVTQNDGTTTIANNLTSTVQVFTDSEYQLPYVLGSAHQGCLPPFPADVFMVPQYGYLTLNNGSQAVGRSSFYCLEYFPSQMLRTGNNFTFSYTFEDVPFHSSYAHSQSLDRLMNPLIDQYLYYLSRTNTPSGTTTQSRLQFSQAGASDIRDQSRNWLPGPCYRQQRVSKTAADNNNSDYSWTGATKYHLNGRDSLVNPGTAMASHKDDEEKYFPQSGVLIFGKQDSGKTNVDIEKVMITDEEEIRTTNPVATEQYGSVSTNLQSGNTQAATSDVNTQGVLPGMVWQDRDVYLQGPIWAKIPHTDGHFHPSPLMGGFGLKHPPPQILIKSTPVPANPSTTFSAAKFASFITQYSTGQVSVEIEWELQKENSKRWNPEIQYTSNYNKSVNVDFTVDTNGVYSDPRPIGTRYLTRNL

SEQ ID NO: 120 - protein, 735 aa, Artificial Sequence
  Synthetic Polypeptide
MAADGYLPDWLEDTLSEGIRQWWKLKPGPPPPRPAERHQDDSRGLVLPGYKYLGPFNGLDKGEPVNEADAAALEHDKAYDRQLDSGDNPYLKYNHADAEFQERLKEDTSFGGNLGRAVFQAKKRVLEPLGLVEEPVKTAPGKKRPVEHSPAEPDSSSGTGKAGQQPARKRLNFGQTGDADSVPDPQPLGQPPAAPTSLGSTTMATGSGAPMADNNEGADGVGNSSGNWHCDSQWLGDRVITTSTRTWALPTYNNHLYKQISSQSGASNDNHYFGYSTPWGYFDFNRFHCHFSPRDWQRLINNNWGFRPKRLNFKLFNIQVKEVTQNDGTTTIANNLTSTVQVFTDSEYQLPYVLGSAHQGCLPPFPADVFMVPQYGYLTLNNGSQAVGRSSFYCLEYFPSQMLRTGNNFTFSYTFEDVPFHSSYAHSQSLDRLMNPLIDQYLYYLSRTNTPSGTTTQSRLRFSQAGASDIRDQSRNWLPGPCYRQQRVSKTAADNNNSDYSWTGATKYHLNGRDSLVNPGTAMASHKDDEEKYFPQSGVLIFGKQDSGKTNVDIERVMITDEEEIRTTNPVATEQYGSVSTNLQSGNTQAATSDVNTQGVLPGMVWQDRDVYLQGPIWAKIPHTDGHFHPSPLMGGFGLKHPPPQILIKNTPVPANPSTTFSAAKFASFITQYSTGQVSVEIEWELQKENSKRWNPEIQYTSNYNKSVNVDFTVDTNGVYSEPRPIGTRYLTRNL

SEQ ID NO: 121 - protein, 735 aa, Artificial Sequence
  Synthetic Polypeptide
MAADGYLPDWLEDTLSEGIRQWWKLKPGPPPPRPAERHQDDSRGLVLPGYKYLGPFNGLDKGEPVNEADAAALEHDKAYDRQLDSGDNPYLKYNHADAEFQERLKEDTSFGGNLGRAVFQAKKRVLEPLGLVEEPVKTAPGKKRPVEHSPAEPDSSSGTGKAGQQPARKRLNFGQTGDADSVPDPQPLGQPPAAPSGLGTNTMASGSGAPMADNNEGADGVGNSSGNWHCDSTWMGDRVITTSTRTWALPTYNNHLYKQISSQSGASNDNHYFGYSTPWGYFDFNRFHCHFSPRDWQRLINNNWGFRPKRLNFKLFNIQVKEVTQNDGTTTIANNLTSTVQVFTDSEYQLPYVLGSAHQGCLPPFPADVFMVPQYGYLTLNNGSQAVGRSSFYCLEYFPSQMLRTGNNFTFSYTFEDVPFHSSYAHSQSLDRLMNPLIDQYLYYLSRTNTPSGTTTQSRLRFSQAGASDIRDQSRNWLPGPCYRQQRVSKTAADNNNSDYSWTGATKYHLNGRDSLVNPGTAMASHKDDEEKYFPQSGVLIFGKQDSGKTNVDIERVMITDEEEIRTTNPVATEQYGSVSTNLQSGNTQAATSDVNTQGVLPGMVWQDRDVYLQGPIWAKIPHTDGHFHPSPLMGGFGLKHPPPQILIKNTPVPANPSTTFSAAKFASFITQYSTGQVSVEIEWELQKENSKRWNPEIQYTSNYNKSVNVDFTVDTNGVYSEPRPIGTRYLTRNL

SEQ ID NO: 122 - protein, 735 aa, Artificial Sequence
  Synthetic Polypeptide
MAADGYLPDWLEDTLSEGIRQWWKLKPGPPPPKPAERHKDDSRGLVLPGYKYLGPFNGLDKGEPVNEADAAALEHDKAYDRQLDSGDNPYLKYNHADAEFQERLKEDTSFGGNLARAVFQAKKRVLEPLGLVEEPVKTAPGKKRPVEHSPAGPDSSSGTGKSGQQPARKRLNFGQTGDADSVPDPQPLGQPPAAPSGLGTNTMASGSGAPMADNNEGADGVGNSSGNWHCDSTWMGDRVITTSTRTWALPTYNNHLYKQISSQSGASNDNHYFGYSTPWGYFDFNRFHCHFSPRDWQRLINNNWGFRPKRLNFELFNIQVKEVTQNDGTTTIANNLTSTVQVFTDSEYQLPYVLGSAHQGCLPPFPADVFMVPQYGYLTLNNGSQAVGRSSFYCLEYFPSQMLRTGNNFTFSYTFEDVPFHSSYAHSQSLDRLMNPLIDQYLYYLSRTNTPSGTTTQSRLQFPQAGASDIRDQSRNWLPGPCYRQQRVSKTAADNNNSDYSWTGATKYHLNGRDSLVNPGTAMASHKDDEEKYFPQSGVLIFGKQDSGKTNVDIEKVMITDEEEIRTTNPVATEQYGSVSTNLQSGNTQAATSDVNTQGVLPGMVWQDRDVYLQGPIWAKIPHTDGHFHPSPLMGGFGLKHPPPQILIKSTPVPANPSTTFSAAKFASFITQYSTGQVSVEIEWELQKENSKRWNPEIQYTSNYNKSVNVDFTVDTNGVYSEPRPIGTRYLTRNL

SEQ ID NO: 123 - protein, 735 aa, Artificial Sequence
  Synthetic Polypeptide
MAADGYLPDWLEDTLSEGIRQWWKLKPGPPPPRPAERHQDDSRGLVLPGYKYLGPFNGLDKGEPVNEADAAALEHDKAYDRQLDSGDNPYLKYNHADAEFQERLKEDTSFGGNLGRAVFQAKKRVLEPLGLVEEPVKTAPGKKRPVEHSPAEPDSSSGTGKSGQQPARKRLNFGQTGDADSVPDPQPLGQPPAAPSGLGTNTMASGSGAPMADNNEGADGVGNSSGNWHCDSTWMGDRVITTSTRTWALPTYNNHLYKQISSQSGASNDNHYFGYSTPWGYFDFNRFHCHFSPRDWQRLINNNWGFRPKRLNFKLFNIQVKEVTQNDGTTTIANNLTSTVQVFTDSEYQLPYVLGSAHQGCLPPFPADVFMVPQYGYLTLNNGSQAVGRSSFYCLEYFPSQMLRTGNNFTFSYTFEDVPFHSSYAHSQSLDRLMNPLIDQYLYYLSRTNTPSGTTTQSRLRFSQAGASDIRDQSRNWLPGPCYRQQRVSKTAADNNNSDYSWTGATKYHLNGRDSLVNPGTAMASHKDDEEKYFPQSGVLIFGKQDSGKTNVDIERVMITDEEEIRTTNPVATEQYGSVSTNLQSGNTQAATSDVNTQGVLPGMVWQDRDVYLQGPIWAKIPHTDGHFHPSPLMGGFGLKHPPPQILIKNTPVPANPSTTFSAAKFASFITQYSTGQVSVEIEWELQKENSKRWNPEIQYTSNYNKSVNVDFTVDTNGVYSEPRPIGTRYLTRNL

SEQ ID NO: 124 - protein, 735 aa, Artificial Sequence
  Synthetic Polypeptide
MAADGYLPDWLEDTLSEGIRQWWKLKPGPPPPKPAERHKDDSRGLVLPGYKYLGPFNGLDKGEPVNEADAAALEHDKAYDRQLDSGDNPYLKYNHADAEFQERLKEDTSFGGNLARAVFQAKKRVLEPLGLVEEPVKTAPGKKRPVEHSPAEPDSSSGTGKSGQQPARKRLNFGQTGDADSVPDPQPLGQPPAAPSGLGTNTMASGSGAPMADNNEGADGVGNSSGNWHCDSTWMGDRVITTSTRTWALPTYNNHLYKQISSQSGASNDNHYFGYSTPWGYFDFNRFHCHFSPRDWQRLINNNWGFRPKRLNFKLFNIQVKEVTQNDGTTTIANNLTSTVQVFTDSEYQLPYVLGSAHQGCLPPFPADVFMVPQYGYLTLNNGSQAVGRSSFYCLEYFPSQMLRTGNNFTFSYTFEDVPFHSSYAHSQSLDRLMNPLIDQYLYYLSRTNTPSGTTTQSRLRFSQAGASDIRDQSRNWLPGPCYRQQRVSKTAADNNNSDYSWTGATKYHLNGRDSLVNPGTAMASHKDDEEKYFPQSGVLIFGKQDSGKTNVDIERVMITDEEEIRTTNPVATEQYGSVSTNLQSGNTQAATSDVNTQGVLPGMVWQDRDVYLQGPIWAKIPHTDGHFHPSPLMGGFGLKHPPPQILIKNTPVPANPSTTFSAAKFASFITQYSTGQVSVEIEWELQKENSKRWNPEIQYTSNYNKSVNVDFTVDTNGVYSEPRPIGTRYLTRNL

SEQ ID NO: 125 - protein, 735 aa, Artificial Sequence
  Synthetic Polypeptide
MAADGYLPDWLEDTLSEGIRQWWKLKPGPPPPKPAERHKDDSRGLVLPGYKYLGPFNGLDKGEPVNEADAAALEHDKAYDRQLDSGDNPYLKYNHADAEFQERLKEDTSFGGNLARAVFQAKKRVLEPLGLVEEPVKTAPGKKRPVEHSPAEPDSSSGTGKSGQQPARKRLNFGQTGDADSVPDPQPLGQPPAAPSGLGTNTMASGSGAPMADNNEGADGVGNSSGNWHCDSTWMGDRVITTSTRTWALPTYNNHLYKQISSQSGASNDNHYFGYSTPWGYFDFNRFHCHFSPRDWQRLINNNWGFRPKRLNFKLFNIQVKEVTQNDGTTTIANNLTSTVQVFTDSEYQLPYVLGSAHQGCLPPFPADVFMVPQYGYLTLNNGSQTVGRSSFYCLEYFPSQMLRTGNNFTFSYTFEDVPFHSSYAHSQSLDRLMNPLIDQYLYYLSRTNTPSGTTTQSRLRFSQAGASDIRDQSRNWLPGPCYRQQRVSKTAADNNNSDYSWTGATKYHLNGRDSLVNPGTAMASHKDDEEKYFPQSGVLIFGKQDSGKTNVDIERVMITDEEEIRTTNPVATEQYGSVSTNLQSGNTQAATSDVNTQGVLPGMVWQDRDVYLQGPIWAKIPHTDGHFHPSPLMGGFGLKHPPPQILIKNTPVPANPSTTFSAAKFASFITQYSTGQVSVEIEWELQKENSKRWNPEIQYTSNYNKSVNVDFTVDTNGVYSEPRPIGTRYLTRNL

SEQ ID NO: 126 - protein, 735 aa, Artificial Sequence
  Synthetic Polypeptide
MAADGYLPDWLEDTLSEGIRQWWKLKPGPPPPKPAERHKDDSRGLVLPGYKYLGPFNGLDKGEPVNEADAAALEHDKAYDRQLDSGDNPYLKYNHADAEFQERLKEDTSFGGNLARAVFQAKKRVLEPLGLVEEPVKTAPGKKRPVEHSPAEPDSSSGTGKSGQQPARKRLNFGQTGDADSVPDPQPLGQPPAAPSGLGTNTMASGSGAPMADNNEGADGVGNSSGNWHCDSTWMGDRVIPTSTRTWALPTYNNHLYKQISSQSGASNDNHYFGYSTPWGYFDFNRFHCHFSPRDWQRLINNNWGFRPKRLNFKLFNIQVKEVTQNDGTTTIANNLTSTVQVFTDSGYQLPYVLGSAHQGCLPPFPADVFMVPQYGYLTLNNGSQAVGRSSFYCLEYFPSQMLRTGNNFTFSYTFEDVPFHSSYAHSQSLDRLMNPLIDQYLYYLSRTNTPSGTTTQSRLRFSQAGASDIRDQSRNWLPGPCYRQQRVSKTAADNNNSDYSWTGATKYHLNGRDSLVNPGTAMASHKDDEEKYFPQSGVLIFGKQDSGKTNVDIERVMITDEEEIRTTNPVATEQYGSVSTNLQSGNTQAATSDVNTQGVLPGMVWQDRDVYLQGPIWAKIPHTDGHFHPSPLMGGFGLKHPPPQILIKNTPVPANPSTTFSAAKFASFITQYSTGQVSVEIEWELQKENSKRWNPEIQYTSNYNKSVNVDFTVDTNGVYSEPRPIGTRYLTRNL

SEQ ID NO: 127 - protein, 735 aa, Artificial Sequence
  Synthetic Polypeptide
MAADGYLPDWLEDTLSEGIRQWWKLKPGPPPPKPAERHKDDSRGLVLPGYKYLGPFNGLDKGEPVNEADAAALEHDKAYDRQLDSGDNPYLKYNHADAEFQERLKEDTSFGGNLARAVFQAKKRVLEPLGLVEEPVKTAPGKKRPVEHSPAEPDSSSGTGKSGQQPARKRLNFGQTGDADSVPDPQPLGQPPAAPSGLGTNTMASGSGAPMADNNEGADGVGNSSGNWHCDSTWMGDRVITTSTRTWALPTYNNHLYKQISSQSGASNDNHYFGYSTPWGYFDFNRFHCHFSPRDWQRLINNNWGFRPKRLNFKLFNIQVKEVTQNDGTTTIANNLTSTVQVFTDSEYQLPYVLGSAHQGCLPPFPADVFMVPQYGYLTLNNGSQAVGRSSFYCLEYFPSQMLRTGNNFTFSYTFEDVPFHSSYAHSQSLDRLMNPLIDQYLYYLSRTNTPSGTTTQSRLRFSQAGASDIRDQSRNWLPGPCYRQQRVSKTAADNNNSDYSWTGATKYHLNGRDSLVNPGTAMASHKDDEEKYFPQSGVLIFGKQDSGKTNVDIERVMITDEEEIRTTNPVATEQYGSVSTNLQSGDTQAATSDVNTQGVLPGMVWQDRDVYLQGPIWAKIPHTDGHFHPSPLMGGFGLKHPPPQILIKNTPVPANPSTTFSAAKFASFITQYSTGQVSVEIEWELQKENSKRWNPEIQYTSNYNKSVNVDFTVDTNGVYSEPRPIGTRYLTRNL

SEQ ID NO: 128 - protein, 734 aa, Artificial Sequence
  Synthetic Polypeptide
MAADGYLPDWLEDTLSEGIRQWWKLKPGPPPPKPAERHKDDSRGLVLPGYKYLGPFNGLDKGEPVNEADAAALEHDKAYDRQLDSGDNPYLKYNHADAEFQERLKEDTSFGGNLARAVFQAKKRVLEPLGLVEEPVKTAPGKKRPVEHSPAEPDSSSGTGKSGQQPARKRLNFGQTGDADSVPDPQPLGQPPAAPSGLGTNTMASGSGAPMADNNEGADGVGNSSGNWHCDSTWMGDRVITTSTRTWALPTYNNHLYKQISSQSGASNDNHYFGYSTPWGYFDFNRFHCHFSPRDWQRLINNNWGFRPKRLNFKLFNIQVKEVTQNDGTTTIANNLTSTVQVFTDSEYQLPYVLGSAHQGCLPPFPADVFMVPQYGYLTLNNGSQAVGRSSFYCLEYFPSQMLRTGNNFTFSYTFEDVPFHSSYAHSQSLDRLMNPLIDQYLYYLSRTNTPSGTTTQSRLRFSQAGASDIRDQSRNWLPGPCYRQQRVSKTAADNNSDYSWTGATKYHLNGRDSLVNPGTAMASHKDDEEKYFPQSGVLIFGKQDSGKTNVDIERVMITDEEEIRTTNPVATEQYGSVSTNLQSGNTQAATSDVNTQGVLPGMVWQDRDVYLQGPIWAKIPHTDGHFHPSPLMGGFGLKHPPPQILIKNTPVPANPSTTFSAAKFASFITQYSTGQVSVEIEWELQKENSKRWNPEIQYTSNYNKSVNVDFTVDTNGVYSEPRPIGTRYLTRNL

SEQ ID NO: 129 - protein, 735 aa, Artificial Sequence
  Synthetic Polypeptide
MAADGYLPDWLEDTLSEGIRQWWKLKPGPPPPKPAERHKDDSRGLVLPGYKYLGPFNGLDKGEPVNEADAAALEHDKAYDRQLDSGDNPYLKYNHADAEFQERLKEDTSFGGNLARAVFQAKKRVLEPLGLVEEPVKTAPGKKRPVEHSPAEPDSSSGTGKSGQQPARKRLNFGQTGDADSVPDPQPLGQPPAAPSGLGTNTMASGSGAPMADNNEGADGVGNSSGNWHCDSTWMGDRVITTSTRTWALPTYNNHLYKQISSQSGASNDNHYFGYSTPWGYFDFNRFHCHFSPRDWQRLINNNWGFRPKRLNFKLFNIQVKEVTQNDGTTTIANNLTSTVQVFTDSEYQLPYVLGSAHQGCLPPFPADVFMVPQYGYLTLNNGSQAVGRSSFYCLEYFPSQMLRTGNNFTFSYTFEDVPFHSSYAHSQSSDRLMNPLIDQYLYYLSRTNTPSGTTTQSRLRFSQAGASDIRDQSRNWLPGPCYRQQRVSKTAADNNNSDYSWTGATKYHLNGRDSLVNPGTAMASHKDDEEKYFPQSGVLIFGKQDSGKTNVDIERVMITDEEEIRTTNPVATEQYGSVSTNLQSGNTQAATSDVNTQGVLPGMVWQDRDVYLQGPIWAKIPHTDGHFRPSPLMGGFGLKHPPPQILIKNTPVPANPSTTFSAAKFASFITQYSTGQVSVEIEWELQKENSKRWNPEIQYTSNYNKSVNVDFTVDTNGVYSEPRPIGTRYLTRNL

SEQ ID NO: 130 - protein, 735 aa, Artificial Sequence
  Synthetic Polypeptide
MAADGYLPDWLEDTLSEGIRQWWKLKPGPPPPKPAERHKDDSRGLVLPGYKYLGPFNGLDKGEPVNEADAAALEHDKAYDRQLDSGDNPYLKYNHADAEFQERLKEDTSFGGNLARAVFQAKKRVLEPLGLVEEPVKTAPGKKRPVEHSPAGPDSSSGTGKSGQQPARKRLNFGQTGDADSVPDPQPLGQPPAAPSGLGTNTMASGSGAPMADNNEGADGVGNSSGNWHCDSTWMGDRVITTSTRTWALPTYNNHLYKQISSQSGASNDNHYFGYSTPWGYFDFNRFHCHFSPRDWQRLINNNWGFRPKRLNFELFNIQVKEVTQNDGTTTIANNLTSTVQVFTDSEYQLPYVLGSAHQGCLPPFPADVFMVPQYGYLTLNNGSQAVGRSSFYCLEYFPSQMLRTGNNFTFSYTFEDVPFHSSYAHSQSLDRLMNPLIDQYLYYLSRTNTPSGTTTQSRLQFSQAGASDIRDQSRNWLPGPCYRQQRVSKTAADNNNSDYSWTGATKYHLNGRDSLVNPGTAMASHKDDEEKYFPQSGVLIFGKQDSGKTNVDIEKVMITDEEEIRTTNPVATEQYGSVSTNLQSGNTQAATSDVNTQGVLPGMVWQDRGVYLQGPIWAKIPHTDGHFHPSPLMGGFGLKHPPPQILIKSTPVPANPSTTFSAAKFASFITQYSTGQVSVEIEWELQKENSKRWNPEIQYTSNYNKSVNVDFTVDTNGVYSDPRPIGTRYLTRNL

SEQ ID NO: 131 - protein, 735 aa, Artificial Sequence
  Synthetic Polypeptide
MAADGYLPDWLEDTLSEGIRQWWKLKPGPPPPKPAERHKDDSRGLVLPGYKYLGPFNGLDKGEPVNEADAAALEHDKAYDRQLDSGDNPYLKYNHADAEFQERLKEDTSFGGNLARAVFQAKKRVLEPLGLVEEPVKTAPGKKRPVEHSPAEPDSSSGTGKSGQQPARKRLNFGQTGDADSVPDPQPLGQPPAAPSGLGTNTMASGSGAPMADNNEGADGVGNSSGNWHCDSTWMGDRVITTSTRTWALPTYNNHLYKQISSQSGASNDNHYFGYSTPWGYFDFNRFHCHFSPRGWQRLINNNWGFRPKRLNFKLFNIQVKEVTQNDGTTTIANNLTSTVQVFTDSEYQLPYVLGSAHQGCLPPFPADVFMVPQYGYLTLNNGSQAVGRSSFYCLEYFPSQMLRTGSNFTFSYTFEDVPFHSSYAHSQSLDRLMNPLIDQYLYYLSRTNTPSGTTTQSRLRFSQAGASDIRDQSRNWLPGPCYRQQRVSKTAADNNNSDYSWTGATKYHLNGRDSLVNPGTAMASHKDDEEKYFPQSGVLIFGKQDSGKTNVDIERVMITDEEEIRTTNPVATEQYGSVSTNLQSGNTQAATSDVNTQGVLPGMVWQDRDVYLQGPIWAKIPHTDGHFHPSPLMGGFGLKHPPPQILIKNTPVPANPSTTFSAAKFASFITQYSTGQVSVEIEWELQKENSKRWNPEIQYTSNYNKSVNVDFTVDTNGVYSEPRPIGTRYLTRNL

SEQ ID NO: 132 - protein, 735 aa, Artificial Sequence
  Synthetic Polypeptide
MAADGYLPDWLEDTLSEGIRQWWKLKPGPPPPRPAERHQDDSRGLVLPGYKYLGPFNGLDKGEPVNEADAAALEHDKAYDRQLDSGDNPYLKYNHADAEFQERLKEDTSFGGNLARAVFQAKKRVLEPLGLVEEPVKTAPGKKRPVEHSPAEPDSSSGTGKSGQQPARKRLNFGQTGDADSVPDPQPLGQPPAAPSGLGTNTMASGSGAPMADNNEGADGVGNSSGNWHCDSTWMGDRVITTSTRTWALPTYNNHLYKQISSQSGASNDNHYFGYSTPWGYFDFNRFHCHFSPRDWQRLINNNWGFRPKRLNFKLFNIQVKEVTQNDGTTTIANNLTSTVQVFTDSEYQLPYVLGSAHQGCLPPFPADVFMVPQYGYLTLNNGSQAVGRSSFYCLEYFPSQMLRTGNNFTFSYTFEDVPFHSSYAHSQSLDRLMNPLIDQYLYYLSRTNTPSGTTTQSRLRFSQAGASDIRDQSRNWLPGPCYRQQRVSKTAADNNNSDYSWTGATKYHLNGRDSLVNPGTAMASHKDDEEKYFPQSGVLIFGKQDSGKTNVDIERVMITDEEEIRTTNPVATEQYGSVSTNLQSGNTQAATSDVNTQGVLPGMVWQDRDVYLQGPIWAKIPHTDGHFHPSPLMGGFGLKHPPPQILIKNTPVPANPSTTFSAAKFASFITQYSTGQVSVEIEWELQKENSKRWNPEIQYTSNYNKSVNVDFTVDTNGVYSEPRPIGTRYLTRNL

SEQ ID NO: 133 - protein, 735 aa, Artificial Sequence
  Synthetic Polypeptide
MAADGYLPDWLEDTLSEGIRQWWKLKPGPPPPKPAERHKDDSRGLVLPGYKYLGPFNGLDKGEPVNEADAAALEHDKAYDRQLDSGDNPYLKYNHADAEFQERLKEDTSFGGNLARAVFQAKKRVLEPLGLVEEPVKTAPGKKRPVEHSPAEPDSSSGTGKSGQQPARKRLNFGQTGDADSVPDPQPLGQPPAAPSGLGTNTMASGSGAPMADNNEGADGVGNSSGNWHCDSTWMGDRVITTSTRTWALPTYNNHLYKQISSQSGASNDNHYFGYSTPWGYFDFNRFHCHFSPRDWQRLINNNWGFRPKRLNFKLFNIQVKEVTQNDGTTTIANNLTSTVQVFTDSEYQLPYVPGSAHQGCLPPFPADVFMVPQYGYLTLNNGSQAVGRSSFYCLEYFPSQMLRTGNNFTFSYTFEDVPFHSSYAHSQSLDRLMNPLIDQYLYYLSRTNTPSGTTTQSRLRFSQAGASDIRDQSRNWLPGPCYRQQRVSKTAADNNNSDYSWTGATKYHLNGRDSLVNPGTAMASHKDDEEKYFPQSGVLIFGKQDSGKTNVDIERVMITDEEEIRTTNPVATEQYGSVSTNLQSGNTQAATSDVNTQGVLPGMVWQDRDVYLQGPIWAKIPHTDGHFHPSPLMGGFGLKHPPPQILIKNTPVPANPSTTFSAAKFASFITQYSTGQVSVEIEWELQKENSKRWNPEIQYTSNYNKSVNVDFTVDTNGVYSEPRPIGTRYLTRNL

SEQ ID NO: 134 - protein, 735 aa, Artificial Sequence
  Synthetic Polypeptide
MAADGYLPDWLEDTLSEGIRQWWKLKPGPPPPKPAERHKDDSRGLVLPGYKYLGPFNGLDKGEPVNEADAAALEHDKAYDRQLDSGDNPYLKYNHADAEFQERLKEDTSFGGNLARAVFQAKKRVLEPLGLVEEPVKTAPGKKRPVEHSPAEPDSSSGTGKSGQQPARKRLNFGQTGDADSVPDPQPLGQPPAAPSGLGTNTMASGSGAPMADNNEGADGVGNSSGNWHCDSTWMGDRVITTSTRTWALPTYDNHLYKQISSQSGASNDNHYFGYSTPWGYFDFNRFHCHFSPRDWQRLINNNWGFRPKRLNFKLFNIQVKEVTQNDGTTTIANNLTSTVQVFTDSEYQLPYVLGSAHQGCLPPFPADVFMVPQYGYLTLNNGSQAVGRSSFYCLEYFPSQMLRTGNNFTFSYTFEDVPFHSSYAHSQSLDRLMNPLIDQYLYYLSRTNTSSGTTTQSRLRFSQAGASDIRDQSRNWLPGPCYRQQRVSKTAADNNNSDYSWTGATKYHLNGRDSLVNPGTAMASHKDDEEKYFPQSGVLIFGKQDSGKTNVDIERVMITDEEEIRTTNPVATEQYGSVSTNLQSGNTQAATSDVNTQGVLPGMVWQDRDVYLQGPIWAKIPHTDGHFHPSPLMGGFGLKHPPPQILIKNTPVPANPSTTFSAAKFASFITQYSTGQVSVEIEWELQKENSKRWNPEIQYTSNYNKSVNVDFTVDTNGVYSEPRPIGTRYLTRNL

SEQ ID NO: 135 - protein, 735 aa, Artificial Sequence
  Synthetic Polypeptide
MAADGYLPDWLEDTLSEGIRQWWKLKPGPPPPRPAERHQDDSRGLVLPGYKYLGPFNGLDKGEPVNEADAAALEHDKAYDRQLDSGDNPYLKYNHADAEFQERLKEDTSFGGNLGRAVFQAKKRVLEPLGLVEEPVKTAPGKKRPVEHSPAEPDSSSGTGKAGQQPARKRLNFGQTGDADSVPDPQPLGQPPAAPTSLGSTTMATGSGAPMADNNEGADGVGNSSGNWHCDSQWLGDRVITTSTRTWALPTYNNHLYKQISSQSGASNDNHYFGYSTPWGYFDFNRFHCHFSPRDWQRLINNNWGFRPKRLNFKLFNIQVKEVTQNDGTTTIANNLTSTVQVFTDSEYQLPYVLGSAHQGCLPPFPADVFMVPQYGYLTLNNGSQAVGRSSFYCLEYFPSQMLRTGNNFTFSYTFEDVPFHSSYAHSQSLDRLMNPLIDQYLYYLSRTNTPSGTTTQSRLQFSQAGASDIRDQSRNWLPGPCYRQQRVSKTAADNNNSDYSWTGATKYHLNGRDSLVNPGTAMASHKDDEEKYFPQSGVLIFGKQDSGKTNVDIEKVMITDEEEIRTTNPVATEQYGSVSTNLQSGNTQAATSDVNTQGVLPGMVWQDRDVYLQGPIWAKIPHTDGHFHPSPLMGGFGLKHPPPQILIKSTPVPANPSTTFSAAKFASFITQYSTGQVSVEIEWELQKENSKRWNPEIQYTSNYNKSVNVDFTVDTNGVYSEPRPIGTRYLTRNL

SEQ ID NO: 136 - protein, 735 aa, Artificial Sequence
  Synthetic Polypeptide
MAADGYLPDWLEDTLSEGIRQWWKLKPGPPPPKPAERHKDDSRGLVLPGYKYLGPFNGLDKGEPVNEADAAALEHDKAYDRQLDSGDNPYLKYNHADAEFQERLKEDTSFGGNLARAVFQAKKRVLEPLGLVEEPVKTAPGKKRPVEHSPAEPDSSSGTGKSGQQPARKRLNFGQTGDADSVPDPQPLGQPPAAPSGLGTNTMASGSGAPMADNNEGADGVGNSSGNWHCDSTWMGDRVITTSTRTWALPTYNNHLYKQISSQSGASNDNHYFGYSTPWGYFDFNRFHCHFSPRDWQRLINNNWGFRPKRLNFKLFNIQVKEVTQNDGTTTIANNLTSTVQVFTDSEYQLPYVLGSAHQGCLPPFPADVFMVPQYGYLTLNNGSQAVGRSSFYCLEYFPSQMLRTGNNFTFSYTFEDVPFHSSYAHSQSSDRLMNPLIDQYLYYLSRTNTPSGTTTQSRLRFSQAGASDIRDQSRNWLPGPCYRQQRVSKTAADNNNSDYSWTGATKYHLNGRDSLVNPGTAMASHKDDEEKYFPQSGVLIFGKQDSGKTNVDIERVMITDEEEIRTTNPVATEQYGSVSTNLQSGNTQAATSDVNTQGVLPGMVWQDRDVYLQGPIWAKIPHTDGHFHPSPLMGGFGLKHPPPQILIKNTPVPANPSTTFSAAKLASFITQYSTGQVSVEIEWELQKENSKRWNPEIQYTSNYNKSVNVDFTVDTNGVYSEPRPIGTRYLTRNL

SEQ ID NO: 137 - protein, 735 aa, Artificial Sequence
  Synthetic Polypeptide
MAADGYLPDWLEDTLSEGIRQWWKLKPGPPPPKPAERHKDDSRGLVLPGYKYLGPFNGLDKGEPVNEADAAALEHDKAYDRQLDSGDNPYLKYNHADAEFQERLKEDTSFGGNLARAVFQAKKRVLEPLGLVEEPVKTAPGKKRPVEHSPAEPDSSSGTGKSGQQPARKRLNFGQTGDADSVPDPQPLGQPPAAPSGLGTNTMASGSGAPMADNNEGADGVGNSSGNWHCDSTWMGDRVITTSTRTWALPTYNNHLYKQISSQSGASNDNHYFGYSTPWGYFDFNRFHCHFSPRDWQRLINNNWGFRPKRLNFKLFNIQVKEVTQNDGTTTIANNLTSTVQVFTDSEYQLPYVLGSAHQGCLPPFPADVFMVPQYGYLTLNNGSQAVGRSSFYCLEYFPSQMLRTGNNFTFSYTFEDVPFHSSYAHSQSLDRLMNPLIDQYLYYLSRTNTPSGTTTQSRLRFSQAGASDIRDQSRNWLPGPCYRQQRVSKTAADNNNSDYSWTGATKYHLNGRDSLVNPGTAMASHKDDEEKYFPQSGVLIFGKQDSGKTNVDIERVMITDEEEIRTTNPVATEQYGSVSTNLQSGNTQAATSDVNTQGVLPGMVWQDRDVYLQGPIWAKIPHTDGHFHPSPLMGGFGLKHPPPQILIKNTPVPANPSTTFSAAKFASFITQYSTGQVSVEIEWELQKENSKRWNPEIQYTSNYNKSVNVDFTVDANGVYSEPRPIGTRYLTRNL

SEQ ID NO: 138 - protein, 735 aa, Artificial Sequence
  Synthetic Polypeptide
MAADGYLPDWLEDTLSEGIRQWWKLKPGPPPPKPAERHKDDSRGLVLPGYKYLGPFNGLDKGEPVNEADAAALEHDKAYDRQLDSGDNPYLKYNHADAEFQERLKEDTSFGGNLARAVFQAKKRVLEPLGLVEEPVKTAPGKKRPVEHSPAGPDSSSGTGKSGQQPARKRLNFGQTGDADSVPDPQPLGQPPAAPSGLGTNTMASGSGAPMADNNEGADGVGNSSGNWHCDSTWMGDRVITTSTRTWALPTYNNHLYKQISSQSGASNDNHYFGYSTPWGYFDFNRFHCHFSPRDWQRLINNNWGFRPKRLNFELFNIQVKEVTQNDGTTTIANNLTSTVQVFTDSEYQLPYVLGSAHQGCLPPFPADVFMVPQYGYLTLNNGSQAVGRSSFYCLEYFPSQMLRTGNNFTFSYTFEDVPFHSSYAHSQSLDRLMNPLIDQYLYYLSRTNTPSGTTTQSRLQFSQAGASDIRDQSRNWLPGPCYRQQRVSKTAADNNNSDYSWTGATKYHLNGRDSLVNPGTAMASHKDDEEKYFPQSGVLIFGKQDSGKTNVDIEKVMITDEEEIRTTNPVATEQYGSVSTNLQSGNTQAATSDVNTQGVLPGMVWQDRDVYLQGPIWAKIPHTDGHFHPSPLMGGFGLKHPPPQILIKSTPVPANPSTTFSAAKFASFITQYSTGQVSVEIEWELQKENSKRWNPEIQYTSNCNKSVNVDFTVDTNGVYSDPRPIGTRYLTRNL

SEQ ID NO: 139 - protein, 735 aa, Artificial Sequence
  Synthetic Polypeptide
MAADGYLPDWLEDTLSEGIRQWWKLKPGPPPPKPAERHKDDSRGLVLPGYKYLGPFNGLDKGEPVNEADAAALEHDKAYDRQLDSGDNPYLKYNHADAELQERLKEDTSFGGNLARAVFQAKKRVLEPLGLVEEPVKTAPGKKRPVEHSPAEPDSSSGTGKSGQQPARKRLNFGQTGDADSVPDPQPLGQPPAAPSGLGTNTMASGSGAPMADNNEGADGVGNSSGNWHCDSTWMGDRVITTSTRTWALPTYNNHLYKQISSQSGASNDNHYFGYSTPWGYFDFNRFHCHFSPRDWQRLINNNWGFRPKRLNFKLFNIQVKEVTQNDGTTTIANNLTSTVQVYTDSEYQLPYVLGSAHQGCLPPFPADVFMVPQYGYLTLNNGSQAVGRSSFYCLEYFPSQMLRTGNNFTFSYTFEDVPFHSSYAHSQSLDRLMNPLIDQYLYYLSRTNTPSGTTTQSRLRFSQAGASDIRDQSRNWLPGPCYRQQRVSKTAADNNNSDYSWTGATKYHLNGRDSLVNPGTAMASHKDDEEKYFPQSGVLIFGKQDSGKTNVDIERVMITDEEEIRTTNPVATEQYGSVSTNLQSGNTQAATSDVNTQGVLPGMVWQDRDVYLQGPIWAKIPHTDGHFHPSPLMGGFGLKHPPPQILIKNTPVPANPSTTFSAAKFASFITQYSTGQVSVEIEWELQKENSKRWNPEIQYTSNYNKSVNVDFTVDTNGVYSEPRPIGTRYLTRNL

SEQ ID NO: 140 - protein, 735 aa, Artificial Sequence
  Synthetic Polypeptide
MAADGYLPDWLEDTLSEGIRQWWKLKPGPPPPKPAERHKDDSRGLVLPGYKYLGPFNGLDKGEPVNEADAAALEHDKAYDRQLDSGDNPYLKYNHADAEFQERLKEDTSFGGNLARAVFQAKKRVLEPLGLVEEPVKTAPGKKRPVEHSPAEPDSSSGTGKSGQQPVRKRLNFGQTGDADSVPDPQPLGQPPAAPSGLGTNTMASGSGAPMADNNEGADGVGNSSGNWHCDSTWMGDRVITTSTRTWALPTYNNHLYKQISSQSGASNDNHYFGYSTPWGYFDFNRFHCHFSPRDWQRLINNNWGFRPKRLNFKLFNIQVKEVTQNDGTTTIANNLTSTVQVFTDSEYQLPYVLGSAHQGCLPPFPADVFMVPQYGYLTLNNGSQAVGRSSFYCLEYFPSQMLRTGSNFTFSYTFEDVPFHSSYAHSQSLDRLMNPLIDQYLYYLSRTNTPSGTTTQSRLRFSQAGASDIRDQSRNWLPGPCYRQQRVSKTAADNNNSDYSWTGATKYHLNGRDSLVNPGTAMASHKDDEEKYFPQSGVLIFGKQDSGKTNVDIERVMITDEEEIRTTNPVATEQYGSVSTNLQSGNTQAATSDVNTQGVLPGMVWQDRDVYLQGPIWAKIPHTDGHFHPSPLMGGFGLKHPPPQILIKNTPVPANPSTTFSAAKFASFITQYSTGQVSVEIEWELQKENSKRWNPEIQYTSNYNKSVNVDFTVDTNGVYSEPRPIGTRYLTRNL

SEQ ID NO: 141 - protein, 735 aa, Artificial Sequence
  Synthetic Polypeptide
MAADGYLPDWLEDTLSEGIRQWWKLKPGPPPPRPAERHQDDSRGLVLPGYKYLGPFNGLDKGEPVNEADAAALEHDKAYDRQLDSGDNPYLKYNHADAEFQERLKEDTSFGGNLGRAVFQAKKRVLEPLGLVEEPVKTAPGKKRPVEHSPAGPDSSSGTGKSGQQPARKRLNFGQTGDADSVPDPQPLGQPPAAPSGLGTNTMASGSGAPMADNNEGADGVGNSSGNWHCDSTWMGDRVITTSTRTWALPTYNNHLYKQISSQSGASNDNHYFGYSTPWGYFDFNRFHCHFSPRDWQRLINNNWGFRPKRLNFELFNIQVKEVTQNDGTTTIANNLTSTVQVFTDSEYQLPYVLGSAHQGCLPPFPADVFMVPQYGYLTLNNGSQAVGRSSFYCLEYFPSQMLRTGNNFTFSYTFEDVPFHSSYAHSQSLDRLMNPLIDQYLYYLSRTNTPSGTTTQSRLQFSQAGASDIRDQSRNWLPGPCYRQQRVSKTAADNNNSDYSWTGATKYHLNGRDSLVNPGTAMASHKDDEEKYFPQSGVLIFGKQDSGKTNVDIEKVMITDEEEIRTTNPVATEQYGSVSTNLQSGNTQAATSDVNTQGVLPGMVWQDRDVYLQGPIWAKIPHTDGHFHPSPLMGGFGLKHPPPQILIKSTPVPANPSTTFSAAKFASFITQYSTGQVSVEIEWELQKENSKRWNPEIQYTSNYNKSVNVDFTVDTNGVYSEPRPIGTRYLTRNL

SEQ ID NO: 142 - protein, 735 aa, Artificial Sequence
  Synthetic Polypeptide
MAADGYLPDWLEDTLSEGIRQWWKLKPGPPPPKPAERHKDDSRGLVLPGYKYLGPFNGLDKGEPVNEADAAALEHDKAYDRQLDSGDNPYLKYNHADAEFQERLKEDTSFGGNLARAVFQAKKRVLEPLGLVEEPVKTAPGKKRPVEHSPAEPDSSSGTGKSGQQPARKRLNFGQTGDADSVPDPQPLGQPPAAPSGLGTNTMASGSGAPMADNNEGADGVGNSSGNWHCDSTWMGDRVITTSTRTWALPTYNNHLYKQISSQSGASNDNHYFGYSTPWGYFDFNRFHGHFSPRDWQRLINNNWGFRPKRLNFKLFNIQVKEVTQNDGTTTIANNLTSTVQVFTDSEYQLPYVLGSAHQGCLPPFPADVFMVPQYGYLTLNNGSQAVGRSSFYCLEYFPSQMLRTGNNFTFSYTFEDVPFHSSYAHSQSLDRLMNPLIDQYLYYLSRTNTPSGTTTQSRLRFSQAGASDIRDQSRNWLPGPCYRQQRVSKTAADNNNSDYSWTGATKYHLNGRDSLVNPGTAMASHKDDEEKYFPQSGVLIFGKQDSGKTNVDIERVMITDEEEIRTTNPVATEQYGSVSTNLQSGNTQAATSDVNTQGVLPGMVWQDRDVYLQGPIWAKIPHTDGHFHPSPLMGGFGLKHPPPQILIKNTPVPANPSTTFSAAKFASFITQYSTGQVSVEIEWELQKENSKRWNPEIQYTSNYNKSVNVDFTVDTNGVYSEPRPIGTRYLTRNL

SEQ ID NO: 143 - protein, 735 aa, Artificial Sequence
  Synthetic Polypeptide
MAADGYLPDWLEDTLSEGIRQWWKLKPGPPPPKPAERHKDDSRGLVLPGYKYLGPFNGLDKGEPVNEADAAALEHDKAYDRQLDSGDNPYLKYNHADAEFQERLKEDTSFGGNLARAVFQAKKRVLEPLGLVEEPVKTAPGKKRPVEHSPAEPDSSSGTGKSGQQPARKRLNFGQTGDADSVPDPQPLGQPPAAPSGLGTNTMASGSGAPMADNNEGADGVGNSSGNWHCDSTWMGDRVITTSTRTWALPTYNNHLYKQISSQSGASNDNHYFGYSTPWGYFDFNRFHCHFSPRDWQRLINNNWGFRPKRLNFKLFNIQVKEVTQNDGTTTIANNLTSTVQVFTDSEYQLPYVLGSAHQGCLPPFPADVFMVPQYGYLTLNNGSQAVGRSSFYCLEYFPSQMLRTGNNFTFSYTFEDVPFHSSYAHSQSLDRLMNPLIDQYLYYLSRTNTPSGTTTQSRLRFSQAGASDIRDQSRNWLPGPCYRQQRVSKTAADNNNSDYSWTGATKYHLNGRDSLVNPGTAMASHKDDEEKYFPQSGVLIFGKQDSGKTNVDIERVMITDEEEIRTTNPVATEQYGSVSTNLQSGNTQAATSDVNTQGVLPGMVWQDRDVYLQGPIWAKIPHTDGHFRPSPLMGGFGLKHPPPQILIKNTPVPANPSTTFSAAKFASFITQYSTGQVSVEIEWELQKENSKRWNPEIQYTSNYNKSVNVDFTVDTNGVYSEPRPIGTRYLTRNL

SEQ ID NO: 144 - protein, 735 aa, Artificial Sequence
  Synthetic Polypeptide
MAADGYLPDWLEDTLSEGIRQWWKLKPGPPPPKPAERHKDDSRGLVLPGYKYLGPFNGLDKGEPVNEADAAALEHDKAYDRQLDSGDNPYLKYNHADAEFQERLKEDTSFGGNLGRAVFQAKKRALEPLGLVEEPVKTAPGKKRPVEHSPVEPDSSSGTGKAGQQPARKRLNFGQTGDADSVPDPQPLGQPPAAPSGLGTNTMATGSGAPMADNNEGADGVGNSSGNWHCDSTWMGDRVITTSTRTWALPTYNNHLYKQISSQSGASNDNHYFGYSTPWGYFDFNRFHCHFSPRDWQRLINNNWGFRPKRLNFKLFNIQVKEVTQNDGTTTIANNLTSTVQVFTDSEYQLPYVLGSAHQGCLPPFPADVFMVPQYGYLTLNNGSQAVGRSSFYCLEYFPSQMLRTGNNFTFSYTFEDVPFHSSYAHSQSLDRLMNPLIDQYLYYLSRTNTPSGTTTQSRLQFSQAGASDIRDQSRNWLPGPCYRQQRVSKTSADNNNSEYSWTGATKYHLNGRDSLVNPGPAMASHKDDEEKFFPQSGVLIFGKQGSEKTNVDIEKVMITDEEEIRTTNPVATEQYGSVSTNLQRGNRQAATADVNTQGVLPGMVWQDRDVYLQGPIWAKIPHTDGHFHPSPLMGGFGLKHPPPQILIKNTPVPANPSTTFSAAKFASFITQYSTGQVSVEIEWELQKENSKRWNPEIQYTSNYNKSVNVDFTVDTNGVYSEPRPIGTRYLTRNL

SEQ ID NO: 145 - protein, 735 aa, Artificial Sequence
  Synthetic Polypeptide
MAADGYLPDWLEDTLSEGIRQWWKLKPGPPPPKPAERHKDDSRGLVLPGYKYLGPFNGLDKGEPVNEADAAALEHDKAYDRQLDSGDNPYLKYNHADAEFQERLKEDTSFGGNLGRAVFQAKKRVLEPLGLVEEPVKTAPGKKRPVEHSPVEPDSSSGTGKAGQQPARKRLNFGQTGDADSVPDPQPLGQPPAAPSGLGTNTMATGSGAPMADNNEGADGVGNSSGNWHCDSTWMGDRVITTSTRTWALPTYNNHLYKQISSQSGASNDNHYFGYSTPWGYFDFNRFHCHFSPRDWQRLINNNWGFRPKRLNFKLFNIQVKEVTQNDGTTTIANNLTSTVQVFTDSEYQLPYVLGSAHQGCLPPFPADVFMVPQYGYLTLNNGSQAVGRSSFYCLEYFPSQMLRTGNNFTFSYTFEDVPFHSSYAHSQSLDRLMNPLIDQYLYYLSRTNTPSGTTTQSRLQFSQAGASDIRDQSRNWLPGPCYRQQRVSKTSADNNNSEYSWTGATKYHLNGRDSLVNPGPAMASHKDDEEKFFPQSGVLIFGKQGSEKTNVDIEKVMITDEEEIRTTNPVATEQYGSVSTNLQRGNRQAATADVNTQGVLPGTVWQDRDVYLQGPIWAKIPHTDGHFHPSPLMGGFGLKHPPPQILIKNTPVPANPSTTFSAAKFASFITQYSTGQVSVEIEWELQKENSKRWNPEIQYTSNYNKSVNVDFTVDTNGVYSEPRPIGTRYLTRNL

SEQ ID NO: 146 - protein, 735 aa, Artificial Sequence
  Synthetic Polypeptide
MAADGYLPDWLEDTLSEGIRQWWKLKPGPPPPKPAERHKDDSRGLVLPGYKYLGPFNGLDKGEPVNEADAAALEHDKAYNRQLDSGDNPYLKYNHADAEFQERLKEDTSFGGNLGRAVFQAKKRVLEPLGLVEEPVKTAPGKKRPVEHSPVEPDSSSGTGKAGQQPARKRLNFGQTGDADSVPDPQPLGQPPAAPSGLGTNTMATGSGAPMADNNEGADGVGNSSGNWHCDSTWMGDRVITTSTRTWALPTYNNHLYKQISSQSGASNDNHYFGYSTPWGYFDFNRFHCHFSPRDWQRLINNNWGFRPKRLNFKLFNIQVKEVTQNDGTTTIANNLTSTVQVFTDSEYQLPYVLGSAHQGCLPPFPADVFMVPQYGYLTLNNGSQAVGRSSFYCLEYFPSQMLRTGNNFTFSYTFEDVPFHSSYAHSQSLDRLMNPLIDQYLYYLSRTNTPSGTTTQSRLQFSQAGASDIRDQSRNWLPGPCYRQQRVSKTSADNNNSEYSWTGATKYHLNGRDSLVNPGPAMASHKDDEEKFFPQSGVLIFGKQGSEKTNVDIEKVMITDEEEIRTTNPVATEQYGSVSTNLQRGNRQAATADVNTQGVLPGMVWQDRDVYLQGPIWAKIPHTDGHFHPSPLMGGFGLKHPPPQILIKNTPVPANPSTTFSAAKFASFITQYSTGQVSVEIEWELQKENSKRGNPEIQYTSNYNKSVNVDFTVDTNGVYSEPRPIGTRYLTRNL

SEQ ID NO: 147 - protein, 735 aa, Artificial Sequence
  Synthetic Polypeptide
MAADGYLPDWLEDTLSEGIRQWWKLKPGPPPPKPAERHKDDSRGLVLPGYKYLGPFNGLDKGEPVNEADAAALEHDKAYDRQLDSGDNPYLKYNHADAEFQERLKEDTSFGGNLGRAVFQAKKRVLEPLGLVEEPVKTAPGKKRPVEHSPVEPDSSSGTGKAGQQPARKRLNFGQTGDADSVPDPQPLGQPPAAPSGLGTNTMATGSGAPMADNNEGADGVGNSSGNWHCDSTWMGDRVITTSTRTWALPTYNNHLYKQISSQSGASNDNHYFGYSTPWGYFDFNRFHCHFSPRDWQRLINNNWGFRPKRLNFKLFNIQVKEVTQNDGTTTIANNLTSTVQVFTDSEYQLPYVLGSAHQGCLPPFPADVFMVPQYGYLTLNNGSQAVGRSSFYCLEYFPSQMLRTGNNFTFSYTFEDVPFHSSYAHSQSLDRLMNPLIDQYLYYLSRTNTPSGTTTQSRLQFSQAGASDIRDQSRNWLPGPCYRQQRVSKTSADNNNSEYPWTGATKYHLNGRDSLVNPGPAMASHKDDEEKFFPQSGVLIFGKQGSEKTNVDIEKVMITDEEEIRTTNPVATEQYGSVSTNLQRGNRQAATADVNTQGVLPGTVWQDRDVYLQGPIWAKIPHTDGHFHPSPLMGGFGLKHPPPQILIKNTPVPANPSTTFSAAKFASFITQYSTGQVSVEIEWELQKENSKRWNPEIQYTSNYNKSVNVDFTVDTNGVYSEPRPIGTRYLTRNL

SEQ ID NO: 148 - protein, 735 aa, Artificial Sequence
  Synthetic Polypeptide
MAADGYLPDWLEDTLSEGIRQWWKLKPGPPPPKPAERHKDDSRGLVLPGYKYLGPFNGLDKGEPVNEADAAALEHDKAYDRQLDSGDNPYLKYNHADAEFQERLKEDTSFGGNLGRAVFQAKKRVLEPLGLVEEPVKTAPGKKRPVEHSPVEPDSSSGTGKAGQQPARKRLNFGQTGDADSVPDPQPLGQPPAAPSGLGTNTMATGSGAPMADNNEGADGVGNSSGNWHCDSTWMGDRVITTSTRTWALPTYNNHLYKQISSQSGASNDNHYFGYSTPWGYFDFNRFHCHFSPRDWQRLINNNWGFRPKRLNFKLFNIQVKEVTQNDGTTTIANNLTSTVQVFTDSEYQLPYVLGSAHQGCLPPFPADVFMVPQYGYLTLNNGSQAVGRSSFYCLEYFPSQMLRTGNNFTFSYTFEDVPFHSSYAHSQSLDRLMNPLIDQYLYYLSRTNTPSGTTTQSRLQFSQAGASDIRDQSRNWLPGPCYRQQRVSKTSADNNNSEYSWTGATKYHLNGRDSLVNPGPAMASHKDDEEKFFPQSGVLIFGKQGSEKTNVGIEKVMITDEEEIRTTNPVATEQYGSVSTNLQRGNRQAATADVNTQGVLPGTVWQDRDVYLQGPIWAKIPHTDGHFHPSPLMGGFGLKHPPPQILIKNTPVPANPSTTFSAAKFASFITQYSTGQVSVEIEWELQKENSKRWNPEIQYTSNYNKSVNVDFTVDTNGVYSEPRPIGTRYLTRNL

SEQ ID NO: 149 - protein, 735 aa, Artificial Sequence
  Synthetic Polypeptide
MAADGYLPDWLEDTLSEGIRQWWKLKPGPPPPKPAGRHKDDSRGLVLPGYKYLGPFNGLDKGEPVNEADAAALEHDKAYDRQLDSGDNPYLKYNHADAEFQERLKEDTSFGGNLGRAVFQAKKRALEPLGLVEEPVKTAPGKKRPVEHSPVEPDSSSGTGKAGQQPARKRLNFGQTGDADSVPDPQPLGQPPAAPSGLGTNTMATGSGAPMADNNEGADGVGNSSGNWHCDSTWMGDRVITTSTRTWALPTYNNHLYKQISSQSGASNDNHYFGYSTPWGYFDFNRFHCHFSPRDWQRLINNNWGFRPKRLNFKLFNIQVKEVTQNDGTTTIANNLTSTVQVFTDSEYQLPYVLGSAHQGCLPPFPADVFMVPQYGYLTLNNGSQAVGRSSFYCLEYFPSQMLRTGNNFTFSYTFEDVPFHSSYAHSQSLDRLMNPLIDQYLYYLSRTNTPSGTTTQSRLQFSQAGASDIRDQSRNWLPGPCYRQQRVSKTSADNNNSEYSWTGATKYHLNGRDSLVNPGPAMASHKDDEEKFFPQSGVLIFGKQGSEKTNVDIEKVMITDEEEIRTTNPVATEQYGSVSTNLQRGNRQAATADVNTQGVLPGMVWQDRDVYLQGPIWAKIPHTDGHFHPSPLMGGFGLKHPPPQILIKNTPVPANPSTTFSAAKFASFITQYSTGQVSVEIEWELQKENSKRWNPEIQYTSNYNKSVNVDFTVDTNGVYSEPRPIGTRYLTRNL

SEQ ID NO: 150 - protein, 735 aa, Artificial Sequence
  Synthetic Polypeptide
MAADGYLPDWLEDTLSEGIRQWWKLKPGPPPPKPAERHKDDSRGLVLPGYKYLGPFNGLDKGEPVNEADAAALEHDKAYDRQLDSGDNPYLKYNHADAEFQERLKEDTSFGGNLGRAVFQAKKRVLEPLGLVEEPVKTAPGKKRPVEHSPVEPDSSSGTGKAGQQPARKRLNFGQTGDADSVPDPQPLGQPPAAPSGLGTNTMATGSGAPMADNNEGADGVGNSSGNWHCDSTWMGDRVITTSTRTWALPTYNNHLYKQISSQSGASNDNHYFGYSTPWGYFDFNRFHCHFSPRDWQRLINNNWGFRPKRLNFKLFNIQVKEVTQNDGTTTIANNLTSTVQVFTDSEYQLPYVLGSAHQGCLPPFPADVFMVPQYGYLTLNNGSQAVGRSSFYCLEYFPSQMLRTGNNFTFSYTFEDVPFHSSYAHSQSLDRLMNPLIDQYLYYLSRTNTPSGTTTQSRPQFSQAGASDIRDQSRNWLPGPCYRQQRVSKTSADNNNSEYSWTGATKYHLNGRDSLVNPGPAMASHKDDEEKFFPQSGVLIFGKQGSEKTNVDIEKVMITDEEEIRTTNPVATEQYGSVSTNLQRGNRQAATADVNTQGVLPGTVWQDRDVYLQGPIWAKIPHTDGHFHPSPLMGGFGLKHPPPQILIKNTPVPANPSTTFSAAKFASFITQYSTGQVSVEIEWELQKENSKRWNPEIQYTSNYNKSVNVDFTVDTNGVYSEPRPIGTRYLTRNL

SEQ ID NO: 151 - protein, 735 aa, Artificial Sequence [sequence omitted]

SEQ ID NO: 152 - protein, 735 aa, Artificial Sequence
  Synthetic Polypeptide
MAADGYLPDWLEDTLSEGIRQWWKLKPGPPPPKPAERHKDDSRGLVLPGYKYLGPFNGLDKGEPVNEADAAALEHDKAYNRQLDSGDNPYLKYNHADAEFQERLKEDTSFGGNLGRAVFQAKKRVLEPLGLVEEPVKTAPGKKRPVEHSPVEPDSSSGTGKAGQQPARKRLNFGQTGDADSVPDPQPLGQPPAAPSGLGTNTMATGSGAPMADNNEGADGVGNSSGNWHCDSTWMGDRVITTSTRTWALPTYNNHLYKQISSQSGASNDNHYFGYSTPWGYFDFNRFHCHFSPRDWQRLINNNWGFRPKRLNFKLFNIQVKEVTQNDGTTTIANNLTSTVQVFTDSEYQLPYVLGSAHQGCLPPFPADVFMVPQYGYLTLNNGSQAVGRSSFYCLEYFPSQMLRTGNNFTFSYTFEDVPFHSSYAHSQSLDRLMNPLIDQYLYYLSRTNTPSGTTTQSRLQFSQAGASDIRDQSRNWLPGPCYRQQRVSKTSADNNNSEYSWTGATKYHLNGRDSLVNPGPAMASHKDDEEKFFPQSGVLIFGKQGSEKTNVDIEKVMITDEEEIRTTNPVATEQYGSVSTNLQRGNRQAATADVNTQGVLPGMVWQDRDVYLQGPIWAKIPHTDGHFHPSPLMGGFGLKHPPPQILIKNTPVPANPSTTFSAAKFASFITQYSTGQVSVEIEWELQKENSKRWNPEIQYTSNYNKSVNVDFTVDTNGVYSEPRPIGTRYLTRNL

SEQ ID NO: 153 - protein, 735 aa, Artificial Sequence
  Synthetic Polypeptide
MAADGYLPDWLEDTLSEGIRQWWKLKPGPPPPKPAERHKDDSRGLVLPGYKYLGPFNGLDKGEPVNEADAAALEHDKAYDRQLDSGDNPYLKYNHADAEFQERLKEDTSFGGNLGRAVFQAKKRVLEPLGLVEEPVKTAPGKKRPVEHSPVEPDSSSGTGKAGQQPARKRLNFGQTGDADSVPDPQPLGQPPAAPSGLGTNTMATGSGAPMADNNEGADGVGNSSGNWHCDSTWMGDRVITTSTRTWALPTYNNHLYKQISSQSGASNDNHYFGYSTPWGYFDFNRFHCHFSPRDWQRLINNNWGFRPKRLNFKLFNIQVKEVTQNDGTTTIANNLTSTVRVFTDSEYQLPYVLGSAHQGCLPPFPADVFMVPQYGYLTLNNGSQAVGRSSFYCLEYFPSQMLRTGNNFTFSYTFEDVPFHSSYAHSQSLDRLMNPLIDQYLYYLSRTNTPSGTTTQSRLQFSQAGASDIRDQSRNWLPGPCYRQQRVSKTSADNNNSEYSWTGATKYHLNGRDSLVNPGPAMASHKDDEEKFFPQSGVLIFGKQGSEKTNVDIEKVMITDEEEIRTTNPVATEQYGSVSTNLQRGNRQAATADVNTQGVLPGTVWQDRDVYLQGPIWAKIPHTDGHFHPSPLMGGFGLKHPPPQILIKNTPVPANPSTTFSAAKFASFITQYSTGQVSVEIEWELQKENSKRWNPEIQYTSNYNKSVNVDFTVDTNGVYSEPRPIGTRYLTRNL

SEQ ID NO: 154 - protein, 735 aa, Artificial Sequence
  Synthetic Polypeptide
MAADGYLPDWLEDTLSEGIRQWWKLKPGPPPPKPAERHKDDSRGLVLPGYKYLGPFNGLDKGEPVNEADAAALEHDKAYDRQLDSGDNPYLKYNHADAEFQERLKEDTSFGGNLGRAVFQAKKRVLEPLGLVEEPVKTAPGKKRPVEHSPVEPDSSSGTGKAGQQPARKRLNFGQTGDADSVPDPQPLGQPPAAPSGLGTNTMATGSGAPMADNNEGADGVGNSSGNWHCDSTWMGDRVITTSTRTWALPTYNNHLYKQISSQSGASNDNHYFGYSTPWGYFDFNRFHCHFSPRDWQRLINNNWGFRPKRLNFKLFNIQVKEVTQNDGTTTIANNLTSTVQVFTDSEYQLPYVLGSAHQGCLPPFPADVFMVPQYGYLTLNNGSQAVGRSSFYCLEYFPSQMLRTGNNFTFSYTFEDAPFHSSYAHSQSLDRLMNPLIDQYLYYLSRTNTPSGTTTQSRLQFSQAGASDIRDQSRNWLPGPCYRQQRVSKTSADNNNSEYSWTGATKYHLNGRDSLVNPGPAMASHKDDEEKFFPQSGVLIFGKQGSEKTNVDIEKVMITDEEEIRTTNPVATEQYGSVSTNLQRGNRQAATADVNTQGVLPGTVWQDRDVYLQGPIWAKIPHTDGHFHPSPLMGGFGLKHPPPQILIKNTPVPANPSTTFSAAKFASFITQYSTGQVSVEIEWELQKENSKRWNPEIQYTSNYNKSVNVDFTVDTNGVYSEPRPIGTRYLTRNL

SEQ ID NO: 155 - protein, 734 aa, Artificial Sequence
  Synthetic Polypeptide
MAADGYLPDWLEDTLSEGIRQWWKLKPGPPPKPAERHKDDSRGLVLPGYKYLGPFNGLDKGEPVNEADAAALEHDKAYDRQLDSGDNPYLKYNHADAEFQERLKEDTSFGGNLGRAVFQAKKRVLEPLGLVEEPVKTAPGKKRPVEHSPVEPDSSSGTGKAGQQPARKRLNFGQTGDADSVPDPQPLGQPPAAPSGLGTNTMATGSGAPMADNNEGADGVGNSSGNWHCDSTWMGDRVITTSTRTWALPTYNNHLYKQISSQSGASNDNHYFGYSTPWGYFDFNRFHCHFSPRDWQRLINNNWGFRPKRLNFKLFNIQVKEVTQNDGTTTIANNLTSTVQVFTDSEYQLPYVLGSAHQGCLPPFPADVFMVPQYGYLTLNNGSQAVGRSSFYCLEYFPSQMLRTGNNFTFSYTFEDVPFHSSYAHSQSLDRLMNPLIDQYLYYLSRTNTPSGTTTQSRLQFSQAGASDIRDQSRNWLPGPCYRQQRVSKTSADNNNSEYSWTGATKYHLNGRDSLVNPGPAMASHKDDEEKFFPQSGVLIFGKQGSEKTNVDIEKVMITDEEEIRTTNPVATEQYGSVSTNLQRGNRQAATADVNTQGVLPGTVWQDRDVYLQGPIWAKIPHTDGHFHPSPLMGGFGLKHPPPQILIKNTPVPANPSTTFSAAKFASFITQYSTGQVSVEIEWELQKENSKRWNPEIQYTSNYNKSVNVDFTVDTNGVYSEPRPIGTRYLTRNL

SEQ ID NO: 156 - protein, 735 aa, Artificial Sequence
  Synthetic Polypeptide
MAADGYLPDWLEDTLSEGIRQWWKLKPGPPPPKPAERHKDDSRGLVLPGYKYLGPFNGLDKGEPVNEADAAALEHDKAYDRQLDSGDNPYLKYNHADAEFQERLKEDTSFGGNLGRAVFQAKKRALEPLGLVEEPVKTAPGKKRPVEHSPVEPDSSSGTGKAGQQPARKRLNFGQTGDADSVPDPQPLGQPPAAPSGLGTNTMATGSGAPMADNNEGADGVGNSSGNWHCDSTWMGDRVITTSTRTWALPTYNNHLYKQISSQSGASNDNHYFGYSTPWGYFDFNRFHCHFSPRDWQRLINNNWGFRPKRLNFKLFNIQVKEVTQNDGTTTIANNLTSTVQVFTDSEYQLPYVLGSAHQGCLPPFPADVFMVPQYGYLTLNNGSQAVGRSSFYCLEYFPSQMLRTGNNFTFSYTFEDVPFHSSYAHSQSLDRLMNPLIDQYLYYLSRTNTPSGTTTQSRLRFSQAGASDIRDQSRNWLPGPCYRQQRVSKTSADNNNSEYSWTGATKYHLNGRDSLVNPGPAMASHKDDEEKFFPQSGVLIFGKQGSEKTNVDIEKVMITDEEEIRTTNPVATEQYGSVSTNLQRGNRQAATADVNTQGVLPGMVWQDRDVYLQGPIWAKIPHTDGHFHPSPLMGGFGLKHPPPQILIKNTPVPANPSTTFSAAKFASFITQYSTGQVSVEIEWELQKENSKRWNPEIQYTSNYNKSVNVDFTVDTNGVYSEPRPIGTRYLTRNL

SEQ ID NO: 157 - protein, 735 aa, Artificial Sequence
  Synthetic Polypeptide
MAADGYLPDWLEDTLSEGIRQWWKLKPGPPPPKPAERHKDDSRGLVLPGYKYLGPFNGLDKGEPVNEADAAALEHDKAYDRQLDSGDNPYLKYNHADAEFQERLKEDTSFGGNLGRAVFQAKKRVLEPLGLVEEPVKTAPGKKRPVEHSPVEPDSSSGTGKAGQRPARKRLNFGQTGDADSVPDPQPLGQPPAAPSGLGTNTMATGSGAPMADNNEGADGVGNSSGNWHCDSTWMGDRVITTSTRTWALPTYNNHLYKQISSQSGASNDNHYFGYSTPWGYFDFNRFHCHFSPRDWQRLINNNWGFRPKRLNFKLFNIQVKEVTQNDGTTTIANNLTSTVQVFTDSEYQLPYVLGSAHQGCLPPFPADVFMVPQYGYLTLNNGSQAVGRSSFYCLEYFPSQMLRTGNNFTFSYTFEDVPFHSSYAHSQSLDRLMNPLIDQYLYYLSRTNTPSGTTTQSRLQFSQAGASDIRDQSRNWLPGPCYRQQRVSKTSADNNNSEYSWTGATKYHLNGRDSLVNPGPAMASHKDDEEKFFPQSGVLIFGKQGSEKTNVDIEKVMITDEEEIRTTNPVATEQYGSVSTNLQRGNRQAATADVNTQGVLPGTVWQDRDVYLQGPIWAKIPHTDGHFHPSPLMGGFGLKHPPPQILIKNTPVPANPSTTFSAAKFASFITQYSTGQVSVEIEWELQKENSKRWNPEIQYTSNYNKSVNVDFTVDTNGVYSEPRPIGTRYLTRNL

SEQ ID NO: 158 - protein, 735 aa, Artificial Sequence
  Synthetic Polypeptide
MAADGYLPDWLEDTLSEGIRQWWKLKPGPPPPKPAERHKDDSRGLVLPGYKYLGPFNGLDKGEPVNEADAAALEHDKAYDRQLDSGDNPYLKYNHADAEFQERLKEDTSFGGNLGRAVFQAKKRVLEPLGLVEEPVKTAPGKKRPVEHSPVEPDSSSGTGKAGQQPARKRLNFGQTGDADSVPDPQPLGQPPAAPSGLGTNTMATGSGAPMADNNEGADGVGNSSGNWHCDSTWMGDRVITTSTRTWALPTYNNHLYKQISSQSGASNDNHYFGYSTPWGYFDFNRFHCHFSPRDWQRLINNNWGFRPKRLNFKLFNIQVKEVTQNDGTTTIANNLTSTVQVFTDSEYQLPYVLGSAHQGCLPPFPADVFMVPQYGYLTLNNGSQAVGRSSFYCLEYFPSQMLRTGNNFTFSYTFEDVPFHSSYAHSQSLDRLMNPLIDQYLYYLSRTNTPSGTTTQSRLQFSQAGASDIRDQSRNWLPGPCYRQQRVSKTSADNNNSEYSWTGATKYHLNGRDSLVNPGPAMASHKDDEEKFFPQSGVLIFGKQGSEKTNVDIEKVMITDEEEIRTTNPVATEQYGSVSTNLQRGNRQAATADVNTQGVLPGMVWQDRDVYLQGPIWAKIPHTDGHFHPSPLMGGFGLKHPPPQILIKNTPVPANPSTTFSAAKFASFITQYSTGQVSVEIEWELQKENSNRWNPEIQYTSNYNKSVNVDFTVDTNGVYSEPRPIGTRYLTRNL

SEQ ID NO: 159 - protein, 735 aa, Artificial Sequence
  Synthetic Polypeptide
MAADGYLPDWLEDTLSEGIRQWWKLKPGPPPPKPAERHKDDSRGLVLPGYKYLGPFNGLDKGEPVNEADAAALEHDKAYDRQLDSGDNPYLKYNHADAEFQERLKEDTSFGGNLGRAVFQAKKRVLEPLGLVEEPVKTAPGKKRPVEHSPVEPDSSSGTGKAGQQPARKRLNFGQTGDADSVPDPQPLGQPPAAPSGLGTNTMATGSGAPMADNNEGADGVGNSSGNWHCDSTWMGDRVITTSTRTWALPTYNNHLYKQISSQSGASNDNHYFGYSTPWGYFDFNRFHCHFSPRDWQRLINNNWGFRPKRLNFKLFNIQVKEVTQNDGTTTIANNLTSTVQVFTDSEYQLPYVLGSAHQGCLPPFPADVFMVPQYGYLTLNNGSQAVGRSSFYCLEYFPSQMLRTGNNFTFSYTFEDVPFHSSYAHSQSLDRLMNPLIDQYLYYLSRTNTPSGTTTQSRLQFSQAGASDIRDQSRNWLPGPCYRQQRVSKTSADNNNSEYSWTGATKYHLNGRDSLVNPGPAMASHKDDEEKFFPQSGVLIFGKQGSEKTNVDIEKVMITDEEEIRTTNPVATEQYGSVSTNLQRGNRQAATADVNTQGVLPGTVWQDRDVYLQGPIWAKIPHTDGHFHPSPLMGGFGLKHPPPQILIKNTPVPANPSTTFSAAKFASFITQYSTGQVGVEIEWELQKENSKRWNPEIQYTSNYNKSVNVDFTVDTNGVYSEPRPIGTRYLTRNL

SEQ ID NO: 160 - protein, 735 aa, Artificial Sequence
  Synthetic Polypeptide
MAADGYLPDWLEDTLSEGIRQWWKLKPGPPPPKPAERHKDDSRGLVLPGYKYLGPFNGLDKGEPVNEADAAALEHDKAYDRQLDSGDNPYLKYNHADAEFQERLKEDTSFGGNLGRAVFQAKKRVLEPLGLVEEPVKTAPGKKRPVEHSPVEPDSSSGTGKAGQQPARKRLNFGQTGDADSVPDPQPLGQPPAAPSGLGTNTMATGSGAPMADNNEGADGVGNSSGNWHCDSTWMGDRVITTSTRTWALPTYNNHLYKQISSQSGASNDNHYFGYSTPWGYFDFNRFHCHFSPRDWQRLINNNWGFRPKRLNFKLFNIQVKEVTQNDGTTTIANNLTSTVQVFTDSEYQLPYVLGSAHQGCLPPFPADVFMVPQYGYLTLNNGSQAVGRSSFYCLEYFPSQMLRTGNNFTFSYTFEDVPFHSSYAHSQSLDRLMNPLIDQYLYYLSRTNTPSGTTTQSRLQFSQAGASDIRDQSRNWLPGPCYRQQRVSKTSADNNNSEYSWTGATKYHLNGRDSLVNPGPAMASHKDDEEKFFPQSGVLIFGKQGSEKTNVDIEKVMITDEEEIRATNPVATEQCGSVSTNLQRGNRQAATADVNTQGVLPGTVWQDRDVYLQGPIWAKIPHTDGHFHPSPLMGGFGLKHPPPQILIKNTPVPANPSTTFSAAKFASFITQYSTGQVSVEIEWELQKENSKRWNPEIQYTSNYNKSVNVDFTVDTNGVYSEPRPIGTRYLTRNL

SEQ ID NO: 161 - protein, 735 aa, Artificial Sequence
  Synthetic Polypeptide
MAADGYLPDWLEDTLSEGIRQWWKLKPGPPPPKPAERHKDDSRGLVLPGYKYLGPFNGLDKGEPVNEADAAALEHDKAYDRQLDSGDNPYLKYNHADAEFQERLKEDTSFGGNLGRAVFQAKKRALEPLGLVEEPVKTAPGKKRPVEHSPVEPDSSSGTGKAGQQPARKRLNFGQTGDADSVPDPQPLGQPPAAPSGLGTNTMATGSGAPMADNNEGADGVGNSSGNWHCDSTWMGDRVITTSTRTWALPTYNNHLYKQISSQSGASNDNHYFGYSTPWGYFDFNRFHCHFSPRDWQRLINNNWGFRPKRLNFKLFNIQVKEVTQNDGTTTIANNLTSTVQVFTDSEYQLPYVLGSAHQGCLPPFPADVFVVPQYGYLTLNNGSQAVGRSSFYCLEYFPSQMLRTGNNFTFSYTFEDVPFHSSYAHSQSLDRLMNPLIDQYLYYLSRTNTPSGTTTQSRLQFSQAGASDIRDQSRNWLPGPCYRQQRVSKTSADNNNSEYSWTGATKYHLNGRDSLVNPGPAMASHKDDEEKFFPQSGVLIFGKQGSEKTNVDIEKVMITDEEEIRTTNPVATEQYGSVSTNLQRGNRQAATADVNTQGVLPGMVWQDRDVYLQGPIWAKIPHTDGHFHPSPLMGGFGLKHPPPQILIKNTPVPANPSTTFSAAKFASFITQYSTGQVSVEIEWELQKENSKRWNPEIQYTSNYNKSVNVDFTVDTNGVYSEPRPIGTRYLTRNL

SEQ ID NO: 162 - protein, 735 aa, Artificial Sequence
  Synthetic Polypeptide
MAADGYLPDWLEDTLSEGIRQWWKLKPGPPPPKPAERHKDDSRGLVLPGYKYLGPFNGLDKGEPVNEADAAALEHDKAYDRQLDSGDNPYLKYNHADAEFQERLKEDTSFGGNLGRAVFQAKKRVLEPLGLVEEPVKTAPGKKRPVEHSPVEPDSSSGTGKAGQQPARKRLNFGQTGDADSVPDPQPLGQPPAAPSGLGTNTMATGSGAPMADNNEGADGVGNSSGNWHCDSTWMGDRVITTSTRTWALPTYNNHLYKQISSQSGASNDNHYFGYSTPWGYFDFNRFHCHFSPRDWQRLINNNWGFRPKRLNFKLFNIQVKEVTQNDGTTTIANNLTSTVQVFTDSEYQLPYVLGSAHQGCLPPFPADVFMVPQYGYLTLNNGSQAVGRSSFYCLEYFPSQMLRTGNNFTFSYTFEDVPFHSSYAHSQSLDRLMNPLIDQYLYYLSRTNTPSGTTTQSRLQFSQAGASDIRDQSRNWLPGPCYRQQRVSKTSADNNNSEYSWTGATKYHLNGRDSLVNPGPAMASHKDDEEKFFPQSGVLIFGKQGSEKTNVDIEKVMITDEEEIRTTNPVATEQYGSVSTNLQRGNRQAATADVNTQGVLPGTVWQDRDVYLQGPIWAKIPHTDGHFHPSPLVGGFGLKHPPPQILIKNTPVPANPSTTFSAAKFASFITQYSTGQVSVEIEWELQKENSKRWNPEIQYTSNYNKSVNVDFTVDTNGVYSEPRPIGTRYLTRNL

SEQ ID NO: 163 - protein, 735 aa, Artificial Sequence
  Synthetic Polypeptide
MAADGYLPDWLEDTLSEGIRQWWKLKPGPPPPKPAERHKDDSRGLVLPGYKYLGPFNGLDKGEPVNEADAAALEHDKAYDRQLDSGDNPYLKYNHADAEFQERLKEDTSFGGNLGRAVFQAKKRVLEPLGLVEEPVKTAPGKKRPVEHSPVEPDSSSGTGKAGQQPARKRLNFGQTGDADSVPDPQPLGQPPAAPSGLGTNTMATGSGAPMADNNEGADGVGNSSGNWHCDSTWMGDRVITTSTRTWALPTYNNHLYKQISSQSGASNDNHYFGYSTPWGYFDFNRFHCHFSPRDWQRLINNNWGFRPKRLNFKLFNIQVKEVTQNDGTTTIANNLTSTVQVFTDSEYQLPYVLGSAHQGCLPPFPADVFMVPQYGYLTLNNGSQAVGRSSFYCLEYFPSQMLRTGNNFTFSYTFEDVPFHSSYAHSQSLDRLMNPLIDQYLYYLSRTNTPSGTTTQSRLQFSQAGASDIRDQSRNWLPGPCYRQQRVSKTSADNNNSEYSWTGATKYHLNGRDSLVNPGPAMASHKDDEEKFFPQSGVLIFGKQGSEKTNVDIEKVMITDEEEIRTTNPVATEQYGSVSTNLQRGNRQAATADVNTQGVLPGTVWQDRDVYLQGPIWAKIPHTDGHFHPSPLMGGFGLKHPPPQILIKNTPVPANPSTTLSAAKFASFITQYSTGQVSVEIEWELQKENSKRWNPEIQYTSNYNKSVNVDFTVDTNGVYSEPRPIGTRYLTRNL

SEQ ID NO: 164 - protein, 735 aa, Artificial Sequence
  Synthetic Polypeptide
MAADGYLPDWLEDTLSEGIRQWWKLKPGPPPPKPAERHKDDSRGLVLPGYKYLGPFNGLDKGEPVNEADAAALEHDKAYDRQLDSGDNPYLKYNHADAEFQERLKEDTSFGGNLGRAVFQAKKRVLEPLGLVEEPVKTAPGKKRPVEHSPVEPDSSSGTGKAGQQPARKRLNFGQTGDADSVPDPQPLGQPPAAPSGLGTNTMATGSGAPMADNNEGADGVGNSSGNWHCDSTWMGDRVITTSTRTWALPTYNNHLYKQISSQSGASNDNHYFGYSTPWGYFDFNRFHCHFSPRDWQRLINNNWGFRPKRLNFKLFNIQVKEVTQNDGTTTIANNLTSTVQVFTDSEYQLPYVLGSAHQGCLPPFPADVFMVPQYGYLTLNNGSQAVGRSSFYCLEYFPSQMLRTGNNFTFSYTFEDVPFHSSYAHSQSLDRLMNPLIDQYLYYLSRTNTPSGTTTQSRLQFSQAGASDIRDQSRNWLPGPCYRQQRVSKTSADNNNSEYSWTGATKYHLNGRDSLVNPGPAMASHKDDEEKFFPQSGVLIFGKQGSEKTNVDIEKVMITDEGEIRTTNPVATEQYGSVSTNLQRGNRQAATADVNTQGVLPGTVWQDRDVYLQGPIWAKIPHTDGHFHPSPLMGGFGLKHPPPQILIKNTPVPANPSTTFSAAKFASFITQYSTGQVSVEIEWELQKENSKRWNPEIQYTSNYNKSVNVDFTVDTNGVYSEPRPIGTRYLTRNL

SEQ ID NO: 165 - protein, 735 aa, Artificial Sequence
  Synthetic Polypeptide
MAADGYLPDWLEDTLSEGIRQWWKLKPGPPPPKPAERHKDDSRGLVLPGYKYLGPFNGLDKGEPVNEADAAALEHDKAYDRQLDSGDNPYLKYNHADAEFQERLKEDTSFGGNLGRAVFQAKKRALEPLGLVEEPVKTAPGKKRPVEHSPVEPDSSSGTGKAGQQPARKRLNFGQTGDADSVPDPQPLGQPPAAPSGLGTNTMATGSGAPMADNNEGADGVGNSSGNWHCDSTWMGDRVITTSTRTWALPTYNNHLYKQISSQSGASNDNHYFGYSTPWGYFDFNRFHCHFSPRDWQRLINNNWGFRPKRLNFKLFNIQVKEVTQNDGTTTIANNLTSTVQVFTDSEYQLPYVLGSAHQGCLPPFPADVFMVPQYGYLTLNNGSQAVGRSSFYCLEYFPSQMLRTGNNFTFSYTFEDVPFHSSYAHSQSLDRLMNPLIDQYLYYLSRTNTPSGTTTQSRLQFSQAGASDIRDQSRNWLPGPCYRQQRVSKTSADNNNSEYSWTGATKYHLNGRDSLVNPGPAMASHKDDEEKFFPQSGVLIFGKQGSEKTNVDIEKVMITDEEEIRTTNPVATEQYGSVSTNLQRGNRQAATADVNTQGVLPGMVWQDRDVYLQGPIWAKIPHTDGHFHPSPLMGGFGLKHPPPQILIKNTPVPANPSTTFSAAKFASFITQYSAGQVSVEIEWELQKENSKRWNPEIQYTSNYNKSVNVDFTVDTNGVYSEPRPIGTRYLTRNL

SEQ ID NO: 166 - protein, 735 aa, Artificial Sequence
  Synthetic Polypeptide
MAADGYLPDWLEDTLSEGIRQWWKLKPGPPPPKPAERHKDDSRGLVLPGYKYLGPFNGLDKGEPVNEADAAALEHDKAYDRQLDSGDNPYLKYNHADAEFQERLKEDTSFGGNLGRAVFQAKKRVLEPLGLVEEPVKTAPGKKRPVEHSPVEPDSSSGTGKAGQQPARKRLNFGQTGDADSVPDPQPLGQPPAAPSGLGTNTMATGSGAPMADNNEGADGVGNSSGNWHCDSTWMGDRVITTSTRTWALPTYNNHLYKQISSQSGASNDNHYFGYSTPWGYFDFNRFHCHFSPRDWQRLINNNWGFRPKRLNFKLFNIQVKEVTQNDGTTTIANNLTSTVQVFTDSEYQLPYVLGSAHQGCLPPFPADVFMVPQYGYLTLNNGSQAVGRSSFYCLEYFPSQMLRTGNNFTFSYTFEDVPFHSSYAHSQSLDRLMNPLIDQYLYYLSRTNTPSGTTTQSRLQFSQAGASDIRDQSRNWLPGPCYRQQRVSKTSADNNNSEYSWTGATEYHLNGRDSLVNPGPAMASHKDDEEKFFPQSGVLIFGKQGSEKTNVDIEKVMITDEEEIRTTNPVATEQYGSVSTNLQRGNRQAATADVNTQGVLPGTVWQDRDVYLQGPIWAKIPHTDGHFHPSPLMGGFGLKHPPPQILIKNTPVPANPSTTFSAAKFASFITQYSTGQVSVEIEWELQKENSKRWNPEIQYTSNYNKSVNVDFTVDTNGVYSEPRPIGTRYLTRNL

SEQ ID NO: 167 - protein, 735 aa, Artificial Sequence
  Synthetic Polypeptide
MAADGYLPDWLEDTLSEGIRQWWKLKPGPPPPKPAERHKDDSRGLVLPGYKYLGPFNGLDKGEPVNEADAAALEHGKAYDRQLDSGDNPYLKYNHADAEFQERLKEDTSFGGNLGRAVFQAKKRVLEPLGLVEEPVKTAPGKKRPVEHSPVEPDSSSGTGKAGQQPARKRLNFGQTGDADSVPDPQPLGQPPAAPSGLGTNTMATGSGAPMADNNEGADGVGNSSGNWHCDSTWMGDRVITTSTRTWALPTYNNHLYKQISSQSGASNDNHYFGYSTPWGYFDFNRFHCHFSPRDWQRLINNNWGFRPKRLNFKLFNIQVKEVTQNDGTTTIANNLTSTVQVFTDSEYQLPYVLGSAHQGCLPPFPADVFMVPQYGYLTLNNGSQAVGRSSFYCLEYFPSQMLRTGNNFTFSYTFEDVPFHSSYAHSQSLDRLMNPLIDQYLYYLSRTNTPSGTTTQSRLQFSQAGASDIRDQSRNWLPGPCYRQQRVSKTSADNNNSEYSWTGATKYHLNGRDSLVNPGPAMASHKDDEEKFFPQSGVLIFGKQGSEKTNVDIEKVMITDEEEIRTTNPVATEQYGSVSTNLQRGNRQAATADVNTQGVLPGTVWQDRDVYLQGPIWAKIPHTDGHFHPSPLMGGFGLKHPPPQILIKNTPVPANPSTTFSAAKFASFITQYSTGQVSVEIEWELQKENSKRWNPEIQYTSNYNKSVNVDFTVDTNGVYSEPRPIGTRYLTRNL

SEQ ID NO: 168 - protein, 735 aa, Artificial Sequence
  Synthetic Polypeptide
MAADGYLPDWLEDTLSEGIRQWWKLKPGPPPPKPAERHKDDSRGLVLPGYKYLGPFNGLDKGEPVNEADAAALEHDKAYDRQLDSGDNPYLKYNHADAEFQERLKEDTSFGGNLGRAVFQAKKRALEPLGLVEEPVKTAPGKKRPVEHSPVEPDSSSGTGKAGQQPARKRLNFGQTGDADSVPDPQPLGQPPAAPSGLGTNTMATGSGAPMADNNEGADGVGNSSGNWHCDSTWMGDRVITTSTRTWALPTYNNHLYKQISSQSGASNDNHYFGYSTPWGYFDFNRFHCHFSPRDWQRLINNNWGFRPKRLNFKLFNIQVKEVTQNDGTTTIANNLTSTVQVFTDSEYQLPYVLGSAHQGCLPPFPADVFMVPQYGYLTLNNGSQAVGRSSFYCLEYFPSQMLRTGNNFTFSYTFEDVPFHSSYAHSQSLDRLMNPLVDQYLYYLSRTNTPSGTTTQSRLQFSQAGASDIRDQSRNWLPGPCYRQQRVSKTSADNNNSEYSWTGATKYHLNGRDSLVNPGPAMASHKDDEEKFFPQSGVLIFGKQGSEKTNVDIEKVMITDEEEIRTTNPVATEQYGSVSTNLQRGNRQAATADVNTQGVLPGMVWQDRDVYLQGPIWAKIPHTDGHFHPSPLMGGFGLKRPPPQILIKNTPVPANPSTTFSAAKFASFITQYSTGQVSVEIEWELQKENSKRWNPEIQYTSNYNKSVNVDFTVDTNGVYSEPRPIGTRYLTRNL

SEQ ID NO: 169 - protein, 735 aa, Artificial Sequence
  Synthetic Polypeptide
MAADGYLPDWLEDTLSEGIRQWWKLKPGPPPPKPAERHKDDSRGLVLPGYKYLGPFNGLDKGEPVNEADAAALEHDKAYDRQLDSGDNPYLKYNHADAEFQERLKEDTSFGGNLGRAVFQAKKRVLEPLGLVEEPVKTAPGKKRPVEHSPVEPDSSSGTGKAGQQPARKRLNFGQTGDADSVPDPQPLGQPPAAPSGLGTNTMATGSGAPMADNNEGADGVGNSSGNWHCDSTWMGDRVITTSTRTWALPTYNNHLYKQISSQSGASNDNHYFGYSTPWGYFDFNRFHCHFSPRDWQRLINNNWGFRPKRLNFKLFNIQVKEVTQNDGTTTIANNLTSTVQVFTDSEYQLPYVLGSAHQGCLPPFPADVFMVPQYGYLTLNNGSQAVGRSSFYCLEYFPSQMLRTGNNFTFSYTFEDVPFHSSYAHSQSLDRLMNPLIDQYLYYLSRTNTPSGTTTQSRLQFSQAGASDIRDQSRNWLPGPCYRQQRVSKTSADNNNSEYSWTGATKYHLNGRDSLVNPGPAMASHKDDEEKFFPQSGVLIFGKQGSEKTNVDIEKVMITDEEEIRTTNPVATEQYGSVSTNLQRGNRQAATADVNTQGVLPGTVWQDRDVYLQGPIWAKIPHTDGHFHPSPLMGGFGLKHPPPQILIKNTPVPANPSTTFSAAKFASFITQHSTGQVSVEIEWELQKENSKRWNPEIQYTSNYNKSVNVDFTVDTNGVYSEPRPIGTRYLTRNL

SEQ ID NO: 170 - protein, 735 aa, Artificial Sequence
  Synthetic Polypeptide
MAADGYLPDWLEDTLSEGIRQWWKLKPGPPPPKPAERHKDDSRGLVLPGYKYLGPFNGLDKGEPVNEADAAALEHDKAYDRQLDSGDDPYLKYNHADAEFQERLKEDTSFGGNLARAVFQAKKRVLEPLGLVEEPVKTAPGKKRPVEHSPAEPDSSSGTGKAGQQPARKRLNFGQTGDADSVPDPQPLGQPPAAPSGLGTNTMATGSGAPMADNNEGADGVGNSSGNWHCDSTWMGDRVITTSTRTWALPTYNNHLYKQISSQSGASNDNHYFGYSTPWGYFDFNRFHCHFSPRDWQRLINNNWGFRPKRLSFKLFNIQVKEVTQNDGTTTIANNLTSTVQVFTDSEYQLPYVLGSAHQGCLPPFPADVFMVPQYGYLTLNNGSQAVGRSSFYCLEYFPSQMLRTGNNFTFSYTFEDVPFHSSYAHSQSLDRLMNPLIDQYLYYLSKTNAPSGTTTMSRLQFSQAGASDIRDQSRNWLPGPCYRQQRVSKTAADNNNSDYSWTGATKYHLNGRDSLVNPGPAMASHKDDEEKYFPQSGVLIFGKQGSNKTNVDIEKVMITDEEEIRTTNPVATEQYGSVSTNLQSGNTQAATSDVNTQGVLPGMVWQDRDVYLQGPIWAKIPHTDGHFHPSPLMGGFGLKHPPPQILIKNTPVPANPSTTFSAAKFASFITQYSTGQVSVEIEWELQKENSKRWNPEIQYTSNYNKSVNVDFTVDTNGVYSEPRPIGTRYLTRNL

SEQ ID NO: 171 - protein, 735 aa, Artificial Sequence
  Synthetic Polypeptide
MAADGYLPDWLEDTLSEGIRQWWKLKPGPPPPKPAERHKDDSRGLVLPGYKYLGPFNGLDKGEPVNEADAAALEHDKAYDRQLDSGDNPYLKYNHADAEFQERLKEDTSFGGNLGRAVFQAKKRVLEPLGLVEEPVKTAPGKKRPVEHSPVEPDSSSGTGKAGQQPARKRLNFGQTGDADSVPDPQPLGQPPAAPSGLGTNTMATGSGAPMADNNEGADGVGNSSGNWHCDSTWMGDRVITTSTRTWALPTYNNHLYKQISSQSGASNDNHYFGYSTPWGYFDFNRFHCHFSPRDWQRLINNNWGFRPKRLNFKLFNIQVKEVTQNDGTTTIANNLTSTVQVFTDSEYQLPYVLGSAHQGCLPPFPADVFMVPQYGYLTLNNGSQAVGRSSFYCLEYFPSQMLRTGNNFTFSYTFEDVPFHSSYAHSQSLDRLMNPLIDQYLYYLSRTNTPSGTTTQPRLQFSQAGASDIRDQSRNWLPGPCYRQQRVSKTSADNNNSEYSWTGATKYHLNGRDSLVNPGPAMASHKDDEEKFFPQSGVLIFGKQGSEKTNVDIEKVMITDEEEIRTTNPVATEQYGSVSTNLQRGNRQAATADVNTQGVLPGTVWQDRDVYLQGPIWAKIPHTDGHFHPSPLMGGFGLKHPPPQILIKNTPVPANPSTTFSAAKFASFITQYSTGQVSVEIEWELQKENSKRWNPEIQYTSNYNKSVNVDFTVDTNGVYSEPRPIGTRYLTRNL

SEQ ID NO: 172 - protein, 735 aa, Artificial Sequence
  Synthetic Polypeptide
MAADGYLPDWLEDTLSEGIRQWWKLKPGPPPPKPAERHKDDSRGLVLPGYKYLGPFNGLDKGEPVNEADAAALEHDKAYDRQLDSGDNPYLKYNHADAEFQERLKEDTSFGGNLGRAVFQAKKRVLEPLGLVEEPVKTAPGKKRPVEHSPVEPDSSSGTGKAGQQPARKRLNFGQTGDADSVPDPQPLGQPPAAPSGLGTNTMATGSGAPMADNNEGADGVGNSSGNWHCDSTWMGDRVITTSTRTWALPTYNNHLYKQISSQSGASNDNHYFGYSTPWGYFDFNRFHCHFSPRDWQRLINNNWGFRPKRLNFKLFNIQVKEVTQNDGTTTIANNLTSTVQVFTDSEYQLPYVLGSAHQGCLPPFPADVFMVPQYGYLTLNNGSQAVGRSSFYCLEYFPSQMLRTGNNFTFSYTFEDVPFHSSYAHSQSLDRLMNPLIDQYLYYLSRTNTPSGTTTQSRLQFSQAGASDIRDQSRNWLPGPCYRQQRVSKTSADNNNSEYLWTGATKYHLNGRDSLVNPGPAMASHKDDEEKFFPQSGVLIFGKQGSEKTNVDIEKVMITDEEEIRTTNPVATEQYGSVSTNLQRGNRQAATADVNTQGVLPGTVWQDRDVYLQGPIWAKIPHTDGHFHPSPLMGGFGLKHPPPQILIKNTPVPANPSTTFSAAKFASFITQYSTGQVSVEIEWELQKENSKRWNPEIQYTSNYNKSVNVDFTVDTNGVYSEPRPIGTRYLTRNL

SEQ ID NO: 173 - protein, 735 aa, Artificial Sequence
  Synthetic Polypeptide
MAADGYLPDWLEDTLSEGIRQWWKLKPGPPPPKPAERHKDDSRGLVLPGYKYLGPFNGLDKGEPVNEADAAALEHDKAYDRQLDSGDNPYLKYNHADAEFQERLKEDTSFGGNLGRAVFQAKKRVLEPLGLVEEPVKTAPGKKRPVEHSPVEPDSSSGTGKAGQQPARKRLNFGQTGDADSVPDPQPLGQPPAAPSGLGTNTMATGSGAPMADNNEGADGVGNSSGNWHCDSTWMGDRVITTSTRTWALPTYNNHLYKQISSQSGASNDNHYFGYSTPWGYFDFNRFHCHFSPRDWQRLINNNWGFRPKRLNFKPFNIQVKEVTQNDGTTTIANNLTSTVQVFTDSEYQLPYVLGSAHQGCLPPFPADVFMVPQYGYLTLNNGSQAVGRSSFYCLEYFPSQMLRTGNNFTFSYTFEDVPFHSSYAHSQSLDRLMNPLIDQYLYYLSRTNTPSGTTTQSRLQFSQAGASDIRDQSRNWLPGPCYRQQRVSKTSADNNNSEYSWTGATKYHLNGRDSLVNPGPAMASHKDDEEKFFPQSGVLIFGKQGSEKTNVDIEKVMITDEEEIRTTNPVATEQYGSVSTNLQRGNRQAATADVNTQGVLPGTVWQDRDVYLQGPIWAKIPHTDGHFHPSPLMGGFGLKHPPPQILIKNTPVPANPSTTFSAAKFASFITQYSTGQVSVEIEWELQKENSKRWNPEIQYTSNYNKSVNVDFTVDTNGVYSEPRPIGTRYLTRNL

SEQ ID NO: 174 - protein, 735 aa, Artificial Sequence
  Synthetic Polypeptide
MAADGYLPDWLEDTLSEGIRQWWKLKPGPPPPKPAERHKDDSRGLVLPGYKYLGPFNGLDKGEPVNEADAAALEHDKAYDRQLDSGDNPYLKYNHADAEFQERLKEDTSFGGNLGRAVFQAKKRVLEPLGLVEEPVKTAPGKKRPVEHSPVEPDSSSGTGKAGQQPARKRLNFGQTGDADSVPDPQPLGQPPAAPSGLGTNTMATGSGAPMADNNEGADGVGNSSGNWHCDSTWMGDRVITTSTRTWALPTYNNHLYKQISSQSGASNDNHYFGYSTPWGYFDFNRFHCHFSPRDWQRLINNNWGFRPKRLNFKLFNIQVKEVTQNDGTTTIANNLTSTVQVFTDSEYQLPYVLGSAHQGCLPPFPADVFMVPQYGYLTLNNGSQAVGRSSFYCLEYFPSQMLRTGNNFTFSYTFEDVPFHSSYAHSQSLDRLMNPLIDQYPYYLSRTNTPSGTTTQSRLQFSQAGASDIRDQSRNWLPGPCYRQQRVSKTSADNNNSEYSWTGATKYHLNGRDSLVNPGPAMASHKDDEEKFFPQSGVLIFGKQGSEKTNVDIEKVMITDEEEIRTTNPVATEQYGSVSTNLQRGNRQAATADVNTQGVLPGTVWQDRDVYLQGPIWAKIPHTDGHFHPSPLMGGFGLKHPPPQILIKNTPVPANPSTTFSAAKFASFITQYSTGQVSVEIEWELQKENSKRWNPEIQYTSNYNKSVNVDFTVDTNGVYSEPRPIGTRYLTRNL

SEQ ID NO: 175 - protein, 735 aa, Artificial Sequence
  Synthetic Polypeptide
MAADGYLPDWLEDTLSEGIRQWWKLKPGPPPPKPAERHKDDSRGLVLPGYKYLGPFNGLDKGEPVNEADAAALEHDKAYDRQLDSGDNPYLKYNHADAEFQERLKEDTSFGGNLGRAVFQAKKRALEPLGLVEEPVKTAPGKKRPVEHSPVEPDSSSGTGKAGQQPARKRLNFGQTGDADSVPDPQPLGQPPAAPSGLGTNTMATGSGAPMADNNEGADGVGNSSGNWHCDSTWMGDRVITTSTRTWALPTYNNHLYKQISSQSGASNDNHYFGYSTPWGYFDFNRFHCHFSPRDWQRLINNNWGFRPKRLNFKLFNIQVKEVTQNDGTTTIANNLTSTVQVFTDSEYQLPYVLGSAHQGCLPPFPADVFMVPQYGYLTLNNGSQAVGRSSFYCLEYFPSQMLRTGNNFTFSYTFEDVPFHSSYAHSQSLDRLMNPLIDQYLYYLSRTNTPSGTTTQSRLQFSQAGASDIRDQSRNWLPGPCYRQQRVSKTSADNNNSEYSWTGATKYHLNGRDSLVNPGPAMASHKDDEEKFFPQSGVLIFGKQGSEKTNVDIEKVMITDEEEIRTTNPVATEQYGSVSTNLQRGNRQAATADVNTQGVLPGTVWQDRDVYLQGPIWAKIPHTDGHFHPSPLMGGFGLKHPPPQILIKNTPVPANPSTTFSAAKFASFITQYSTGQVSVEIEWELQKENSKRWNPEIQYTSNYNKSVNVDFTVDTNGVYSEPRPIGTRYLTRNL

SEQ ID NO: 176 - protein, 735 aa, Artificial Sequence
  Synthetic Polypeptide
MAADGYLPDWLEDTLSEGIRQWWKLKPGPPPPKPAERHKDDSRGLVLPGYKYLGPFNGLDKGEPVNEADAAALEHDKAYDRQLDSGDNPYLKYNHADAEFQERLKEDTSFGGNLGRAVFQAKKRVLEPLGLVGEPVKTAPGKKRPVEHSPVEPDSSSGTGKAGQQPARKRLNFGQTGDADSVPDPQPLGQPPAAPSGLGTNTMATGSGAPMADNNEGADGVGNSSGNWHCDSTWMGDRVITTSTRTWALPTYNNHLYKQISSQSGASNDNHYFGYSTPWGYFDFNRFHCHFSPRDWQRLINNNWGFRPKRLNFKLFNIQVKEVTQNDGTTTIANNLTSTVQVFTDSEYQLPYVLGSAHQGCLPPFPADVFMVPQYGYLTLNNGSQAVGRSSFYCLEYFPSQMLRTGNNFTFSYTFEDVPFHSSYAHSQSLDRLMNPLIDQYLYYLSRTNTPSGTTTQSRLQFSQAGASDIRDQSRNWLPGPCYRQQRVSKTSADNNNSEYSWTGATKYHLNGRDSLVNPGPAMASHKDDEEKFFPQSGVLIFGKQGSEKTNVDIEKVMITDEEEIRTTNPVATEQYGSVSTNLQRGNRQAATADVNTQGVLPGMVWQDRDVYLQGPIWAKIPHTDGHFHPSPLMGGFGLKHPPPQILIKNTPVPANPSTTFSAAKFASFITQYSTGQVSVEIEWELQKENSKRWNPEIQYTSNYNKSVNVDFTVDTNGVYSEPRPIGTRYLTRNL

SEQ ID NO: 177 - protein, 735 aa, Artificial Sequence
  Synthetic Polypeptide
MAADGYLPDWLEDTLSEGIRQWWKLKPGPPPPKPAERHKDDSRGLVLPGYKYLGPFNGLDKGEPVNEADAAALEHDKAYDRQPDSGDNPYLKYNHADAEFQERLKEDTSFGGNLGRAVFQAKKRVLEPLGLVEEPVKTAPGKKRPVEHSPVEPDSSSGTGKAGQQPARKRLNFGQTGDADSVPDPQPLGQPPAAPSGLGTNTMATGSGAPMADNNEGADGVGNSSGNWHCDSTWMGDRVITTSTRTWALPTYNNHLYKQISSQSGASNDNHYFGYSTPWGYFDFNRFHCHFSPRDWQRLINNNWGFRPKRLNFKLFNIQVKEVTQNDGTTTIANNLTSTVQVFTDSEYQLPYVLGSAHQGCLPPFPADVFMVPQYGYLTLNNGSQAVGRSSFYCLEYFPSQMLRTGNNFTFSYTFEDVPFHSSYAHSQSLDRLMNPLIDQYLYYLSRTNTPSGTTTQSRLQFSQAGASDIRDQSRNWLPGPCYRQQRVSKTSADNNNSEYSWTGATKYHLNGRDSLVNPGPAMASHKDDEEKFFPQSGVLIFGKQGSEKTNVDIEKVMITDEEEIRTTNPVATEQYGSVSTNLQRGNRQAATADVNTQGVLPGTVWQDRDVYLQGPIWAKIPHTDGHFHPSPLMGGFGLKHPPPQILIKNTPVPANPSTTFSAAKFASFITQYSTGQVSVEIEWELQKENSKRWNPEIQYTSNYNKSVNVDFTVDTNGVYSEPRPIGTRYLTRNL

SEQ ID NO: 178 - protein, 735 aa, Artificial Sequence
  Synthetic Polypeptide
MAADGYLPDWLEDTLSEGIRQWWKLKPGPPPPKPAERHKDDSRGLVLPGYKYLGPFNGLDKGEPVNEADAAALEHDKAYDRQLDSGDNPYLKYNHADAEFQERLKEDTSFGGNLGRAVFQAKKRVLEPLGLVEEPVKTAPGKKRPVEHSPVEPDSSSGTGKAGQQPARKRLNFGQTGDADSVPDPQPLGQPPAAPSGLGTNTMATGSGAPMADNNEGADGVGNSSGNWHCDSTWMGDRVITTSTRTWALPTYNNHLYKQISSQSGASNDNHYFGYSTPWGYFDFNRFHCHFSPRDWQRLINNNWGFRPKRLNFKLFNIQVKEVTQNDGTTTIANNLTSTVQVFTDSEYQLPYVLGSAHQGCLPPFPADVFMVPQYGYLTLNNGSQAVGRSSFYCLEYFPSQMLRTGNNFTFSYTFEDVPFHSSYAHSQSLDRLMNPLIDQYLYYLSRTNTPSGTTTQSRLQFSQAGASDIRDQSRNWLPGPCYRQQRVSKTSADNNNSEYSWTGATKYHLNGRDSLVNPGPAMASHKDDEEKFFPQSGVLIFGKQGSEKTNVDIEKVMITDEEEIRTTNPVATEQYGSVSTNLQRGNRQAATADVNTQGVLPGMVWQDRDVYLQGPIWAKIPHTDGHFHPSPLMGGFGLKHPPPQILIKNTPVPANPSTTFSAAKFASSITQYSTGQVSVEIEWELQKENSKRWNPEIQYTSNYNKSVNVDFTVDTNGVYSEPRPIGTRYLTRNL

SEQ ID NO: 179 - protein, 735 aa, Artificial Sequence
  Synthetic Polypeptide
MAADGYLPDWLEDTLSEGIRQWWKLKPGPPPPKPAERHKDDSRGLVLPGYKYLGPFNGLDKGEPVNEADAAALEHDKAYDRQLDSGDNPYLKYNHADAEFQERLKEDTSFGGNLGRAVFQAKKRVLEPLGLVEEPVKTAPGKKRPVEHSPVEPDSSSGTGKAGQQPARKRLNFGQTGDADSVPDPQPLGQPPAAPSGLGTNTMATGSGAPMADNNEGADGVGNSSGNWHCDSTWMGDRVITTSTRTWALPTYNNHLYKQISSQSGASNDNHYFGYSTPWGYFDLNRFHCHFSPRDWQRLINNNWGFRPKRLNFKLFNIQVKEVTQNDGTTTIANNLTSTVQVFTDSEYQLPYVLGSAHQGCLPPFPADVFMVPQYGYLTLNNGSQAVGRSSFYCLEYFPSQMLRTGNNFTFSYTFEDVPFHSSYAHSQSLDRLMNPLIDQYLYYLSRTNTPSGTTTQSRLQFSQAGASDIRDQSRNWLPGPCYRQQRVSKTSADNNNSEYSWTGATKYHLNGRDSLVNPGPAMASHKDDEEKFFPQSGVLIFGKQGSEKTNVDIEKVMITDEEEIRTTNPVATEQYGSVSTNLQRGNRQAATADVNTQGVLPGTVWQDRDVYLQGPIWAKIPHTDGHFHPSPLMGGFGLKHPPPQILIKNTPVPANPSTTFSAAKFASFITQYSTGQVSVEIEWELQKENSKRWNPEIQYTSNYNKSVNVDFTVDTNGVYSEPRPIGTRYLTRNL

SEQ ID NO: 180 - protein, 735 aa, Artificial Sequence
  Synthetic Polypeptide
MAADGYLPDWLEDTLSEGIRQWWKLKPGPPPPKPAERHKDDSRGLVLPGYKYLGPFNGLDKGEPVNEADAAALEHDKAYDRQLDSGDNPYLKYNHADAEFQERLKEDTSFGGNLGRAVFQAKKRVLEPLGLVEEPVKTAPGKKRPVEHSPVEPDSSSGTGKAGQQPARKRLNFGQTGDADSVPDPQPLGQPPAAPSGLGTNTMATGSGAPMADNNEGADGVGNSSGNWHCDSTWMGDRVITTSTRTWALPTYNNHLYKQISSQSGASNDNRYFGYSTPWGYFDFNRFHCHFSPRDWQRLINNNWGFRPKRLNFKLFNIQVKEVTQNDGTTTIANNLTSTVQVFTDSEYQLPYVLGSAHQGCLPPFPADVFMVPQYGYLTLNNGSQAVGRSSFYCLEYFPSQMLRTGNNFTFSYTFEDVPFHSSYAHSQSLDRLMNPLIDQYLYYLSRTNTPSGTTTQSRLQFSQAGASDIRDQSRNWLPGPCYRQQRVSKTSADNNNSEYSWTGATKYHLNGRDSLVNPGPAMASHKDDEEKFFPQSGVLIFGKQGSEKTNVDIEKVMITDEEEIRTTNPVATEQYGSVSTNLQRGNRQAATADVNTQGVLPGTVWQDRDVYLQGPIWAKIPHTDGHFHPSPLMGGFGLKHPPPQILIKNTPVPANPSTTFSAAKFASFITQYSTGQVSVEIEWELQKENSKRWNPEIQYTSNYNKSVNVDFTVDTNGVYSEPRPIGTRYLTRNL

SEQ ID NO: 181 - protein, 735 aa, Artificial Sequence
  Synthetic Polypeptide
MAADGYLPDWLEDTLSEGIRQWWKLKPGPPPPKPAERHKDDSRGLVLPGYKYLGPFNGLDKGEPVNEADAAALEHDKAYDRQLDSGDNPYLKYNHADAEFQERLKEDTSFGGNLGRAVFQAKKRVLEPLGLVEEPVKTAPGKKRPVEHSPVEPDSSSGTGKAGQQPARKRLNFGQTGDADSVPDPQPLGQPPAAPSGLGTNTMATGSGAPMADNNEGADGVGNSSGNWHCDSTWMGDRVITTSTRTWALPTYNNHLYKQISSQSGASNDNHYFGYSTPWGYFDFNRFHCHFSPRDWQRLINNNWGFRPKRLNFKLFNIQVKEVTQNDGTTTIANNLTSTVQVFTDSEYQLPYVLGSAHQGCLPPFPADVFMVPQYGYLTLNNGSQAVGRSSFYCLEYFPSQMLRTGNNFTFSYTFEDVPFHSSYAHSQSLDRLMNPLIDQYLYYLSRTNTPSGTTTQSRLQFSQAGASDIRDQSRNWLPGPCYRQQRVSKTSADNNNSEYSWTGATKYHLNGRDSLVNPGPAMASHKDDEEKFFPQSGVLIFGKQGSEKTNVDIEKVMITDEEEIRTTNPVATEQYGSVSTNLQRGNRQAATADVNTQGVLPGTVWQDRDVYLQGPIWAKIPHTDGHFHPSPLMGGFGLKHPPPQILIKNTPVPANPSTTFSAAKFASFITQYSTGQVSVEIEWELQKENSKRWNPEIQYTSNYNKSANVDFTVDTNGVYSEPRPIGTRYLTRNL

SEQ ID NO: 182 - protein, 735 aa, Artificial Sequence
  Synthetic Polypeptide
MAADGYLPDWLEDTLSEGIRQWWKLKPGPPPPKPAERHKDDSRGLVLPGYKYLGPFNGLDKGEPVNEADAAALEHDKAYDRQLDSGDNPYLKYNHADAEFQERLKEDTSFGGNLGRAVFQAKKRVLEPLGLVEEPVKTAPGKKRPVEHSPVEPDSSSGTGKAGQQPARKRLNFGQTGDADSVPDPQPLGQPPAAPSGLGTNTMATGSGAPMAGNNEGADGVGNSSGNWHCDSTWMGDRVITTSTRTWALPTYNNHLYKQISSQSGASNDNHYFGYSTPWGYFDFNRFHCHFSPRDWQRLINNNWGFRPKRLNFKLFNIQVKEVTQNDGTTTIANNLTSTVQVFTDSEYQLPYVLGSAHQGCLPPFPADVFMVPQYGYLTLNNGSQAVGRSSFYCLEYFPSQMLRTGNNFTFSYTFEDVPFHSSYAHSQSLDRLMNPLIDQYLYYLSRTNTPSGTTTQSRLQFSQAGASDIRDQSRNWLPGPCYRQQRVSKTSADNNNSEYSWTGATKYHLNGRDSLVNPGPAMASHKDDEEKFFPQSGVLIFGKQGSEKTNVDIEKVMITDEEEIRTTNPVATEQYGSVSTNLQRGNRQAATADVNTQGVLPGTVWQDRDVYLQGPIWAKIPHTDGHFHPSPLMGGFGLKHPPPQILIKNTPVPANPSTTFSAAKFASFITQYSTGQVSVEIEWELQKENSKRWNPEIQYTSNYNKSVNVDFTVDTNGVYSEPRPIGTRYLTRNL

SEQ ID NO: 183 - protein, 735 aa, Artificial Sequence
  Synthetic Polypeptide
MAADGYLPDWLEDTLSEGIRQWWKLKPGPPPPKPAERHKDDSRGLVLPGYKYLGPFNGLDKGEPVNEADAAALEHDKAYNRQLDSGDNPYLKYNHADAEFQERLKEDTSFGGNLGRAVFQAKKRVLEPLGLVEEPVKTAPGKKRPVEHSPVEPDSSSGTGKAGQQPARKRLNFGQTGDADSVPDPQPLGQPPAAPSGLGTNTMATGSGAPMADNNEGADGVGNSSGNWHCDSTWMGDRVITTSTRTWALPTYNNHLYKQISSQSGASNDNHYFGYSTPWGYFDFNRFHCHFSPRDWQRLINNNWGFRPKRLNFKLFNIQVKEVTQNDGTTTIANNLTSTVQVFTDSEYQLPYVLGSAHQGCLPPLPADVFMVPQYGYLTLNNGSQAVGRSSFYCLEYFPSQMLRTGNNFTFSYTFEDVPFHSSYAHSQSLDRLMNPLIDQYLYYLSRTNTPSGTTTQSRLQFSQAGASDIRDQSRNWLPGPCYRQQRVSKTSADNNNSEYSWTGATKYHLNGRDSLVNPGPAMASHKDDEEKFFPQSGVLIFGKQGSEKTNVDIEKVMITDEEEIRTTNPVATEQYGSVSTNLQRGNRQAATADVNTQGVLPGMVWQDRDVYLQGPIWAKIPHTDGHFHPSPLMGGFGLKHPPPQILIKNTPVPANPSTTFSAAKFASFITQYSTGQVSVEIEWELQKENSKRWNPEIQYTSNYNKSVNVDFTVDTNGVYSEPRPIGTRYLTRNL

SEQ ID NO: 184 - protein, 735 aa, Artificial Sequence
  Synthetic Polypeptide
MAADGYLPDWLEDTLSEGIRQWWKLKPGPPPPKPAERHKDDSRGLVLPGYKYLGPFNGLDKGEPVNEADAAALEHDKAYDRQLDSGDNPYLKYNHADAEFQERLKEDTSFGGNLARAVFQAKKRVLEPLGLVEEPVKTAPGKKRPVEHSPAEPDSSSGTGKAGQQPARKRLNFGQTGDADSVPDPQPLGQPPAAPSGLGTNTMATGSGAPMADNNEGADGVGNSSGNWHCDSTWMGDRVITTSTRTWALPTYNNHLYKQISSQSGASNDNHYFGYSTPWGYFDFNRFHCHFSPRDWQRLINNNWGFRPKRLSFKLFNIQVKEVTQNDGATTIANNLTSTVQVFTDSEYQLPYVLGSAHQGCLPPFPADVFMVPQYGYLTLNNGSQAVGRSSFYCLEYFPSQMLRTGNNFTFSYTFEDVPFHSSYAHSQSLDRLMNPLIDQYLYYLSKTNAPSGTTTMSRLQFSQAGASDIRDQSRNWLPGPCYRQQRVSKTAADNNNSDYSWTGATKYHLNGRDSLVNPGPAMASHKDDEEKYFPQSGVLIFGKQGSNKTNVDIEKVMITDEEEIRTTNPVATEQYGSVSTNLQSGNTQAATSDVNTQGVLPGMVWQDRDVYLQGPIWAKIPHTDGHFHPSPLMGGFGLKHPPPQILIKNTPVPANPSTTFSAAKFASFITQYSTGQVSVEIEWELQKENSKRWNPEIQYTSNYNKSVNVDFTVDTNGVYSEPRPIGTRYLTRNL

SEQ ID NO: 185 - protein, 734 aa, Artificial Sequence
  Synthetic Polypeptide
MAADGYLPDWLEDTLSEGIRQWWKLKPGPPPKPAERHKDDSRGLVLPGYKYLGPFNGLDKGEPVNEADAAALEHDKAYDRQLDSGDNPYLKYNHADAEFQERLKEDTSFGGNLGRAVFQAKKRALEPLGLVEEPVKTAPGKKRPVEHSPVEPDSSSGTGKAGQQPARKRLNFGQTGDADSVPDPQPLGQPPAAPSGLGTNTMATGSGAPMADNNEGADGVGNSSGNWHCDSTWMGDRVITTSTRTWALPTYNNHLYKQISSQSGASNDNHYFGYSTPWGYFDFNRFHCHFSPRDWQRLINNNWGFRPKRLNFKLFNIQVKEVTQNDGTTTIANNLTSTVQVFTDSEYQLPYVLGSAHQGCLPPFPADVFMVPQYGYLTLNNGSQAVGRSSFYCLEYFPSQMLRTGNNFTFSYTFEDVPFHSSYAHSQSLDRLMNPLIDQYLYYLSRTNTPSGTTTQSRLQFSQAGASDIRDQSRNWLPGPCYRQQRVSKTSADNNNSEYSWTGATKYHLNGRDSLVNPGPAMASHKDDEEKFFPQSGVLIFGKQGSEKTNVDIEKVMITDEEEIRTTNPVATEQYGSVSTNLQRGNRQAATADVNTQGVLPGMVWQDRDVYLQGPIWAKIPHTDGHFHPSPLMGGFGLKHPPPQILIKNTPVPANPSTTFSAAKFASFITQYSTGQVSVEIEWELQKENSKRWNPEIQYTSNYNKSVNVDFTVDTNGVYSEPRPIGTRYLTRNL

SEQ ID NO: 186 - protein, 735 aa, Artificial Sequence
  Synthetic Polypeptide
MAADGYLPDWLEDTLSEGIRQWWKLKPGPPPPKPAERHKDDSRGLVLPGYKYLGPFNGLDKGEPVNEADAAALEHDKAYDRQLDSGDNPYLKYNHADAEFQERLKEDTSFGGNLARAVFQAKKRVLEPLGLVEEPVKTAPGKKRPVEHSPAEPDSSSGTGKAGQQPARKRLNFGQTGDADSVPDPQPLGQPPAAPSGLGTNTMATGSGAPMADNNEGADGVGNSSGNWHCDSTWMGDRVITTSTRTWALPTYNNHLYKQISSQSGASNDNHYFGYSTPWGYFDFNRFHCHFSPRDWQRLINNNWGFRPKRLSFKLFNIQVKEVTQNDGTTTIANNLTSTVQVFTDSEYQLPYVLGSAHQGCLPPFPADVFMVPQYGYLTLNNGSQAVGRSSFYCLEYFPSQMLRTGNNFTFSYTFEDVPFHSSYAHSQSLDRLMNPLIDQYLYYLSKTNAPSGTTTMSRLQFSQAGASDIRDQSRNWLPGPCYRQQRVSKTAADNNNSDYSWTGATKYHLNGRDSLVNPGPAMASHKDDEEKYFPQSGVLIFGKQGSNKTNVDIEKVMITDEEEIRTTNPVATEQYGSVSTNLQSGNTQAATSDVNTQGVLPGMVWQDRDVYLQGPIWAKIPHTDGHFHPSPLMGGFGLKHPPPQILIKNTPVPANPSTTFSAAKFASFITQYSTGQVSVEIEWELQKENGKRWNPEIQYTSNYNKSVNVDFTVDTNGVYSEPRPIGTRYLTRNL

SEQ ID NO: 187 - protein, 735 aa, Artificial Sequence
  Synthetic Polypeptide
MAADGYLPDWLEDTLSEGIRQWWKLKPGPPPPKPAERHKDDSRGLVLPGYKYLGPFNGLDKGEPVNEADAAALEHDKAYDRQLDSGDNPYLKYNHADAEFQERLKEDTSFGGNLGRAVFQAKKRVLEPLGLVEEPVKTAPGKKRPVEHSPVEPDSSSGTGKAGQQPARKRLNFGQTGDADSVPDPQPLGQPPAAPSGLGTNTMATGSGAPMADNNEGADGVGNSSGNWHCDSTWMGDRVITTSTRTWALPTYNNHLYKQISSQSGASNDNHYFGYSTPWGYFDFNRFHCHFSPRDWQRLINNNWGFRPKRLNFKLFNIQVKEVTQNDGTTTIANNLTSTVQVFTDSEYQLPYVLGSAHQGCLPPFPADVFMVPQYGYLTLNNGSQAVGRSSFYCLEYFPSQMLRTGNNFTFSYTFEDVPFHSSYAHSQSLDRLMNPLIDQYLYYLSRTNTPSGTTTQSRLQFSQAGASDIRDQSRNWLPRPCYRQQRVSKTSADNNNSEYSWTGATKYHLNGRDSLVNPGPAMASHKDDEEKFFPQSGVLIFGKQGSEKTNVDIEKVMITDEEEIRTTNPVATEQYGSVSTNLQRGNRQAATADVNTQGVLPGTVWQDRDVYLQGPIWAKIPHTDGHFHPSPLMGGFGLKHPPPQILIKNTPVPANPSTTFSAAKFASFITQYSTGQVSVEIEWELQKENSKRWNPEIQYTSNYNKSVNVDFTVDTNGVYSEPRPIGTRYLTRNL

SEQ ID NO: 188 - protein, 735 aa, Artificial Sequence
  Synthetic Polypeptide
MAADGYLPDWLEDTLSEGIRQWWKLKPGPPPPKPAERHKDDSRGLVLPGYKYLGPFNGLDKGEPVNEADAAALEHDKAYDRQLDSGDNPYLKYNHADAEFQERLKEDTSFGGNLGRAVFQAKKRALEPLGLVEEPVKTAPGKKRPVEHSPVEPDSSSGTGKAGQQPARKRLNFGQTGDADSVPDPQPLGQPPAAPSGLGTNTMATGSGAPMADNNEGADGVGNSSGNWHCDSTWMGDRVITTSTRTWALPTYNNHLYKQISSQSGASNDNHYFGYSTPWGYFDFNRFHCHFSPRDWQRLINNNWGFRPKRLNFKLFNIQVKEVTQNDGTTTIANNLTSTVQVFTDSEYQLPYVLGSAHQGCLPPFPADVFMVPQYGYLTLNNGSQAVGRSSFYCLEYFPSQMLRTGNNFTFSYTFEDVPFHSSYAHSQSLDRLMNPLIDQYLYYLSRTNTPSGTTTQSRLQFSQAGASDIRDQSRNWLPGPCYRQQRVSKTSADNNNSEYSWTGATKYHLNGRDSLVNPGPAMASHKDDEEKFFPQSGVLIFGKQGSEETNVDIEKVMITDEEEIRTTNPVATEQYGSVSTNLQRGNRQAATADVNTQGVLPGMVWQDRDVYLQGPIWAKIPHTDGHFHPSPLMGGFGLKHPPPQILIKNTPVPANPSTTFSAAKFASFITQYSTGQVSVEIEWELQKENSKRWNPEIQYTSNYNKSVNVDFTVDTNGVYSEPRPIGTRYLTRNL

SEQ ID NO: 189 - protein, 735 aa, Artificial Sequence
  Synthetic Polypeptide
MAADGYLPDWLEDTLSEGIRQWWKLKPGPPPPKPAERHKDDSRGLVLPGYKYLGPFNGLDKGEPANEADAAALEHDKAYDRQLDSGDNPYLKYNHADAEFQERLKEDTSFGGNLGRAVFQAKKRVLEPLGLVEEPVKTAPGKKRPVEHSPVEPDSSSGTGKAGQQPARKRLNFGQTGDADSVPDPQPLGQPPAAPSGLGTNTMATGSGAPMADNNEGADGVGNSSGNWHCDSTWMGDRVITTSTRTWALPTYNNHLYKQISSQSGASNDNHYFGYSTPWGYFDFNRFHCHFSPRDWQRLINNNWGFRPKRLNFKLFNIQVKEVTQNDGTTTIANNLTSTVQVFTDSEYQLPYVLGSAHQGCLPPFPADVFMVPQYGYLTLNNGSQAVGRSSFYCLEYFPSQMLRTGNNFTFSYTFEDVPFHSSYAHSQSLDRLMNPLIDQYLYYLSRTNTPSGTTTQSRLQFSQAGASDIRDQSRNWLPGPCYRQQRVSKTSADNNNSEYSWTGATKYHLNGRDSLVNPGPAMASHKDDEEKFFPQSGVLIFGKQGSEKTNVDIEKVMITDEEEIRTTNPVATEQYGSVSTNLQRGNRQAATADVNTQGVLPGTVWQDRDVYLQGPIWAKIPHTDGHFHPSPLMGGFGLKHPPPQILIKNTPVPANPSTTFSAAKFASFITQYSTGQVSVEIEWELQKENSKRWNPEIQYTSNYNKSVNVDFTVDTNGVYSEPRPIGTRYLTRNL

SEQ ID NO: 190 - protein, 735 aa, Artificial Sequence
  Synthetic Polypeptide
MAADGYLPDWLEDTLSEGIRQWWKLKPGPPPPKPAERHKDDSRGLVLPGYKYLGPFNGLDKGEPVNEADAAALEHDKAYDRQLDSGDNPYLKYNHADAEFQERLKEDTSFGGNLGRAVFQAKKRVLEPLGLVEEPVKTAPGKKRPVEHSPVEPDSSSGTGKAGQQPARKRLNFGQTGDADSVPDPQPLGQPPAAPSGLGTNTMATGSGAPMADNNEGADGVGNSSGNWHCDSTWMGDRVITTSTRTWALPTYNNHLYKQISSQSGASNDNHYFGYSTPWGYFDFNRFHCHFSPRDWQRLINNNWGFRPKRLNFKLFNIQVKEVTQNDGTTTIANNLTSTVQVFTDSEYQLPYVLGSAHQGCLPPFPADVFMVPQYGYLTLNNGSQAVGRSSFYCLEYFPSQMLRTGNNFTFSYTFEDVPFHSSYAHSQSLDRLMNPLIDQYLYYLSRTNTPSGTTTQSRLQFSQAGASDIRDQSRNWLPGPCYRQQRVSKTSADNNNSEYSWTGATKYHLNGRDSLVNPGPAMASHKDDEEKFFPQSGVLIFGKQGSEKTNVDIEKVMVTDEEEIRTTNPVATEQYGSVSTNLQRGNRQAATADVNTQGVLPGTVWQDRDVYLQGPIWAKIPHTDGHFHPSPLMGGFGLKHPPPQILIKNTPVPANPSTTFSAAKFASFITQYSTGQVSVEIEWELQKENSKRWNPEIQYTSNYNKSVNVDFTVDTNGVYSEPRPIGTRYLTRNL

SEQ ID NO: 191 - protein, 735 aa, Artificial Sequence
  Synthetic Polypeptide
MAADGYLPDWLEDTLSEGIRQWWKLKPGPPPPKPAERHKDDSRGLVLPGYKYLGPFNGLDKGEPVNEADAAALEHDKAYDRQLDSGDNPYLKYNHADAEFQERLKEDTSFGGNLGRAVFQAKKRVLEPLGLVEEPVKTAPGKKRPVEHSPVEPDSSSGTGKAGQQPARKRLNFGQTGDADSVPDPQPLGQPPAAPSGLGTNTMATGSGAPMADNNEGADGVGNSSGNWHCDSTWMGDRVITTSTRTWALPTYNNHLYKQISSQSGASNDNHYFGYSTPWGYFDFNRFHCHFSPRDWQRLINNNWGFRPKRLNFKLFNIQVKEVTQNDGTTTIANNLTSTVQVFTDSEYQLPYVLGSAHQGCLPPFPADVFMAPQYGYLTLNNGSQAVGRSSFYCLEYFPSQMLRTGNNFTFSYTFEDVPFHSSYAHSQSLDRLMNPLIDQYLYYLSRTNTPSGTTTQSRLQFSQAGASDIRDQSRNWLPGPCYRQQRVSKTSADNNNSEYSWTGATKYHLNGRDSLVNPGPAMASHKDDEEKFFPQSGVLIFGKQGSEKTNVDIEKVMITDEEEIRTTNPVATEQYGSVSTNLQRGNRQAATADVNTQGVLPGTVWQDRDVYLQGPIWAKIPHTDGHFHPSPLMGGFGLKHPPPQILIKNTPVPANPSTTFSAAKFASFITQYSTGQVSVEIEWELQKENSKRWNPEIQYTSNYNKSVNVDFTVDTNGVYSEPRPIGTRYLTRNL

SEQ ID NO: 192 - protein, 735 aa, Artificial Sequence
  Synthetic Polypeptide
MAADGYLPDWLEDTLSEGIRQWWKLKPGPPPPKPAERHKDDSRGLVLPGYKYLGPFNGLDKGEPVNEADAAALEHDKAYDRQLDSGDNPYLKYNHADAEFQERLKEDTSFGGNLGRAVFQAKKRVLEPLGLVEEPVKTAPGKKRPVEHSPVEPDSSSGTGKTGQQPARKRLNFGQTGDADSVPDPQPLGQPPAAPSGLGTNTMATGSGAPMADNNEGADGVGNSSGNWHCDSTWMGDRVITTSTRTWALPTYNNHLYKQISSQSGASNDNHYFGYSTPWGYFDFNRFHCHFSPRDWQRLINNNWGFRPKRLNFKLFNIQVKEVTQNDGTTTIANNLTSTVQVFTDSEYQLPYVLGSAHQGCLPPFPADVFMVPQYGYLTLNNGSQAVGRSSFYCLEYFPSQMLRTGNNFTFSYTFEDVPFHSSYAHSQSLDRLMNPLIDQYLYYLSRTNTPSGTTTQSRLQFSQAGASDIRDQSRNWLPGPCYRQQRVSKTSADNNNSEYSWTGATKYHLNGRDSLVNPGPAMASHKDDEEKFFPQSGVLIFGKQGSEKTNVDIEKVMITDEEEIRTTNPVATEQYGSVSTNLQRGNRQAATADVNTQGVLPGMVWQDRDVYLQGPIWAKIPHTDGHFHPSPLMGGFGLKHPPPQILIKNTPVSANPSTTFSAAKFASFITQYSTGQVSVEIEWELQKENSKRWDPEIQYTSNYNKSVNVDFTVDTNGVYSEPRPIGTRYLTRNL

SEQ ID NO: 193 - protein, 734 aa, Artificial Sequence
  Synthetic Polypeptide
MAADGYLPDWLEDTLSEGIRQWWKLKPGPPPPKPAERHKDDSRGLVLPGYKYLGPFNGLDKGEPVNEADAAALEHDKAYDRQLDSGDNPYLKYNHADAEFQERLKEDTSFGGNLGRAVFQAKKRVLEPLGLVEEPVKTAPGKKRPVEHSPVEPDSSSGTGKAGQQPARKRLNFGQTGDADSVPDPQPLGQPPAAPSGLGTNTMATGSGAPMADNNEGADGVGNSSGNWHCDSTWMGDRVITTSTRTWALPTYNNHLYKQISSQSGASNDNHYFGYSTPWGYFDFNRFHCHFSPRDWQRLINNWGFRPKRLNFKLFNIQVKEVTQNDGTTTIANNLTSTVQVFTDSEYQLPYVLGSAHQGCLPPFPADVFMVPQYGYLTLNNGSQAVGRSSFYCLEYFPSQMLRTGNNFTFSYTFEDVPFHSSYAHSQSLDRLMNPLIDQYLYYLSRTNTPSGTTTQSRLQFSQAGASDIRDQSRNWLPGPCYRQQRVSKTSADNNNSEYSWTGATKYHLNGRDSLVNPGPAMASHKDDEEKFFPQSGVLIFGKQGSEKTNVDIEKVMITDEEEIRTTNPVATEQYGSVSTNLQRGNRQAATADVNTQGVLPGTVWQDRDVYLQGPIWAKIPHTDGHFHPSPLMGGFGLKHPPPQILIKNTPVPANPSTTFSAAKFASFITQYSTGQVSVEIEWELQKENSKRWNPEIQYTSNYNKSVNVDFTVDTNGVYSEPRPIGTRYLTRNL

SEQ ID NO: 194 - protein, 735 aa, Artificial Sequence
  Synthetic Polypeptide
MAADGYLPDWLEDTLSEGIRQWWKLKPGPPPPKPAERHKDDSRGLVLPGYKYLGPFNGLDKGEPVNEADAAALEHDKAYDRQLDSGDNPYLKYNHADAEFQERLKEDTSFGGNLGRAVFQAKKRVLEPLGLVEEPVKTAPGKKRPVEHSPVEPDSSSGTGKAGQQPARKRLNFGQTGDADSVPDPQPLGQPPAAPSGLGTNTMATGSGAPMADNNEGADGVGNSSGNWHCDSTWMGDRVITTSTRTWALPTYNNHLYKQISSQSGASNDNHYFGYSTPWGYFDFNRFHCHFSPRDWQRLINNNWGFRPKRLNFKLFNIQVKEVTQNDGTTTIANNLTSTVQVFTDSEYQLPYVLGSAHQGCLPPFPADVFMVPQYGYLTLNNGSQAVGRSSFYCLEYFPSQMLRTGNNFTFSYTFEDVPFHSSYAHSQSLDRLMNPLIDQYLYYLSRTNTPSGTTTQSRLQFSQAGASDIRDQSRNWLPGPCYRQQRVSKTSADNNNSEYSWTGATKYHLNGRDSLVNPGPAMASHKDDEEKFFPQSGVLIFGKQGSEKTNVDIEKVMITDEEEIRTTNPVATEQYGSVSTNLQRGNRQAATADVNTQGVLPGTVWQDRDVYLQGPIWAKIPHTDGHFHPSPLMGGFGLKHPPPQILIKNTPVPANPSTTFSAAKFASFITQYSTGQVSVEIEWELQKENGKRWNPEIQYTSNYNKSVNVDFTVDTNGVYSEPRPIGTRYLTRNL

SEQ ID NO: 195 - protein, 735 aa, Artificial Sequence
  Synthetic Polypeptide
MAADGYLPDWLEDTLSEGIRQWWKLKPGPPPPKPAERHKDDSRGLVLPGYKYLGPFNGLDKGEPVNEADAAALEHDKAYDRQLDSGDNPYLKYNHADAEFQERPKEDTSFGGNLGRAVFQAKKRVLEPLGLVEEPVKTAPGKKRPVEHSPVEPDSSSGTGKAGQQPARKRLNFGQTGDADSVPDPQPLGQPPAAPSGLGTNTMATGSGAPMADNNEGADGVGNSSGNWHCDSTWMGDRVITTSTRTWALPTYNNHLYKQISSQSGASNDNHYFGYSTPWGYFDFNRFHCHFSPRDWQRLINNNWGFRPKRLNFKLFNIQVKEVTQNDGTTTIANNLTSTVQVFTDSEYQLPYVLGSAHQGCLPPFPADVFMVPQYGYLTLNNGSQAVGRSSFYCLEYFPSQMLRTGNNFTFSYTFEDVPFHSSYAHSQSLDRLMNPLIDQYLYYLSRTNTPSGTTTQSRLQFSQAGASDIRDQSRNWLPGPCYRQQRVSKTSADNNNSEYLWTGATKYHLNGRDSLVNPGPAMASHKDDEEKFFPQSGVLIFGKQGSEKTNVDIEKVMITDEEEIRTTNPVATEQYGSVSTNLQRGNRQAATADVNTQGVLPGTVWQDRDVYLQGPIWAKIPHTDGHFHPSPLMGGFGLKHPPPQILIKNTPVPANPSTTFSAAKFASFITQYSTGQVSVEIEWELQKENSKRWNPEIQYTSNYNKSVNVDFTVDTNGVYSEPRPIGTRYLTRNL

SEQ ID NO: 196 - protein, 735 aa, Artificial Sequence
  Synthetic Polypeptide
MAADGYLPDWLEDTLSEGIRQWWKLKPGPPPPKPAERHKDDSRGLVLPGYKYLGPFNGLDKGEPVNEADAAALEHDKAYDRQLDSGDNPYLKYNHADAEFQERLKEDTSFGGNLGRAVFQAKKRALEPLGLVEEPVKTAPGKKRPVEHSPVEPDSSSGTGKAGQQPARKRLDFGQTGDADSVPDPQPLGQPPAAPSGLGTNTMATGSGAPMADNNEGADGVGNSSGNWHCDSTWMGDRVITTSTRTWALPTYNNHLYKQISSQSGASNDNHYFGYSTPWGYFDFNRFHCHFSPRDWQRLINNNWGFRPKRLNFKLFNIQVKEVTQNDGTTTIANNLTSTVQVFTDSEYQLPYVLGSAHQGCLPPFPADVFMVPQYGYLTLNNGSQAVGRSSFYCLEYFPSQMLRTGNNFTFSYTFEDVPFHSSYAHSQSLDRLMNPLIDQYLYYLSRTNTPSGTTTQSRLQFSQAGASDIRDQSRNWLPGPCYRQQRVSKTSADNNNSEYSWTGATKYHLNGRDSLVNPGPAMASHKDDEEKFFPQSGVLIFGKQGSEKTNVDIEKVMITDEEEIRTTNPVATEQYGSVSTNLQRGNRQAATADVNTQGVLPGMVWQDRDVYLQGPIWAKIPHTDGHFHPSPLMGGFGLKHPPPQILIKNTPVPANPSTTFSAAKFASFITQYSTGQVSVEIEWELQKENSKRWNPEIQYTSNYNKSVNVDFTVDTNGVYSEPRPIGTRYLTRNL

SEQ ID NO: 197 - protein, 735 aa, Artificial Sequence
  Synthetic Polypeptide
MAADGYLPDWLEDTLSEGIRQWWKLKPGPPPPKPAERHKDDSRGLVLPGYKYLGPFNGLDKGEPVNEADAAALEHDKAYDRQLDSGDNPYLKYNHADAEFQERLKEDTSFGGNLARAVFQAKKRVLEPLGLVEEPVKTAPGKKRPVEHSPAEPDSSSGTGKAGQQPARKRLNFGQTGDADSVPDPQPLGQPPAAPSGLGTNTMATGSGAPMADNNEGADGVGNSSGNWHCDSTWMGDRVITTSTRTWALPTYNNHLYKQISSQSGASNDNHYFGYSTPWGYFDFNRFHCHFSPRDWQRLINNNWGFRPKRLSFKLFNIQVKEVTQNDGTTTIANNLTSTVQVFTDSEYQLPYVLGSAHQGCLPPFPADVFMVPQYGYLTLNNGSQAVGRSSFYCLEYFPSQMLRTGNNFTFSYTFEDVPFHSSYAHSQSLDRLMNPLIDQYLYYLSKTNAPSGTTTMSRLQFSQAGASDIRDQSRNWLPGPCYRQQRVSKTAADNNNSDYSWTGATKYHLNGRDSLVNPGPAMASHKDDEEKYFPQSGVLIFGKQGSNKTNVDIEKVMITDEEEIRTTNPVATEQYGSVSTNLQSGNTQAATSDVNTQGVLPGMVWQDRDVYLQGPIWAKIPHTDGHFHPSPLMGGFGLKHPPPQILIKNTPVPANPSTTFSAAKFASFITQYSTGQVSVEIEWELQKENSKRWNPEIQYTSNYNKSVNVDFTVDTNGVYSEPRPIGTRYLTRNL

SEQ ID NO: 198 - protein, 735 aa, Artificial Sequence
  Synthetic Polypeptide
MAADGYLPDWLEDTLSEGIRQWWKLKPGPPPPKPAERHKDDSRGLVLPGYKYLGPFNGLDKGEPVNEADAAALEHDKAYDRQLDSGDNPYLKYNHADAEFQERLKEDTSFGGNLGRAVFQAKKRVLEPLGLVEEPVKTAPGKKRPVEHSPVEPDSSSGTGKAGQQPARKRLNFGQTGDADSVPDPQPLGQPPAAPSGLGTNTMATGSGAPMADNNEGADGVGNSSGNWHCDSTWMGDRVITTSTRTWALPTYNNHLYKQISSQSGASNDNHYFGYSTPWGYFDFNRFHCHFSPRDWQRLINNNWGFRPKRLNFKLFNIQVKEVTQNDGTTTIANNLTSTVQVFTDSEYQLPYVLGSAHQGCLPPFPADVSMVPQYGYLTLNNGSQAVGRSSFYCLEYFPSQMLRTGNNFTFSYTFEDVPFHSSYAHSQSLDRLMNPLIDQYLYYLSRTNTPSGTTTQSRLQFSQAGASDIRDQSRNWLPGPCYRQQRVSKTSADNNNSEYSWTGATKYHLNGRDSLVNPGPAMASHKDDEEKFFPQSGVLIFGKQGSEKTNVDIEKVMITDEEEIRTTNPVATEQYGSVSTNLQRGNRQAATADVNTQGVLPGTVWQDRDVYLQGPIWAKIPHTDGHFHPSPLMGGFGLKHPPPQILIKNTPVPANPSTTFSAAKFASFITQYSTGQVSVEIEWELQKENSKRWNPEIQYTSNYNKSVNVDFTVDTNGVYSEPRPIGTRYLTRNL

SEQ ID NO: 199 - protein, 735 aa, Artificial Sequence
  Synthetic Polypeptide
MAADGYLPDWLEDTLSEGIRQWWKLKPGPPPPKPAERHKDDSRGLTLPGYKYLGPFNGLDKGEPVNEADAAALEHDKAYDRQLDSGDNPYLKYNHADAEFQERLKEDTSFGGNLARAVFQAKKRVLEPLGLVEEPVKTAPGKKRPVEHSPAELDSSSGTGKSGQQPARKRLNFGQTGDADSVPDPQPLGQPPAAPSGLGTNTMASGSGAPMADNNEGADGVGNSSGNWHCDSTWMGDRVITTSTRTWALPTYNNHLYKQISSQSGASNDNHYFGYSTPWGYFDFNRFHCHFSPRDWQRLINNNWGFRPKRLNFKLFNIQVKEVTQNDGTTTIANNLTSTVQVFTDSEYQLPYVLGSAHQGCLPPFPADVFMVPQYGYLTLNNGSQAVGRSSFYCLEYFPSQMLRTGNNFTFSYTFEDVPFHSSYAHSQSLDRLMNPLIDQYLYYLSRTNTPSGTTTQSRLQFSQAGASDIRDQSRNWLPGPCYRQQRVSKTAADNNNSDYSWTGATKYHLNGRDSLVNPGTAMASHKDDEEKYFPQSGVLIFGKQDSGKTNVDIEKVMITDEEEIRTTNPVATEQYGSVSTNLQSGNTQAATSDVNTQGVLPGMVWQDRDVYLQGPIWAKIPHTDGHFHPSPLMGGFGPKHPPPQILIKNTPVPANPSTTFSAAKFASFITQYSTGQVSVEIEWELQKENSKRWNPEIQYTSNYNKSVNVDFTVDTNGVYSEPRPIGTRYLTRNL

SEQ ID NO: 200 - protein, 735 aa, Artificial Sequence
  Synthetic Polypeptide
MAADGYLPDWLEDTLSEGIRQWWKLKPGPPPPKPAERHKDDSRGLVLPGYKYLGPFNGLDKGEPVNEADAAALEHDKAYDRQLDSGDNPYLKYNHADAEFQERLKEDTSFGGNLARAVFQAKKRVLEPLGLVEEPVKTAPGKKRPVEHSPAEPDSSSGTGESGQQPARKRLNFGQTGDADSVPDPQPLGQPPAAPSGLGTNTMASGSGAPMADNNEGADGVGNSSGNWHCDSTWMGDRVITTSTRTWALPTYNNHLYKQISSQSGASNDNHYFGYSTPWGYFDFNRFHCHFSPRDWQRLINNNWGFRPKRLNFKLFNIQVKEVTQNDGTTTIANNLTSTVQVFTDSEYQLPYVLGSAHQGCLPPFPADVFMVPQYGYLTLNNGSQAVGRSSFYCLEYFPSQMLRTGNNFTFSYTFEDVPFHSSYAHSQSLDRLMNPLIDQYLYYLSRTNTPSGTTTQSRLQFSQAGASDIRDQSRNWLPGPCYRQQRVSKTAADNNNSDYSWTGATKYHLNGRDSLVNPGTAMASHKDDEEKYFPQSGVLIFGKQDSGKTNVDIEKVMITDEEEIRTTNPVATEQYGSVSTNLQSGNTQAATSDVNTQGVLPGMVRQDRDVYLQGPIWAKIPHTDGHFHPSPLMGGFGLKHPPPQILIKNTPVPANPSTTFSAAKFASFITQYSTGQVSVEIEWEPQKENSKRWNPEIQYTSNYNKSVNVDFTVDTNGVYSEPRPIGTRYLTRNL

SEQ ID NO: 201 - protein, 735 aa, Artificial Sequence
  Synthetic Polypeptide
MAADGYLPDWLEDTLSEGIRQWWKLKPGPPPPKPAERHKDDSRGLALPGYKYLGPFNGLDKGEPVNEADAAALEHDKAYDRQLDSGDNPYLKYNHADAEFQERLKEDTSFGGNLARAVFQAKKRVLEPLGLVEEPVKTAPGKKRPVEHSPAELDSSSGTGKSGQQPARKRLNFGQTGDADSVPDPQPLGQPPAAPSGLGTNTMASGSGAPMADNNEGADGVGNSSGNWHCDSTWMGDRVITTSTRTWALPTYNNHLYKQISSQSGASNDNHYFGYSTPWGYFDFNRFHCHFSPRDWQRLINNNWGFRPKRLNFKLFNIQVKEVTQNDGTTTIANNLTSTVQVFTDSEYQLPYVLGSAHQGCLPPFPADVFMVPQYGYLTLNNGSQAVGRSSFYCLEYFPSQMLRTGNNFTFSYTFEDVPFHSSYAHSQSLDRLMNPLIDQYLYYLSRTNTPSGTTTQSGLQFSQAGASDIRDQSRNWLPGPCYRQQRVSKTAADNNNSDYSWTGATKYHLNGRDSLVNPGTAMASHKDDEEKYFPQSGVLIFGKQDSGKTNVDIEKVMITDEEEIRTTNPVATEQYGSVSTNLQSGNTQAATSDVNTQGVLPGMVWQDRDVYLQGPIWAKIPHTDGHFHPSPLMGGFGPKHPPPQILIKNTPVPANPSTTFSAAKFASFITQYSTGQVSVEIEWELQKENSKRWNPEIQYTSNYNKSVNVDFTVDTNGVYSEPRPIGTRYLTRNL

SEQ ID NO: 202 - protein, 735 aa, Artificial Sequence
  Synthetic Polypeptide
MAADGYLPDWLEDTLSEGIRQWWKLKPGPPPPKPAERHKDDSRGLVLPGYKYLGPFNGLDKGEPVNEADAAALEHDKAYDRQLDSGDNPYLKYNHADAEFQERLKEDTSFGGNLARAVFQAKKRVLEPLGLVEEPVKTAPGKKRPVEHSPAEPDSSSGTGKSGQQPARKRLNFGQTGDADSVPDPQPLGQPPAAPSGLGTNTMASGSGAPMADNNEGADGVGNSSGNWHCDSTWMGDRVITTSTRTWALPTYNNHLYKQISSQSGASNDNHYFGYSTPWGYFDFNRFHCHFSPRDWQRLINNNWGFRPKRLNFKLFNIQVKEVTQNDGTTTVANNLTSTVQVFTDSEYQLPYVLGSAHQGCLPPFPADVFMVPQYGYLTLNNGSQAVGRSSFYCLEYFPSQMLRTGNNFTFSYTFEDVPFHSSYAHSQSLDRLMNPLIDQYLYYLSRTNTPSGTTTQSRLQFSQAGASDIRDQSRNWLPGPCYRQQRVSKTAADNNNSDYSWTGATKYHLNGRDSLVNPGTAMASHKDDEEKYFPQSGVLIFGKQDSGKTNVDIEKVMITDEEEIRTTNPVATEQYGSVSTNLQSGNTQAATSDVNTQGVLPGMVRQDRDVYLQGPIWAKIPHTDGHFHPSPLMGGFGLKHPPPQILIKNTPVPANPSTTFSAAKFASFITQYSTGQVSVEIEWEPQKENSKRWNPEIQYTSNYNKSVNVDFTVDTNGVYSEPRPIGTRYLTRNL

SEQ ID NO: 203 - protein, 735 aa, Artificial Sequence
  Synthetic Polypeptide
MAADGYLPDWLEDTLSEGIRQWWKLKPGPPPPKPAERHKDDSRGLVLPGYKYLGPFNGLDKGEPVNEADAAALEHDKAYDRQLDSGDNPYLKYNHADAEFQERLKEDTSFGGNLARAVFQAKKRVLEPLGLVEEPVKTAPGKKRPVEHSPAEPDSSSGTGKSGQQPARKRLNFGQTGDADSVPDPQPLGQPPAAPSGLGTNTMASGSGAPMADNNEGADGVGNSSGNWHCDSTWMGDRVITTSTRTWALPTYNNHLYKQISSQSGASNDNHYFGYSTPWGYFDFNRFHCHFSPRDWQRLINNNWGFRPKRLNFKLFNIQVKEVTQNDGTTTIANNLTSTVQVFTDSEYQLPYVLGSAHQGCLPPFPADVFMVPQYGYLTLNNGSQAVGRSSFYCLEYFPSQMLRTGNNFTFSYTFEDVPFHSSYAHSQSLDRLMNPLIDQYLYYLSRTNTPSGTTTQSRLQFSQAGASDIRDQSRNWLPGPCYRQQRVSKTAADNNNSDYSWTGATKYHLNGRDSLVNPGTAMASHKDDEEKYFPQGGVLIFGKQDSGKTNVDIEKVMITDEEEIRTTNPVATEQYGSVSTNLQSGNTQAATSDVNTQGVLPGMVRQDRDVYLQGPIWAKIPHTDGHFHPSPLMGGFGLKHPPPQILIKNTPVPANPSTTFSAAKFASFITQYSTGQVSVEIEWEPQKENSKRWNPEIQYTSNYNKSVNVDFTVDTNGVYSEPRPIGTRYLTRNL

SEQ ID NO: 204 - protein, 735 aa, Artificial Sequence
  Synthetic Polypeptide
MAADGYLPDWLEDTLSEGIRQWWKLKPGPPPPKPAERHKDDSRGLALPGYKYLGPFNGLDKGEPVNEADAAALEHDKAYDRQLDSGDNPYLKYNHADAEFQERLKEDTSFGGNLARAVFQAKKRVLEPLGLVEEPVKTAPGKKRPVEHSPAELDSSSGTGKSGQQPARKRLNFGQTGDADSVPDPQPLGQPPAAPSGLGTNTMASGSGAPMADNNEGADGVGNSSGNWHCDSTWMGDRVITTSTRTWALPTYNNHLYKQISSQSGASNDNHYFGYSTPWGYFDFNRFHCHFSPRDWQRLINNNWGFRPKRLNFKLFNIQVKEVTQNDGTTTIANNLTSTVQVFTDSEYQLPYVLGSAHQGCLPPFPADVFMVPQYGYLTLNNGSQAVGRSSFYCLEYFPSQMLRTGNNFTFSYTFEDVPFHSSYAHSQSLDRLMNPLIDQYLYYLSRTNTPSGTTTQSRLQFSQAGASDIRDQSRNWLPGPCYRQQRVSKTAADNNNSDYSWTGATKYHLNGRDSLVNPGTAMAGHKDDEEKYFPQSGVLIFGKQDSGKTNVDIEKVMITDEEEIRTTNPVATEQYGSVSTNLQSGNTQAATSDVNTQGVLPGMVWQDRDVYLQGPIWAKIPHTDGHFHPSPLMGGFGPKHPPPQILIKNTPVPANPSTTFSAAKFASFITQYSTGQVSVEIEWELQKENSKRWNPEIQYTSNYNKSVNVDFTVDTNGVYSEPRPIGTRYLTRNL

SEQ ID NO: 205 - protein, 735 aa, Artificial Sequence
  Synthetic Polypeptide
MAADGYLPDWLEDTLSEGIRQWWKLKPGPPPPKPAERHKDDSRGLALPGYKYLGPFNGLDKGEPVNEADAAALEHDKAYDRQLDSGDNPYLKYNHADAEFQERLKEDTSFGGNLARAVFQAKKRVLEPLGLVEEPVKTAPGKKRPVEHSPAELDSSSGTGKSGQQPARKRLNFGQTGDADSVPDPQPLGQPPAAPSGLGTNTMASGSGAPMADNNEGADGVGNSSGNWHCDSTWMGDRVITTSTRTWALPTYNNHLYKQISSQSGASNDNHYFGYSTPWGYFDFNRFHCHFSPRDWQRLINNNWGFRPKRLNFKLFNIQVKEVTQNDGTTTIANNLTSTVQVFTDSEYQLPYVLGSAHQGCLPPFPADVFMVPQYGYLTLNNGSQAVGRSSFYCLEYFPSQMLRTGNNFTFSYTFEDVPFHSSYAHSQSLDRLMNPLIDQYLYYLSRTNTPSGTTTQSRLQFSQAGASDIRDQSRNWLPGPCYRQQRVSKTAADNNNSDYSWTGATKYHLNGRDSLVNPGTAMASHKDDEEKYFPQSGVLIFGKQDSGKTNVDIEKVMITDEEEIRTTNPVATEQYGSVSTNLQSGNTQAATSDVNTQGVLPGMVWQDRDVYLQGPIWAKIPHTDGHFHPSPLMGGFGPKHPPPQILIKNTPVPANPSTTFSAAKFASFITQYSTGQVSVEIEWELQKENSKRWNPEIQYTSNYNKSVNVDFTVDTNGVYSEPRPIGTRYLTRNL

SEQ ID NO: 206 - protein, 735 aa, Artificial Sequence
  Synthetic Polypeptide
MAADGYLPDWLEDTLSEGIRQWWKLKPGPPPPKPAERHKDDSRGLVLPGYKYLGPFNGLDKGEPVNEADAAALEHDKAYDRQLDSGDNPYLKYNHADAEFQERLKEDTSFGGNLARAVFQAKKRVLEPLGLVEEPVKTAPGKKRPVEHSPAEPDSSSGTGKSGQQPARKRLNFGQTGDADSVPGPQPLGQPPAAPSGLGTNTMASGSGAPMADNNEGADGVGNSSGNWHCDSTWMGDRVITTSTRTWALPTYNNHLYKQISSQSGASNDNHYFGYSTPWGYFDFNRFHCHFSPRDWQRLINNNWGFRPKRLNFKLFNIQVKEVTQNDGTTTVANNLTSTVQVFTDSEYQLPYVLGSAHQGCLPPFPADVFMVPQYGYLTLNNGSQAVGRSSFYCLEYFPSQMLRTGNNFTFSYTFEDVPFHSSYAHSQSLDRLMNPLIDQYLYYLSRTNTPSGTTTQSRLQFSQAGASDIRDQSRNWLPGPCYRQQRVSKTAADNNNSDYSWTGATKYHLNGRDSLVNPGTAMASHKDDEEKYFPQSGVLIFGKQDSGKTNVDIEKVMITDEEEIRTTNPVATEQYGSVSTNLQSGNTQAATSDVNTQGVLPGMVRQDRDVYLQGPIWAKIPHTDGHFHPSPLMGGFGLKHPPPQILIKNTPVPANPSTTFSAAKFASFITQYSTGQVSVEIEWEPQKENSKRWNPEIQYTSNYNKSVNVDFTVDTNGVYSEPRPIGTRYLTRNL

SEQ ID NO: 207 - protein, 735 aa, Artificial Sequence
  Synthetic Polypeptide
MAADGYLPDWLEDTLSEGIRQWWKLKPGPPPPKPAERHKDDSRGLVLPGYKYLGPFNGLDKGEPVNEADAAALEHDKAYDRQLDSGDNPYLKYNHADAEFQERLKEDTSFGGNLARAVFQAKKRVLEPLGLVEEPVKTAPGKKRPVEHSPAEPDSSSGTGKSGQQPARKRLNFGQTGDADSVPDPQPLGQPPAAPSGLGTNTMASGSGAPMADNNEGADGVGNSSGNWHCDSTWMGDRVITTSTRTWALPTYNNHLYKQISSQSGASNDNHYFGYSTPWGYFDFNRFHCHFSPRDWQRLINNNWGFRPKRLNFKLFNIQVKEVTQNDGTTTIANNLTSTVQVFTDSEYQLPYVLGSAHQGCLPPFPADVFMVPQYGYLTLNNGSQAVGRSSFYCLEYFPSQMLRTGNNFTFSYTFEDAPFHSSYAHSQSLDRLMNPLIDQYLYYLSRTNTPSGTTTQSRLQFSQAGASDIRDQSRNWLPGPCYRQQRVSKTAADNNNSDYSWTGATKYHLNGRDSLVNPGTAMASHKDDEEKYFPQSGVLIFGKQDSGKTNVDIEKVMITDEEEIRTTNPVATEQYGSVSTNLQSGNTQAATSDVNTQGVLPGMVRQDRDVYLQGPIWAKIPHTDGHFHPSPLMGGFGLKHPPPQILIKNTPVPANPSTTFSAAKFASFITQYSTGQVSVEIEWEPQKENSKRWNPEIQYTSNYNKSVNVDFTVDTNGVYSEPRPIGTRYLTRNL

SEQ ID NO: 208 - protein, 735 aa, Artificial Sequence
  Synthetic Polypeptide
MAADGYLPDWLEDTLSEGIRQWWKLKPGPPPPKPAERHKDDSRGLVLPGYKYLGPFNGLDKGEPVNEADAAALEHDKAYDRQLDSGDNPYLKYNHADAEFQERLKEDTSFGGNLARAVFQAKKRVLEPLGLVEEPVKTAPGKKRPVEHSPAEPDSSSGTGKSGQQPARKRLNFGQTGDADSVPDPQPLGQPPAAPSGLGTNTMASGSGAPMADNNEGADGVGNSSGNWHCDSTWMGDRVIPTSTRTWALPTYNNHLYKQISSQSGASNDNHYFGYSTPWGYFDFNRFHCHFSPRDWQRLINNNWGFRPKRLNFKLFNIQVKEVTQNDGTTTIANNLTSTVQVFTDSEYQLPYVLGSAHQGCLPPFPADVFMVPQYGYLTLNNGSQAVGRSSFYCLEYFPSQMLRTGNNFTFSYTFEDVPFHSSYAHSQSLDRLMNPLIDQYLYYLSRTNTPSGTTTQSRLQFSQAGASDIRDQSRNWLPGPCYRQQRVSKTAADNNNSDYSWTGATKYHLNGRDSLVNPGTAMASHKDDEEKYFPQSGVLIFGKQDSGKTNVDIEKVMITDEEEIRTTNPVATEQYGSVSTNLQSGNTQAATSDVNTQGVLPGMVRQDRDVYLQGPIWAKIPHTDGHFHPSPLMGGFGLKHPPPQILIKNTPVPANPSTTFSAAKFASFITQYSTGQVSVEIEWEPQKENSKRWNPEIQYTSNYNKSVNVDFTVDTNGVYSEPRPIGTRYLTRNL

SEQ ID NO: 209 - protein, 735 aa, Artificial Sequence
  Synthetic Polypeptide
MAADGYLPDWLEDTLSEGIRQWWKLKPGPPPPKPAERHKDDSRGLVLPGYKYLGPFNGLDKGEPVNEADAAALEHDKAYDRQLDSGDNPYLKYNHADAEFQERLKEDTSFGGNLARAVFQAKKRVLEPLGLVEEPVKTAPGKKRPAEHSPAEPDSSSGTGKSGQQPARKRLNFGQTGDADSVPDPQPLGQPPAAPSGLGTNTMASGSGAPMADNNEGADGVGNSSGNWHCDSTWMGDRVITTSTRTWALPTYNNHLYKQISSQSGASNDNHYFGYSTPWGYFDFNRFHCHFSPRDWQRLINNNWGFRPKRLNFKLFNIQVKEVTQNDGTTTIANNLTSTVQVFTDSEYQLPYVLGSAHQGCLPPFPADVFMVPQYGYLTLNNGSQAVGRSSFYCLEYFPSQMLRTGNNFTFSYTFEDVPFHSSYAHSQSLDRLMNPLIDQYLYYLSRTNTPSGTTTQSRLQFSQAGASDIRDQSRNWLPGPCYRQQRVSKTAADNNNSDYSWTGATKYHLNGRDSLVNPGTAMASHKDDEEKYFPQSGVLIFGKQDSGKTNVDIEKVMITDEEEIRTTNPVATEQYGSVSTNLQSGNTQAATSDVNTQGVLPGMVRQDRDVYLQGPIWAKIPHTDGHFHPSPLMGGFGLKHPPPQILIKNTPVPANPSTTFSAAKFASFITQYSTGQVSVEIEWEPQKENSKRWNPEIQYTSNYNKSVNVDFTVDTNGVYSEPRPIGTRYLTRNL

SEQ ID NO: 210 - protein, 735 aa, Artificial Sequence
  Synthetic Polypeptide
MAADGYLPDWLEDTLSEGIRQWWKLKPGPPPPKPAERHKDDSRGLVLPGYKYLGPFNGLDKGEPVNEADAAALEHDKAYDRQLDSGDNPYLKYNHADAEFQERLKEDTSFGGNLARAVFQAKKRVLEPLGLVEEPVKTAPGKKRPVEHSPAEPDSSSGTGKSGQQPARKRLNFGQTGDADSVPDPQPLGQPPAAPSGLGTNTMASGSGAPMADNNEGADGVGNSSGNWHCDSTWMGDRVITTSTRTWALPTYNNHLYKQISSQSGASNDNHYFGYSTPWGYFDFNRFHCHFSPRDWQRLINNNWGFRPKRLNFKLFNIQVKEVTQNDGTTTIANNLTSTVQVFTDSEYQLPYVLGSAHQGCLPPFPADVFMVPQYGYLTLNNGSQAVGRSSFYCLEYFPSQMLRTGNNFTFSYTFEDVPFHSSYAHSQSLDRLMNPLIDQYLYYLSRTNTPSGTTTQSRLQFSQAGASDIRDQSRNWLPGPCYRQQRVSRTAADNNNSDYSWTGATKYHLNGRDSLVNPGTAMASHKDDEEKYFPQSGVLIFGKQDSGKTNVDIEKVMITDEEEIRTTNPVATEQYGSVSTNLQSGNTQAATSDVNTQGVLPGMVRQDRDVYLQGPIWAKIPHTDGHFHPSPLMGGFGLKHPPPQILIKNTPVPANPSTTFSAAKFASFITQYSTGQVSVEIEWEPQKENSKRWNPEIQYTSNYNKSVNVDFTVDTNGVYSEPRPIGTRYLTRNL

SEQ ID NO: 211 - protein, 735 aa, Artificial Sequence
  Synthetic Polypeptide
MAADGYLPDWLEDTLSEGIRQWWKLKPGPPPPKPAERHKDDSRGLVLPGYKYLGPFNGLDKGEPVNEADAAALEHDKAYDRQLDSGDNPYLKYNHADAEFQERLKEDTSFGGNLARAVFQAKKRVLEPLGLVEEPVKTAPGKKRPVEHSPAGPDSSSGTGKSGQQPARKRLNFGQTGDADSVPDPQPLGQPPAAPSGLGTNTMASGSGAPMADNNEGADGVGNSSGNWHCDSTWMGDRVITTSTRTWALPTYNNHLYKQISSQSGASNDNHYFGYSTPWGYFDFNRFHCHFSPRDWQRLINNNWGFRAKRLNFELFNIQVKEVTQNDGTTTIANNLTSTVQVFTDSEYQLPYVLGSAHQGCLPPFPADVFMVPQYGYLTLNNGSQAVGRSSFYCLEYFPSQMLRTGNNFTFSYTFEDVPFHSSYAHSQSLDRLMNPLIDQYLYYLSRTNTPSGTTTQSRLQFSQAGASDIRDQSRNWLPGPCYRQQRVSKTAADNNNSDYSWTGATKYHLNGRDSLVNPGTAMASHKDDEEKYFPQSGVLIFGKQDSGKTNVDIEKVMITDEEEIRTTNPVATEQYGSVSTNLQSGNTQAATSDVNTQGVLPGMVWQDRDVYLQGPIWAKIPHTDGHFHPSPLMGGFGLKHPPPQILIKSTPVPANPSTTFSAAKFASFITQYSTGQVSVEIEWELQKENSKRWNPEIQYTSNYNKSVNVDFTVDTNGVYSEPRPIGTRYLTRNL

SEQ ID NO: 212 - protein, 735 aa, Artificial Sequence
  Synthetic Polypeptide
MAADGYLPDWLEDTLSEGIRQWWKLKPGPPPPKPAERHKDDSRGLVLPGYKYLGPFNGLDKGEPVNEADAAALEHDKAYDRQLDSGDNPYLKYNHADAEFQERLKEDTSFGGNLARAVFQAKKRVLEPLGLVEEPVKTAPGKKRPVEHSPAEPDSSSGTGKSGQQPARKRLNFGQTGDADSVPDPQPLGQPPAAPSGLGTNTMASGSGAPMADNNEGADGVGNSSGNWHCDSTWMGDRVITTSTRTWALPTYNNHLYKQISSQSGASNDNHYFGYSTPWGYFDFNRFHCHFSPRDWQRLINNNWGFRPKRLNFKLFNIQVKEVTQNDGTTTIANNLTSTVQVFTDSEYQLPYVLGSAHQGCLPPFPADVFMVPQYGYLTLNNGSQAVGRSSFYCLEYFPSQMLRTGNNFTFSYTFEDVPFHSSYAHSQSLDRLMNPLIDQYLYYLSRTNTPSGTTTQSRLRFSQAGASDIRDQSRNWLPGPCYRQQRVSKTAADNNNSDYSWTGATKYHLNGRDSLVNPGTAMASHKDDEEKYFPQSGVLIFRKQDSGKTNVDIERVMITDEEEIRTTNPVATEQYGSVSTNLQSGNTQAATSDVNTQGVLPGMVWQDRDVYLQGPIWAKIPHTDGHFHPSPLMGGFGLKHPPPQILIKNTPVPANPSTTFSAAKFASFITQYSTGQVSVEIEWELQKENSKRWNPEIQYTSNYNKSVNVDFTVDTNGVYSEPRPIGTRYLTRNL

SEQ ID NO: 213 - protein, 735 aa, Artificial Sequence
  Synthetic Polypeptide
MAADGYLPDWLEDTLSEGIRQWWKLKPGPPPPKPAERHKDDSRGLVLPGYKYLGPFNGLDKGEPVNEADAAALEHDKAYDRQLDSGDNPYLKYNHADAEFQERLKEDTSFGGNLARAVFQAKKRVLEPLGLVEEPVKTAPGKKRPVEHSPAEPDSSSGTGKSGQQPARKRLNFGQTGDADSVPDPQPLGQPPAAPSGLGTNTMASGSGAPMADNNEGADGVGNSSGNWHCDSTWMGDRVITTSTRTWALPTYNNHLYKQISSQSGASNDNHYFGYSTPWGYFDFNRFHCHFSPRDWQRLINNNWGFRAKRLNFKLFNIQVKEVTQNDGTTTIANNLTSTVQVFTDSEYQLPYVLGSAHQGCLPPFPADVFMVPQYGYLTLNNGSQAVGRSSFYCLEYFPSQMLRTGNNFTFSYTFEDVPFHSSYAHSQSLDRLMNPLIDQYLYYLSRTNTPSGTTTQSRLRFSQAGASDIRDQSRNWLPGPCYRQQRVSKTAADNNNSDYSWTGATKYHLNGRDSLVNPGTAMASHKDDEEKYFPQSGVLIFGKQDSGKTNVDIERVMITDEEEIRTTNPVATEQYGSVSTNLQSGNTQAATSDVNTQGVLPGMVWQDRDVYLQGPIWAKIPHTDGHFHPSPLMGGFGLKHPPPQILIKNTPVPANPSTTFSAAKFASFITQYSTGQVSVEIEWELQKENSKRWNPEIQYTSNYNKSVNVDFTVDTNGVYSEPRPIGTRYLTRNL

SEQ ID NO: 214 - protein, 735 aa, Artificial Sequence
  Synthetic Polypeptide
MAADGYLPDWLEDTLSEGIRQWWKLKPGPPPPRPAERHQDDSRGLVLPGYKYLGPFNGLDKGEPVNEADAAALEHDKAYDRQLDSGDNPYLKYNHADAEFQERLKEDTSFGGNLGRAVFQAKKRVLEPLGLVEEPVKTAPGKKRPVEHSPAEPDSSSGTGKAGQQPARKRLNFGQTGDADSVPDPQPLGQPPAAPTSLGSTTMATGSGAPMADNNEGADGVGNSSGNWHCDSQWLGDRVITTSTRTWALPTYNNHLYKQISSQSGASNDNHYFGYSTPWGYFDFNRFHCHFSPRDWQRLINNNWGFRPKRLNFELFNIQVKEVTQNDGTTTIANNLTSTVQVFTDSEYQLPYVLGSAHQGCLPPFPADVFMVPQYGYLTLNNGSQAVGRSSFYCLEYFPSQMLRTGNNFTFSYTFEDVPFHSSYAHSQSLDRLMNPLIDQYLYYLSRTNTPSGTTTQSRLQFSQAGASDIRDQSRNWLPGPCYRQQRVSKTAADNNNSDYSWTGATKYHLNGRDSLVNPGTAMASHKDDEEKYFPQSGVLIFGKQDSGKTNVDIEKVMITDEEEIRTTNPVATEQYGSVSTNLQSGNTQAATSDVNTQGVLPGMVWQDRDVYLQGPIWAKIPHTDGHFHPSPLMGGFGLKHPPPQILIKSTPVPANPSTTFSAAKFASFITQYSTGQVSVEIEWELQKENSKRWNPEIQYTSNYNKSVNVDFTVDTNGVYSEPRPIGTRYLTRNL

SEQ ID NO: 215 - protein, 735 aa, Artificial Sequence
  Synthetic Polypeptide
MAADGYLPDWLEDTLSEGIRQWWKLKPGPPPPKPAERHKDDSRGLVLPGYKYLGPFNGLDKGEPVNEADAAALEHDKAYDRQLDSGDNPYLKYNHADAEFQERLKEDTSFGGNLARAVFQAKKRVLEPLGLVEEPVKTAPGKKRPVEHSPAGPDSSSGTGKSGQQPARKRLNFGQTGDADSVPDPQPLGQPPAAPSGLGTNTMASGSGAPMADNNEGADGVGNSSGNWHCDSTWMGDRVITTSTRTWALPTYNNHLYKQISSQSGASNDNHYFGYSTPWGYFDFNRFHCHFSPRDWHRLINNNWGFRPKRLNFELFNIQVKEVTQNDGTTTIANNLTSTVQVFTDSEYQLPYVLGSAHQGCLPPFPADVFMVPQYGYLTLNNGSQAVGRSSFYCLEYFPSQMLRTGNNFTFSYTFEDVPFHSSYARSQSLDRLMNPLIDQYLYYLSRTNTPSGTTTQSRLQFSQAGASDIRDQSRNWLPGPCYRQQRVSKTAADNNNSDYSWTGATKYHLNGRDSLVNPGTAMASHKDDEEKYFPQSGVLIFGKQDSGKTNVDIEKVMITDEEEIRTTNPVATEQYGSVSTNLQSGNTQAATSDVNTQGVLPGMVWQDRDVYLQGPIWAKIPHTDGHFHPSPLMGGFGLKHPPPQILIKSTPVPANPSTTFSAAKFASFITQYSTGQVSVEIEWELQKENSKRWNPEIQYTSNYNKSVNVDFTVDTNGVYSEPRPIGTRYLTRNL

SEQ ID NO: 216 - protein, 735 aa, Artificial Sequence
  Synthetic Polypeptide
MAADGYLPDWLEDTLSEGIRQWWKLKPGPPPPKPAERHKDDSRGLVLPGYKYLGPFNGLDKGEPVNEADAAALEHDKAYDRQLDSGDNPYLKYNHADAEFQERLKEDTSFGGNLARAVFQAKKRVLEPLGLVEEPVKTAPGKKRPVEHSPAGPDSSSGTGKSGQQPARKRLNFGQTGDADSVPDPQPLGQPPAAPSGLGTNTMASGSGAPMADNNEGADGVGNSSGNWHCDSTWMGDRVITTSTRTWALPTYNNHLYKQISSQSGASNDNHYFGYSTPWGYFDFNRFHCHFSPRDWQRLINNNWGFRPKRLNFELFNIQVKEVTQNDGTTTIANNLTSTVQVFTDSEYQLPYVLGSAHQGCLPPFPADVFMVPQYGYLTLNNGSQAVGRSSFYCLEYFPSQMLRTGNNFTFSYTFEDVPFHSSYAHSQSLDRLMNPLIDQYLYYLSRTNTPSGTTTQSRLQFSQAGASDIRDQSRNWLPGPCYRQQRVSKTAADNNNSDYSWTGATKYHLNGRDSLVNPGTAMASHKDDEEKYFPQSGVLIFGKQDSGKTNVDIEKVMITDEEEIRTTNPVATEQYGSVSTNLQSGNTQAATSDVNTQGVLPGMVWQDRDVYLQGPIWAKIPHTDGHFHPSPLMGGFGLKHPPPQILIKSTPVPANPSTTFSAAKFASFITQYSTGQVSVEIEWELQKENSKRWNPEIQYTSNYNKSVNVDFTVDANGVYSEPRPIGTRYLTRNL

SEQ ID NO: 217 - protein, 735 aa, Artificial Sequence
  Synthetic Polypeptide
MAADGYLPDWLEDTLSEGIRQWWKLKPGPPPPKPAERHKDDSRGLVLPGYKYLGPFNGLDKGEPVNEADAAALEHDKAYDRQLDSGDNPYLKYNHADAEFQERLKEDTSFGGNLARAVFQAKKRVLEPLGLVEEPVKTAPGKKRPVEHSPAGPDSSSGTGKSGQQPARKRLNFGQTGDADSVPDPQPLGQPPAAPSGLGTNTMASGSGAPMADNNEGADGVGNSSGNWHCDSTWMGDRVITTSTRTWALPTYNNHLYKQISSQSGASNDNHYFGYSTPWGYFDFNRFHCHFSPRDWQRLINNNLGFRAKRLNFELFNIQVKEVTQNDGTTTIANNLTSTVQVFTDSEYQLPYVLGSAHQGCLPPFPADVFMVPQYGYLTLNNGSQAVGRSSFYCLEYFPSQMLRTGNNFTFSYTFEDVPFHSSYAHSQSLDRLMNPLIDQYLYYLSRTNTPSGTTTQSRLQFSQAGASDIRDQSRNWLPGPCYRQQRVSKTAADNNNSDYSWTGATKYHLNGRDSLVNPGTAMASHKDDEEKYFPQSGVLIFGKQDSGKTNVDIEKVMITDEEEIRTTNPVATEQYGSVSTNLQSGNTQAATSDVNTQGVLPGMVWQDRDVYLQGPIWAKIPHTDGHFHPSPLMGGFGLKHPPPQILIKSTPVPANPSTTFSAAKFASFITQYSTGQVSVEIEWELQKENSKRWNPEIQYTSNYNKSVNVDFTVDTNGVYSEPRPIGTRYLTRNL

SEQ ID NO: 218 - protein, 735 aa, Artificial Sequence
  Synthetic Polypeptide
MAADGYLPDWLEDTLSEGIRQWWKLKPGPPPPKPAERHKDDSRGLVLPGYKYLGPFNGLDKGEPVNEADAAALEHDKAYDRQLDSGDNPYLKYNHADAEFQERLKEDTSFGGNLARAVFQAKKRVLEPLGLVEEPVKTAPGKKRPVEHSPAEPDSSSGTGKSGQQPARKRLNFGQTGDADSVPDPQPLGQPPAAPSGLGTNTMASGSGAPMADNNEGADGVGNSSGNWHCDSTWMGDRVITTSTRTWALPTYNNHLYKQISSQSGASNDNHYFGYSTPWGYFDFNRFHCHFSPRDWQRLINNNWGFRPKRLNFELFNIQVKEVTQNDGTTTIANNLTSTVQVFTDSEYQLPYVLGSAHQGCLPPFPADVFMVPQYGYLTLNNGSQAVGRSSFYCLEYFPSQMLRTGNNFTFSYTFEDVPFHSSYAHSQSLDRLMNPLIDQYLYYLSRTNTPSGTTTQSRLQFSQAGASDIRDQSRNWLPGPCYRQQRVSKTAADNNNSDYSWTGATKYHLNGRDSLVNPGTAMASHKDDEEKYFPQSGVLIFRKQDSGKTNVDIEKVMITDEEEIRTTNPVATEQYGSVSTNLQSGNTQAATSDVNTQGVLPGMVWQDRDVYLQGPIWAKIPHTDGHFHPSPLMGGFGLKHPPPQILIKSTPVPANPSTTFSAAKFASFITQYSTGQVSVEIEWELQKENSKRWNPEIQYTSNYNKSVNVDFTVDTNGVYSEPRPIGTRYLTRNL

SEQ ID NO: 219 - protein, 735 aa, Artificial Sequence
  Synthetic Polypeptide
MAADGYLPDWLEDTLSEGIRQWWKLKPGPPPPKPAERHQDDSRGLVLPGHKYLGPFNGLDKGEPVNEADAAALEHDKAYDRQLDSGDNPYLKYNHADAEFQERLKEDTSFGGNLGRAVFQAKKRVLEPLGLVEEPVKTAPGKKRPVEHSPAGPDSSSGTGKSGQQPARKRLNFGQTGDADSVPDPQPLGQPPAAPSGLGTNTMASGSGAPMADNNEGADGVGNSSGNWHCDSTWMGDRVITTSTRTWALPTYNNHLYKQISSQSGASNDNHYFGYSTPWGYFDFNRFHCHFSPRDWQRLINNNWGFRPKRLNFELFNIQVKEVTQNDGTTTIANNLTSTVQVFTDSEYQLPYVLGSAHQGCLPPFPADVFMVPQYGYLTLNNGSQAVGRSSFYCLEYFPSQMLRTGNNFTFSYTFEDVPFHSSYAHSQSLDRLMNPLIDQYLYYLSRTNTPSGTTTQSRLQFSQAGASDIRDQSRNWLPGPCYRQQRVSKTAADNNNSDYSWTGATKYHLNGRDSLVNPGTAMASHKDDEEKYFPQSGVLIFGKQDSGKTNVDIEKVMITDEEEIRTTNPVATEQYGSVSTNLQSGNTQAATSDVNTQGVLPGMVWQDRDVYLQGPIWAKIPHTDGHFHPSPLMGGFGLKHPPPQILIKSTPVPANPSTTFSAAKFASFITQYSTGQVSVEIEWELQKENSKRWNPEIQYTSNYNKSVNVDFTVDTNGVYSEPRPIGTRYLTRNL

SEQ ID NO: 220 - protein, 735 aa, Artificial Sequence
  Synthetic Polypeptide
MAADGYLPDWLEDTLSEGIRQWWKLKPGPPPPKPAERHKDDSRGLVLPGYKYLGPFNGLDKGEPVNEADAAALEHDKAYDRQLDSGDNPYLKYNHADAEFQERLKEDTSFGGNLARAVFQAKKRVLEPLGLVEEPVKTAPGKKRPVEHSPAGPDSSSGTGKSGQQPARKRLNFGQTGDADSVPDPQPLGQPPAAPSGLGTNTMASGSGAPMADNNEGADGVGNSSGNWHCDSTWMGDRVITTSTRTWALPTYNNHLYKQISSQSGASNDNHYFGYSTPWGYFDFNRFHCHFSPRDWHRLINNNWGFRPKRLNFELFNIQVKEVTQNDGTTTIANNLTSTVQVFTDSEYQLPYVLGSAHQGCLPPFPADVFMVPQYGYLTLNNGSQAVGRSSFYCLEYFPSQMLRTGNNFTFSYTFEDVPFHSSYAHSQSLDRLMNPLIDQYLYYLSRTNTPSGTTTQSRLQFSQAGASDIRDQSRNWLPGPCYRQQRVSKTAADNNNSDYSWTGATKYHLNGRDSLVNPGTAMASHKDDEEKYFPQSGVLIFGKQDSGKTNVDIEKVMITDEEEIRTTNPVATEQYGSVSTNLQSGNTQAATSDVNTQGVLPGMVWQDRDVYLQGPIWAKIPHTDGHFHPSPLMGGFGLKHPPPQILIKSTPVPANPSTTFSAAKFASFITQYSTGQVSVEIEWELQKENSKRWNPEIQYTSNYNKSVNVDFTVDTNGVYSEPRPIGTRYLTRNL

SEQ ID NO: 221 - protein, 735 aa, Artificial Sequence
  Synthetic Polypeptide
MAADGYLPDWLEDTLSEGIRQWWKLKPGPPPPKPAERHKDDSRGLVLPGYKYLGPFNGLDKGEPVNEADAAALEHDKAYDRQLDSGDNPYLKYNHADAEFQERLKEDTSFGGNLGRAVFQAKKRVLEPLGLVEEPVKTAPGKKRPVEHSPVEPDSSSGTGKAGQQPARKRLNFGQTGDADSVPDPQPLGQPPAAPSGLGTNTMATGSGAPMADNNEGADGVGNSSGNWHCDSTWMGDRVITTSTRTWALPTYNNHLYKQISSQSGASNDNHYFGYSTPWGYFDFNRFHCHFSPRDWQRLINNNWGFRPKRLSFKLFNIQVKEVTQNDGTTTIANNLTSTVQVFTDSEYQLPYVLGSAHQGCLPPFPADVFMVPQYGYLTLNNGSQAVGRSSFYCLEYFPSQMLRTGNNFTFSYTFEDVPFHSGYAHSQSLDRLMNPLIDQYLYYLSKTNAPSGTTTMSRLQFSQAGASDIRDQSRNWLPGPCYRQQRVSKTAADNNNSDYSWTGATKYHLNGRDSLVNPGPAMASHKDDEEKYFPQSGVLIFGKQGSNKTNVDIEKVMITDEEEIRTTNPVATEQYGSVSTNLQSGNTQAATSDVNTQGVLPGMVWQDRDVYLQGPIWAKIPHTDGHFHPSPLMGGFGLKHPPPQILIKNTPVPANPSTTFSAAKFASFITQYSTGQVSVEIEWELQKENSKRWNPEIQYTSNYNKSVNVDFTVDTNGVYSEPRPIGTRYLTRNL

SEQ ID NO: 222 - protein, 735 aa, Artificial Sequence
  Synthetic Polypeptide
MAADGYLPDWLEDTLSEGIRQWWKLKPGPPPPRPAERHQDDSRGLVLPGYKYLGPFNGLDKGEPVNEADAAALEHDKAYDRQLDSGDNPYLKYNHADAEFQERLKEDTSFGGNLGRAVFQAKKRVLEPLGLVEEPVKTAPGKKRPVEHSPAEPDSSSGTGKAGQQPARKRLNFGQTGDADSVPDPQPLGQPPAAPTSLGSTTMATGSGAPMADNNEGADGVGNSSGNWHCDSTWMGDRVITTSTRTWALPTYNNHLYKQISSQSGASNDNHYFGYSTPWGYFDFNRFHCHFSPRDWQRLINNNWGFRPKRLNFELFNIQVKEVTQNDGTTTIANNLTSTVQVFTDSEYQLPYVLGSAHQGCLPPFPADVFMVPQYGYLTLNNGSQAVGRSSFYCLEYFPSQMLRTGNNFTFSYTFEDVPFHSSYAHSQSLDRLMNPLIDQYLYYLSRTNTPSGTTTQSRLQFSQAGASDIRDQSRNWLPGPCYRQQRVSKTAADNNNSDYSWTGATKYHLNGRDSLVNPGTAMASHKDDEEKYFPQSGVLIFGKQDSGKTNVDIEKVMITDEEEIRTTNPVATEQYGSVSTNLQSGNTQAATSDVNTQGVLPGMVWQDRDVYLQGPIWAKIPHTDGHFHPSPLMGGFGLKHPPPQILIKSTPVPANPSTTFSAAKFASFITQYSTGQVSVEIEWELQKENSKRWNPEIQYTSNYNKSVNVDFTVDTNGVYSEPRPIGTRYLTRNL

SEQ ID NO: 223 - protein, 735 aa, Artificial Sequence
  Synthetic Polypeptide
MAADGYLPDWLEDTLSEGIRQWWKLKPGPPPPKPAERHQDDSRGLVLPGHKYLGPFNGLDKGEPVNEADAAALEHDKAYDRQLDSGDNPYLKYNHADAEFQERLKEDTSFGGNLGRAVFQAKKRVLEPLGLVEEPVKTAPGKKRPVEHSPAEPDSSSGTGKAGQQPARKRLNFGQTGDADSVPDPQPLGQPPAAPSGLGTNTMASGSGAPMADNNEGADGVGNSSGNWHCDSTWMGDRVITTSTRTWALPTYNNHLYKQISSQSGASNDNHYFGYSTPWGYFDFNRFHCHFSPRDWQRLINNNWGFRPKRLNFELFNIQVKEVTQNDGTTTIANNLTSTVQVFTDSEYQLPYVLGSAHQGCLPPFPADVFMVPQYGYLTLNNGSQAVGRSSFYCLEYFPSQMLRTGNNFTFSYTFEDVPFHSSYAHSQSLDRLMNPLIDQYLYYLSRTNTPSGTTTQSRLQFSQAGASDIRDQSRNWLPGPCYRQQRVSKTAADNNNSDYSWTGATKYHLNGRDSLVNPGTAMASHKDDEEKYFPQSGVLIFGKQDSGKTNVDIEKVMITDEEEIRTTNPVATEQYGSVSTNLQSGNTQAATSDVNTQGVLPGMVWQDRDVYLQGPIWAKIPHTDGHFHPSPLMGGFGLKHPPPQILIKSTPVPANPSTTFSAAKFASFITQYSTGQVSVEIEWELQKENSKRWNPEIQYTSNYNKSVNVDFTVDTNGVYSEPRPIGTRYLTRNL

SEQ ID NO: 224 - protein, 735 aa, Artificial Sequence
  Synthetic Polypeptide
MAADGYLPDWLEDTLSEGIRQWWKLKPGPPPPKPAERHKDDSRGLVLPGYKYLGPFNGLDKGEPVNEADAAALEHDKAYDRQLDSGDNPYLKYNHADAEFQERLKEDTSFGGNLARAVFQAKKRVLEPLGLVEEPVKTAPGKKRPVEHSPAEPDSSSGTGKSGQQPARKRLNFGQTGDADSVPDPQPLGQPPAAPSGLGTNTMASGSGAPMADNNEGADGVGNSSGNWHCDSTWMGDRVITTSTRTWALPTYNNHLYKQISSQSGASNDNHYFGYSTPWGYFDFNRFHCHFSPRDWQRLINNNWGFRPKRLNFKLFNIQVKEVTQNDGTTTIANNLTSTVQVFTDSEYQLPYVLGSAHQGCLPPFPADVFMVPQYGYLTLNNGSQAVGRSSFYCLEYFPSQMLRTGNNFTFSYTFEDVPFHSSYAHSQSLDRLMNPLIDQYLYYLSRTNTPSGTTTQSRLRFSQAGASDIRDQSRNWLPGPCYRQQRVSKTAADNNNSDYSWTGATKYHLNGRDSLVNPGTAMASHKDDEEKYFPQSGVLIFGKQDSEKTNVDIERVMITDEEEIRTTNPVATEQYGSVSTNLQSGNTQAATSDVNTQGVLPGMVWQDRDVYLQGPIWAKIPHTDGHFHPSPLMGGFGLKHPPPQILIKNTPVPANPSTTFSAAKFASFITQYSTGQVSVEIEWELQKENSKRWNPEIQYTSNYNKSVNVDFTVDTNGVYSEPRPIGTRYLTRNL

SEQ ID NO: 225 - protein, 735 aa, Artificial Sequence
  Synthetic Polypeptide
MAADGYLPDWLEDTLSEGIRQWWKLKPGPPPPKPAERHQDDSRGLVLPGYKYLGPFNGLDKGEPVNEADAAALEHDKAYDRQLDSGDNPYLKYNHADAEFQERLKEDTSFGGNLGRAVFQAKKRVLEPLGLVEEPVKTAPGKKRPVEHSPVEPDSSSGTGKAGQQPARKRLNFGQTGDADSVPDPQPLGQPPAAPSGLGTNTMATGSGAPMADNNEGADGVGNSSGNWHCDSTWMGDRVITTSTRTWALPTYNNHLYKQISSQSGASNDNHYFGYSTPWGYFDFNRFHCHFSPRDWQRLINNNWGFRPKRLSFKLFNIQVKEVTQNDGTTTIANNLTSTVQVFTDSEYQLPYVLGSAHQGCLPPFPADVFMVPQYGYLTLNNGSQAVGRSSFYCLEYFPSQMLRTGNNFTFSYTFEDVPFHSSYAHSQSLDRLMNPLIDQYLYYLSKTNAPSGTTTMSRLQFSQAGASDIRDQSRNWLPGPCYRQQRVSKTAADNNNSDYSWTGATKYHLNGRDSLVNPGPAMASHKDDEEKYFPQSGVLIFGKQGSNKTNVDIEKVMITDEEEIRTTNPVATEQYGSVSTNLQSGNTQAATSDVNTQGVLPGMVWQDRDVYLQGPIWAKIPHTDGHFHPSPLMGGFGLKHPPPQILIKNTPVPANPSTTFSAAKFASFITQYSTGQVSVEIEWELQKENSKRWNPEIQYTSNYNKSVNVDFTVDTNGVYSEPRPIGTRYLTRNL

SEQ ID NO: 226 - protein, 735 aa, Artificial Sequence
  Synthetic Polypeptide
MAADGYLPDWLEDTLSEGIRQWWKLKPGPPPPRPAERHQDDSRGLVLPGYKYLGPFNGLDKGEPVNEADAAALEHDKAYDRQLDSGDNPYLKYNHADAEFQERLKEDTSFGGNLGRAVFQAKKRVLEPLGLVEEPVKTAPGKKRPVEHSPAGPDSSSGTGKSGQQPARKRLNFGQTGDADSVPDPQPLGQPPAAPSGLGTNTMASGSGAPMADNNEGADGVGNSSGNWHCDSTWMGDRVITTSTRTWALPTYNNHLYKQISSQSGASNDNHYFGYSTPWGYFDFNRFHCHFSPRDWQRLINNNWGFRAKRLNFELFNIQVKEVTQNDGTTTIANNLTSTVQVFTDSEYQLPYVLGSAHQGCLPPFPADVFMVPQYGYLTLNNGSQAVGRSSFYCLEYFPSQMLRTGNNFTFSYTFEDVPFHSSYAHSQSLDRLMNPLIDQYLYYLSRTNTPSGTTTQSRLQFSQAGASDIRDQSRNWLPGPCYRQQRVSKTAADNNNSDYSWTGATKYHLNGRDSLVNPGTAMASHKDDEEKYFPQSGVLIFGKQDSGKTNVDIEKVMITDEEEIRTTNPVATEQYGSVSTNLQSGNTQAATSDVNTQGVLPGMVWQDRDVYLQGPIWAKIPHTDGHFHPSPLMGGFGLKHPPPQILIKSTPVPANPSTTFSAAKFASFITQYSTGQVSVEIEWELQKENSKRWNPEIQYTSNYNKSVNVDFTVDTNGVYSEPRPIGTRYLTRNL

SEQ ID NO: 227 - protein, 735 aa, Artificial Sequence
  Synthetic Polypeptide
MAADGYLPDWLEDTLSEGIRQWWKLKPGPPPPKPAERHKDDSRGLVLPGYKYLGPFNGLDKGEPVNEADAAALEHDKAYDRQLDSGDNPYLKYNHADAEFQERLKEDTSFGGNLARAVFQAKKRVLEPLGLVEEPVKTAPGKKRPVEHSPAGPDSSSGTGKSGQQPARKRLNFGQTGDADSVPDPQPLGQPPAAPSGLGTNTMASGSGAPTADNNEGADGVGNSSGNWHCDSTWMGDRVITTSTRTWALPTYNNHLYKQISSQSGASNDNHYFGYSTPWGYFDFNRFHCHFSPRDWQRLINNNWGFRPKRLNFELFNIQVKEVTQNDGTTTIANNLTSTVQVFTDSEYQLPYVLGSAHQGCLPPFPADVFMVPQYGYLTLNNGSQAVGRSSFYCLEYFPSQMLRTGNNFTFSYTFEDVPFHSSYAHSQSLDRLMNPLIDQYLYYLSRTNTPSGTTTQSRLQFSQAGASDIRDQSRNWLPGPCYRQQRVSKTAADNNNSDYSWTGATKYHLNGRDSLVNPGTAMASHKDDEEKYFPQSGVLIFGKQDSGKTNVDIEKVMITDEEEIRTTNPVATEQYGSVSTNLQSGNTQAATSDVNTQGVLPGMVWQDRDVYLQGPIWAKIPHTDGHFHPSPLMGGFGLKHPPPQILIKSTPVPANPSTTFSAAKFASFITQYSTGQVSVEIEWELQKENSKRWNPEIQYTSNYNKSVNVDFTVDTNGVYSEPRPIGTRYLTRNL

SEQ ID NO: 228 - protein, 735 aa, Artificial Sequence
  Synthetic Polypeptide
MAADGYLPDWLEDTLSEGIRQWWKLKPGPPPPKPAERHKDDSRGLVLPGYKYLGPFNGLDKGEPVNEADAAALEHDKAYDRQLDSGDNPYLKYNHADAEFQERLKEDTSFGGNLARAVFQAKKRVLEPLGLVEEPVKTAPGKKRPVEHSPAGPDSSSGTGKSGQQPARKRLNFGQTGDADSVPDPQPLGQPPAAPSGLGTNTMASGSGAPMADNNEGADGVGNSSGNWHCDSTWMGDRVITTSTRTWALPTYNNHLYKQISSQSGASNDNHYFGYSTPWGYFDFNRFHCHFSPRDWQRLINNNWGFRPKRLNFELFNIQVKEVTQNDGTTTIANNLTSTVQVFTDSEYQLPYVLGSAHQGCLPPFPADVFMVPQYGYLTLNNGSQAVGRSSFYCLEYFPSQMLRTGNNFTFSYTFEDVPFHSSYAHSQSLDRLMNPLIDQYLYYLSRTNTPSGTTTQSRLQFSQAGASDIRDQSRNWLPGPCYRQQRVSKTAADNNNSDYSWTGATKYHLNGRDSLVNPGTAMASHKDDEEKYFPQSGVLIFRKQDSGKTNVDIEKVMITDEEEIRTTNPVATEQYGSVSTNLQSGNTQAATSDVNTQGVLPGMVWQDRDVYLQGPIWAKIPHTDGHFHPSPLMGGFGLKHPPPQILIKSTPVPANPSTTFSAAKFASFITQYSTGQVSVEIEWELQKENSKRWNPEIQYTSNYNKSVNVDFTVDTNGVYSEPRPIGTRYLTRNL

SEQ ID NO: 229 - protein, 735 aa, Artificial Sequence
  Synthetic Polypeptide
MAADGYLPDWLEDTLSEGIRQWWKLKPGPPPPKPAERHKDDSRGLVLPGYKYLGPFNGLDKGEPVNEADAAALEHDKAYDRQLDSGDNPYLKYNHADAEFQERLKEDTSFGGNLARAVFQAKKRVLEPLGLVEEPVKTAPGKKRPVEHSPAEPDSSSGTGKSGQQPARKRLNFGQTGDADSVPDPQPLGQPPAAPSGLGTNTMASGSGAPMADNNEGADGVGNSSGNWHCDSTWMGDRVITTSTRTWALPTYNNHLYKQISSQSGASNDNHYFGYSTPWGYFDFNRFHCHFSPRDWQRLINNNWGFRPKRLNFKLFNIQVKEVTQNDGTTTIANNLTSTVQVFTDSEYQLPYVLGSAHQGCLPPFPADVFMVPQYGYLTLNNGSQAVGRSSFYCLEYFPSQMLRTGNNFTFSYTFEDVPFHSSYAHSQSLDRLMNPLIDQYLYYLSRTNTPSGTTTQSRLQFSQAGASDIRDQSRNWLPGPCYRQQRVSKTAADNNNSDYSWTGATKYHLNGRDSLVNPGTAMASHKDDEEKYFPQSGALIFGKQDSGKTNVDIEKVMITDEEEIRTTNPVATEQYGSVSTNLQSGNTQAATSDVNTQGVLPGMVWQDRDVYLQGPIWAKIPHTDGHFHPSPLMGGFGLKHPPPQILIKNTPVPANPSTTFSAAKFASFITQYSTGQVSVEIEWELQKENSKRWNPEIQYTSNYNKSVNVDFTVDTNGVYSEPRPIGTRYLTRNL

SEQ ID NO: 230 - protein, 735 aa, Artificial Sequence
  Synthetic Polypeptide
MAADGYLPDWLEDTLSEGIRQWWKLKPGPPPPKPAERHKDDSRGLVLPGYKYLGPFNGLDKGEPVNEADAAALEHDKAYDRQLDSGDNPYLKYNHADAEFQERLKEDTSFGGNLARAVFQAKKRVLEPLGLVEEPVKTAPGKKRPVEHSPAEPGSSSGTGKSGQQPARKRLNFGQTGDADSVPDPQPLGQPPAAPSGLGTNTMASGSGAPMADNNEGADGVGNSSGNWHCDSTWMGDRVITTSTRTWALPTYNNHLYKQISSQSGASNDNHYFGYSTPWGYFDFNRFHCHFSPRDWQRLINNNWGFRPKRLNFKLFNIQVKEVTQNDGTTTIANNLTSTVQVFTDSEYQLPYVLGSAHQGCLPPFPADVFMVPQYGYLTLNNGSQAVGRSSFYCLEYFPSQMLRTGNNFTFSYTFEDVPFHSSYARSQSLDRLMNPLIDQYLYYLSRTNTPSGTTTQSRLRFSQAGASDIRDQSRNWLPGPCYRQQRVSKTAADNNNSDYSWTGATKYHLNGRDSLVNPGTAMASHKDDEEKYFPQSGVLIFGKQDSGKTNVDIERVMITDEEEIRTTNPVATEQYGSVSTNLQSGNTQAATSDVNTQGVLPGMVWQDRDVYLQGPIWAKIPHTDGHFHPSPLMGGFGLKHPPPQILIKNTPVPANPSTTFSAAKFASFITQYSTGQVSVEIEWELQKENSKRWNPEIQYTSNYNKSVNVDFTVDTKGVYSEPRPIGTRYLTRNL

SEQ ID NO: 231 - protein, 735 aa, Artificial Sequence
  Synthetic Polypeptide
MAADGYLPDWLEDTLSEGIRQWWKLKPGPPPPKPAERHKDDSRGLVLPGYKYLGPFNGLDKGEPVNEADAAALEHDKAYDRQLDSGDNPYLKYNHADAEFQERLKEDTSFGGNLARAVFQAKKRVLEPLGLVEEPVKTAPGKKRPVEHSPAEPDSSSGTGKSGQQPARKRLNFGQTGDADSVPDPQPLGQPPAAPSGLGTNTMASGSGAPMADNNEGADGVGNSSGNWHCDSTWMGDRVITTSTRTWALPTYNNHLYKQISSQSGASNDNHYFGYSTPWGYFDFNRFHCHFSPRDWQRLINNNWGFRPKRLNFKLFNIQVKEVTQNDGTTTIANNLTSTVQVFTDSEYQLPYVLGSAHQGCLPPFPADVFMVPQYGYLTLNNGSQAVGRSSFYCLEYFPSQMLRTGNNFTFSYTFEDVPFHSSYAHSQSLDRLMNPLIDQYLYYLSRTNTPSGTTTQSRLQFSQAGASDIRDQSRNWLPGPCYRQQRVSKTAADNNNSDYSWTGATKYHLNGRDSLVNPGTAMASHKDDEEKYFPQSGVLIFGKQDSGKTNVDIEKVMITDEEEIRTTNPVATEQYGSVSTNLQSGNTQAATSDVNTQGVLPGMVWQDRDVYLQGPIWAKIPHTDGHFHPSPLMGGFGLKHPPPQILIKSTPVPANPSTTFSAAKFASFITQYSTGQVSVEIEWELQKENSKRWNPEIQYTSNYNKSVNVDFTVDTNGVYSEPRPIGTRYLTRNL

SEQ ID NO: 232 - protein, 735 aa, Artificial Sequence
  Synthetic Polypeptide
MAADGYLPDWLEDTLSEGIRQWWKLKPGPPPPKPAERHKDDSRGLVLPGYKYLGPFNGLDKGEPVNEADAAALEHDKAYDRQLDSGDNPYLKYNHADAEFQERLKEDTSFGGNLARAVFQAKKRVLEPLGLVEEPVKTAPGKKRPVEHSPAELDSSSGTGKSGQQPARKRLNFGQTGDADSVPDPQPLGQPPAAPSGLGTNTMASGSGAPMADNNEGADGVGNSSGNWHCDSTWMGDRVITTSTRTWALPTYNNHLYKQISSQSGASNDNHYFGYSTPWGYFDFNRFHCHFSPRDWQRLINNNWGFRPKRLNFKLFNIQVKEVTQNDGTTTIANNLTSTVQVFTDSEYQLPYVLGSAHQGCLPPFPADVFMVPQYGYLTLNNGSQAVGRSSFYCLEYFPSQMLRTGNNFTFSYTFEDVPFHSSYAHSQSLDRLMNPLIDQYLYYLSRTNTPSGTTTQSRLQFSQAGASDIRDQSRNWLPGPCYRQQRVSKTAADNNNSDYSWTGATKYHLNGRDSLVNPGTAMASHKDDEEKYFPQSGVLIFGKQDSGKTNVDIEKVMITDEEEIRTTNPVATEQYGSVSTNLQSGNTQAATSDVNTQGVLPGMVWQDRDVYLQGPIWAKIPHTDGHFHPSPLMGGFGPKHPPPQILIKNTPVPANPSTTFSAAKFASFITQYSTGQVSVEIEWELQKENSKRWNPEIQYTSNYNKSVNVDFTVDANGVYSEPRPIGTRYLTRNL

SEQ ID NO: 233 - protein, 735 aa, Artificial Sequence
  Synthetic Polypeptide
MAADGYLPDWLEDTLSEGIRQWWKLKPGPPPPKPAERHKDDSRGLVLPGYKYLGPFNGLDKGEPVNEADAAALEHDKAYDRQLDSGDNPYLKYNHADAEFQERLKEDTSFGGNLARAVFQAKKRVLEPLGLVEEPVKTAPGKKRPVEHSPAELDSSSGTGKSGQQPARKRLNFGQTGDADSVPDPQPLGQPPAAPSGLGTNTMASGSGAPMADNNEGADGVGNSSGNWHCDSTWMGDRVITTSTRTWALPTYNNHLYKQISSQSGASNDNHYFGYSTPWGYFDFNRFHCHFSPRDWQRLINNNWGFRPKRLNFKLFNIQVKEVTQNDGTTTIANNLTSTVQVFTDSEYQLPYVLGSAHQGCLPPFPADVFMVPQYGYLTLNNGSQAVGRSSFYCLEYFPSQMLRTGNNFTFSYTFEDVPFHSSYAHSQSLDRLMNPLIDQYLYYLSRTNTPSGTTTQSRLQFSQAGASDIRDQSRNWLPGPCYRQQRVSKTAADNNNSDYSWTGATKYHLNGRDSLVNPGTAMASHKDDEEKYFPQSGVLIFGKQDSGKTNVDIEKVMITDEEEIRTTNPVATEQYGSVSTNLRSGNTQAATSDVNTQGVLPGMVWQDRDVYLQGPIWAKIPHTDGHFHPSPLMGGFGPKHPPPQILIKNTPVPANPSTTFSAAKFASFITQYSTGQVSVEIEWELQKENSKRWNPEIQYTSNYNKSVNVDFTVDTNGVYSEPRPIGTRYLTRNL

SEQ ID NO: 234 - protein, 735 aa, Artificial Sequence
  Synthetic Polypeptide
MAADGYLPDWLEDTLSEGIRQWWKLKPGPPPPKPAERHKDDSRGLVLPGYKYLGPFNGLDKGEPVNEADAAALEHDKAYDRQLDSGDNPYLKYNHADAEFQERLKEDTPFGGNLARAVFQAKKRVLEPLGLVEEPVKTAPGKKRPVEHSPAELDSSSGTGKSGQQPARKRLNFGQTGDADSVPDPQPLGQPPAAPSGLGTNTMASGSGAPMADNNEGADGVGNSSGNWHCDSTWMGDRVITTSTRTWALPTYNNHLYKQISSQSGASNDNHYFGYSTPWGYFDFNRFHCHFSPRDWQRLINNNWGFRPKGLNFKLFNIQVKEVTQNDGTTTIANNLTSTVQVFTDSEYQLPYVLGSAHQGCLPPFPADVFMVPQYGYLTLNNGSQAVGRSSFYCLEYFPSQMLRTGNNFTFSYTFEDVPFHSSYAHSQSLDRLMNPLIDQYLYYLSRTNTPSGTTTQSRLQFSQAGASDIRDQSRNWLPGPCYRQQRVSKTAADNNNSDYSWTGATKYHLNGRDSLVNPGTAMASHKDDEEKYFPQSGVLIFGKQDSGKTNVDIEKVMITDEEEIRTTNPVATEQYGSVSTNLQSGNTQAATSDVNTQGVLPGMVWQDRDVYLQGPIWAKIPHTDGHFHPSPLMGGFGPKHPPPQILIKNTPVPANPSTTFSAAKFASFITQYSTGQVSVEIEWELQKENSKRWNPEIQYTSNYNKSVNVDFTVDTNGVYSEPRPIGTRYLTRNL

SEQ ID NO: 235 - protein, 735 aa, Artificial Sequence
  Synthetic Polypeptide
MAADGYLPDWLEDTLSEGIRQWWKLKPGPPPPKPAERHKDDSRGLVLPGYKYLGPFNGLDKGEPVNEADAAALEHDKAYDRQLDSGDNPYLKYNHADAEFQERLKEDTSFGGNLARAVFQAKKRVLEPLGLVEEPVKTAPGKKRPVEHSPAELDSSSGTGKSGQQPARKRLNFGQTGDADSVPDPQPLGQPPAAPSGLGTNTMASGSGAPMADNNEGADGVGNSSGNWHCDSTWMGDRVITTSTRTWALPTYNNHLYKQISSQSGASNDNHYLGYSTPWGYFDFNRFHCHFSPRDWQRLINNNWGFRPKRLNFKLFNIQVKEVTQNDGTTTIANNLTSTVQVFTDSEYQLPYVLGSAHQGCLPPFPADVFMVPQYGYLTLNNGSQAVGRSSFYCLEYFPSQMLRTGNNFTFSYTFEDVPFHSSYAHSQSLDRLMNPLIDQYLYYLSRTNTPSGTTTQSRLQFSQAGASGIRDQSRNWLPGPCYRQQRVSKTAADNNNSDYSWTGATKYHLNGRDSLVNPGTAMASHKDDEEKYFPQSGVLIFGKQDSGKTNVDIEKVMITDEEEIRTTNPVATEQYGSVSTNLQSGNTQAATSDVNTQGVLPGMVWQDRDVYLQGPIWAKIPHTDGHFHPSPLMGGFGPKHPPPQILIKNTPVPANPSTTFSAAKFASFITQYSTGQVSVEIEWELQKGNSKRWNPEIQYTSNYNKSVNVDFTVDTNGVYSEPRPIGTRYLTRNL

SEQ ID NO: 236 - protein, 735 aa, Artificial Sequence
  Synthetic Polypeptide
MAADGYLPDWLEDTLSEGIRQWWKLKPGPPPPKPAERHKDDSRGLVLPGYKYLGPFNGLDKGEPVNEADAAALEHDKAYDRQLDSGDNPYLKYNHADAEFQERLKEDTSFGGNLARAVFQAKKRVLEPLGLVEEPVKTAPGKKRPVEHSPAELDSSSGTGKSGQQPARKRLNFGQTGDADSVPDPQPLGQPPAAPSGLGTNTMASGSGAPMADNNEGADGVGNSSGNWHCDSTWMGDRVITTSTRTWALPTYNNHLYKQISSQSGASNDNHYFGYSTPWGYFDFNRFHCHFSPRDWQRLINNNWGFRPKRLNFKLFNIQVKEVTQNDGTTTIANNLTSTVQVFTDSEYQLPYVLGSAHQGCLPPFPADVFMVPQYGYLTLNNGSQAVGRSSFYCLEYFPSQMLRTGNNFTFSYTFEDVPFHSSYAHSQSLDRLMNPLIDQYLYYLSRTNTPSGTTTQSRLQFSQAGASDIRDQSRNWLPGPCYRQQRVSKTAADNNNSDYSWTGATKYHLNGRDSLVNPGTAMASHKDDEEKYFPQSGVLIFGKQDSGKTNVDIEKVMITDEEEIRTTNPVATEQYGSVSTNLQSGNTQAATSDVNTQGVLPGMVWQDRDVYLQGPIWAKIPHTDGHFHPSPLMGGFGPKHPPPQILIKNTPVPANPSTTFSAAKFASFITQYSTGQVSVEIEWELQKENSKRWNPEIQYTSNYNKSVNVDFTVDTNGVYSEPRPIGTRYPTRNL

SEQ ID NO: 237 - protein, 735 aa, Artificial Sequence
  Synthetic Polypeptide
MAADGYLPDWLEDTLSEGIRQWWKLKPGPPPPKPAERHKDDSRGLVLPGYKYLGPFNGLDKGEPVNEADAAALEHDKAYDRQLDSGDNPYLKYNHADAEFQERLKEDTSFGGNLARAVFQAKKRVLEPLGLVEEPVKTAPGKKRPVEHSPAELDSSSGTGKSGQQPARKRLNFGQTGDADSVPDPQPLGQPPAAPSGLGTNTMASGSGAPMADNNEGADGVGNSSGNWHCDSTWMGDRVITTSTRTWALPTYNNHLYKQISSQSGASNDNHYFGYSTPWGYFDFNRFHCHFSPRDWQRLINNNWGFRPKRLNFKLFNIQVKEVTQNDGTTTIANNLTSTVQVFTDSEYQLPYVLGSAHQGCLPPFPADVFMVPQYGYLTLNNGSQAVGRSSFYCLEYFPSQMLRTGNNFTFSYTFEDVPFHSSYAHSQSLDRLMNPLIDQYLYYLSRTNTPSGTTTQSRLQFSQAGASDIRDQSRNWLPGPCYRQQRVSKTAADNNNSDYSWTGATKYHLNGRDSLVNPGTAMASHKDDEEKYFPQSGVLIFGKQDSGKTNVDIEKVMITDEEEIRTTNPVATEQYGSVSTNLQSGNTQAATSDVNTQGVLPGMVWQDRDVYLQGPIWAKIPHTDGHFHPSPLMGGFGPKHPPPQILIKNTPVPANPSTTFSAAKLASFITQYSTGQVSVEIEWELQKENSKRWNPEIQYTSNYNKSVNVDFTVDTNGVYSEPRPIGTRYLTRNL

SEQ ID NO: 238 - protein, 735 aa, Artificial Sequence
  Synthetic Polypeptide
MAADGYLPDWLEDTLSEGIRQWWKLKPGPPPPKPAERHKDDSRGLVLPGYKYLGPFNGLDKGEPVNEADAAALEHDKAYDRQLDSGDNPYLKYNHADAEFQERLKEDTSFGGNLARAVFQAKKRVLEPLGLVEEPVKTAPGKKRPVEHSPAELDSSSGTGKSGQQPARKRLNFGQTGDADSVPDPQPLGQPPAAPSGLGTNTMASGSGAPMADNNEGADGVGNSSGNWHCDSTWMGDRVITTSTRTWALPTYNNHLYKQISSQSGASNDNHYFGYSTPWGYFDFNRFHCHFSPRDWQRLINNNWGFRPKRLNFKLFNIQVKEVTQNDGTTTIANNLTSTVQVFTDSEYQLPYVLGSAHQGCLPPFPADVFMVPQYGYLTLNNGSQAVGRSSFYCLEYFPSQMLRTGNNFTFSYTFEDVPFHSSYAHSQSLDRLMNPLIDQYLYYLSRTNTPSGTTTQSRLQFSQAGASDIRDQSRNWLPGPCYRQQRVSKTAADNNNSDYSWTGATKYHLNGRDSLVNPGTAMASHKDDEEKYFPQSGVLIFGKQDSGKTNVDIEKVMITDEEEIRTTNPVATEQYGSVSTNLQSGNTQAATSDVNTQGVLPGMVWQDRDVYLQGPIWAKIPHTDGHFHPSPLMGGFGPKHPPPQILIKNTPVPANPSTTFSAAKFASFTTQYSTGQVSVEIEWELQKENSKRWNPEIQYTSNYNKSVNVDFTVDTNGVYSEPRPIGTRYLTRNL

SEQ ID NO: 239 - protein, 735 aa, Artificial Sequence
  Synthetic Polypeptide
MAADGYLPDWLEDTLSEGIRQWWKLKPGPPPPKPAERHKDDSRGLVLPGYKYLGPFNGLDKGEPVNEADAAALEHDKAYDRQLDSGDNPYLKYNHADAEFQERLKEDTSFGGNLARAVFQAKKRVLEPLGLVEEPVKTAPGKKRPVEHSPAELDSSSGTGKSGQQPARKRLNFGQTGDADSVPDPQPLGQPPAAPSGLGTNTMASGSGAPMADNNEGADGVGNSSGNWHCDSTWMGDRVITTSTRTWALPTYNNHLYKQISSQSGASNDNHYFGYSTPWGYFDFNRFHCHFSPRDWQRLINNNWGFRPKRLNFKLFNIQVKEVTQNDGTTTIANNLTSTVQVFTDSEYQLPYVLGSAHQGCLPPFPADVFMVPQYGYLTLNNGSQAVGRSSFYCLEYFPSQMLRTGNNFTFSYTFEDVPFHSSYAHSQSLDRLMNPLIDQYLYYLSRTNTPSGTTTQSRLQFSQAGASDIRDQSRNWLPGPCYRQQRVSKTAADNNNSDYSWTGATKYHLNGRDSLVNPGTAMASHKDDEEKYFPRSGVLIFGKQDSGKTNVDIEKVMITDEEEIRTTNPVATEQYGSVSTNLQSGNTQAATSDVNTQGVLPGMVWQDRDVYLQGPIWAKIPHTDGHFHPSPLMGGFGPKHPPPQILIKNTPVPANPSTTFSAAKFASFITQYSTGQVSVEIEWELQKENSKRWNPEIQYTSNYNKSVNVDFTVDTNGVYSEPRPIGTRYLTRNL

SEQ ID NO: 240 - protein, 735 aa, Artificial Sequence
  Synthetic Polypeptide
MAADGYLPDWLEDTLSEGIRQWWKLKPGPPPPKPAERHKDDSRGLVLPGYKYLGPFNGLDKGEPVNEADAAALEHDKAYDRQLDSGDNPYLKYNHADAEFQERLKEDTSFGGNLARAVFQAKKRVLEPLGLVEEPVKTAPGKKRPVEHSPAELDSSSGTGKSGQQPARKRLNFGQTGDADSVPDPQPLGQPPAAPSGLGTNTMASGSGAPMADNNEGADGVGNSSGNWHCDSTWMGDRVITTSTRTWALPTYNNHLYKQISSQSGASNDNHYFGYSTPWGYFDFNRFHCHFSPRDWQRLINNNWGFRPKRLNFKLFNIQVKEVTQNDGTATIANNLTSTVQVFTDSEYQLPYVLGSAHQGCLPPFPADVFMVPQYGYLTLNNGSQAVGRSSFYCLEYFPSQMLRTGNNFTFSYTFEDVPFHSSYAHSQSLDRLMNPLIDQYLYYLSRTNTPSGTTTQSRLQFSQAGASDIRDQSRNWLPGPCYRQQRVSKTAADNNNSDYSWTGATKYHLNGRDSLVNPGTAMASHKDDEEKYFPQSGVLIFGKQDSGKTNVDIEKVMITDEEEIRTTNPVATEQYGSVSTNLQSGNTQAATSDVNTQGVLPGMVWQDRDVYLQGPIWAKIPHTDGHFHPSPLMGGFGPKHPPPQILIKNTPVPANPSTTFSAAKFASFITQYSTGQVSVEIEWELQKENSKRWNPEIQYTSNYNKSVNVDFTVDTNGVYSEPRPIGTRYLTRNL

SEQ ID NO: 241 - protein, 735 aa, Artificial Sequence
  Synthetic Polypeptide
MAADGYLPDWLEDTLSEGIRQWWKLKPGPPPPKPAERHKDDSRGLVLPGYKYLGPFNGLDKGEPVNEADAAALEHDKAYDRQPDSGDNPYLKYNHADAEFQERLKEDTSFGGNLARAVFQAKKRVLEPLGLVEEPVKTAPGKKRPVEHSPAELDSSSGTGKSGQQPARKRLNFGQTGDADSVPDPQPLGQPPAAPSGLGTNTMASGSGAPMADNNEGADGVGNSSGNWHCDSTWMGDRVITTSTRTWALPTYNNHLYKQISSQSGASNDNHYFGYSTPWGYFDFNRFHCHFSPRDWQRLINNNWGFRPKRLNFKLFNIQVKEVTQNDGTTTIANNLTSTVQVFTDSEYQLPYVLGSAHQGCLPPFPADVFMVPQYGYLTLNNGSQAVGRSSFYCLEYFPSQMLRTGNNFTFSYTFEDVPFHSSYAHSQSLDRLMNPLIDQYLYYLSRTNTPSGTTTQSRLQFSQAGASDIRDQSRNWLPGPCYRQQRVSKTAADNNNSDYSWTGATKYHLNGRDSLVNPGTAMASHKDDEEKYFPQSGVLIFGKQDSGKTNVDIEKVMITDEEEIRTTNPVATEQYGSVSTNLQSGNTQAATSDVNTQGVLPGMVWQDRDVYLQGPIWAKIPHTDGHFHPSPLMGGFGPKHPPPQILIKNTPVPANPSTTFSAAKFASFITQYSTGQVSVEIEWELQKENSKRWNPEIQYTSNYNKSVNVDFTVDTNGVYSEPRPIGTRYLTRNL

SEQ ID NO: 242 - protein, 735 aa, Artificial Sequence
  Synthetic Polypeptide
MAADGYLPDWLEDTLSEGIRQWWKLEPGPPPPKPAERHKDDSRGLVLPGYKYLGPFNGLDKGEPVNEADAAALEHDKAYDRQLDSGDNPYLKYNHADAEFQERLKEDTPFGGNLARAVFQAKKRVLEPLGLVEEPVKTAPGKKRPVEHSPAELDSSSGTGKSGQQPARKRLNFGQTGDADSVPDPQPLGQPPAAPSGLGTNTMASGSGAPMADNNEGADGVGNSSGNWHCDSTWMGDRVITTSTRTWALPTYNNHLYKQISSQSGASNDNHYFGYSTPWGYFDFNRFHCHFSPRDWQRLINNNWGFRPKRLNFKLFNIQVKEVTQNDGTTTIANNLTSTVQVFTDSEYQLPYVLGSAHQGCLPPFPADVFMVPQYGYLTLNNGSQAVGRSSFYCLEYFPSQMLRTGNNFTFSYTFEDVPFHSSYAHSQSLDRLMNPLIDQYLYYLSRTNTPSGTTTQSRLQFSQAGASDIRDQSRNWLPGPCYRQQRVSKTAADNNNSDYSWTGATKYHLNGRDSLVNPGTAMASHEDDEEKYFPQSGVLIFGKQDSGKTNVDIEKVMITDEEEIRTTNPVATEQYGSVSTNLQSGNTQAATSDVNTQGVLPGMVWQDRDVYLQGPIWAKIPHTDGHFHPSPLMGGFGPKHPPPQILIKNTPVPANPSTTFSAAKFASFITQYSTGQVSVEIEWELQKENSKRWNPEIQYTSNYNKSVNVDFTVDTNGVYSEPRPIGTRYLTRNL

SEQ ID NO: 243 - protein, 734 aa, Artificial Sequence
  Synthetic Polypeptide
MAADGYLPDWLEDTLSEGIRQWWKLKPGPPPPKPAERHKDDSRGLVLPGYKYLGPFNGLDKGEPVNEADAAALEHDKAYDRQLDSGDNPYLKYNHADAEFQERLKEDTSFGGNLARAVFQAKKRVLEPLGLVEEPVKTAPGKKRPVEHSPAELDSSSGTGKSGQQPARKRLNFGQTGDADSVPDPQPLGQPPAAPSGLGTNTMASGSGAPMADNNEGADGVGNSSGNWHCDSTWMGDRVITTSTRTWALPTYNNHLYKQISSQSGASNDNHYFGYSTPWGYFDFNRFHCHFSPRDWQRLINNNWGFRPKRLNFKLFNIQVKEVTQNDGTTTIANNLTSTVQVFTDSEYQLPYVLGSAHQGCLPPFPADVFMVPQYGYLTLNNGSQAVGRSSFYCLEYFPSQMLRTGNNFTFSYTFEDVPFHSSYAHSQSLDRLMNPLIDQYLYYLSRTNTPSGTTTQSRLQFSQAGASDIRDQSRNWLPGPCYRQQRVSKTAADNNSDYSWTGATKYHLNGRDSLVNPGTAMASHKDDEEKYFPQSGVLIFGKQDSGKTNVDIEKVMITDEEEIRTTNPVATEQYGSVSTNLQSGNTQAATSDVNTQGVLPGMVWQDRDVYLQGPIWAKIPHTDGHFHPSPLMGGFGPKHPPPQILIKNTPVPANPSTTFSAAKFASFITQYSTGQVSVEIEWELQKENSKRWNPEIQYTSNYNKSVNVDFTVDTNGVYSEPRPIGTRYLTRNL

SEQ ID NO: 244 - protein, 735 aa, Artificial Sequence
  Synthetic Polypeptide
MAADGYLPDWLEDTLSEGIRQWWKLKPGPPPPKPAERHKDDSRGLVLPGYKYLGPFNGLDKGEPVNEADAAALEHDKAYDRQLDSGDNPYLKYNHADAEFQERLKEDTPFGGNLARAVFQAKKRVLEPLGLVEEPVKTAPGKKRPVEHSPAELDSSSGTGKSGQQPARKRLNFGQTGDADSVPDPQPLGQPPAAPSGLGTNTMASGSGAPMADNNEGADGVGNSSGNWHCDSTWMGDRVITTSTRTWALPTYNNHLYKQISSQSGASNDNHYFGYSTPWGYFDFNRFHCHFSPRDWQRLINNNWGFRPKRLNFKLFNIQVKEVTQNGGTTTIANNLTSTVQVFTDSEYQLPYVLGSAHQGCLPPFPADVFMVPQYGYLTLNNGSQAVGRSSFYCLEYFPSQMLRTGNNFTFSYTFEDVPFHSSYAHSQSLDRLMNPLIDQYLYYLSRTNTPSGTTTQSRLQFSQAGASDIRDQSRNWLPGPCYRQQRVSKTAADNNNSDYSWTGATKYHLNGRDSLVNPGTAMASHKDDEEKYFPQSGVLIFGKQDSGKTNVDIEKVMITDEEEIRTTNPVATEQYGSVSTNLQSGNTQAATSDVNTQGVLPGMVWQDRDVYLQGPIWAKIPHTDGHFHPSPLMGGFGPKHPPPQILIKNTPVPANPSTTFSAAKFASFITQYSTGQVSVEIEWELQKENSKRWNPEIQYTSNYNKSVNVDFTVDTNGVYSEPRPIGTRYLTRNL

SEQ ID NO: 245 - protein, 735 aa, Artificial Sequence
  Synthetic Polypeptide
MAADGYLPDWLEDTLSEGIRQWWKLKPGPPPPKPAERHKDDSRGLVLPGYKYLGPFNGLDKGEPVNEADAAALEHDKAYDRQLDSGDNPYLKYNHADAEFQERLKEDTSFGGNLARAVFQAKKGVLEPLGLVEEPVKTAPGKKRPVEHSPAELDSSSGTGKSGQQPARKRLNFGQTGDADSVPDPQPLGQPPAAPSGLGTNTMASGSGAPMADNNEGADGVGNSSGNWHCDSTWMGDRVITTSTRTWALPTYNNHLYKQISSQSGASNDNHYFGYSTPWGYFDFNRFHCHFSPRDWQRLINNNWGFRPKRLNFKLFNIQVKEVTQNDGTTTIANNLTSTVQVFTDSEYQLPYVLGSAHQGCLPPFPADVFMVPQYGYLTLNNGSQAVGRSSFYCLEYFPSQMLRTGNNFTFSYTFEDVPFHSSYAHSQSLDRLMNPLIDQYLYYLSRTNTPSGTTTQSRLQFSQAGASDIRDQSRNWLPGPCYRQQRVSKTAADNNNSDYSWTGATKYHLNGRDSLVNPGTAMASHKDDEEKYFPQSGVLIFGKQDSGKTNVDIEKVMITDEEEIRTTNPVATEQYGSVSTNLQSGNTQAATSDVNTQGVLPGMVWQDRDVYLQGPIWAKIPHTDGHFHPSPLMGGFGPKHPPPQILIKNTPVPANPSTTFSAAKFASFITQYSTGQVSVEIEWELQKENSKRWNPEIQYTSNYNKSVNVDFTVDTNGVYSEPRPIGTRYLTRNL

SEQ ID NO: 246 - protein, 735 aa, Artificial Sequence
  Synthetic Polypeptide
MAADGYLPDWLEDTLSEGIRQWWKLKPGPPPPKPAERHKDDSRGLVLPGYKYLGPFNGLDKGEPVNEADAAALEHDKAYDRQLDSGDNPYLKYNHADAEFQERLKEDTSFGGNLARAVFQAKKRVLEPLGLVEEPVKTAPGKKRPVEHSPAELDSSSGTGKSGQQPARKRLNFGQTGDADSVPDPQPLGQPPAAPSGLGTNTMASGSGAPMADNNEGADGVGNSSGNWHCDSTWMGDRVITTSTRTWALPTYNNHLYKQISSQSGASNDNHYFGYSTPWGYFDFNRFHCHFSPRDWQRLINNNWGFRPKRLNFKLFNIQVKEVTQNDGTTTIANNLTSTVQVFTDSEYQLPYVLGSAHQGCLPPFPADVFMVPQYGYLTLNNGSQAVGRSSFYCLEYFPSQMLRTGNNFTFSYTFEDVPFHSSYAHSQSLDRLMNPLIDQYLYYLSRTNTPSGTTTQSRLQFSQAGASDIRDQSRNWLPGPCYRQQRVSKTAADNNNSDYSWTGATKYHLNGRDSLVNPGTAMASHKDDEEKYFPQSGVLIFGKQDSGKTNVDIEKVMITDEEEIRTTNPVATEQYGSVSTNLQSGNTQAATSDVNTQGVLPGMVWQDRDVYLQGPIWARIPHTDGHFHPSPLMGGFGPKHPPPQILIKNTPVPANPSTTFSAAKFASFITQYSTGQVSVEIEWELQKENSKRWNPEIQYTSNYNKSVNVDFTVDTNGVYSEPRPIGTRYLTRNL

SEQ ID NO: 247 - protein, 735 aa, Artificial Sequence
  Synthetic Polypeptide
MAADGYLPDWLEDTLSEGIRQWWKLKPGPPPPKPAERHKDDSRGLVLPGYKYLGPFNGLDKGEPVNEADAAALEHDKAYDRQLDSGDNPYLKYNHADAEFQERLKEDTSFGGNLARAVFQAKKRVLEPLGLVEEPVKTAPGKKRPVGHSPAELDSSSGTGKSGQQPARKRLNFGQTGDADSVPDPQPLGQPPAAPSGLGTNTMASGSGAPMADNNEGADGVGNSSGNWHCDSTWMGDRVITTSTRTWALPTYNNHLYKQISSQSGASNDNHYFGYSTPWGYFDFNRFHCHFSPRDWQRLINNNWGFRPKRLNFKLFNIQVKEVTQNDGTTTIANNLTSTVQVFTDSEYQLPYVLGSAHQGCLPPFPADVFMVPQYGYLTLNNGSQAVGRSSFYCLEYFPSQMLRTGNNFTFSYTFEDVPFHSSYAHSQSLDRLMNPLIDQYLYYLSRTNTPSGTTTQSRLQFSQAGASDIRDQSRNWLPGPCYRQQRVSKTAADNNNSDYSWTGATKYHLNGRDSLVNPGTAMASHKDDEEKYFPQSGVLIFGKQDSGKTNVDIEKVMITDEEEIRTTNPVATEQYGSVSTNLQSGNTQAATSDVNTQGVLPGMVWQDRDVYLQGPIWAKIPHTDGHFHPSPLMGGFGPKHPPPQILIKNTPVPANPSTTFSAAKFASFITQYSTGQVSVEIEWELQKENSKRWNPEIQYTSNYNKSVNVDFTVDTNGVYSEPRPIGTRYLTRNL

SEQ ID NO: 248 - protein, 735 aa, Artificial Sequence
  Synthetic Polypeptide
MAADGYLPDWLEDTLSEGIRQWWKLKPGPPPPKPAERHKDDSRGLVLPGYKYLGPFNGLDKGEPVNEADAAALEHDKAYDRQLDSGDNPYLKYNHADAEFQERLKEDTSFGGNLARAVFQAKKRVLEPLGLVEEPVKTAPGKKRPVEHSPAELDSSSGTGKSGQQPARKRLNFGQTGDADSVPDPQPLGQPPAAPSGLGTNTMASGSGAPMADNNEGADGVGNSSGNWHCDSTWMGDRVITTSTRTWALPTYNNHLYKQISSQSGASNDNHYFGYSTPWGYFDFNRFHCHFSPRDWQRLINNNWGFRPKRLNFKLFNIQVKEVTQNDGTTTIANNLTSTVQVFTDSEYQLPYVLGSAHQGCLPPFPADVFMVPQYGYLTLNNGSQAVGRSSFYCLEYFPSQMLRTGNNFTFSYTFEDVPFHSSYAHSQSLDRLMNPLIDQYLYYLSRTNTPSGTTTQSRLQFSQAGASDIRDQSRNWLPGPCYRQQRVSKTAADNNNSDYSWTGATKYHLNGRDSLVNPGTAMASHKDDEEKYFPQSGVLIFGKQDSGKTNVDIEKVMITDEEEIRTTNPVATEQYGSVSTNLQSGNTQAATSDVNTQGVLPGMVWQDRDVYLQGPIWAKIPHTDGHFHPSPLMGGFGPKHPPPQILIKNTPVPANPSTTFSAAKFASFITQYSTGQVSVEIEWELQKGNSKRWNPEIQYTSNYNKSVNVDFTVDTNGVYSEPRPIGTRYLTRNL

SEQ ID NO: 249 - protein, 735 aa, Artificial Sequence
  Synthetic Polypeptide
MAADGYLPDWLEDTLSEGIRQWWKLKPGPPPPKPAERHKDDSRGLVLPGYKYLGPFNGLDKGEPVNEADAAALEHDKAYDRQLDSGDNPYLKYNHADAEFQERLKEDTPFGGNLARAVFQAKKRVLEPLGLVEEPVKTAPGKKGPVEHSPAELDSSSGTGKSGQQPARKRLNFGQTGDADSVPDPQPLGQPPAAPSGLGTNTMASGSGAPMADNNEGADGVGNSSGNWHCDSTWMGDRVITTSTRTWALPTYNNHLYKQISSQSGASNDNHYFGYSTPWGYFDFNRFHCHFSPRDWQRLINNNWGFRPKRLNFKLFNIQVKEVTQNDGTTTIANNLTSTVQVFTDSEYQLPYVLGSAHQGCLPPFPADVFMVPQYGYLTLNNGSQAVGRSSFYCLEYFPSQMLRTGNNFTFSYTFEDVPFHSSYAHSQSLDRLMNPLIDQYLYYLSRTNTPSGTTTQSRLQFSQAGASDIRDQSRSWLPGPCYRQQRVSKTAADNNNSDYSWTGATKYHLNGRDSLVNPGTAMASHKDDEEKYFPQSGVLIFGKQDSGKTNVDIEKVMITDEEEIRTTNPVATEQYGSVSTNLQSGNTQAATSDVNTQGVLPGMVWQDRDVYLQGPIWAKIPHTDGHFHPSPLMGGFGPKHPPPQILIKNTPVPANPSTTFSAAKFASFITQYSTGQVSVEIEWELQKENSKRWNPEIQYTSNYNKSVNVDFTMDTNGVYSEPRPIGTRYLTRNL

SEQ ID NO: 250 - protein, 735 aa, Artificial Sequence
  Synthetic Polypeptide
MAADGYLPDWLEDTLSEGIRQWWKLKPGPPPPKPAERHKDDSRGLVLPGYKYLGPFNGLDKGEPVNEADAAALEHDKAYDRQLDSGDNPYLKYNHADAEFQERLKEDTSFGGNLARAVFQAKKRVLEPLGLVEEPVKTAPGKKRPVEHSPAELDSSSGTGKSGQQPARKRLNFGQTGDADSVPDPQPLGQPPAAPSGLGTNTMASGSGAPMADNNEGADGVGNSSGNWHCDSTWMGDRVITTSTRTWALPTYNNHLYKQISSQSGASNDNHYFGYSTPWGYFDFNRFHCHFSPRDWQRLINNNWGFRPKRLNFKLFNIQVKEVTQNDGTTTIANNLTSTVQVFTDSEYQLPYVLGSAHQGCLPPFPADVFMVPQYGYLTLNNGSQAVGRSSFYCLEYFPSQMLRTGNNFTFSYTFEDVPFHSSYAHSQSLDRLMNPLIDQYLYYLSRTNTPSGTTTQSRLQFSQAGASDIRDQSRNWLPGPCYRQQRVSKTAADNNNSDYSWTGATKYHLNGRDSLVNPGTAMASHKDDEEKYFPQSGVLIFGKQDSGKTNADIEKVMITDEEEIRTTNPVATEQYGSVSTNLQSGNTQAATSDVNTQGVLPGMVWQDRDVYLQGPIWAKIPHTDGHFHPSPLMGGFGPKHPPPQILIKNTPVPANPSTTFSAAKFASFITQYSTGQVSVEIEWELQKENSKRWNPEIQYTSNYNKSVNVDFTVDTNGVYSEPRPIGTRYLTRNL

SEQ ID NO: 251 - protein, 735 aa, Artificial Sequence
  Synthetic Polypeptide
MAADGYLPDWLEDTLSEGIRQWWKLKPGPPPPKPAERHKDDSRGLVLPGYKYLGPFNGLDKGEPVNEADAAALEHDKAYDRQLDSGDNPYLKYNHADAEFQERLKEDTSFGGNLARAVFQAKKRVLEPLGLVEEPVKTAPGKKRPVEHSPAELDSSSGTGKSGQQPARKRLNFGQTGDADSVPDPQPLGQPPAAPSGLGTNTMASGSGAPMADNNEGGDGVGNSSGNWHCDSTWMGDRVITTSTRTWALPTYNNHLYKQISSQSGASNDNHYFGYSTPWGYFDFNRFHCHFSPRDWQRLINNNWGFRPKRLNFKLFNIQVKEVTQNDGTTTIANNLTSTVQVFTDSEYQLPYVLGSAHQGCLPPFPADVFMVPQYGYLTLNNGSQAVGRSSFYCLEYFPSQMLRTGNNFTFSYTFEDVPFHSSYAHSQSLDRLMNPLIDQYLYYLSRTNTPSGTTTQSRLQFSQAGASDIRDQSRNWLPGPCYRQQRVSKTAADNNNSDYSWTGATKYHLNGRDSLVNPGTAMASHKDDEEKYFPQSGVLIFGKQDSGKTNVDIEKVMITDEEEIRTTNPVATEQYGSVSTNLQSGNTQAATSDVNTQGVLPGMVWQDRDVYLQGPIWAKIPHTDGHFHPSPLMGGFGPKHPPPQILIKNTPVPANPSTTFSAAKFASFITQYSTGQVSVEIEWELQKENSKRWNPEIQYTSNYNKSVNVDFTVDTNGVYSEPRPIGTRYLTRNL

SEQ ID NO: 252 - protein, 735 aa, Artificial Sequence
  Synthetic Polypeptide
MAADGYLPDWLEDTLSEGIRQWWKLKPGPPPPKPAERHKDDSRGLVLPGYKYLGPFNGLDKGEPVNEADAAALEHDKAYDRQLDSGDNPYLKYNHADAEFQERLKEDTSFGGNLARAVFQAKKRVLEPLGLVEEPVKTAPGKKRPVEHSPAELDSSSGTGKSGQQPARKRLNFGQTGDADSVPDPQPLGQPPAAPSGLGTNTMASGSGAPMADNNEGADGVGNSSGNWHCDSTWMGDRVITTSTRTWALPTYNNHLYKQISSQSGASNDNHYFGYSTPWGYFDFNRFHCHFPPRDWQRLINNNWGFRPKRLNFKLFNIQVKEVTQNDGTTTIANNLTSTVQVFTDSEYQLPYVLGSAHQGCLPPFPADVFMVPQYGYLTLNNGSQAVGRSSFYCLEYFPSQMLRTGNNFTFSYTFEDVPFHSSYAHSQSLDRLMNPLIDQYLYYLSRTNTPSGTTTQSRLQFSQAGASDIRDQSRNWLPGPCYRQQRVSKTAADNNNSDYSWTGATKYHLNGRDSLVNPGTAMASHKDDEEKYFPQSGVLIFGKQDSGKTNVDIEKVMITDEEEIRTTNPVATEQYGSVSTNLQSGNTQAATSDVNTQGVLPGMVWQDRDVYLQGPIWAKIPHTDGHFHPSPLMGGFGPKHPPPQILIKNTPVPANPSTTFSAAKFASFITQYSTGQVSVEIEWELQKENSKRWNPEIQYTSNYNKSVNVDFTVDTNGVYSEPRPIGTRYLTRNL

SEQ ID NO: 253 - protein, 735 aa, Artificial Sequence
  Synthetic Polypeptide
MAADGYLPDWLEDTLSEGIRQWWKLKPGPPPPKPAERHKDDSRGLVLPGYKYLGPFNGLDKGEPVNEADAAALEHDKAYDRQLDSGDNPYLKYNHADAEFQERLKEDTSFGGNLARAVFQAKKRVLEPLGLVEEPVKTAPGKKRPVEHSPAELDSSSGAGKSGQQPARKRLNFGQTGDADSVPDPQPLGQPPAAPSGLGTNTMASGSGAPMADNNEGADGVGNSSGNWHCDSTWMGDRVITTSTRTWALPTYNNHLYKQISSQSGASNDNHYLGYSTPWGYFDFNRFHCHFSPRDWQRLINNNWGFRPKRLNFKLFNIQVKEVTQNDGTTTIANNLTSTVQVFTDSEYQLPYVLGSAHQGCLPPFPADVFMVPQYGYLTLNNGSQAVGRSSFYCLEYFPSQMLRTGNNFTFSYTFEDVPFHSSYAHSQSLDRLMNPLIDQYLYYLSRTNTPSGTTTQSRLQFSQAGASDIRDQSRNWLPGPCYRQQRVSKTAADNNNSDYSWTGATKYHLNGRDSLVNPGTAMASHKDDEEKYFPQSGVLIFGKQDSGKTNVDIEKVMITDEEEIRTTNPVATEQYGSVSTNLQSGNTQAATSDVNTQGVLPGMVWQDRDVYLQGPIWAKIPHTDGHFHPSPLMGGFGPKHPPPQILIKNTPVPANPSTTFSAAKFASFITQYSTGQVSVEIEWELQKENSKRWNPEIQYTSNYNKSVNVDFTVDTNGVYSEPRPIGTRYLTRNL

SEQ ID NO: 254 - protein, 735 aa, Artificial Sequence
  Synthetic Polypeptide
MAADGYLPDWLEDTLSEGIRQWWKLKPGPPPPKPAERHKDDSRGLVLPGYKYLGPFNGLDKGEPVNEADAAALEHDKAYDRQLDSGDNPYLKYNHADAEFQERLKEDTPFGGNLARAVFQAKKRVLEPLGLVEEPVKTAPGKKRPVEHSPAELDSSSGTGKSGQQPARKRLNFGQTGDADSVPDPQPLGQPPAAPSGLGTNTMVSGSGAPMADNNEGADGVGNSSGNWHCDSTWMGDRVITTSTRTWALPTYNNHLYKQISSQSGASNDNHYFGYSTPWGYFDFNRFHCHFSPRDWQRLINNNWGFRPKRLNFKLFNIQVKEVTQNDGTTTIANNLTSTVQVFTDSEYQLPYVLGSAHQGCLPPFPADVFMVPQYGYLTLNNGSQAVGRSSFYCLEYFPSQMLRTGNNFTFSYTFEDVPFHSSYAHSQSLDRLMNPLIDQYLYYLSRTNTPSGTTTQSRLQFSQAGASDIRDQSRNWLPGPCYRQQRVSKTAADNNNSDYSWTGATKYHLNGRDSLVNPGTAMASHKDDEEKYFPQSGVLIFGKQDSGKTNVDIEKVMITDEEEIRTTNPVATEQYGSVSTNLQSGNTQAATSDVNTQGVLPGMVWQDRDVYLQGPIWAKIPHTDGHFHPSPLMGGFGPKHPPPQILIKNTPVPANPSTTFSAAKFASFITQYSTGQVSVEIEWELQKENSKRWNPEIQYTSNYNKSVNVDFTVDTNGVYSEPRPIGTRYLTRNL

SEQ ID NO: 255 - protein, 735 aa, Artificial Sequence
  Synthetic Polypeptide
MAADGYLPDWLEDTLSEGIRQWWELKPGPPPPKPAERHKDDSRGLVLPGYKYLGPFNGLDKGEPVNEADAAALEHDKAYDRQLDSGDNPYLKYNHADAEFQERLKEDTSFGGNLARAVFQAKKRVLEPLGLVEEPVKTAPGKKRPVEHSPAELDSSSGTGKSGQQPARKRLNFGQTGDADSVPDPQPLGQPPAAPSGLGTNTMASGSGAPMADNNEGADGVGNSSGNWHCDSTWMGDRVITTSTRTWALPTYNNHLYKQISSQSGASNDNHYFGYSTPWGYFDFNRFHCHFSPRDWQRLINNNWGFRPKRLNFKLFNIQVKEVTQNDGTTTIANNLTSTVQVFTDSEYQLPYVLGSAHQGCLPPFPADVFMVPQYGYLTLNNGSQAVGRSSFYCLEYFPSQMLRTGNNFTFSYTFEDVPFHSSYAHSQSLDRLMNPLIDQYLYYLSRTNTPSGTTTQSRLQFSQAGASDIRDQSRNWLPGPCYRQQRVSKTAADNNNSDYSWTGATKYHLNGRDSLVNPGTAMASHKDDEEKYFPQSGVLIFGKQDSGKTNVDIEKVMITDEEEIRTTNPVATEQYGSVSTNLQSGNTQAATSDVNTQGVLPGMVWQDRDVYLQGPIWAKIPHTDGHFHPSPLMGGFGPKHPPPQILIKNTPVPANPSTTFSAAKFASFITQYSTGQVSVEIEWELQKENSKRWNPEIQYTSNYNKSVNVDFTVDTNGVYSEPRPIGTRYLTRNL

SEQ ID NO: 256 - protein, 735 aa, Artificial Sequence
  Synthetic Polypeptide
MAADGYLPDWLEDTLSEGIRQWWKLKPGPPPPKPAERHKDDSRGLVLPGYKYLGPFNGLDKGEPVNEADAAALEHDKAYDRQLDSGDNPYLKYNHADAEFQERLKEDTPFGGNLARAVFQAKKRVLEPLGLVEEPVKTAPGKKRPVGHSPAELDSSSGTGKSGQQPARKRLNFGQTGDADSVPDPQPLGQPPAAPSGLGTNTMASGSGAPMADNNEGVDGVGNSSGNWHCDSTWMGDRVITTSTRTWALPTYNNHLYKQISSQSGASNDNHYFGYSTPWGYFDFNRFHCHFSPRDWQRLINNNWGFRPKRLNFKLFNIQVKEVTQNDGTTTIANNLTSTVQVFTDSEYQLPYVLGSAHQGCLPPFPADVFMVPQYGYLTLNNGSQAVGRSSFYCLEYFPSQMLRTGNNFTFSYTFEDVPFHSSYAHSQSLDRLMNPLIDQYLYYLSRTNTPSGTTTQSRLQFSQAGASDIRDQSRNWLPGPCYRQQRVSKTAADNNNSDYSWTGATKYHLNGRDSLVNPGTAMASHKDDEEKYFPQSGVLIFGKQDSGKTNVDIEKVMITDEEEIRTTNPVATEQYGSVSTNLQSGNTQAATSDVNTQGVLPGMVWQDRDVYLQGPIWAKIPHTDGHFHPSPLMGGFGPKHPPPQILIKNTPVPANPSTTFSAAKFASFITQYSTGQVSVEIEWELQKENSKRWNPEIQYTSNYNKSVNVDFTVDTNGVYSEPRPIGTRYLTRNL

SEQ ID NO: 257 - protein, 735 aa, Artificial Sequence
  Synthetic Polypeptide
MAADGYLPDWLEDTLSEGIRQWWELKPGPPPPKPAERHKDDSRGLVLPGYKYLGPFNGLDKGEPVNEADAAALEHDKAYDRQLDSGDNPYLKYNHADAEFQERLKEDTSFGGNLARAVFQAKKRVLEPLGLVEEPVKTAPGKKRPVEHSPAELDSSSGTGKSGQQPARKRLNFGQTGDADSVPDPQPLGQPPAAPSGLGTNTMASGSGAPMADNNEGADGVGNSSGNWHCDSTWMGDRVITTSTRTWALPTYNNHLYKQISSQSGASNDNHYFGYSTPWGYFDFNRFHCHFSPRDWQRLINNNWGFRPKRLNFKLFNIQVKEVTQNDGTTTIANNLTSTVQVFTDSEYQLPYVLGSAHQGCLPPFPADVFMVPQYGYLTLNNGSQAVGRSSFYCLEYFPSQMLRTGNNFTFSYTFEDVPFHSSYAHSQSLDRLMNPLIDQYLYYFSRTNTPSGTTTQSRLQFSQAGASDIRDQSRNWLPGPCYRQQRVSKTAADNNNSDYSWTGATKYHLNGRDSLVNPGTAMASHKDDEEKYFPQSGVLIFGKQDSGKTNVDIEKVMITDEEEIRTTNPVATEQYGSVSTNLQSGNTQAATSDVNTQGVLPGMVWQDRDVYLQGPIWAKIPHTDGHFHPSPLMGGFGPKHPPPQILIKNTPVPANPSTTFSAAKFASFITQYSTGQVSVEIEWELQKENSKRWNPEIQYTSNYNKSVNVDFTVDTNGVYSEPRPIGTRYLTRNL

SEQ ID NO: 258 - protein, 735 aa, Artificial Sequence
  Synthetic Polypeptide
MAADGYLPDWLEDTLSEGIRQWWKLKPGPPPPKPAERHKDDSRGLVLPGYKYLGPFNGLDKGEPVNEADAAALEHDKAYDRQLDSGDNPYLKYNHADAEFQERLKEDTSFGGNLARAVFQAKKRVLEPLGLVEEPVKTAPGKKRPVEHSPAELDSSSGTGKSGQQPARKRLNFGQTGDADSVPDPQPLGQPPAAPSGLGTNTMASGSGAPMADNNEGADGVGNSSGNWHCDSTWMGDRVITTSTRTWALPTYNNHLYKQISSQSGASNDNHYFGYSTPWGYFDFNRFHCHFSPRDWQRLINNNWGFRPKRLNFKLFNIQVKEVTQNDGTTTIANNLTSTVQVFTDSEYQLPYVLGSAHQGCLPPFPADVFMVPQYGYLTLNNGSQAVGRSSFYRLEYFPSQMLRTGNNFTFSYTFEDVPFHSSYAHSQSLDRLMNPLIDQYLYYLSRTNTPSGTTTQSRLQFSQAGASDIRDQSRNWLPGPCYRQQRVSKTAADNNNSDYSWTGATKYHLNGRDSLVNPGTAMASHKDDEEKYFPQSGVLIFGKQDSGKTNVDIEKVMITDEEEIRTTNPVATEQYGSVSTNLQSGNTQAATSDVNTQGVLPGMVWQDRDVYLQGPIWAKIPHTDGHFHPSPLMGGFGPKHPPPQILIKNTPVPANPSTTFSAAKFASFITQYSTGQVSVEIEWELQKENSKRWNPEIQYTSNYNKSVNVDFTVDTNGVYSEPRPIGTRYLTRNL

SEQ ID NO: 259 - protein, 735 aa, Artificial Sequence
  Synthetic Polypeptide
MAADGYLPDWLEDTLSEGIRQWWKLKPGPPPPKPAERHKDDSRGLVLPGYKYLGPFNGLDKGEPVNEADAAALEHDKAYDRQLDSGDNPYLKYNHADAEFQERLKEDTSFGGNLARAVFQAKKRVLEPLGLVEEPVKTAPGKKRPVEHSPAELDSSSGTGKSGQQPARKRLNFGQTGDADSVPDPQPLGQPPAAPSGLGTNTMASGSGAPMADNNEGADGVGNSSGNWHCDSTWMGDRVITTSTRTWALPTYNNHLYKQISSQSGASNDNHYLGYSTPWGYFDFNRFHCHFSPRDWQRLINNNWGFRPKRLNFKLFNIQVKEVTQNDGTTTIANNLTSTVQVFTDSEYQLPYVLGSAHQGCLPPFPADVFMVPQYGYLTLNNGSQAVGRSSFYCLEYFPSQMLRTGNNFTFSYTFEDVPFHSSYAHSQSLDRLMNPLIDQYLYYLSRTNTPSGTTTQSRLQFSQAGASDIRDQSRNWLPGPCYRQQRVSKTAADNNNSDYSWTGATKYHLNGRDSLVNPGTAMASHKDDEEKYFPQSGVLIFGKQDSGKTNVDIEKVMITDEEEIRTTNPVATEQYGSVSTNLQSGNTQAATSDVNTQGVLPGMVWQDGDVYLQGPIWAKIPHTDGHFHPSPLMGGFGPKHPPPQILIKNTPVPANPSTTFSAAKFASFITQYSTGQVSVEIEWELQKENSKRWNPEIQYTSNYNKSVNVDFTVDTNGVYSEPRPIGTRYLTRNL

SEQ ID NO: 260 - protein, 735 aa, Artificial Sequence
  Synthetic Polypeptide
MAADGYLPDWLEDTLSEGIRQWWKLKPGPPPPKPAERHKDDSRGLVLPGYKYLGPFNGLDKGEPVNEADAAALEHDKAYDRQLDSGDNPYLKYNHADAEFQERLKEDTSFGGNLARAVFQAKKRVLEPLGLVEEPVKTAPGKKRPVEHSPAELDSSSGTGKSGQQPARKRLNFGQTGDADSVPDPQPLGQPPAAPSGLGTNTMASGSGAPMADNNEGADGVGNSSGNWHCDSTWMGDRVITTSTRTWALPTYNNHLYKQISSQSGASNDNHYFGYSTPWGYFDFNRFHCHFSPRDWQRLINNNWGFRPKRLNFKLFNIQVKEVTQNDGTTTIANNLTSTVQVFTDSEYQLPYVLGSAHQGCLPPFPADVFMVPQYGYLTLNNGSQAVGRSSFYCLEYFPPQMLRTGNNFTFSYTFEDVPFHSSYAHSQSLDRLMNPLIDQYLYYLSRTNTPSGTTTQSRLQFSQAGASDIRDQSRNWLPGPCYRQQRVSKTAADNNNSDYSWTGATKYHLNGRDSLVNPGTAMASHKDDEEKYFPQSGVLIFGKQDSGKTNVDIEKVMITDEEEIRTTNPVATEQYGSVSTNLQSGNTQAATSDVNTQGVLPGMVWQDRDVYLQGPIWAKIPHTDGHFHPSPLMGGFGPKHPPPQILIKNTPVPANPSTTFSAAKFASFITQYSTGQVSVEIEWELQKENSKRWNPEIQYTSNYNKSVNVDFTVDTNGVYSEPRPIGTRYLTRNL

SEQ ID NO: 261 - protein, 735 aa, Artificial Sequence
  Synthetic Polypeptide
MAADGYLPDWLEDTLSEGIRQWWKLKPGPPPPKPAERHKDDSRGLVLPGYKYLGPFNGLDKGEPVNEADAAALEHDKAYDRQLDSGDNPYLKYNHADAEFQERLKEDTSFGGNLARAVFQAKKRVLEPLGLVEEPVKTAPGKKRPVEHSPAELDSSSGTGKSGQQPARKRLNFGQTGDADSVPDPQPLGQPPAAPSGLGTNTMASGSGAPMADNNEGADGVGNSSGNWHCDSTWMGDRVITTSTRAWALPTYNNHLYKQISSQSGASNDNHYLGYSTPWGYFDFNRFHCHFSPRDWQRLINNNWGFRPKRLNFKLFNIQVKEVTQNDGTTTIANNLTSTVQVFTDSEYQLPYVLGSAHQGCPPPFPADVFMVPQYGYLTLNNGSQAVGRSSFYCLEYFPSQMLRTGNNFTFSYTFEDVPFHSSYAHSQSLDRLMNPLIDQYLYYLSRTNTPSGTTTQSRLQFSQAGASDIRDQSRNWLPGPCYRQQRVSKTAADNNNSDYSWTGATKYHLNGRDSLVNPGTAMASHKDDEEKYFPQSGVLIFGKQDSGKTNVDIEKVMITDEEEIRTTNPVATEQYGSVSTNLQSGNTQAATSDVNTQGVLPGMVWQDRDVYLQGPIWAKIPHTDGHFHPSPLMGGFGPKHPPPQILIKNTPVPANPSTTFSAAKFASFITQYSTGQVSVEIEWELQKENSKRWNPEIQYTSNYNKSVNVDFTVDTNGVYSEPRPIGTRYLTRNL

SEQ ID NO: 262 - protein, 735 aa, Artificial Sequence
  Synthetic Polypeptide
MAADGYLPDWLEDTLSEGIRQWWKLKPGPPPPKPAERHKDDSRGLVLPGYKYLGPFNGLDKGEPVNEADAAALEHDKAYDRQLDSGDNPYLKYNHADAEFQERLKEDTSFGGNLARAVFQAKKRVLEPLGLVEEPVKTAPGKKRPVEHSPAELDSSSGTGKSGQQPARKRLNFGQTGDADSVPDPQPLGQPPAAPSGLGTNTMASGSGAPMADNNEGADGVGNSSGNWHCDSTWMGDRVITTSTRTWALPTYNNHLYKQISSQSGASNDNHYFGYSTPWGYFDFNRFHCHFSPRDWQRLINNNWGFRPKRLNFKLFNIQVKEVTQNDGTTTIANNLTSTVQVFTDSEYQLPYVLGSAHQGCLPPFPADVFMVPQYGYLTLNNGSQAVGRSSFYCLEYFPSQMLRTGNNFTFSYTFEDVPFHSSYAHSQSLDRLMNPLIDQYLYYLSRTNTPSGTTTQSRLQFSQAGASDIRDQSRNWLPGPCYRQQRVSKTAADNNNSDYSWTGATKYHLNGRDSLVNPGTAMASHKDDEEKYFPQSGVLIFGKQDSGKTNVDIEKVMITDEEEIRTTNPVATEQYGSVSTNLQSGNTQAATSDVNTQGVLPGMVWQDRDVYLQGPIWAKIPHTDGHFHPSPLMGGFGPKHPPPQILIKNTPVPANPSTTFSAAKFAFFITQYSTGQVSVEIEWELQKENSKRWNPEIQYTSNYNKSVNVDFTVDTNGVYSEPRPIGTRYLTRNL

SEQ ID NO: 263 - protein, 735 aa, Artificial Sequence
  Synthetic Polypeptide
MAADGYLPDWLEDTLSEGIRQWWKLKPGPPPPKPAERHKDDSRGLVLPGYKYLGPFNGLDKGEPVNEADAAALEHDKAYDRQLDSGDNPYLKYNHADAEFQERLKEDTSFGGNLARAVFQAKKRVLEPLGLVEEPVKTAPGKKRPVEHSPAELDSSSGTGKSGQQPARKRLNFGQTGDADSVPDPQPLGQPPAAPSGLGTNTMASGSGAPMADNNEGADGVGNSSGNWHCDSTWMGDRVITTSTRTWALPTYNNHLYKQISSQSGASNDNHYLGYSTPWGYFDFNRFHCHFSPRDWQRLINNNWGFRPKRLNFKLFNIQVKEVTQNDGTTTIANNLTSTVQVFTDSEYQLPYVLGSAHQGCLPPFPADVFMVPQYGYLTLNNGSQAVGRSSFYRLEYFPSQMLRTGNNFTFSYTFEDVPFHSSYAHSQSLDRLMNPLIDQYLYYLSRTNTPSGTTTQSRLQFSQAGASDIRDQSRNWLPGPCYRQQRVSKTAADNNNSDYSWTGATKYHLNGRDSLVNPGTAMASHKDDEEKYFPQSGVLIFGKQDSGKTNVDIEKVMITDEEEIRTTNPVATEQYGSVSTNLQSGNTQAATSDVNTQGVLPGMVWQDRDVYLQGPIWAKIPHTDGHFHPSPLMGGFGPKHPPPQILIKNTPVPANPSTTFSAAKFASFITQYSTGQVSVEIEWELQKENSKRWNPEIQYTSNYNKSVNVDFTVDTNGVYSEPRPIGTRYLTRNL

SEQ ID NO: 264 - protein, 734 aa, Artificial Sequence
  Synthetic Polypeptide
MAADGYLPDWLEDTLSEGIRQWWKLKPGPPPPKPAERHKDDSRGLVLPGYKYLGPFNGLDKGEPVNEADAAALEHDKAYDRQLDSGDNPYLKYNHADAEFQERLKEDTSFGGNLARAVFQAKKRVLEPLGLVEEPVKTAPGKKRPVEHSPAELDSSSGTGKSGQQPARKRLNFGQTGDADSVPDPQPLGQPPAAPSGLGTNTMASGSGAPMADNNEGADGVGNSSGNWHCDSTWMGDRVITTSTRTWALPTYNNHLYKQISSQSGASNDNHYLGYSTPWGYFDFNRFHCHFSPRDWQRLINNNWGFRPKRLNFKLFNIQVKEVTQNDGTTTIANNLTSTVQVFTDSEYQLPYVLGSAHQGCLPPFPADVFMVPQYGYLTLNNGSQAVGRSSFYCLEYFPSQMLRTGNNFTFSYTFEDVPFHSSYAHSQSLDRLMNPLIDQYLYYLSRTNTPSGTTTQSRLQFSQAGASDIRDQSRNWLPGPCYRQQRVSKTAADNNSDYSWTGATKYHLNGRDSLVNPGTAMASHKDDEEKYFPQSGVLIFGKQDSGKTNVDIEKVMITDEEEIRTTNPVATEQYGSVSTNLQSGNTQAATSDVNTQGVLPGMVWQDRDVYLQGPIWAKIPHTDGHFHPSPLMGGFGPKHPPPQILIKNTPVPANPSTTFSAAKFASFITQYSTGQVSVEIEWELQKENSKRWNPEIQYTSNYNKSVNVDFTVDTNGVYSEPRPIGTRYLTRNL

SEQ ID NO: 265 - protein, 734 aa, Artificial Sequence
  Synthetic Polypeptide
MAADGYLPDWLEDTLSEGIRQWWKLKPGPPPPKPAERHKDDSRGLVLPGYKYLGPFNGLDKGEPVNEADAAALEHDKAYDRQLDSGDNPYLKYNHADAEFQERLKEDTSLGNLARAVFQAKKRVLEPLGLVEEPVKTAPGKKRPVEHSPAELDSSSGTGKSGQQPARKRLNFGQTGDADSVPDPQPLGQPPAAPSGLGTNTMASGSGAPMADNNEGADGVGNSSGNWHCDSTWMGDRVITTSTRTWALPTYNNHLYKQISSQSGASNDNHYFGYSTPWGYFDFNRFHCHFSPRDWQRLINNNWGFRPKRLNFKLFNIQVKEVTQNDGTTTIANNLTSTVQVFTDSEYQLPYVLGSAHQGCLPPFPADVFMVPQYGYLTLNNGSQAVGRSSFYCLEYFPSQMLRTGNNFTFSYTFEDVPFHSSYAHSQSLDRLMNPLIDQYLYYLSRTNTPSGTTTQSRLQFSQAGASDIRDQSRNWLPGPCYRQQRVSKTAADNNNSDYSWTGATKYHLNGRDSLVNPGTAMASHKDDEEKYFPQSGVLIFGKQDSGKTNVDIEKVMITDEEEIRTTNPVATEQYGSVSTNLQSGNTQAATSDVNTQGVLPGMVWQDRDVYLQGPIWAKIPHTDGHFHPSPLMGGFGPKHPPPQILIKNTPVPANPSTTFSAAKFASFITQYSTGQVSVEIEWELQKENSKRWNPEIQYTSNYNKSVNVDFTVDTNGVYSEPRPIGTRYLTRNL

SEQ ID NO: 266 - protein, 735 aa, Artificial Sequence
  Synthetic Polypeptide
MAADGYLPDWLEDTLSEGIRQWWKLKPGPPPPKPAERHKDDSRGLVLPGYKYLGPFNGLDKGEPVNEADAAALEHDKAYDRQLDSGDNPYLKYNHADAEFQERLKEDTSFGGNLARAVFQAKKRVLEPLGLVEEPVKTAPGKKRPVEHSPAELDSSSGTGKSGQQPARKRLNFGQTGDADSVPDPQPLGQPPAAPSGLGTNTMASGSGAPMADNNEGADGVGNSSGNWHCDSTWMGDRVITTSTRTWALPTYNNHLYKQISSQSGASNDNHYFGYSTPWGYFDFNRFHCHFSPRDWQRLINNNWGFRPKRLNFKLFNIQVKEVTQNDGTTTIANNLTSTVQVFTDSEYQLPYVLGSAHQGCLPPFPADVFMVPQYGYLTLNNGSQAVGRSSFYCLEYFPSQMLRTGNNFTFSYTFEDVPFHSSYAHSQSLDRLMNPLIDQYLYYLSRTNTPSGTTTQSRLQFSQAGASDIRDQSRNWLPGPCYRQQRVSKTAADNNNSDYSWTGATKYHLNGRDSLVNPGTAMASHKDDEEKYFPQSGVLIFGKQDSGKTNVDIEKVMITDEEEIRTTNPVATEQYGSVSTNLQSGNTQAATSDVNTQGVLPGMVWQDRDVYLQGPIWAKIPHTDGHFHPSPLMGGFGPKHPPPQILIKNTPVPANPSTTFSAAKFASFITQYSTGQVGVEIEWELQKENSKRWNPEIQYTSNYNKSVNVDFTVDTNGVYSEPRPIGTRYLTRNL

SEQ ID NO: 267 - protein, 735 aa, Artificial Sequence
  Synthetic Polypeptide
MAADGYLPDWLEDTLSEGIRQWWKLKPGPPPPKPAERHKDDSRGLVLPGYKYLGPFNGLDKGEPVNEADAAALEHDKAYDRQLDSGDNPYLKYNHADAEFQERLKEDTSFGGNLARAVFQAKKRVLEPLGLVEEPVKTAPGKKRPVEHSPAELDSSSGTGKSGQQPARKRLNFGQTGDADSVPDPQPLGQPPAAPSGLGTNTMASGSGAPMADNNEGADGVGNSSGNWHCDSTWMGDRVITTSTRTWALPTYNNHLYKQISSQSGASNDNHYFGYSTPWGYFDFNRFHCHFSPRDWQRLINNNWGFRPKRLNFKLFNIQVKEVTQNDSTTTIANNLTSTVQVFTDSEYQLPYVLGSAHQGCLPPFPADVFMVPQYGYLTLNNGSQAVGRSSFYCLEYFPSQMLRTGNNFTFSYTFEDVPFHSSYAHSQSLDRLMNPLIDQYLYYLSRTNTPSGTTTQSRLQFSQAGASDIRDQSRNWLPGPCYRQQRVSKTAADNNNSDYSWTGATKYHLNGRDSLVNPGTAMASHKDDEEKYFPQSGVLIFGKQDSGKTNVDIEKVMITDEEEIRTTNPVATEQYGSVSTNLQSGNTQAATSDVNTQGVLPGMVWQDRDVYLQGPIWAKIPHTDGHFHPSPLMGGFGPKHPPPQILIKNTPVPANPSTTFSAAKFASFITQYSTGQVSVEIEWELQKENSKRWNPEIQYTSNYNKSVNVDFTVDTNGVYSEPRPIGTRYLTRNL

SEQ ID NO: 268 - protein, 735 aa, Artificial Sequence
  Synthetic Polypeptide
MAADGYLPDWLEDTLSEGIRQWWKLKPGPPPPKPAERHKDDSRGLVLPGYKYLGPFNGLDKGEPVNEADAAALEHDKAYDRQLDSGDNPYLKYNHADAEFQERLKEDTSFGGNLARAVFQAKKRVLEPLGLVEEPVKTAPGKKRPVEHSPAELDSSSGTGKSGQQPARKRLNFGQTGDADSVPDPQPLGQPPAAPSGLGTNTMASGSGAPMADNNEGADGVGNSSGNWHCDSTWMGDRVITTSTRTWALPTYNNHLYKQISSQSGASNDNHYFGYSTPWGYFDFNRFHCHFSPRDWQRLINNNWGFRPKRLNFKLFNIQVKEVTQNDGTTTIANNLTSTVQVFTDSEYQLPYVLGSAHQGCLPPFPADVFMVPQYGYLTLNNGSQAVGRSSFYCLEYFPSQMLRTGNNFTFSYTFEDVPFHSSYAHSQSLDRLMNPLIDQYLYYLSRTNTPSGTTTQSRLQFSQAGASDIRDQSRNWLPGPCYRQQRVSKTAADNNNSDYSWTGATKYHLNGRDSLVNPGTAMASHKDDEEKYFPQSGVLIFRKQDSGKTNVDIEKVMITDEEEIRTTNPVATEQYGSVSTNLQSGNTQAATSDVNTQGVLPGMVWQDRDVYLQGPIWAKIPHTDGHFHPSPLMGGFGPKHPPPQILIKNTPVPANPSTTFSAAKFAYFITQYSTGQVSVEIEWELQKENSKRWNPEIQYTSNYNKSVNVDFTVDTNGVYSEPRPIGTRYLTRNL

SEQ ID NO: 269 - protein, 735 aa, Artificial Sequence
  Synthetic Polypeptide
MAADGYLPDWLEDTLSEGIRQWWKLKPGPPPPKPAERHKDDSRGLVLPGYKYLGPFNGLDKGEPVNEADAAALEHDKAYDRQLDSGDNPYLKYNHADAEFQERLKEDTSFGGNLARAVFQAKKRVLEPLGLVEEPVKTAPGKKRPVEHSPAELDSSSGTGKSGQQPARKRLNFGQTGDADSVPDPQPLGQPPAAPSGLGTNTMASGSGAPMADNNEGADGVGNSSGNWHCDSTWMGDRVITTSTRTWALPTYNNHLYKQISSQSGASNDNHYFGYSTPWGYFDFNRFHCHFSPRDWQRLINNNWGFRPKRLDFKLFNIQVKEVTQNDGTTTIANNLTSTVQVFTDSEYQLPYVLGSAHQGCLPPFPADVFMVPQYGYLTLNNGSQAVGRSSFYCLEYFPSQMLRTGNNFTFSYTFEDVPFHSSYAHSQSLDRLMNPLIDQYLYYLSRTNTPSGTTTQSRLQFSQAGASDIRDQSRNWLPGPCYRQQRVSKTAADNNNSDYSWTGATKYHLNGRDSLVNPGTAMASHKDDEEKYFPQSGVLIFGKQDSGKTNVDIEKVMITDEEEIRTTNPVATEQYGSVSTNLQSGNTQAATSDVNTQGVLPGMVWQDRDVYLQGPIWAKIPHTDGHFHPSPLMGGFGPKHPPPQILIKNTPVPANPSTTFSAAKFASFITQYSTGQVSVEIEWELQKENSKRWNPEIQYTSNYNKSVNVDFTVDTNGVYSEPRPIGTRYLTRNL

SEQ ID NO: 270 - protein, 735 aa, Artificial Sequence
  Synthetic Polypeptide
MAADGYLPDWLEDTLSEGIRQWWKLKPGPPPPKPAERHKDDSRGLVLPGYKYLGPFNGLDKGEPVNEADAAALEHDKAYDRQLDSGDNPYLKYNHADAEFQERLKEDTSFGGNLARAVFQAKKRVLEPLGLVEEPVKTAPGKKRPVEHSPAELDSSSGTGKSGQQPARKRLNFGQTGGADSVPDPQPLGQPPAAPSGLGTNTMASGSGAPMADNNEGADGVGNSSGNWHCDSTWMGDRVITTSTRTWALPTYNNHLYKQISSQSGASNDNHYFGYSTPWGYFDFNRFHCHFSPRDWQRLINNNWGFRPKRLNFKLFNIQVKEVTQNDGTTTIANNLTSTVQVFTDSEYQLPYVLGSAHQGCLPPFPADVFMVPQYGYLTLNNGSQAVGRSSFYCLEYFPSQMLRTGNNFTFSYTFEDVPFHSSYAHSQSLDRLMNPLIDQYLYYLSRTNTPSGTTTQSRLQFSQAGASDIRDQSRNWLPGPCYRQQRVSKTAADNNNSDYSWTGATKYHLNGRDSLVNPGTAMASHKDDEEKYFPQSGVLIFGKQDSGKTNVDIEKVMITDEEEIRTTNPVATEQYGSVSTNLQSGNTQAATSDVNTQGVLPGMVWQDRDVYLQGPIWAKIPHTDGHFHPSPLMGGFGPKHPPPQILIKNTPVPANPSTTFSAAKFASFITQYSTGQVSVEIEWELQKENSKRWNPEIQYTSNYNKSVNVDFTVDTNGVYSEPRPIGTRYLTRNL

SEQ ID NO: 271 - protein, 735 aa, Artificial Sequence
  Synthetic Polypeptide
MAADGYLPDWLEDTLSEGIRQWWKLKPGPPPPKPAERHKDDSRGLVLPGYKYLGPFNGLDKGEPVNEADAAALEHDKAYDRQLDSGDNPYLKYNHADAEFQERLKEDTSFGGNLARAVFQAKKRVLEPLGLVEEPVKTAPGKKRPVEHSPAELDSSSGTGKSGQQPARKRLNFGQTGDADSVPDPQPLGQPPAAPSGLGTNTMASGSGAPMADNNEGADGVGNSSGNWHCDSTWMGDRVITTSTRTWALPTYNNHLYKQISSQSGASNDNHYFGYSTPWGYFDFNRFHCHFSPRDWQRLINNNWGFRPKRLNFKLFNIQVKEVTQNDGTTTIANNLTSTVQVFTDSEYQLPYVLGSAHQGCLPPFPADVFMVPQYGYLTLNNGSQAVGRSSFYCLEYFPSQMLRTGNNLTFSYTFEDVPFHSSYAHSQSLDRLMNPLIDQYLYYLSRTNTPSGTTTQSRLQFSQAGASDIRDQSRNWLPGPCYRQQRVSKTAADNNNSDYSWTGATKYHLNGRDSLVNPGTAMASHKDDEEKYFPQSGVLIFGKQDSGKTNVDIEKVMITDEEEIRTTNPVATEQYGSVSTNLQSGNTQAATSDVNTQGVLPGMVWQDRDVYLQGPIWAKIPHTDGHFHPSPLMGGFGPKHPPPQILIKNTPVPANPSTTFSAAKFASFITQYSTGQVSVEIEWELQKENSKRWNPEIQYTSNYNKSVNVDFTVDTNGVYSEPRPIGTRYLTRNL

SEQ ID NO: 272 - protein, 735 aa, Artificial Sequence
  Synthetic Polypeptide
MAADGYLPDWLEDTLSEGIRQWWKLKPGPPPPKPAERHKDDSRGLVLPGYKYLGPFNGLDKGEPVNEADAAALEHDKAYDRQLDSGDNPYLKYNHADAEFQERLKEDTSFGGNLARAVFQAKKRVLEPLGLVEEPVKTAPGKKRPVEHSPAELDSSSGTGKSGQQPARKRLNFGQTGDADSVPDPQPLGQPPAAPSGLGTNTMASGSGAPMADNNEGADGVGNSSGNWHCDSTWMGDRVITTSTRTWALPTYNNHLYKQISSQSGASNDNHYFGYSTPWGYFDFNRFHCHFSPRDWQRLINNNWGFRPKRLNFKLFNIQVKEVTQNDGTTTIANNLTSTVQVFTDSEYQLPYVLGSAHQGCLPPFPADVFMVPQYGYHTLNNGSQAVGRSSFYCLEYFPSQMLRTGNNFTFSYTFEDVPFHSSYAHSQSLDRLMNPLIDQYLYYLSRTNTPSGTTTQSRLQFSQAGASDIRDQSRNWLPGPCYRQQRVSKTAADNNNSDYSWTGATKYHLNGRDSLVNPGTAMASHKDDEEKYFPQSGVLIFGKQDSGKTNVDIEKVMITDEEEIRTTNPVATEQYGSVSTNLQSGNTQAATSDVNTQGVLPGMVWQDRDVYLQGPIWAKIPHTDGHFHPSPLMGGFGPKHPPPQILIKNTPVPANPSTTFSAAKFASFITQYSTGQVSVEIEWELQKENSKRWNPEIQYTSNYNKSVNVDFTVDTNGVYSEPRPIGTRYLTRNL

SEQ ID NO: 273 - protein, 735 aa, Artificial Sequence
  Synthetic Polypeptide
MAADGYLPDWLEDTLSEGIRQWWKLKPGPPPPKPAERHKDDSRGLVLPGYKYLGPFNGLDKGEPVNEADAAALEHDKAYDRQLDSGDNPYLKYNHADAEFQERLKEDTSFGGNLARAVFQAKKRVLEPLGLVEEPVKTAPGKKRPVEHSPAELDSSSGTGKSGQQPARKRLNFGQTGDADSVPDPQPLGQPPAAPSGLGTNTMASGSGAPMADNNEGADGVGNSSGNWHCDSTWMGDRVITTSTRTWALPTYNNHLYKQISSQSGASNDNHYFGYSTPWGYFDFNRFHCHFSPRDWQRLINNNWGFRPKRLNFKLFNIQVKEVTQNDGTTTIANNLTSTVQVFTDSEYQLPYVLGSAHQGCLPPFPADVFMVPQYGYLTLNNGSQAVGRSSFYCLEYFPSQMLRTGNNFTFSYTFEDVPFHSSYAHSQSLDRLMNPLIDQYPYYLSRTNTPSGTTTQSRLQFSQAGASDIRDQSRNWLPGPCYRQQRVSKTAADNNNSDYSWTGATKYHLNGRDSLVNPGTAMASHKDDEEKYFPQSGVLIFGKQDSGKTNVDIEKVMITDEEEIRTTNPVATEQYGSVSTNLQSGNTQAATSDVNTQGVLPGMVWQDRDVYLQGPIWAKIPHTDGHFHPSPLMGGFGPKHPPPQILIKNTPVPANPSTTFSAAKFASFITQYSTGQVSVEIEWELQKENSKRWNPEIQYTSNYNKSVNVDFTVDTNGVYSEPRPIGTRYLTRNL

SEQ ID NO: 274 - protein, 735 aa, Artificial Sequence
  Synthetic Polypeptide
MAADGYLPDWLEDTLSEGIRQWWKLKPGPPPPKPAERHKDDSRGLVLPGYKYLGPFNGLDKGEPVNEADAAALEHDKAYDRQLDSGDNPYLKYNHADAEFQERLKEDTSFGGNLARAVFQAKKRVLEPLGLVEEPVKTAPGKKRPVEHSPAELDSSSGTGKSGQQPARKRLNFGQTGDADSVPDPQPLGQPPAAPSGLGTNTMASGSGAPMADNNEGADGVGNSSGNWHCDSTWMGDRVITTSTRTWALPTYNNHLYKQISSQSGASNDNHYFGYSTPWGYFDFNRFHCHFSPRDWQRLINNNWGFRPKRLNFKLFNIQVKEVTQNDGTTTIANNLTSTVQVFTDSEYQLPYVLGSAHQGCLPPFPADVFMVPQYGYLTLNNGSQAVGRSSFYCLEYFPSQMLRTGNNFTFSYTFEDVPFHSSYAHSQSLDRLMNPLIDQYLYYLSRTNTPSGTTTQSRLQFSQAGASDIRDQSRNWLPGPCYRQQRVSKTAADNNNSDYSWTGATKYHLNGRDSLVNPGTAMASHKDDEEKYFPQSGVLIFGKQDSGKTNVDIEKVMITDEEEIRTTNPVATEQYGSVSTNLQSGNTQAATSDVNTQGVLPGMVWQDRDVYLQGPIWAKIPHTDGHFHPSPLMGGFGPKHPPPQILIKNTPVPANPPTTFSAAKFASFITQYSTGQVSVEIEWELQKENSKRWNPEIQYTSNYNKSVNVDFTVDTNGVYSEPRPIGTRYLTRNL

SEQ ID NO: 275 - protein, 735 aa, Artificial Sequence
  Synthetic Polypeptide
MAADGYLPDWLEDTLSEGIRQWWKLKPGPPPPKPAERHKDDSRGLVLPGYKYLGPFNGLDKGEPVNEADAAALEHDKAYDRQLDSGDNPYLKYNHADAEFQERLKEDTSFGGNLARAVFQAKKRVLEPLGLVEEPVKTAPGKKRPVEHSPAELDSSSGTGKSGQQPARKRLNFGQTGDADSVPDPQPLGQPPAAPSGLGTNTMASGSGAPMADNNEGADGVGNSSGNWHCDSTWMGDRVITTSTRTWALPTYNNHLYKQISSQSGASNDNHYFGYSTPWGYFDFNRFHCHFSPRDWQRLINNNWGFRPKRLNFKLFNIQVKEVTQNDGTTTIANNLTSTVQVFTDSEYQLPYVLGSAHQGCLPPFPADVFMVPQYGYLTLNNGSQAVGRSSFYCLEYFPSQMLRTGNNFTFSYTFEDVPFHSSYAHSQSLDRLMNPLIDQYLYYLSRTNTPSGTTTQSRLQFSQAGASDIRDQSRNWLPGPCYRQQRVPKTAADNNNSDYSWTGATKYHLNGRDSLVNPGTAMASHKDDEEKYFPQSGVLIFGKQDSGKTNVDIEKVMITDEEEIRTTNPVATEQYGSVSTNLQSGNTQAATSDVNTQGVLPGMVWQDRDVYLQGPIWAKIPHTDGHFHPSPLMGGFGPKHPPPQILIKNTPVPANPSTTFSAAKFASFITQYSTGQVSVEIEWELQKENSKRWNPEIQYTSNYNKSVNVDFTVDTNGVYSEPRPIGTRYLTRNL

SEQ ID NO: 276 - protein, 735 aa, Artificial Sequence
  Synthetic Polypeptide
MAADGYLPDWLEDTLSEGIRQWWKLKPGPPPPKPAERHKDDSRGLVLPGYKYLGPFNGLDKGEPVNEADAAALEHDKAYDRQLDSGDNPYLKYNHADAEFQERLKEDTSFGGNLARAVFQAKKRVLEPLGLVEEPVKTAPGKKRPVEHSPAELDSSSGTGKSGQQPARKRLNFGQTGDADSVPDPQPLGQPPAAPSGLGTNTMASGSGAPMADNNEGADGVGNSSGNWHCDSTWMGDRVITTSTRTWALPTYNNHLYKQISSQSGASNDNHYFGYSTPWGYFDFNRFHCHFSPRDWQRLINNNWGFRPKRLNFKLFNIQVKEVTQNDGTTTIANNLTSTVQVFTDSEYQLPYVLGSAHQGCLPPFPADVFMVPQYGYLTLNNGSQAVGRSSFYCLEYFPSQMLRTGNNFTFSYTFEDVPFHSSYAHSQSLDRLMNPLIDQYLYYLSRTNTPSGTTTQSRLQFSQAGASDIRDQSRNWLPGPCYRQQRVSKTAADNNNSDYSWTGATKYHLNGRDSLVNPGTAMASHKDDEEKYFPQSGVLIFGKQDSGKTNVDIEKVMITDEEEIRTTNPVATEQYGSVSTNLQSGNTQAATSDVNTQGVLPGMVWQDRDVYLQGPIWAKIPHTDGHFHPSPLMGGFGPKHPPPQILIKNTPVPANPSTTFSAAKFASFITQYSTGQVSVEIEWELQKENSKRWNPEIQYTSNYNKSVNVDFTVDTNGVYSEPRPIGTRYLTRNL

SEQ ID NO: 277 - protein, 735 aa, Artificial Sequence
  Synthetic Polypeptide
MAADGYLPDWLEDTLSEGIRQWWKLKPGPPPPKPAERHKDDSRGLVLPGYKYLGPFNGLDKGEPVNEADAAALEHDKAYDRQLDSGDNPYLKYNHADAEFQERLKEDTPFGGNLARAVFQAKKRVLEPLGLVEEPVKTAPGKKRPVEHSPAELDSSSGTGKSGQQPARKRLNFGQTGDADSVPDPQPLGQPPAAPSGLGTNTMASGSGAPMADNNEGADGVGNSSGNWHCDSTWMGDRVITTSTRTWALPTYNNHLYKQISSQSGASNDNHYFGYSTPWGYFDFNRFHCHFSPRDWQRLINNNWGFRPKRLNFKLFNIQVKEVTQNDGTTTIANNLTSTVQVFTDSEYQLPYVLGSAHQGCLPPFPADVFMVPQYGYLTLNNGSQAVGRSSFYCLEYFPSQMLRTGNNFTFSYTFEDVPFHSSYAHSQSLDRLMNPLIDQYLYYLSRTNTPSGTTTQSRLQFSQAGASDIRDQSRNWLPGPCYRQQRVSKTAADNNNSDYSWTGATKYHLNGRDSLVNPGTAMASHKDDEEKYFPQSGVLIFGKQDSGKTNVDIEKVMITDEEEIRTTNPVATEQYGSVSTNLQSGNTQAATSDVNTQGVLPGMVWQDRDVYLQGPIWAKIPHTDGHFHPSPLMGGFGPKHPPPQILIKNTPVPANPSTTFSAAKFASFITQYSTGQVSVEIEWELQKENSKRWNPEIQYTSNYNKSVNVDFTVDTNGVYSEPRPIGTRYLTRNL

SEQ ID NO: 278 - protein, 735 aa, Artificial Sequence
  Synthetic Polypeptide
MAADGYLPDWLEDTLSEGIRQWWKLKPGPPPPKPAERHKDDSRGLVLPGYKYLGPFNGLDKGEPVNEADAAALEHDKAYDRQLDSGDNPYLKYNHADAEFQERLKEDTSFGGNLARAVFQAKKRVLEPLGLVEEPVKTAPGKKRPVEHSPAELDSSSGTGKSGQQPARKRLNFGQTGDADSVPDPQPLGQPPAAPSGLGTNTMASGSGAPMADNNEGADGVGNSSGNWHCDSTWMGDRVITTSTRTWALPTYNNHLYKQISSQSGASNDNHYFGYSTPWGYFDFNRFHCHFSPRDWQRLINNNWGFRPKRLNSKLFNIQVKEVTQNDGTTTIANNLTSTVQVFTDSEYQLPYVLGSAHQGCLPPFPADVFMVPQYGYLTLNNGSQAVGRSSFYCLEYFPSQMLRTGNNFTFSYTFEDVPFHSSYAHSQSLDRLMNPLIDQYLYYLSRTNTPSGTTTQSRLQFSQAGASDIRDQSRNWLPGPCYRQQRVSKTAADNNNSDYSWTGATKYHLNGRDSLVNPGTAMASHKDDEEKYFPQSGVLIFGKQDSGKTNVDIEKVMITDEEEIRTTNPVATEQYGSVSTNLQSGNTQAATSDVNTQGVLPGMVWQDRDVYLQGPIWAKIPHTDGHFHPSPLMGGFGPKHPPPQILIKNTPVPANPSTTFSAAKFASFITQYSTGQVSVEIEWELQKENSKRWNPEIQYTSNYNKSVNVDFTVDTNGVYSEPRPIGTRYLTRNL

SEQ ID NO: 279 - protein, 735 aa, Artificial Sequence
  Synthetic Polypeptide
MAADGYLPDWLEDTLSEGIRQWWKLKPGPPPPKPAERHKDDSRGLVLPGYKYLGPFNGLDKGEPVNEADAAALEHDKAYDRQLDSGDNPYLKYNHADAEFQERLKEDTSFGGNLARAVFQAKKRVLEPLGLVEEPVKTAPGKKRPVEHSPAELDSSSGTGKSGQQPARKRLNFGQTGDADSVPDPQPLGQPPAAPSGLGTNTMASGSGAPMADNNEGADGVGNSSGNWHCDSTWMGDRVITTSTRTWALPTYNNHLYKQISSQSGASNDNHYFGYSTPWGYFDFNRFHCHFSPRDWQRLINNNWGFRPKRLNFKLFNIQVKEVTQNDGTTTIANNLTSTVQVFTDSEYQLPYVLGSAHQGCLPPFPADVFMVPQYGYLTLNNGSQAVGRSSFYCLEYFPSQMLRTGNNFTFSYTFEDVPFHSSYAHSQGLDRLMNPLIDQYLYYLSRTNTPSGTTTQSRLQFSQAGASDIRDQSRNWLPGPCYRQQRVSKTAADNNNSDYSWTGATKYHLNGRDSLVNPGTAMASHKDDEEKYFPQSGVLIFGKQDSGKTNVDIEKVMITDEEEIRTTNPVATEQYGSVSTNLQSGNTQAATSDVNTQGVLPGMVWQDRDVYLQGPIWAKIPHTDGHFHPSPLMGGFGPKHPPPQILIKNTPVPANPSTTFSAAKFASFITQYSTGQVSVEIEWELQKENSKRWNPEIQYTSNYNKSVNVDFTVDTNGVYSEPRPIGTRYLTRNL

SEQ ID NO: 280 - protein, 735 aa, Artificial Sequence
  Synthetic Polypeptide
MAADGYLPDWLEDTLSEGIRQWWKLKPGPPPPKPAERHKDDSRGLVLPGYKYLGPFNGLDKGEPVNEADAAALEHDKAYDRQLDSGDNPYLKYNHADAEFQERLKEDTSFGGNLARAVFQAKKRVLEPLGLVEEPVKTAPGKKRPVEHSPAELDSSSGTGKSGQQPARKRLNFGQTGDADSVPDPQPLGQPPAAPSGLGTNTMASGSGAPMADNNEGADGVGNSSGNWHCDSTWMGDRVITTSTRTWALPTYNNHLYKQISSQSGASNDNHYFGYSTPWGYFDFNRFHCHFSPRDWQRLINNNWGFRPKRLNFKLFNIQVKEVTQNDGTTTIANNLTSTVQVFTDSEYQLPYVLGSAHQGCLPPLPADVFMVPQYGYLTLNNGSQAVGRSSFYCLEYFPSQMLRTGNNFTFSYTFEDVPFHSSYAHSQSLDRLMNPLIDQYLYYLSRTNTPSGTTTQSRLQFSQAGASDIRDQSRNWLPGPCYRQQRVSKTAADNNNSDYSWTGATKYHLNGRDSLVNPGTAMASHKDDEEKYFPQSGVLIFGKQDSGKTNVDIEKVMITDEEEIRTTNPVATEQYGSVSTNLQSGNTQAATSDVNTQGVLPGMVWQDRDVYLQGPIWAKIPHTDGHFHPSPLMGGFGPKHPPPQILIKNTPVPANPSTTFSAAKFASFITQYSTGQVSVEIEWELQKENSKRWNPEIQYTSNYNKSVNVDFTVDTNGVYSEPRPIGTRYLTRNL

SEQ ID NO: 281 - protein, 735 aa, Artificial Sequence
  Synthetic Polypeptide
MAADGYLPDWLEDTLSEGIRQWWKLKPGPPPPKPAERHKDDSRGLVLPGYKYLGPFNGLDKGEPVNEADAAALEHDKAYDRQLDSGDNPYLKYNHADAEFQERLKEDTSFGGNLARAVFQAKKRVLEPLGLVEEPVKTAPGKKRPVEHSPAELDSSSGTGKSGQQPARKRLNFGQTGDADSVPDPQPLGQPPAAPSGLGTNTMASGSGAPMADNNEGADGVGNSSGNWHCDSTWMGDRVITTSTRTWALPTYNNHLYKQISSQSGASNDNHYFGYSTPWGYFDFNRFHCHFSPRDWQRPINNNWGFRPKRLNFKLFNIQVKEVTQNDGTTTIANNLTSTVQVFTDSEYQLPYVLGSAHQGCLPPFPADVFMVPQYGYLTLNNGSQAVGRSSFYCLEYFPSQMLRTGNNFTFSYTFEDVPFHSSYAHSQSLDRLMNPLIDQYLYYLSRTNTPSGTTTQSRLQFSQAGASDIRDQSRNWLPGPCYRQQRVSKTAADNNNSDYSWTGATKYHLNGRDSLVNPGTAMASHKDDEEKYFPQSGVLIFGKQDSGKTNVDIEKVMITDEEEIRTTNPVATEQYGSVSTNLQSGNTQAATSDVNTQGVLPGMVWQDRDVYLQGPIWAKIPHTDGHFHPSPLMGGFGPKHPPPQILIKNTPVPANPSTTFSAAKFASFITQYSTGQVSVEIEWELQKENSKRWNPEIQYTSNYNKSVNVDFTVDTNGVYSEPRPIGTRYLTRNL

SEQ ID NO: 282 - protein, 735 aa, Artificial Sequence
  Synthetic Polypeptide
MAADGYLPDWLEDTLSEGIRQWWKLKPGPPPPKPAERHKDDSRGLVLPGYKYLGPFNGLDKGEPVNEADAAALEHDEAYDRQLDSGDNPYLKYNHADAEFQERLKEDTSFGGNLARAVFQAKKRVLEPLGLVEEPVKTAPGKKRPVEHSPAELDSSSGTGKSGQQPARKRLNFGQTGDADSVPDPQPLGQPPAAPSGLGTNTMASGSGAPMADNNEGADGVGNSSGNWHCDSTWMGDRVITTSTRTWALPTYNNHLYKQISSQSGASNDNHYFGYSTPWGYFDFNRFHCHFSPRDWQRLINNNWGFRPKRLNFKLFNIQVKEVTQNDGTTTIVNNLTSTVQVFTDSEYQLPYVLGSAHQGCLPPFPADVFMVPQYGYLTLNNGSQAVGRSSFYCLEYFPSQMLRTGNNFTFSYTFEDVPFHSSYAHSQSLDRLMNPLIDQYLYYLSRTNTPSGTTTQSRLQFSQAGASDIRDQSRNWLPGPCYRQQRVSKTAADNNNSDYSWTGATKYHLNGRDSLVNPGTAMASHKDDEEKYFPQSGVLIFGKQDSGKTNVDIEKVMITDEEEIRTTNPVATEQYGSVSTNLQSGNTQAATSDVNTQGVLPGMVWQDRDVYLQGPIWAKIPHTDGHFHPSPLMGGFGPKHPPPQILIKNTPVPANPSTTFSAAKFAYFITQYSTGQVSVEIEWELQKGNSKRWNPEIQYTSNYNKSVNVDFTVDTNGVYSEPRPIGTRYLTRNL

SEQ ID NO: 283 - protein, 735 aa, Artificial Sequence
  Synthetic Polypeptide
MAADGYLPDWLEDTLSEGIRQWWKLKPGPPPPKPAERHKDDSRGLVLPGYKYLGPFNGLDKGEPVNEADAAALEHDKAYDRQLDSGDNPYLKYNHADAEFQERLKEDTSFGGNLARAVFQAKKRVLEPLGLVEEPVKTAPGKKRPVEHSPAELDSSSGTGKSGQQPARKRLNFGQTGDADSVPDPQPLGQPPAAPSGLGTNTMASGSGAPMADNNEGADGVGNSSGNWHCDSTWMGDRVITTSTRTWALPTYNNHLYKQISSQSGASNDNHYFGYSTPWGYFDFNRFHCHFSPRDWQRLINNNWGFRPKRLNFKLFNIQVKEVTQNDGTTTIANNLTSTVQVFTDSEYQLPYVLGSAHQGCLPPFPADVFMVPQYGYLTLNNGSQAVGRSSFYCLEYFPSQMLRTGNNCTFSYTFEDVPFHSSYAHSQSLDRLMNPLIDQYLYYLSRTNTPSGTTTQSRLQFSQAGASDIRDQSRNWLPGPCYRQQRVSKTAADNNNSDYSWTGATKYHLNGRDSLVNPGTAMASHKDDEEKYFPQSGVLIFGKQDSGKTNVDIEKVMITDEEEIRTTNPVATEQYGSVSTNLQSGNTQAATSDVNTQGVLPGMVWQDRDVYLQGPIWAKIPHTDGHFHPSPLMGGFGPKHPPPQILIKNTPVPANPSTTFSAAKFASFITQYSTGQVSVEIEWELQKENSKRWNPEIQYTSNYNKSVNVDFTVDTNGVYSEPRPIGTRYLTRNL

SEQ ID NO: 284 - protein, 735 aa, Artificial Sequence
  Synthetic Polypeptide
MAADGYLPDWLEDTLSEGIRQWWKLKPGPPPPKPAERHKDDSRGLVLPGYKYLGPFNGLDKGEPVNEADAAALEHDKAYDRQLDSGDNPYLKYNHADAEFQERLKEDTSFGGNLARAVFQAKKRVLEPLGLVEEPVKTAPGKKRPVEHSPAELDSSSGTGKSGQQPARKRLNFGQTGDADSVPDPQPLGQPPAAPSGLGTNTMASGSGAPMADNNEGADGVGNSSGNWHCDSTWMGDRVITTSTRTWALPTYNNHLYKQISSQSGASNDNHYFGYSTPWGYFDFNRFHCHFSPRDWQRLINNNWGFRPKRPNFKLFNIQVKEVTQNDGTTTIANNLTSTVQVFTDSEYQLPYVLGSAHQGCLPPFPADVFMVPQYGYLTLNNGSQAVGRSSFYCLEYFPSQMLRTGNNFTFSYTFEDVPFHSSYAHSQSLDRLMNPLIDQYLYYLSRTNTPSGTTTQSRLQFSQAGASDIRDQSRNWLPGPCYRQQRVSKTAADNNNSDYSWTGATKYHLNGRDSLVNPGTAMASHKDDEEKYFPQSGVLIFGKQDSGKTNVDIEKVMITDEEEIRTTNPVATEQYGSVSTNLQSGNTQAATSDVNTQGVLPGMVWQDRDVYLQGPIWAKIPHTDGHFHPSPLMGGFGPKHPPPQILIKNTPVPANPSTTFSAAKFASFITQYSTGQVSVEIEWELQKENSKRWNPEIQYTSNYNKSVNVDFTVDTNGVYSEPRPIGTRYLTRNL

SEQ ID NO: 285 - protein, 735 aa, Artificial Sequence
  Synthetic Polypeptide
MAADGYLPDWLEDTLSEGIRQWWKLKPGPPPPKPAERHKDDSRGLVLPGYKYLGPFNGLDKGEPVNEADAAALEHDKAYDRQLDSGDNPYLKYNHADAEFQERLKEDTSFGGNLARAVFQAKKRVLEPLGLVEEPVKTAPGKKRPVEHSPAELDSSSGTGKSGQQPARKRLNFGQTGDADSVPDPQPLGQPPAAPSGLGTNTMASGSGAPMAGNNEGADGVGNSSGNWHCDSTWMGDRVITTSTRTWALPTYNNHLYKQISSQSGASNDNHYFGYSTPWGYFDFNRFHCHFSPRDWQRLINNNWGFRPKRLNFKLFNIQVKEVTQNDGTTTIANNLTSTVQVFTDSEYQLPYVLGSAHQGCLPPFPADVFMVPQYGYLTLNNGSQAVGRSSFYCLEYFPSQMLRTGNNFTFSYTFEDVPFHSSYAHSQSLDRLMNPLIDQYLYYLSRTNTPSGTTTQSRLQFSQAGASDIRDQSRNWLPGPCYRQQRVSKTAADNNNSDYSWTGATKYHLNGRDSLVNPGTAMASHKDDEEKYFPQSGVLIFGKQDSGKTNVDIEKVMITDEEEIRTTNPVATEQYGSVSTNLQSGNTQAATSDVNTQGVLPGMVWQDRDVYLQGPIWAKIPHTDGHFHPSPLMGGFGPKHPPPQILIKNTPVPANPSTTFSAAKFASFITQYSTGQVSVEIEWELQKENSKRWNPEIQYTSNYNKSVNVDFTVDTNGVYSEPRPIGTRYLTRNL

SEQ ID NO: 286 - protein, 735 aa, Artificial Sequence
  Synthetic Polypeptide
MAADGYLPDWLEDTLSEGIRQWWKLKPGPPPPKPAERHKDDSRGLVLPGYKYLGPFNGLDKGEPVNEADAAALEHDKAYDRQLDSGDNPYLKYNHADAEFQERLKEDTPFGGNLARAVFQAKKRVLEPLGLVEEPVKTAPGKKRPVEHSPAELDSSSGTGKSGQQPARKRLNFGQTGDADSVPDPQPLGQPPAAPSGLGTNTMASGSGAPMADNNEGADGVGNSSGNWHCDSTWMGDRVITTSTRTWALPTYNNHLYKQISSQSGASNDNHYFGYSTPWGYFDFNRFHCHFSPRDWQRLINNNWGFRPKRLNFKLFNIQVKEVTQNDGTTTIANNLTSTVQVFTDSEYQLPYVLGSAHQGCLPPFPADVFMVPQYGYLTLNNGSQAVGRSSFYCLEYFPSQMLRTGNNFTFSYTFEDVPFHSSYAHSQSLDRLMNPLIDQYLYYLSRTNTPSGTTTQSRLQFSQAGASDIRDQSRNWLPGPCYRQQRVSKTAADNNNSDYSWTGATKYHLNGRDSLVNPGTAMASHKDDEEKYFPQSGVLIFGKQDSGKTNVDIEKVMITDEEEIRTTNPVATEQYGSVSTNLQSGNTQAATSDVNTQGVLPGMVWQDRDVYLQGPIWAKIPHTDGHFHPSPLMGGFGPKHPPPQILIKNTPVPANPSTTFSAAKFASFITQYSTGQVSVEIEWELQKENSKRWNPEIQYTSNYNKSVNVDFTMDTNGVYSEPRPIGTRYLTRNL

SEQ ID NO: 287 - protein, 735 aa, Artificial Sequence
  Synthetic Polypeptide
MAADGYLPDWLEDTLSEGIRQWWKLKPGPPPPKPAERHKDDSRGLVLPGYKYLGPFNGLDKGEPVNEADAAALEHDKAYDRQLDSGDNPYLKYNHADAEFQERLKEDTSFGGNLARAVFQAKKRVLEPLGLVEEPVKTAPGKKRPVEHSPAELDSSSGTGKSGQQPARKRLNFGQTGDADSVPDPQPLGQPPAAPSGLGTNTMASGSGAPMADNNEGADGVGNSSGNWHCDSTWMGDRVITTSTRTWALPTYNNHLYKQISSQSGASNDNHYFGYSTPWGYFDFNRFHCHFSPRDWQRLINNNWGFRPKRLNFKLFNIQVKEVTQNDGTTTIANNLTSTVQVFTDSEYQLPYVLGSAHQGCLPPFPADVFMVPQYGYLTLNNGSQAVGRSSFYCLEYFPSQMLRTGNNFTFSYTFEDVPFHSSYAHSQSLDRLMNPLIDQYLYYLSRTNTPSGTTTQPRLQFSQAGASDIRDQSRNWLPGPCYRQQRVSKTAADNNNSDYSWTGATKYHLNGRDSLVNPGTAMASHKDDEEKYFPQSGVLIFGKQDSGKTNVDIEKVMITDEEEIRTTNPVATEQYGSVSTNLQSGNTQAATSDVNTQGVLPGMVWQDRDVYLQGPIWAKIPHTDGHFHPSPLMGGFGPKHPPPQILIKNTPVPANPSTTFSAAKFASFITQYSTGQVSVEIEWELQKENSKRWNPEIQYTSNYNKSVNVDFTVDTNGVYSEPRPIGTRYLTRNL

SEQ ID NO: 288 - protein, 735 aa, Artificial Sequence
  Synthetic Polypeptide
MAADGYLPDWLEDTLSEGIRQWWKLKPGPPPPKPAERHKDDSRGLVLPGYKYLGPFNGLDKGEPVNEADAAALEHDKAYDRQLDSGDNPYLKYNHADAEFQERLKEDTSFGGNLARAVFQAKKRVLEPLGLVEEPVKTAPGKKRPVEHSPAELDSSSGTGKSGQQPARKRLNFGQTGDADSVPDPQPLGQPPAAPSGLGTNTMASGSGAPMADNNEGADGVGNSSGNWHCDSTWMGDRVITTSTRTWALPTYNNHLYKQISSQSGASNDNHYFGYSTPWGYFDFNRFHCHFSPRDWQRLINNNWGFRPKRLNFKLFNIQVKEVTQNDGTTTIANNLTSTVQVFTDSEYQLPYVLGSAHQGCLPPFPADVFMVPQYGYLTLNNGSQAVGRSSFYCLEYFPSQMLRTGNNFTFSYTFEDVPFHSSYAHSQSLDRLMNPLIDQYLYYLSRTNTPSGTTTQSRLQFSQAGASDIRDQSRNWLPGPCYRQQRVSKTAADNNNSDYSWTGATKHHLNGRDSLVNPGTAMASHKDDEEKYFPQSGVLIFGKQDSGKTNVDIEKVMITDEEEIRTTNPVATEQYGSVSTNLQSGNTQAATSDVNTQGVLPGMVWQDRDVYLQGPIWAKIPHTDGHFHPSPLMGGFGPKHPPPQILIKNTPVPANPSTTFSAAKFASFITQYSTGQVSVEIEWELQKENSKRWNPEIQYTSNYNKSVNVDFTVDTNGVYSEPRPIGTRYLTRNL

SEQ ID NO: 289 - protein, 735 aa, Artificial Sequence
  Synthetic Polypeptide
MAADGYLPDWLEDTLSEGIRQWWKLKPGPPPPKPAERHKDDSRGLVLPGYKYLGPFNGLDKGEPVNEADAAALEHDKAYDRQLDSGDNPYLKYNHADAEFQERLKEDTSFGGNLARAVFQAKKRVLEPLGLVEEPVKTAPGKKRPVEHSPAELDSSSGTGKSGQQPARKRLNFGQTGDADSVPDPQPLGQPPAAPSGLGTNTMASGSGAPMADNNEGADGVGNSSGNWHCDSTWMGDRVITTSTRTWALPTYNNHLYKQISSQSGASNDNHYFGYSTPWGYFDLNRFHCHFSPRDWQRLINNNWGFRPKRLNFKLFNIQVKEVTQNDGTTTIANNLTSTVQVFTDSEYQLPYVLGSAHQGCLPPFPADVFMVPQYGYLTLNNGSQAVGRSSFYCLEYFPSQMLRTGNNFTFSYTFEDVPFHSSYAHSQSLDRLMNPLIDQYLYYLSRTNTPSGTTTQSRLQFSQAGASDIRDQSRNWLPGPCYRQQRVSKTAADNNNSDYSWTGATKYHLNGRDSLVNPGTAMASHKDDEEKYFPQSGVLIFGKQDSGKTNVDIEKVMITDEEEIRTTNPVATEQYGSVSTNLQSGNTQAATSDVNTQGVLPGMVWQDRDVYLQGPIWAKIPHTDGHFHPSPLMGGFGPKHPPPQILIKNTPVPANPSTTFSAAKFASFITQYSTGQVSVEIEWELQKENSKRWNPEIQYTSNYNKSVNVDFTVDTNGVYSEPRPIGTRYLTRNL

SEQ ID NO: 290 - protein, 735 aa, Artificial Sequence
  Synthetic Polypeptide
MAADGYLPDWLEDTLSEGIRQWWKLKPGPPPPKPAERHKDDSRGLVLPGYKYLGPLNGLDKGEPVNEADAAALEHDKAYDRQLDSGDNPYLKYNHADAEFQERLKEDTSFGGNLARAVFQAKKRVLEPLGLVEEPVKTAPGKKRPVEHSPAELDSSSGTGKSGQQPARKRLNFGQTGDADSVPDPQPLGQPPAAPSGLGTNTMASGSGAPMADNNEGADGVGNSSGNWHCDSTWMGDRVITTSTRTWALPTYNNHLYKQISSQSGASNDNHYFGYSTPWGYFDFNRFHCHFSPRDWQRLINNNWGFRPKRLNFKLFNIQVKEVTQNDGTTTIANNLTSTVQVFTDSEYQLPYVLGSAHQGCLPPFPADVFMVPQYGYLTLNNGSQAVGRSSFYCLEYFPSQMLRTGNNFTFSYTFEDVPFHSSYAHSQSLDRLMNPLIDQYLYYLSRTNTPSGTTTQSRLQFSQAGASDIRDQSRNWLPGPCYRQQRVSKTAADNNNSDYSWTGATKYHLNGRDSLVNPGTAMASHKDDEEKYFPQSGVLIFGKQDSGKTNVDIEKVMITDEEEIRTTNPVATEQYGSVSTNLQSGNTQAATSDVNTQGVLPGMVWQDRDVYLQGPIWAKIPHTDGHFHPSPLMGGFGPKHPPPQILIKNTPVPANPSTTFSAAKFASFITQYSTGQVSVEIEWELQKENSKRWNPEIQYTSNYNKSVNVDFTVDTNGVYSEPRPIGTRYLTRNL

SEQ ID NO: 291 - protein, 735 aa, Artificial Sequence
  Synthetic Polypeptide
MAADGYLPDWLEDTLSEGIRQWWKLKPGPPPPKPAERHKDDSRGLVLPGYKYLGPFNGLDKGEPVNEADAAALEHDKAYDRQLDSGDNPYLKYNHADAEFQERLKEDTSFGGNLARAVFQAKKRVLEPLGLVEEPVKTAPGKKRPVEHSPAELDSSSGTGKSGQQPARKRLNFGQTGDADSVPDPQPLGQPPAAPSGLGTNTMASGSGAPMADNNEGADGVGNSSGNWHCDSTWMGDRVITTSTRTWALPTYNNHLYKQISSQSGASNDNHYFGYSTPWGYFDFNRFHCHFSPRDWQRLINNNWGFRPKRLNFKLFNIQVKEVTQNDGTTTIANNLTSTVQVFTDSEYQLPYVLGSAHQGCLPPFPADVFMVPQYGYLTLNNGSQAVGRSSFYCLEYFPSQMLRTGNNFTFSYTFEDVPFHSSYAHSQSLDRLMNPLIDQYLYYLSRTNTPSGTTTQSRLQFSQAGASDIRDQSRNWLPGPCYRQQRVSKTAADNNNSDYSWTGATKYHLNGRDSLVNPGTAMASHKDDEEKYFPQSGVLIFGKQDSGKTNVDIEKVMITDEEEIRTTNPVATEQYGSVSTNLQSGNTQAATSDVNTQGVLPGMVWQDRDVYLQGPIWAKIPHTDGHFHPSPLMGGFGPKHPPPQILIKNTPVPANPSTTFSAAKFASFITQYSTGQVSVEIEWELQKENSKRWNPEIQYTSNYNKSVNVDFTVDTNGVYSEPRPIGTRYLARNL

SEQ ID NO: 292 - protein, 735 aa, Artificial Sequence
  Synthetic Polypeptide
MAADGYLPDWLEDTLSEGIRQWWKLKPGPPPPKPAERHKDDSRGLVLPGYKYLGPFNGLDKGEPVNEADAAALEHDKAYDRQLDSGDNPYLKYNHADAEFQERLKEDTSFGGNLARAVFQAKKRVLEPLGLVEEPVKTAPGKKRPVEHSPAELDSSSGTGKSGQQPARKRLNFGQTGDADSVPDPQPLGQPPAAPSGLGTNTMASGSGAPMADNNEGADGVGNSSGNWHCDSTWMGDRVITTSTRTWALPTYNNHLYKQISSQSGASNDNHYFGYSTPWGYFDFNRFHCHFSPRDWQRLINNNWGFRPKRLNFKLFNIQVKEVTQNDGTTTIANNLTSTVQVFTDSEYQLPYVLGSAHQGCLPPFPADVFMVPQYGYLTLNNGSQAVGRSSFYCLEYFPSQMLRTGNNFTLSYTFEDVPFHSSYAHSQSLDRLMNPLIDQYLYYLSRTNTPSGTTTQSRLQFSQAGASDIRDQSRNWLPGPCYRQQRVSKTAADNNNSDYSWTGATKYHLNGRDSLVNPGTAMASHKDDEEKYFPQSGVLIFGKQDSGKTNVDIEKVMITDEEEIRTTNPVATEQYGSVSTNLQSGNTQAATSDVNTQGVLPGMVWQDRDVYLQGPIWAKIPHTDGHFHPSPLMGGFGPKHPPPQILIKNTPVPANPSTTFSAAKFASFITQYSTGQVSVEIEWELQKENSKRWNPEIQYTSNYNKSVNVDFTVDTNGVYSEPRPIGTRYLTRNL

SEQ ID NO: 293 - protein, 735 aa, Artificial Sequence
  Synthetic Polypeptide
MAADGYLPDWLEDTLSEGIRQWWKLKPGPPPPKPAERHKDDSRGLVLPGYKYLGPFNGLDKGEPVNEADAAALEHDKAYDRQLDSGDNPYLKYNHADAEFQERLKEDTSFGGNLARAVFQAKKRVLEPLGLVEEPVKTAPGKKRPVEHSPAELDSSSGTGKSGQQPARKRLNFGQTGDADSVPDPQPLGQPPAAPSGLGTNTMASGSGAPMADNNEGADGVGNSSGNWHCDSTWMGDRVITTSTRTWALPTYNNHLYKQISSQSGASNDNHYFGYSTPWGYFDFNRFHCHFSPRDWQRLINNNWGFRPKRLNFKLFNIQVKEVTQNDGTTTIANNLTSTVQVFTDSEYQLPYVLGSAHQGCLPPFPADVFMVPQYGYLTLNNGSQAVGRSSFYCLEYFPSQMLRTGNNFTFSYTFEDVPFHSSYAHSQSLDRLMNPLIDQYLYYLSRTNTPSGTTTQSRLQFSQAGASDIRDQSRNWLPGPCYRQQRVSKTAADNNNSDYSWTGATKYHLNGRDSLVNPGTAMASHKDDEEKYFPQSGVLIFRKQDSGKTNVDIEKVMITDEEEIRTTNPVATEQYGSVSTNLQSGNTQAATSDVNTQGVLPGMVWQDRDVYLQGPIWAKIPHTDGHFHPSPLMGGFGPKHPPPQILIKNTPVPANPSTTFSAAKFASFITQYSTGQVSVEIEWELQKENSKRWNPEIQYTSNYNKSVNVDFTVDTNGVYSEPRPIGTRYLTRNL

SEQ ID NO: 294 - protein, 735 aa, Artificial Sequence
  Synthetic Polypeptide
MAADGYLPDWLEDTLSEGIRQWWKLKPGPPPPKPAERHKDDSRGLVLPGYKYLGPFNGLDKGEPVNEADAAALEHDKAYDRQLDSGDNPYLKYNHADAEFQERLKEDTSFGGNLARAVFQAKKRVLEPLGLVEEPVKTAPGKKRPVEHSPAELDSSSGTGKSGQQPARKRLNFGQTGDADSVPDPQPLGQPPAAPSGLGTNTMASGSGAPMADNNEGADGVGNSSGNWHCDSTWMGDRVITTSTRTWALPTYNNHLYKQISSQSGASNDNHYFGYSTPWGYFDFNRFHCHFSPRDWQRLINNNWGFRPKRLNFKLFNIQVKEVTQNDGTTTIANNLTSTVQVFTDSEYQLPYVLGSAHQGCLPPFPADVFMVPQYGYLTLNNGSQAVGRSSFYCLEYFPSQMLRTGNNFTFSYTFEDVPFHSSYAHSQSLDRLMNPLIDQYLYYLSRTNTPSGTTTQSRLQFSQAGASDIRDQSRNWLPGPCYRQQRVSKTAADNNNSDYSWTGATKYHLNGRDSLVNPGTAMASHKDDEEKYFPQSGVLIFGKRDSGKTNVDIEKVMITDEEEIRTTNPVATEQYGSVSTNLQSGNTQAATSDVNTQGVLPGMVWQDRDVYLQGPIWAKIPHTDGHFHPSPLMGGFGPKHPPPQILIKNTPVPANPSTTFSAAKFASFITQYSTGQVSVEIEWELQKENSKRWNPEIQYTSNYNKSVNVDFTVDTNGVYSEPRPIGTRYLTRNL

SEQ ID NO: 295 - protein, 735 aa, Artificial Sequence
  Synthetic Polypeptide
MAADGYLPDWLEDTLSEGIRQWWKLKPGPPPPKPAERHKDDSRGLVLPGYKYLGPFNGLDKGEPVNEADAAALEHDKAYDRQLDSGDNPYLKYNHADAEFQERLKEDTSFGGNLARAVFQAKKRVLEPLGLVEEPVKTAPGKKRPVEHSPAELDSSSGTGKSGQQPARKRLNFGQTGDADSVPDPQPLGQPPAAPSGLGTNTMASGSGAPMADNNEGADGVGNSSGNWHCDSTWMGDRAITTSTRTWALPTYNNHLYKQISSQSGASNDNHYFGYSTPWGYFDFNRFHCHFSPRDWQRLINNNWGFRPKRLNFKLFNIQVKEVTQNDGTTTIANNLTSTVQVFTDSEYQLPYVLGSAHQGCLPPFPADVFMVPQYGYLTLNNGSQAVGRSSFYCLEYFPSQMLRTGNNFTFSYTFEDVPFHSSYAHSQSLDRLMNPLIDQYLYYLSRTNTPSGTTTQSRLQFSQAGASDIRDQSRNWLPGPCYRQQRVSKTAADNNNSDYSWTGATKYHLNGRDSLVNPGTAMASHKDDEEKYFPQSGVLIFGKQDSGKTNVDIEKVMITDEEEIRTTNPVATEQYGSVSTNLQSGNTQAATSDVNTQGVLPGMVWQDRDVYLQGPIWAKIPHTDGHFHPSPLMGGFGPKHPPPQILIKNTPVPANPSTTFSAAKFASFITQYSTGQVSVEIEWELQKENSKRWNPEIQYTSNYNKSVNVDFTVDTNGVYSEPRPIGTRYLTRNL

SEQ ID NO: 296 - protein, 735 aa, Artificial Sequence
  Synthetic Polypeptide
MAADGYLPDWLEDTLSEGIRQWWKLKPGPPPPKPAERHKDDSRGLVLPGYKYLGPFNGLDKGEPVNEADAAALEHDKAYDRQLDSGDNPYLKYNHADAEFQERLKEDTSFGGNLARAVFQAKKRVLEPLGLVEEPVKTAPGKKRPVEHSPAELDSSSGTGKSGQQPARKRLNFGQTGDADSVPDPQPLGQPPAAPSGLGTNTMASGSGAPMADNNEGADGVGNSSGNWHCDSTWMGDRVITTSTRTWALPTYNNHLYKQISSQSGASNDNHYFGYSTPWGYFDFNRFHCHFSPRDWQRLINNNWGFRPKRLNFKLFNIQVKEVTQNDGTTTIANNLTSTVQVFTDSEYQLPYVLGSAHQGCLPPFPADVFMVPQYGYLTLNNGSQAVGRSSFYCLEYFPSQMLRTGNNFTFSYTFEDVPFHSSYAHSQSLDRLMNPLIDQYLYYLSRTNTPSGTTTQSRLQFSQAGASDIRDQSRNWLPGPCYRQQRVSKTAADNNNSDYSWTGATKYHLNGRDSLVNPGTAMASHKDDEEKYFPQSGVLIFGKQDSGKTNVDIEKVMITDEEEIRTTNPVATEQYGSVSTNLQSGNTQAATSDVNTQGVLPGMVWQDRDVYLQGPIWAKIPHTDGHFHPSPLMGGFGPKHPPPQILIKNTPVPANPSTTFSAAKFAYFITQYSTGQVSVEIEWELQKENSKRWNPEIQYTSNYNKSVNVDFTVDTNGVYSEPRPIGTRYLTRNL

SEQ ID NO: 297 - protein, 735 aa, Artificial Sequence
  Synthetic Polypeptide
MAADGYLPDWLEDTLSEGIRQWWKLKPGPPPPKPAERHKDDSRGLVLPGYKYLGPFNGLDKGEPVNEADAAALEHDKAYDRQLDSGDNPYLKYNHADAEFQERLKEDTSFGGNLARAVFQAKKRVLEPLGLVEEPVKTAPGKKRPVEHSPAELDSSSGTGKSGQQPARKRLNFGQTGDADSVPDPQPLGQPPAAPSGLGTNTMASGSGAPMADNNEGADGVGNSSGNWHCDSTWMGDRVITTSTRTWALPTYNNHLYKQISSQSGASNDNHYFGYSTPWGYFGFNRFHCHFSPRDWQRLINNNWGFRPKRLNFKLFNIQVKEVTQNDGTTTIANNLTSTVQVFTDSEYQLPYVLGSAHQGCLPPFPADVFMVPQYGYLTLNNGSQAVGRSSFYCLEYFPSQMLRTGNNFTFSYTFEDVPFHSSYAHSQSLDRLMNPLIDQYLYYLSRTNTPSGTTTQSRLQFSQAGASDIRDQSRNWLPGPCYRQQRVSKTAADNNNSDYSWTGATKYHLNGRDSLVNPGTAMASHKDDEEKYFPQSGVLIFGKQDSGKTNVDIEKVMITDEEEIRTTNPVATEQYGSVSTNLQSGNTQAATSDVNTQGVLPGMVWQDRDVYLQGPIWAKIPHTDGHFHPSPLMGGFGPKHPPPQILIKNTPVPANPSTTFSAAKFAYFITQYSTGQVSVEIEWELQKENSKRWNPEIQYTSNYNKSVNVDFTVDTNGVYSEPRPIGTRYLTRNL

SEQ ID NO: 298 - protein, 735 aa, Artificial Sequence
  Synthetic Polypeptide
MAADGYLPDWLEDTLSEGIRQWWKLKPGPPPPKPAERHKDDSRGLVLPGYKYLGPFNGLDKGEPVNEADAAALEHDKAYDRQLDSGDNPYLKYNHADAEFQERLKEDTSFGGNLARAVFQAKKRVLEPLGLVEEPVKTAPGKKRPVEHSPAELDSSSGTGKSGQQPARKRLNFGQTGDADSVPDPQPLGQPPAAPSGLGTNTMASGSGAPMADNNEGADGVGNSSGNWHCDSTWMGDRVITTSTRTWALPTYNNHLYKQISSQSGASNDNRYFGYSTPWGYFDFNRFHCHFSPRDWQRLINNNWGFRPKRLNFKLFNIQVKEVTQNDGTTTIANNLTSTVQVFTDSEYQLPYVLGSAHQGCLPPFPADVFMVPQYGYLTLNNGSQAVGRSSFYCLEYFPSQMLRTGNNFTFSYTFEDVPFHSSYAHSQSLDRLMNPLIDQYLYYLSRTNTPSGTTTQSRLQFSQAGASDIRDQSRNWLPGPCYRQQRVSKTAADNNNSDYSWTGATKYHLNGRDSLVNPGTAMASHKDDEEKYFPQSGVLIFGKQDSGKTNVDIEKVMITDEEEIRTTNPVATEQYGSVSTNLQSGNTQAATSDVNTQGVLPGMVWQDRDVYLQGPIWAKIPHTDGHFHPSPLMGGFGPKHPPPQILIKNTPVPANPSTTFSAAKFASFITQYSTGQVSVEIEWELQKENSKRWNPEIQYTSNYNKSVNVDFTVDTNGVYSEPRPIGTRYLTRNL

SEQ ID NO: 299 - protein, 735 aa, Artificial Sequence
  Synthetic Polypeptide
MAADGYLPDWLEDTLSEGIRQWWKLKPGPPPPKPAERHKDDSRGLVLPGYKYLGPFNGLDKGEPVNEADAAALEHDKAYDRQLDSGDNPYLKYNHADAEFQERLKEDTPFGGNLARAVFQAKKRVLEPLGLVEEPVKTAPGKKRPVEHSPAELDSSSGTGKSGQQPARKRLNFGQTGDADSVPDPQPLGQPPAAPSGLGTNTMASGSGAPMADNNEGADGVGNSSGNWHCDSTWMGDRVITTSTRTWALPTYNNHLYKQISSQSGASNDNHYFGYSTPWGYFDFNRFHCHFSPRDWQRLINNNWGFRPKRLNFKLFNIQVKEVTQNDGTTTIANNLTSTVQVFTDSEYQLPYVLGSAHQGCLPPFPADVFMVPQYGYLTLNNGSQAVGRSSFYCLEYFPSQMLRTGNNFTFSYTFEDVPFHSSYAHSRSLDRLMNPLIDQYLYYLSRTNTPSGTTTQSRLQFSQAGASDIRDQSRNWLPGPCYRQQRVSKTAADNNNSDYSWTGATKYHLNGRDSLVNPGTAMASHKDDEEKYFPQSGVLIFGKQDSGKTNVDIEKVMITDEEEIRTTNPVATEQYGSVSTNLQSGNTQAATSDVNTQGVLPGMVWQDRDVYLQGPIWAKIPHTDGHFHPSPLMGGFGPKHPPPQILIKNTPVPANPSTTFSAAKFASFITQYSTGQVSVEIEWELQKENSKRWNPEIQYTSNYNKSVNVDFTVDTNGVYSEPRPIGTRYLTRNL

SEQ ID NO: 300 - protein, 735 aa, Artificial Sequence
  Synthetic Polypeptide
MAADGYLPDWLEDTLSEGIRQWWKLKPGPPPPKPAERHKDGSRGLVLPGYKYLGPFNGLDKGEPVNEADAAALEHDKAYDRQLDSGDNPYLKYNHADAEFQERLKEDTSFGGNLARAVFQAKKRVLEPLGLVEEPVKTAPGKKRPVEHSPAELDSSSGTGKSGQQPARKRLNFGQTGDADSVPDPQPLGQPPAAPSGLGTNTMASGSGAPMADNNEGADGVGNSSGNWHCDSTWMGDRVITTSTRTWALPTYNNHLYKQISSQSGASNDNHYFGYSTPWGYFDFNRFHCHFSPRDWQRLINNNWGFRPKRLNFKLFNIQVKEVTQNDGTTTIANNLTSTVQVFTDSEYQLPYVLGSAHQGCLPPFPADVFMVPQYGYLTLNNGSQAVGRSSFYCLEYFPSQMLRTGNNFTFSYTFEDVPFHSSYAHSQSLDRLMNPLIDQYLYYLSRTNTPSGTTTQSRLQFSQAGASDIRDQSRNWLPGPCYRQQRVSKTAADNNNSDYSWTGATKYHLNGRDSLVNPGTAMASHKDDEEKYFPQSGVLIFGKQDSGKTNVDIEKVMITDEEEIRTTNPVATEQYGSVSTNLQSGNTQAATSDVNTQGVLPGMVWQDRDVYLQGPIWAKIPHTDGHFHPSPLMGGFGPKHPPPQILIKNTPVPANPSTTFSAAKFASFITQYSTGQVSVEIEWELQKENSKRWNPEIQYTSNYNKSVNVDFTVDTNGVYSEPRPIGTRYLTRNL

SEQ ID NO: 301 - protein, 735 aa, Artificial Sequence
  Synthetic Polypeptide
MAADGYLPDWLEDTLSEGIRQWWKLKPGPPPPKPAERHKDDSRGLVLPGYKYLGPFNGLDKGEPVNEADAAALEHDKAYDRQLDSGDNPYLKYNHADAGFQERLKEDTSFGGNLARAVFQAKKRVLEPLGLVEEPVKTAPGKKRPVEHSPAELDSSSGTGKSGQQPARKRLNFGQTGDADSVPDPQPLGQPPAAPSGLGTNTMASGSGAPMADNNEGADGVGNSSGNWHCDSTWMGDRVITTSTRTWALPTYNNHLYKQISSQSGASNDNHYFGYSTPWGYFDFNRFHCHFSPRDWQRLINNNWGFRPKRLNFKLFNIQVKEVTQNDGTTTIANNLTSTVQVFTDSEYQLPYVLGSAHQGCLPPFPADVFMVPQYGYLTLNNGSQAVGRSSFYCLEYFPSQMLRTGNNFTFSYTFEDVPFHSSYAHSQSLDRLMNPLIDQYLYYLSRTNTPSGTTTQSRLQFSQAGASDIRDQSRNWLPGPCYRQQRVSKTAADNNNSDYSWTGATKYHLNGRDSLVNPGTAMASHKDDEEKYFPQSGVLIFGKQDSGKTNVDIEKVMITDEEEIRTTNPVATEQYGSVSTNLQSGNTQAATSDVNTQGVLPGMVWQDRDVYLQGPIWAKIPHTDGHFHPSPLMGGFGPKHPPPQILIKNTPVPANPSTTFSAAKFASFITQYSTGQVSVEIEWELQKENSKRWNPEIQYTSNYNKSVNVDFTVDTNGVYSEPRPIGTRYLTRNL

SEQ ID NO: 302 - protein, 735 aa, Artificial Sequence
  Synthetic Polypeptide
MAADGYLPDWLEDTLSEGIRQWWKLKPGPPPPKPAERHKDDSRGLVLPGYKYLGPFNGLDKGEPVNEADAAALEHDKAYDRQLDSGDNPYLKYNHADAEFQERLKEDTSFGGNLARAVFQAKKRVLEPLGLVEEPVKTAPGKKRPVEHSPAELDSSSGTGKSGQQPARKRLNFGQTGDADSVPDPQPLGQPPAAPSGLGTNTMASGSGAPMADNNEGADGVGNSSGNWHCDSTWMGDRVITTSTRTWALPTYNNHLYKQISSQSGASNDNHYLGYSTPWGYFDFNRFHCHFSPRDWQRLINNNWGFRPKRLNFKLFNIQVKEVTQNDGTTTIANNLTSTVQVFTDSEYQLPYVLGSAHQGCLPPFPADVFMVPQYGYLTLNNGSQAVGRSSFYCLEYFPSQMLRTGNNFTFSYTFEDVPFHSSYAHSQSLDRLMNPLIDQYLYYLSRTNTPSGTTTQSRLQFSQAGASDIRDQSRNWLPGPCYRQQRVSKTAADNNNSDYSWTGATKYHLNGRDSLVNPGTAMASHKDDEEKYFPQSGVLIFGKQDSGKTNVDIEKVMITDEEEIRTTNPVATEQYGSVSTNLQSGNTQAATSDVNTQGVLPGMVWQDRDVYLQGPIWAKIPHTDGHFHPSPLMGGFGPKHPPPQILIKNTPVPANPSTTFSAAKFASFITQYSTGQVSVEIERELQKENSKRWNPEIQYTSNYNKSVNVDFTVDTNGVYSEPRPIGTRYLTRNL

SEQ ID NO: 303 - protein, 735 aa, Artificial Sequence
  Synthetic Polypeptide
MAADGYLPDWLEDTLSEGIRQWWKLKPGPPPPKPAERHKDDSRGLVLPGYKYLGPFNGLDKGEPVNEADAAALEHDKAYDRQLDSGDNPYLKYNHADAEFQERLKEDTSFGGNLARAVFQAKKRVLEPLGLVEEPVKTAPGKKRPVEHSPAELDSSSGTGKSGQQPARKRLNFGQTGDADSVPDPQPLGQPPAAPSGLGTNTMASGSGAPMADNNEGADGVGNSSGNWHCDSTWMGDRVITTSTRTWALPTYNNHLYKQISSQSGASNDNHYFGYSTPWGYFDFNRFHCHFSPRDWQRLINNNWGFRPKRLNFKLFNIQVKEVTQNDGTTTIANNLTSTVQVFTDSEYQLPYVLGSAHQGCLPPFPADVFMVPQYGYLTLNNGSQAVGRSSFYCLEYFPSQMLRTGNNFTFSYTFEDVPFHSSYAHSQSLDRLMNPLIDQYLYYLSRTNTPSGTTTQSRLQFSQAGASDIRDQSRNWLPGPCYRQQRVSKTAADNNNSDYSWTGATKYHLNGRDSLVNPGTAMASHKDDEEKYFPQSGVLIFGKQDSGKANVDIEKVMITDEEEIRTTNPVATEQYGSVSTNLQSGNTQAATSDVNTQGVLPGMVWQDRDVYLQGPIWAKIPHTDGHFHPSPLMGGFGPKHPPPQILIKNTPVPANPSTTFSAAKFASFITQYSTGQVSVEIEWELQKENSKRWNPEIQYTSNYNKSVNVDFTVDTNGVYSEPRPIGTRYLTRNL

SEQ ID NO: 304 - protein, 735 aa, Artificial Sequence
  Synthetic Polypeptide
MAADGYLPDWLEDTLSEGIRQWWKLKPGPPPPKPAERHKDDSRGLVLPGYKYLGPFNGLDKGEPVNEADAAALEHDKAYDRQLDSGDNPYLKYNHADAEFQERLKEDTSFGGNLARAVFQAKKRVLEPLGLVEEPVKTAPGKKRPVEHSPAELDSSSGTGKSGQQPARKRLNFGQTGDADSVPDPQPLGQPPAAPSGLGTNTMASGSGAPMADNNEGADGVGNSSGNWHCDSTWMGDRVITTSTRTWALPTYNNHLYKQISSQSGASNDNHYFGYSTPWGYFDFNRFHCHFSPRDWQRLTNNNWGFRPKRLNFKLFNIQVKEVTQNDGTTTIANNLTSTVQVFTDSEYQLPYVLGSAHQGCLPPFPADVFMVPQYGYLTLNNGSQAVGRSSFYCLEYFPSQMLRTGNNFTFSYTFEDVPFHSSYAHSQSLDRLMNPLIDQYLYYLSRTNTPSGTTTQSRLQFSQAGASDIRDQSRNWLPGPCYRQQRVSKTAADNNNSDYSWTGATKYHLNGRDSLVNPGTAMASHKDDEEKYFPQSGVLIFGKQDSGKTNVDIEKVMITDEEEIRTTNPVATEQYGSVSTNLQSGNTQAATSDVNTQGVLPGMVWQDRDVYLQGPIWAKIPHTDGHFHPSPLMGGFGPKHPPPQILIKNTPVPANPSTTFSAAKFASFITQYSTGQVSVEIEWELQKENSKRWNPEIQYTSNYNKSVNVDFTVDTNGVYSEPRPIGTRYLTRNL

SEQ ID NO: 305 - protein, 735 aa, Artificial Sequence
  Synthetic Polypeptide
MAADGYLPDWLEDTLSEGIRQWWKLKPGPPPPKPAERHKDDSRGLVLPGYKYLGPFNGLDKGEPVNEADAAALEHDKAYDRQLDSGDNPYLKYNHADAEFQERLKEDTSFGGNLARAVFQAKKRVLEPLGLVEEPVKTAPGKKRPVEHSPAELDSSSGTGKSGQQPARKRLNFGQTGDADSVPDPQPLGQPPAAPSGLGTNTMASGSGAPMADNNEGADGVGNSSGNWHCDSTWMGDRVITTSTRTWALPTYNNHLYKQISSQSGASNDNHYFGYSTPWGYFDFNRFHCHFSPRDWQRLINNNWGFRPKRLNFKLFNIQVKEVTQNDGTTTIANNLTSTVRVFTDSEYQLPYVLGSAHQGCLPPFPADVFMVPQYGYLTLNNGSQAVGRSSFYCLEYFPSQMLRTGNNFTFSYTFEDVPFHSSYAHSQSLDRLMNPLIDQYLYYLSRTNTPSGTTTQSRLQFSQAGASDIRDQSRNWLPGPCYRQQRVSKTAADNNNSDYSWTGATKYHLNGRDSLVNPGTAMASHKDDEEKYFPQSGVLIFGKQDSGKTNVDIEKVMITDEEEIRTTNPVATEQYGSVSTNLQSGNTQAATSDVNTQGVLPGMVWQDRDVYLQGPIWAKIPHTDGHFHPSPLMGGFGPKHPPPQILIKNTPVPANPSTTFSAAKFASFITQYSTGQVSVEIEWELQKENSKRWNPEIQYTSNYNKSVNVDFTVDTNGVYSEPRPIGTRYLTRNL

SEQ ID NO: 306 - protein, 735 aa, Artificial Sequence
  Synthetic Polypeptide
MAADGYLPDWLEDTLSEGIRQWWKLKPGPPPPKPAERHKDDSRGLVLPGYKYLGPFNGLDKGEPVNEADAAALEHDKAYDRQLDSGDNPYLKYNHADAEFQERLKEDTSFGGNLARAVFQAKKRVLEPLGLVGEPVKTAPGKKRPVEHSPAELDSSSGTGKSGQQPARKRLNFGQTGDADSVPDPQPLGQPPAAPSGLGTNTMASGSGAPMADNNEGADGVGNSSGNWHCDSTWMGDRVITTSTRTWALPTYNNHLYKQISSQSGASNDNHYFGYSTPWGYFDFNRFHCHFSPRDWQRLINNNWGFRPKRLNFKLFNIQVKEVTQNDGTTTIANNLTSTVQVFTDSEYQLPYVLGSAHQGCLPPFPADVFMVPQYGYLTLNNGSQAVGRSSFYCLEYFPSQMLRTGNNFTFSYTFEDVPFHSSYAHSQSLDRLMNPLIDQYLYYLSRTNTPSGTTTQSRLQFSQAGASDIRDQSRNWLPGPCYRQQRVSKTAADNNNSDYSWTGATKYHLNGRDSLVNPGTAMASHKDDEEKYFPQSGVLIFGKQDSGKTNVDIEKVMITDEEEIRTTNPVATEQYGSVSTNLQSGNTQAATSDVNTQGVLPGMVWQDRDVYLQGPIWAKIPHTDGHFHPSPLMGGFGPKHPPPQILIKNTPVPANPSTTFSAAKFASFITQYSTGQVSVEIEWELQKENSKRWNPEIQYTSNYNKSVNVDFTVDTNGVYSEPRPIGTRYLTRNL

SEQ ID NO: 307 - protein, 735 aa, Artificial Sequence
  Synthetic Polypeptide
MAADGYLPDWLEDTLSEGIRQWWKLKPGPPPPKPAERHKDDSRGLVLPGYKYLGPFNGLDKGEPVNEADAAALEHDKAYDRQLDSGDNPYLKYNHADAEFQERLKEDTSFGGNLARAVFQAKKRVLEPLGLVEEPVKTAPGKKRPVEHSPAELDSSSGTGKSGQQPARKRLNFGQTGDADSVPGPQPLGQPPAAPSGPGTNTMASGSGAPMADNNEGADGVGNSSGNWHCDSTWMGDRVVTTSTRTWALPTYNNHLYKQISSQSGASNDNHYFGYSTPWGYFDFNRFHCHFSPRDWQRLINNNWGFRPKRLNFKLFNIQVKEVTQNDGTTTIANNLTSTVQVFTDSEYQLPYVLGSAHQGCLPPFPADVFMVPQYGYLTLNNGSQAVGRSSFYCLEYFPSQMLRTGNNFTFSYTFEDVPFHSSYAHSQSLDRLMNPLIDQYLYYLSRTNTPSGTTTQSRLQFSQAGASDIRDQSRNWLPGPCYRQQRVPKTAADNNNSDYSWTGATKYHLNGRDSLVNPGTAMASHKDDEEKYFPQSGVLIFGKQDSGKTNVDIEKVMITDEEEIRTTNPVATEQYGSVSTNLQSGNTQAATSDVNTQGVLPGMVWQDRDVYLQGPIWAKIPHTDGHFHPSPLMGGFGPKHPPPQILIKNTPVPANPSTTFSAAKFASFITQYSTGQVSVEIEWELQKENSKRWNPEIQYTSNYNKSVNVDFTVDTNGVYSEPRPIGTRYLTRNL

SEQ ID NO: 308 - protein, 735 aa, Artificial Sequence
  Synthetic Polypeptide
MAADGYLPDWLEDTLSEGIRQWWKLKPGPPPPKPAERHKDDSRGLVLPGYKYLGPFNGLDKGEPVNEADAAALEHDKAYDRQLDSGDNPYLKYNHADAEFQERLKEDTSFGGNLARAVFQAKKRVLEPLGLVEGPVKTAPGKKRPVEHSPAELDSSSGTGKSGQQPARKRLNFGQTGDADSVPDPQPLGQPPAAPSGLGTNTMASGSGAPMADNNEGADGVGNSSGNWHCDSTWMGDRVITTSTRTWALPTYNNHLYKQISSQSGASNDNHYFGYSTPWGYFDFNRFHCHFSPRDWQRLINNNWGFRPKRLNFKLFNIQVKEVTQNDGTTTIANNLTSTVQVFTDSEYQLPYVLGSAHQGCLPPFPADVFMVPQYGYLTLNNGSQAVGRSSFYCLEYFPSQMLRTGNNFTFSYTFEDVPFHSSYAHSQSLDRLMNPLIDQYLYYLSRTNTPSGTTTQSRLQFSQAGASDIRDQSRNWLPGPCYRQQRVSKTAADNNNSDYSWTGATKYHLNGRDSLVNPGTAMASHKDDEEKYFPQSGVLIFGKQDSGKTNVDIEKVMITDEEEIRTTNPVATEQYGSVSTNLQSGNTQAATSDVNTQGVLPGMVWQDRDVYLQGPIWAKIPHTDGHFHPSPLMGGFGPKHPPPQILIKNTPVPANPSTTFSAAKFASFITQYSTGQVSVEIEWELQKENSKRWNPEIQYTSNYNKSVNVDFTVDTNGVYSEPRPIGTRYLTRNL

SEQ ID NO: 309 - protein, 735 aa, Artificial Sequence
  Synthetic Polypeptide
MAADGYLPDWLEDTLSEGIRQWWKLKPGPPPPKPAERHKDDSRGLVLPGYKYLGPFNGLDKGEPVNEADAAALEHDKAYDRQLDSGDNPYLKYNHADAEFQERLKEDTSFGGNLARAVFQAKKRVLEPLGLVEEPVKTAPGKKRPVEHSPAELDSSSGTGKSGQQPARKRLNFGQTGDADSVPDPQPLGQPPAAPSGLGTNTMASGSGAPMADNNEGADGVGNSSGNWHCDSTWMGDRVITTSTRTWALPTYNNHLYKQISSQSGASNDNHYLGYSTPWGYFDFNRFHCHFSPRDWQRLINNNWGFRPKRLNFKLFNIQVKEVTQNDGTTTIANNLTSTVQVFTDSEYQLPYVLGSAHQGCLPPFPADVFMVPQYGYLTLNNGSQAVGRSSFYCLEYFPSQMLRTGNNFTFSYTFEDVPFHSSYAHSQSLDRLMNPLIDQYLYYLSRTNTPSGTTTQSRLQFSQAGASDIRDQSRNWLPGPCYRQQRVSKTAADNNNSDYSWTGATKYHLNGRDSLVNPGTAMASHKDDEEKYFPQSGVLIFGKQDSGKTNVDIEKVMITDEEEIRTTNPVATEQYGSVSTNLQSGNTQAATSDVNTQGVLPGMVWQDRDVYLQGPIWAKIPHTDGHFHPSPLMGGFGPKHPPPQILIKNTPVPANPSTTFSAAKFASFITQYSTGQVSVEIEWELQKENSKRWNPEIQYTSNYNKSVNVDFTVDTNGVYSEPRPIGTRYLTRNL

SEQ ID NO: 310 - protein, 735 aa, Artificial Sequence
  Synthetic Polypeptide
MAADGYLPDWLEDTLSEGIRQWWKLKPGPPPPKPAERHKDDSRGLVLPGYKYLGPFNGLDKGEPVNEADAAALEHDKAYDRQLDSGDNPYLKYNHADAEFQERLKEDTSFGGNLARAVFQAKKRVLEPLGLVEEPVKTAPGKKGPVEHSPAELDSSSGTGKSGQQPARKRLNFGQTGDADSVPDPQPLGQPPAAPSGLGTNTMASGSGAPMADNNEGADGVGNSSGNWHCDSTWMGDRVITTSTRTWALPTYNNHLYKQISSQSGASNDNHYFGYSTPWGYFDFNRFHCHFSPRDWQRLINNNWGFRPKRLNFKLFNIQVKEVTQNDGTTTIANNLTSTVQVFTDSEYQLPYVLGSAHQGCLPPFPADVFMVPQYGYLTLNNGSQAVGRSSFYCLEYFPSQMLRTGNNFTFSYTFEDVPFHSSYAHSQSLDRLMNPLIDQYLYYLSRTNTPSGTTTQSRLQFSQAGASDIRDQSRNWLPGPCYRQQRVSKTAADNNNSDYSWTGATKYHLNGRDSLVNPGTAMASHKDDEEKYFPQSGVLIFGKQDSGKTNVDIEKVMITDEEEIRTTNPVATEQYGSVSTNLQSGNTQAATSDVNTQGVLPGMVWQDRDVYLQGPIWAKIPHTDGHFHPSPLMGGFGPKHPPPQILIKNTPVPANPSTTFSAAKFASFITQYSTGQVSVEIEWELQKENSKRWNPEIQYTSNYNKSVNVDFTVDTNGVYSEPRPIGTRYLTRNL

SEQ ID NO: 311 - protein, 735 aa, Artificial Sequence
  Synthetic Polypeptide
MAADGYLPDWLEDTLSEGIRQWWKLKPGPPPPKPAERHKDDSRGLVLPGYKYLGPFNGLDKGEPVNEADAAALEHDKAYDRQLDSGDNPYLKYNHADAEFQERLKEDTPFGGNLARAVFQAKKRVLEPLGLVEEPVKTAPGKKRPVEHSPAELDSSSGTGKSGQQPARKRLNFGQTGDADSVPDPQPLGQPPAAPSGLGTNTMASGSGAPMADNNEGADGVGNSSGNWHCDSTWMGDRVITTSTRTWALPTYNNHLYKQISSQSGASNDNHYFGYSTPWGYFDFNRFHCHFSPRDWQRLINNNWGFRPKRLNFKLFNIQVKEVTQNDGTTTIANNLTSTVQVFTDSEYQLPYVLGSAHQGCLPPFPADVFMVPQYGYLTLNNGSQAVGRSSFYCLEYFPSQMLRTGNNFTFSYTFEDVPFHSSYAHSQSLDRLMNPLIDQYLYYLSRANTPSGTTTQSRLQFSQAGASDIRDQSRNWLPGPCYRQQRVSKTAADNNNSDYSWTGATKYHLNGRDSLVNPGTAMASHKDDEEKYFPQSGVLIFGKQDSGKTNVDIEKVMITDEEEIRTTNPVATEQYGSVSTNLQSGNTQAATSDVNTQGVLPGMVWQDRDVYLQGPIWAKIPHTDGHFHPSPLMGGFGPKHPPPQILIKNTPVPANPSTTFSAAKFASFITQYSTGQVSVEIEWELQKENSKRWNPEIQYTSNYNKSVNVDFTVDTNGVYSEPRPIGTRYLTRNL

SEQ ID NO: 312 - protein, 735 aa, Artificial Sequence
  Synthetic Polypeptide
MAADGYLPDWLEDTLSEGIRQWWKLKPGPPPPKPAERHKDDSRGLVLPGYKYLGPFNGLDKGEPVNEADAAALEHDKAYDRQLDSGDNPYLKYNHADAEFQERLKEDTSFGGNLARAVFQAKKRVLEPLGLVEEPVKTAPGKKRPVEHSPAELDSSSGTGKSGQQPARKRLNFGQTGDADSVPDPQPLGQPPAAPSGLGTNTMASGSGAPMADNNEGADGVGNSSGNWHCDSTWMGDRVITTSTRTWALPTYNNHLYKQISSQSGASNDNHYFGYSAPWGYFDFNRFHCHFSPRDWQRLINNNWGFRPKRLNFKLFNIQVKEVTQNDGTTTIANNLTSTVQVFTDSEYQLPYVLGSAHQGCLPPFPADVFMVPQYGYLTLNNGSQAVGRSSFYCLEYFPSQMLRTGNNFTFSYTFEDVPFHSSYAHSQSLDRLMNPLIDQYLYYLSRTNTPSGTTTQSRLQFSQAGASDIRDQSRNWLPGPCYRQQRVSKTAADNNNSDYSWTGATKYHLNGRDSLVNPGTAMASHKDDEEKYFPQSGVLIFGKQDSGKTNVDIEKVMITDEEEIRTTNPVATEQYGSVSTNLQSGNTQAATSDVNTQGVLPGMVWQDRDVYLQGPIWAKIPHTDGHFHPSPLMGGFGPKHPPPQILIKNTPVPANPSTTFSAAKFASFITQYSTGQVSVEIEWELQKENSKRWNPEIQYTSNYNKSVNVDFTVDTNGVYSEPRPIGTRYLTRNL

SEQ ID NO: 313 - protein, 735 aa, Artificial Sequence
  Synthetic Polypeptide
MAADGYLPDWLEDTLSEGIRQWWKLKPGPPPPKPAERHKDDSRGLVLPGYKYLGPFNGLDKGEPVNEADAAALEHDKAYDRQLDSGDNPYLKYNHADAEFQERLKEDTSFGGNLARAVFQAKKRVLEPLGLVEEPVKTAPGKKRPVEHSPAELDSSSGTGKSGQQPARKRLNFGQTGDADSVPDPQPLGQPPAAPSGLGTNTMASGSGAPMADNNEGADGVGNSSGNWHCDSTWMGDRVITTSTRTWALPTYNNHLYKQISSQSGASNDNHYFGYSTPWGYFDFNRFHCHFSPRDWQRLINNNWGFRPKRLNFKLFNIQVKEVTQNDGTTTIANNLTSTVQVFTDSEYQLPYVLGSAHQGCLPPFPADVFMVPQYGYLTLNNGSQAVGRSSFYCLEYFPSQMLRTGNNFTFSYTFEDVPFHSSYAHSQSLDRLMNPLIDQYLYYLSRTNTPSGTTTQSRLQFSQAGASDIRDQSRNWLPGPCYRQQRVSKTAADNNNSDYSWTGATKYHLNGRDSLVNPGTAMASHKDDEEKYFPQSGVLIFGKQDSGKTNVDIEKVMITDEEEIRTTNPVATEQYGSVSTNLQSGNTQAATSDVNTQGVLPGMVWQDRDVYLQGPIWAKIPHTDGHFHPSPLMGGFGPKHPPPQILIKNTPVPANPSTTFSAAKFASLITQYSTGQVSVEIEWELQKENSKRWNPEIQYTSNYNKSVNVDFTVDTNGVYSEPRPIGTRYLTRNL

SEQ ID NO: 314 - protein, 735 aa, Artificial Sequence
  Synthetic Polypeptide
MAADGYLPDWLEDTLSEGIRQWWKLKPGPPPPKPAERHKDDSRGLVLPGYKYLGPFNGLDKGEPVNEADAAALEHDKAYDRQLDSGDNPYLKYNHADAEFQERLKEDTSFGGNLARAVFQAKKRVLEPLGLVEEPVKTAPGKKRPVEHSPAELDSSSGTGKSGQQPARKGLNFGQTGDADSVPDPQPLGQPPAAPSGLGTNTMASGSGAPMADNNEGADGVGNSSGNWHCDSTWMGDRVITTSTRTWALPTYNNHLYKQISSQSGASNDNHYFGYSTPWGYFDFNRFHCHFSPRDWQRLINNNWGFRPKRLNFKLFNIQVKEVTQNDGTTTIANNLTSTVQVFTDSEYQLPYVLGSAHQGCLPPFPADVFMVPQYGYLTLNNGSQAVGRSSFYCLEYFPSQMLRTGNNFTFSYTFEDVPFHSSYAHSQSLDRLMNPLIDQYLYYLSRTNTPSGTTTQSRLQFSQAGASDIRDQSRNWLPGPCYRQQRVSKTAADNNNSDYSWTGATKYHLNGRDSLVNPGTAMASHKDDEEKYFPQSGVLIFGKQDSGKTNVDIEKVMITDEEEIRTTNPVATEQYGSVSTNLQSGNTQAATSDVNTQGVLPGMVWQDRDVYLQGPIWAKIPHTDGHFHPSPLMGGFGPKHPPPQILIKNTPVPANPSTTFSAAKFASFITQYSTGQVSVEIEWELQKENSKRWNPEIQYTSNYNKSVNVDFTVDTNGVYSEPRPIGTRYLTRNL

SEQ ID NO: 315 - protein, 735 aa, Artificial Sequence
  Synthetic Polypeptide
MAADGYLPDWLEDTLSEGIRQWWKLKPGPPPPKPAERHKDDSRGLVLPGYKYLGPFNGLDKGEPVNEADAAALEHDEAYDRQLDSGDNPYLKYNHADAEFQERLKEDTSFGGNLARAVFQAKKRVLEPLGLVEEPVKTAPGKKRPVEHSPAELDSSSGTGKSGQQPARKRLNFGQTGDADSVPDPQPLGQPPAAPSGLGTNTMASGSGAPMADNNEGADGVGNSSGNWHCDSTWMGDRVITTSTRTWALPTYNNHLYKQISSQSGASNDNHYFGYSTPWGYFDFNRFHCHFSPRDWQRLINNNWGFRPKRLNFKLFNIQVKEVTQNDGTTTIVNNLTSTVQVFTDSEYQLPYVLGSAHQGCLPPFPADVFMVPQYGYLTLNNGSQAVGRSSFYCLEYFPSQMLRTGNNFTFSYTFEDVPFHSSYAHSQSLDRLMNPLIDQYLYYLSRTNTPSGTTTQSRLQFSQAGASDIRDQSRNWLPGPCYRQQRVSKTAADNNNSDYSWTGATKYHLNGRDSLVNPGTAMASHKDDEEKYFPQSGVLIFGKQDSGKTNVDIEKVMITDEEEIRTTNPVATEQYGSVSTNLQSGNTQAATSDVNTQGVLPGMVWQDRDVYLQGPIWAKIPHTDGHFHPSPLMGGFGPKHPPPQILIKNTPVPANPSTTFSAAKFAYFITQYSTGQVSVEIEWELQKENSKRWNPEIQYTSNYNKSVNVDFTVDTNGVYSEPRPIGTRYLTRNL

SEQ ID NO: 316 - protein, 735 aa, Artificial Sequence
  Synthetic Polypeptide
MAADGYLPDWLEDTLSEGIRQWWKLKPGPPPPKPAERHKDDSRGLVLPGYKYLGPFNGLDKGEPVNEADAAALEHDKAYDRQLDSGDNPYLKYNHADAEFQERLKEDTSFGGNLARAVFQAKKRVLEPLGLVEEPVKTAPGKKRPVEHSPAELDSSSGTGKSGQQPARKRLNFGQTGDADSVPDPQPLGQPPAAPSGLGTNTMASGSGAPMADNNEGADGVGNSSGNWHCDSTWMGDRVITTSTRTWALPTYNNHLYKQISSQSGASNDNHYFGYSTPWGYFDFNRFHCHFSPRDWQRLINNNWGFRPKRLNFKLFNIQVKEVTQNDGTTTIANNLTSTVQVFTDSEYQLPYVLGSAHQGCLPPFPADVFMVPQYGYLTLNNGSQAVGRSSFYCLEYFPSQMLRTGNNFTFSYTFEDVPFHSSYAHSQSLDRLMNPLIDQYLYYLSRTNTPSGTTTQSRLQFSQAGASGIRDQSRNWLPGPCYRQQRVSKTAADNNNSDYSWTGATKYHLNGRDSLVNPGTAMASHKDDEEKYFPQSGVLIFGKQDSGKTNVDIEKVMITDEEEIRTTNPVATEQYGSVSTNLQSGNTQAATSDVNTQGVLPGMVWQDRDVYLQGPIWAKIPHTDGHFHPSPLMGGFGPKHPPPQILIKNTPVPANPSTTFSAAKFASFITQYSTGQVSVEIEWELQKENSKRWNPEIQYTSNYNKSVNVDFTVDTNGVYSEPRPIGTRYLTRNL

SEQ ID NO: 317 - protein, 735 aa, Artificial Sequence
  Synthetic Polypeptide
MAADGYLPDWLEDTLSEGIRQWWKLKPGPPPPKPAERHKDDSRGLVLPGYKYLGPFNGLDKGEPVNEADAAALEHDKAYDRQLDSGDNPYLKYNHADAEFQERLKEDTSFGGNLARAVFQAKKRVLEPLGLVEEPVKTAPGKKRPVEHSPAELDSSSGTGKSGQQPARKRLNFGQTGDADSVPDPQPLGQPPAAPSGLGTNTMASGSGAPMADNNEGADGVGNSSGNWHCDSTWMGDRVITTSTRTWALPTYNNHLYKQISSQSGASNDNHYFGYSTPWGYFDFNRFHCHFSPRDWQRLINNNWGFRPKRLNFKLFNIQVKEVTQNDGTTTIANNLTSTVQVFTDSEYQLPYVLGSAHQGCLPPFPADVFMVPQYGYLTLNNGSQAVGRSSFYCLEYFPSQMLRTGNNFTFSYTFEDVPFHSSYAHSQSLDRLMNPLIDQYLYYLSRTNTPSGTTTQSRLQFSQAGASDIRDQSRNWLPGPCYRQQRVSKTAADNNNSDYSWTGATKYHLNGRDSLVNPGTAMASHKDDEEKYFPQSGVLIFGKQDSGKTNVDIEKVVITDEEEIRTTNPVATEQYGSVSTNLQSGNTQAATSDVNTQGVLPGMVWQDRDVYLQGPIWAKIPHTDGHFHPSPLMGGFGPKHPPPQILIKNTPVPANPSTTFSAAKFASFITQYSTGQVSVEIEWELQKENSKRWNPEIQYTSNYNKSVNVDFTVDTNGVYSEPRPIGTRYLTRNL

SEQ ID NO: 318 - protein, 735 aa, Artificial Sequence
  Synthetic Polypeptide
MAADGYLPDWLEDTLSEGIRQWWKLKPGPPPPKPAERHKDDSRGLVLPGYKYLGPFNGLDKGEPVNEADAAALEHDKAYDRQLDSGDNPYLKYNHADAEFQERLKEDTSFGGNLARAVFQAKKRVLEPLGLVEEPVKTAPGKKRPVEHSPAELDSSSGTGKSGQQPARKRLNFGQTGDADSVPDPQPLGQPPAAPSGLGTNTMASGSGAPMADNNEGADGVGNSSGNWHCDSTWMGDRVITTSTRTWALPTYNNHLYKQISSQSGASNDNHYFGYSTPWGYFDFNRFHCHFSPRDWQRLINNNWGFRPKRLNFKLFNIQVKEVTQNDGTTTIANNLTSTVQVFTDSEYQLPYVLGSAHQGCLPPFPADVFMVPQYGYLTLNNGSQAVGRSSFYCLEYFPSQMLRTGNNFTFSYTFEDVPFHSSYAHSQSLDRLMNPLIDQYLYYLSRTNTPSGTTTQSRLQFSQAGASDIRDQSRNWLPGPCYRQQRVSKTAADNNNSDYSWTGATKYHLNGRDSLVNPGTAMASHKDDEEKYFPQSGVLIFGKQDSGKTNVDIEKVMITDEEEIRTTNPVATEQYGSVSTNLQSGDTQAATSDVNTQGVLPGMVWQDRDVYLQGPIWAKIPHTDGHFHPSPLMGGFGPKHPPPQILIKNTPVPANPSTTFSAAKFASFITQYSTGQVSVEIEWELQKENSKRWNPEIQYTSNYNKSVNVDFTVDTNGVYSEPRPIGTRYLTRNL

SEQ ID NO: 319 - protein, 735 aa, Artificial Sequence
  Synthetic Polypeptide
MAADGYLPDWLEDTLSEGIRQWWKLKPGPPPPKPAERHKDDSRGLVLPGYKYLGPFNGLDKGEPVNEADAAALEHDKAYDRQLDSGDNPYLKYNHADAEFQERLKEDTSFGGNLARAVFQAKKRVLEPLGLVEEPVKTAPGKKRPVEHSPAELDSSSGTGKSGQQPARKRLNFGQTGDADSVPDPQPLGQPPAAPSGLGTNTMASGSGAPMADNNEGADGVGNSSGNWHCDSTWMGDRVITTSTRTWALPTYNNHLYKQISSQSGASNDNHYFGYSTPWGYFDFNRFHCHFSPRDWQRLINNNWGFRPKRLNFRLFNIQVKEVTQNDGTTTIANNLTSTVQVFTDSEYQLPYVLGSAHQGCLPPFPADVFMVPQYGYLTLNNGSQAVGRSSFYCLEYFPSQMLRTGNNFTFSYTFEDVPFHSSYAHSQSLDRLMNPLIDQYLYYLSRTNTPSGTTTQSRLQFSQAGASDIRDQSRNWLPGPCYRQQRVSKTAADNNNSDYSWTGATKYHLNGRDSLVNPGTAMASHKDDEEKYFPQSGVLIFGKQDSGKTNVDIEKVMITDEEEIRTTNPVATEQYGSVSTNLQSGNTQAATSDVNTQGVLPGMVWQDRDVYLQGPIWAKIPHTDGHFHPSPLMGGFGPKHPPPQILIKNTPVPANPSTTFSAAKFASFITQYSTGQVSVEIEWELQKENSKRWNPEIQYTSNYNKSVNVDFTVDTNGVYSEPRPIGTRYLTRNL

SEQ ID NO: 320 - protein, 735 aa, Artificial Sequence
  Synthetic Polypeptide
MAADGYLPDWLEDTLSEGIRQWWKLKPGPPPPKPAERHKDDSRGLVLPGYKYLGPFNGLDKGEPVNEADAAALEHGKAYDRQLDSGDNPYLKYNHADAEFQERLKEDTSFGGNLARAVFQAKKRVLEPLGLVEEPVKTAPGKKRPVEHSPAELDSSSGTGKSGQQPARKRLNFGQTGDADSVPDPQPLGQPPAAPSGLGTNTMASGSGAPMADNNEGADGVGNSSGNWHCDSTWMGDRVITTSTRTWALPTYNNHLYKQISSQSGASNDNHYFGYSTPWGYFDFNRFHCHFSPRDWQRLINNNWGFRPKRLNFKLFNIQVKEVTQNDGTTTIANNLTSTVQVFTDSEYQLPYVLGSAHQGCLPPFPADVFMVPQYGYLTLNNGSQAVGRSSFYCLEYFPSQMLRTGNNFTFSYTFEDVPFHSSYAHSQSLDRLMNPLIDQYLYYLSRTNTPSGTTTQSRLQFSQAGASDIRDQSRNWLPGPCYRQQRVSKTAADNNNSDYSWTGATKYHLNGRDSLVNPGTAMASHKDDEEKYFPQSGVLIFGKQDSGKTNVDIEKVMITDEEEIRTTNPVATEQYGSVSTNLQSGNTQAATSDVNTQGVLPGMVWQDRDVYLQGPIWAKIPHTDGHFHPSPLMGGFGPKHPPPQILIKNTPVPANPSTTFSAAKFASFITQYSTGQVSVEIEWELQKENSKRWNPEIQYTSNYNKSVNVDFTVDTNGVYSEPRPIGTRYLTRNL

SEQ ID NO: 321 - protein, 735 aa, Artificial Sequence
  Synthetic Polypeptide
MAADGYLPDWLEDTLSEGIRQWWKLKPGPPPPKPAERHKDDSRGLVLPGYKYLGPFNGLDKGEPVNEADAAALEHDKAYDRQLDSGDNPYLKYNHADAEFQERLKEDTSFGGNLARAVFQAKKRVLEPLGLVEEPVKTAPGKKRPVEHSPAELDSSSGTGKSGQQPARKRLNFGQTGDADSVPDPQPLGQPPAAPSGPGTNTMASGSGAPMADNNEGADGVGNSSGNWHCDSTWMGDRVITTSTRTWALPTYNNHLYKQISSQSGASNDNHYFGYSTPWGYFDFNRFHCHFSPRDWQRLINNNWGFRPKRLNFKLFNIQVKEVTQNDGTTTIANNLTSTVQVFTDSEYQLPYVLGSAHQGCLPPFPADVFMVPQYGYLTLNNGSQAVGRSSFYCLEYFPSQMLRTGNNFTFSYTFEDVPFHSSYAHSQSLDRLMNPLIDQYLYYLSRTNTPSGTTTQSRLQFSQAGASDIRDQSRNWLPGPCYRQQRVSKTAADNNNSDYSWTGATKYHLNGRDSLVNPGTAMASHKDDEEKYFPQSGVLIFGKQDSGKTNVDIEKVMITDEEEIRTTNPVATEQYGSVSTNLQSGNTQAATSDVNTQGVLPGMVWQDRDVYLQGPIWAKIPHTDGHFHPSPLMGGFGPKHPPPQILIKNTPVPANPSTTFSAAKFASFITQYSTGQVSVEIEWELQKENSKRWNPEIQYTSNYNKSVNVDFTVDTNGVYSEPRPIGTRYLTRNL

SEQ ID NO: 322 - protein, 735 aa, Artificial Sequence
  Synthetic Polypeptide
MAADGYLPDWLEDTLSEGIRQWWKLKPGPPPPKPAERHKDDSRGLVLPGYKYLGPFNGLDKGEPVNEADAAALEHDKAYDRQLDSGDNPYLKYNHADAEFQERLKEDTSFGGNLARAVFQAKKRVLEPLGLVEEPVKTAPGKKRPVEHSPAGPDSSSGTGKSGQQPARKRLNFGQTGDADSVPDPQPLGQPPAAPSGLGTNTMASGSGAPMADNNEGADGVGNSSGNWHCDSTWMGDRVITTSTRTWALPTYNNHLYKQISSQSGASNDNHYFGYSTPWGYFDFNRFHCHFSPRDWQRLINNNWGFRPKRLNFELFNIQVKEVTQNDGTTTIANNLTSTVQVFTDSEYQLPYVLGSAHQGCLPPFPADVFMVPQYGYLTLNNGSQAVGRSSFYCLEYFPSQMLRTGNNFTFSYTFEDVPFHSSYAHSQSLDRLMNPLIDQYLYYLSRTNTPSGTTTQSRLQFSQAGASDIRDQSRNWLPGPCYRQQRVSKTAADNNNSDYSWTGATKYHLNGRDSLVNPGTAMASHKDDEEKYFPQSGVLIFGKQDSEKTNVDIEKVMITDEEEIRTTNPVATEQYGSVSTNLQSGNTQAATSDVNTQGVLPGMVWQDRDVYLQGPIWAKIPHTDGHFHPSPLMGGFGLKHPPPQILIKSTPVPANPSTTFSAAKFASFITQYSTGQVSVEIEWELQKENSKRWNPEIQYTSNYNKSVNVDFTVDTNGVYSEPRPIGTRYLTRNL

SEQ ID NO: 323 - protein, 735 aa, Artificial Sequence
  Synthetic Polypeptide
MAADGYLPDWLEDTLSEGIRQWWKLKPGPPPPKPAERHKDDSRGLVLPGYKYLGPFNGLDKGEPVNEADAAALEHDKAYDRQLDSGDNPYLKYNHADAEFQERLKEDTSFGGNLARAVFQAKKRVLEPLGLVEEPVKTAPGKKRPVEHSPAGPDSSSGTGKSGQQPARKRLNFGQTGDADSVPDPQPLGQPPAAPSGLGTNTMASGSGAPMADNNEGADGVGNSSGNWHCDSTWMGDRVITTSTRTWALPTYNNHLYKQISSQSGASNDNHYFGYSTPWGYFDFNRFHCHFSPRDWQRLINNNWGFRPKRLNFELFNIQVKEVTQNDGTTTIANNLTSTVQVFTDSEYQLPYVLGSAHQGCLPPFPADVFMVPQYGYLTLNNGSQAVGRSSFYCLEYFPSQMLRTGNNFTFSYTFEDVPFHSSYAHSQSLDRLMNPLIDQYLYYLSRTNTPSGTTTQSRLQFSQAGASDIRDQSRNWLPGPCYRQQRVSKTAADNNNSDYSWTGATKYHLNGRDSLVNPGTAMASHKDDEEKYFPQSGVLIFGKQDSGKTNVDIEKVMITDEEEIRTTNPVATEQYGSVSTNLQSGNTQAATSDVNTQGVLPGMVWQDRDVYLQGPIWAKIPHTDGHFHPSPLMGGFGLKHPPPQILIKSTPVPANPSTTLSAAKFASFITQYSTGQVSVEIEWELQKENSKRWNPEIQYTSNYNKSVNVDFTVDTNGVYSEPRPIGTRYLTRNL

SEQ ID NO: 324 - protein, 734 aa, Artificial Sequence
  Synthetic Polypeptide
MAADGYLPDWLEDTLSEGIRQWWKLKPGPPPPKPAERHKDDSRGLVLPGYKYLGPFNGLDKGEPVNEADAAALEHDKAYDRQLDSGDNPYLKYNHADAEFQERLKEDTSFGGNLARAVFQAKKRVLEPLGLVEEPVKTAPGKKRPVEHSPAGPDSSSGTGKSGQQPARKRLNFGQTGDADSVPDPQPLGQPPAAPSGLGTNTMASGSGAPMADNNEGADGVGNSSGNWHCDSTWMGDRVITTSTRTWALPTYNNHLYKQISSQSGASNDNHYFGYSTPWGYFDFNRFHCHFSPRDWQRLINNNWGFRPKRLNFELFNIQVKEVTQNDGTTTIANNLTSTVQVFTDSEYQLPYVLGSAHQGCLPPFPADVFMVPQYGYLTLNNGSQAVGRSSFYCLEYFPSQMLRTGNNFTFSYTFEDVPFHSSYAHSQSLDRLMNPLIDQYLYYLSRTNTPSGTTTQSRLQFSQAGASDIRDQSRNWLPGPCYRQQRVSKTAADNNSDYSWTGATKYHLNGRDSLVNPGTAMASHKDDEEKYFPQSGVLIFGKQDSGKTNVDIEKVMITDEEEIRTTNPVATEQYGSVSTNLQSGNTQAATSDVNTQGVLPGMVWQDRDVYLQGPIWAKIPHTDGHFHPSPLMGGFGLKHPPPQILIKSTPVPANPSTTFSAAKFASFITQYSTGQVSVEIEWELQKENSKRWNPEIQYTSNYNKSVNVDFTVDTNGVYSEPRPIGTRYLTRNL

SEQ ID NO: 325 - protein, 735 aa, Artificial Sequence
  Synthetic Polypeptide
MAADGYLPDWLEDTLSEGIRQWWKLKPGPPPPKPAERHKDDSRGLVLPGYKYLGPFNGLDKGEPVNEADAAALEHDKAYDRQLDSGDNPYLKYNHADAEFQERLKEDTSFGGNLGRTVFQAKKRVLEPLGLVEEPVKTAPGKKRPVEHSPVEPDSSSGTGKAGQQPARKRLNFGQTGDADSVPDPQPLGQPPAAPSGLGTNTMATGSGAPMADNNEGADGVGNSSGNWHCDSTWMGDRVITTSTRTWALPTYNNHLYKQISSQSGASNDNHYFGYSTPWGYFDFNRFHCHFSPRDWQRLINNNWGFRPKRLSFKLFNIQVKEVTQNDGTTTIANNLTSTVQVFTDSEYQLPYVLGSAHQGCLPPFPADVFMVPQYGYLTLNNGSQAVGRSSFYCLEYFPSQMLRTGNNFTFSYTFEDVPFHSSYAHSQSLDRLMNPLIDQYLYYLSKTNAPSGTTTMSRLQFSQAGASDIRDQSRNWLPGPCYRQQRVSKTAADNNNSDYSWTGATKYHLNGRDSLVNPGPAMASHKDDEEKYFPQSGVLIFGKQGSNKTNVDIEKVMITDEEEIRTTNPVATEQYGSVSTNLQSGNTQAATSDVNTQGVLPGMVWQDRDVYLQGPIWAKIPHTDGHFHPSPLMGGFGLKHPPPQILIKNTPVPANPSTTFSAAKFASFITQYSTGQVSVEIEWELQKENSKRWNPEIQYTSNYNKSVNVDFTVDTNGVYSEPRPIGTRYLTRNL

SEQ ID NO: 326 - protein, 735 aa, Artificial Sequence
  Synthetic Polypeptide
MAADGYLPDWLEDTLSEGIRQWWKLKPGPPPPKPAERHKDDSRGLVLPGYKYLGPFNGLDKGEPVNEADAAALEHDKAYDRQLDSGDNPYLKYNHADAEFQERLKEDTSFGGNLGRAVFQAKKRVLEPLGLVEEPVKTAPGKKRPVEHSPVEPDSSSGTGKAGQQPARKRLNFGQTGDADSVPDPQPLGQPPAAPSGLGTNTMATGSGAPMADNNEGADGVGNSSGNWHCDSTWMGDRVITTSTRTWALPTYNNHLYKQISSQSGASNDNHYFGYSTPWGYFDFNRFHCHFSPRDWQRLINNNWGFRPKRLSFKLFNIQVKEVTQNDGTTTIANNLTSTVQVFTDSEYQLPYVLGSAHQGCLPPFPADVFMVPQYGYLTLNNGSQAVGRSSFYCLEYFPSQMLRTGNNFTFSYTFEDVPFHSSYAHSQSLDRLMNPLIDQYLYYLSKTNAPSGTTTMSRLQFSQAGASDIRDQSRNWLPGPCYRQQRVSKTAADNNNSDYSWTGATKYHLNGRDSLVNPGPAMANHKDDEEKYFPQSGVLIFGKQGSNKTNVDIEKVMITDEEEIRTTNPVATEQYGSVSTNLQSGNTQAATSDVNTQGVLPGMVWQDRDVYLQGPIWAKIPHTDGHFHPSPLMGGFGLKHPPPQILIKNTPVPANPSTTFSAAKFASFITQYSTGQVSVEIEWELQKENSKRWNPEIQYTSNYNKSVNVDFTVDTNGVYSEPRPIGTRYLTRNL

SEQ ID NO: 327 - protein, 735 aa, Artificial Sequence
  Synthetic Polypeptide
MAADGYLPDWLEDTLSEGIRQWWKLKPGPPPPKPAERHKDDSRGLVLPGYKYLGPFNGLDKGEPVNEADAAALEHDKAYDRQLDSGDNPYLKYNHADAEFQERLKEDTSFGGNLGRAVFQAKKRVLEPLGLVEEPVKTAPGKKRPVEHSPVEPDSSSGTGKAGQQPARKRLNFGQTGDADSVPDPQPLGQPPAAPSGLGTNTMATGSGAPMADNNEGADGVGNSSGNWHCDSTWMGDRVITTSTRTWALPTYNNHLYKQISSQSGASNDNHYFGYSTPWGYFDFNRFHCHFSPRDWQRLINNNWGFRPKRLSFKLFNIQVKEVTQNDGTTTIANNLTSTVQVFTDSEYQLPYVLGSAHQGCLPPFPADVFMVPQYGYLTLNNGSQAVGRSSFYCLEYFPSQMLRTGNNFTFSYTFEDVPFHSSYAHSQSLDRLMNPLIDQYLYYLSKTNAPSGTTTMSRLQFSQAGASDIRDQSRNWLPGPCYRQQRVSKTAADNNNSDYSWTGATKYHLNGRDSLVNPGPAMASHKDDEEKYFPQSGVLIFGKQGSNKTNVDIEKVMITDEEEIRTTNPVATEQYGSVSTNLQSGNTQAATSDVNTQGVLPGMVWQDRDVYLQGPIWAKIPHTDGHFHPSPLMGGFGLKHPPPQILIKNTPVPANPSTTFSAAKFASFITQYSTGQVSVEIEWELQKENSKRWNPEIQYTSNYNKSVNVDFTVDTNGVYSEPRPIGTRYPTRNL

SEQ ID NO: 328 - protein, 735 aa, Artificial Sequence
  Synthetic Polypeptide
MAADGYLPDWLEDTLSEGIRQWWKLKPGPPPPKPAERHKDDSRGLVLPGYKYLGPFNGLDKGEPVNEADAAALEHDKAYDRQLDSGDNPYLKYNHADAEFQERLKEDTSFGGNLGRAVFQAKKRVLEPLGLVEEPVKTAPGKKRPVEHSPVEPDSSSGTGKAGQQPARKRLNFGQTGDADSVPDPQPLGQPPAAPSGLGTNTMATGSGAPMADNNEGADGVGNSSGNWHCDSTWMGDRVITTSTRTWALPTYNNHLYKQISSQSGASNDNHYFGYSTPWGYFDFNRFHCHFSPRDWQRLINNNWGFRPKRLSFKLFNIQVKEVTQNDGTTTIANNLTSTVQVFTDSEYQLPYVLGSAHQGCLPPFPADVFMVPQYGYLTLNNGSQAVGRSSFYCLEYFPSQMLRTGNNFTFSYTFEDVPFHSSYAHSQSLDRLMNPLIDQYLYYLSKTNAPSGTTTMSRLQFSQAGASDIRDQSRNWLPGPCYRQQRVSKTAADNNNSDYSWTGATKYHLNGRDSLVNPGPAMASHKDDEEKYFPQSGVLIFGKQGSNKTNVDIEKVMITDEEEIRTTNPVATEQYGSVSTNLQSGNTQAATSDVNTQGVLPGMVWQDRDVYLQGPIWAKIPHTDGHFHPSPLMGGFGLKHPPPQILIKNTPVPANPSTTFSAAKFASFITQYSTGQVSVEIEWELQKENSKRWNPEIQYTSNYNKSVNVDFTVGTNGVYSEPRPIGTRYLTRNL

SEQ ID NO: 329 - protein, 735 aa, Artificial Sequence
  Synthetic Polypeptide
MAADGYLPDWLEDTLSEGIRQWWKLKPGPPPPKPAERHKDDSRGLVLPGYKYLGPFNGLDKGEPVNEADAAALEHDKAYDRQLDSGDNPYLKYNHADAEFQERLKEDTSFGGNLGRAVFQAKKRVLEPLGLVEEPVKTAPGKKRPVEHSPVEPDSSSGTGKAGQQPARKRLNFGQTGDADSVPDPQPLGQPPAAPSGLGTNTMATGSGAPMADNNEGADGVGNSSGNWHCDSTWMGDRVITTSTRTWALPTYNNHLYKQISSQSGASNDNHYFGYSTPWGYFDFNRFHCHFSPRDWQRLINNNWGFRPKRLSFKLFNIQVKEVTQNDGTTTIANNLTSTVQVFTDSEYQLPYVLGSAHQGCLPPFPADVFMVPQYGYLTLNNGSQAVGRSSFYCLEYFPSQMLRTGNNFTFSYTFEDVPFHSSYAHSQSLDRLMNPLIDQYLYYLSKTNAPSGTTTMSRLQFSQAGASDIRDQSRNWLPGPCYRQQRVSKTAADNNNSDYSWTGATKYHLNGRDSLVNPGPAMASHKDDEEKYFPQSGVLIFGKQGSNKTNVDIEKVMITDEEEIRTTNPVATEQYGSVSTNLQSGNTQAATSDVNTQGVLPGMVWQDRDVYLQGPIWAKIPHTDGHFHPSPLMGGFGLKYPPPQILIKNTPVPANPSTTFSAAKFASFITQYSTGQVSVEIEWELQKENSKRWNPEIQYTSNYNKSVNVDFTVDTNGVYSEPRPIGTRYLTRNL

SEQ ID NO: 330 - protein, 735 aa, Artificial Sequence
  Synthetic Polypeptide
MAADGYLPDWLEDTLSEGIRQWWKLKPGPPPPKPAERHKDDSRGLVLPGYKYLGPFNGLDKGEPVNEADAAALEHDKAYDRQLDSGDNPYLKYNHADAEFQERLKEDTSFGGNLGRAVFQAKKRVLEPLGLVEEPVKTAPGKKRPVEHSPVEPDSSSGTGKAGQQPARKRLNFGQTGDADSVPDPQPLGQPPAAPSGLGTNTMATGSGAPMADNNEGADGVGNSSGNWHCDSTWMGDRVITTSTRTWALPTYNNHLYKQISGQSGASNDNHYFGYSTPWGYFDFNRFHCHFSPRDWQRLINNNWGFRPKRLSFKLFNIQVKEVTQNDGTTTIANNLTSTVQVFTDSEYQLPYVLGSAHQGCLPPFPADVFMVPQYGYLTLNNGSQAVGRSSFYCLEYFPSQMLRTGNNFTFSYTFEDVPFHSSYAHSQSLDRLMNPLIDQYLYYLSKTNAPSGTTTMSRLQFSQAGASDIRDQSRNWLPGPCYRQQRVSKTAADNNNSDYSWTGATKYHLNGRDSLVNPGPAMASHKDDEEKYFPQSGVLIFGKQGSNKTNVDIEKVMITDEEEIRTTNPVATEQYGSVSTNLQSGNTQAATSDVNTQGVLPGMVWQDRDVYLQGPIWAKIPHTDGHFHPSPLMGGFGLKHPPPQILIKNTPVPANPSTTFSAAKFASFITQYSTGQVSVEIEWELQKENSKRWNPEIQYTSNYNKSVNVDFTVDTNGVYSEPRPIGTRYLTRNL

SEQ ID NO: 331 - protein, 735 aa, Artificial Sequence
  Synthetic Polypeptide
MAADGYLPDWLEDTLSEGIRQWWKLKPGPPPPKPAERHKDDSRGLVLPGYKYLGPFNGLDKGEPVNEADAAALEHDKAYDRQLDSGDNPYLKYNHADAEFQERLKEDTSFGGNLGRAVFQAKKRVLEPLGLVEEPVKTAPGKKRPVEHSPVEPDSSSGTGKAGQQPARKRLNFGQTGDADSVPDPQPLGQPPAAPSGLGTNTMATGSGAPMADNNEGADGVGNSSGNWHCDSTWMGDRVITTSTRTWALPTYNNHLYKQISSQSGASNDNHYFGYSTPWGYFDFNRFHCHFSPRDWQRLINNNWGFRPKRLSFKLFNIQVKEVTQNDGTTTIANNLTSTVQVFTDSEYRLPYVLGSAHQGCLPPFPADVFMVPQYGYLTLNNGSQAVGRSSFYCLEYFPSQMLRTGNNFTFSYTFEDVPFHSSYAHSQSLDRLMNPLIDQYLYYLSKTNAPSGTTTMSRLQFSQAGASDIRDQSRNWLPGPCYRQQRVSKTAADNNNSDYSWTGATKYHLNGRDSLVNPGPAMASHKDDEEKYFPQSGVLIFGKQGSNKTNVDIEKVMITDEEEIRTTNPVATEQYGSVSTNLQSGNTQAATSDVNTQGVLPGMVWQDRDVYLQGPIWAKIPHTDGHFHPSPLMGGFGLKHPPPQILIKNTPVPANPSTTFSAAKFASFITQYSTGQVSVEIEWELQKENSKRWNPEIQYTSNYNKSVNVDFTVDTNGVYSEPRPIGTRYLTRNL

SEQ ID NO: 332 - protein, 735 aa, Artificial Sequence
  Synthetic Polypeptide
MAADGYLPDWLEDTLSEGIRQWWKLKPGPPPPKPAERHKDDSRGLVLPGYKYLGPFNGLDKGEPVNEADAAALEHDKAYDRQLDSGDNPYLKYNHADAEFQERLKEDTSFGGNLGRAVFQAKKRVLEPLGLVEEPVKTAPGKKRPVEHSPVEPDSSSGTGKAGQQPARKRLNFGQTGDADSVPDPQPLGQPPAAPSGLGTNTMATGSGAPMADNNEGADGVGNSSGNWHCDSTWMGDRVITTSTRTWALPTYNNHLYKQISSQSGASNDNHYFGYSTPWGYFDFNRFHCHFSPRDWQRLINNNWGFRPKRLSFKLFNIQVKEVTQNDGTTTIANNLTSTVQVFTDSEYQLPYVLGSAHRGCLPPFPADVFMVPQYGYLTLNNGSQAVGRSSFYCLEYFPSQMLRTGNNFTFSYTFEDVPFHSSYAHSQSLDRLMNPLIDQYLYYLSKTNAPSGTTTMSRLQFSQAGASDIRDQSRNWLPGPCYRQQRVSKTAADNNNSDYSWTGATKYHLNGRDSLVNPGPAMASHKDDEEKYFPQSGVLIFGKQGSNKTNVDIEKVMITDEEEIRTTNPVATEQYGSVSTNLQSGNTQAATSDVNTQGVLPGMVWQDRDVYLQGPIWAKIPHTDGHFHPSPLMGGFGLKHPPPQILIKNTPVPANPSTTFSAAKFASFITQYSTGQVSVEIEWELQKENSKRWNPEIQYTSNYNKSVNVDFTVDTNGVYSEPRPIGTRYLTRNL

SEQ ID NO: 333 - protein, 735 aa, Artificial Sequence
  Synthetic Polypeptide
MAADGYLPDWLEDTLSEGIRQWWKLKPGPPPPKPAERHKDDSRGLVLPGYKYLGPFNGLDKGEPVNEADAAALEHDKAYDRQLDSGDNPYLKYNHADAEFQERLKEDTSFGGNLGRAVFQAKKRVLEPLGLVEEPVKTAPGKKRPVEHSPVEPDSSSGTGKAGQQPARKRLNFGQTGDADSVPDPQPLGQPPAAPSGLGTNTMATGSGAPMADNNEGADGVGNSSGNWHCDSTWMGDRVITTSTRTWALPTYNNHLYKQISSQSGASNDNHYFGYSTPWGYFDFNRFHCHFSPRDWQRLINNNWGFRPKRLSFKLFNIQVKEVTQNDGTTTIANNLTSTVQVFTDSEYQLPYVLGSAHQGCLPPFPADVFMVPQYGYLTLNNGSQAVGRSSFYCLEYFPSQMLRAGNNFTFSYTFEDVPFHSSYAHSQSLDRLMNPLIDQYLYYLSKTNAPSGTTTMSRLQFSQAGASDIRDQSRNWLPGPCYRQQRVSKTAADNNNSDYSWTGATKYHLNGRDSLVNPGPAMASHKDDEEKYFPQSGVLIFGKQGSNKTNVDIEKVMITDEEEIRTTNPVATEQYGSVSTNLQSGNTQAATSDVNTQGVLPGMVWQDRDVYLQGPIWAKIPHTDGHFHPSPLMGGFGLKHPPPQILIKNTPVPANPSTTFSAAKFASFITQYSTGQVSVEIEWELQKENSKRWNPEIQYTSNYNKSVNVDFTVDTNGVYSEPRPIGTRYLTRNL

SEQ ID NO: 334 - protein, 735 aa, Artificial Sequence
  Synthetic Polypeptide
MAADGYLPDWLEDTLSEGIRQWWKLKPGPPPPKPAERHKDDSRGLVLPGYKYLGPFNGLDKGEPVNEADAAALEHDKAYDRQLDSGDNPYLKYNHADAEFQERLKEDTSFGGNLGRAVFQAKKRVLEPLGLVEEPVKTAPGKKRPVEHSPVEPDSSSGTGKAGQQPARKRLNFGQTGDADSVPDPQPLGQPPAAPSGLGTNTMATGSGAPMADNNEGADGVGNSSGNWHCDSTWMGDRVITTSTRTWALPTYNNHLYKQISSQSGASNDNHYFGYSTPWGYFDFNRFHCHFSPRDWQRLINNNWGFRPKRLGFKLFNIQVKEVTQNDGTTTIANNLTSTVQVFTDSEYQLPYVLGSAHQGCLPPFPADVFMVPQYGYLTLNNGSQAVGRSSFYCLEYFPSQMLRTGNNFTFSYTFEDVPFHSSYAHSQSLDRLMNPLIDQYLYYLSKTNAPSGTTTMSRLQFSQAGASDIRDQSRNWLPGPCYRQQRVSKTAADNNNSDYSWTGATKYHLNGRDSLVNPGPAMASHKDDEEKYFPQSGVLIFGKQGSNKTNVDIEKVMITDEEEIRTTNPVATEQYGSVSTNLQSGNTQAATSDVNTQGVLPGMVWQDRDVYLQGPIWAKIPHTDGHFHPSPLMGGFGLKHPPPQILIKNTPVPANPSTTFSAAKFASFITQYSTGQVSVEIEWELQKENSKRWNPEIQYTSNYNKSVNVDFTVDTNGVYSEPRPIGTRYLTRNL

SEQ ID NO: 335 - protein, 735 aa, Artificial Sequence
  Synthetic Polypeptide
MAADGYLPDWLEDTLSEGIRQWWKLKPGPPPPKPAERHKDDSRGLVLPGYKYLGPFNGLDKGEPVNEADAAALEHDKAYDRQLDSGDNPYLKYNHADAEFQERLKEDTSFGGNLGRAVFQAKKRVLEPLGLVEEPVKTAPGKKRPVEHSPVEPDSSSGTGKAGQQPARKRLNFGQTGDADSVPDPQPLGQPPAAPSGLGTNTMATGSGAPMADNNEGADGVGNSSGNWHCDSTWMGDRVITTSTRTWALPTYNNHLYKQISSQSGVSNDNHYFGYSTPWGYFDFNRFHCHFSPRDWQRLINNNWGFRPKRLSFKLFNIQVKEVTQNDGTTTIANNLTSTVQVFTDSEYQLPYVLGSAHQGCLPPFPADVFMVPQYGYLTLNNGSQAVGRSSFYCLEYFPSQMLRTGNNFTFSYTFEDVPFHSSYAHSQSLDRLMNPLIDQYLYYLSKTNAPSGTTTMSRLQFSQAGASDIRDQSRNWLPGPCYRQQRVSKTAADNNNSDYSWTGATKYHLNGRDSLVNPGPAMASHKDDEEKYFPQSGVLIFGKQGSNKTNVDIEKVMITDEEEIRTTNPVATEQYGSVSTNLQSGNTQAATSDVNTQGVLPGMVWQDRDVYLQGPIWAKIPHTDGHFHPSPLMGGFGLKHPPPQILIKNTPVPANPSTTFSAAKFASFITQYSTGQVSVEIEWELQKENSKRWNPEIQYTSNYNKSVNVDFTVDTNGVYSEPRPIGTRYLTRNL

SEQ ID NO: 336 - protein, 735 aa, Artificial Sequence
  Synthetic Polypeptide
MAADGYLPDWLEDTLSEGIRQWWKLKPGPPPPKPAERHKDDSRGLVLPGYKYLGPFNGLDKGEPVNEADAAALEHDKAYDRQLDSGDNPYLKYNHADAEFQERLKEDTSFGGNLGRAVFQAKKRVLEPLGLVEEPVKTAPGKKRPVEHSPVEPDSSSGTGKAGQQPARKRLNFGQTGDADSVPDPQPLGQPPAAPSGLGTNTMATGSGAPMADNNEGADGVGNSSGNWHCDSTWMGDRVITTSTRTWALPTYNNHLYKQISSQSGASNDNHYFGYSTPWGYFDFNRFHCHFSPRDWQRLINNNWGFRPKRLSFKLFNIQVKEVTQNDGTTTIANNLTSTVQVFTDSEYQLPYVLGSAHQGCLPPFPADVFMVPQYGYLTLNNGSQAVGRSSFYCLEYFPSQMLRTGNNFTFSYTFEDVPFHSSYAHSQSLDRLMNPLIDQYLYYLSKTNAPSGTTTMSRLQFSQAGASDIRDQSRNWLPGPCYRQQRVSKTAADNNNSDYSWTGATKYHLNGRDSLVNPGPAMASHKDDEEKYFPQSGVLIFGKQGSNKTNVDIEKVMITDEEEIRTTNPMATEQYGSVSTNLQSGNTQAATSDVNTQGVLPGMVWQDRDVYLQGPIWAKIPHTDGHFHPSPLMGGFGLKHPPPQILIKNTPVPANPSTTFSAAKFASFITQYSTGQVSVEIEWELQKENSKRWNPEIQYTSNYNKSVNVDFTVDTNGVYSEPRPIGTRYLTRNL

SEQ ID NO: 337 - protein, 735 aa, Artificial Sequence
  Synthetic Polypeptide
MAADGYLPDWLEDTLSEGIRQWWKLKPGPPPPKPAERHKDDSRGLVLPGYKYLGPFNGLDKGEPVNEADAAALEHDKAYDRQLDSGDNPYLKYNHADAEFQERLKEDTSFGGNLGRAVFQAKKRVLEPLGLVEEPVKTAPGKKRPIEHSPVEPDSSSGTGKAGQQPARKRLNFGQTGDADSVPDPQPLGQPPAAPSGLGTNTMATGSGAPMADNNEGADGVGNSSGNWHCDSTWMGDRVITTSTRTWALPTYNNHLYKQISSQSGASNDNHYFGYSTPWGYFDFNRFHCHFSPRDWQRLINNNWGFRPKRLSFKLFNIQVKEVTQNDGTTTIANNLTSTVQVFTDSEYQLPYVLGSAHQGCLPPFPVDVFMVPQYGYLTLNNGSQAVGRSSFYCLEYFPSQMLRTGNNFTFSYTFEDVPFHSSYAHSQSLDRLMNPLIDQYLYYLSKTNAPSGTTTMSRLQFSQAGASDIRDQSRNWLPGPCYRQQRVSKTAADNNNSDYSWTGATKYHLNGRDSLVNPGPAMASHKDDEEKYFPQSGVLIFGKQGSNKTNVDIEKVMITDEEEIRTTNPVATEQYGSVSTNLQSGNTQAATSDVNTQGVLPGMVWQDRDVYLQGPIWAKIPHTDGHFHPSPLMGGFGLKHPPPQILIKNTPVPANPSTTFSAAKFASFITQYSTGQVSVEIEWELQKENSKRWNPEIQYTSNYNKSVNVDFTVDTNGVYSEPRPIGTRYLTRNL

SEQ ID NO: 338 - protein, 735 aa, Artificial Sequence
  Synthetic Polypeptide
MAADGYLPDWLEDTLSEGIRQWWKLKPGPPPPKPAERHKDDSRGLVLPGYKYLGPFNGLDKGEPVNEADAAALEHDKAYDRQLDSGDNPYLKYNHADAEFQERLKEDTSFGGNLGRAVFQAKKRVLEPLGLVEEPVKTAPGKKRPVEHSPVEPDSSSGTGKAGQQPARKRLNFGQTGDADSVPDPQPLGQPPAAPSGLGTNTMTTGSGAPMADNNEGADGVGNSSGNWHCDSTWMGDRVITTSTRTWALPTYNNHLYKQISSQSGASNDNHYFGYSTPWGYFDFNRFHCHFSPRDWQRLINNNWGFRPKRLSFKLFNIQVKEVTQNDGTTTIANNLTSTVQVFTDSEYQLPYVLGSAHQGCLPPFPADVFMVPQYGYLTLNNGSQAVGRSSFYCLEYFPSQMLRTGNNFTFSYTFEDVPFHSSYAHSQSLDRLMNPLIDQYLYYLSKTNAPSGTTTMSRLQFSQAGASDIRDQSRNWLPGPCYRQQRVSKTAADNNNSDYSWTGATKYHLNGRDSLVNPGPAMASHKDDEEKYFPQSGVLIFGKQGSNKTNVDIEKVMITDEEEIRTTNPVATEQYGSVSTNLQSGNTQAATSDVNTQGVLPGMVWQDRDVYLQGPIWAKIPHTDGHFHPSPLMGGFGLKHPPPQILIKNTPVPANPSTTFSAAKFASFITQYSTGQVSVEIEWELQKENSKRWNPEIQYTSNYNKSVNVDFTVDTNGVYSEPRPIGTRYLTRNL

SEQ ID NO: 339 - protein, 735 aa, Artificial Sequence
  Synthetic Polypeptide
MAADGYLPDWLEDTLSEGIRQWWKLKPGPPPPKPAERHKDDSRGLVLPGYKYLGPFNGLDKGEPVNEADAAALEHDKAYDRQLDSGDNPYLKYNHADAEFQERLKEDTSFGGNLGRAVFQAKKRVLEPLGLVEEPVKTAPGKKRSVEHSPVEPDSSSGTGKAGQQPARKRLNFGQTGDADSVPDPQPLGQPPAAPSGLGTNTMATGSGAPMADNNEGADGVGNSSGNWHCDSTWMGDRVITTSTRTWALPTYNNHLYKQISSQSGASNDNHYFGYSTPWGYFDFNRFHCHFSPRDWQRLINNNWGFRPKRLSFKLFNIQVKEVTQNDGTTTIANNLTSTVQVFTDSEYQLPYVLGSAHQGCLPPFPADVFMVPQYGYLTLNNGSQAVGRSSFYCLEYFPSQMLRTGNNFTFSYTFEDVPFHSSYAHSQSLDRLMNPLIDQYLYYLSKTNAPSGTTTMSRLQFSQAGASDIRDQSRNWLPGPCYRQQRVSKTAADNNNSDYSWTGATKYHLNGRDSLVNPGPAMASHKDDEEKYFPQSGVLIFGKQGSNKTNVDIEKVMITDEEEIRTTNPVATEQYGSVSTNLQSGNTQAATSDVNTQGVLPGMVWQDRDVYLQGPIWAKIPHTDGHFHPSPLMGGFGLKHPPPQILIKNTPVPANPSTTFSAAKFASFITQYSTGQVSVEIEWELQKENSKRWNPEIQYTSNYNKSVNVDFTVDTNGVYSEPRPIGTRYLTRNL

SEQ ID NO: 340 - protein, 735 aa, Artificial Sequence
  Synthetic Polypeptide
MAADGYLPDWLEDTLSEGIRQWWKLKPGPPPPKPAERHKDDSRGLVLPGYKYLGPFNGLDKGEPVNEADAAALEHDKAYDRQLDSGDNPYLKYNHADAEFQERLKEDTSFGGNLGRAVFQAKKRVLEPLGLVEEPVKTAPGKKRPVEHSPVEPDSSSGTGKAGQQPARKRLNFGQTGDADSVPDPQPLGQPPAAPSGLGTNTMATGSGAPMADNNEGADGVGNSSGNWHCDSTWMGDRVITTSTRTWALPTYNNHLYKQISSQSGASNDNHYFGYSTPWGYFDFNRFHCHFSPRDWQRLINNNWGFRPKRLSFKLFNIQVKEVTQNDGTTTIANNLTSTVQVFTDSEYQLPYVLGSAHQGCLPPFPADVFVVPQYGYLTLNNGSQAVGRSSFYCLEYFPSQMLRTGNNFTFSYTFEDVPFHSSYAHSQSLDRLMNPLIDQYLYYLSKTNAPSGTTTMSRLQFSQAGASDIRDQSRNWLPGPCYRQQRVSKTAADNNNSDYSWTGATKYHLNGRDSLVNPGPAMASHKDDEEKYFPQSGVLIFGKQGSNKTNVDIEKVMITDEEEIRTTNPVATEQYGSVSTNLQSGNTQAATSDVNTQGVLPGMVWQDRDVYLQGPIWAKIPHTDGHFHPSPLMGGFGLKHPPPQILIKNTPVPANPSTTFSAAKFASFITQYSTGQVGVEIEWELQKENSKRWNPEIQYTSNYNKSVNVDFTVDTNGVYSEPRPIGTRYLTRNL

SEQ ID NO: 341 - protein, 735 aa, Artificial Sequence
  Synthetic Polypeptide
MAADGYLPDWLEDTLSEGIRQWWKLKPGPPPPKPAERHKDDSRGLVLPGYKYLGPFNGLDKGEPVNEADAAALEHDKAYDRQLDSGDNPYLKYNHADAEFQERLKEDTSFGGNLGRAVFQAKKRVLEPLGLVEEPVKTAPGKKRPVEHSPVEPDSSSGTGKAGQQPARKRLNFGQTGDADSVPDPQPLGQPPAAPSGLGTNTMATGSGAPMADNNEGADGVGNSSGNWHCDSTWMGDRVITTSTRTWALPTYNNHLYKQISSQSGASNDNHYFGYSTPWGYFDFNRFHCHFSPRDWQRLINNNWGFRPKRLSFKLFNIQVKEVTQNDGTTTIANNLTSTVQVFTDSEYQLPYVLGSAHQGCLPPFPADVFMVPQYGYLTLNNGSQAVGRSSFYCLEYFPSQMLRTGNNFTFSYTFEDVPFHSSYAHSQSLDRLMNPLIDQYLYYLSKTNAPSGTTAMSRLQFSQAGASDIRDQSRNWLPGPCYRQQRVSKTAADNNNSDYSWTGATKYHLNGRDSLVNPGPAMASHKDDEEKYFPQSGVLIFGKQGSNKTNVDIEKVMITDEEEIRTTNPVATEQYGSVSTNLQSGNTQAATSDVNTQGVLPGMVWQDRDVYLQGPIWAKIPHTDGHFHPSPLMGGFGLKHPPPQILIKNTPVPANPSTTFSAAKFASFITQYSTGQVSVEIEWELQKENSKRWNPEIQYTSNYNKSVNVDFTVDTNGVYSEPRPIGTRYLTRNL

SEQ ID NO: 342 - protein, 735 aa, Artificial Sequence
  Synthetic Polypeptide
MAADGYLPDWLEDTLSEGIRQWWKLKPGPPPPKPAERHKDDSRGLVLPGYKYLGPFNGLDKGEPVNEADAAALEHDKAYDRQLDSGDNPYLKYNHADAEFQERLKEDTSFGGNLGRAVFQAKKRVLEPLGLVEEPVKTAPGKKRPVEHSPVEPDSSSGTGKAGQQPARKRLNFGQTGDADSVPDPQPLGQPPAAPSGLGTNTMATGSGAPMADNNEGADGVGNSSGNWHCDSTWMGDRVITTSTRTWALPTYNNHLYKQISSQSGASNDNHYFGYSTPWGYFDFNRFHCHFSPRDWQRLINNNWGFRPKRLSFKLFNIQVKEVTQNDGTTTIANNLTSTVQVFTDSEYQLPYVLGSAHQGCLPPFPADVFMVPQYGYLTLNNGSQAVGRSSFYCLEYFPSQMLRTGNNFTFSYTFEDVPFHSSYAHSQSLDRLMNPPIDQYLYYLSKTNAPSGTTTMSRLQFSQAGASDIRDQSRNWLPGPCYRQQRVSKTAADNNNSDYSWTGATKYHLNGRDSLVNPGPAMASHKDDEEKYFPQSGVLIFGKQGSNKTNVDIEKVMITDEEEIRTTNPVATEQYGSVSTNLQSGNTQAATSDVNTQGVLPGMVWQDRDVYLQGPIWAKIPHTDGHFHPSPLMGGFGLKHPPPQILIKNTPVPANPSTTFSAAKFASFITQYSTGQVSVEIEWELQKENSKRWNPEIQYTSNYNKSVNVDFTVDTNGVYSEPRPIGTRYLTRNL

SEQ ID NO: 343 - protein, 735 aa, Artificial Sequence
  Synthetic Polypeptide
MAADGYLPDWLEDTLSEGIRQWWKLKPGPPPPKPAERHKDDSRGLVLPGYKYLGPFNGLDKGEPVNEADAAALEHDKAYDRQLDSGDNPYLKYNHADAEFQERLKEDTSFGGNLGRAVFQAKKRVLEPLGLVEEPVKTAPGKKRPVEHSPVEPDSSSGTGKAGQQPARKRLNFGQTGDADSVPDPQPLGQPPAAPSGLGTNTMATGSGAPMADNNEGADGVGNSSGNWHCDSTWMGDRVITTSTRTWALPTYNNHLYKQISSQSGASNDNHYFGYSTPWGYFDFNRFHCHFSPRDWQRLINNNWGFRPKRLSFKLFNIQVKEVTQNDGTTTIANNLTSTVQVFTDSEYQLPYVLGSAHQGCLPPFPADVFMVPQYGYLTLNNGSQAVGRSSFYCLEYFPSQMLRTGNNFTFSYTFEDVPFHSSYAHGQSLDRLMNPLIDQYLYYLSKTNAPSGTTTMSRLQFSQAGASDIRDQSRNWLPGPCYRQQRVSKTAADNNNSDYSWTGATKYHLNGRDSLVNPGPAMASHKDDEEKYFPQSGVLIFGKQGSNKTNVDIEKVMITDEEEIRTTNPVATEQYGSVSTNLQSGNTQAATSDVNTQGVLPGMVWQDRDVYLQGPIWAKIPHTDGHFHPSPLMGGFGLKHPPPQILIKNTPVPANPSTTFSAAKFASFITQYSTGQVSVEIEWELQKENSKRWNPEIQYTSNYNKSVNVDFTVDTNGVYSEPRPIGTRYLTRNL

SEQ ID NO: 344 - protein, 735 aa, Artificial Sequence
  Synthetic Polypeptide
MAADGYLPDWLEDTLSEGIRQWWKLKPGPPPPKPAERHKDDSRGLVLPGYKYLGPFNGLDKGEPVNEADAAALEHDKAYDRQLDSGDNPYLKYNHADAEFQERLKEDTSFGGNLGRAVFQAKKRVLEPLGLVEEPVKTAPGKKRPVEHSPVEPDSSSGTGKAGQQPARKRLNFGQTGDADSVPDPQPLGQPPAAPSGLGTNTMATGSGAPMADNNEGADGVGNSSGNWHCDSTWMGDRVITTSTRTWALPTYNNHLYKQISSQSGASNDNHYFGYSTPWGYFDFNRFHCHFSPRDWQRLINNNWGFRPKRLSFKLFNIQVKEVTQNDGTTTIANNLTSTVQVFTDSEYQLPYVLGSAHQGCLPPFPADVFMVPQYGYLTLNNGSQAVGRSSFYCLEYFPSQMLRTGNNFTFSYTFEDVPFHSSYAHSQSLDRLMNPLIDQYLYYLSKTNAPSGTTTMSRPQFSQAGASDIRDQSRNWLPGPCYRQQRVSKTAADNNNSDYSWTGATKYHLNGRDSLVNPGPAMASHKDDEEKYFPQSGVLIFGKQGSNKTNVDIEKVMITDEEEIRTTNPVATEQYGSVSTNLQSGNTQAATSDVNTQGVLPGMVWQDRDVYLQGPIWAKIPHTDGHFHPSPLMGGFGLKHPPPQILIKNTPVPANPSTTFSAAKFASFITQYSTGQVSVEIEWELQKENSKRWNPEIQYTSNYNKSVNVDFTVDTNGVYSEPRPIGTRYLTRNL

SEQ ID NO: 345 - protein, 735 aa, Artificial Sequence
  Synthetic Polypeptide
MAADGYLPDWLEDTLSEGIRQWWKLKPGPPPPKPAERHKDDSRGLVLPGYKYLGPFNGLDKGEPVNEADAAALEHDKAYDRQLDSGDNPYLKYNHADAEFQERLKEDTSFGGNLGRAVFQAKKRVLEPLGLVEEPVKTAPGKKRPVEHSPVEPDSSSGTGKAGQQPARKRLNFGQTGDADSVPDPQPLGQPPAAPSGLGTNTMATGSGAPMADNNEGADGVGNSSGNWHCDSTWMGDRVITTSTRTWALPTYNNHLYKQISSQSGTSNDNHYFGYSTPWGYFDFNRFHCHFSPRDWQRLINNNWGFRPKRLSFKLFNIQVKEVTQNDGTTTIANNLTSTVQVFTDSEYQLPYVLGSAHQGCLPPFPADVFMVPQYGYLTLNNGSQAVGRSSFYCLEYFPSQMLRTGNNFTFSYTFEDVPFHSSYAHSQSLDRLMNPLIDQYLYYLSKTNAPSGTTTMSRLQFSQAGASDIRDQSRNWLPGPCYRQQRVSKTAADNNNSDYSWTGATKYHLNGRDSLVNPGPAMASHKDDEEKYFPQSGVLIFGKQGSNKTNVDIEKVMITDEEEIRTTNPVATEQYGSVSTNLQSGNTQAATSDVNTQGVLPGMVWQDRDVYLQGPIWAKIPHTDGHFHPSPLMGGFGLKHPPPQILIKNTPVPANPSTTFSAAKFASFITQYSTGQVSVEIEWELQKENSKRWNPEIQYTSNYNKSVNVDFTVDTNGVYSEPRPIGTRYLTRNL

SEQ ID NO: 346 - protein, 735 aa, Artificial Sequence
  Synthetic Polypeptide
MAADGYLPDWLEDTLSEGIRQWWKLKPGPPPPKPAERHKDDSRGLVLPGYKYLGPFNGLDKGEPVNEADAAALEHDKAYDRQLDSGDNPYLKYNHADAEFQERLKEDTSFGGNLGRAVFQAKKRVLEPLGLVEEPVKTAPGKKRPVEHSPVEPDSSSGTGKAGQQPARKRLNFGQTGDADSVPDPQPLGQPPAAPSGLGTNTMATGSGAPMADNNEGADGVGNSSGNWHCDSTWMGDRVITTSTRTWALPTYNNHLYKQISSQSGASNDNHYFGYSTPWGYFDFNRFHCHFSPRDWQRLINNNWGFRPKRLSFKLFNIQVKEVTQNDGTTTIANNLTSTVQVFTDSEYQLPYVLGSAHQGCLPPFPADVFMVPQYGYLTLNNGSQAVGRSSFYCLEYFPSQMLRTGNNFTFSYTFEDVPFHSSYAHSQSLDRLMNPLIDQYLYYLSKTNAPSGTTTMSRLQFSQAGASDIRDQSRNWLPGPCYRQQRVSKTAADNNNSDYSWTGATKYHLNGRDSLVNPGPAMASHKDDEEKYFPQSGVLIFGKQGSNKTNVDIEKVMITDEEEIRTTNPVATEQYGSVSTNLQSGNTQAATSDVNTQGVLPGMVWQDRDVYLQGPIWAKIPHTDGHFHPSPLMGGFGLKHPPPQILIKNTPVPANPSTTFSAAKFASFITQYSTGQVSVEIEWELQKENSKRWNPEIQYTSNYNKSVNVDFTVDTNGVYSEPHPIGTRYLTRNL

SEQ ID NO: 347 - protein, 735 aa, Artificial Sequence
  Synthetic Polypeptide
MAADGYLPDWLEDTLSEGIRQWWKFKPGPPPPKPAERHKDDSRGLVLPGYKYLGPFNGLDKGEPVNEADAAALEHDKAYDRQLDSGDNPYLKYNHADAEFQERLKEDTSFGGNLGRAVFQAKKRVLEPLGLVEEPVKTAPGKKRPVEHSPVEPDSSSGTGKAGQQPARKRLNFGQTGDADSVPDPQPLGQPPAAPSGLGTNTMATGSGAPMADNNEGADGVGNSSGNWHCDSTWMGDRVITTSTRTWALPTYNNHLYKQISSQSGASNDNHYFGYSTPWGYFDFNRFHCHFSPRDWQRLINNNWGFRPKRLSFKLFNIQVKEVTQNDGTTTIANNLTSTVQVFTDSEYQLPYVLGSAHQGCLPPFPADVFMVPQYGYLTLNNGSQAVGRSSFYCLEYFPSQMLRTGNNFTFSYTFEDVPFHSSYAHSQSLDRLMNPLIDQYLYYLSKTNAPSGTTTMSRLQFSQAGASDIRDQSRNWLPGPCYRQQRVSKTAADNNNSDYSWTGATKYHLNGRDSLVNPGPAMASHKDDEEKYFPQSGVLIFGKQGSNKTNVDIEKVMITDEEEIRTTNPVATEQYGSVSTNLQSGNTQAATSDVNTQGVLPGMVWQDRDVYLQGPIWAKIPHTDGHFHPSPLMGGFGLKHPPPQILIKNTPVPANPSTTFSAAKFASFITQYSTGQVSVEIEWELQKENSKRWNPEIQYTSNYNKSVNVDFTVDTNGVYSEPRPIGTRYLTRNL

SEQ ID NO: 348 - protein, 735 aa, Artificial Sequence
  Synthetic Polypeptide
MAADGYLPDWLEDTLSEGIRQWWKLKPGPPPPKPAERHKDDSRGLVLPGYKYLGPFNGLDKGEPVNEADAAALEHDKAYDRQLDSGDNPYLKYNHADAEFQERLKEDTSFGGNLGRAVFQAKKRVLEPLGLVEEPVKTAPGKKRPVEHSPVEPDSSSGTGKAGQQPARKRLNFGQTGDADSVPDPQPLGQPPAAPSGLGTNTMATGSGAPMADNNEGADGVGNSSGNWHCDSTWMGDRVITTSTRTWALPTYNNHLYKQISSQSGASNDNHYFGYSTPWGYFDFNRFHCHFSSRDWQRLINNNWGFRPKRLSFKLFNIQVKEVTQNDGTTTIANNLTSTVQVFTDSEYQLPYVLGSAHQGCLPPFPADVFMVPQYGYLTLNNGSQAVGRSSFYCLEYFPSQMLRTGNNFTFSYTFEDVPFHSSYAHSQSLDRLMNPLIDQYLYYLSKTNAPSGTTTMSRLQFSQAGASDIRDQSRNWLPGPCYRQQRVSKTAADNNNSDYSWTGATKYHLNGRDSLVNPGPAMASHKDDEEKYFPQSGVLIFGKQGSNKTNVDIEKVMITDEEEIRTTNPVATEQYGSVSTNLQSGNTQAATSDVNTQGVLPGMVWQDRDVYLQGPIWAKIPHTDGHFHPSPLMGGFGLKHPPPQILIKNTPVPANPSTTFSAAKFASFITQYSTGQVSVEIEWELQKENSKRWNPEIQYTSNYNKSVNVDFTVDTNGVYSEPRPIGTRYLTRNL

SEQ ID NO: 349 - protein, 735 aa, Artificial Sequence
  Synthetic Polypeptide
MAADGYLPDWLEDTLSEGIRQWWKLKPGPPPPKPAERHEDDSRGLVLPGYKYLGPFNGLDKGEPVNEADAAALEHDKAYDRQLDSGDNPYLKYNHADAEFQERLKEDTSFGGNLGRAVFQAKKRVLEPLGLVEEPVKTAPGKKRPVEHSPVEPDSSSGTGKAGQQPARKRLNFGQTGDADSVPDPQPLGQPPAAPSGLGTNTMATGSGAPMADNNEGADGVGNSSGNWHCDSTWMGDRVITTSTRTWALPTYNNHLYKQISSQSGASNDNHYFGYSTPWGYFDFNRFHCHFSPRDWQRLINNNWGFRPKRLSFKLFNIQVKEVTQNDGTTTIANNLTSTVQVFTDSEYQLPYVLGSAHQGCLPPFPADVFMVPQYGYLTLNNGSQAVGRSSFYCLEYFPSQMLRTGNNFTFSYTFEDVPFHSSYAHSQSLDRLMNPLIDQYLYYLSKTNAPSGTTTMSRLQFSQAGASDIRDQSRNWLPGPCYRQQRVSKTAADNNNSDYSWTGATKYHLNGRDSLVNPGPAMASHKDDEEKYFPQSGVLIFGKQGSNKTNVDIEKVMITDEEEIRTTNPVATEQYGSVSTNLQSGNTQAATSDVNTQGVLPGMVWQDRDVYLQGPIWAKIPHTDGHFHPSPLMGGFGLKHPPPQILIKNTPVPANPSTTFSAAKFASFITQYSTGQVSVEIEWELQKENSKRWNPEIQYTSNYNKSVNVDFTVDTNGVYSEPRPIGTRYLTRNL

SEQ ID NO: 350 - protein, 734 aa, Artificial Sequence
  Synthetic Polypeptide
MAADGYLPDWLEDTLSEGIRQWWKLKPGPPPPKPAERHKDDSRGLVLPGYKYLGPFNGLDKGEPVNEADAAALEHDKAYDRQLDSGDNPYLKYNHADAEFQERLKEDTSFGGNLGRAVFQAKKRVLEPLGLVEEPVKTAPGKKRPVEHSPVEPDSSSGTGKAGQQPARKRLNFGQTGDADSVPDPQPLGQPPAAPSGLGTNTMATGSGAPMADNNEGADGVGNSSGNWHCDSTWMGDRVITTSTRTWALPTYNNHLYKQISSQSGASNDNHYFGYSTPWGYFDFNRFHCHFSPRDWQRLINNNWGFRPKRLSFKLFNIQVKEVTQNDGTTTIANNLTSTVQVFTDSEYQLPYVLGSAHQGCLPPFPADVFMVPQYGYLTLNNGSQAVGRSSFYCLEYFPSQMLRTGNNFTFSYTFEDVPFHSSYAHSQSLDRLMNPLIDQYLYYLSKTNAPSGTTTMSRLQFSQAGASDIRDQSRNWLPGPCYRQQRVSKTAADNNSDYSWTGATKYHLNGRDSLVNPGPAMASHKDDEEKYFPQSGVLIFGKQGSNKTNVDIEKVMITDEEEIRTTNPVATEQYGSVSTNLQSGNTQAATSDVNTQGVLPGMVWQDRDVYLQGPIWAKIPHTDGHFHPSPLMGGFGLKHPPPQILIKNTPVPANPSTTFSAAKFASFITQYSTGQVSVEIEWELQKENSKRWNPEIQYTSNYNKSVNVDFTVDTNGVYSEPRPIGTRYLTRNL

SEQ ID NO: 351 - protein, 735 aa, Artificial Sequence
  Synthetic Polypeptide
MAADGYLPDWLEDTLSEGIRQWWKLKPGPPPPKPAEWHKDDSRGLVLPGYKYLGPFNGLDKGEPVNEADAAALEHDKAYDRQLDSGDNPYLKYNHADAEFQERLKEDTSFGGNLGRAVFQAKKRVLEPLGLVEEPVKTAPGKKRPVEHSPVEPDSSSGTGKAGQQPARKRLNFGQTGDADSVPDPQPLGQPPAAPSGLGTNTMATGSGAPMADNNEGADGVGNSSGNWHCDSTWMGDRVITTSTRTWALPTYNNHLYKQISSQSGASNDNHYFGYSTPWGYFDFNRFHCHFSPRDWQRLINNNWGFRPKRLSFKLFNIQVKEVTQNDGTTTIANNLTSTVQVFTDSEYQLPYVLGSAHQGCLPPFPADVFMVPQYGYLTLNNGSQAVGRSSFYCLEYFPSQMLRTGNNFTFSYTFEDVPFHSSYAHSQSLDRLMNPLIDQYLYYLSKTNAPSGTTTMSRLQFSQAGASDIRDQSRNWLPGPCYRQQRVSKTAADNNNSDYSWTGATKYHLNGRDSLVNPGPAMASHKDDEEKYFPQSGVLIFGKQGSNKTNVDIEKVMITDEEEIRTTNPVATEQYGSVSTNLQSGNTQAATSDVNTQGVLPGMVWQDRDVYLQGPIWAKIPHTDGHFHPSPLMGGFGLKHPPPQILIKNTPVPANPSTTFSAAKFASFITQYSTGQVSVEIEWELQKENSKRWNPEIQYTSNYNKSVNVDFTVDTNGVYSEPRPIGTRYLTRNL

SEQ ID NO: 352 - protein, 735 aa, Artificial Sequence
  Synthetic Polypeptide
MAADGYLPDWLEDTLSEGIRQWWKLKPGPPPPKPAERHKDDSRGLVLPGYKYLGPFNGLDKGEPVNEADAAALEHDKAYDRQLDSGDNPYLKYNHADAEFQERLKEDTSFGGNLGRAVFQAKKRVLEPLGLVEEPVKTAPGKKRPVEHSPVEPDSSSGTGKAGQQPARKRLNFGQTGDADSVPDPQPLGQPPAAPSGLGTNTMATGSGAPMADNNEGADGVGNSSGNWHCDSTWMGDRVITTSTRTWALPTYNNHLYKQISSQSGASNDNHYFGYSTPWGYFDFNRFHCHFSPRDWQRLINNNWGFRPKRLSFKLFNIQVKEVTQNDGTTTIANNLTSTVQVFTDSEYQLPYVLGSAHQGCLPPFPADVFMVPQYGYLTLNNGSQAVGRSSFYCLEYFPSQMLRTGNNFTFSYTFEDVPFHSSYAHSQSLDRLMNPLIDQYLYYLSKTNAPSGTTTMSRLQFSQAGASDIRDQSRNWLPGPCYRQQRVSKTAADNNNSDYSWTGATKYHLNGRDSLVNPGPAMASHKDDEEKYFPQSGVLIFGKQGSNKTNVDIEKVMITDEEEIRTTNPVATEQYGSVSTNLQSGNTQAATSDVNTQGVLPDMVWQDRDVYLQGPIWAKIPHTDGHFHPSPLMGGFGLKHPPPQILIKNTPVPANPSTTFSAAKFASFITQYSTGQVSVEIEWELQKENSKRWNPEIQYTSNYNKSVNVDFTVDTNGVYSEPRPIGTRYLTRNL

SEQ ID NO: 353 - protein, 735 aa, Artificial Sequence
  Synthetic Polypeptide
MAADGYLPDWLEDTLSEGIRQWWKLKPGPPPPKPAERHKDDSRGLVLPGYKYLGPFNGLDKGEPVNEADAAALEHDKAYDRQLDSGDNPYLKYNHADAEFQERLKEDTSFGDNLGRAVFQAKKRVLEPLGLVEEPVKTAPGKKRPVEHSPVEPDSSSGTGKAGQQPARKRLNFGQTGDADSVPDPQPLGQPPAAPSGLGTNTMATGSGAPMADNNEGADGVGNSSGNWHCDSTWMGDRVITTSTRTWALPTYNNHLYKQISSQSGASNDNHYFGYSTPWGYFDFNRFHCHFSPRDWQRLINNNWGFRPKRLSFKLFNIQVKEVTQNDGTTTIANNLTSTVQVFTDSEYQLPYVLGSAHQGCLPPFPADVFMVPQYGYLTLNNGSQAVGRSSFYCLEYFPSQMLRTGNNFTFSYTFEDVPFHSSYAHSQSLDRLMNPLIDQYLYYLSKTNAPSGTTTMSRLQFSQAGASDIRDQSRNWLPGPCYRQQRVSKTAADNNNSDYSWTGATKYHLNGRDSLVNPGPAMASHKDDEEKYFPQSGVLIFGKQGSNKTNVDIEKVMITDEEEIRTTNPVATEQYGSVSTNLQSGNTQAATSDVNTQGVLPGMVWQDRDVYLQGPIWAKIPHTDGHFHPSPLMGGFGLKHPPPQILIKNTPVPANPSTTFSAAKFASFITQYSTGQVSVEIEWELQKENSKRWNPEIQYTSNYNKSVNVDFTVDTNGVYSEPRPIGTRYLTRNL

SEQ ID NO: 354 - protein, 735 aa, Artificial Sequence
  Synthetic Polypeptide
MAADGYLPDWLEDTLSEGIRQWWKLKPGPPPPKPAERHKDDSRGLVLPGYKYLGPFNGLDKGEPVNEADAAALEHDKAYDRQLDSGDNPYLKYNHADAEFQERLKEDTSFGGNLGRAVFQAKKRVLEPLGLVEEPVKTAPGKKRPVEHSPVEPDSSSGTGKAGQQPARKRLNFGQTGDADSVPDPQPLGQPPAAPSGLGTNTMATGSGAPMADNNEGADGVGNSSGNWHCDSTWMGDRVITTSTRTWALPTYNNHLYKQISSQSGASNDNHYFGYSTPWGYFDFNRFHCHFSPRDWQRLINNNWGFRPKRLSFKLFNIQVKEVTQNDGTTTIANNLTSTVQVFTDSEYQLPYVLDSAHQGCLPPFPADVFMVPQYGYLTLNNGSQAVGRSSFYCLEYFPSQMLRTGNNFTFSYTFEDVPFHSSYAHSQSLDRLMNPLIDQYLYYLSKTNAPSGTTTMSRLQFSQAGASDIRDQSRNWLPGPCYRQQRVSKTAADNNNSDYSWTGATKYHLNGRDSLVNPGPAMASHKDDEEKYFPQSGVLIFGKQGSNKTNVDIEKVMITDEEEIRTTNPVATEQYGSVSTNLQSGNTQAATSDVNTQGVLPGMVWQDRDVYLQGPIWAKIPHTDGHFHPSPLMGGFGLKHPPPQILIKNTPVPANPSTTFSAAKFASFITQYSTGQVSVEIEWELQKENSKRWNPEIQYTSNYNKSVNVDFTVDTNGVYSEPRPIGTRYLTRNL

SEQ ID NO: 355 - protein, 735 aa, Artificial Sequence
  Synthetic Polypeptide
MAADGYLPDWLEDTLSEGIRQWWKLKPGPPPPKPAERHKDDSRGLVLPGYKYLGPFNGLDKGEPVNEADAAALEHDKAYDRQLDSGDNPYLKYNHADAEFQERLKEDTSFGGNLGRAVFQAKKRVLEPLGLVEEPVKTAPGKKRPVEHSPVEPDSSSGTGKAGQQPARKRLNFGQTGDADSVPDPQPLGQPPAAPSGLGTNTMATGSGAPMADNNEGADGVGNSSGNWHCDSTWMGDRVITTSTRTWALPTYNNHLYKQISSQSGASNDNHYFGYSTPWGYFDFNRFHCHFSPRDWQRLINNNWGFRPKRLSFKLFNIQVKEVTQNDGTTTIANNLTSTVQVFTDSEYQLPYVLGSAHQGCLPPFPADVFMVPQYGYLTLNNGSQAVGRSSFYCLEYFPSQMLRTGNNFTFSYTFEDVPFHSSYAHSQSLDRLMNPLIDQYLYYLSKTNAPSGTTTMSRLQFSQAGASDIRDQSRNWLPGPCYRQQRVSKTAADNNNSDYSWTGATKYHLNGRDSLVNPGPAMASHKDDEEKYFPQSGVLIFGKQGSNKTNVDIEKVMITDEEEIRTTNPVATEQYGSVSTNLQSGNTQAATSDVNTQGVLPGMVWQDRDVYLQGPIWAKIPHTDGHFHPSPLMGGFGLKHPPPQILIKNTPVPANPSTTFSATKFASFITQYSTGQVSVEIEWELQKENSKRWNPEIQYTSNYNKSVNVDFTVDTNGVYSEPRPIGTRYLTRNL

SEQ ID NO: 356 - protein, 735 aa, Artificial Sequence
  Synthetic Polypeptide
MAADGYLPDWLEDTLSEGIRQWWKLKPGPPPPKPAERHKDDSRGLVLPGYKYLGPFNGLDKGESVNEADAAALEHDKAYDRQLDSGDNPYLKYNHADAEFQERLKEDTSFGGNLGRAVFQAKKRVLEPLGLVEEPVKTAPGKKRPVEHSPVEPDSSSGTGKAGQQPARKRLNFGQTGDADSVPDPQPLGQPPAAPSGLGTNTMATGSGAPMADNNEGADGVGNSSGNWHCDSTWMGDRVITTSTRTWALPTYNNHLYKQISSQSGASNDNHYFGYSTPWGYFDFNRFHCHFSPRDWQRLINNNWGFRPKRLSFKLFNIQVKEVTQNDGTTTIANNLTSTVQVFTDSEYQLPYVLGSAHQGCLPPFPADVFMVPQYGYLTLNNGSQAVGRSSFYCLEYFPSQMLRTGNNFTFSYTFEDVPFHSSYAHSQSLDRLMNPLIDQYLYYLSKTNAPSGTTTMSRLQFSQAGASDIRDQSRNWLPGPCYRQQRVSKTAADNNNSDYSWTGATKYHLNGRDSLVNPGPAMASHKDDEEKYFPQSGVLIFGKQGSNKTNVDIEKVMITDEEEIRTTNPVATEQYGSVSTNLQSGNTQAATSDVNTQGVLPGMVWQDRDVYLQGPIWAKIPHTDGHFHPSPLMGGFGLKHPPPQILIKNTPVPANPSTTFSAAKFASFITQYSTGQVSVEIEWELQKENSKRWNPEIQYTSNYNKSVNVDFTVDTNGVYSEPRPIGTRYLTRNL

SEQ ID NO: 357 - protein, 735 aa, Artificial Sequence
  Synthetic Polypeptide
MAADGYLPDWLEDTLSEGIRQWWKLKPGPPPPKPAERHKDDSRGLVLPGYKYLGPFNGLDKGEPVNEADAAALEHDKAYDRQLDSGDNPYLKYNHADAEFQERLKEDTSFGGNLGRAVFQAKKRVLEPLGLVEEPVKTAPGKKRPVEHSPVEPDSSSGTGKAGQQPARKRLNFGQTGDADSVPDPQPLGQPPAAPSGLGTNTMATGSGAPMADNNEGADGVGNSSGNWHCDSTWMGDRVITTSTRTWALPTYNNHLYKQISSQSGASNDNHYFGYSTPWGYFDFNRFHCHFSPRDWQRLINNNWGFRPKRLSFKLFNIQVKEVTQNDGTTTIANNLTSTVQVFTDSEYQLPYVLGSVHQGCLPPFPADVFMVPQYGYLTLNNGSQAVGRSSFYCLEYFPSQMLRTGNNFTFSYTFEDVPFHSSYAHSQSLDRLMNPLIDQYLYYLSKTNAPSGTTTMSRLQFSQAGASDIRDQSRNWLPGPCYRQQRVSKTAADNNNSDYSWTGATKYHLNGRDSLVNPGPAMASHKDDEEKYFPQSGVLIFGKQGSNKTNVDIEKVMITDEEEIRTTNPVATEQYGSVSTNLQSGNTQAATSDVNTQGVLPGMVWQDRDVYLQGPIWAKIPHTDGHFHPSPLMGGFGLKHPPPQILIKNTPVPANPSTTFSAAKFASFITQYSTGQVSVEIEWELQKENSKRWNPEIQYTSNYNKSVNVDFTVDTNGVYSEPRPIGTRYLTRNL

SEQ ID NO: 358 - protein, 735 aa, Artificial Sequence
  Synthetic Polypeptide
MAADGYLPDWLEDTLSEGIRQWWKLKPGPPPPKPAERHKDDSRGLVLPGYKYLGPFNGLDKGEPVNEADAAALEHDKAYDRQLDSGDNPYLKYNHADAEFQERLKEDTSFGGNLGRAVFQAKKRVLEPLGLVEEPVKTAPGKKRPVEHSPVESDSSSGTGKAGQQPARKRLNFGQTGDADSVPDPQPLGQPPAAPSGLGTNTMATGSGAPMADNNEGADGVGNSSGNWHCDSTWMGDRVITTSTRTWALPTYNNHLYKQISSQSGASNDNHYFGYSTPWGYFDFNRFHCHFSPRDWQRLINNNWGFRPKRLSFKLFNIQVKEVTQNDGTTTIANNLTSTVQVFTDSEYQLPYVLGSAHQGCLPPFPADVFMVPQYGYLTLNNGSQAVGRSSFYCLEYFPSQMLRTGNNFTFSYTFEDVPFHSSYAHSQSLDRLMNPLIDQYLYYLSKTNAPSGTTTMSRLQFSQAGASDIRDQSRNWLPGPCYRQQRVSKTAADNNNSDYSWTGATKYHLNGRDSLVNPGPAMASHKDDEEKYFPQSGVLIFGKQGSNKTNVDIEKVMITDEEEIRTTNPVATEQYGSVSTNLQSGNTQAATSDVNTQGVLPGMVWQDRDVYLQGPIWAKIPHTDGHFHPSPLMGGFGLKHPPPQILIKNTPVPANPSTTFSAAKFASFITQYSTGQVSVEIEWELQKENSKRWNPEIQYTSNYNKSVNVDFTVDTNGVYSEPRPIGTRYLTRNL

SEQ ID NO: 359 - protein, 735 aa, Artificial Sequence
  Synthetic Polypeptide
MAADGYLPDWLEDTLSEGIRQWWKLKPGPPPPKPAERHKDDSRGLVLPGYKYLGPFNGLDKGEPVNEADAAALEHDKAYDRQLDSGDNPYLKYNHADAEFQERLKEDTSFGGNLGRAVFQAKKRVLEPLGLVEEPVKTAPGKKRPVEHSPVEPDSSSGTGKAGQQPARKRLNFGQTGDADSVPDPQPLGQPPAAPSGLGTNTMATGSGAPMADNNEGADGVGNSSGNWHCDSTWMGDRVITTSTRTWALPTYNNHLYKQISSQSGASNDNHYFGYSTPWGYFDFNRFHCHFSPRDWQRLINNNWGFRPKRLSFKLFNIQVKEVTQNDGTTTIANNLTSTVQVFTDSEYQLPYVLGSAHQGCLPPFPADVFMVPQYGYLTLNNGSQAVGRSSFYCLEYFPSQMLRTGNNFTFSYTFEDVPFHSSYAHSQSMDRLMNPLIDQYLYYLSKTNAPSGTTTMSRLQFSQAGASDIRDQSRNWLPGPCYRQQRVSKTAADNNNSDYSWTGATKYHLNGRDSLVNPGPAMASHKDDEEKYFPQSGVLIFGKQGSNKTNVDIEKVMITDEEEIRTTNPVATEQYGSVSTNLQSGNTQAATSDVNTQGVLPGMVWQDRDVYLQGPIWAKIPHTDGHFHPSPLMGGFGLKHPPPQILIKNTPVPANPSTTFSAAKFASFITQYSTGQVSVEIEWELQKENSKRWNPEIQYTSNYNKSVNVDFTVDTNGVYSEPRPIGTRYLTRNL

SEQ ID NO: 360 - protein, 735 aa, Artificial Sequence
  Synthetic Polypeptide
MAADGYLPDWLEDTLSEGIRQWWKLKPGPPPPKPAERHKDDSRGLVLPGYKYLGPFNGLDKGEPVNEADAAALEHDKAYDRQLDSGDNPYLKYNHADAEFQERLKEDTSFGGNLGRAVFQAKKRVLEPLGLVEEPVKTAPGKKRPVEHSPVEPDSSSGTGKAGQQPARKRLNFGQTGDADSVPDPQPLGQPPAAPSGLGTNTMATGSGAPMADNNEGADGVGNSSGNWHCDSTWMGDRVITTSTRTWALPTYNNHLYKQISSQSGASNDNHYFGYSTPWGYFDFNRFHCHFSPRDWQRLINNNWGFRPKRLSFKLFNIQVKEVTQNDGTTTIANNLTSTVQVFTDSEYQLPYVLGSAHQGCLPPFPADVFMVPQYGYLTLNNGSQAVGRSSFYCLEYFPSQMLRTGNNFTFSYTFEDVPFHSSYAHSQSLDRLMNPLIDQYLYYLSKTNAPSGTTTMSRLQFSQAGASDIRDQSRNWLPGPCYRQQRVSKTAADNNNSDYSWTGATKYHLNGRDSLVNPGPAMASHKDDEEKYFPQSGVLIFRKQGSNKTNVDIEKVMITDEEEIRTTNPVATEQYGSVSTNLQSGNTQAATSDVNTQGVLPGMVWQDRDVYLQGPIWAKIPHTDGHFHPSPLMGGFGLKHPPPQILIKNTPVPANPSTTFSAAKFASFITQYSTGQVSVEIEWELQKENSKRWNPEIQYTSNYNKSVNVDFTVDTNGVYSEPRPIGTRYLTRNL

SEQ ID NO: 361 - protein, 735 aa, Artificial Sequence
  Synthetic Polypeptide
MAADGYLPDWLEDTLSEGIRQWWKLKPGPPPPKPAERHKDDSRGLVLPGYKYLGPFNGLDKGEPVNEADTAALEHDKAYDRQLDSGDNPYLKYNHADAEFQERLKEDTSFGGNLGRAVFQAKKRVLEPLGLVEEPVKTAPGKKRPVEHSPVEPDSSSGTGKAGQQPARKRLNFGQTGDADSVPDPQPLGQPPAAPSGLGTNTMATGSGAPMADNNEGADGVGNSSGNWHCDSTWMGDRVITTSTRTWALPTYNNHLYKQISSQSGASNDNHYFGYSTPWGYFDFNRFHCHFSPRDWQRLINNNWGFRPKRLSFKLFNIQVKEVTQNDGTTTIANNLTSTVQVFTDSEYQLPYVLGSAHQGCLPPFPADVFMVPQYGYLTLNNGSQAVGRSSFYCLEYFPSQMLRTGNNFTFSYTFEDVPFHSSYAHSQSLDRLMNPLIDQYLYYLSKTNAPSGTTTMSRLQFSQAGASDIRDQSRNWLPGPCYRQQRVSKTAADNNNSDYSWTGATKYHLNGRDSLVNPGPAMASHKDDEEKYFPQSGVLIFGKQGSNKTNVDIEKVMITDEEEIRTTNPVATEQYGSVSTNLQSGNTQAATSDVNTQGVLPGMVWQDRDVYLQGPIWAKIPHTDGHFHPSPLMGGFGLKHPPPQILIKNTPVPANPSTTFSAAKFASFITQYSTGQVSVEIEWELQKENSKRWNPEIQYTSNYNKSVNVDFTVDTNGVYSEPRPIGTRYLTRNL

SEQ ID NO: 362 - protein, 735 aa, Artificial Sequence
  Synthetic Polypeptide
MAADGYLPDWLEDTLSEGIRQWWKLKPGPPPPKPAERHKDDSRGLVLPGYKYLGPFNGLDKGEPVNEADAAALEHDKAYDRQLDSGDNPYLKYNHADAEFQERLKEDTSFGGNLGRAVFQAKKRVLEPLGLVEEPVKTAPGKKRPVEHSPVEPDSSSGTGKAGQQPARKRLNFGQTGDADSVPDPQPLGQPPAAPSGLGTNTMATGSGTPMADNNEGADGVGNSSGNWHCDSTWMGDRVITTSTRTWALPTYNNHLYKQISSQSGASNDNHYFGYSTPWGYFDFNRFHCHFSPRDWQRLINNNWGFRPKRLSFKLFNIQVKEVTQNDGTTTIANNLTSTVQVFTDSEYQLPYVLGSAHQGCLPPFPADVFMVPQYGYLTLNNGSQAVGRSSFYCLEYFPSQMLRTGNNFTFSYTFEDVPFHSSYAHSQSLDRLMNPLIDQYLYYLSKTNAPSGTTTMSRLQFSQAGASDIRDQSRNWLPGPCYRQQRVSKTAADNNNSDYSWTGATKYHLNGRDSLVNPGPAMASHKDDEEKYFPQSGVLIFGKQGSNKTNVDIEKVMITDEEEIRTTNPVATEQYGSVSTNLQSGNTQAATSDVNTQGVLPGMVWQDRDVYLQGPIWAKIPHTDGHFHPSPLMGGFGLKHPPPQILIKNTPVPANPSTTFSAAKFASFITQYSTGQVSVEIEWELQKENSKRWNPEIQYTSNYNKSVNVDFTVDTNGVYSEPRPIGTRYLTRNL

SEQ ID NO: 363 - protein, 735 aa, Artificial Sequence
  Synthetic Polypeptide
MAADGYLPDWLEDTLSEGIRQWWKLKPGPPPPKPAERHKDDSRGLVLPGYKYLGPFNGLDKGEPVNEADAAALEHDKAYDRQLDSGDNPYLKYNHADAEFQERLKEDTSFGGNLGRAVFQAKKRVLEPLGLVEEPVKTAPGKKRPVEHSPVEPDSSSGTGKAGQQPARKRLNFGQTGDADSVPDPQPLGQPPAAPSGLGTNTMATGSGAPMADNNEGADGVGNSSGNWHCDSTWMGDRVITTSTRTWALSTYNNHLYKQISSQSGASNDNHYFGYSTPWGYFDFNRFHCHFSPRDWQRLINNNWGFRPKRLSFKLFNIQVKEVTQNDGTTTIANNLTSTVQVFTDSEYQLPYVLGSAHQGCLPPFPADVFMVPQYGYLTLNNGSQAVGRSSFYCLEYFPSQMLRTGNNFTFSYTFEDVPFHSSYAHSQSLDRLMNPLIDQYLYYLSKTNAPSGTTTMSRLQFSQAGASDIRDQSRNWLPGPCYRQQRVSKTAADNNNSDYSWTGATKYHLNGRDSLVNPGPAMASHKDDEEKYFPQSGVLIFGKQGSNKTNVDIEKVMITDEEEIRTTNPVATEQYGSVSTNLQSGNTQAATSDVNTQGVLPGMVWQDRDVYLQGPIWAKIPHTDGHFHPSPLMGGFGLKHPPPQILIKNTPVPANPSTTFSAAKFASFITQYSTGQVSVEIEWELQKENSKRWNPEIQYTSNYNKSVNVDFTVDTNGVYSEPRPIGTRYLTRNL

SEQ ID NO: 364 - protein, 735 aa, Artificial Sequence
  Synthetic Polypeptide
MAADGYLPDWLEDTLSEGIRQWWKLKPGPPPPKPAERHKDDSRGLVLPGYKYLGPFNGLDKGEPVNEADAAALEHDKAYDRQLDSGDNPYLKYNHADAEFQERLKEDTSFGGNLGRAVFQAKKRVLEPLGLVEEPVKTAPGKKRPVEHSPVEPDSSSGTGKAGQQPARKRLNFGQTGDADSVPDPQPLGQPPAAPSGLGTNTMATGSGAPMADNNEGADGVGNSSGNWHCDSTWMGDRVITTSTRTWALPTYNNHLYKQISSQSGASNDNHYFGYSTPWGYFDFNRFHCHFSPRDWQRLINNNWGFRPKRLSFKLFNIQVKEVTQNDGTTTIANNLTSTVQVFTDSEYQLPYVLGSAHQGCLPPFPADVFMVPQYGYLTLNNGSQAVGRSSFYCLEYFPSQMLRTGNNFTFSYTFEDVPFHSSYAHSQSLDRLMNPLIDQYLYYLSKTNAPSGTTTMSRLQFSQAGASDIRDQSRNWLPGPCYRQQRVSKTAVDNNNSDYSWTGATKYHLNGRDSLVNPGPAMASHKDDEEKYFPQSGVLIFGKQGSNKTNVDIEKVMITDEEEIRTTNPVATEQYGSVSTNLQSGNTQAATSDVNTQGVLPGMVWQDRDVYLQGPIWAKIPHTDGHFHPSPLMGGFGLKHPPPQILIKNTPVPANPSTTFSAAKFASFITQYSTGQVSVEIEWELQKENSKRWNPEIQYTSNYNKSVNVDFTVDTNGVYSEPRPIGTRYLTRNL

SEQ ID NO: 365 - protein, 735 aa, Artificial Sequence
  Synthetic Polypeptide
MAADGYLPDWLEDTLSEGIRQWWKLKPGPPPPKPAERHKDDSRGLVLPGYKYLGPFNGLDKGEPVNEADAAALEHDKAYDRQLDSGDNPYLKYNHADAEFQERLKEDTSFGGNLGRAVFQAKKRVLEPLGLVEEPVKTAPGKKRPVEHSPVEPDSSSGTGKAGQQPARKRLNFGQTGDADSVPDPQPLGQPPAAPSGLGTNTMATGSGAPMADNNEGADGVGNSSGNWHCDSTWMGDRVITTSTRTWALPTYNNHLYKQISSQSGASNDNHYFGYSTPWGYFDFNRFHCHFSPRDWQRLINNNWGFRPKRLSFKLFNIQVKEVTQNDGTTTIANNLTSTVQVFTDSEYQLPYVLGSAHQGCLPPFPADVFMVPQYGYLTLNNGSQAVGRSSFYCLEYFPSQILRTGNNFTFSYTFEDVPFHSSYAHSQSLDRLMNPLIDQYLYYLSKTNAPSGTTTMSRLQFSQAGASDIRDQSRNWLPGPCYRQQRVSKTAADNNNSDYSWTGATKYHLNGRDSLVNPGPAMASHKDDEEKYFPQSGVLIFGKQGSNKTNVDIEKVMITDEEEIRTTNPVATEQYGSVSTNLQSGNTQAATSDVNTQGVLPGMVWQDRDVYLQGPIWAKIPHTDGHFHPSPLMGGFGLKHPPPQILIKNTPVPANPSTTFSAAKFASFITQYSTGQVSVEIEWELQKENSKRWNPEIQYTSNYNKSVNVDFTVDTNGVYSEPRPIGTRYLTRNL

SEQ ID NO: 366 - protein, 735 aa, Artificial Sequence
  Synthetic Polypeptide
MAADGYLPDWLEDTLSEGIRQWWKLKPGPPPPKPAERHKDDSRGLVLPGYKYLGPFNGLDKGEPVNEADAAALEHDKAYDRQLDSGDNPYLKYNHADAEFQERLKEDTSFGGNLGRAVFQAKKRVLEPLGLVEEPVKTAPGKKRPVEHSPVEPDSSSGTGKVGQQPARKRLNFGQTGDADSVPDPQPLGQPPAAPSGLGTNTMATGSGAPMADNNEGADGVGNSSGNWHCDSTWMGDRVITTSTRTWALPTYNNHLYKQISSQSGASNDNHYFGYSTPWGYFDFNRFHCHFSPRDWQRLINNNWGFRPKRLSFKLFNIQVKEVTQNDGTTTIANNLTSTVQVFTDSEYQLPYVLGSAHQGCLPPFPADVFMVPQYGYLTLNNGSQAVGRSSFYCLEYFPSQMLRTGNNFTFSYTFEDVPFHSSYAHSQSLDRLMNPLIDQYLYYLSKTNAPSGTTTMSRLQFSQAGASDIRDQSRNWLPGPCYRQQRVSKTAADNNNSDYSWTGATKYHLNGRDSLVNPGPAMASHKDDEEKYFPQSGVLIFGKQGSNKTNVDIEKVMITDEEEIRTTNPVATEQYGSVSTNLQSGNTQAATSDVNTQGVLPGMVWQDRDVYLQGPIWAKIPHTDGHFHPSPLMGGFGLKHPPPQILIKNTPVPANPSTTFSAAKFASFITQYSTGQVSVEIEWELQKENSKRWNPEIQYTSNYNKSVNVDFTVDTNGVYSEPRPIGTRYLTRNL

SEQ ID NO: 367 - protein, 735 aa, Artificial Sequence
  Synthetic Polypeptide
MAADGYLPDWLEDTLSEGIRQWWKLKPGPPPPKPAERHKDDSRGLVLPGYKYLGPFNGLDKGEPVNEADAAALEHDKAYDRQLDSGDNPYLKYNHADAEFQERLKEDTSFGGNLGRAVFQAKKRVLEPLGLVEEPVKTAPGKKRPVEHSPVEPDSSSGTGKAGQQPARKRLNFGQTGDADSVPDPQPLGQPPAAPSGLGTNTMAAGSGAPMADNNEGADGVGNSSGNWHCDSTWMGDRVITTSTRTWALPTYNNHLYKQISSQSGASNDNHYFGYSTPWGYFDFNRFHCHFSPRDWQRLINNNWGFRPKRLSFKLFNIQVKEVTQNDGTTTIANNLTSTVQVFTDSEYQLPYVLGSAHQGCLPPFPADVFMVPQYGYLTLNNGSQAVGRSSFYCLEYFPSQMLRTGNNFTFSYTFEDVPFHSSYAHSQSLDRLMNPLIDQYLYYLSKTNAPSGTTTMSRLQFSQAGASDIRDQSRNWLPGPCYRQQRVSKTAADNNNSDYSWTGATKYHLNGRDSLVNPGPAMASHKDDEEKYFPQSGVLIFGKQGSNKTNVDIEKVMITDEEEIRTTNPVATEQYGSVSTNLQSGNTQAATSDVNTQGVLPGMVWQDRDVYLQGPIWAKIPHTDGHFHPSPLMGGFGLKHPPPQILIKNTPVPANPSTTFSAAKFASFITQYSTGQVSVEIEWELQKENSKRWNPEIQYTSNYNKSVNVDFTVDTNGVYSEPRPIGTRYLTRNL

SEQ ID NO: 368 - protein, 735 aa, Artificial Sequence
  Synthetic Polypeptide
MAADGYLPDWLEDTLSEGIRQWWKLKPGPPPPKPAERHKDDSRGLVLPGYKYLGPFNGLDKGEPVNEADAAALEHDKAYDRQLDSGDNPYLKYNHADAEFQERLKEDTSFGGNLGRAVFQAKKRVLEPLGLVEEPVKTAPGKKRPVEHSPVEPDSSSGTGKAGQQPARKRLNFGQTGDADSVPDPQPLGQPPAAPSGLGTNTMATGSGAPMADNNEGADGVGNSSGNWHCDSTWMGDRVITTSTRTWALPTYNNHLYKQISSQSGASNDNHYFGYSTPWGYFDFNRFHCHFSPRDWQRLINNNWGFRPKRLSFKLFNIQVKEVTQNDGTTTIANNLTSTVQVFTDSEYQLPYVLGSAHQGCLPPFPADVFMVPQYGYLTLNNGSQAVGRSSFYCLEYFPSQMLRTGNNFTFSYTFEDVPFHSSYAHSQSLDRLMNPLIDQYLYYLSKTNAPSGTTTMSRLQFSQAGASDIRDQSRNWLPGPCYRQQRVSKTAADNNNSDYSWTGATKYHLNGRDSLVNPGPAMASHKDDEEKYFPQSGVLIFGKQGSNKTNVDIEKVMITDEEEIRTTNPVATEQYGSVSTNLQSDNTQAATSDVNTQGVLPGMVWQDRDVYLQGPIWAKIPHTDGHFHPSPLMGGFGLKHPPPQILIKNTPVPANPSTTFSAAKFASFITQYSTGQVSVEIEWELQKENSKRWNPEIQYTSNYNKSVNVDFTVDTNGVYSEPRPIGTRYLTRNL

SEQ ID NO: 369 - protein, 735 aa, Artificial Sequence
  Synthetic Polypeptide
MAADGYLPDWLEDTLSEGIRQWWKLKPGPPPPKPAERHKDDSRGLVLPGYKYLGPFNGLDKGEPVNEADAAALEHDKAYDRQLDSGDNPYLKYNHADAEFQERLKEDTSFGGNLGRAVFQAKKRVLEPLGLVEEPVKTAPGKKRPVEHSPVEPDSSSGTGKAGQQPARKRLNFGQTGDADSVPDPQPLGQPPAAPSGLGTNTMATGSGAPMADNNEGADGVGNSSGNWHCDSTWMGDRVITTSTRTWALPTYNNHLYKQISSQSGASNDNHYFGYSTPWGYFDFNRFHCHFSPRDWQRLINNNWGFRPKRLSFKLFNIQVKEVTQNDGTTTIANNLTSTVQVFTDSEYQLPYVLGSAHQGCLPPFPADVFMVPQYGYLTLNNGSQAVGRSSFYCLEYFPSQMLRTGNNFTFSYTFEDVPFHSSYAHSQSLDRLMNPLIDQYLYYLSKTNAPSGTTTMSRLQFSQAGASDIRDQSRNWLPGPCYRQQRVSKTAADNNNSDYSWTGATKYHLNGRDSLVNPGPAMASHKDDEEKYFPQSGVLIFGKQGSNKTNVDIEKVMITDEEEIRTTNPVATEQYGSVSTNLQSGNTQAATSDVNTQGVLPGMVWQDRDVYLQGPIWAKIPHTDGHFHPSPLMGGFGLKHPPPQILIKNTPVPANPSTTFSAAKFASFITQYSTGQVSVEIEWELQKENSKRWNPEIQYTSNYNKSVNVDFTVDTNGVYSEPRPIGTRYLTRNL

SEQ ID NO: 370 - protein, 735 aa, Artificial Sequence
  Synthetic Polypeptide
MAADGYLPDWLEDTLSEGIRQWWKLKPGPPPPKPAERHKDDSRGLVLPGYKYLGPFNGLDKGEPVNEADAAALEHDKAYDRQLDSGDNPYLKYNHADAEFQERLKEDTSFGGNLGRAVFQAKKRVLEPLGLVEEPVKTAPGKKRPVEHSPVEPDSSSGTGKAGQQPARKRLNFGQTGDADSVPDPQPLGQPPAAPSGLGTNTMATGSGAPMADNNEGADGVGNSSGNWHCDSTWMGDRVITTSTRTWALPTYNNHLYKQISSQSGASNDNHYFGYSTPWGYFDFNRFHCHFSPRDWQRLINNNWGFRPKRLSFKLFNIQVKEVTQNDGTTTIANNLTSTVQVFTDSEYQLPYVLGSAHQGCLPPFPADVFMVPQYGYLTLNNGSQAVGRSSFYCLEYFPSQMLRTGNNFTFSYTFEDVPFHSSYAHSQSLDRLMNPLIDQYLYYLSKTNAPSGTTTMSRLQFSQAGASDIRDQSRNWLPGPCYRQQRVSKTAADNNNSDYSWTGATKYHLNGRDSLVNPGPAMASHKDDEEKYFPQSGVLIFGKQGSNKTNVDIEKVMITDEEEIRTTNPVATEQYGSVSTNLQSGNTQAATSDVNTQGVLPGMVWQDRDVYLQGPIWAKIPHTDGHFHPSPLMGGFGLKHPPPQILIKNTPVPANPSTTFSAAKFASFITQYSTGQVSVEIEWELQKENSKRWNPEIQYTSNYNKSVNVDFTVDTNGVYSEPRPIDTRYLTRNL

SEQ ID NO: 371 - protein, 735 aa, Artificial Sequence
  Synthetic Polypeptide
MAADGYLPDWLEDTLSEGIRQWWKLKPGPPPPKPAERHKDDSRGLVLPGYKYLGPFNGLDKGEPVNEADAAALEHDKAYDRQLDSGDNPYLKYNHADAEFQERLKEDTSFGGNLGRAVFQAKKRVLEPLGLVEEPVKTAPGKKRPVEHSPVEPDSSSGTGKAGQQPARKRLNFGQTGDTDSVPDPQPLGQPPAAPSGLGTNTMATGSGAPMADNNEGADGVGNSSGNWHCDSTWMGDRVITTSTRTWALPTYNNHLYKQISSQSGASNDNHYFGYSTPWGYFDFNRFHCHFSPRDWQRLINNNWGFRPKRLSFKLFNIQVKEVTQNDGTTTIANNLTSTVQVFTDSEYQLPYVLGSAHQGCLPPFPADVFMVPQYGYLTLNNGSQAVGRSSFYCLEYFPSQMLRTGNNFTFSYTFEDVPFHSSYAHSQSLDRLMNPLIDQYLYYLSKTNAPSGTTTMSRLQFSQAGASDIRDQSRNWLPGPCYRQQRVSKTAADNNNSDYSWTGATKYHLNGRDSLVNPGPAMASHKDDEEKYFPQSGVLIFGKQGSNKTNVDIEKVMITDEEEIRTTNPVATEQYGSVSTNLQSGNTQAATSDVNTQGVLPGMVWQDRDVYLQGPIWAKIPHTDGHFHPSPLMGGFGLKHPPPQILIKNTPVPANPSTTFSAAKFASFITQYSTGQVSVEIEWELQKENSKRWNPEIQYTSNYNKSVNVDFTVDTNGVYSEPRPIGTRYLTRNL

SEQ ID NO: 372 - protein, 735 aa, Artificial Sequence
  Synthetic Polypeptide
MAADGYLPDWLEDTLSEGIRQWWKLKPGPPPPKPAERHKDDSRGLVLPGYKYLGPFNGLDKGEPVNEADAAALEHDKAYDRQLDSGDNPYLKYNHADAEFQERLKEDTSFGGNLGRAVFQAKKRVLEPLGLVEEPVKTTPGKKRPVEHSPVEPDSSSGTGKAGQQPARKRLNFGQTGDADSVPDPQPLGQPPAAPSGLGTNTMATGSGAPMADNNEGADGVGNSSGNWHCDSTWMGDRVITTSTRTWALPTYNNHLYKQISSQSGASNDNHYFGYSTPWGYFDFNRFHCHFSPRDWQRLINNNWGFRPKRLSFKLFNIQVKEVTQNDGTTTIANNLTSTVQVFTDSEYQLPYVLGSAHQGCLPPFPADVFMVPQYGYLTLNNGSQAVGRSSFYCLEYFPSQMLRTGNNFTFSYTFEDVPFHSSYAHSQSLDRLMNPLIDQYLYYLSKTNAPSGTTTMSRLQFSQAGASDIRDQSRNWLPGPCYRQQRVSKTAADNNNSDYSWTGATKYHLNGRDSLVNPGPAMASHKDDEEKYFPQSGVLIFGKQGSNKTNVDIEKVMITDEEEIRTTNPVATEQYGSVSTNLQSGNTQAATSDVNTQGVLPGMVWQDRDVYLQGPIWAKIPHTDGHFHPSPLMGGFGLKHPPPQILIKNTPVPANPSTTFSAAKFASFITQYSTGQVSVEIEWELQKENSKRWNPEIQYTSNYNKSVNVDFTVDTNGVYSEPRPIGTRYLTRNL

SEQ ID NO: 373 - protein, 735 aa, Artificial Sequence
  Synthetic Polypeptide
MAADGYLPDWLEDTLSEGIRQWWKLKPGPPPPKPAERHKDDSRGLVLPGYKYLGPFNGLDKGEPVNEADAAALEHDKAYDRQLDSGDNPYLKYNHADAEFQERLKEDTSFGGNLGRAVFQAKKRVLEPLGLVEEPVKTAPGKKRPVEHSPVEPDSSSGTGKAGQQPARKRLNFGQTGDADSVPDPQPLGQSPAAPSGLGTNTMATGSGAPMADNNEGADGVGNSSGNWHCDSTWMGDRVITTSTRTWALPTYNNHLYKQISSQSGASNDNHYFGYSTPWGYFDFNRFHCHFSPRDWQRLINNNWGFRPKRLSFKLFNIQVKEVTQNDGTTTIANNLTSTVQVFTDSEYQLPYVLGSAHQGCLPPFPADVFMVPQYGYLTLNNGSQAVGRSSFYCLEYFPSQMLRTGNNFTFSYTFEDVPFHSSYAHSQSLDRLMNPLIDQYLYYLSKTNAPSGTTTMSRLQFSQAGASDIRDQSRNWLPGPCYRQQRVSKTAADNNNSDYSWTGATKYHLNGRDSLVNPGPAMASHKDDEEKYFPQSGVLIFGKQGSNKTNVDIEKVMITDEEEIRTTNPVATEQYGSVSTNLQSGNTQAATSDVNTQGVLPGMVWQDRDVYLQGPIWAKIPHTDGHFHPSPLMGGFGLKHPPPQILIKNTPVPANPSTTFSAAKFASFITQYSTGQVSVEIEWELQKENSKRWNPEIQYTSNYNKSVNVDFTVDTNGVYSEPRPIGTRYLTRNL

SEQ ID NO: 374 - protein, 735 aa, Artificial Sequence
  Synthetic Polypeptide
MAADGYLPDWLEDTLSEGIRQWWKLKPGPPPPKPAERHKDDSRGLVLPGYKYLGPFNGLDKGEPVNEADAAALEHDKAYDRQLDSGDNPYLKYNHADAEFQERLKEDTSFGGNLGRAVFQAKKRVLEPLGLVEEPVKTAPGKKRPVEHSPVEPDSSSGTGKAGQQPARKRLNFGQTGDADSVPDPQPLGQPPAAPSGLGTNTMATGSGAPMADNNEGADGVGNSSGNWHCDSTWMGDRVITTSTRTWALPTYNNHLYKQISSQSGASNDNHYFGYSTPWGYFDFNRFHCHFSPRDWQRLINNNWGFRPKRLSFKLFNIQVKEVTQNDGTTTIANNLTSTVQVFTDSEYQLPYVLGSAHQGCLPPFPADVFMVPQYGYLTLNNGSQAVGRSSFYCLEYFPSQMLRTGNNFTFSYTFEDVPFHSSYAHSQSLDRLMNPLIDQYLYYLSKTNAPSGTTTMSRLQFSQAGASDIRDQSRNWLPGPCYRQQRVSKTAADNNNSDYSWTGATKYHLNGRDSLVNPGPAMVSHKDDEEKYFPQSGVLIFGKQGSNKTNVDIEKVMITDEEEIRTTNPVATEQYGSVSTNLQSGNTQAATSDVNTQGVLPGMVWQDRDVYLQGPIWAKIPHTDGHFHPSPLMGGFGLKHPPPQILIKNTPVPANPSTTFSAAKFASFITQYSTGQVSVEIEWELQKENSKRWNPEIQYTSNYNKSVNVDFTVDTNGVYSEPRPIGTRYLTRNL

SEQ ID NO: 375 - protein, 735 aa, Artificial Sequence
  Synthetic Polypeptide
MAADGYLPDWLEDTLSEGIRQWWKLKPGPPPPKPAERHKDDSRGLVLPGYKYLGPFNGLDKGEPVNEADAAALEHDKAYDRQLDSGDNPYLKYNHADAEFQERLKEDTSFGGNLGRAVFQAKKRVLEPLGLVEEPVKTAPGKKRPVEHSPVEPDSSSGTGKAGQQPARKRLNFGQTGDADSVPDPQPLGQPPAAPSGLGTNTMATGSGAPMADNNEGADGVGNSSGNWHCDSTWMGDRVITTSTRTWALPTYNNHLYKQISSQSGASNDNHYFGYSTPWGYFDFNRFHCHFSPRDWQRLINNNWGFRPKRLSFKLFNIQVKEVTQNDGTTTIANNLTSTVQVFTDSEYQLPYVLGSAHQGCLPPFPADVFMVPQYGYLTLNNGSQAVGRSSFYCLEYFPSQMLRTGNNFTFSYTFEDVPFHSSYAHSQSLDRLMNPLIDQYLYYLSKTNAPSGTTTMSRLQFSQAGASDIRDQSRNWLPGPCYRQQRVSKTAADNNNSDYSWTGATKYHLNGRDSLVNPGPAMASHKDDEEKYFPQSGVLIFGKQGSNKTNVDIEKVMITDEEEIRTTNPVATEQYGSVSTNLQSGNTQAATSDVNTQGVLPGMVWQDRDVYLQGPIWAKIPHTDGHFHPSPLMGGFGLKHPPPQILIKNTPVPANPSTTFSAAKFASFITQYSMGQVSVEIEWELQKENSKRWNPEIQYTSNYNKSVNVDFTVDTNGVYSEPRPIGTRYLTRNL

SEQ ID NO: 376 - protein, 735 aa, Artificial Sequence
  Synthetic Polypeptide
MAADGYLPDWLEDTLSEGIRQWWKLKPGPPPPKPAERHKDDSRGLVLPGYKYLGPFNGLDKGEPVNEADAAALEHDKVYDRQLDSGDNPYLKYNHADAEFQERLKEDTSFGGNLGRAVFQAKKRVLEPLGLVEEPVKTAPGKKRPVEHSPVEPDSSSGTGKAGQQPARKRLNFGQTGDADSVPDPQPLGQPPAAPSGLGTNTMATGSGAPMADNNEGADGVGNSSGNWHCDSTWMGDRVITTSTRTWALPTYNNHLYKQISSQSGASNDNHYFGYSTPWGYFDFNRFHCHFSPRDWQRLINNNWGFRPKRLSFKLFNIQVKEVTQNDGTTTIANNLTSTVQVFTDSEYQLPYVLGSAHQGCLPPFPADVFMVPQYGYLTLNNGSQAVGRSSFYCLEYFPSQMLRTGNNFTFSYTFEDVPFHSSYAHSQSLDRLMNPLIDQYLYYLSKTNAPSGTTTMSRLQFSQAGASDIRDQSRNWLPGPCYRQQRVSKTAADNNNSDYSWTGATKYHLNGRDSLVNPGPAMASHKDDEEKYFPQSGVLIFGKQGSNKTNVDIEKVMITDEEEIRTTNPVATEQYGSVSTNLQSGNTQAATSDVNTQGVLPGMVWQDRDVYLQGPIWAKIPHTDGHFHPSPLMGGFGLKHPPPQILIKNTPVPANPSTTFSAAKFASFITQYSTGQVSVEIEWELQKENSKRWNPEIQYTSNYNKSVNVDFTVDTNGVYSEPRPIGTRYLTRNL

SEQ ID NO: 377 - protein, 735 aa, Artificial Sequence
  Synthetic Polypeptide
MAADGYLPDWLEDTLSEGIRQWWKLKPGPPPPKPAERHKDDSRGLVLPGYKYLGPFNGLDKGEPVNEADAAALEHDKAYDRQLDSGDNPYLKYNHADAEFQERLKEDTSFGGNLGRAVFQAKKRVLEPLGLVEEPVKTAPGKKRPVEHSPVEPDSSSGTGKAGQQPARKRLNFGQTGDADSVPDPQPLGQPPAAPSGLGTNTMATGSGAPMADNNEGADGVGNSSGNWHCDSTWMGDRVITTSTRTWALPTYNNHLYKQISSQSGASNDNHYFGYSTPWGYFDFNRFHCHFSPRDWQRLINNNWGFRPKRLSFKLFNIQVKEVTQNDGTTTIANNLTSTVQVFTDSEYQLPYVLGSAHQGCLPPFPADVFMVPQYGYLTLNNGSQAVGRSSFYCLEYFPSQMLRTGNNFTFSYTFEDVPFHSSYAHSQSLDRLMNPLIDQYLYYLSKTNAPSGTTTMSRLQFSQAGASDIRDQSRNWLPGPCYRQQRVSKTAADNNNSDYSWTGATKYHLNGRDSLVNPGPAMASHKDDEEKYFPQSGVLIFGKQGSNKTNVDIEKVMITDEEEIRTTNPVATEQYGSVSTNLQSGNTQAATSDVNTQGVLPGMVWQDRDVYLQGPIWAKIPHTDGHFHPSPLMGGFGLKHPPPQILIKNTPVPANPSTTFSAAKFASFITQYSTGQVSVEIEWELQKENNKRWNPEIQYTSNYNKSVNVDFTVDTNGVYSEPRPIGTRYLTRNL

SEQ ID NO: 378 - protein, 735 aa, Artificial Sequence
  Synthetic Polypeptide
MAADGYLPDWLEDTLSEGIRQWWKLKPGPPPPKPAERHKDDSRGLVLPGYKYLGPFNGLDKGEPVNEADAAALEHDKAYDRQLDSGDNPYLKYNHADAEFQERLKEDTSFGGNLGRAVFQAKKRVLEPLGLVEEPVKTAPGKKRPVEHSPVEPDSSSGTGKAGQQPTRKRLNFGQTGDADSVPDPQPLGQPPAAPSGLGTNTMATGSGAPMADNNEGADGVGNSSGNWHCDSTWMGDRVITTSTRTWALPTYNNHLYKQISSQSGASNDNHYFGYSTPWGYFDFNRFHCHFSPRDWQRLINNNWGFRPKRLSFKLFNIQVKEVTQNDGTTTIANNLTSTVQVFTDSEYQLPYVLGSAHQGCLPPFPADVFMVPQYGYLTLNNGSQAVGRSSFYCLEYFPSQMLRTGNNFTFSYTFEDVPFHSSYAHSQSLDRLMNPLIDQYLYYLSKTNAPSGTTTMSRLQFSQAGASDIRDQSRNWLPGPCYRQQRVSKTAADNNNSDYSWTGATKYHLNGRDSLVNPGPAMASHKDDEEKYFPQSGVLIFGKQGSNKTNVDIEKVMITDEEEIRTTNPVATEQYGSVSTNLQSGNTQAATSDVNTQGVLPGMVWQDRDVYLQGPIWAKIPHTDGHFHPSPLMGGFGLKHPPPQILIKNTPVPANPSTTFSAAKFASFITQYSTGQVSVEIEWELQKENSKRWNPEIQYTSNYNKSVNVDFTVDTNGVYSEPRPIGTRYLTRNL

SEQ ID NO: 379 - protein, 735 aa, Artificial Sequence
  Synthetic Polypeptide
MAADGYLPDWLEDTLSEGIRQWWKLKPGPPPPKPAERHKDDSRGLVLPGYKYLGPFNGLDKGEPVNEADAAALEHDKAYDRQLDSGDNPYLKYNHADAEFQERLKEDTSFGGNLGRAVFQAKKRVLEPLGLVEEPVKTAPGKKRPVEHSPVEPDSSSGTGKAGQQPARKRLNFGQTGDADSVPDPQPLGQPPAAPSGLGTNTMATGSGAPMADNNEGADGVGNSSGNWHCDSTWMGDRVITTSTRTWALPTYNNHLYKQISSQSGASNDNHYFGYSTPWGYFDFNRFHCHFSPRDWQRLINNNWGFRPKRLSFKLFNIQVKEVTQNDGTTTIANNLTSTVQVFTDSEYQLPYVLGSAHQGCLPPFPADVFMVPQYGYLTLNNGSQAVGRSSFYCLEYFPSQMLRTGNNFTFSYTFEDVPFHSSYAHSQSLDRLMNPLIDQYLYYLSKTNAPSGTTTMSRLQFSQAGASDIRDQSRNWLPGPCYRQQRVSKTAADNNNSDYSWTGATKYHLNGRDSLVNPGPAMASHKDDEEKYFPQSGVLIFGKQGSNKTNVDIERVMITDEEEIRTTNPVATEQYGSVSTNLQSGNTQAATSDVNTQGVLPGMVWQDRDVYLQGPIWAKIPHTDGHFHPSPLMGGFGLKHPPPQILIKNTPVPANPSTTFSAAKFASFITQYSTGQVSVEIEWELQKENSKRWNPEIQYTSNYNKSVNVDFTVDTNGVYSEPRPIGTRYLTRNL

SEQ ID NO: 380 - protein, 735 aa, Artificial Sequence
  Synthetic Polypeptide
MAADGYLPDWLEDTLSEGIRQWWKLKPGPPPPKPAERHKDDSRGLVLPGYKYLGPFNGLDKGEPVNEADAAALEHDKAYDRQLDSGDNPYLKYNHADAEFQERLKEDTSFGGNLGRAVFQAKKRVLEPLGLVEEPVKTAPGKKRPVEHSPVEPDSSSGTGKAGQQPVRKRLNFGQTGDADSVPDPQPLGQPPAAPSGLGTNTMATGSGAPMADNNEGADGVGNSSGNWHCDSTWMGDRVITTSTRTWALPTYNNHLYKQISSQSGASNDNHYFGYSTPWGYFDFNRFHCHFSPRDWQRLINNNWGFRPKRLSFKLFNIQVKEVTQNDGTTTIANNLTSTVQVFTDSEYQLPYVLGSAHQGCLPPFPADVFMVPQYGYLTLNNGSQAVGRSSFYCLEYFPSQMLRTGNNFTFSYTFEDVPFHSSYAHSQSLDRLMNPLIDQYLYYLSKTNAPSGTTTMSRLQFSQAGASDIRDQSRNWLPGPCYRQQRVSKTAADNNNSDYSWTGATKYHLNGRDSLVNPGPAMASHKDDEEKYFPQSGVLIFGKQGSNKTNVDIEKVMITDEEEIRTTNPVATEQYGSVSTNLQSGNTQAATSDVNTQGVLPGMVWQDRDVYLQGPIWAKIPHTDGHFHPSPLMGGFGLKHPPPQILIKNTPVPANPSTTFSAAKFASFITQYSTGQVSVEIEWELQKENSKRWNPEIQYTSNYNKSVNVDFTVDTNGVYSEPRPIGTRYLTRNL

SEQ ID NO: 381 - protein, 735 aa, Artificial Sequence
  Synthetic Polypeptide
MAADGYLPDWLEDTLSEGIRQWWKLKPGPPPPKPAERHKDDSRGLVLPGYKYLGPFNGLDKGEPVNEADAAALEHDKAYDRQLDSGDNPYLKYNHADAEFQERLKEDTSFGGNLGRAVFQAKKRVLEPLGLVEEPVKTAPGKKRPVEHSPVEPDSSSGTGKAGQQPARKRLNFGQTGDADSVPDPQPLGQPPAAPSGLGTNTMATGSGAPMADNNEGADGVGNSSGNWHCDSTWMGDRVITTSTRTWALPTYNNHLYKQISSQSGASNDNHYFGYSTPWGYFDFNRFHCHFSPRDWQRLINNNWGFRPKRLSFKLFNIQVKEVTQNDGTTTIANNLTSTVQVFTDSEYQLPYVLGSAHQGCLPPFPADVFMVPQYGYPTLNNGSQAVGRSSFYCLEYFPSQMLRTGNNFTFSYTFEDVPFHSSYAHSQSLDRLMNPLIDQYLYYLSKTNAPSGTTTMSRLQFSQAGASDIRDQSRNWLPGPCYRQQRVSKTAADNNNSDYSWTGATKYHLNGRDSLVNPGPAMASHKDDEEKYFPQSGVLIFGKQGSNKTNVDIEKVMITDEEEIRTTNPVATEQYGSVSTNLQSGNTQAATSDVNTQGVLPGMVWQDRDVYLQGPIWAKIPHTDGHFHPSPLMGGFGLKHPPPQILIKNTPVPANPSTTFSAAKFASFITQYSTGQVSVEIEWELQKENSKRWNPEIQYTSNYNKSVNVDFTVDTNGVYSEPRPIGTRYLTRNL

SEQ ID NO: 382 - protein, 735 aa, Artificial Sequence
  Synthetic Polypeptide
MAADGYLPDWLEDTLSEGIRQWWKLKPGPPPPKPAERHKDDSRGLVLPGYKYLGPFNGLDKGEPVNEADAAALEHDKAYDRQLDSGDNPYLKYNHADAEFQERLKEDTSFGGNLGRAVFQAKKRVLEPLGLVEEPVKTAPGKKRPVEHSPVEPDSSSGTGKAGQQPARKRLNFGQTGDADSVPDPQSLGQPPAAPSGLGTNTMATGSGAPMADNNEGADGVGNSSGNWHCDSTWMGDRVITTSTRTWALPTYNNHLYKQISSQSGASNDNHYFGYSTPWGYFDFNRFHCHFSPRDWQRLINNNWGFRPKRLSFKLFNIQVKEVTQNDGTTTIANNLTSTVQVFTDSEYQLPYVLGSAHQGCLPPFPADVFMVPQYGYLTLNNGSQAVGRSSFYCLEYFPSQMLRTGNNFTFSYTFEDVPFHSSYAHSQSLDRLMNPLIDQYLYYLSKTNAPSGTTTMSRLQFSQAGASDIRDQSRNWLPGPCYRQQRVSKTAADNNNSDYSWTGATKYHLNGRDSLVNPGPAMASHKDDEEKYFPQSGVLIFGKQGSNKTNVDIEKVMITDEEEIRTTNPVATEQYGSVSTNLQSGNTQAATSDVNTQGVLPGMVWQDRDVYLQGPIWAKIPHTDGHFHPSPLMGGFGLKHPPPQILIKNTPVPANPSTTFSAAKFASFITQYSTGQVSVEIEWELQKENSKRWNPEIQYTSNYNKSVNVDFTVDTNGVYSEPRPIGTRYLTRNL

SEQ ID NO: 383 - protein, 735 aa, Artificial Sequence
  Synthetic Polypeptide
MAADGYLPDWLEDTLSEGIRQWWKLKPGPPPPKPAERHKDDSRGLVLPGYKYLGPFNGLDKGEPVNEADAAALEHDKAYDRQLDSGDNPYLKYNHADAEFQERLKEDTSFGGNLGRAVFQAKKRVLEPLGLVEEPVKTAPGKKRPVEHSPVEPDSSSGTGKAGQQPARKRLNFGQTGDADSVPDPQPLGQPPAAPSGLGTNTMATGSGAPMADNNEGADGVGNSSGNWHCDSTWMGDRVITTSTRTWALPTYNNHLYKQISSQSGASNDNHYFGYSTPWGYFDFNRFHCHFSPRDWQRLINNNWGFRPKRLSFKLFNIQVKEVTQNGGTTTIANNLTSTVQVFTDSEYQLPYVLGSAHQGCLPPFPADVFMVPQYGYLTLNNGSQAVGRSSFYCLEYFPSQMLRTGNNFTFSYTFEDVPFHSSYAHSQSLDRLMNPLIDQYLYYLSKTNAPSGTTTMSRLQFSQAGASDIRDQSRNWLPGPCYRQQRVSKTAADNNNSDYSWTGATKYHLNGRDSLVNPGPAMASHKDDEEKYFPQSGVLIFGKQGSNKTNVDIEKVMITDEEEIRTTNPVATEQYGSVSTNLQSGNTQAATSDVNTQGVLPGMVWQDRDVYLQGPIWAKIPHTDGHFHPSPLMGGFGLKHPPPQILIKNTPVPANPSTTFSAAKFASFITQYSTGQVSVEIEWELQKENSKRWNPEIQYTSNYNKSVNVDFTVDTNGVYSEPRPIGTRYLTRNL

SEQ ID NO: 384 - protein, 735 aa, Artificial Sequence
  Synthetic Polypeptide
MAADGYLPDWLEDTLSEGIRQWWKLKPGPPPPKPAERHKDDSRGLVLPGYKYLGPFNGLDKGEPVNEADAAALEHDKAYDRQLDSGDNPYLKYNHADAEFQERLKEDTSFGGNLGRAVFQAKKRVLEPLGLVEEPVKTAPGKKRPVEHSPVEPDSSSGTGKAGQQPARKRLNFGQTGDADSVPDPQPLGQPPAAPSGLGTNTMATGSGAPMADNNEGADGVGNSSGNWHCDSTWMGDRVITTSTRTWALPTYNNHLYKQISSQSGASNDNHYFGYSTPWGYFDFNRFHCHFSPRDWQRLINNNWGFRPKRLSFKLFNIQVKEVTQNDGTTTIANNLTSTVQVFTDSEYQLPYVLGSAHQGCLPPFPADVFMVPQYGYLTLNNGSQAVGRSSFYCLEYFPSQMLRTGNNFTFSYTFEDVPFHSSYAHSQSLDRLMNPLIDQYLYYLSKTNAPSGTTTMSGLQFSQAGASDIRDQSRNWLPGPCYRQQRVSKTAADNNNSDYSWTGATKYHLNGRDSLVNPGPAMASHKDDEEKYFPQSGVLIFGKQGSNKTNVDIEKVMITDEEEIRTTNPVATEQYGSVSTNLQSGNTQAATSDVNTQGVLPGMVWQDRDVYLQGPIWAKIPHTDGHFHPSPLMGGFGLKHPPPQILIKNTPVPVNPSTTFSAAKFASFITQYSTGQVSVEIEWELQKENSKRWNPEIQYTSNYNKSVNVDFTVDTNGVYSEPRPIGTRYLTRNL

SEQ ID NO: 385 - protein, 735 aa, Artificial Sequence
  Synthetic Polypeptide
MAADGYLPDWLEDTLSEGIRQWWKLKPGPPPPKPAERHKDDSRGLVLPGYKYLGPFNGLDKGEPVNEADAAALEHDKAYDRQLDSGDNPYLKYNHADAEFQERLKEDTSFGGNLGRAVFQAKKRVLEPLGLVEEPVKTAPGKKRPVEHSPVEPDSSSGTGKAGQQPARKRLNFGQTGDADSVPDPQPLGQPPAAPSGLGTNTMATGSGAPMADNNEGADGVGNSSGNWHCDSTWMGDRVITTSTRTWALPTYNNHLYKQISSQSGASNDNHYFGYSTPWGYFDFNRFHCHFSPRDWQRLINNNWGFRPKRLSFKLFNIQVKEVTQNDGTTTIANNLTSTVQVFTDSEYQLPYVLGSAHQGCLPPFPADVFMVPQYGYLTLNNGSQAVGRSSFYCLEYFPSQMLRTGNNFTFSYTFEDVPFHSSYAHSQSLDRLMNPLIDQYLYYLSKTNAPSGTTTMSRLQFSQAGASDIRDQSRNWLPGPCYRQQRVSKTAADNNNSDYSWTGATKYHLNGRDSLVNPGPTMASHKDDEEKYFPQSGVLIFGKQGSNKTNVDIEKVMITDEEEIRTTNPVATEQYGSVSTNLQSGNTQAATSDVNTQGVLPGMVWQDRDVYLQGPIWAKIPHTDGHFHPSPLMGGFGLKHPPPQILIKNTPVPANPSTTFSAAKFASFITQYSTGQVSVEIEWELQKENSKRWNPEIQYTSNYNKSVNVDFTVDTNGVYSEPRPIGTRYLTRNL

SEQ ID NO: 386 - protein, 735 aa, Artificial Sequence
  Synthetic Polypeptide
MAADGYLPDWLEDTLSEGIRQWWKLKPGPPPPKPAERHKDDSRGLVLPGYKYLGPLNGLDKGEPVNEADAAALEHDKAYDRQLDSGDNPYLKYNHADAEFQERLKEDTSFGGNLGRAVFQAKKRVLEPLGLVEEPVKTAPGKKRPVEHSPVEPDSSSGTGKAGQQPARKRLNFGQTGDADSVPDPQPLGQPPAAPSGLGTNTMATGSGAPMADNNEGADGVGNSSGNWHCDSTWMGDRVITTSTRTWALPTYNNHLYKQISSQSGASNDNHYFGYSTPWGYFDFNRFHCHFSPRDWQRLINNNWGFRPKRLSFKLFNIQVKEVTQNDGTTTIANNLTSTVQVFTDSEYQLPYVLGSAHQGCLPPFPADVFMVPQYGYLTLNNGSQAVGRSSFYCLEYFPSQMLRTGNNFTFSYTFEDVPFHSSYAHSQSLDRLMNPLIDQYLYYLSKTNAPSGTTTMSRLQFSQAGASDIRDQSRNWLPGPCYRQQRVSKTAADNNNSDYSWTGATKYHLNGRDSLVNPGPAMASHKDDEEKYFPQSGVLIFGKQGSNKTNVDIEKVMITDEEEIRTTNPVATEQYGSVSTNLQSGNTQAATSDVNTQGVLPGMVWQDRDVYLQGPIWAKIPHTDGHFHPSPLMGGFGLKHPPPQILIKNTPVPANPSTTFSAAKFASFITQYSTGQVSVEIEWELQKENSKRWNPEIQYTSNYNKSVNVDFTVDTNGVYSEPRPIGTRYLTRNL

SEQ ID NO: 387 - protein, 735 aa, Artificial Sequence
  Synthetic Polypeptide
MAADGYLPDWLEDTLSEGIRQWWKLKPGPPPPKPAERHKDDSRGLVLPGYKYLGPFNGLDKGEPVNEADAAALEHDKAYDRQLDSGDNPYLKYNHADAEFQERLKEDTSFGGNLGRAVFQAKKRVLEPLGLVEEPVKTAPGKKRPVEHSPVEPDSSSGTGKAGQQPARKRLNFGQTGDADSVPDPQPLGQPPAAPSGLGTNTMATGSGAPMADNNEGADGVGNSSGNWHCDSTWMGDRVITTSTRTWALPTYNNHLYKQISSQSGASNDNHYFGYSTPWGYFDFNRFHCHFSPRDWQRLINNNWGFRPKRLSFKLFNIQVKEVTQNDGTTTIANNLTSTVQVFTDSEYQLPYVLGSAHQGCLPPFPADVFMVPQYGYLTLNNGSQAVGRSSFYCLEYFPSQMLRTGNNFTFSYTFEDVPFHSSYAHSQSLDRLMNPLIDQYLYYLSKTNAPSGTTTMSRLQFSQAGASDIRDQSRNWLPGPCYRQQRVSKTAADNNNSDYSWTGATKYHLNGRDSLVNPGPAMTSHKDDEEKYFPQSGVLIFGKQGSNKTNVDIEKVMITDEEEIRTTNPVATEQYGSVSTNLQSGNTQAATSDVNTQGVLPGMVWQDRDVYLQGPIWAKIPHTDGHFHPSPLMGGFGLKHPPPQILIKNTPVPANPSTTFSAAKFASFITQYSTGQVSVEIEWELQKENSKRWNPEIQYTSNYNKSVNVDFTVDTNGVYSEPRPIGTRYLTRNL

SEQ ID NO: 388 - protein, 735 aa, Artificial Sequence
  Synthetic Polypeptide
MAADGYLPDWLEDTLSEGIRQWWKLKPGPPPPKPAERHKDDSRGLVLPGYKYLGPFNGLDKGEPVNEADAAALEHDKAYDRQLDSGDNPYLKYNHADAEFQERLKEDTSFGGNLGRAVFQAKKRVLEPLGLVEEPVKTAPGKKRPVEHSPVEPDSSSGTGKAGQQPARKRLNFGQTGDADSVPDPQPLGQPPAAPSGLGTNTMATGSGAPMADNNEGADGVGNSSGNWHCDSTWMGDRVITTSTRTWALPTYNNHLYKQISSQSGASNDNHYFGYSTPWGYFDFNRFHCHFSPRDWQRLINNNWGFRPKRLSFKLFNIQVKEVTQNDGTTTIANNLTSTVQVFTDSEYQLPYVLGSAHQGCLPPFPADVFMVPQYGYLTLNNGSQAVGRSSFYCLEYFPSQMLRTGNNFTFSYTFEDVPFHSSYAHSQSLDRLMNPLIDQYLYYLSKTNAPSGTTTMSRLQFSQAGASDIRDQSRNWLPGPCYRQQRVSKTAADNNNSDYSWTGATKYHLNGRDSLVNPGPAMASHKDDEEKYFPQSGVLIFGKQGSNKTNVDIEKVMITDEEEIRTTNPVATEQYGSVSTNLQSGNTQAATSDVNTQGVLPGMVWQDRDVYLQGPIWTKIPHTDGHFHPSPLMGGFGLKHPPPQILIKNTPVPANPSTTFSAAKFASFITQYSTGQVSVEIEWELQKENSKRWNPEIQYTSNYNKSVNVDFTVDTNGVYSEPRPIGTRYLTRNL

SEQ ID NO: 389 - protein, 735 aa, Artificial Sequence
  Synthetic Polypeptide
MAADGYLPDWLEDTLSEGIRQWWKLKPGPPPPKPAERHKDDSRGLVLPGYKYLGPFNGLDKGEPVNEADAAALEHDKAYDRQLDSGDNPYLKYNHADAEFQERLKEDTSFGGNLGRAVFQAKKRVLEPLGLVEEPVKTAPGKKRPVEHSPVEPDSSSGTGKAGQQPARKRLNFGQTGDADSVPDPQPLGQPPVAPSGLGTNTMATGSGAPMADNNEGADGVGNSSGNWHCDSTWMGDRVITTSTRTWALPTYNNHLYKQISSQSGASNDNHYFGYSTPWGYFDFNRFHCHFSPRDWQRLINNNWGFRPKRLSFKLFNIQVKEVTQNDGTTTIANNLTSTVQVFTDSEYQLPYVLGSAHQGCLPPFPADVFMVPQYGYLTLNNGSQAVGRSSFYCLEYFPSQMLRTGNNFTFSYTFEDVPFHSSYAHSQSLDRLMNPLIDQYLYYLSKTNAPSGTTTMSRLQFSQAGASDIRDQSRNWLPGPCYRQQRVSKTAADNNNSDYSWTGATKYHLNGRDSLVNPGPAMASHKDDEEKYFPQSGVLIFGKQGSNKTNVDIEKVMITDEEEIRTTNPVATEQYGSVSTNLQSGNTQAATSDVNTQGVLPGMVWQDRDVYLQGPIWAKIPHTDGHFHPSPLMGGFGLKHPPPQILIKNTPVPANPSTTFSAAKFASFITQYSTGQVSVEIEWELQKENSKRWNPEIQYTSNYNKSVNVDFTVDTNGVYSEPRPIGTRYLTRNL

SEQ ID NO: 390 - protein, 735 aa, Artificial Sequence
  Synthetic Polypeptide
MAADGYLPDWLEDTLSEGIRQWWKLKPGPPPPKPAERHKDDSRGLVLPGYKYLGPFNGLDKGEPVNEADAAALEHDKAYDRQLDSGDNPYLKYNHADAEFQERLKEDTSFGGNLGRAVFQAKKRVLEPLGLVEEPVKTAPGKKRPVEHSPVEPDSSSGTGKAGQQPARKRLNFGQTGDADSVPDPQPLGQPPAAPSGLGTNTMATGSGAPMADNNEGADGVGNSSGNWHCDSTWMGDRVITTSTRTWALPTYNNHLYKQISSQSGASNDNHYFGYSTPWGYFDFNRFHCHFSPRDWQRLINNNWGFRPKRLSFKLFNIQVKEVTQNDGTTTIANNLTSTVQVFTDSEYQLPYVLGSAHQGCLPPFPADVFMVPQYGYLTLNNGSQAVGRSSFYCLEYFPSQMLRTGNNFTFSYTFEDVPFHSSYAHSQSLDRLMNPLIDQYLYYLSKTNAPSGTTTMSRLQFSQAGASDIRDQSRNWLPGPCYRQQRVSKTAADNNNSDYSWTGATKYHLNGRDSLVNPGPAMASHKDDEEKYFPQSGVLIFGKQGSNKTNVDIEKVMITDEEEIRTTNPVATEQYGSVSTNLQSGNTQAATSDVNTQGVLPGMVWQDRDVYLQGPIWAKIPHTDGHFHPSPLMGGFGLKHPPPQILIKNTPVPANPSTTFSAAKFASFITQYSTGQVSVEIEWEPQKENSKRWNPEIQYTSNYNKSVNVDFTVDTNGVYSEPRPIGTRYLTRNL

SEQ ID NO: 391 - protein, 735 aa, Artificial Sequence
  Synthetic Polypeptide
MAADGYLPDWLEDTLSEGIRQWWKLKPGPPPPKPAERHKDDSRGLVLPGYKYLGPFNGLDKGEPVNEADAAALEHDKAYDRQLDSGDNPYLKYNHADAEFQERLKEDTSFGGNLGRAVFQAKKRVLEPLGLVEEPVKTAPGKKRPVEHSPVEPDSSSGTGKAGQQPARKRLNFGQTGDADSVPDPQPLGQPPAAPSGLGTNTMATGSGAPMADNNEGADGVGNSSGNWHCDSTWMGDRVITTSTRTWALPTYNNHLYKQISSQSGASNDNHYFGYSTPWGYFDFNRFHCHFSPRDWQRLINNNWGFRPKRLSFKLFNIQVKEVTQNDGTTTIANNLTSTVQVFTDSEYQLPYVLGSAHQGCLPPFPADVFMVPQYGYLTLNNGSQAVGRSSFYCLEYFPSQMLRTGNNFTFSYTFEDVPFHSSYAHSQSLDRLMNPLIDQYLYYLSKTNAPSGTTTMSRLQFSQAGASDIRDQSRNWLPGPCYRQQRVSKTVADNNNSDYSWTGATKYHLNGRDSLVNPGPAMASHKDDEEKYFPQSGVLIFGKQGSNKTNVDIEKVMITDEEEIRTTNPVATEQYGSVSTNLQSGNTQAATSDVNTQGVLPGMVWQDRDVYLQGPIWAKIPHTDGHFHPSPLMGGFGLKHPPPQILIKNTPVPANPSTTFSAAKFASFITQYSTGQVSVEIEWELQKENSKRWNPEIQYTSNYNKSVNVDFTVDTNGVYSEPRPIGTRYLTRNL

SEQ ID NO: 392 - protein, 735 aa, Artificial Sequence
  Synthetic Polypeptide
MAADGYLPDWLEDTLSEGIRQWWKLKPGPPPPKPAERHKDDSRGLVLPGYKYLGPFNGLDKGEPVNEADAAALEHDKAYDRQLDSGDNPYLKYNHADAEFQERLKEDTSFGGNLGRAVFQAKKRVLEPLGLVEEPVKTAPGKKRPVEHSPVEPDSSSGTGKAGQQPARKRLNFGQTGDADSVPDPQPLGQPPAAPSGLGTNTMATGSGAPMADNNEGADGVGNSSGNWHCDSTWMGDRVITTSTRTWALPTYNNHLYKQISSQSGASNDNHYFGYSTPWGYFDFNRFHCHFSPRDWQRLINNNWGFRPKRLSFKLFNIQVKEVTQNDGTTTIANNLTSTVQVFTDSEYQLPYVLGSAHQGCLPPFPADVFMVPQYGYLTLNNGSQAVGRSSFYCLEYFPSQMLRTGNNFTFSYTFEDVPFHSSYAHSQSLDRLMNPLIDQYPYYLSKTNAPSGTTTMSRLQFSQAGASDIRDQSRNWLPGPCYRQQRVSKTAADNNNSDYSWTGATKYHLNGRDSLVNPGPAMASHKDDEEKYFPQSGVLIFGKQGSNKTNVDIEKVMITDEEEIRTTNPVATEQYGSVSTNLQSGNTQAATSDVNTQGVLPGMVWQDRDVYLQGPIWAKIPHTDGHFHPSPLMGGFGLKHPPPQILIKNTPVPANPSTTFSAAKFASFITQYSTGQVSVEIEWELQKENSKRWNPEIQYTSNYNKSVNVDFTVDTNGVYSEPRPIGTRYLTRNL

SEQ ID NO: 393 - protein, 735 aa, Artificial Sequence
  Synthetic Polypeptide
MAADGYLPDWLEDTLSEGIRQWWKLKPGPPPPKPAERHKDDSRGLVLPGYKYLGPFNGLDKGEPVNEADAAALEHDKAYDRQLDSGDNPYLKYNHTDAEFQERLKEDTSFGGNLGRAVFQAKKRVLEPLGLVEEPVKTAPGKKRPVEHSPVEPDSSSGTGKAGQQPARKRLNFGQTGDADSVPDPQPLGQPPAAPSGLGTNTMATGSGAPMADNNEGADGVGNSSGNWHCDSTWMGDRVITTSTRTWALPTYNNHLYKQISSQSGASNDNHYFGYSTPWGYFDFNRFHCHFSPRDWQRLINNNWGFRPKRLSFKLFNIQVKEVTQNDGTTTIANNLTSTVQVFTDSEYQLPYVLGSAHQGCLPPFPADVFMVPQYGYLTLNNGSQAVGRSSFYCLEYFPSQMLRTGNNFTFSYTFEDVPFHSSYAHSQSLDRLMNPLIDQYLYYLSKTNAPSGTTTMSRLQFSQAGASDIRDQSRNWLPGPCYRQQRVSKTAADNNNSDYSWTGATKYHLNGRDSLVNPGPAMASHKDDEEKYFPQSGVLIFGKQGSNKTNVDIEKVMITDEEEIRTTNPVATEQYGSVSTNLQSGNTQAATSDVNTQGVLPGMVWQDRDVYLQGPIWAKIPHTDGHFHPSPLMGGFGLKHPPPQILIKNTPVPANPSTTFSAAKFASFITQYSTGQVSVEIEWELQKENSKRWNPEIQYTSNYNKSVNVDFTVDTNGVYSEPRPIGTRYLTRNL

SEQ ID NO: 394 - protein, 735 aa, Artificial Sequence
  Synthetic Polypeptide
MAADGYLPDWLEDTLSEGIRQWWKLKPGPPPPKPAERHKDDSRGLVLPGYKYLGPFNGLDKGGPVNEADAAALEHDKAYDRQLDSGDNPYLKYNHADAEFQERLKEDTSFGGNLGRAVFQAKKRVLEPLGLVEEPVKTAPGKKRPVEHSPVEPDSSSGTGKAGQQPARKRLNFGQTGDADSVPDPQPLGQPPAAPSGLGTNTMATGSGAPMADNNEGADGVGNSSGNWHCDSTWMGDRVITTSTRTWALPTYNNHLYKQISSQSGASNDNHYFGYSTPWGYFDFNRFHCHFSPRDWQRLINNNWGFRPKRLSFKLFNIQVKEVTQNDGTTTIANNLTSTVQVFTDSEYQLPYVLGSAHQGCLPPFPADVFMVPQYGYLTLNNGSQAVGRSSFYCLEYFPSQMLRTGNNFTFSYTFEDVPFHSSYAHSQSLDRLMNPLIDQYLYYLSKTNAPSGTTTMSRLQFSQAGASDIRDQSRNWLPGPCYRQQRVSKTAADNNNSDYSWTGATKYHLNGRDSLVNPGPAMASHKDDEEKYFPQSGVLIFGKQGSNKTNVDIEKVMITDEEEIRTTNPVATEQYGSVSTNLQSGNTQAATSDVNTQGVLPGMVWQDRDVYLQGPIWAKIPHTDGHFHPSPLMGGFGLKHPPPQILIKNTPVPANPSTTFSAAKFASFITQYSTGQVSVEIEWELQKENSKRWNPEIQYTSNYNKSVNVDFTVDTNGVYSEPRPIGTRYLTRNL

SEQ ID NO: 395 - protein, 735 aa, Artificial Sequence
  Synthetic Polypeptide
MAADGYLPDWLEDTLSEGIRQWWKLKPGPPPPKPAERHKDDSRGLVLPGYKYLGPFNGLDKGEPVNEADAAALEHDKAYDRQLDSGDNPYLKYNHADAEFQERLKEDTSFGGNLGRAVFQAKKRVLEPLGLVEEPVKTAPGKKRPVEHSPVEPDSSSGTGKAGQQPARKRLNFGQTGDADSVPDPQPLGQPPAAPSGLGTNTMATGSGAPMADNNEGADGVGNSSGNWHCDSTWMGDRVITTSTRTWTLPTYNNHLYKQISSQSGASNDNHYFGYSTPWGYFDFNRFHCHFSPRDWQRLINNNWGFRPKRLSFKLFNIQVKEVTQNDGTTTIANNLTSTVQVFTDSEYQLPYVLGSAHQGCLPPFPADVFMVPQYGYLTLNNGSQAVGRSSFYCLEYFPSQMLRTGNNFTFSYTFEDVPFHSSYAHSQSLDRLMNPLIDQYLYYLSKTNAPSGTTTMSRLQFSQAGASDIRDQSRNWLPGPCYRQQRVSKTAADNNNSDYSWTGATKYHLNGRDSLVNPGPAMASHKDDEEKYFPQSGVLIFGKQGSNKTNVDIEKVMITDEEEIRTTNPVATEQYGSVSTNLQSGNTQAATSDVNTQGVLPGMVWQDRDVYLQGPIWAKIPHTDGHFHPSPLMGGFGLKHPPPQILIKNTPVPANPSTTFSAAKFASFITQYSTGQVSVEIEWELQKENSKRWNPEIQYTSNYNKSVNVDFTVDTNGVYSEPRPIGTRYLTRNL

SEQ ID NO: 396 - protein, 735 aa, Artificial Sequence
  Synthetic Polypeptide
MAADGYLPDWLEDTLSEGIRQWWKLKPGPPPPKPAERHKDDSRGLVLPGYKYLGPFNGLDKGEPVNEADAAVLEHDKAYDRQLDSGDNPYLKYNHADAEFQERLKEDTSFGGNLGRAVFQAKKRVLEPLGLVEEPVKTAPGKKRPVEHSPVEPDSSSGTGKAGQQPARKRLNFGQTGDADSVPDPQPLGQPPAAPSGLGTNTMATGSGAPMADNNEGADGVGNSSGNWHCDSTWMGDRVITTSTRTWALPTYNNHLYKQISSQSGASNDNHYFGYSTPWGYFDFNRFHCHFSPRDWQRLINNNWGFRPKRLSFKLFNIQVKEVTQNDGTTTIANNLTSTVQVFTDSEYQLPYVLGSAHQGCLPPFPADVFMVPQYGYLTLNNGSQAVGRSSFYCLEYFPSQMLRTGNNFTFSYTFEDVPFHSSYAHSQSLDRLMNPLIDQYLYYLSKTNAPSGTTTMSRLQFSQAGASDIRDQSRNWLPGPCYRQQRVSKTAADNNNSDYSWTGATKYHLNGRDSLVNPGPAMASHKDDEEKYFPQSGVLIFGKQGSNKTNVDIEKVMITDEEEIRTTNPVATEQYGSVSTNLQSGNTQAATSDVNTQGVLPGMVWQDRDVYLQGPIWAKIPHTDGHFHPSPLMGGFGLKHPPPQILIKNTPVPANPSTTFSAAKFASFITQYSTGQVSVEIEWELQKENSKRWNPEIQYTSNYNKSVNVDFTVDTNGVYSEPRPIGTRYLTRNL

SEQ ID NO: 397 - protein, 735 aa, Artificial Sequence
  Synthetic Polypeptide
MAADGYLPDWLEDTLSEGIRQWWKLKPGPPPPKPAERHKDDSRGLVLPGYKYLGPFNGLDKGEPVNEADAAALEHDKAYDRQLDSGDNPYLKYNHADAEFQERLKEDTSFGGNLGRAVFQAKKRVLEPLGLVEEPVKTAPGKKRPVEHSPVEPDSSSGTGKAGQQPARKRLNFGQTGDADSVPDPQPLGQPPAAPSGLGTNTMATGSGAPMADNNEGADGVGNSSGNWHCDSTWMGDRVITTSTHTWALPTYNNHLYKQISSQSGASNDNHYFGYSTPWGYFDFNRFHCHFSPRDWQRLINNNWGFRPKRLSFKLFNIQVKEVTQNDGTTTIANNLTSTVQVFTDSEYQLPYVLGSAHQGCLPPFPADVFMVPQYGYLTLNNGSQAVGRSSFYCLEYFPSQMLRTGNNFTFSYTFEDVPFHSSYAHSQSLDRLMNPLIDQYLYYLSKTNAPSGTTTMSRLQFSQAGASDIRDQSRNWLPGPCYRQQRVSKTAADNNNSDYSWTGATKYHLNGRDSLVNPGPAMASHKDDEEKYFPQSGVLIFGKQGSNKTNVDIEKVMITDEEEIRTTNPVATEQYGSVSTNLQSGNTQAATSDVNTQGVLPGMVWQDRDVYLQGPIWAKIPHTDGHFHPSPLMGGFGLKHPPPQILIKNTPVPANPSTTFSAAKFASFITQYSTGQVSVEIEWELQKENSKRWNPEIQYTSNYNKSVNVDFTVDTNGVYSEPRPIGTRYLTRNL

SEQ ID NO: 398 - protein, 735 aa, Artificial Sequence
  Synthetic Polypeptide
MAADGYLPDWLEDTLSEGIRQWWKLKPGPPPPKPAERHKDDSRGLVLPGYKYLGPFNGLDKGEPVNEADAAALEHDKAYDRQLDSGDNPYLKYNHADAEFQERLKEDTSFGGNLGRAVFQAKKRVLEPLGLVEEPVKTAPGKKRPVEHSPVEPDSSSGTGKAGQQPARKRLNFGQTGDADSVPDPQPLGQPPAAPSGLGTNTMATGSGAPMADNNEGADGVGNSSGNWHCDSTWMGDRVITTSTRTWALPTYNNHLYKQISSQSGASNDNHYFGYSTPWGYFDFNRFHCHFSPRDWQRLINNNWGFRPKRLSFKLFNIQVKEVTQNDGTTTIANNLTSTVQVFTDSEYQLPYVLGSAHQGCLPPFPADVFMVPQYGYLTLNNGSQAVGRSSFYCLEYFPSQMLRTGNNFTFSYTFEDVPFHSSYAHSQSLDRLMNPLIDQYLYYLSKTNAPSGTTTMSRLQFSQAGASGIRDQSRNWLPGPCYRQQRVSKTAADNNNSDYSWTGATKYHLNGRDSLVNPGPAMASHKDDEEKYFPQSGVLIFGKQGSNKTNVDIEKVMITDEEEIRTTNPVATEQYGSVSTNLQSGNTQAATSDVNTQGVLPGMVWQDRDVYLQGPIWAKIPHTDGHFHPSPLMGGFGLKHPPPQILIKNTPVPANPSTTFSAAKFASFITQYSTGQVSVEIEWELQKENSKRWNPEIQYTSNYNKSVNVDFTVDTNGVYSEPRPIGTRYLTRNL

SEQ ID NO: 399 - protein, 735 aa, Artificial Sequence
  Synthetic Polypeptide
MAADGYLPDWLEDTLSEGIRQWWKLKPGPPPPKPAERHKDDSRGLVLPGYKYLGPFNGLDKGEPVNEADAAALEHDKAYDRQLDSGDNPYLKYNHADAEFQERLKEDTSFGGNLGRVVFQAKKRVLEPLGLVEEPVKTAPGKKRPVEHSPVEPDSSSGTGKAGQQPARKRLNFGQTGDADSVPDPQPLGQPPAAPSGLGTNTMATGSGAPMADNNEGADGVGNSSGNWHCDSTWMGDRVITTSTRTWALPTYNNHLYKQISSQSGASNDNHYFGYSTPWGYFDFNRFHCHFSPRDWQRLINNNWGFRPKRLSFKLFNIQVKEVTQNDGTTTIANNLTSTVQVFTDSEYQLPYVLGSAHQGCLPPFPADVFMVPQYGYLTLNNGSQAVGRSSFYCLEYFPSQMLRTGNNFTFSYTFEDVPFHSSYAHSQSLDRLMNPLIDQYLYYLSKTNAPSGTTTMSRLQFSQAGASDIRDQSRNWLPGPCYRQQRVSKTAADNNNSDYSWTGATKYHLNGRDSLVNPGPAMASHKDDEEKYFPQSGVLIFGKQGSNKTNVDIEKVMITDEEEIRTTNPVATEQYGSVSTNLQSGNTQAATSDVNTQGVLPGMVWQDRDVYLQGPIWAKIPHTDGHFHPSPLMGGFGLKHPPPQILIKNTPVPANPSTTFSAAKFASFITQYSTGQVSVEIEWELQKENSKRWNPEIQYTSNYNKSVNVDFTVDTNGVYSEPRPIGTRYLTRNL

SEQ ID NO: 400 - protein, 735 aa, Artificial Sequence
  Synthetic Polypeptide
MAADGYLPDWLEDTLSEGIRQWWKLKPGPPPPKPAERHKDDSRGLVLPGYKYLGPFNGLDKGEPVNEADAAALEHDKAYDRQLDSGDNPYLKYNHADAEFQERLKEDTSFGGNLGRAVFQAKKRVLEPLGLVEEPVKTAPGKKRPVEHSPVEPDSSSGTGKAGQQPARKRLNFGQTGDADSVPDPQPLGQPPAAPSGLGTNTMATGSGAPMADNNEGADGVGNSSGNWHCDSTWMGDRVITTSTRTWALPTYNNHLYKQISSQSGASNDNHYFGYSTPWGYFDFNRFHCHFSPRDWQRLINNNWGFRPKRLSFKLFNIQVKEVTQNDGTTTIANNLTSTVQVFTDSEYQLPYILGSAHQGCLPPFPADVFMVPQYGYLTLNNGSQAVGRSSFYCLEYFPSQMLRTGNNFTFSYTFEDVPFHSSYAHSQSLDRLMNPLIDQYLYYLSKTNAPSGTTTMSRLQFSQAGASDIRDQSRNWLPGPCYRQQRVSKTAADNNNSDYSWTGATKYHLNGRDSLVNPGPAMASHKDDEEKYFPQSGVLIFGKQGSNKTNVDIEKVMITDEEEIRTTNPVATEQYGSVSTNLQSGNTQAATSDVNTQGVLPGMVWQDRDVYLQGPIWAKIPHTDGHFHPSPLMGGFGLKHPPPQILIKNTPVPANPSTTFSAAKFASFITQYSTGQVSVEIEWELQKENSKRWNPEIQYTSNYNKSVNVDFTVDTNGVYSEPRPIGTRYLTRNL

SEQ ID NO: 401 - protein, 735 aa, Artificial Sequence
  Synthetic Polypeptide
MAADGYLPDWLEDTLSEGIRQWWKLKPGPPPPKPAERHKDDSRGLVLPGYKYLGPFNGLDKGEPVNEADAAALEHDKAYDRQLDSGDNPYLKYNHADAEFQERLKEDTSFGGNLGRAVFQAKKRVLEPLGLVEEPVKTAPGKKRPVEHSPVEPDSSSGTGKAGQQPARKRLNFGQTGDADSVPDPQPLGQPPAAPSGLGTNTMATGSGAPMADNNEGVDGVGNSSGNWHCDSTWMGDRVITTSTRTWALPTYNNHLYKQISSQSGASNDNHYFGYSTPWGYFDFNRFHCHFSPRDWQRLINNNWGFRPKRLSFKLFNIQVKEVTQNDGTTTIANNLTSTVQVFTDSEYQLPYVLGSAHQGCLPPFPADVFMVPQYGYLTLNNGSQAVGRSSFYCLEYFPSQMLRTGNNFTFSYTFEDVPFHSSYAHSQSLDRLMNPLIDQYLYYLSKTNAPSGTTTMSRLQFSQAGASDIRDQSRNWLPGPCYRQQRVSKTAADNNNSDYSWTGATKYHLNGRDSLVNPGPAMASHKDDEEKYFPQSGVLIFGKQGSNKTNVDIEKVMITDEEEIRTTNPVATEQYGSVSTNLQSGNTQAATSDVNTQGVLPGMVWQDRDVYLQGPIWAKIPHTDGHFHPSPLMGGFGLKHPPPQILIKNTPVPANPSTTFSAAKFASFITQYSTGQVSVEIEWELQKENSKRWNPEIQYTSNYNKSVNVDFTVDTNGVYSEPRPIGTRYLTRNL

SEQ ID NO: 402 - protein, 735 aa, Artificial Sequence
  Synthetic Polypeptide
MAADGYLPDWLEDTLSEGIRQWWKLKPGPPPPKPAERHKDDSRGLVLPGYKYLGPFNGLDKGEPVNEADAAALEHDKAYDRQLDSGDNPYLKYNHADAEFQERLKEDTSFGGNLGRAVFQAKKRVLEPLGLVEEPVKTAPGKKRPVEHSPVEPDSSSGTGKAGQQPARKRLNFGQTGDADSVPDPQPLGQPPAAPSGLGTNTMATGSGAPMADNNEGADGVGNSSGNWHCDSTWMGDRVITTSTRTWALPTYNNHLYKQISSQSGASNDNHYFGYSTPWGYFDFNRFHCHFSPRDWQRLINNNWGFRPKRLSFKLFNIQVKEVTQNDGTTTIANNLTSTVQVFTDSEYQLPYVLGSAHQGCLPPFPADVFMVPQYGYLTLNNGSQAVGRSSFYCLEYFPSQMLRTGNNFTFSYTFEDVPFHSSYAHSQSLDRLMNPLIDQYLYYLSKTNAPSGTTTMSRLQFSQAGASDIRDQSRNWLPGPCYRQQRVSKTAADNNNSDYSWTGATKYHLNGRGSLVNPGPAMASHKDDEEKYFPQSGVLIFGKQGSNKTNVDIEKVMITDEEEIRTTNPVATEQYGSVSTNLQSGNTQAATSDVNTQGVLPGMVWQDRDVYLQGPIWAKIPHTDGHFHPSPLMGGFGLKHPPPQILIKNTPVPANPSTTFSAAKFASFITQYSTGQVSVEIEWELQKENSKRWNPEIQYTSNYNKSVNVDFTVDTNGVYSEPRPIGTRYLTRNL

SEQ ID NO: 403 - protein, 735 aa, Artificial Sequence
  Synthetic Polypeptide
MAADGYLPDWLEDTLSEGIRQWWKLKPGPPPPKPAERHKDDSRGLVLPGYKYLGPFNGLDKGEPVNEADAAALEHDKAYDRQLDSGDNPYLKYNHADAEFQERLKEDTSFGGNLGRAVFQAKKRVLEPLGLVEEPVKTAPGKKRPVEHSPVEPDSSSGTGKAGQQPARKRLNFGQTGDADSVPDPQPLGQPPAAPSGLGTNTMATGSGAPMADNNEGADGVGNSSGNWHCDSTWMGDRVITTSTRTWALPTYNNHLYKQISSQSGASNDNHYFGYSTPWGYFDFNRFHCHFSPRDWQRLINNNWGFRPKRLSFKLFNIQVKEVTQNDGTTTIANNLTSTVQVFTDSEYQLPYVLGSAHQGCLPPFPADVFMVPQYGYLTLNNGSQAVGRSSFYCLEYFPSQMLRTGNNFTFSYTFEDVPFHSSYAHSQSLDRLMNPLIDQYLYYLSKTNAPSGTTTMSRLQFSQAGASDIRDQSRNWLPGPCYRQQRVSKTAADNNNSDYSWTGATKYHLNGRDSLVNPGPAMASHKDDEEKYFPQSGVLIFGKQGSNKTNVDIEKVMITDEEEIRTTNPVATEQYGSVSTNLQSGNTQAATPDVNTQGVLPGMVWQDRDVYLQGPIWAKIPHTDGHFHPSPLMGGFGLKHPPPQILIKNTPVPANPSTTFSAAKFASFITQYSTGQVSVEIEWELQKENSKRWNPEIQYTSNYNKSVNVDFTVDTNGVYSEPRPIGTRYLTRNL

SEQ ID NO: 404 - protein, 735 aa, Artificial Sequence
  Synthetic Polypeptide
MAADGYLPDWLEDTLSEGIRQWWKLKPGPPPPKPAERHKDDSRGLVLPGYKYLGPFNGLDKGEPVNEADAAALEHDKAYDRQLDSGDNPYLKYNHADAEFQERLKEDTSFGGNLGRAVFQAKKRVLEPLGLVEEPVKTAPGKKRPVEHSPVEPDSSSGTGKAGQQPARKRLNFGQTGDADSVPDPQPLGQPPAAPSGLGTNTMATGSGAPMADNNEGADGVGNSSGNWHCDSTWMGDRVITTSTRTWALPTYNNHLYKQISSQSGASNDNHYFGYSTPWGYFDFNRFHCHFSPRDWQRLINNNWGFRPKRLSFKLFNIQVKEVTQNDGTTTIANNLTSTVQVFTDSEYQLPYVLGSAHQGCLPPFPADVFMVPQYGYLTLNNGSQAVGRSSFYCLEYFPSQMLRTGNNFTFSYTFEDVPFHSSYAHSQSLDRLMNPLIDQYLYYLSKTNAPSGTTTMSRLQFSQAGASDIRDQSRNWLPGPCYRQQRVSKTAADNNNSDYSWTGATKYHLNGRDSLVNPGPAMASHKDDEEKYFPQSGVLIFGKQGSNKTNVDIEKVMITDEEEIRTTNPVATEQYGSVSTNLQSGNTQAATSDVNTQGVLPGMVWQDRDVYLQGPIWAKIPHTDGHFHPSPLMGGFGLKHPPPQILIKNTPVPANPSTTFSVAKFASFITQYSTGQVSVEIEWELQKENSKRWNPEIQYTSNYNKSVNVDFTVDTNGVYSEPRPIGTRYLTRNL

SEQ ID NO: 405 - protein, 735 aa, Artificial Sequence
  Synthetic Polypeptide
MAADGYLPDWLEDTLSEGIRQWWKLKPGPPPPKPAERHKDDSRGLVLPGYKYLGPFNGLDKGEPVNEADAAALEHDKAYDRQLDSGDNPYLKYNHADAEFQERLKEDTSFGGNLGRAVFQAKKRVLEPLGLVEEPVKTAPGKKRPVEHSPVEPDSSSGTGKAGQQPARKRLNFGQTGDADSVPDPQPLGQPPAAPSGLGTNTMATGSGAPMADNNEGADGVGNSSGNWHCDSTWMGDRVITTSTRTWALPTYNNHLYKQISSQSGASNDNHYFGYSTPWGYFDFNRFHCHFSPRDWQRLINNNWGFRPKRLSFKLFNIQVKEVTQNDGTTTIANNLTSTVQVFTDSEYQLPYVLGSAHQGCLPPFPADVFMVPQYGYLTLNNGSQAVGRSSFYCLEYFPSQMLRTGNNFTFSYTFEDVPFRSSYAHSQSLDRLMNPLIDQYLYYLSKTNAPSGTTTMSRLQFSQAGASDIRDQSRNWLPGPCYRQQRVSKTAADNNNSDYSWTGATKYHLNGRDSLVNPGPAMASHKDDEEKYFPQSGVLIFGKQGSNKTNVDIEKVMITDEEEIRTTNPVATEQYGSVSTNLQSGNTQAATSDVNTQGVLPGMVWQDRDVYLQGPIWAKIPHTDGHFHPSPLMGGFGLKHPPPQILIKNTPVPANPSTTFSAAKFASFITQYSTGQVSVEIEWELQKENSKRWNPEIQYTSNYNKSVNVDFTVDTNGVYSEPRPIGTRYLTRNL

SEQ ID NO: 406 - protein, 735 aa, Artificial Sequence
  Synthetic Polypeptide
MAADGYLPDWLEDTLSEGIRQWWKLKPGPPPPKPAERHKDDSRGLVLPGYKYLGPFNGLDKGEPVNEADAAALEHDKAYDRQLDSGDNPYLKYNHADAEFQERLKEDTSFGGNLGRAVFQAKKRVLEPLGLVEEPVKTAPGKKRPVEHSPVEPDSSSGTGKADQQPARKRLNFGQTGDADSVPDPQPLGQPPAAPSGLGTNTMATGSGAPMADNNEGADGVGNSSGNWHCDSTWMGDRVITTSTRTWALPTYNNHLYKQISSQSGASNDNHYFGYSTPWGYFDFNRFHCHFSPRDWQRLINNNWGFRPKRLSFKLFNIQVKEVTQNDGTTTIANNLTSTVQVFTDSEYQLPYVLGSAHQGCLPPFPADVFMVPQYGYLTLNNGSQAVGRSSFYCLEYFPSQMLRTGNNFTFSYTFEDVPFHSSYAHSQSLDRLMNPLIDQYLYYLSKTNAPSGTTTMSRLQFSQAGASDIRDQSRNWLPGPCYRQQRVSKTAADNNNSDYSWTGATKYHLNGRDSLVNPGPAMASHKDDEEKYFPQSGVLIFGKQGSNKTNVDIEKVMITDEEEIRTTNPVATEQYGSVSTNLQSGNTQAATSDVNTQGVLPGMVWQDRDVYLQGPIWAKIPHTDGHFHPSPLMGGFGLKHPPPQILIKNTPVPANPSTTFSAAKFASFITQYSTGQVSVEIEWELQKENSKRWNPEIQYTSNYNKSVNVDFTVDTNGVYSEPRPIGTRYLTRNL

SEQ ID NO: 407 - protein, 735 aa, Artificial Sequence
  Synthetic Polypeptide
MAADGYLPDWLEDTLSEGIRQWWKLKPGPPPPKPAERHKDDSRGLVLPGYKYLGPFNGLDKGEPVNEADAAALEHDKAYDRQLDSGDNPYLKYNHADAEFQERLKEDTSFGGNLGRAVFQAKKRVLEPLGLVEEPVKTAPGKKRPVEHSPVEPDSSSGTGKAGQQPARKRLNFGQTGDADSVPDPQPLGQPPAAPSGLGTNTMATGSGAPMADNNEGADGVGNSSGNWHCDSTWMGDRVITTSTRTWALPTYNNHLYKQISSQSGASNDNHYFGYSTPWGYFDFNRFHCHFSPRDWQRLINNNWGFRPKRLSFKLFNIQVKEVTQNDGTTTIANNLTNTVQVFTDSEYQLPYVLGSAHQGCLPPFPADVFMVPQYGYLTLNNGSQAVGRSSFYCLEYFPSQMLRTGNNFTFSYTFEDVPFHSSYAHSQSLDRLMNPLIDQYLYYLSKTNAPSGTTTMSRLQFSQAGASDIRDQSRNWLPGPCYRQQRVSKTAADNNNSDYSWTGATKYHLNGRDSLVNPGPAMASHKDDEEKYFPQSGVLIFGKQGSNKTNVDIEKVMITDEEEIRTTNPVATEQYGSVSTNLQSGNTQAATSDVNTQGVLPGMVWQDRDVYLQGPIWAKIPHTDGHFHPSPLMGGFGLKHPPPQILIKNTPVPANPSTTFSAAKFASFITQYSTGQVSVEIEWELQKENSKRWNPEIQYTSNYNKSVNVDFTVDTNGVYSEPRPIGTRYLTRNL

SEQ ID NO: 408 - protein, 735 aa, Artificial Sequence
  Synthetic Polypeptide
MAADGYLPDWLEDTLSEGIRQWWKLKPGPPPPKPAERHKDDSRGLVLPGYKYLGPFNGLDKGEPVNEADAAALEHDKAYDRQLDSGDNPYLKYNHADAEFQERLKEDTSFGGNLGRAVFQAKKRVLEPLGLVEEPVKTAPGKKRPVEHSPVEPDSSSGTGKAGQQPARKRLNFGQTGDADSVPDPQPLGQPPAAPSGLGTNTMATGSGAPMADNNEGADGVGNSSGNWHCDSTWMGDRVITTSTRTWALPTYNNHLYKQISSQSGASNDNHYFGYNTPWGYFDFNRFHCHFSPRDWQRLINNNWGFRPKRLSFKLFNIQVKEVTQNDGTTTIANNLTSTVQVFTDSEYQLPYVLGSAHQGCLPPFPADVFMVPQYGYLTLNNGSQAVGRSSFYCLEYFPSQMLRTGNNFTFSYTFEDVPFHSSYAHSQSLDRLMNPLIDQYLYYLSKTNAPSGTTTMSRLQFSQAGASDIRDQSRNWLPGPCYRQQRVSKTAADNNNSDYSWTGATKYHLNGRDSLVNPGPAMASHKDDEEKYFPQSGVLIFGKQGSNKTNVDIEKVMITDEEEIRTTNPVATEQYGSVSTNLQSGNTQAATSDVNTQGVLPGMVWQDRDVYLQGPIWAKIPHTDGHFHPSPLMGGFGLKHPPPQILIKNTPVPANPSTTFSAAKFASFITQYSTGQVSVEIEWELQKENSKRWNPEIQYTSNYNKSVNVDFTVDTNGVYSEPRPIGTRYLTRNL

SEQ ID NO: 409 - protein, 735 aa, Artificial Sequence
  Synthetic Polypeptide
MAADGYLPDWLEDTLSEGIRQWWKLKPGPPPPKPAERHKDDSRGLVLPGYKYLGPFNGLDKGEPVNEADAAALEHDKAYDRQLDSGDNPYLKYNHADAEFQERLKEDTSFGGNLGRAVFQAKKRVLEPLGLVEEPVKTAPGKKRPVEHSPVEPDSSSGTGKAGQQPARKRLNFGQTGGADSVPDPQPLGQPPAAPSGLGTNTMATGSGAPMADNNEGADGVGNSSGNWHCDSTWMGDRVITTSTRTWALPTYNNHLYKQISSQSGASNDNHYFGYSTPWGYFDFNRFHCHFSPRDWQRLINNNWGFRPKRLSFKLFNIQVKEVTQNDGTTTIANNLTSTVQVFTDSEYQLPYVLGSAHQGCLPPFPADVFMVPQYGYLTLNNGSQAVGRSSFYCLEYFPSQMLRTGNNFTFSYTFEDVPFHSSYAHSQSLDRLMNPLIDQYLYYLSKTNAPSGTTTMSRLQFSQAGASDIRDQSRNWLPGPCYRQQRVSKTAADNNNSDYSWTGATKYHLNGRDSLVNPGPAMASHKDDEEKYFPQSGVLIFGKQGSNKTNVDIEKVMITDEEEIRTTNPVATEQYGSVSTNLQSGNTQAATSDVNTQGVLPGMVWQDRDVYLQGPIWAKIPHTDGHFHPSPLMGGFGLKHPPPQILIKNTPVPANPSTTFSAAKFASFITQYSTGQVSVEIEWELQKENSKRWNPEIQYTSNYNKSVNVDFTVDTNGVYSEPRPIGTRYLTRNL

SEQ ID NO: 410 - DNA, 4090 bp, Artificial Sequence
  Synthetic Polynucleotide
atgccggggttctacgagattgtgattaaggtccccagcgaccttgacgagcatctgcccggcatttctgacagctttgtgaactgggtggccgagaaggaatgggagttgccgccagattctgacatggatctgaatctgattgagcaggcacccctgaccgtggccgagaagttgcagcgcgactttctgacagagtggcgccgcgtgagtaaggccccggaggcccttttctttgtgcaatttgagaaaggggaaagctattttcacatgcacgtgctggtggagaccaccggggtgaaatccatggttttgggacgtttcctgagtcagattcgcgaaaaactgattcagagaatttaccgcggaatcgagccgactttgccaaattggttcgcggtcacaaagacccgaaatggcgccggaggcgggaacaaggtggtggatgagtgctacatccccaattacctgctccccaaaacccagcctgagctccagtgggcgtggactaatatggaacagtatttaagcgcctgtttgaatctcgcggagcgtaaacggttggtggcgcagcatctgacgcacgtgtcgcagacgcaggagcagaacaaagagaatcagaatcccaattctgacgcgccggtgattagatcaaaaacctcagccaggtacatggagcttgtcgggtggctcgtggataaggggattacctcggagaagcagtggatccaggaggaccaggcttcatacatctccttcaatgcggcctccaactcgcggtcccagatcaaggctgctttggacaatgcggggaagatcatgagcctgactaaaaccgcccccgactacctggtgggccagcagcccgtggaggacatttccagcaatcggatttataaaatcttggaactgaacgggtatgacccccaatacgcggcttccgtctttctgggatgggctacgaaaagattcggcaagaggaacaccatctggctgtttgggcctgcgactaccgggaagaccaacatcgcggaggccatagcccacacggttcccttctacgggtgcgtaaactggaccaatgagaactttccgttcaacgactgcgtcgacaagatggtgatctggtgggaggagggaaagatgaccgccaaggtcgtggagtcggccaaggccatcctcggtggaagcaaggtgcgcgtggaccagaaatgcaagtcctcggcccagatagacccgactcccgtgatcgtcacctccaacaccaacatgtgcgccgtgattgacgggaactcaacgaccttcgagcaccagcagccgttgcaagaccggatgttcaaatttgaactcacccgccgtctggatcatgactttgggaaggtcaccaagcaggaagtcaaagactttttccggtgggcaaaggatcacgtggttgaggtggaacatgaattttacgtcaaaaagggtggagccaaaaaaagacccgcccccagtgatgcagatataagtgagcccaaacgggcgcgcgagtcagttgcgcagccatcgacgtcagacgcggaagcttcgatcaactacgcggacaggtaccaaaacaaatgttctcgtcacgtgggcatgaatctgatgctgtttccctgcagacaatgcgaaagaatgaatcagaattcaaatatctgcttcactcacggacagaaagactgtttagagtgctttcccgtgtcagaatctcaacccgtttctgtcgtcaaaaaggcgtatcagaaactgtgctatattcatcatatcatgggaaaggtaccagacgcttgcactgcttgcgacctggtcaatgtggatttggatgactgcatctctgaacaataaatgatttaaatcaggtatggctgccgatggttatcttccagattggctcgaggacactctctctgaaggaataagacagtggtggaagctcaaacctggcccaccaccgccaaagcccgcagagcggcataaggacgacagcaggggtcttgtgcttcctgggtacaagtacctcggacccttcaacggactcgacaaaggagagccggtcaacgaggcagacgccgcggccctcgagcacgacaaggcctacgaccggcagctcgacagcggagacaacccgtacctcaagtacaaccacgccgacgcggagtttcaggagcgccttaaagaagatacgtcttttgggggcaacctcggacgagcagtcttccaggcgaaaaagagggttcttgaacctctgggcctggttgaggaacctgttaagacggctccgggaaaaaagaggccggtagagcactctcctgcggagccagactcctcctcgggaaccggaaaggcgggccagcagcctgcgagaaagagattgaatttcggtcagactggagacgcagactccgtacctgacccccagcctctcggacagccaccagcagccccctctggtctgggaactaatacgatggctacaggcagtggcgcaccaatggcagacaataacgagggcgccgacggagtgggtaattcctcgggaaattggcattgcgattccacatggatgggcgacagagtcatcaccaccagcacccgcacctgggctctgcccacctacaacaaccatctgtacaagcaaatttccagccaatcaggagcatcgaacgacaaccactactttggctacagcaccccctgggggtattttgacttcaacagattccactgccacttttcgccacgtgactggcaaagactcatcaacaacaactggggattccggcccaagagactcagcttcaagctctttaacattcaagtcaaggaggtcacgcagaatgacggtacgacgacgattgccaataaccttaccagcacggttcaggtctttactgactcggagtaccagctcccgtacgtcctcggctcggcgcatcaaggatgcctcccgccgtttccagcggacgtcttcatggtcccacagtatggatacctcaccctgaacaacgggagtcaggcggtaggacgctcttccttttactgcctggagtactttccttctcagatgcttcgtactggaaacaactttaccttcagctacacctttgaagacgttcctttccacagcagctacgctcacagccaaagtctggaccgtctcatgaatcctctcatcgaccagtacctgtattacttgagcaaaacaaacgctccaagcggaaccaccacgatgtccaggcttcagttttctcaggccggagcaagtgacattcgggaccagtctagaaactggcttcctggaccctgttaccgccagcagcgagtatcaaagacagctgcggacaacaacaacagtgattactcgtggactggagctaccaagtaccacctcaatggaagagactctctggtgaacccgggcccagctatggccagccacaaggacgatgaagaaaaatattttcctcagagcggggttctcatcttcgggaaacaaggctcaaataaaactaatgtggacattgaaaaggtcatgattacagacgaagaggaaatcaggaccaccaatcccgtggctacggagcagtacggtgctgtatctaccaaccttcaaagcggcaacacacaagcagctacctcagatgtcaacacacaaggcgttcttcctggcatggtctggcaggacagagacgtgtacctgcaggggcccatctgggcaaagattccccacacggatggacactttcacccttctcctcttatgggaggatttggattgaagcaccctcccccacagattctcatcaagaataccccggtacctgcgaatccttctaccaccttcagtgcggcaaagtttgcttctttcatcacacagtactccacagggcaggtcagcgtggagatcgagtgggagctgcagaaagagaacagcaaacgctggaaccccgagattcagtatacctccaactacaacaagtctgttaatgtggactttactgtggacactaatggcgtgtattcagagcctcgccccattggcacaagatacctgactcgtaatctgtaa

SEQ ID NO: 411 - DNA, 4090 bp, Artificial Sequence
  Synthetic Polynucleotide
atgccggggttctacgagattgtgattaaggtccccagcgaccttgacgagcatctgcccggcatttctgacagctttgtgaactgggtggccgagaaggaatgggagttgccgccagattctgacatggatctgaatctgattgagcaggcacccctgaccgtggccgagaagttgcagcgcgactttctgacagagtggcgccgcgtgagtaaggccccggaggcccttttctttgtgcaatttgagaaaggggaaagctattttcacatgcacgtgctggtggagaccaccggggtgaaatccatggttttgggacgtttcctgagtcagattcgcgaaaaactgattcagagaatttaccgcggaatcgagccgactttgccaaattggttcgcggtcacaaagacccgaaatggcgccggaggcgggaacaaggtggtggatgagtgctacatccccaattacctgctccccaaaacccagcctgagctccagtgggcgtggactaatatggaacagtatttaagcgcctgtttgaatctcgcggagcgtaaacggttggtggcgcagcatctgacgcacgtgtcgcagacgcaggagcagaacaaagagaatcagaatcccaattctgacgcgccggtgattagatcaaaaacctcagccaggtacatggagcttgtcgggtggctcgtggataaggggattacctcggagaagcagtggatccaggaggaccaggcttcatacatctccttcaatgcggcctccaactcgcggtcccagatcaaggctgctttggacaatgcggggaagatcatgagcctgactaaaaccgcccccgactacctggtgggccagcagcccgtggaggacatttccagcaatcggatttataaaatcttggaactgaacgggtatgacccccaatacgcggcttccgtctttctgggatgggctacgaaaagattcggcaagaggaacaccatctggctgtttgggcctgcgactaccgggaagaccaacatcgcggaggccatagcccacacggttcccttctacgggtgcgtaaactggaccaatgagaactttccgttcaacgactgcgtcgacaagatggtgatctggtgggaggagggaaagatgaccgccaaggtcgtggagtcggccaaggccatcctcggtggaagcaaggtgcgcgtggaccagaaatgcaagtcctcggcccagatagacccgactcccgtgatcgtcacctccaacaccaacatgtgcgccgtgattgacgggaactcaacgaccttcgagcaccagcagccgttgcaagaccggatgttcaaatttgaactcacccgccgtctggatcatgactttgggaaggtcaccaagcaggaagtcaaagactttttccggtgggcaaaggatcacgtggttgaggtggaacatgaattttacgtcaaaaagggtggagccaaaaaaagacccgcccccagtgatgcagatataagtgagcccaaacgggcgcgcgagtcagttgcgcagccatcgacgtcagacgcggaagcttcgatcaactacgcggacaggtaccaaaacaaatgttctcgtcacgtgggcatgaatctgatgctgtttccctgcagacaatgcgaaagaatgaatcagaattcaaatatctgcttcactcacggacagaaagactgtttagagtgctttcccgtgtcagaatctcaacccgtttctgtcgtcaaaaaggcgtatcagaaactgtgctatattcatcatatcatgggaaaggtaccagacgcttgcactgcttgcgacctggtcaatgtggatttggatgactgcatctctgaacaataaatgatttaaatcaggtatggctgccgatggttatcttccagattggctcgaggacactctctctgaaggaataagacagtggtggaagctcaaacctggcccaccaccgccaaagcccgcagagcggcataaggacgacagcaggggtcttgtgcttcctgggtacaagtacctcggacccttcaacggactcgacaaaggagagccggtcaacgaggcagacgccgcggccctcgagcacgacaaggcctacgaccggcagctcgacagcggagacaacccgtacctcaagtacaaccacgccgacgcggagtttcaggagcgccttaaagaagatacgtcttttgggggcaacctcggacgagcagtcttccaggcgaaaaagagggttcttgaacctctgggcctggttgaggaacctgttaagacggctccgggaaaaaagaggccggtagagcactctcctgcggagccagactcctcctcgggaaccggaaaggcgggccagcagcctgcgagaaagagattgaatttcggtcagactggagacgcagactccgtacctgacccccagcctctcggacagccaccagcagccccctctggtctgggaactaatacgatggctacaggcagtggcgcaccaatggcagacaataacgagggcgccgacggagtgggtaattcctcgggaaattggcattgcgattccacatggatgggcgacagagtcatcaccaccagcacccgcacctgggctctgcccacctacaacaaccatctgtacaagcaaatttccagccaatcaggagcatcgaacgacaaccactactttggctacagcaccccctgggggtattttgacttcaacagattccactgccacttttcgccacgtgactggcaaagactcatcaacaacaactggggattccggcccaagagactcagcttcaagctctttaacattcaagtcaaggaggtcacgcagaatgacggtacgacgacgattgccaataaccttaccagcacggttcaggtctttactgactcggagtaccagctcccgtacgtcctcggctcggcgcatcaaggatgcctcccgccgtttccagcggacgtcttcatggtcccacagtatggatacctcaccctgaacaacgggagtcaggcggtaggacgctcttccttttactgcctggagtactttccttctcagatgcttcgtactggaaacaactttaccttcagctacacctttgaagacgttcctttccacagcagctacgctcacagccaaagtctggaccgtctcatgaatcctctcatcgaccagtacctgtattacttgagcaaaacaaacgctccaagcggaaccaccacgatgtccaggcttcagttttctcaggccggagcaagtgacattcgggaccagtctagaaactggcttcctggaccctgttaccgccagcagcgagtatcaaagacagctgcggacaacaacaacagtgattactcgtggactggagctaccaagtaccacctcaatggaagagactctctggtgaacccgggcccagctatggccagccacaaggacgatgaagaaaaaatatttcctcagagcggggttctcatcttcgggaaacaaggctcaaataaaactaatgtggacattgaaaaggtcatgattacagacgaagaggaaatcaggaccaccaatcccgtggctacggagcagtacggtgctgtatctaccaaccttcaaagcggcaacacacaagcagctacctcagatgtcaacacacaaggcgttcttcctggcatggtctggcaggacagagacgtgtacctgcaggggcccatctgggcaaagattccccacacggatggacactttcacccttctcctcttatgggaggatttggattgaagcaccctcccccacagattctcatcaagaataccccggtacctgcgaatccttctaccaccttcagtgcggcaaagtttgcttctttcatcacacagtactccacagggcaggtcagcgtggagatcgagtgggagctgcagaaagagaacagcaaacgctggaaccccgagattcagtatacctccaactacaacaagtctgttaatgtggactttactgtggacactaatggcgtgtattcagagcctcgccccattggcacaagatacctgactcgtaatctgtaa

SEQ ID NO: 412 - DNA, 4090 bp, Artificial Sequence
  Synthetic Polynucleotide
atgccggggttctacgagattgtgattaaggtccccagcgaccttgacgagcatctgcccggcatttctgacagctttgtgaactgggtggccgagaaggaatgggagttgccgccagattctgacatggatctgaatctgattgagcaggcacccctgaccgtggccgagaagttgcagcgcgactttctgacagagtggcgccgcgtgagtaaggccccggaggcccttttctttgtgcaatttgagaaaggggaaagctattttcacatgcacgtgctggtggagaccaccggggtgaaatccatggttttgggacgtttcctgagtcagattcgcgaaaaactgattcagagaatttaccgcggaatcgagccgactttgccaaattggttcgcggtcacaaagacccgaaatggcgccggaggcgggaacaaggtggtggatgagtgctacatccccaattacctgctccccaaaacccagcctgagctccagtgggcgtggactaatatggaacagtatttaagcgcctgtttgaatctcgcggagcgtaaacggttggtggcgcagcatctgacgcacgtgtcgcagacgcaggagcagaacaaagagaatcagaatcccaattctgacgcgccggtgattagatcaaaaacctcagccaggtacatggagcttgtcgggtggctcgtggataaggggattacctcggagaagcagtggatccaggaggaccaggcttcatacatctccttcaatgcggcctccaactcgcggtcccagatcaaggctgctttggacaatgcggggaagatcatgagcctgactaaaaccgcccccgactacctggtgggccagcagcccgtggaggacatttccagcaatcggatttataaaatcttggaactgaacgggtatgacccccaatacgcggcttccgtctttctgggatgggctacgaaaagattcggcaagaggaacaccatctggctgtttgggcctgcgactaccgggaagaccaacatcgcggaggccatagcccacacggttcccttctacgggtgcgtaaactggaccaatgagaactttccgttcaacgactgcgtcgacaagatggtgatctggtgggaggagggaaagatgaccgccaaggtcgtggagtcggccaaggccatcctcggtggaagcaaggtgcgcgtggaccagaaatgcaagtcctcggcccagatagacccgactcccgtgatcgtcacctccaacaccaacatgtgcgccgtgattgacgggaactcaacgaccttcgagcaccagcagccgttgcaagaccggatgttcaaatttgaactcacccgccgtctggatcatgactttgggaaggtcaccaagcaggaagtcaaagactttttccggtgggcaaaggatcacgtggttgaggtggaacatgaattttacgtcaaaaagggtggagccaaaaaaagacccgcccccagtgatgcagatataagtgagcccaaacgggcgcgcgagtcagttgcgcagccatcgacgtcagacgcggaagcttcgatcaactacgcggacaggtaccaaaacaaatgttctcgtcacgtgggcatgaatctgatgctgtttccctgcagacaatgcgaaagaatgaatcagaattcaaatatctgcttcactcacggacagaaagactgtttagagtgctttcccgtgtcagaatctcaacccgtttctgtcgtcaaaaaggcgtatcagaaactgtgctatattcatcatatcatgggaaaggtaccagacgcttgcactgcttgcgacctggtcaatgtggatttggatgactgcatctctgaacaataaatgatttaaatcaggtatggctgccgatggttatcttccagattggctcgaggacactctctctgaaggaataagacagtggtggaagctcaaacctggcccaccaccgccaaagcccgcagagcggcataaggacgacagcaggggtcttgtgcttcctgggtacaagtacctcggacccttcaacggactcgacaaaggagagccggtcaacgaggcagacgccgcggccctcgagcacgacaaggcctacgaccggcagctcgacagcggagacaacccgtacctcaagtacaaccacgccgacgcggagtttcaggagcgccttaaagaagatacgtcttttgggggcaacctcggacgagcagtcttccaggcgaaaaagagggttcttgaacctctgggcctggttgaggaacctgttaagacggctccgggaaaaaagaggccggtagagcactctcctgcggagccagactcctcctcgggaaccggaaaggcgggccagcagcctgcgagaaagagattgaatttcggtcagactggagacgcagactccgtacctgacccccagcctctcggacagccaccagcagccccctctggtctgggaactaatacgatggctacaggcagtggcgcaccaatggcagacaataacgagggcgccgacggagtgggtaattcctcgggaaattggcattgcgattccacatggatgggcgacagagtcatcaccaccagcacccgcacctgggctctgcccacctacaacaaccatctgtacaagcaaatttccagccaatcaggagcatcgaacgacaaccactactttggctacagcaccccctgggggtattttgacttcaacagattccactgccacttttcgccacgtgactggcaaagactcatcaacaacaactggggattccggcccaagagactcagcttcaagctctttaacattcaagtcaaggaggtcacgcagaatgacggtacgacgacgattgccaataaccttaccagcacggttcaggtctttactgactcggagtaccagctcccgtacgtcctcggctcggcgcatcaaggatgcctcccgccgtttccagcggacgtcttcatggtcccacagtatggatacctcaccctgaacaacgggagtcaggcggtaggacgctcttccttttactgcctggagtactttccttctcagatgcttcgtactggaaacaactttaccttcagctacacctttgaagacgttcctttccacagcagctacgctcacagccaaagtctggaccgtctcatgaatcctctcatcgaccagtacctgtattacttgagcaaaacaaacgctccaagcggaaccaccacgatgtccaggcttcagttttctcaggccggagcaagtgacattcgggaccagtctagaaactggcttcctggaccctgttaccgccagcagcgagtatcaaagacagctgcggacaacaacaacagtgattactcgtggactggagctaccaagtaccacctcaatggaagagactctctggtgaacccgggcccagctatggccagccacaaggacgatgaagaaaaatattttcctcagagcggggttctcatcttcgggaaacaaggctcaaaataaactaatgtggacattgaaaaggtcatgattacagacgaagaggaaatcaggaccaccaatcccgtggctacggagcagtacggtgctgtatctaccaaccttcaaagcggcaacacacaagcagctacctcagatgtcaacacacaaggcgttcttcctggcatggtctggcaggacagagacgtgtacctgcaggggcccatctgggcaaagattccccacacggatggacactttcacccttctcctcttatgggaggatttggattgaagcaccctcccccacagattctcatcaagaataccccggtacctgcgaatccttctaccaccttcagtgcggcaaagtttgcttctttcatcacacagtactccacagggcaggtcagcgtggagatcgagtgggagctgcagaaagagaacagcaaacgctggaaccccgagattcagtatacctccaactacaacaagtctgttaatgtggactttactgtggacactaatggcgtgtattcagagcctcgccccattggcacaagatacctgactcgtaatctgtaa

SEQ ID NO: 413 - DNA, 4090 bp, Artificial Sequence
  Synthetic Polynucleotide
atgccggggttctacgagattgtgattaaggtccccagcgaccttgacgagcatctgcccggcatttctgacagctttgtgaactgggtggccgagaaggaatgggagttgccgccagattctgacatggatctgaatctgattgagcaggcacccctgaccgtggccgagaagttgcagcgcgactttctgacagagtggcgccgcgtgagtaaggccccggaggcccttttctttgtgcaatttgagaaaggggaaagctattttcacatgcacgtgctggtggagaccaccggggtgaaatccatggttttgggacgtttcctgagtcagattcgcgaaaaactgattcagagaatttaccgcggaatcgagccgactttgccaaattggttcgcggtcacaaagacccgaaatggcgccggaggcgggaacaaggtggtggatgagtgctacatccccaattacctgctccccaaaacccagcctgagctccagtgggcgtggactaatatggaacagtatttaagcgcctgtttgaatctcgcggagcgtaaacggttggtggcgcagcatctgacgcacgtgtcgcagacgcaggagcagaacaaagagaatcagaatcccaattctgacgcgccggtgattagatcaaaaacctcagccaggtacatggagcttgtcgggtggctcgtggataaggggattacctcggagaagcagtggatccaggaggaccaggcttcatacatctccttcaatgcggcctccaactcgcggtcccagatcaaggctgctttggacaatgcggggaagatcatgagcctgactaaaaccgcccccgactacctggtgggccagcagcccgtggaggacatttccagcaatcggatttataaaatcttggaactgaacgggtatgacccccaatacgcggcttccgtctttctgggatgggctacgaaaagattcggcaagaggaacaccatctggctgtttgggcctgcgactaccgggaagaccaacatcgcggaggccatagcccacacggttcccttctacgggtgcgtaaactggaccaatgagaactttccgttcaacgactgcgtcgacaagatggtgatctggtgggaggagggaaagatgaccgccaaggtcgtggagtcggccaaggccatcctcggtggaagcaaggtgcgcgtggaccagaaatgcaagtcctcggcccagatagacccgactcccgtgatcgtcacctccaacaccaacatgtgcgccgtgattgacgggaactcaacgaccttcgagcaccagcagccgttgcaagaccggatgttcaaatttgaactcacccgccgtctggatcatgactttgggaaggtcaccaagcaggaagtcaaagactttttccggtgggcaaaggatcacgtggttgaggtggaacatgaattttacgtcaaaaagggtggagccaaaaaaagacccgcccccagtgatgcagatataagtgagcccaaacgggcgcgcgagtcagttgcgcagccatcgacgtcagacgcggaagcttcgatcaactacgcggacaggtaccaaaacaaatgttctcgtcacgtgggcatgaatctgatgctgtttccctgcagacaatgcgaaagaatgaatcagaattcaaatatctgcttcactcacggacagaaagactgtttagagtgctttcccgtgtcagaatctcaacccgtttctgtcgtcaaaaaggcgtatcagaaactgtgctatattcatcatatcatgggaaaggtaccagacgcttgcactgcttgcgacctggtcaatgtggatttggatgactgcatctctgaacaataaatgatttaaatcaggtatggctgccgatggttatcttccagattggctcgaggacactctctctgaaggaataagacagtggtggaagctcaaacctggcccaccaccgccaaagcccgcagagcggcataaggacgacagcaggggtcttgtgcttcctgggtacaagtacctcggacccttcaacggactcgacaaaggagagccggtcaacgaggcagacgccgcggccctcgagcacgacaaggcctacgaccggcagctcgacagcggagacaacccgtacctcaagtacaaccacgccgacgcggagtttcaggagcgccttaaagaagatacgtcttttgggggcaacctcggacgagcagtcttccaggcgaaaaagagggttcttgaacctctgggcctggttgaggaacctgttaagacggctccgggaaaaaagaggccggtagagcactctcctgcggagccagactcctcctcgggaaccggaaaggcgggccagcagcctgcgagaaagagattgaatttcggtcagactggagacgcagactccgtacctgacccccagcctctcggacagccaccagcagccccctctggtctgggaactaatacgatggctacaggcagtggcgcaccaatggcagacaataacgagggcgccgacggagtgggtaattcctcgggaaattggcattgcgattccacatggatgggcgacagagtcatcaccaccagcacccgcacctgggctctgcccacctacaacaaccatctgtacaagcaaatttccagccaatcaggagcatcgaacgacaaccactactttggctacagcaccccctgggggtattttgacttcaacagattccactgccacttttcgccacgtgactggcaaagactcatcaacaacaactggggattccggcccaagagactcagcttcaagctctttaacattcaagtcaaggaggtcacgcagaatgacggtacgacgacgattgccaataaccttaccagcacggttcaggtctttactgactcggagtaccagctcccgtacgccctcggctcggcgcatcaaggatgcctcccgccgtttccagcggacgtcttcatggtcccacagtatggatacctcaccctgaacaacgggagtcaggcggtaggacgctcttccttttactgcctggagtactttccttctcagatgcttcgtactggaaacaactttaccttcagctacacctttgaagacgttcctttccacagcagctacgctcacagccaaagtctggaccgtctcatgaatcctctcatcgaccagtacctgtattacttgagcaaaacaaacgctccaagcggaaccaccacgatgtccaggcttcagttttctcaggccggagcaagtgacattcgggaccagtctagaaactggcttcctggaccctgttaccgccagcagcgagtatcaaagacagctgcggacaacaacaacagtgattactcgtggactggagctaccaagtaccaccccaatggaagagactctctggtgaacccgggcccagctatggccagccacaaggacgatgaagaaaaatattttcctcagagcggggttctcatcttcgggaaacaaggctcaaataaaactaatgtggacattgaaaaggtcatgattacagacgaagaggaaatcaggaccaccaatcccgtggctacggagcagtacggtgctgtatctaccaaccttcaaagcggcaacacacaagcagctacctcagatgtcaacacacaaggcgttcttcctggcatggtctggcaggacagagacgtgtacctgcaggggcccatctgggcaaagattccccacacggatggacactctcacccttctcctcttatgggaggatttggattgaagcaccctcccccacagattctcatcaagaataccccggtacctgcgaatccttctaccaccttcagtgcggcaaagtttgcttctttcatcacacagtactccacagggcaggtcagcgtggagatcgagtgggagctgcagaaagagaacagcaaacgctggaaccccgagattcagtatacctccaactacaacaagtctgttaatgtggactttactgtggacactaatggcgtgtattcagagcctcgccccattggcacaagatacctgactcgtaatctgtaa

SEQ ID NO: 414 - DNA, 4087 bp, Artificial Sequence
  Synthetic Polynucleotide
atgccggggttctacgagattgtgattaaggtccccagcgaccttgacgagcatctgcccggcatttctgacagctttgtgaactgggtggccgagaaggaatgggagttgccgccagattctgacatggatctgaatctgattgagcaggcacccctgaccgtggccgagaagttgcagcgcgactttctgacagagtggcgccgcgtgagtaaggccccggaggcccttttctttgtgcaatttgagaaaggggaaagctattttcacatgcacgtgctggtggagaccaccggggtgaaatccatggttttgggacgtttcctgagtcagattcgcgaaaaactgattcagagaatttaccgcggaatcgagccgactttgccaaattggttcgcggtcacaaagacccgaaatggcgccggaggcgggaacaaggtggtggatgagtgctacatccccaattacctgctccccaaaacccagcctgagctccagtgggcgtggactaatatggaacagtatttaagcgcctgtttgaatctcgcggagcgtaaacggttggtggcgcagcatctgacgcacgtgtcgcagacgcaggagcagaacaaagagaatcagaatcccaattctgacgcgccggtgattagatcaaaaacctcagccaggtacatggagcttgtcgggtggctcgtggataaggggattacctcggagaagcagtggatccaggaggaccaggcttcatacatctccttcaatgcggcctccaactcgcggtcccagatcaaggctgctttggacaatgcggggaagatcatgagcctgactaaaaccgcccccgactacctggtgggccagcagcccgtggaggacatttccagcaatcggatttataaaatcttggaactgaacgggtatgacccccaatacgcggcttccgtctttctgggatgggctacgaaaagattcggcaagaggaacaccatctggctgtttgggcctgcgactaccgggaagaccaacatcgcggaggccatagcccacacggttcccttctacgggtgcgtaaactggaccaatgagaactttccgttcaacgactgcgtcgacaagatggtgatctggtgggaggagggaaagatgaccgccaaggtcgtggagtcggccaaggccatcctcggtggaagcaaggtgcgcgtggaccagaaatgcaagtcctcggcccagatagacccgactcccgtgatcgtcacctccaacaccaacatgtgcgccgtgattgacgggaactcaacgaccttcgagcaccagcagccgttgcaagaccggatgttcaaatttgaactcacccgccgtctggatcatgactttgggaaggtcaccaagcaggaagtcaaagactttttccggtgggcaaaggatcacgtggttgaggtggaacatgaattttacgtcaaaaagggtggagccaaaaaaagacccgcccccagtgatgcagatataagtgagcccaaacgggcgcgcgagtcagttgcgcagccatcgacgtcagacgcggaagcttcgatcaactacgcggacaggtaccaaaacaaatgttctcgtcacgtgggcatgaatctgatgctgtttccctgcagacaatgcgaaagaatgaatcagaattcaaatatctgcttcactcacggacagaaagactgtttagagtgctttcccgtgtcagaatctcaacccgtttctgtcgtcaaaaaggcgtatcagaaactgtgctatattcatcatatcatgggaaaggtaccagacgcttgcactgcttgcgacctggtcaatgtggatttggatgactgcatctctgaacaataaatgatttaaatcaggtatggctgccgatggttatcttccagattggctcgaggacactctctctgaaggaataagacagtggtggaagctcaaacctggcccaccaccgccaaagcccgcagagcggcataaggacgacagcaggggtcttgtgcttcctgggtacaagtacctcggacccttcaacggactcgacaaaggagagccggtcaacgaggcagacgccgcggccctcgagcacgacaaggcctacgaccggcagctcgacagcggagacaacccgtacctcaagtacaaccacgccgacgcggagtttcaggagcgccttaaagaagatacgtcttttgggggcaacctcggacgagcagtcttccaggcgaaaaagagggttcttgaacctctgggcctggttgaggaacctgttaagacggctccgggaaaaaagaggccggtagagcactctcctgcggagccagactcctcctcgggaaccggaaaggcgggccagcagcctgcgagaaagagattgaatttcggtcagactggagacgcagactccgtacctgacccccagcctctcggacagccaccagcagccccctctggtctgggaactaatacgatggctacaggcagtggcgcaccaatggcagacaataacgagggcgccgacggagtgggtaattcctcgggaaattggcattgcgattccacatggatgggcgacagagtcatcaccaccagcacccgcacctgggctctgcccacctacaacaaccatctgtacaagcaaatttccagccaatcaggagcatcgaacgacaaccactactttggctacagcaccccctgggggtattttgacttcaacagattccactgccacttttcgccacgtgactggcaaagactcatcaacaacaactggggattccggcccaagagactcagcttcaagctctttaacattcaagtcaaggaggtcacgcagaatgacggtacgacgacgattgccaataaccttaccagcacggttcaggtctttactgactcggagtaccagctcccgtacgtcctcggctcggcgcatcaaggatgcctcccgccgtttccagcggacgtcttcatggtcccacagtatggatacctcaccctgaacaacgggagtcaggcggtaggacgctcttccttttactgcctggagtactttccttctcagatgcttcgtactggaaacaactttaccttcagctacacctttgaagacgttcctttccacagcagctacgctcacagccaaagtctggaccgtctcatgaatcctctcatcgaccagtacctgtattacttgagcaaaacaaacgctccaagcggaaccaccacgatgtccaggcttcagttttctcaggccggagcaagtgacattcgggaccagtctagaaactggcttcctggaccctgttaccgccagcagcgagtatcaaagacagctgcggacaacaacagtgattactcgtggactggagctaccaagtaccacctcaatggaagagactctctggtgaacccgggcccagctatggccagccacaaggacgatgaagaaaaatattttcctcagagcggggttctcatcttcgggaaacaaggctcaaataaaactaatgtggacattgaaaaggtcatgattacagacgaagaggaaatcaggaccaccaatcccgtggctacggagcagtacggtgctgtatctaccaaccttcaaagcggcaacacacaagcagctacctcagatgtcaacacacaaggcgttcttcctggcatggtctggcaggacagagacgtgtacctgcaggggcccatctgggcaaagattccccacacggatggacactttcacccttctcctcttatgggaggatttggattgaagcaccctcccccacagattctcatcaagaataccccggtacctgcgaatccttctaccaccttcagtgcggcaaagtttgcttctttcatcacacagtactccacagggcaggtcagcgtggagatcgagtgggagctgcagaaagagaacagcaaacgctggaaccccgagattcagtatacctccaactacaacaagtctgttaatgtggactttactgtggacactaatggcgtgtattcagagcctcgccccattggcacaagatacctgactcgtaatctgtaa

SEQ ID NO: 415 - DNA, 4090 bp, Artificial Sequence
  Synthetic Polynucleotide
atgccggggttctacgagattgtgattaaggtccccagcgaccttgacgagcatttgcccggcatttctgacagctttgtgaactgggtggccgagaaggaatgggagttgccgccagattctgacatggatctgaatctgattgagcaggcacccctgaccgtggccgagaagctgcagcgcgactttctgacggagtggcgccgtgtgagtaaggccccggaggcccttttctttgtgcaatttgagaagggagagagctacttccatatgcacgtgcttgtggagaccaccggggtgaaatccatggttttgggacgcttcctgagtcagattcgcgaaaaactgattcagagaatttaccgcgggatcgagccgactttgccaaattggttcgcggttacaaagactcgaaatggcgccggaggcgggaacaaggtggtggatgagtgctacatccccaattacctgctccccaaaacccagcctgagctccagtgggcgtggactaatatggaacagtatttaagcgcctgtttgaatctcgcggagcgtaaacggttggtggcgcagcatctgacgcacgtgtcgcagacgcaggagcagaacaaagagaatcagaatcccaattctgacgcgccggtgattagatcaaaaacatcagccaggtacatggagctggtcgggtggctcgtggataaggggattacctcggagaagcagtggatccaggaggaccaggcctcatacatttccttcaatgcggcctccaactcgcggtcccagatcaaggctgctctggacaatgcggggaagatcatgagcctgactaaaaccgcccccgactacctggtgggccagcagcccgtggaggacatttccagcaatcggatttataaaatcttggaactgaacgggtacgatccccaatatgcggcttccgtcttcctgggatgggctacgaaaaagttcggcaagaggaacaccatctggctgtttgggcctgcgactaccgggaagacaaacatcgcggaggctatagcccacacggtacccttctacgggtgcgtaaactggaccaatgagaactttccgttcaatgactgcgtcgacaagatggtgatctggtgggaggaggggaagatgaccgccaaggtcgtggaatcggccaaagccattctcggtggaagcaaggtacgcgtggaccagaaatgcaagtcctcggcccagatagacccgactcccgtgatcgtcacctccaacaccaatatgtgcgccgtgattgacgggaactcaacgaccttcgaacaccagcagccgttgcaagaccggatgttcaaatttgaactcacccgccgtctggatcatgactttgggaaggtcaccaagcaggaagtcaaagactttttccggtgggcccaagaccacgtggtagaggtggagcatgaattctacgtcaaaaagggtggagctaagaaaaggcccgcccccagtgacgcagatataagtgagcccaaacgggcgcgcgagtcagttgcgcagccatcgacgtcagacgcggaagcttcgatcaactacgcggacaggtaccaaaacaaatgttctcgtcacgtgggcatgaatctgatgctgtttccctgcagacaatgcgagagaatgaatcagaattcaaatatctgcttcactcacggacagaaagactgtttagagtgctttcccgtgtcagaatctcaacccgtttctgtcgtcaaaaaggcgtatcagaaactgtgctatattcatcatatcatgggaaaggtaccagacgcttgcactgcttgcgacctggtaaatgtggatttggatgactgcatctctgaacaataaatgatttaaatcaggtatggctgccgatggttatcttccagattggctcgaggacactctctctgaaggaataagacagtggtggaagctcaaacctggcccaccaccgccaaagcccgcagagcggcataaggacgacagcaggggtcttgtgcttcctgggtacaagtacctcggacccttcaacggactcgacaaaggagagccggtcaacgaggcagacgccgcggccctcgagcacgacaaggcctacgaccggcagctcgacagcggagacaacccgtacctcaagtacaaccacgccgacgcggagtttcaggagcgccttaaagaagatacgtcttttgggggcaacctcgcaagagcagtattccaggcgaaaaagagggttcttgaacctctgggcctggttgaggagcctgttaagacggctccgggaaaaaagaggccggtagagcactctcctgcggagccagattcctcctccggaactggaaagtcgggccaacagcctgcaagaaagagattgaattttggtcagactggagacgcagactccgtacctgacccccagcctctcggacagccaccagcagccccctctggtctgggaactaatacgatggcttcaggcagtggcgcaccaatggcagacaataacgagggcgccgacggagtgggtaattcctcgggaaattggcattgcgattccacatggatgggcgacagagtcatcaccaccagcacccgcacctgggctctgcccacctacaacaaccatctgtacaagcaaatttccagccagtctggagccagcaacgacaaccactactttggctacagcaccccttgggggtattttgacttcaacagattccactgccacttctccccacgtgactggcaaagactcatcaacaacaattggggattccggcccaaaagactcaacttcaagctctttaacattcaagtcaaggaggtcacgcagaatgacggtacgacgacgattgccaataaccttaccagcacggttcaggtgtttactgactcggagtaccagctcccgtacgtcctcggctcggcgcatcaaggatgcctcccgccgttcccagcagacgtcttcatggtgccacagtatggatacctcaccctgaacaacgggagtcaggcggtaggacgctcttcattttactgcctggagtactttccttctcagatgctgcgtaccggaaacaactttaccttcagctacacctttgaggacgttccttttcacagcagctacgctcacagccagagtttggaccgtctcatgaatcctctcatcgaccagtacctgtattacttgagcagaacaaacactccaagcggaaccactacgcagtccaggcttcagttttctcaagccggagcgagtgacattcgggaccagtctaggaactggcttcctggaccctgttaccgccagcagcgagtatcaaagacagctgcggacaacaacaacagtgattactcgtggactggagctaccaagtatcacctcaatggaagagactctctggtgaatccgggcacagccatggccagccacaaggacgatgaagaaaagtattttcctcagagcggggttctcatcttcggaaaacaagactcgggaaaaactaatgtggacattgaaaaggtcatgattacagacgaagaggaaatcaggaccaccaatcccgtggctacggagcagtatggttctgtatctaccaatctccagagcggcaacacacaagcagctacctcagatgtcaacacacaaggcgttcttccaggcatggtctggcaggacagagacgtgtacctgcagggacccatctgggcaaagattccacacacggacggacattttcacccttctcctcttatgggaggatttggactgaagcaccctcccccgcagattctcatcaagaataccccggtacctgcgaatccttctaccaccttcagcgcggcaaagtttgcttccttcatcacacagtactccacggggcaggtcagcgtggagatcgagtgggagctgcagaaagagaacagcaaacgctggaaccccgagatccagtatacctccaactacaacaagtctgttaatgtggactttactgtggacactaatggcgtgtattcagagcctcgccccattggcacaagatacctgactcgtaatctgtaa

SEQ ID NO: 416 - DNA, 4090 bp, Artificial Sequence
  Synthetic Polynucleotide
atgccggggttctacgagattgtgattaaggtccccagcgaccttgacgagcatttgcccggcatttctgacagctttgtgaactgggtggccgagaaggaatgggagttgccgccagattctgacatggatctgaatctgattgagcaggcacccctgaccgtggccgagaagctgcagcgcgactttctgacggagtggcgccgtgtgagtaaggccccggaggcccttttctttgtgcaatttgagaagggagagagctacttccatatgcacgtgcttgtggagaccaccggggtgaaatccatggttttgggacgcttcctgagtcagattcgcgaaaaactgattcagagaatttaccgcgggatcgagccgactttgccaaattggttcgcggttacaaagactcgaaatggcgccggaggcgggaacaaggtggtggatgagtgctacatccccaattacctgctccccaaaacccagcctgagctccagtgggcgtggactaatatggaacagtatttaagcgcctgtttgaatctcgcggagcgtaaacggttggtggcgcagcatctgacgcacgtgtcgcagacgcaggagcagaacaaagagaatcagaatcccaattctgacgcgccggtgattagatcaaaaacatcagccaggtacatggagctggtcgggtggctcgtggataaggggattacctcggagaagcagtggatccaggaggaccaggcctcatacatttccttcaatgcggcctccaactcgcggtcccagatcaaggctgctctggacaatgcggggaagatcatgagcctgactaaaaccgcccccgactacctggtgggccagcagcccgtggaggacatttccagcaatcggatttataaaatcttggaactgaacgggtacgatccccaatatgcggcttccgtcttcctgggatgggctacgaaaaagttcggcaagaggaacaccatctggctgtttgggcctgcgactaccgggaagacaaacatcgcggaggctatagcccacacggtacccttctacgggtgcgtaaactggaccaatgagaactttccgttcaatgactgcgtcgacaagatggtgatctggtgggaggaggggaagatgaccgccaaggtcgtggaatcggccaaagccattctcggtggaagcaaggtacgcgtggaccagaaatgcaagtcctcggcccagatagacccgactcccgtgatcgtcacctccaacaccaatatgtgcgccgtgattgacgggaactcaacgaccttcgaacaccagcagccgttgcaagaccggatgttcaaatttgaactcacccgccgtctggatcatgactttgggaaggtcaccaagcaggaagccaaagactttttccggtgggcccaagaccacgtggtagaggtggagcatgaattctacgtcaaaaagggtggagctaagaaaaggcccgcccccagtgacgcagatataagtgagcccaaacgggcgcgcgagtcagttgcgcagccatcgacgtcagacgcggaagcttcgatcaactacgcggacaggtaccaaaacaaatgttctcgtcacgtgggcatgaatctgatgctgtttccctgcagacaatgcgagagaatgaatcagaattcaaatatctgcttcactcacggacagaaagactgtttagagtgctttcccgtgtcagaatctcaacccgtttctgtcgtcaaaaaggcgtatcagaaactgtgctatattcatcatatcatgggaaaggtaccagacgcttgcactgcttgcgacctggtaaatgtggatttggatgactgcatctctgaacaataaatgatttaaatcaggtatggctgccgatggttatcttccagattggctcgaggacactctctctgaaggaataagacagtggtggaagctcaaacctggcccaccaccgccaaagcccgcagagcggcataaggacgacagcaggggtcttgtgcttcctgggtacaagtacctcggacccttcaacggactcgacaaaggagagccggtcaacgaggcagacgccgcggccctcgagcacgacaaggcctacgaccggcagctcgacagcggagacaacccgtacctcaagtacaaccacgccgacgcggagtttcaggagcgccttaaagaagatacgtcttttgggggcaacctcgcaagagcagtattccaggcgaaaaagagggttcttgaacctctgggcctggttgaggagcctgttaagacggctccgggaaaaaagaggccggtagagcactctcctgcggagccagattcctcctccggaactggaaagtcgggccaacagcctgcaagaaagagattgaattttggtcagactggagacgcagactccgtacctgacccccagcctctcggacagccaccagcagccccctctggtctgggaactaatacgatggcttcaggcagtggcgcaccaatggcagacaataacgagggcgccgacggagtgggtaattcctcgggaaattggcattgcgattccacatggatgggcgacagagtcatcaccaccagcacccgcacctgggctctgcccacctacaacaaccatctgtacaagcaaatttccagccagtctggagccagcaacgacaaccactactttggctacagcaccccttgggggtattttgacttcaacagattccactgccacttctccccacgtgactggcaaagactcatcaacaacaattggggattccggcccaaaagactcaacttcaagctctttaacattcaagtcaaggaggtcacgcagaatgacggtacgacgacgattgccaataaccttaccagcacggttcaggtgtttactgactcggagtaccagctcccgtacgtcctcggctcggcgcatcaaggatgcctcccgccgttcccagcagacgtcttcatggtgccacagtatggatacctcaccctgaacaacgggagtcaggcggtaggacgctcttcattttactgcctggagtactttccttctcagatgctgcgtaccggaaacaactttaccttcagctacacctttgaggacgttccttttcacagcagctacgctcacagccagagtttggaccgtctcatgaatcctctcatcgaccagtacctgtattacttgagcagaacaaacactccaagcggaaccactacgcagtccaggcttcagttttctcaagccggagcgagtgacattcgggaccagtctaggaactggcttcctggaccctgttaccgccagcagcgagtatcaaagacagctgcggacaacaacaacagtgattactcgtggactggagctaccaagtatcacctcaatggaagagactctctggtgaatccgggcacagccatggccagccacaaggacgatgaagaaaagtattttcctcagagcggggttctcatcttcggaaaacaagactcgggaaaaactaatgtggacattgaaaaggtcatgattacagacgaagaggaaatcaggaccaccaatcccgtggctacggagcagtatggttctgtatctaccaatctccagagcggcaacacacaagcagctacctcagatgtcaacacacaaggcgttcttccaggcatggtctggcaggacagagacgtgtacctgcagggacccatctgggcaaagattccacacacggacggacattttcacccttctcctcttatgggaggatttggactgaagcaccctcccccgcagattctcatcaagaataccccggtacctgcgaatccttctaccaccttcagcgcggcaaagtttgcttccttcatcacacagtactccacggggcaggtcagcgtggagatcgagtgggagctgcagaaagagaacagcaaacgctggaaccccgagatccagtatacctccaactacaacaagtctgttaatgtggactttactgtggacactaatggcgtgtattcagagcctcgccccattggcacaagatacctgactcgtaatctgtaa

SEQ ID NO: 417 - DNA, 4090 bp, Artificial Sequence
  Synthetic Polynucleotide
atgccggggttctacgagattgtgattacggtccccagcgaccttgacgagcatttgcccggcatttctgacagctttgtgaactgggtggccgagaaggaatgggagttgccgccagattctgacatggatctgaatctgattgagcaggcacccctgaccgtggccgagaagctgcagcgcgactttctgacggagtggcgccgtgtgagtaaggccccggaggcccttttctttgtgcaatttgagaagggagagagctacttccatatgcacgtgcttgtggagaccaccggggtgaaatccatggttttgggacgcttcctgagtcagattcgcgaaaaactgattcagagaatttaccgcgggatcgagccgactttgccaaattggttcgcggttacaaagactcgaaatggcgccggaggcgggaacaaagtggtggatgagtgctacatccccaattacctgctccccaaaacccagcctgagctccagtgggcgtggactaatatggaacagtatttaagcgcctgtttgaatctcgcggagcgtaaacggttggtggcgcagcatctgacgcacgtgtcgcagacgcaggagcagaacaaagagaatcagaatcccaattctgacgcgccggtgattagatcaaaaacatcagccaggtacatggagctggtcgggtggctcgtggataaggggattacctcggagaagcagtggatccaggaggaccaggcctcatacatttccttcaatgcggcctccaacccgcggtcccagatcaaggctgctctggacaatgcggggaagatcatgagcctgactaaaaccgcccccgactacctggtgggccagcagcccgtggaggacatttccagcaatcggatttataaaatcttggaactgaacgggtacgatccccaatatgcggcttccgtcttcctgggatgggctacgaaaaagttcggcaagaggaacaccatctggctgtttgggcctgcgactaccgggaagacaaacatcgcggaggctatagcccacacggtacccttctacgggtgcgtacactggaccaatgagaactttccgttcaatgactgcgtcgacaagatggtgatctggtgggaggaggggacgatgaccgccaaggtcgtggaatcggccaaagccattctcggtggaagcaaggtacgcgtggaccagaaatgcaagtcctcggcccagatagacccgactcccgtgatcgtcacctccaacaccaatatgtgcgccgtgattgacgggaactcaacgaccttcgaacaccagcagccgttgcaagaccggatgttcaaatttgaactcacccgccgtctggatcatgactttgggaaggtcaccaagcaggacgtcaaagactttttccggtgggcccaagaccacgtggtagaggtggagcatgaattctacgtcaaaaagggtggagctaagaaaaggcccgcccccagtgacgcagatataagtgagcccaaacgggcgcgcgagtcagttgcgcagccatcgacgtcagacgcggaagcttcgatcaactacgcggacaggtaccaaaacaaatgttctcgtcacgtgggcatgaatctgatgctgtttccctgcagacaatgcgagagaatgaatcagaattcaaatatctgcttcactcacggacagaaagactgtttagagtgctttcccgtgtcagaatctcaacccgtttctgtcgtcaaaaaggcgtatcagaaactgtgctatattcatcatatcatgggaaaggtaccagacgcttgcactgcttgcgacctggtaaatgtggatttggatgactgcatctctgaacaataaatgatttaaatcaggtatggctgccgatggttatcttccagattggctcgaggacactctctctgaaggaataagacagtggtggaagctcaaacctggcccaccaccgccaaagcccgcagagcggcataaggacgacagcaggggtcttgtgcttcctgggtacaagtacctcggacccttcaacggactcgacaaaggagagccggtcaacgaggcagacgccgcggccctcgagcacgacaaggcctacgaccggcagctcgacagcggagacaacccgtacctcaagtacaaccacgccgacgcggagtttcaggagcgccttaaagaagatacgtcttttgggggcaacctcgcaagagcagtattccaggcgaaaaagagggttcttgaacctctgggcctggttgaggagcctgttaagacggctccgggaaaaaagaggccggtagagcactctcctgcggagccagattcctcctccggaactggaaagtcgggccaacagcctgcaagaaagagattgaattttggtcagactggagacgcagactccgtacctgacccccagcctctcggacagccaccagcagccccctctggtctgggaactaatacgatggcttcaggcagtggcgcaccaatggcagacaataacgagggcgccgacggagtgggtaattcctcgggaaattggcattgcgattccacatggatgggcgacagagtcatcaccaccagcacccgcacctgggctctgcccacctacaacaaccatctgtacaagcaaatttccagccagtctggagccagcaacgacaaccactactttggctacagcaccccttgggggtattttgacttcaacagattccactgccacttctccccacgtgactggcaaagactcatcaacaacaattggggattccggcccaaaagactcaacttcaagctctttaacattcaagtcaaggaggtcacgcagaatgacggtacgacgacgattgccaataaccttaccagcacggttcaggtgtttactgactcggagtaccagctcccgtacgtcctcggctcggcgcatcaaggatgcctcccgccgttcccagcagacgtcttcatggtgccacagtatggatacctcaccctgaacaacgggagtcaggcggtaggacgctcttcattttactgcctggagtactttccttctcagatgctgcgtaccggaaacaactttaccttcagctacacctttgaggacgttccttttcacagcagctacgctcacagccagagtttggaccgtctcatgaatcctctcatcgaccagtacctgtattacttgagcagaacaaacactccaagcggaaccactacgcagtccaggcttcagttttctcaagccggagcgagtgacattcgggaccagtctaggaactggcttcctggaccctgttaccgccagcagcgagtatcaaagacagctgcggacaacaacaacagtgattactcgtggactggagctaccaagtatcacctcaatggaagagactctctggtgaatccgggcacagccatggccagccacaaggacgatgaagaaaagtattttcctcagagcggggttctcatcttcggaaaacaagactcgggaaaaactaatgtggacattgaaaaggtcatgattacagacgaagaggaaatcaggaccaccaatcccgtggctacggagcagtatggttctgtatctaccaatctccagagcggcaacacacaagcagctacctcagatgtcaacacacaaggcgttcttccaggcatggtctggcaggacagagacgtgtacctgcagggacccatctgggcaaagattccacacacggacggacattttcacccttctcctcttatgggaggatttggactgaagcaccctcccccgcagattctcatcaagaataccccggtacctgcgaatccttctaccaccttcagcgcggcaaagtttgcttccttcatcacacagtactccacggggcaggtcagcgtggagatcgagtgggagctgcagaaagagaacagcaaacgctggaaccccgagatccagtatacctccaactacaacaagtctgttaatgtggactttactgtggacactaatggcgtgtattcagagcctcgccccattggcacaagatacctgactcgtaatctgtaa

SEQ ID NO: 418 - DNA, 4090 bp, Artificial Sequence
  Synthetic Polynucleotide
atgccggggttctacgagattgtgattaaggtccccagcgaccttgacgagcatttgcccggcatttctgacagctttgtgaactgggtggccgagaaggaatgggagttgccgccagattctgacatggatctgaatctgattgagcaggcacccctgaccgtggccgagaagctgcagcgcgactttctgacggagtggcgccgtgtgagtaaggccccggaggcccttttctttgtgcaatttgagaagggagagagctacttccatatgcacgtgcttgtggagaccaccggggtgaaatccatggttttgggacgcttcctgagtcagattcgcgaaaaactgattcagagaatttaccgcgggatcgagccgactttgccaaattggttcgcggttacaaagactcgaaatggcgccggaggcgggaacaaggtggtggatgagtgctacatccccaattacctgctccccaaaacccagcctgagctccagtgggcgtggactaatatggaacagtatttaagcgcctgtttgaatctcgcggagcgtaaacggttggtggcgcagcatctgacgcacgtgtcgcagacgcaggagcagaacaaagagaatcagaatcccaattctgacgcgccggtgattagatcaaaaacatcagccaggtacatggagctggtcgggtggctcgtggataaggggattacctcggagaagcagtggatccaggaggaccaggcctcatacatttccttcaatgcggcctccaactcgcggtcccagatcaaggctgctctggacaatgcggggaagatcatgagcctgactaaaaccgcccccgactacctggtgggccagcagcccgtggaggacatttccagcaatcggatttataaaatcttggaactgaacgggtacgatccccaatatgcggcttccgtcttcctgggatgggctacgaaaaagttcggcaagaggaacaccatctggctgtttgggcctgcgactaccgggaagacaaacatcgcggaggctatagcccacacggtacccttctacgggtgcgtaaactggaccaatgagaactttccgttcaatgactgcgtcgacaagatggtgatctggtgggaggaggggaagatgaccgccaaggtcgtggaatcggccaaagccattctcggtggaagcaaggtacgcgtggaccagaaatgcaagtcctcggcccagatagacccgactcccgtgatcgtcacctccaacaccaatatgtgcgccgtgattgacgggaactcaacgaccttcgaacaccagcagccgttgcaagaccggatgttcaaatttgaactcacccgccgtctggatcatgactttgggaaggtcaccaagcaggaagtcaaagactttttccggtgggcccaagaccacgtggtagaggtggagcatgaattctacgtcaaaaagggtggagctaagaaaaggcccgcccccagtgacgcagatataagtgagcccaaacgggcgcgcgagtcagttgcgcagccatcgacgtcagacgcggaagcttcgatcaactacgcggacaggtaccaaaacaaatgttctcgtcacgtgggcatgaatctgatgctgtttccctgcagacaatgcgagagaatgaatcagaattcaaatatctgcttcactcacggacagaaagactgtttagagtgctttcccgtgtcagaatctcaacccgtttctgtcgtcaaaaaggcgtatcagaaactgtgctatattcatcatatcatgggaaaggtaccagacgcttgcactgcttgcgacctggtaaatgtggatttggatgactgcatctctgaacaataaatgatttaaatcaggtatggctgccgatggttatcttccagattggctcgaggacactctctctgaaggaataagacagtggtggaagctcaaacctggcccaccaccgccaaagcccgcagagcggcataaggacgacagcaggggtcttgtgcttcctgggtacaagtacctcggacccttcaacggactcgacaaaggagagccggtcaacgaggcagacgccgcggccctcgagcacgacaaggcctacgaccggcagctcgacagcggagacaacccgtacctcaagtacaaccacgccgacgcggagtttcaggagcgccttaaagaagatacgtcttttgggggcaacctcgcaagagcagtattccaggcgaaaaagagggttcttgaacctctgggcctggttgaggagcctgttaagacggctccgggaaaaaagaggccggtagagcactctcctgcggagccagattcctcctccggaactggaaagtcgggccaacagcctgcaagaaagagattgaattttggtcagactggagacgcagactccgtacctgacccccagcctctcggacagccaccagcagccccctctggtctgggaactaatacgatggcttcaggcagtggcgcaccaatggcagacaataacgagggcgccgacggagtgggtaattcctcgggaaattggcattgcgattccacatggatgggcgacagagtcatcaccaccagcacccgcacctgggctctgcccacctacaacaaccatctgtacaagcaaatttccagccagtctggagccagcaacgacaaccactactttggctacagcaccccttgggggtattttgacttcaacagattccactgccacttctccccacgtgactggcaaagactcatcaacaacaattggggattccggcccaaaagactcaacttcaagctctttaacattcaagtcaaggaggtcacgcagaatgacggtacgacgacgattgccaataaccttaccagcacggttcaggtgtttactgactcggagtaccagctcccgtacgtcctcggctcggcgcatcaaggatgcctcccgccgttcccagcagacgtcttcatggtgccacagtatggatacctcaccctgaacaacgggagtcaggcggtaggacgctcttcattttactgcctggagtactttccttctcagatgctgcgtaccggaaacaactttaccttcagctacacctttgaggacgttccttttcacagcagctacgctcacagccagagtttggaccgtctcatgaatcctctcatcgaccagtacctgtattacttgagcagaacaaacactccaagcggaaccactacgcagtccaggcttcagttttctcaagccggagcgagtgacattcgggaccagtctaggaactggcttcctggaccctgttaccgccagcagcgagtatcaaagacagctgcggacaacaacaacagtgattactcgtggactggagctaccaagtatcacctcaatggaagagactctctggtgaatccgggcacagccatggccagccacaaggacgatgaagaaaagtattttcctcagagcggggttctcatcttccggaaacaagactcgggaaaaactaatgtggacattgaaaaggtcatgattacagacgaagaggaaatcaggaccaccaatcccgtggctacggagcagtatggttctgtatctaccaatctccagagcggcaacacacaagcagctacctcagatgtcaacacacaaggcgttcttccaggcatggtctggcaggacagagacgtgtacctgcagggacccatctgggcaaagattccacacacggacggacattttcacccttctcctcttatgggaggattgggacagaagcaccctcccccgcagagtctcatcaagaataccccggtacctgcgaatccttctaccaccttcagcgcggcaaagtttgcttccttcatcacacagtactccacggggcaggtcagcgtggagatcgagtgggagctgcagaaagagaacagcaaacgctggaaccccgagatccagtatacctccaactacaacaagtctgttaatgtggactttactgtggacactaatggcgtgtattcagagcctcgccccattggcacaagatacctgactcgtaatctgtaa

SEQ ID NO: 419 - DNA, 4090 bp, Artificial Sequence
  Synthetic Polynucleotide
atgccggggttctacgagattgtgattaaggtccccagcgaccttgacgagcatttgcccggcatttctgacagctttgtgaactgggtggccgagaaggaatgggagttgccgccagattctgacatggatctgaatctgattgagcaggcacccctgaccgtggccgagaagctgcagcgcgactttctgacggagtggcgccgtgtgagtaaggccccggaggcccttttctttgtgcaatttgagaagggagagagctacttccatatgcacgtgcttgtggagaccaccggggtgaaatccatggttttgggacgcttcctgagtcagattcgcgaaaaactgattcagagaatttaccgcgggatcgagccgactttgccaaattggttcgcggttacaaagactcgaaatggcgccggaggcgggaacaaggtggtggatgagtgctacatccccaattacctgctccccaaaacccagcctgagctccagtgggcgtggactaatatggaacagtatttaagcgcctgtttgaatctcgcggagcgtaaacggttggtggcgcagcatctgacgcacgtgtcgcagacgcaggagcagaacaaagagaatcagaatcccaattctgacgcgccggtgattagatcaaaaacatcagccaggtacatggagctggtcgggtggctcgtggataaggggattacctcggagaagcagtggatccaggaggaccaggcctcatacatttccttcaatgcggcctccaactcgcggtcccagatcaaggctgctctggacaatgcggggaagatcatgagcctgactaaaaccgcccccgactacctggtgggccagcagcccgtggaggacatttccagcaatcggatttataaaatcttggaactgaacgggtacgatccccaatatgcggcttccgtcttcctgggatgggctacgaaaaagttcggcaagaggaacaccatctggctgtttgggcctgcgactaccgggaagacaaacatcgcggaggctatagcccacacggtacccttctacgggtgcgtaaactggaccaatgagaactttccgttcaatgactgcgtcgacaagatggtgatctggtgggaggaggggaagatgaccgccaaggtcgtggaatcggccaaagccattctcggtggaagcaaggtacgcgtggaccagaaatgcaagtcctcggcccagatagacccgactcccgtgatcgtcacctccaacaccaatatgtgcgccgtgattgacgggaactcaacgaccttcgaacaccagcagccgttgcaagaccggatgttcaaatttgaactcacccgccgtctggatcatgactttgggaaggtcaccaagcaggaagtcaaagactttttccggtgggcccaagaccacgtggtagaggtggagcatgaattctacgtcaaaaagggtggagctaagaaaaggcccgcccccagtgacgcagatataagtgagcccaaacgggcgcgcgagtcagttgcgcagccatcgacgtcagacgcggaagcttcgatcaactacgcggacaggtaccaaaacaaatgttctcgtcacgtgggcatgaatctgatgctgtttccctgcagacaatgcgagagaatgaatcagaattcaaatatctgcttcactcacggacagaaagactgtttagagtgctttcccgtgtcagaatctcaacccgtttctgtcgtcaaaaaggcgtatcagaaactgtgctatattcatcatatcatgggaaaggtaccagacgcttgcactgcttgcgacctggtaaatgtggatttggatgactgcatctctgaacaataaatgatttaaatcaggtatggctgccgatggttatcttccagattggctcgaggacactctctctgaaggaataagacagtggtggaagctcaaacctggcccaccaccgccaaagcccgcagagcggcataaggacgacagcaggggtcttgtgcttcctgggtacaagtacctcggacccttcaacggactcgacaaaggagagccggtcaacgaggcagacgccgcggccctcgagcacgacaaggcctacgaccggcagctcgacagcggagacaacccgtacctcaagtacaaccacgccgacgcggagtttcaggagcgccttaaagaagatacgtcttttgggggcaacctcgcaagagcagtattccaggcgaaaaagagggttcttgaacctctgggcctggttgaggagcctgttaagacggctccgggaaaaaagaggccggtagagcactctcctgcggagccagattcctcctccggaactggaaagtcgggccaacagcctgcaagaaagagattgaattttggtcagactggagacgcagactccgtacctgacccccagcctctcggacagccaccagcagccccctctggtctgggaactaatacgatggcttcaggcagtggcgcaccaatggcagacaataacgagggcgccgacggagtgggtaattcctcgggaaattggcattgcgattccacatggatgggcgacagagtcatcaccaccagcacccgcacctgggctctgcccacctacaacaaccatctgtacaagcaaatttccagccagtctggagccagcaacgacaaccactactttggctacagcaccccttgggggtattttgacttcaacagattccactgccacttctccccacgtgactggcaaagactcatcaacaacaattggggattccggcccaaaagactcaacttcaagctctttaacattcaagtcaaggaggtcacgcagaatgacggtacgacgacgattgccaataaccttaccagcacggttcaggtgtttactgactcggagtaccagctcccgtacgtcctcggctcggcgcatcaaggatgcctcccgccgttcccagcagacgtcttcatggtgccacagtatggatacctcaccctgaacaacgggagtcaggcggtaggacgctcttcattttactgcctggagtactttccttctcagatgctgcgtaccggaaacaactttaccttcagctacacctttgaggacgttccttttcacagcagctacgctcacagccagagtttggaccgtctcatgaatcctctcatcgaccagtacctgtattacttgagcagaacaaacactccaagcggaaccactacgcagtccaggcttcagttttctcaagccggagcgagtgacattcgggaccagtctaggaactggcttcctggaccctgttaccgccagcagcgagtatcaaagacagctgcggacaacaacaacagtgattactcgtggactggagctaccaagtatcacctcaatggaagagactctctggtgaatccgggcacagccatggccagccacaaggacgatgaagaaaagtattttcctcagagcggggttctcatcttcggaaaacaagactcgggaaaaactaatgtggacattgaaaaggtcatgattacagacgaagaggaaatcaggaccaccaatcccgtggctacggagcagtatggttctgtatctaccaatctccagagcggcaacacacaagcagctacctcagatgtcaacacacaaggcgttcttccaggcatggtctggcaggacagagacgtgtacctgcagggacccatctgggcaaagattccacacacggacggacattttcacccttctcctcttatgggaggattgggacagaagcaccctcccccgcagattctcatcaagaataccccggtacctgcgaatccttctaccaccttcagcgcggcaaagtttgcttccttcatcacacagtactccacggggcaggtcagcgtggagatcgagtgggagctgcagaaagagaacagcaaacgctggaaccccgagatccagtatacctccaactacaacaagtctgttaatgtggactttactgtggacactaatggcgtgtattcagagcctcgccccattggcacaagatacctgactcgtaatctgtaa

SEQ ID NO: 420 - DNA, 4090 bp, Artificial Sequence
  Synthetic Polynucleotide
atgccggggttctacgagattgtgattaaggtccccagcgaccttgacgagcatttgcccggcatttctgacagctttgtgaactgggtggccgagaaggaatgggagttgccgccagattctgacatggatctgaatctgattgagcaggcacccctgaccgtggccgagaagctgcagcgcgactttctgacggagtggcgccgtgtgagtaaggccccggaggcccttttctttgtgcaatttgagaagggagagagctacttccatatgcacgtgcttgtggagaccaccggggtgaaatccatggttttgggacgcttcctgagtcagattcgcgaaaaactgattcagagaatttaccgcgggatcgagccgactttgccaaattggttcgcggttacaaagactcgaaatggcgccggaggcgggaacaaggtggtggatgagtgctacatccccaattacctgctccccaaaacccagcctgagctccagtgggcgtggactaatatggaacagtatttaagcgcctgtttgaatctcgcggagcgtaaacggttggtggcgcagcatctgacgcacgtgtcgcagacgcaggagcagaacaaagagaatcagaatcccaattctgacgcgccggtgattagatcaaaaacatcagccaggtacatggagctggtcgggtggctcgtggataaggggattacctcggagaagcagtggatccaggaggaccaggcctcatacatttccttcaatgcggcctccaactcgcggtcccagatcaaggctgctctggacaatgcggggaagatcatgagcctgactaaaaccgcccccgactacctggtgggccagcagcccgtggaggacatttccagcaatcggatttataaaatcttggaactgaacgggtacgatccccaatatgcggcttccgtcttcctgggatgggctacgaaaaagttcggcaagaggaacaccatctggctgtttgggcctgcgactaccgggaagacaaacatcgcggaggctatagcccacacggtacccttctacgggtgcgtaaactggaccaatgagaactttccgttcaatgactgcgtcgacaagatggtgatctggtgggaggaggggaagatgaccgccaaggtcgtggaatcggccaaagccattctcggtggaagcaaggtacgcgtggaccagaaatgcaagtcctcggcccagatagacccgactcccgtgatcgtcacctccaacaccaatatgtgcgccgtgattgacgggaactcaacgaccttcgaacaccagcagccgttgcaagaccggatgttcaaatttgaactcacccgccgtctggatcatgactttgggaaggtcaccaagcaggaagtcaaagactttttccggtgggcccaagaccacgtggtagaggtggagcatgaattctacgtcaaaaagggtggagctaagaaaaggcccgcccccagtgacgcagatataagtgagcccaaacgggcgcgcgagtcagttgcgcagccatcgacgtcagacgcggaagcttcgatcaactacgcggacaggtaccaaaacaaatgttctcgtcacgtgggcatgaatctgatgctgtttccctgcagacaatgcgagagaatgaatcagaattcaaatatctgcttcactcacggacagaaagactgtttagagtgctttcccgtgtcagaatctcaacccgtttctgtcgtcaaaaaggcgtatcagaaactgtgctatattcatcatatcatgggaaaggtaccagacgcttgcactgcttgcgacctggtaaatgtggatttggatgactgcatctctgaacaataaatgatttaaatcaggtatggctgccgatggttatcttccagattggctcgaggacactctctctgaaggaataagacagtggtggaagctcaaacctggcccaccaccgccaaagcccgcagagcggcataaggacgacagcaggggtcttgtgcttcctgggtacaagtacctcggacccttcaacggactcgacaaaggagagccggtcaacgaggcagacgccgcggccctcgagcacgacaaggcctacgaccggcagctcgacagcggagacaacccgtacctcaagtacaaccacgccgacgcggagtttcaggagcgccttaaagaagatacgtcttttgggggcaacctcgcaagagcagtattccaggcgaaaaagagggttcttgaacctctgggcctggttgaggagcctgttaagacggctccgggaaaaaagaggccggtagagcactctcctgcggagccagattcctcctccggaactggaaagtcgggccaacagcctgcaagaaagagattgaattttggtcagactggagacgcagactccgtacctgacccccagcctctcggacagccaccagcagccccctctggtctgggaactaatacgatggcttcaggcagtggcgcaccaatggcagacaataacgagggcgccgacggagtgggtaattcctcgggaaattggcattgcgattccacatggatgggcgacagagtcatcaccaccagcacccgcacctgggctctgcccacctacaacaaccatctgtacaagcaaatttccagccagtctggagccagcaacgacaaccactactttggctacagcaccccttgggggtattttgacttcaacagattccactgccacttctccccacgtgactggcaaagactcatcaacaacaattggggattccggcccaaaagactcaacttcaagctctttaacattcaagtcaaggaggtcacgcagaatgacggtacgacgacgattgccaataaccttaccagcacggttcaggtgtttactgactcggagtaccagctcccgtacgtcctcggctcggcgcatcaaggatgcctcccgccgttcccagcagacgtcttcatggtgccacggtatggatacctcaccctgaacaacgggagtcaggcggtaggacgctcttcattttactgcctggagtactttccttctcagatgctgcgtaccggaaacaactttaccttcagctacacctttgaggacgttccttttcacagcagctacgctcacagccagagtttggaccgtctcatgaatcctctcatcgaccagtacctgtattacttgagcagaacaaacactccaagcggaaccactacgcagtccaggcttcagttttctcaagccggagcgagtgacattcgggaccagtctaggaactggcttcctggaccctgttaccgccagcagcgagtatcaaagacagctgcggacaacaacaacagtgattactcgtggactggagctaccaagtatcacctcaatggaagagactctctggtgaatccgggcacagccatggccagccacaaggacgatgaagaaaagtattttcctcagagcggggttctcatcttccggaaacaagactcgggaaaaactaatgtggacattgaaaaggtcatgattacagacgaagaggaaatcaggaccaccaatcccgtggctacggagcagtatggttctgtatctaccaatctccagagcggcaacacacaagcagctacctcagatgtcaacacacaaggcgttcttccaggcatggtctggcaggacagagacgtgtacctgcagggacccatctgggcaaagattccacacacggacggacattttcacccttctcctcttatgggaggatttggactgaagcaccctcccccgcagattctcatcaagaataccccggtacctgcgaatccttctaccaccttcagcgcggcaaagtttgcttccttcatcacacagtactccacggggcaggtcagcgtggagatcgagtgggagctgcagaaagagaacagcaaacgctggaaccccgagatccagtatacctccaactacaacaagtctgttaatgtggactttactgtggacactaatggcgtgtattcagagcctcgccccattggcacaagatacctgactcgtaatctgtaa

SEQ ID NO: 421 - DNA, 4090 bp, Artificial Sequence
  Synthetic Polynucleotide
atgccggggttctacgagattgtgattaaggtccccagcgaccttgacgagcatttgcccggcatttctgacagctttgtgaactgggtggccgagaaggaatgggagttgccgccagattctgacatggatctgaatctgattgagcaggcacccctgaccgtggccgagaagctgcagcgcgactttctgacggagtggcgccgtgtgagtaaggccccggaggcccttttctttgtgcaatttgagaagggagagagctacttccatatgcacgtgcttgtggagaccaccggggtgaaatccatggttttgggacgcttcctgagtcagattcgcgaaaaactgattcagagaatttaccgcgggatcgagccgactttgccaaattggttcgcggttacaaagactcgaaatggcgccggaggcgggaacaaggtggtggatgagtgctacatccccaattacctgctccccaaaacccagcctgagctccagtgggcgtggactaatatggaacagtatttaagcgcctgtttgaatctcgcggagcgtaaacggttggtggcgcagcatctgacgcacgtgtcgcagacgcaggagcagaacaaagagaatcagaatcccaattctgacgcgccggtgattagatcaaaaacatcagccaggtacatggagctggtcgggtggctcgtggataaggggattacctcggagaagcagtggatccaggaggaccaggcctcatacatttccttcaatgcggcctccaactcgcggtcccagatcaaggctgctctggacaatgcggggaagatcatgagcctgactaaaaccgcccccgactacctggtgggccagcagcccgtggaggacatttccagcaatcggatttataaaatcttggaactgaacgggtacgatccccaatatgcggcttccgtcttcctgggatgggctacgaaaaagttcggcaagaggaacaccatctggctgtttgggcctgcgactaccgggaagacaaacatcgcggaggctatagcccacacggtacccttctacgggtgcgtaaactggaccaatgagaactttccgttcaatgactgcgtcgacaagatggtgatctggtgggaggaggggaagatgaccgccaaggtcgtggaatcggccaaagccattctcggtggaagcaaggtacgcgtggaccagaaatgcaagtcctcggcccagatagacccgactcccgtgatcgtcacctccaacaccaatatgtgcgccgtgattgacgggaactcaacgaccttcgaacaccagcagccgttgcaagaccggatgttcaaatttgaactcacccgccgtctggatcatgactttgggaaggtcaccaagcaggaagtcaaagactttttccggtgggcccaagaccacgtggtagaggtggagcatgaattctacgtcaaaaagggtggagctaagaaaaggcccgcccccagtgacgcagatataagtgagcccaaacgggcgcgcgagtcagttgcgcagccatcgacgtcagacgcggaagcttcgatcaactacgcggacaggtaccaaaacaaatgttctcgtcacgtgggcatgaatctgatgctgtttccctgcagacaatgcgagagaatgaatcagaattcaaatatctgcttcactcacggacagaaagactgtttagagtgctttcccgtgtcagaatctcaacccgtttctgtcgtcaaaaaggcgtatcagaaactgtgctatattcatcatatcatgggaaaggtaccagacgcttgcactgcttgcgacctggtaaatgtggatttggatgactgcatctctgaacaataaatgatttaaatcaggtatggctgccgatggttatcttccagattggctcgaggacactctctctgaaggaataagacagtggtggaagctcaaacctggcccaccaccgccaaagcccgcagagcggcataaggacgacagcaggggtcttgtgcttcctgggtacaagtacctcggacccttcaacggactcgacaaaggagagccggtcaacgaggcagacgccgcggccctcgagcacgacaaggcctacgaccggcagctcgacagcggagacaacccgtacctcaagtacaaccacgccgacgcggagtttcaggagcgccttaaagaagatacgtcttttgggggcaacctcgcaagagcagtattccaggcgaaaaagagggttcttgaacctctgggcctggttgaggagcctgttaagacggctccgggaaaaaagaggccggtagagcactctcctgcggagccagattcctcctccggaactggaaagtcgggccaacagcctgcaagaaagagattgaattttggtcagactggagacgcagactccgtacctgacccccagcctctcggacagccaccagcagccccctctggtctgggaactaatacgatggcttcaggcagtggcgcaccaatggcagacaataacgagggcgccgacggagtgggtaattcctcgggaaattggcattgcgattccacatggatgggcgacagagtcatcaccaccagcacccgcacctgggctctgcccacctacaacaaccatctgtacaagcaaatttccagccagtctggagccagcaacgacaaccactactttggctacagcaccccttgggggtattttgacttcaacagattccactgccacttctccccacgtgactggcaaagactcatcaacaacaattggggattccggcccaaaagactcaacttcaagctctttaacattcaagtcaaggaggtcacgcagaatgacggtacgacgacgattgccaataaccttaccagcacggttcaggtgtttactgactcggagtaccagctcccgtacgtcctcggctcggcgcatcaaggatgcctcccgccgttcccagcagacgtcttcatggtgccacagtatggatacctcaccctgaacaacgggagtcaggcggtaggacgctcttcattttactgcctggagtactttccttctcagatgctgcgtaccggaaacaactttaccttcagctacacctttgaggacgttccttttcacagcagctacgctcacagccagagtttggaccgtctcatgaatcctctcatcgaccagtacctgtattacttgagcagaacaaacactccaagcggaaccactacgcagtccaggcttcagttttctcaagccggagcgagtgacattcgggaccagtctaggaactggcttcctggaccctgttaccgccagcagcgagtatcaaagacagctgcggacaacaacaacagtgattactcgtggactggagctaccaagtatcacctcaatggaagagactctctggtgaatccgggcacagccatggccagccacaaggacgatgaagaaaagtattttcctcagagcggggttctcatcttccggaaacaagactcgggaaaaactaatgtggacattgaaaaggtcatgattacagacgaagaggaaatcaggaccaccaatcccgtggctacggagcagtatggttctgtatctaccaatctccagagcggcaacacacaagcagctacctcagatgtcaacacacaaggcgttcttccaggcatggtctggcaggacagagacgtgtacctgcagggacccatctgggcaaagattccacacacggacggacattttcacccttctcctcttatgggaggatttggactgaagcaccctcccccgcagattctcatcaagaataccccggtacctgcgaatccttctaccaccttcagcgcggcaaagtttgcttccttcatcacacagtactccacggggcaggtcagcgtggagatcgagtgggagctgcagaaagagaacagcaaacgctggaaccccgagatccagtatacctccaactacaacaagtctgttaatgtggactttactgtggacactaatggcgtgtattcagagcctcgccccattggcacaagatacctgactcgtaatctgtaa

SEQ ID NO: 422 - DNA, 4090 bp, Artificial Sequence
  Synthetic Polynucleotide
atgccggggttctacgagattgtgattacggtccccagcgaccttgacgagcatttgcccggcatttctgacagctttgtgaactgggtggccgagaaggaatgggagttgccgccagattctgacatggatctgaatctgattgagcaggcacccctgaccgtggccgagaagctgcagcgcgactttctgacggagtggcgccgtgtgagtaaggccccggaggcccttttctttgtgcaatttgagaagggagagagctacttccatatgcacgtgcttgtggagaccaccggggtgaaatccatggttttgggacgcttcctgagtcagattcgcgaaaaactgattcagagaatttaccgcgggatcgagccgactttgccaaattggttcgcggttacaaagactcgaaatggcgccggaggcgggaacaaagtggtggatgagtgctacatccccaattacctgctccccaaaacccagcctgagctccagtgggcgtggactaatatggaacagtatttaagcgcctgtttgaatctcgcggagcgtaaacggttggtggcgcagcatctgacgcacgtgtcgcagacgcaggagcagaacaaagagaatcagaatcccaattctgacgcgccggtgattagatcaaaaacatcagccaggtacatggagctggtcgggtggctcgtggataaggggattacctcggagaagcagtggatccaggaggaccaggcctcatacatttccttcaatgcggcctccaactcgcggtcccagatcaaggctgctctggacaatgcggggaagatcatgagcctgactaaaaccgcccccgactacctggtgggccagcagcccgtggaggacatttccagcaatcggatttataaaatcttggaactgaacgggtacgatccccaatatgcggcttccgtcttcctgggatgggctacgaaaaagttcggcaagaggaacaccatctggctgtttgggcctgcgactaccgggaagacaaacatcgcggaggctatagcccacacggtacccttctacgggtgcgtacactggaccaatgagaactttccgttcaatgactgcgtcgacaagatggtgatctggtgggaggaggggacgatgaccgccaaggtcgtggaatcggccaaagccattctcggtggaagcaaggtacgcgtggaccagaaatgcaagtcctcggcccagatagacccgactcccgtgatcgtcacctccaacaccaatatgtgcgccgtgattgacgggaactcaacgaccttcgaacaccagcagccgttgcaagaccggatgttcaaatttgaactcacccgccgtctggatcatgactttgggaaggtcaccaagcaggacgtcaaagactttttccggtgggcccaagaccacgtggtagaggtggagcatgaattctacgtcaaaaagggtggagctaagaaaaggcccgcccccagtgacgcagatataagtgagcccaaacgggcgcgcgagtcagttgcgcagccatcgacgtcagacgcggaagcttcgatcaactacgcggacaggtaccaaaacaaatgttctcgtcacgtgggcatgaatctgatgctgtttccctgcagacaatgcgagagaatgaatcagaattcaaatatctgcttcactcacggacagaaagactgtttagagtgctttcccgtgtcagaatctcaacccgtttctgtcgtcaaaaaggcgtatcagaaactgtgctatattcatcatatcatgggaaaggtaccagacgcttgcactgcttgcgacctggtaaatgtggatttggatgactgcatctctgaacaataaatgatttaaatcaggtatggctgccgatggttatcttccagattggctcgaggacactctctctgaaggaataagacagtggtggaagctcaaacctggcccaccaccgccaaagcccgcagagcggcataaggacgacagcaggggtcttgtgcttcctgggtacaagtacctcggacccttcaacggactcgacaaaggagagccggtcaacgaggcagacgccgcggccctcgagcacgacaaggcctacgaccggcagctcgacagcggagacaacccgtacctcaagtacaaccacgccgacgcggagtttcaggagcgccttaaagaagatacgtcttttgggggcaacctcgcaagagcagtattccaggcgaaaaagagggttcttgaacctctgggcctggttgaggagcctgttaagacggctccgggaaaaaagaggccggtagagcactctcctgcggagccagattcctcctccggaactggaaagtcgggccaacagcctgcaagaaagagattgaattttggtcagactggagacgcagactccgtacctgacccccagcctctcggacagccaccagcagccccctctggtctgggaactaatacgatggcttcaggcagtggcgcaccaatggcagacaataacgagggcgccgacggagtgggtaattcctcgggaaattggcattgcgattccacatggatgggcgacagagtcatcaccaccagcacccgcacctgggctctgcccacctacaacaaccatctgtacaagcaaatttccagccagtctggagccagcaacgacaaccactactttggctacagcaccccttgggggtattttgacttcaacagattccactgccacttctccccacgtgactggcaaagactcatcaacaacaattggggattccggcccaaaagactcaacttcaagctctttaacattcaagtcaaggaggtcacgcagaatgacggtacgacgacgattgccaataaccttaccagcacggttcaggtgtttactgactcggagtaccagctcccgtacgtcctcggctcggcgcatcaaggatgcctcccgccgttcccagcagacgtcttcatggtgccacagtatggatacctcaccctgaacaacgggagtcaggcggtaggacgctcttcattttactgcctggagtactttccttctcagatgctgcgtaccggaaacaactttaccttcagctacacctttgaggacgttccttttcacagcagctacgctcacagccagagtttggaccgtctcatgaatcctctcatcgaccagtacctgtattacttgagcagaacaaacactccaagcggaaccactacgcagtccaggcttcagttttctcaagccggagcgagtgacattcgggaccagtctaggaactggcttcctggaccctgttaccgccagcagcgagtatcaaagacagctgcggacaacaacaacagtgattactcgtggactggagctaccaagtatcacctcaatggaagagactctctggtgaatccgggcacagccatggccagccacaaggacgatgaagaaaagtattttcctcagagcggggttctcatcttcggaaaacaagactcgggaaaaactaatgtggacattgaaaaggtcatgattacagacgaagaggaaatcaggaccaccaatcccgtggctacggagcagtatggttctgtatctaccaatctccagagcggcaacacacaagcagctacctcagatgtcaacacacaaggcgttcttccaggcatggtctggcaggacagagacgtgtacctgcagggacccatctgggcaaagattccacacacggacggacattttcacccttctcctcttatgggaggatttggactgaagcaccctcccccgcagattctcatcaagaataccccggtacctgcgaatccttctaccaccttcagcgcggcaaagtttgcttccttcatcacacagtactccacggggcaggtcagcgtggagatcgagtgggagctgcagaaagagaacagcaaacgctggaaccccgagatccagtatacctccaactacaacaagtctgttaatgtggactttactgtggacactaatggcgtgtattcagagcctcgccccattggcacaagatacctgactcgtaatctgtaa

SEQ ID NO: 423 - DNA, 4090 bp, Artificial Sequence
  Synthetic Polynucleotide
atgccggggttctacgagattgtgattaaggtccccagcgaccttgacgagcatttgcccggcatttctgacagctttgtgaactgggtggccgagaaggaatgggagttgccgccagattctgacatggatctgaatctgattgagcaggcacccctgaccgtggccgagaagctgcagcgcgactttctgacggagtggcgccgtgtgagtaaggccccggaggcccttttctttgtgcaatttgagaagggagagagctacttccatatgcacgtgcttgtggagaccaccggggtgaaatccatggttttgggacgcttcctgagtcagattcgcgaaaaactgattcagagaatttaccgcgggatcgagccgactttgccaaattggttcgcggttacaaagactcgaaatggcgccggaggcgggaacaaggtggtggatgagtgctacatccccaattacctgctccccaaaacccagcctgagctccagtgggcgtggactaatatggaacagtatttaagcgcctgtttgaatctcgcggagcgtaaacggttggtggcgcagcatctgacgcacgtgtcgcagacgcaggagcagaacaaagagaatcagaatcccaattctgacgcgccggtgattagatcaaaaacatcagccaggtacatggagctggtcgggtggctcgtggataaggggattacctcggagaagcagtggatccaggaggaccaggcctcatacatttccttcaatgcggcctccaactcgcggtcccagatcaaggctgctctggacaatgcggggaagatcatgagcctgactaaaaccgcccccgactacctggtgggccagcagcccgtggaggacatttccagcaatcggatttataaaatcttggaactgaacgggtacgatccccaatatgcggcttccgtcttcctgggatgggctacgaaaaagttcggcaagaggaacaccatctggctgtttgggcctgcgactaccgggaagacaaacatcgcggaggctatagcccacacggtacccttctacgggtgcgtaaactggaccaatgagaactttccgttcaatgactgcgtcgacaagatggtgatctggtgggaggaggggaagatgaccgccaaggtcgtggaatcggccaaagccattctcggtggaagcaaggtacgcgtggaccagaaatgcaagtcctcggcccagatagacccgactcccgtgatcgtcacctccaacaccaatatgtgcgccgtgattgacgggaactcaacgaccttcgaacaccagcagccgttgcaagaccggatgttcaaatttgaactcacccgccgtctggatcatgactttgggaaggtcaccaagcaggaagtcaaagactttttccggtgggcccaagaccacgtggtagaggtggagcatgaattctacgtcaaaaagggtggagctaagaaaaggcccgcccccagtgacgcagatataagtgagcccaaacgggcgcgcgagtcagttgcgcagccatcgacgtcagacgcggaagcttcgatcaactacgcggacaggtaccaaaacaaatgttctcgtcacgtgggcatgaatctgatgctgtttccctgcagacaatgcgagagaatgaatcagaattcaaatatctgcttcactcacggacagaaagactgtttagagtgctttcccgtgtcagaatctcaacccgtttctgtcgtcaaaaaggcgtatcagaaactgtgctatattcatcatatcatgggaaaggtaccagacgcttgcactgcttgcgacctggtaaatgtggatttggatgactgcatctctgaacaataaatgatttaaatcaggtatggctgccgatggttatcttccagattggctcgaggacactctctctgaaggaataagacagtggtggaagctcaaacctggcccaccaccgccaaagcccgcagagcggcataaggacgacagcaggggtcttgtgcttcctgggtacaagtacctcggacccttcaacggactcgacaaaggagagccggtcaacgaggcagacgccgcggccctcgagcacgacaaggcctacgaccggcagctcgacagcggagacaacccgtacctcaagtacaaccacgccgacgcggagtttcaggagcgccttaaagaagatacgtcttttgggggcaacctcgcaagagcagtattccaggcgaaaaagagggttcttgaacctctgggcctggttgaggagcctgttaagacggctccgggaaaaaagaggccggtagagcactctcctgcggagccagattcctcctccggaactggaaagtcgggccaacagcctgcaagaaagagattgaattttggtcagactggagacgcagactccgtacctgacccccagcctctcggacagccaccagcagccccctctggtctgggaactaatacgatggcttcaggcagtggcgcaccaatggcagacaataacgagggcgccgacggagtgggtaattcctcgggaaattggcattgcgattccacatggatgggcgacagagtcatcaccaccagcacccgcacctgggctctgcccacctacaacaaccatctgtacaagcaaatttccagccagtctggagccagcaacgacaaccactactttggctacagcaccccttgggggtattttgacttcaacagattccactgccacttctccccacgtgactggcaaagactcatcaacaacaattggggattccggcccaaaagactcaacttcaagctctttaacattcaagtcaaggaggtcacgcagaatgacggtacgacgacgattgccaataaccttaccagcacggttcaggtgtttactgactcggagtaccagctcccgtacgtcctcggctcggcgcatcaaggatgcctcccgccgttcccagcagacgtcttcatggtgccacggtatggatacctcaccctgaacaacgggagtcaggcggtaggacgctcttcattttactgcctggagtactttccttctcagatgctgcgtaccggaaacaactttaccttcagctacacctttgaggacgttccttttcacagcagctacgctcacagccagagtttggaccgtctcatgaatcctctcatcgaccagtacctgtattacttgagcagaacaaacactccaagcggaaccactacgcagtccaggcttcagttttctcaagccggagcgagtgacattcgggaccagtctaggaactggcttcctggaccctgttaccgccagcagcgagtatcaaagacagctgcggacaacaacaacagtgattactcgtggactggagctaccaagtatcacctcaatggaagagactctctggtgaatccgggcacagccatggccagccacaaggacgatgaagaaaagtattttcctcagagcggggttctcatcttcggaaaacaagactcgggaaaaactaatgtggacattgaaaaggtcatgattacagacgaagaggaaatcaggaccaccaatcccgtggctacggagcagtatggttctgtatctaccaatctccagagcggcaacacacaagcagctacctcagatgtcaacacacaaggcgttcttccaggcatggtctggcaggacagagacgtgtacctgcagggacccatctgggcaaagattccacacacggacggacattttcacccttctcctcttatgggaggatttggactgaagcaccctcccccgcagattctcatcaagaataccccggtacctgcgaatccttctaccaccttcagcgcggcaaagtttgcttccttcatcacacagtactccacggggcaggtcagcgtggagatcgagtgggagctgcagaaagagaacagcaaacgctggaaccccgagatccagtatacctccaactacaacaagtctgttaatgtggactttactgtggacactaatggcgtgtattcagagcctcgccccattggcacaagatacctgactcgtaatctgtaa

SEQ ID NO: 424 - DNA, 4090 bp, Artificial Sequence
  Synthetic Polynucleotide
atgccggggttctacgagattgtgattaaggtccccagcgaccttgacgagcatttgcccggcatttctgacagctttgtgaactgggtggccgagaaggaatgggagttgccgccagattctgacatggatctgaatctgattgagcaggcacccctgaccgtggccgagaagctgcagcgcgactttctgacggagtggcgccgtgtgagtaaggccccggaggcccttttctttgtgcaatttgagaagggagagagctacttccatatgcacgtgcttgtggagaccaccggggtgaaatccatggttttgggacgcttcctgagtcagattcgcgaaaaactgattcagagaatttaccgcgggatcgagccgactttgccaaattggttcgcggttacaaagactcgaaatggcgccggaggcgggaacaaggtggtggatgagtgctacatccccaattacctgctccccaaaacccagcctgagctccagtgggcgtggactaatatggaacagtatttaagcgcctgtttgaatctcgcggagcgtaaacggttggtggcgcagcatctgacgcacgtgtcgcagacgcaggagcagaacaaagagaatcagaatcccaattctgacgcgccggtgattagatcaaaaacatcagccaggtacatggagctggtcgggtggctcgtggataaggggattacctcggagaagcagtggatccaggaggaccaggcctcatacatttccttcaatgcggcctccaactcgcggtcccagatcaaggctgctctggacaatgcggggaagatcatgagcctgactaaaaccgcccccgactacctggtgggccagcagcccgtggaggacatttccagcaatcggatttataaaatcttggaactgaacgggtacgatccccaatatgcggcttccgtcttcctgggatgggctacgaaaaagttcggcaagaggaacaccatctggctgtttgggcctgcgactaccgggaagacaaacatcgcggaggctatagcccacacggtacccttctacgggtgcgtaaactggaccaatgagaactttccgttcaatgactgcgtcgacaagatggtgatctggtgggaggaggggaagatgaccgccaaggtcgtggaatcggccaaagccattctcggtggaagcaaggtacgcgtggaccagaaatgcaagtcctcggcccagatagacccgactcccgtgatcgtcacctccaacaccaatatgtgcgccgtgattgacgggaactcaacgaccttcgaacaccagcagccgttgcaagaccggatgttcaaatttgaactcacccgccgtctggatcatgactttgggaaggtcaccaagcaggaagtcaaagactttttccggtgggcccaagaccacgtggtagaggtggagcatgaattctacgtcaaaaagggtggagctaagaaaaggcccgcccccagtgacgcagatataagtgagcccaaacgggcgcgcgagtcagttgcgcagccatcgacgtcagacgcggaagcttcgatcaactacgcggacaggtaccaaaacaaatgttctcgtcacgtgggcatgaatctgatgctgtttccctgcagacaatgcgagagaatgaatcagaattcaaatatctgcttcactcacggacagaaagactgtttagagtgctttcccgtgtcagaatctcaacccgtttctgtcgtcaaaaaggcgtatcagaaactgtgctatattcatcatatcatgggaaaggtaccagacgcttgcactgcttgcgacctggtaaatgtggatttggatgactgcatctctgaacaataaatgatttaaatcaggtatggctgccgatggttatcttccagattggctcgaggacactctctctgaaggaataagacagtggtggaagctcaaacctggcccaccaccgccaaagcccgcagagcggcataaggacgacagcaggggtcttgtgcttcctgggtacaagtacctcggacccttcaacggactcgacaaaggagagccggtcaacgaggcagacgccgcggccctcgagcacgacaaggcctacgaccggcagctcgacagcggagacaacccgtacctcaagtacaaccacgccgacgcggagtttcaggagcgccttaaagaagatacgtcttttgggggcaacctcgcaagagcagtattccaggcgaaaaagagggttcttgaacctctgggcctggttgaggagcctgttaagacggctccgggaaaaaagaggccggtagagcactctcctgcggagccagattcctcctccggaactggaaagtcgggccaacagcctgcaagaaagagattgaattttggtcagactggagacgcagactccgtacctgacccccagcctctcggacagccaccagcagccccctctggtctgggaactaatacgatggcttcaggcagtggcgcaccaatggcagacaataacgagggcgccgacggagtgggtaattcctcgggaaattggcattgcgattccacatggatgggcgacagagtcatcaccaccagcacccgcacctgggctctgcccacctacaacaaccatctgtacaagcaaatttccagccagtctggagccagcaacgacaaccactactttggctacagcaccccttgggggtattttgacttcaacagattccactgccacttctccccacgtgactggcaaagactcatcaacaacaattggggattccggcccaaaagactcaacttcaagctctttaacattcaagtcaaggaggtcacgcagaatgacggtacgacgacgattgccaataaccttaccagcacggttcaggtgtttactgactcggagtaccagctcccgtacgtcctcggctcggcgcatcaaggatgcctcccgccgttcccagcagacgtcttcatggtgccacagtatggatacctcaccctgaacaacgggagtcaggcggtaggacgctcttcattttactgcctggagtactttccttctcagatgctgcgtaccggaaacaactttaccttcagctacacctttgaggacgttccttttcacagcagctacgctcacagccagagtttggaccgtctcatgaatcctctcatcgaccagtacctgtattacttgagcagaacaaacactccaagcggaaccactacgcagtccaggcttcagttttctcaagccggagcgagtgacattcgggaccagtctaggaactggcttcctggaccctgttaccgccagcagcgagtatcaaagacagctgcggacaacaacaacagtgattactcgtggactggagctaccaagtatcacctcaatggaagagactctctggtgaatccgggcacagccatggccagccacaaggacgatgaagaaaagtattttcctcagagcggggttctcatcttcggaaaacaagactcgggaaaaactaatgtggacattgaaaaggtcatgattacagacgaagaggaaatcaggaccaccaatcccgtggctacggagcagtatggttctgtatctaccaatctccagagcggcaacacacaagcagctacctcagatgtcaacacacaaggcgttcttccaggcatggtctggcaggacagagacgtgtacctgcagggacccatctgggcaaagattccacacacggacggacattttcacccttctcctcttatgggaggattgggacagaagcaccctcccccgcagagtctcatcaagaataccccggtacctgcgaatccttctaccaccttcagcgcggcaaagtttgcttccttcatcacacagtactccacggggcaggtcagcgtggagatcgagtgggagctgcagaaagagaacagcaaacgctggaaccccgagatccagtatacctccaactacaacaagtctgttaatgtggactttactgtggacactaatggcgtgtattcagagcctcgccccattggcacaagatacctgactcgtaatctgtaa

SEQ ID NO: 425 - DNA, 4090 bp, Artificial Sequence
  Synthetic Polynucleotide
atgccggggttctacgagattgtgattaaggtccccagcgaccttgacgagcatttgcccggcatttctgacagctttgtgaactgggtggccgagaaggaatgggagttgccgccagattctgacatggatctgaatctgattgagcaggcacccctgaccgtggccgagaagctgcagcgcgactttctgacggagtggcgccgtgtgagtaaggccccggaggcccttttctttgtgcaatttgagaagggagagagctacttccatatgcacgtgcttgtggagaccaccggggtgaaatccatggttttgggacgcttcctgagtcagattcgcgaaaaactgattcagagaatttaccgcgggatcgagccgactttgccaaattggttcgcggttacaaagactcgaaatggcgccggaggcgggaacaaggtggtggatgagtgctacatccccaattacctgctccccaaaacccagcctgagctccagtgggcgtggactaatatggaacagtatttaagcgcctgtttgaatctcgcggagcgtaaacggttggtggcgcagcatctgacgcacgtgtcgcagacgcaggagcagaacaaagagaatcagaatcccaattctgacgcgccggtgattagatcaaaaacatcagccaggtacatggagctggtcgggtggctcgtggataaggggattacctcggagaagcagtggatccaggaggaccaggcctcatacatttccttcaatgcggcctccaactcgcggtcccagatcaaggctgctctggacaatgcggggaagatcatgagcctgactaaaaccgcccccgactacctggtgggccagcagcccgtggaggacatttccagcaatcggatttataaaatcttggaactgaacgggtacgatccccaatatgcggcttccgtcttcctgggatgggctacgaaaaagttcggcaagaggaacaccatctggctgtttgggcctgcgactaccgggaagacaaacatcgcggaggctatagcccacacggtacccttctacgggtgcgtaaactggaccaatgagaactttccgttcaatgactgcgtcgacaagatggtgatctggtgggaggaggggaagatgaccgccaaggtcgtggaatcggccaaagccattctcggtggaagcaaggtacgcgtggaccagaaatgcaagtcctcggcccagatagacccgactcccgtgatcgtcacctccaacaccaatatgtgcgccgtgattgacgggaactcaacgaccttcgaacaccagcagccgttgcaagaccggatgttcaaatttgaactcacccgccgtctggatcatgactttgggaaggtcaccaagcaggaagtcaaagactttttccggtgggcccaagaccacgtggtagaggtggagcatgaattctacgtcaaaaagggtggagctaagaaaaggcccgcccccagtgacgcagatataagtgagcccaaacgggcgcgcgagtcagttgcgcagccatcgacgtcagacgcggaagcttcgatcaactacgcggacaggtaccaaaacaaatgttctcgtcacgtgggcatgaatctgatgctgtttccctgcagacaatgcgagagaatgaatcagaattcaaatatctgcttcactcacggacagaaagactgtttagagtgctttcccgtgtcagaatctcaacccgtttctgtcgtcaaaaaggcgtatcagaaactgtgctatattcatcatatcatgggaaaggtaccagacgcttgcactgcttgcgacctggtaaatgtggatttggatgactgcatctctgaacaataaatgatttaaatcaggtatggctgccgatggttatcttccagattggctcgaggacactctctctgaaggaataagacagtggtggaagctcaaacctggcccaccaccgccaaagcccgcagagcggcataaggacgacagcaggggtcttgtgcttcctgggtacaagtacctcggacccttcaacggactcgacaaaggagagccggtcaacgaggcagacgccgcggccctcgagcacgacaaggcctacgaccggcagctcgacagcggagacaacccgtacctcaagtacaaccacgccgacgcggagtttcaggagcgccttaaagaagatacgtcttttgggggcaacctcgcaagagcagtattccaggcgaaaaagagggttcttgaacctctgggcctggttgaggagcctgttaagacggctccgggaaaaaagaggccggtagagcactctcctgcggagccagattcctcctccggaactggaaagtcgggccaacagcctgcaagaaagagattgaattttggtcagactggagacgcagactccgtacctgacccccagcctctcggacagccaccagcagccccctctggtctgggaactaatacgatggcttcaggcagtggcgcaccaatggcagacaataacgagggcgccgacggagtgggtaattcctcgggaaattggcattgcgattccacatggatgggcgacagagtcatcaccaccagcacccgcacctgggctctgcccacctacaacaaccatctgtacaagcaaatttccagccagtctggagccagcaacgacaaccactactttggctacagcaccccttgggggtattttgacttcaacagattccactgccacttctccccacgtgactggcaaagactcatcaacaacaattggggattccggcccaaaagactcaacttcaagctctttaacattcaagtcaaggaggtcacgcagaatgacggtacgacgacgattgccaataaccttaccagcacggttcaggtgtttactgactcggagtaccagctcccgtacgtcctcggctcggcgcatcaaggatgcctcccgccgttcccagcagacgtcttcatggtgccacagtatggatacctcaccctgaacaacgggagtcaggcggtaggacgctcttcattttactgcctggagtactttccttctcagatgctgcgtaccggaaacaactttaccttcagctacacctttgaggacgttccttttcacagcagctacgctcacagccagagtttggaccgtctcatgaatcctctcatcgaccagtacctgtattacttgagcagaacaaacactccaagcggaaccactacgcagtccaggcttcagttttctcaagccggagcgagtgacattcgggaccagtctaggaactggcttcctggaccctgttaccgccagcagcgagtatcaaagacagctgcggacaacaacaacagtgattactcgtggactggagctaccaagtatcacctcaatggaagagactctctggtgaatccgggcacagccatggccagccacaaggacgatgaagaaaagtattttcctcagagcggggttctcatcttcggaaaacaagactcggagaaaactaatgtggacattgaaaaggtcatgattacagacgaagaggaaatcaggaccaccaatcccgtggctacggagcagtatggttctgtatctaccaatctccagagcggcaacacacaagcagctacctcagatgtcaacacacaaggcgttcttccaggcatggtctggcaggacagagacgtgtacctgcagggacccatctgggcaaagattccacacacggacggacattttcacccttctcctcttatgggaggatttggactgaagcaccctcccccgcagattctcatcaagaataccccggtacctgcgaatccttctaccaccttcagcgcggcaaagtttgcttccttcatcacacagtactccacggggcaggtcagcgtggagatcgagtgggagctgcagaaagagaacagcaaacgctggaaccccgagatccagtatacctccaactacaacaagtctgttaatgtggactttactgtggacactaatggcgtgtattcagagcctcgccccattggcacaagatacctgactcgtaatctgtaa

SEQ ID NO: 426 - DNA, 4090 bp, Artificial Sequence
  Synthetic Polynucleotide
atgccggggttctacgagattgtgattaaggtccccagcgaccttgacgagcatttgcccggcatttctgacagctttgtgaactgggtggccgagaaggaatgggagttgccgccagattctgacatggatctgaatctgattgagcaggcacccctgaccgtggccgagaagctgcagcgcgactttctgacggagtggcgccgtgtgagtaaggccccggaggcccttttctttgtgcaatttgagaagggagagagctacttccatatgcacgtgcttgtggagaccaccggggtgaaatccatggttttgggacgcttcctgagtcagattcgcgaaaaactgattcagagaatttaccgcgggatcgagccgactttgccaaattggttcgcggttacaaagactcgaaatggcgccggaggcgggaacaaggtggtggatgagtgctacatccccaattacctgctccccaaaacccagcctgagctccagtgggcgtggactaatatggaacagtatttaagcgcctgtttgaatctcgcggagcgtaaacggttggtggcgcagcatctgacgcacgtgtcgcagacgcaggagcagaacaaagagaatcagaatcccaattctgacgcgccggtgattagatcaaaaacatcagccaggtacatggagctggtcgggtggctcgtggataaggggattacctcggagaagcagtggatccaggaggaccaggcctcatacatttccttcaatgcggcctccaactcgcggtcccagatcaaggctgctctggacaatgcggggaagatcatgagcctgactaaaaccgcccccgactacctggtgggccagcagcccgtggaggacatttccagcaatcggatttataaaatcttggaactgaacgggtacgatccccaatatgcggcttccgtcttcctgggatgggctacgaaaaagttcggcaagaggaacaccatctggctgtttgggcctgcgactaccgggaagacaaacatcgcggaggctatagcccacacggtacccttctacgggtgcgtaaactggaccaatgagaactttccgttcaatgactgcgtcgacaagatggtgatctggtgggaggaggggaagatgaccgccaaggtcgtggaatcggccaaagccattctcggtggaagcaaggtacgcgtggaccagaaatgcaagtcctcggcccagatagacccgactcccgtgatcgtcacctccaacaccaatatgtgcgccgtgattgacgggaactcaacgaccttcgaacaccagcagccgttgcaagaccggatgttcaaatttgaactcacccgccgtctggatcatgactttgggaaggtcaccaagcaggaagtcaaagactttttccggtgggcccaagaccacgtggtagaggtggagcatgaattctacgtcaaaaagggtggagctaagaaaaggcccgcccccagtgacgcagatataagtgagcccaaacgggcgcgcgagtcagttgcgcagccatcgacgtcagacgcggaagcttcgatcaactacgcggacaggtaccaaaacaaatgttctcgtcacgtgggcatgaatctgatgctgtttccctgcagacaatgcgagagaatgaatcagaattcaaatatctgcttcactcacggacagaaagactgtttagagtgctttcccgtgtcagaatctcaacccgtttctgtcgtcaaaaaggcgtatcagaaactgtgctatattcatcatatcatgggaaaggtaccagacgcttgcactgcttgcgacctggtaaatgtggatttggatgactgcatctctgaacaataaatgatttaaatcaggtatggctgccgatggttatcttccagattggctcgaggacactctctctgaaggaataagacagtggtggaagctcaaacctggcccaccaccgccaaagcccgcagagcggcataaggacgacagcaggggtcttgtgcttcctgggtacaagtacctcggacccttcaacggactcgacaaaggagagccggtcaacgaggcagacgccgcggccctcgagcacgacaaggcctacgaccggcagctcgacagcggagacaacccgtacctcaagtacaaccacgccgacgcggagtttcaggagcgccttaaagaagatacgtcttttgggggcaacctcgcaagagcagtattccaggcgaaaaagagggttcttgaacctctgggcctggttgaggagcctgttaagacggctccgggaaaaaagaggccggtagagcactctcctgcggagccagattcctcctccggaactggaaagtcgggccaacagcctgcaagaaagagattgaattttggtcagactggagacgcagactccgtacctgacccccagcctctcggacagccaccagcagccccctctggtctgggaactaatacgatggcttcaggcagtggcgcaccaatggcagacaataacgagggcgccgacggagtgggtaattcctcgggaaattggcattgcgattccacatggatgggcgacagagtcatcaccaccagcacccgcacctgggctctgcccacctacaacaaccatctgtacaagcaaatttccagccagtctggagccagcaacgacaaccactactttggctacagcaccccttgggggtattttgacttcaacagattccactgccacttctccccacgtgactggcaaagactcatcaacaacaattggggattccggcccaaaagactcaacttcaagctctttaacattcaagtcaaggaggtcacgcagaatgacggtacgacgacgattgccaataaccttaccagcacggttcaggtgtttactgactcggagtaccagctcccgtacgtcctcggctcggcgcatcaaggatgcctcccgccgttcccagcagacgtcttcatggtgccacagtatggatacctcaccctgaacaacgggagtcaggcggtaggacgctcttcattttactgcctggagtactttccttctcagatgctgcgtaccggaaacaactttaccttcagctacacctttgaggacgttccttttcacagcagctacgctcacagccagagtttggaccgtctcatgaatcctctcatcgaccagtacctgtattacttgagcagaacaaacactccaagcggaaccactacgcagtccaggcttcagttttctcaagccggagcgagtgacattcgggaccagtctaggaactggcttcctggaccctgttaccgccagcagcgagtatcaaagacagctgcggacaacaacaacagtgattactcgtggactggagctaccaagtatcacctcaatggaagagactctctggtgaatccgggcacagccatggccagccacaaggacgatgaagaaaagtattttcctcagagcggggtcctcatcttcggaaaacaagactcgggaaaaactaatgtggacattgaaaaggtcatgattacagacgaagaggaaatcaggaccaccaatcccgtggctacggagcagtatggttctgtatctaccaatctccagagcggcaacacacaagcagctacctcagatgtcaacacacaaggcgttcttccaggcatggtctggcaggacagagacgtgtacctgcagggacccatctgggcaaagattccacacacggacggacattttcacccttctcctcttatgggaggatttggactgaagcaccctcccccgcagattctcatcaagaataccccggtacctgcgaatccttctaccaccttcagcgcggcaaagtttgcttccttcatcacacagtactccacggggcaggtcagcgtggagatcgagtgggagctgcagaaagagaacagcaaacgctggaaccccgagatccagtatacctccaactacaacaagtctgttaatgtggactttactgtggacactaatggcgtgtattcagagcctcgccccattggcacaagatacctgactcgtaatctgtaa

SEQ ID NO: 427 - DNA, 4090 bp, Artificial Sequence
  Synthetic Polynucleotide
atgccggggttctacgagattgtgattaaggtccccagcgaccttgacgagcatttgcccggcatttctgacagctttgtgaactgggtggccgagaaggaatgggagttgccgccagattctgacatggatctgaatctgattgagcaggcacccctgaccgtggccgagaagctgcagcgcgactttctgacggagtggcgccgtgtgagtaaggccccggaggcccttttctttgtgcaatttgagaagggagagagctacttccatatgcacgtgcttgtggagaccaccagggtgaaatccatggttttgggacgcttcctgagtcagattcgcgaaaaactgattcagagaatttaccgcgggatcgagccgactttgccaaattggttcgcggttacaaagactcgaaatggcgccggaggcgggaacaaggtggtggatgagtgctacatccccaattacctgctccccaaaacccagcctgagctccagtgggcgtggactaatatggaacagtatttaagcgcctgtttgaatctcgcggagcgtaaacggttggtggcgcagcatctgacgcacgtgtcgcagacgcaggagcagaacaaagagaatcagaatcccaattctgacgcgccggtgattagatcaaaaacatcagccaggtacatggagctggtcgggtggctcgtggataaggggattacctcggagaagcagtggatccaggaggaccaggcctcatacatttccttcaatgcggcctccaactcgcggtcccagatcaaggctgctctggacaatgcggggaagatcatgagcctgactaaaaccgcccccgactacctggtgggccagcagcccgtggaggacatttccagcaatcggatttataaaatcttggaactgaacgggtacgatccccaatatgcggcttccgtcttcctgggatgggctacgaaaaagttcggcaagaggaacaccatctggctgtttgggcctgcgactaccgggaagacaaacatcgcggaggctatagcccacacggtacccttctacgggtgcgtaaactggaccaatgagaactttccgttcaatgactgcgtcgacaagatggtgatctggtgggaggaggggaagatgaccgccaaggtcgtggaatcggccaaagccattctcggtggaagcaaggtacgcgtggaccagaaatgcaagtcctcggcccagatagacccgactcccgtgatcgtcacctccaacaccaatatgtgcgccgtgattgacgggaactcaacgaccttcgaacaccagcagccgttgcaagaccggatgttcaaatttgaactcacccgccgtctggatcatgactttgggaaggtcaccaagcaggaagtcaaagactttttccggtgggcccaagaccacgtggtagaggtggagcatgaattctacgtcaaaaagggtggagctaagaaaaggcccgcccccagtgacgcagatataagtgagcccaaacgggcgcgcgagtcagttgcgcagccatcgacgtcagacgcggaagcttcgatcaactacgcggacaggtaccaaaacaaatgttctcgtcacgtgggcatgaatctgatgctgtttccctgcagacaatgcgagagaatgaatcagaattcaaatatctgcttcactcacggacagaaagactgtttagagtgctttcccgtgtcagaatctcaacccgtttctgtcgtcaaaaaggcgtatcagaaactgtgctatattcatcatatcatgggaaaggtaccagacgcttgcactgcttgcgacctggtaaatgtggatttggatgactgcatctctgaacaataaatgatttaaatcaggtatggctgccgatggttatcttccagattggctcgaggacactctctctgaaggaataagacagtggtggaagctcaaacctggcccaccaccgccaaagcccgcagagcggcataaggacgacagcaggggtcttgtgcttcctgggtacaagtacctcggacccttcaacggactcgacaaaggagagccggtcaacgaggcagacgccgcggccctcgagcacgacaaggcctacgaccggcagctcgacagcggagacaacccgtacctcaagtacaaccacgccgacgcggagtttcaggagcgccttaaagaagatacgtcttttgggggcaacctcgcaagagcagtattccaggcgaaaaagagggttcttgaacctctgggcctggttgaggagcctgttaagacggctccgggaaaaaagaggccggtagagcactctcctgcggagccagattcctcctccggaactggaaagtcgggccaacagcctgcaagaaagagattgaattttggtcagactggagacgcagactccgtacctgacccccagcctctcggacagccaccagcagccccctctggtctgggaactaatacgatggcttcaggcagtggcgcaccaatggcagacaataacgagggcgccgacggagtgggtaattcctcgggaaattggcattgcgattccacatggatgggcgacagagtcatcaccaccagcacccgcacctgggctctgcccacctacaacaaccatctgtacaagcaaatttccagccagtctggagccagcaacgacaaccactactttggctacagcaccccttgggggtattttgacttcaacagattccactgccacttctccccacgtgactggcaaagactcatcaacaacaattggggattccggcccaaaagactcaacttcaagctctttaacattcaagtcaaggaggtcacgcagaatgacggtacgacgacgattgccaataaccttaccagcacggttcaggtgtttactgactcggagtaccagctcccgtacgtcctcggctcggcgcatcaaggatgcctcccgccgttcccagcagacgtcttcatggtgccacagtatggatacctcaccctgaacaacgggagtcaggcggtaggacgctcttcattttactgcctggagtactttccttctcagatgctgcgtaccggaaacaactttaccttcagctacacctttgaggacgttccttttcacagcagctacgctcacagccagagtttggaccgtctcatgaatcctctcatcgaccagtacctgtattacttgagcagaacaaacactccaagcggaaccactacgcagtccaggcttcagttttctcaagccggagcgagtgacattcgggaccagtctaggaactggcttcctggaccctgttaccgccagcagcgagtatcaaagacagctgcggacaacaacaacagtgattactcgtggactggagctaccaagtatcacctcaatggaagagactctctggtgaatccgggcacagccatggccagccacaaggacgatgaagaaaagtattttcctcagagcggggttctcatcttcggaaaacaagactcgggaaaaactaatgtggacattgaaaaggtcatgattacagacgaagaggaaatcaggaccaccaatcccgtggctacggagcagtatggttctgtatctaccaatctccagagcggcaacacacaagcagctacctcagatgtcaacacacaaggcgttcttccaggcatggtctggcaggacagagacgtgtacctgcagggacccatctgggcaaagattccacacacggacggacattttcacccttctcctcttatgggaggatttggactgaagcaccctcccccgcagattctcatcaagaataccccggtacctgcgaatccttctaccaccttcagcgcggcaaagtttgcttccttcatcacacagtactccacggggcaggtcagcgtggagatcgagtgggagctgcagaaagagaacagcaaacgctggaaccccgagatccagtatacctccaactacaacaagtctgttaatgtggactttactgtggacactaatggcgtgtattcagagcctcgccccattggcacaagatacctgactcgtaatctgtaa

SEQ ID NO: 428 - DNA, 4090 bp, Artificial Sequence
  Synthetic Polynucleotide
atgccggggttctacgagattgtgattaaggtccccagcgaccttgacgagcatttgcccggcatttctgacagctttgtgaactgggtggccgagaaggaatgggagttgccgccagattctgacatggatctgaatctgattgagcaggcacccctgaccgtggccgagaagctgcagcgcgactttctgacggagtggcgccgtgtgagtaaggccccggaggcccttttctttgtgcaatttgagaagggagagagctacttccatatgcacgtgcttgtggagaccaccggggtgaaatccatggttttgggacgcttcctgagtcagattcgcgaaaaactgattcagagaatttaccgcgggatcgagccgactttgccaaattggttcgcggttacaaagactcgaaatggcgccggaggcgggaacaaggtggtggatgagtgctacatccccaattacctgctccccaaaacccagcctgagctccagtgggcgtggactaatatggaacagtatttaagcgcctgtttgaatctcgcggagcgtaaacggttggtggcgcagcatctgacgcacgtgtcgcagacgcaggagcagaacaaagagaatcagaatcccaattctgacgcgccggtgattagatcaaaaacatcagccaggtacatggagctggtcgggtggctcgtggataaggggattacctcggagaagcagtggatccaggaggaccaggcctcatacatttccttcaatgcggcctccaactcgcggtcccagatcaaggctgctctggacaatgcggggaagatcatgagcctgactaaaaccgcccccgactacctggtgggccagcagcccgtggaggacatttccagcaatcggatttataaaatcttggaactgaacgggtacgatccccaatatgcggcttccgtcttcctgggatgggctacgaaaaagttcggcaagaggaacaccatctggctgtttgggcctgcgactaccgggaagacaaacatcgcggaggctatagcccacacggtacccttctacgggtgcgtaaactggaccaatgagaactttccgttcaatgactgcgtcgacaagatggtgatctggtgggaggaggggaagatgaccgccaaggtcgtggaatcggccaaagccattctcggtggaagcaaggtacgcgtggaccagaaatgcaagtcctcggcccagatagacccgactcccgtgatcgtcacctccaacaccaatatgtgcgccgtgattgacgggaactcaacgaccttcgaacaccagcagccgttgcaagaccggatgttcaaatttgaactcacccgccgtctggatcatgactttgggaaggtcaccaagcaggaagtcaaagactttttccggtgggcccaagaccacgtggtagaggtggagcatgaattctacgtcaaaaagggtggagctaagaaaaggcccgcccccagtgacgcagatataagtgagcccaaacgggcgcgcgagtcagttgcgcagccatcgacgtcagacgcggaagcttcgatcaactacgcggacaggtaccaaaacaaatgttctcgtcacgtgggcatgaatctgatgctgtttccctgcagacaatgcgagagaatgaatcagaattcaaatatctgcttcactcacggacagaaagactgtttagagtgctttcccgtgtcagaatctcaacccgtttctgtcgtcaaaaaggcgtatcagaaactgtgctatattcatcatatcatgggaaaggtaccagacgcttgcactgcttgcgacctggtaaatgtggatttggatgactgcatctctgaacaataaatgatttaaatcaggtatggctgccgatggttatcttccagattggctcgaggacactctctctgaaggaataagacagtggtggaagctcaaacctggcccaccaccgccaaagcccgcagagcggcataaggacgacagcaggggtcttgtgcttcctgggtacaagtacctcggacccttcaacggactcgacaaaggagagccggtcaacgaggcagacgccgcggccctcgagcacgacaaggcctacgaccggcagctcgacagcggagacaacccgtacctcaagtacaaccacgccgacgcggagtttcaggagcgccttaaagaagatacgtcttttgggggcaacctcgcaagagcagtattccaggcgaaaaagagggttcttgaacctctgggcctggttgaggagcctgttaagacggctccgggaaaaaagaggccggtagagcactctcctgcggagccagattcctcctccggaactggaaagtcgggccaacagcctgcaagaaagagattgaattttggtcagactggagacgcagactccgtacctgacccccagcctctcggacagccaccagcagccccctctggtctgggaactaatacgatggcttcaggcagtggcgcaccaatggcagacaataacgagggcgccgacggagtgggtaattcctcgggaaattggcattgcgattccacatggatgggcgacagagtcatcaccaccagcacccgcacctgggctctgcccacctacaacaaccatctgtacaagcaaatttccagccagtctggagccagcaacgacaaccactactttggctacagcaccccttgggggtattttgacttcaacagattccactgccacttctccccacgtgactggcaaagactcatcaacaacaattggggattccggcccaaaagactcaacttcaagctctttaacattcaagtcaaggaggtcacgcagaatgacggtacgacgacgattgccaataaccttaccagcacggttcaggtgtttactgactcggagtaccagctcccgtacgtcctcggctcggcgcatcaaggatgcctcccgccgttcccagcagacgtcttcatggtgccacagtatggatacctcaccctgaacaacgggagtcaggcggtaggacgctcttcattttactgcctggagtactttccttctcagatgctgcgtaccggaaacaactttaccttcagctacacctttgaggacgttccttttcacagcagctacgctcacagccagagtttggaccgtctcatgaatcctctcatcgaccagtacctgtattacttgagcagaacaaacactccaagcggaaccactacgcagtccaggcttcagttttctcaagccggagcgagtgacattcgggaccagtctaggaactggcttcctggaccctgttaccgccagcagcgagtatcaaagacagctgcggacaacaacaacagtgattactcgtggactggagctaccaagtatcacctcaatggaagagactctctggtgaatccgggcacagccatggccagccacaaggacgatgaagaaaagtattttcctcagagcggggttctcatcttcggaaaacaagactcgggaaaaactaatgtggacattgaaaaggtcatgattacagacgaagaggaaatcaggaccaccaatcccgtggctacggagcagtatggttctgtatctaccaatctccagagcggcaacacacaagcagctacctcagatgtcaacacacaaggcgttcttccaggcatggtctggcaggacagagacgtgtacctgcagggacccatctgggcaaagattccacacacggacggacattttcacccttctcctcttatgggaggatttggacagaagcaccctcccccgcagagtctcatcaagaataccccggtacctgcgaatccttctaccaccttcagcgcggcaaagtttgcttccttcatcacacagtactccacggggcaggtcagcgtggagatcgagtgggagctgcagaaagagaacagcaaacgctggaaccccgagatccagtatacctccaactacaacaagtctgttaatgtggactttactgtggacactaatggcgtgtattcagagcctcgccccattggcacaagatacctgactcgtaatctgtaa

SEQ ID NO: 429 - DNA, 4090 bp, Artificial Sequence
  Synthetic Polynucleotide
atgccggggttctacgagattgtgattaaggtccccagcgaccttgacgagcatttgcccggcatttctgacagctttgtgaactgggtggccgagaaggaatgggagttgccgccagattctgacatggatctgaatctgattgagcaggcacccctgaccgtggccgagaagctgcagcgcgactttctgacggagtggcgccgtgtgagtaaggccccggaggcccttttctttgtgcaatttgagaagggagagagctacttccatatgcacgtgcttgtggagaccaccggggtgaaatccatggttttgggacgcttcctgagtcagattcgcgaaaaactgattcagagaatttaccgcgggatcgagccgactttgccaaattggttcgcggttacaaagactcgaaatggcgccggaggcgggaacaaggtggtggatgagtgctacatccccaattacctgctccccaaaacccagcctgagctccagtgggcgtggactaatatggaacagtatttaagcgcctgtttgaatctcgcggagcgtaaacggttggtggcgcagcatctgacgcacgtgtcgcagacgcaggagcagaacaaagagaatcagaatcccaattctgacgcgccggtgattagatcaaaaacatcagccaggtacatggagctggtcgggtggctcgtggataaggggattacctcggagaagcagtggatccaggaggaccaggcctcatacatttccttcaatgcggcctccaactcgcggtcccagatcaaggctgctctggacaatgcggggaagatcatgagcctgactaaaaccgcccccgactacctggtgggccagcagcccgtggaggacatttccagcaatcggatttataaaatcttggaactgaacgggtacgatccccaatatgcggcttccgtcttcctgggatgggctacgaaaaagttcggcaagaggaacaccatctggctgtttgggcctgcgactaccgggaagacaaacatcgcggaggctatagcccacacggtacccttctacgggtgcgtaaactggaccaatgagaactttccgttcaatgactgcgtcgacaagatggtgatctggtgggaggaggggaagatgaccgccaaggtcgtggaatcggccaaagccattctcggtggaagcaaggtacgcgtggaccagaaatgcaagtcctcggcccagatagacccgactcccgtgatcgtcacctccaacaccaatatgtgcgccgtgattgacgggaactcaacgaccttcgaacaccagcagccgttgcaagaccggatgttcaaatttgaactcacccgccgtctggatcatgactttgggaaggtcaccaagcaggaagtcaaagactttttccggtgggcccaagaccacgtggtagaggtggagcatgaattctacgtcaaaaagggtggagctaagaaaaggcccgcccccagtgacgcagatataagtgagcccaaacgggcgcgcgagtcagttgcgcagccatcgacgtcagacgcggaagcttcgatcaactacgcggacaggtaccaaaacaaatgttctcgtcacgtgggcatgaatctgatgctgtttccctgcagacaatgcgagagaatgaatcagaattcaaatatctgcttcactcacggacagaaagactgtttagagtgctttcccgtgtcagaatctcaacccgtttctgtcgtcaaaaaggcgtatcagaaactgtgctatattcatcatatcatgggaaaggtaccagacgcttgcactgcttgcgacctggtaaatgtggatttggatgactgcatctctgaacaataaatgatttaaatcaggtatggctgccgatggttatcttccagattggctcgaggacactctctctgaaggaataagacagtggtggaagctcaaacctggcccaccaccgccaaagcccgcagagcggcataaggacgacagcaggggtcttgtgcttcctgggtacaagtacctcggacccttcaacggactcgacaaaggagagccggtcaacgaggcagacgccgcggccctcgagcacgacaaggcctacgaccggcagctcgacagcggagacaacccgtacctcaagtacaaccacgccgacgcggagtttcaggagcgccttaaagaagatacgtcttttgggggcaacctcgcaagagcagtattccaggcgaaaaagagggttcttgaacctctgggcctggttgaggagcctgttaagacggctccgggaaaaaagaggccggtagagcactctcctgcggagccagattcctcctccggaactggaaagtcgggccaacagcctgcaagaaagagattgaattttggtcagactggagacgcagactccgtacctgacccccagcctctcggacagccaccagcagccccctctggtctgggaactaatacgatggcttcaggcagtggcgcaccaatggcagacaataacgagggcgccgacggagtgggtaattcctcgggaaattggcattgcgattccacatggatgggcgacagagtcatcaccaccagcacccgcacctgggctctgcccacctacaacaaccatctgtacaagcaaatttccagccagtctggagccagcaacgacaaccactactttggctacagcaccccttgggggtattttgacttcaacagattccactgccacttctccccacgtgactggcaaagactcatcaacaacaattggggattccggcccaaaagactcaacttcaagctctttaacattcaagtcaaggaggtcacgcagaatgacggtacgacgacgattgccaataaccttaccagcacggttcaggtgtttactgactcggagtaccagctcccgtacgtcctcggctcggcgcatcaaggatgcctcccgccgttcccagcagacgtcttcatggtgccacagtatggatacctcaccctgaacaacgggagtcaggcggtaggacgctcttcattttactgcctggagtactttccttctcagatgctgcgtaccggaaacaactttaccttcagctacacctttgaggacgttccttttcacagcagctacgctcacagccagagtttggaccgtctcatgaatcctctcatcgaccagtacctgtattacttgagcagaacaaacactccaagcggaaccactacgcagtccaggcttcagttttctcaagccggagcgagtgacattcgggaccagtctaggaactggcttcctggaccctgttaccgccagcagcgagtatcaaagacagctgcggacaacaacaacagtgattactcgtggactggagctaccaagtatcacctcaatggaagagactctctggtgaatccgggcacagccatggccagccacaaggacgatgaagaaaagtattttcctcagagcggggttctcatcttccgaaaacaagactcgggaaaaactaatgtggacattgaaaaggtcatgattacagacgaagaggaaatcaggaccaccaatcccgtggctacggagcagtatggttctgtatctaccaatctccagagcggcaacacacaagcagctacctcagatgtcaacacacaaggcgttcttccaggcatggtctggcaggacagagacgtgtacctgcagggacccatctgggcaaagattccacacacggacggacattttcacccttctcctcttatgggaggatttggactgaagcaccctcccccgcagattctcatcaagaataccccggtacctgcgaatccttctaccaccttcagcgcggcaaagtttgcttccttcatcacacagtactccacggggcaggtcagcgtggagatcgagtgggagctgcagaaagagaacagcaaacgctggaaccccgagatccagtatacctccaactacaacaagtctgttaatgtggactttactgtggacactaatggcgtgtattcagagcctcgccccattggcacaagatacctgactcgtaatctgtaa

SEQ ID NO: 430 - DNA, 4090 bp, Artificial Sequence
  Synthetic Polynucleotide
atgccggggttctacgagattgtgattaaggtccccagcgaccttgacgagcatttgcccggcatttctgacagctttgtgaactgggtggccgagaaggaatgggagttgccgccagattctgacatggatctgaatctgattgagcaggcacccctgaccgtggccgagaagctgcagcgcgactttctgacggagtggcgccgtgtgagtaaggccccggaggcccttttctttgtgcaatttgagaagggagagagctacttccatatgcacgtgcttgtggagaccaccggggtgaaatccatggttttgggacgcttcctgagtcagattcgcgaaaaactgattcagagaatttaccgcgggatcgagccgactttgccaaattggttcgcggttacaaagactcgaaatggcgccggaggcgggaacaaggtggtggatgagtgctacatccccaattacctgctccccaaaacccagcctgagctccagtgggcgtggactaatatggaacagtatttaagcgcctgtttgaatctcgcggagcgtaaacggttggtggcgcagcatctgacgcacgtgtcgcagacgcaggagcagaacaaagagaatcagaatcccaattctgacgcgccggtgattagatcaaaaacatcagccaggtacatggagctggtcgggtggctcgtggataaggggattacctcggagaagcagtggatccaggaggaccaggcctcatacatttccttcaatgcggcctccaactcgcggtcccagatcaaggctgctctggacaatgcggggaagatcatgagcctgactaaaaccgcccccgactacctggtgggccagcagcccgtggaggacatttccagcaatcggatttataaaatcttggaactgaacgggtacgatccccaatatgcggcttccgtcttcctgggatgggctacgaaaaagttcggcaagaggaacaccatctggctgtttgggcctgcgactaccgggaagacaaacatcgcggaggctatagcccacacggtacccttctacgggtgcgtaaactggaccaatgagaactttccgttcaatgactgcgtcgacaagatggtgatctggtgggaggaggggaagatgaccgccaaggtcgtggaatcggccaaagccattctcggtggaagcaaggtacgcgtggaccagaaatgcaagtcctcggcccagatagacccgactcccgtgatcgtcacctccaacaccaatatgtgcgccgtgattgacgggaactcaacgaccttcgaacaccagcagccgttgcaagaccggatgttcaaatttgaactcacccgccgtctggatcatgactttgggaaggtcaccaagcaggaagtcaaagactttttccggtgggcccaagaccacgtggtagaggtggagcatgaattctacgtcaaaaagggtggagctaagaaaaggcccgcccccagtgacgcagatataagtgagcccaaacgggcgcgcgagtcagttgcgcagccatcgacgtcagacgcggaagcttcgatcaactacgcggacaggtaccaaaacaaatgttctcgtcacgtgggcatgaatctgatgctgtttccctgcagacaatgcgagagaatgaatcagaattcaaatatctgcttcactcacggacagaaagactgtttagagtgctttcccgtgtcagaatctcaacccgtttctgtcgtcaaaaaggcgtatcagaaactgtgctatattcatcatatcatgggaaaggtaccagacgcttgcactgcttgcgacctggtaaatgtggatttggatgactgcatctctgaacaataaatgatttaaatcaggtatggctgccgatggttatcttccagattggctcgaggacactctctctgaaggaataagacagtggtggaagctcaaacctggcccaccaccgccaaagcccgcagagcggcataaggacgacagcaggggtcttgtgcttcctgggtacaagtacctcggacccttcaacggactcgacaaaggagagccggtcaacgaggcagacgccgcggccctcgagcacgacaaggcctacgaccggcagctcgacagcggagacaacccgtacctcaagtacaaccacgccgacgcggagtttcaggagcgccttaaagaagatacgtcttttgggggcaacctcgcaagagcagtattccaggcgaaaaagagggttcttgaacctctgggcctggttgaggagcctgttaagacggctccgggaaaaaagaggccggtagagcactctcctgcggagccagattcctcctccggaactggaaagtcgggccaacagcctgcaagaaagagattgaattttggtcagactggagacgcagactccgtacctgacccccagcctctcggacagccaccagcagccccctctggtctgggaactaatacgatggcttcaggcagtggcgcaccaatggcagacaataacgagggcgccgacggagtgggtaattcctcgggaaattggcattgcgattccacatggatgggcgacagagtcatcaccaccagcacccgcacctgggctctgcccacctacaacaaccatctgtacaagcaaatttccagccagtctggagccagcaacgacaaccactactttggctacagcaccccttgggggtattttgacttcaacagattccactgccacttctccccacgtgactggcaaagactcatcaacaacaattggggattccggcccaaaagactcaacttcaagctctttaacattcaagtcaaggaggtcacgcagaatgacggtacgacgacgattgccaataaccttaccagcacggttcaggtgtttactgactcggagtaccagctcccgtacgtcctcggctcggcgcatcaaggatgcctcccgccgttcccagcagacgtcttcatggtgccacagtatggatacctcaccctgaacaacgggagtcaggcggtaggacgctcttcattttactgcctggagtactttccttctcagatgctgcgtaccggaaacaactttaccttcagccacacctttgaggacgttccttttcacagcagctacgctcacagccagagtttggaccgtctcatgaatcctctcatcgaccagtacctgtattacttgagcagaacaaacactccaagcggaaccactacgcagtccaggcttcagttttctcaagccggagcgagtgacattcgggaccagtctaggaactggcttcctggaccctgttaccgccagcagcgagtatcaaagacagctgcggacaacaacaacagtgattactcgtggactggagctaccaagtatcacctcaatggaagagactctctggtgaatccgggcacagccatggccagccacaaggacgatgaagaaaagtattttcctcagagcggggttctcatcttcggaaaacaagactcgggaaaaactaatgtggacattgaaaaggtcatgattacagacgaagaggaaatcaggaccaccaatcccgtggctacggagcagtatggttctgtatctaccaatctccagagcggcaacacacaagcagctacctcagatgtcaacacacaaggcgttcttccaggcatggtctggcaggacagagacgtgtacctgcagggacccatctgggcaaagattccacacacggacggacattttcacccttctcctcttatgggaggatttggactgaagcaccctcccccgcagattctcatcaagaataccccggtacctgcgaatccttctaccaccttcagcgcggcaaagtttgcttccttcatcacacagtactccacggggcaggtcagcgtggagatcgagtgggagctgcagaaagagaacagcaaacgctggaaccccgagatccagtatacctccaactacaacaagtctgttaatgtggactttactgtggacactaatggcgtgtattcagagcctcgccccattggcacaagatacctgactcgtaatctgtaa

SEQ ID NO: 431 - DNA, 4090 bp, Artificial Sequence
  Synthetic Polynucleotide
atgccggggttctacgagattgtgattaaggtccccagcgaccttgacgagcatttgcccggcatttctgacagctttgtgaactgggtggccgagaaggaatgggagttgccgccagattctgacatggatctgaatctgattgagcaggcacccctgaccgtggccgagaagctgcagcgcgactttctgacggagtggcgccgtgtgagtaaggccccggaggcccttttctttgtgcaatttgagaagggagagagctacttccatatgcacgtgcttgtggagaccaccggggtgaaatccatggttttgggacgcttcctgagtcagattcgcgaaaaactgattcagagaatttaccgcgggatcgagccgactttgccaaattggttcgcggttacaaagactcgaaatggcgccggaggcgggaacaaggtggtggatgagtgctacatccccaattacctgctccccaaaacccagcctgagctccagtgggcgtggactaatatggaacagtatttaagcgcctgtttgaatctcgcggagcgtaaacggttggtggcgcagcatctgacgcacgtgtcgcagacgcaggagcagaacaaagagaatcagaatcccaattctgacgcgccggtgattagatcaaaaacatcagccaggtacatggagctggtcgggtggctcgtggataaggggattacctcggagaagcagtggatccaggaggaccaggcctcatacatttccttcaatgcggcctccaactcgcggtcccagatcaaggctgctctggacaatgcggggaagatcatgagcctgactaaaaccgcccccgactacctggtgggccagcagcccgtggaggacatttccagcaatcggatttataaaatcttggaactgaacgggtacgatccccaatatgcggcttccgtcttcctgggatgggctacgaaaaagttcggcaagaggaacaccatctggctgtttgggcctgcgactaccgggaagacaaacatcgcggaggctatagcccacacggtacccttctacgggtgcgtaaactggaccaatgagaactttccgttcaatgactgcgtcgacaagatggtgatctggtgggaggaggggaagatgaccgccaaggtcgtggaatcggccaaagccattctcggtggaagcaaggtacgcgtggaccagaaatgcaagtcctcggcccagatagacccgactcccgtgatcgtcacctccaacaccaatatgtgcgccgtgattgacgggaactcaacgaccttcgaacaccagcagccgttgcaagaccggatgttcaaatttgaactcacccgccgtctggatcatgactttgggaaggtcaccaagcaggaagtcaaagactttttccggtgggcccaagaccacgtggtagaggtggagcatgaattctacgtcaaaaagggtggagctaagaaaaggcccgcccccagtgacgcagatataagtgagcccaaacgggcgcgcgagtcagttgcgcagccatcgacgtcagacgcggaagcttcgatcaactacgcggacaggtaccaaaacaaatgttctcgtcacgtgggcatgaatctgatgctgtttccctgcagacaatgcgagagaatgaatcagaattcaaatatctgcttcactcacggacagaaagactgtttagagtgctttcccgtgtcagaatctcaacccgtttctgtcgtcaaaaaggcgtatcagaaactgtgctatattcatcatatcatgggaaaggtaccagacgcttgcactgcttgcgacctggtaaatgtggatttggatgactgcatctctgaacaataaatgatttaaatcaggtatggctgccgatggttatcttccagattggctcgaggacactctctctgaaggaataagacagtggtggaagctcaaacctggcccaccaccgccaaagcccgcagagcggcataaggacgacagcaggggtcttgtgcttcctgggtacaagtacctcggacccttcaacggactcgacaaaggagagccggtcaacgaggcagacgccgcggccctcgagcacgacaaggcctacgaccggcagctcgacagcggagacaacccgtacctcaagtacaaccacgccgacgcggagtttcaggagcgccttaaagaagatacgtcttttgggggcaacctcgcaagagcagtattccaggcgaaaaagagggttcttgaacctctgggcctggttgaggagcctgttaagacggctccgggaaaaaagaggccggtagagcactctcctgcggagccagattcctcctccggaactggaaagtcgggccaacagcctgcaagaaagagattgaattttggtcagactggagacgcggactccgtacctgacccccagcctctcggacagccaccagcagccccctctggtctgggaactaatacgatggcttcaggcagtggcgcaccaatggcagacaataacgagggcgccgacggagtgggtaattcctcgggaaattggcattgcgattccacatggatgggcgacagagtcatcaccaccagcacccgcacctgggctctgcccacctacaacaaccatctgtacaagcaaatttccagccagtctggagccagcaacgacaaccactactttggctacagcaccccttgggggtattttgacttcaacagattccactgccacttctccccacgtgactggcaaagactcatcaacaacaattggggattccggcccaaaagactcaacttcaagctctttaacattcaagtcaaggaggtcacgcagaatgacggtacgacgacgattgccaataaccttaccagcacggttcaggtgtttactgactcggagtaccagctcccgtacgtcctcggctcggcgcatcaaggatgcctcccgccgttcccagcagacgtcttcatggtgccacagtatggatacctcaccctgaacaacgggagtcaggcggtaggacgctcttcattttactgcctggagtactttccttctcagatgctgcgtaccggaaacaactttaccttcagctacacctttgaggacgttccttttcacagcagctacgctcacagccagagtttggaccgtctcatgaatcctctcatcgaccagtacctgtattacttgagcagaacaaacactccaagcggaaccactacgcagtccaggcttcagttttctcaagccggagcgagtgacattcgggaccagtctaggaactggcttcctggaccctgttaccgccagcagcgagtatcaaagacagctgcggacaacaacaacagtgattactcgtggactggagctaccaagtatcacctcaatggaagagactctctggtgaatccgggcacagccatggccagccacaaggacgatgaagaaaagtattttcctcagagcggggttctcatcttcggaaaacaagactcgggaaaaactaatgtggacattgaaaaggtcatgattacagacgaagaggaaatcaggaccaccaatcccgtggctacggagcagtatggttctgtatctaccaatctccagagcggcaacacacaagcagctacctcagatgtcaacacacaaggcgttcttccaggcatggtctggcaggacagagacgtgtacctgcagggacccatctgggcaaagattccacacacggacggacattttcacccttctcctcttatgggaggatttggactgaagcaccctcccccgcagattctcatcaagaataccccggtacctgcgaatccttctaccaccttcagcgcggcaaagtttgcttccttcatcacacagtactccacggggcaggtcagcgtggagatcgagtgggagctgcagaaagagaacagcaaacgctggaaccccgagatccagtatacctccaactacaacaagtctgttaatgtggactttactgtggacactaatggcgtgtattcagagcctcgccccattggcacaagatacctgactcgtaatctgtaa

SEQ ID NO: 432 - DNA, 4090 bp, Artificial Sequence
  Synthetic Polynucleotide
atgccggggttctacgagattgtgattaaggtccccagcgaccttgacgagcatttgcccggcatttctgacagctttgtgaactgggtggccgagaaggaatgggagttgccgccagattctgacatggatctgaatctgattgagcaggcacccctgaccgtggccgagaagctgcagcgcgactttctgacggagtggcgccgtgtgagtaaggccccggaggcccttttctttgtgcaatttgagaagggagagagctacttccatatgcacgtgcttgtggagaccaccggggtgaaatccatggttttgggacgcttcctgagtcagattcgcgaaaaactgattcagagaatttaccgcgggatcgagccgactttgccaaattggttcgcggttacaaagactcgaaatggcgccggaggcgggaacaaggtggtggatgagtgctacatccccaattacctgctccccaaaacccagcctgagctccagtgggcgtggactaatatggaacagtatttaagcgcctgtttgaatctcgcggagcgtaaacggttggtggcgcagcatctgacgcacgtgtcgcagacgcaggagcagaacaaagagaatcagaatcccaattctgacgcgccggtgattagatcaaaaacatcagccaggtacatggagctggtcgggtggctcgtggataaggggattacctcggagaagcagtggatccaggaggaccaggcctcatacatttccttcaatgcggcctccaactcgcggtcccagatcaaggctgctctggacaatgcggggaagatcatgagcctgactaaaaccgcccccgactacctggtgggccagcagcccgtggaggacatttccagcaatcggatttataaaatcttggaactgaacgggtacgatccccaatatgcggcttccgtcttcctgggatgggctacgaaaaagttcggcaagtggaacaccatctggctgtttgggcctgcgactaccgggaagacaaacatcgcggaggctatagcccacacggtacccttctacgggtgtgtaaactggaccaatgagaactttccgttcaatgactgcgtcgacaagatggtgatctggtgggaggaggggaagatgaccgccaaggtcgtggaatcggccaaagccattctcggtggaagcaaggtacgcgtggaccagaaatgcaagtcctcggcccagatagacccgactcccgtgatcgtcacctccaacaccaatatgtgcgccgtgattgacgggaactcaacgaccttcgaacaccagcagccgttgcaagaccggatgttcaaatttgaactcacccgccgtctggatcatgactttgggaaggtcaccaagcaggaagtcaaagactttttccggtgggcccaagaccacgtggtagaggtggagcatgaattctacgtcaaaaagggtggagctaagaaaaggcccgcccccagtgacgcagatataagtgagcccaaacgggcgcgcgagtcagttgcgcagccatcgacgtcagacgcggaagcttcgatcaactacgcggacaggtaccaaaacaaatgttctcgtcacgtgggcatgaatctgatgctgtttccctgcagacaatgcgagagaatgaatcagaattcaaatatctgcttcactcacggacagaaagactgtttagagtgctttcccgtgtcagaatctcaacccgtttctgtcgtcaaaaaggcgtatcagaaactgtgctatattcatcatatcatgggaaaggtaccagacgcttgcactgcttgcgacctggtaaatgtggatttggatgactgcatctctgaacaataaatgatttaaatcaggtatggctgccgatggttatcttccagattggctcgaggacactctctctgaaggaataagacagtggtggaagctcaaacctggcccaccaccgccaaagcccgcagagcggcataaggacgacagcaggggtcttgtgcttcctgggtacaagtacctcggacccttcaacggactcgacaaaggagagccggtcaacgaggcagacgccgcggccctcgagcacgacaaggcctacgaccggcagctcgacagcggagacaacccgtacctcaagtacaaccacgccgacgcggagtttcaggagcgccttaaagaagatacgtcttttgggggcaacctcgcaagagcagtattccaggcgaaaaagagggttcttgaacctctgggcctggttgaggagcctgttaagacggctccgggaaaaaagaggccggtagagcactctcctgcggagccagattcctcctccggaactggaaagtcgggccaacagcctgcaagaaagagattgaattttggtcagactggagacgcagactccgtacctgacccccagcctctcggacagccaccagcagccccctctggtctgggaactaatacgatggcttcaggcagtggcgcaccaatggcagacaataacgagggcgccgacggagtgggtaattcctcgggaaattggcattgcgattccacatggatgggcgacagagtcatcaccaccagcacccgcacctgggctctgcccacctacaacaaccatctgtacaagcaaatttccagccagtctggagccagcaacgacaaccactactttggctacagcaccccttgggggtattttgacttcaacagattccactgccacttctccccacgtgactggcaaagactcatcaacaacaattggggattccggcccaaaagactcaacttcaagctctttaacattcaagtcaaggaggtcacgcagaatgacggtacgacgacgattgccaataaccttaccagcacggttcaggtgtttactgactcggagtaccagctcccgtacgtcctcggctcggcgcatcaaggatgcctcccgccgttcccagcagacgtcttcatggtgccacagtatggatacctcaccctgaacaacgggagtcaggcggtaggacgctcttcattttactgcctggagtactttccttctcagatgctgcgtaccggaaacaactttaccttcagctacacctttgaggacgttccttttcacagcagctacgctcacagccagagtttggaccgtctcatgaatcctctcatcgaccagtacctgtattacttgagcagaacaaacactccaagcggaaccactacgcagtccaggcttcagttttctcaagccggagcgagtgacattcgggaccagtctaggaactggcttcctggaccctgttaccgccagcagcgagtatcaaagacagctgcggacaacaacaacagtgattactcgtggactggagctaccaagtatcacctcaatggaagagactctctggtgaatccgggcacagccatggccagccacaaggacgatgaagaaaagtattttcctcagagcggggttctcatcttcggaaaacaagactcgggaaaaactaatgtggacattgaaaaggtcatgattacagacgaagaggaaatcaggaccaccaatcccgtggctacggagcagtatggttctgtatctaccaatctccagagcggcaacacacaagcagctacctcagatgtcaacacacaaggcgttcttccaggcatggtctggcaggacagagacgtgtacctgcagggacccatctgggcaaagattccacacacggacggacattttcacccttctcctcttatgggaggatttggactgaagcaccctcccccgcagattctcatcaagaataccccggtacctgcgaatccttctaccaccttcagcgcggcaaagtttgcttccttcatcacacagtactccacggggcaggtcagcgtggagatcgagtgggagctgcagaaagagaacagcaaacgctggaaccccgagatccagtatacctccaactacaacaagtctgttaatgtggactttactgtggacactaatggcgtgtattcagagcctcgccccattggcacaagatacctgactcgtaatctgtaa

SEQ ID NO: 433 - DNA, 4090 bp, Artificial Sequence
  Synthetic Polynucleotide
atgccggggttctacgagattgtgattaaggtccccagcgaccttgacgagcatttgcccggcatttctgacagctttgtgaactgggtggccgagaaggaatgggagttgccgccagattctgacatggatctgaatctgattgagcaggcacccctgaccgtggccgagaagctgcagcgcgactttctgacggagtggcgccgtgtgagtaaggccccggaggcccttttctttgtgcaatttgagaagggagagagctacttccatatgcacgtgcttgtggagaccaccggggtgaaatccatggttttgggacgcttcctgagtcagattcgcgaaaaactgattcagagaatttaccgcgggatcgagccgactttgccaaattggttcgcggttacaaagactcgaaatggcgccggaggcgggaacaaggtggtggatgagtgctacatccccaattacctgctccccaaaacccagcctgagctccagtgggcgtggactaatatggaacagtatttaagcgcctgtttgaatctcgcggagcgtaaacggttggtggcgcagcatctgacgcacgtgtcgcagacgcaggagcagaacaaagagaatcagaatcccaattctgacgcgccggtgattagatcaaaaacatcagccaggtacatggagctggtcgggtggctcgtggataaggggattacctcggagaagcagtggatccaggaggaccaggcctcatacatttccttcaatgcggcctccaactcgcggtcccagatcaaggctgctctggacaatgcggggaagatcatgagcctgactaaaaccgcccccgactacctggtgggccagcagcccgtggaggacatttccagcaatcggatttataaaatcttggaactgaacgggtacgatccccaatatgcggcttccgtcttcctgggatgggctacgaaaaagttcggcaagaggaacaccatctggctgtttgggcctgcgactaccgggaagacaaacatcgcggaggctatagcccacacggtacccttctacgggtgcgtaaactggaccaatgagaactttccgttcaatgactgcgtcgacaagatggtgatctggtgggaggaggggaagatgaccgccaaggtcgtggaatcggccaaagccattctcggtggaagcaaggtacgcgtggaccagaaatgcaagtcctcggcccagatagacccgactcccgtgatcgtcacctccaacaccaatatgtgcgccgtgattgacgggaactcaacgaccttcgaacaccagcagccgttgcaagaccggatgttcaaatttgaactcacccgccgtctggatcatgactttgggaaggtcaccaagcaggaagtcaaagactttttccggtgggcccaagaccacgtggtagaggtggagcatgaattctacgtcaaaaagggtggagctaagaaaaggcccgcccccagtgacgcagatataagtgagcccaaacgggcgcgcgagtcagttgcgcagccatcgacgtcagacgcggaagcttcgatcaactacgcggacaggtaccaaaacaaatgttctcgtcacgtgggcatgaatctgatgctgtttccctgcagacaatgcgagagaatgaatcagaattcaaatatctgcttcactcacggacagaaagactgtttagagtgctttcccgtgtcagaatctcaacccgtttctgtcgtcaaaaaggcgtatcagaaactgtgctatattcatcatatcatgggaaaggtaccagacgcttgcactgcttgcgacctggtaaatgtggatttggatgactgcatctctgaacaataaatgatttaaatcaggtatggctgccgatggttatcttccagattggctcgaggacactctctctgaaggaataagacagtggtggaagctcaaacctggcccaccaccgccaaagcccgcagagcggcataaggacgacagcaggggtcttgtgcttcctgggtacaagtacctcggacccttcaacggactcgacaaaggagagccggtcaacgaggcagacgccgcggccctcgagcacgacaaggcctacgaccggcagctcgacagcggagacaacccgtacctcaagtacaaccacgccgacgcggagtttcaggagcgccttaaagaagatacgtcttttgggggcaacctcgcaagagcagtattccaggcgaaaaagagggttcttgaacctctgggcctggttgaggagcctgttaagacggctccgggaaaaaagaggccggtagagcactctcctgcggagccagattcctcctccggaactggaaagtcgggccaacagcctgcaggaaagagattgaattttggtcggactggagacgcagactccgtacctgacccccagcctctcggacagccaccagcagccccctctggtctgggaactaatacgatggcttcaggcagtggcgcaccaatggcagacaataacgagggcgccgacggagtgggtaattcctcgggaaattggcattgcgattccacatggatgggcgacagagtcatcaccaccagcacccgcacctgggctctgcccacctacaacaaccatctgtacaagcaaatttccagccagtctggagccagcaacgacaaccactactttggctacagcaccccttgggggtattttgacttcaacagattccactgccacttctccccacgtgactggcaaagactcatcaacaacaattggggattccggcccaaaagactcaacttcaagctctttaacattcaagtcaaggaggtcacgcagaatgacggtacgacgacgattgccaataaccttaccagcacggttcaggtgtttactgactcggagtaccagctcccgtacgtcctcggctcggcgcatcaaggatgcctcccgccgttcccagcagacgtcttcatggtgccacagtatggatacctcaccctgaacaacgggagtcaggcggtaggacgctcttcattttactgcctggagtactttccttctcagatgctgcgtaccggaaacaactttaccttcagctacacctttgaggacgttccttttcacagcagctacgctcacagccagagtttggaccgtctcatgaatcctctcatcgaccagtacctgtattacttgagcagaacaaacactccaagcggaaccactacgcagtccaggcttcagttttctccagccggagcgagtgacattcgggaccagtctaggaactggcttcctggaccctgttaccgccagcagcgagtatcaaagacagctgcggacaacaacaacagtgattactcgtggactggagctaccaagtatcacctcaatggaagagactctctggtgaatccgggcacagccatggccagccacaaggacgatgaagaaaagtattttcctcagagcggggttctcatcttcggaaaacaagactcgggaaaaactaatgtggacattgaaaaggtcatgattacagacgaagaggaaatcaggaccaccaatcccgtggctacggagcagtatggttctgtatctaccaatctccagagcggcaacacacaagcagctacctcagatgtcaacacacaaggcgttcttccaggcatggtctggcaggacagagacgtgtacctgcagggacccatctgggcaaagattccacacacggacggacattttcacccttctcctcttatgggaggatttggactgaagcaccctcccccgcagattctcatcaagaataccccggtacctgcgaatccttctaccaccttcagcgcggcaaagtttgcttccttcatcacacagtactccacggggcaggtcagcgtggagatcgagtgggagctgcagaaagagaacagcaaacgctggaaccccgagatccagtatacctccaactacaacaagtctgttaatgtggactttactgtggacactaatggcgtgtattcagagcctcgccccattggcacaagatacctgactcgtaatctgtaa

SEQ ID NO: 434 - DNA, 4087 bp, Artificial Sequence
  Synthetic Polynucleotide
atgccggggttctacgagattgtgattaaggtccccagcgaccttgacgagcatttgcccggcatttctgacagctttgtgaactgggtggccgagaaggaatgggagttgccgccagattctgacatggatctgaatctgattgagcaggcacccctgaccgtggccgagaagctgcagcgcgactttctgacggagtggcgccgtgtgagtaaggccccggaggcccttttctttgtgcaatttgagaagggagagagctacttccatatgcacgtgcttgtggagaccaccggggtgaaatccatggttttgggacgcttcctgagtcagattcgcgaaaaactgattcagagaatttaccgcgggatcgagccgactttgccaaattggttcgcggttacaaagactcgaaatggcgccggaggcgggaacaaggtggtggatgagtgctacatccccaattacctgctccccaaaacccagcctgagctccagtgggcgtggactaatatggaacagtatttaagcgcctgtttgaatctcgcggagcgtaaacggttggtggcgcagcatctgacgcacgtgtcgcagacgcaggagcagaacaaagagaatcagaatcccaattctgacgcgccggtgattagatcaaaaacatcagccaggtacatggagctggtcgggtggctcgtggataaggggattacctcggagaagcagtggatccaggaggaccaggcctcatacatttccttcaatgcggcctccaactcgcggtcccagatcaaggctgctctggacaatgcggggaagatcatgagcctgactaaaaccgcccccgactacctggtgggccagcagcccgtggaggacatttccagcaatcggatttataaaatcttggaactgaacgggtacgatccccaatatgcggcttccgtcttcctgggatgggctacgaaaaagttcggcaagaggaacaccatctggctgtttgggcctgcgactaccgggaagacaaacatcgcggaggctatagcccacacggtacccttctacgggtgcgtaaactggaccaatgagaactttccgttcaatgactgcgtcgacaagatggtgatctggtgggaggaggggaagatgaccgccaaggtcgtggaatcggccaaagccattctcggtggaagcaaggtacgcgtggaccagaaatgcaagtcctcggcccagatagacccgactcccgtgatcgtcacctccaacaccaatatgtgcgccgtgattgacgggaactcaacgaccttcgaacaccagcagccgttgcaagaccggatgttcaaatttgaactcacccgccgtctggatcatgactttgggaaggtcaccaagcaggaagtcaaagactttttccggtgggcccaagaccacgtggtagaggtggagcatgaattctacgtcaaaaagggtggagctaagaaaaggcccgcccccagtgacgcagatataagtgagcccaaacgggcgcgcgagtcagttgcgcagccatcgacgtcagacgcggaagcttcgatcaactacgcggacaggtaccaaaacaaatgttctcgtcacgtgggcatgaatctgatgctgtttccctgcagacaatgcgagagaatgaatcagaattcaaatatctgcttcactcacggacagaaagactgtttagagtgctttcccgtgtcagaatctcaacccgtttctgtcgtcaaaaaggcgtatcagaaactgtgctatattcatcatatcatgggaaaggtaccagacgcttgcactgcttgcgacctggtaaatgtggatttggatgactgcatctctgaacaataaatgatttaaatcaggtatggctgccgatggttatcttccagattggctcgaggacactctctctgaaggaataagacagtggtggaagctcaaacctggcccaccaccgccaaagcccgcagagcggcataaggacgacagcaggggtcttgtgcttcctgggtacaagtacctcggacccttcaacggactcgacaaaggagagccggtcaacgaggcagacgccgcggccctcgagcacgacaaggcctacgaccggcagctcgacagcggagacaacccgtacctcaagtacaaccacgccgacgcggagtttcaggagcgccttaaagaagatacgtcttttgggggcaacctcgcaagagcagtattccaggcgaaaaagagggttcttgaacctctgggcctggttgaggagcctgttaagacggctccgggaaaaaagaggccggtagagcactctcctgcggagccagattcctcctccggaactggaaagtcgggccaacagcctgcaagaaagagattgaattttggtcagactggagacgcagactccgtacctgacccccagcctctcggacagccaccagcagccccctctggtctgggaactaatacgatggcttcaggcagtggcgcaccaatggcagacaataacgagggcgccgacggagtgggtaattcctcgggaaattggcattgcgattccacatggatgggcgacagagtcatcaccaccagcacccgcacctgggctctgcccacctacaacaaccatctgtacaagcaaatttccagccagtctggagccagcaacgacaaccactactttggctacagcaccccttgggggtattttgacttcaacagattccactgccacttctccccacgtgactggcaaagactcatcaacaacaattggggattccggcccaaaagactcaacttcaagctctttaacattcaagtcaaggaggtcacgcagaatgacggtacgacgacgattgccaataaccttaccagcacggttcaggtgtttactgactcggagtaccagctcccgtacgtcctcggctcggcgcatcaaggatgcctcccgccgttcccagcagacgtcttcatggtgccacagtatggatacctcaccctgaacaacgggagtcaggcggtaggacgctcttcattttactgcctggagtactttccttctcagatgctgcgtaccggaaacaactttaccttcagctacacctttgaggacgttccttttcacagcagctacgctcacagccagagtttggaccgtctcatgaatcctctcatcgaccagtacctgtattacttgagcagaacaaacactccaagcggaaccactacgcagtccaggcttcagttttctcaagccggagcgagtgacattcgggaccagtctaggaactggcttcctggaccctgttaccgccagcagcgagtatcaaagacagctgcggacaacaacagtgattactcgtggactggagctaccaagtatcacctcaatggaagagactctctggtgaatccgggcacagccatggccagccacaaggacgatgaagaaaagtattttcctcagagcggggttctcatcttcggaaaacaagactcgggaaaaactaatgtggacattgaaaaggtcatgattacagacgaagaggaaatcaggaccaccaatcccgtggctacggagcagtatggttctgtatctaccaatctccagagcggcaacacacaagcagctacctcagatgtcaacacacaaggcgttcttccaggcatggtctggcaggacagagacgtgtacctgcagggacccatctgggcaaagattccacacacggacggacattttcacccttctcctcttatgggaggatttggactgaagcaccctcccccgcagattctcatcaagaataccccggtacctgcgaatccttctaccaccttcagcgcggcaaagtttgcttccttcatcacacagtactccacggggcaggtcagcgtggagatcgagtgggagctgcagaaagagaacagcaaacgctggaaccccgagatccagtatacctccaactacaacaagtctgttaatgtggactttactgtggacactaatggcgtgtattcagagcctcgccccattggcacaagatacctgactcgtaatctgtaa

SEQ ID NO: 435 - protein, 735 aa, Artificial Sequence
  Synthetic Polypeptide
MAADGYLPDWLEDTLSEGIRQWWKLKPGPPPPRPAERHQDDSRGLVLPGYKYLGPFNGLDKGEPVNEADAAALEHDKAYDRQLDSGDNPYLKYNHADAEFQERLKEDTSFGGNLGRAVFQAKKRVLEPLGLVEEPVKTAPGKKRPVEHSPAEPDSSSGTGKAGQQPARKRLNFGQTGDADSVPDPQPLGQPPAAPTSLGSTTMATGSGAPMADNNEGADGVGNSSGNWHCDSQWLGDRVITTSTRTWALPTYNNHLYKQISSQSGASNDNHYFGYSTPWGYFDFNRFHCHFSPRDWQRLINNNWGFRPKRLNFKLFNIQVKEVTQNDGTTTIANNLTSTVQVFTDSEYQLPYVLGSAHQGCLPPFPADVFMVPQYGYLTLNNGSQAVGRSSLYCLEYFPSQMLRTGNNFTFSYTFEDVPFHSSYAHSQSLDRLMNPLIDQYLYYLNRTQSNSGTLQQSRLLFSQAGPTSMSLQAKNWLPGPCYRQQRLSKQANDNNNSNFPWTAATKYHLNGRDSLVNPGPAMASHKDDEEKFFPMHGTLIFGKQGTNANDADLEHVMITDEEEIRTTNPVATEQYGNVSNNLQNSNTGPTTENVNHQGALPGMVWQDRDVYLQGPIWAKIPHTDGHFHPSPLMGGFGLKHPPPQIMIKNTPVPANPPTNFSAAKFASFITQYSTGQVSVEIEWELQKENSKRWNPEIQYTSNYNKSVNVDFTVDANGVYSEPRPIGTRYLTRNL

SEQ ID NO: 436 - protein, 735 aa, Artificial Sequence
  Synthetic Polypeptide
MAADGYLPDWLEDTLSEGIRQWWKLKPGPPPPRPAERHQDDSRGLVLPGYKYLGPFNGLDKGEPVNEADAAALEHDKAYDRQLDSGDNPYLKYNHADAEFQERLKEDTSFGGNLGRAVFQAKKRVLEPLGLVEEPVKTAPGKKRPVEHSPAEPDSSSGTGKAGQQPARKRLNFGQTGDADSVPDPQPLGQPPAAPTSLGSTTMATGSGAPMADNNEGADGVGNSSGNWHCDPQWLGDRVITTSTRTWALPTYNNHLYKQISSQSGASNDNHYFGYSTPWGYFDFNRFHCHFSPRDWQRLINNNWGFRPKRLNFKLFNIQVKEVTQNDGTTTIANNLTSTVQVFTDSEYQLPYVLGSAHQGCLPPFPADVFMVPQYGYLTLNNGSQAVGRSSFYCLEYFPSQMLRTGNNFTFSYTFEDVPFHSSYAHSQSLDRLMNPLIDQYLYYLNRTQSNSGTLQQSRLLFSQAGPTSMSLQAKNWLPGPCYRQQRLSKQANDNNNSNFPWTAATKYHLNGRDSLVNPGPAMASHKDDEEKFFPMHGTLIFGKQGTNANDADLEHVMITDEEEIRTTNPVATEQYGNVSNNLQNSNTGPTTENVNHQGALPGMVWQDRDVYLQGPIWAKIPHTDGHFHPSPLMGGFGLKHPPPQIMIKNTPVPANPPTNFSAAKFASFITQYSTGQVSVEIEWELQKENSKRWNPEIQYTSNYNKSVNVDFTVDANGVYSEPRPIGTRYLTRNL

SEQ ID NO: 437 - protein, 735 aa, Artificial Sequence
  Synthetic Polypeptide
MAADGYLPDWLEDTLSEGIRQWWKLKPGPPPPRPAERHQDDSRGLVLPGYKYLGPFNGLDKGEPVNEADAAALEHDKAYDRQLDSGDNPYLKYNHADAEFQERLKEDTSFGGNLGRAVSQAKKRVLEPLGLVEEPVKTAPGKKRPVEHSPAEPDSSSGTGKAGQQPARKRLNFGQTGDADSVPDPQPLGQPPAAPTSLGSTTMATGSGAPMADNNEGADGVGNSSGNWHCDSQWLGDRVITTSTRTWALPTYNNHLYKQISSQSGASNDNHYFGYSTPWGYFDFNRFHCHFSPRDWQRLINNNWGFRPKRLNFKLFNIQVKEVTQNDGTTTIANNLTSTVQVFTDSEYQLPYVLGSAHQGCLPPFPADVFMVPQYGYLTLNNGSQAVGRSSFYCLEYFPSQMLRTGNNFTFSYTFEDVPFHSSYAHSQSLDRLMNPLIDQYLYYLNRTQSNSGTLQQSRLLFSQAGPTSMSLQAKNWLPGPCYRQQRLSKQANDNNNSNFPWTAATKYHLNGRDSLVNPGPAMASHKDDEEKFFPMHGTLIFGKQGTNANDADLEHVMITDEEEIRTTNPVATEQYGNVSNNLQNSNTGPTTENVNHQGALPGMVWQDRDVYLQGPIWAKIPHTDGHFHPSPLMGGFGLKHPPPQIMIKNTPVPANPPTNFSAAKFASFITQYSTGQVSVEIEWELQKENSKRWNPEIQYTSNYNKSVNVDFTVDANGVYSEPRPIGTRYLTRNL

SEQ ID NO: 438 - protein, 735 aa, Artificial Sequence
  Synthetic Polypeptide
MAADGYLPDWLEDTLSEGIRQWWKLKPGPPPPRPAERHQDDSRGLVLPGYKYLGPFNGLDKGEPVNEADAAALEHDKAYDRQLDSGDNPYLKYNHADAEFQERLKEDTSFGGNLGRAVFQAKKRVLEPLGLVEEPVKTAPGKKRPVEHSPAEPDSSSGTGKAGQQPARKRLNFGQTGDADSVPDPQPLGQPPAAPTSLGSTTMATGSGAPMADNNEGADGVGNSSGNWHCDSQWLGDRVITTSTRTWALPTYNNHLYKQISSQSGASNDNHYFGYSTPWGYFDFNRFHCHFSPRDWQRLINNNWGFRPKRLNFKLFNIQVKEVTQNDGTTTIANNLTSTVQVFTDSEYQLPYVLGSAHQGCLPPFPADVFMVPQYGYLTLNNGSQAVGRSSFYCLEYFPSQMLRTGNNFTFSYTFEDVPFHSSYAHSQSLDRLMSPLIDQYLYYLNRTQSNSGTLQQSRLLFSQAGPTSMSLQAKNWLPGPCYRQQRLSKQANDNNNSNFPWTAATKYHLNGRDSLVNPGPAMASHKDDEEKFFPMHGTLIFGKQGTNANDADLEHVMITDEEEIRTTNPVATEQYGNVSNNLQNSNTGPTTENVNHQGALPGMVWQDRDVYLQGPIWAKIPHTDGHFHPSPLMGGFGLKHPPPQIMIKNTPVPANPPTNFSAAKFASFITQYSTGQVSVEIEWELQKENSKRWNPEIQYTSNYNKSVNVDFTVDANGVYSEPRPIGTRYLTRNL

SEQ ID NO: 439 - protein, 735 aa, Artificial Sequence
  Synthetic Polypeptide
MAADGYLPDWLEDTLSEGIRQWWKLKPGPPPPRPAERHQDDSRGLVLPGYKYLGPFNGLDKGEPVNEADAAALEHDKAYDRQLDSGDNPYLKYNHADAEFQERLKEDTSFGGNLGRAVFQAKKRVLEPLGLVEEPVKTAPGKKRPVEHSPAEPDSSSGTGKAGQQPARKRLNFGQTGDADSVPDPQPLGQPPAAPTSLGSTTMATGSGAPMAGNNEGADGVGNSSGNWHCDSQWLGDRVITTSTRTWALPTYNNHLYKQISSQSGASNDNHYFGYSTPWGYFDFNRFHCHFSPRDWQRLINNNWGFRPKRLNFKLFNIQVKEVTQNDGTTTIANNLTSTVQVFTDSEYQLPYVLGSAHQGCLPPFPADVFMVPQYGYLTLNNGSQAVGRSSFYCLEYFPSQMLRTGNNFTFSYTFEDVPFHSSYAHSQSLDRLMNPLIDQYLYYLNRTQSNSGTLQQSRLLFSQAGPTSMSLQAKNWLPGPCYRQQRLSKQANDNNNSNFPWTAATKYHLNGRDSLVNPGPAMASHKDDEEKFFPMHGTLIFGKQGTNANDADLEHVMITDEEEIRTTNPVATEQYGNVSNNLQNSNTGPTTENVNHQGALPGMVWQDRDVYLQGPIWAKIPHTDGHFHPSPLMGGFGLKHPPPQIMIKNTPVPANPPTNFSAAKFASFITQYSTGQVSVEIEWELQKENSKRWNPEIQYTSNYNKSVNVDFTVDANGVYSEPRPIGTRYLTRNL

SEQ ID NO: 440 - protein, 735 aa, Artificial Sequence
  Synthetic Polypeptide
MAADGYLPDWLEDTLSEGIRQWWKLKPGPPPPRPAERHQDDSRGLVLPGYKYLGPFNGLDKGEPVNEADAAALEHDKAYDRQLDSGDNPYLKYNHADAEFQERLKEDTSFGGNLGRAVFQAKKRVLEPLGLVEEPVKTAPGKKRPVEHSPAEPDSSSGTGKAGQQPARKRLNFGQTGDADSVPDPQPLGQPPAAPTSLGSTTMATGSGAPMADSNEGADGVGNSSGNWHCDSQWLGDRVITTSTRTWALPTYNNHLYKQISSQSGASNDNHYFGYSTPWGYFDFNRFHCHFSPRDWQRLINNNWGFRPKRLNFKLFNIQVKEVTQNDGTTTIANNLTSTVQVFTDSEYQLPYVLGSAHQGCLPPFPADVFMVPQYGYLTLNNGSQAVGRSSFYCLEYFPSQMLRTGNNFTFSYTFEDVPFHSSYAHSQSLDRLMNPLIDQYLYYLNRTQSNSGTLQQSRLLFSQAGPTSMSLQAKNWLPGPCYRQQRLSKQANDNNNSNFPWTAATKYHLNGRDSLVNPGPAMASHKDDEEKFFPMHGTLIFGKQGTNANDADLEHVMITDEEEIRTTNPVATEQYGNVSNNLQNSNTGPTTENVNHQGALPGMVWQDRDVYLQGPIWAKIPHTDGHFHPSPLMGGFGLKHPPPQIMIKNTPVPANPPTNFSAAKFASFITQYSTGQVSVEIEWELQKENSKRWNPEIQYTSNYNKSVNVDFTVDANGVYSEPRPIGTRYLTRNL

SEQ ID NO: 441 - protein, 735 aa, Artificial Sequence
  Synthetic Polypeptide
MAADGYLPDWLEDTLSEGIRQWWKLKPGPPPPRPAERHQDDSRGLVLPGYKYLGPFNGLDKGEPVNEADAAALEHDKAYDRQLDSGDNPYLKYNHADAEFQERLKEDTSFGGNLGRAVFQAKKRVLEPLGLVEEPVKTAPGKKRPVEHSPAEPDSSSGTGKAGQQPARKRLNFGQTGDADSVPDPQPLGQPPAAPTSLGSTTMATGSGAPMADNNEGADGVGNSSGNWHCDSQWLGDRVITTSTRTWALPTYNNHHYKQISSQSGASNDNHYFGYSTPWGYFDFNRFHCHFSPRDWQRLINNNWGFRPKRLNFKLFNIQVKEVTQNDGTTTIANNLTSTVQVFTDSEYQLPYVLGSAHQGCLPPFPADVFMVPQYGYLTLNNGSQAVGRSSFYCLEYFPSQMLRTGNNFTFSYTFEDVPFHSSYAHSQSLDRLMNPLIDQYLYYLNRTQSNSGTLQQSRLLFSQAGPTSMSLQAKNWLPGPCYRQQRLSKQANDNNNSNFPWTAATKYHLNGRDSLVNPGPAMASHKDDEEKFFPMHGTLIFGKQGTNANDADLEHVMITDEEEIRTTNPVATEQYGNVSNNLQNSNTGPTTENVNHQGALPGMVWQDRDVYLQGPIWAKIPHTDGHFHPSPLMGGFGLKHPPPQIMIKNTPVPANPPTNFSAAKFASFITQYSTGQVSVEIEWELQKENSKRWNPEIQYTSNYNKSVNVDFTVDANGVYSEPRPIGTRYLTRNL

SEQ ID NO: 442 - protein, 735 aa, Artificial Sequence
  Synthetic Polypeptide
MAADGYLPDWLEDTLSEGIRQWWKLKPGPPPPRPAERHQDDSRGLVLPGYKYLGPFNGLDKGEPVNEADAAALEHDKAYDRQLDSGDNPYLKYNHADAEFQERLKEDTSFGGNLGRAVFQAKKRVLEPLGLVEEPVKTAPGKKRPVEHSPAEPDSSSGTGKAGQQPARKRLNFGQTGDADSVPDPQPLGQPPAAPTSLGSTTMATGSGAPMADNNEGADGVGNSSGNWHCDSQWLGDRVITTSTRTWALPTYNNHLYKQISSQSGASNDNHYFGYSTPWGYFDFNRFHCHFSPRDWQRLINNNWGFRPKRLNFKLFNIQVKEVTQNDGTTTIANNLTSTVRVFTDSEYQLPYVLGSAHQGCLPPFPADVFMVPQYGYLTLNNGSQAVGRSSFYCLEYFPSQMLRTGNNFTFSYTFEDVPFHSSYAHSQSLDRLMNPLIDQYLYYLNRTQSNSGTLQQSRLLFSQAGPTSMSLQAKNWLPGPCYRQQRLSKQANDNNNSNFPWTAATKYHLNGRDSLVNPGPAMASHKDDEEKFFPMHGTLIFGKQGTNANDADLEHVMITDEEEIRTTNPVATEQYGNVSNNLQNSNTGPTTENVNHQGALPGMVWQDRDVYLQGPIWAKIPHTDGHFHPSPLMGGFGLKHPPPQIMIKNTPVPANPPTNFSAAKFASFITQYSTGQVSVEIERELQKENSKRWNPEIQYTSNYNKSVNVDFTVDANGVYSEPRPIGTRYLTRNL

SEQ ID NO: 443 - protein, 735 aa, Artificial Sequence
  Synthetic Polypeptide
MAADGYLPDWLEDTLSEGIRQWWKLKPGPPPPRPAERHQDDSRGLVLPGYKYLGPFNGLDKGEPVNEADAAALEHDKAYDRQLDSGDNPYLKYNHADAEFQERLKEDTSFGGNLGRAVFQAKKRVLEPLGLVEEPVKTAPGKKRPVEHSPAEPDSSSGTGKAGQQPARKRLNFGQTGDADSVPDPQPLGQPPAAPTSLGSTTMATGSGAPMADNNEGADGVGNSSGNWHCDSQWLGDRVITTSTRTWALPTYNNHLYKQISSQSGASNDNHYFGYSTPWGYFDFNRFHCHFSPRDWQRLINNNWGFRPKRLNFKLFNIQVKEVTQNDGTTTIANNLTSTVQVFTDSEYQLPYVLGSAHQGCLPPFPADVFMVPQYGYLTLNNGSQAVGRSSFYCLEYFPSQMLRTGNNFTFSYTFEDVPSHSSYAHSQSLDRLMNPLIDQYLYYLNRTQSNSGTLQQSRLLFSQAGPTSMSLQAKNWLPGPCYRQQRLSKQANDNNNSNFPWTAATKYHLNGRDSLVNPGPAMASHKDDEEKFFPMHGTLIFGKQGTNANDADLEHVMITDEEEIRTTNPVATEQYGNVSNNLQNSNTGPTTENVNHQGALPGMVWQDRDVYLQGPIWAKIPHTDGHFHPSPLMGGFGLKHPPPQIMIKNTPVPANPPTNFSAAKFASFITQYSTGQVSVEIEWELQKENSKRWNPEIQYTSNYNKSVNVDFTVDANGVYSEPRPIGTRYLTRNL

SEQ ID NO: 444 - protein, 735 aa, Artificial Sequence
  Synthetic Polypeptide
MAADGYLPDWLEDTLSEGIRQWWKLKPGPPPPRPAERHQDDSRGLVLPGYKYLGPFNGLDKGEPVNEADAAALEHDKAYDRQLDSGDNPYLKYNHADAEFQERLKEDTSFGGNLGRAVFQAKKRVLEPLGLVEEPVKTAPGKKRPVEHSPAEPDSSSGTGKAGQRPARKRLNFGQTGDADSVPDPQPLGQPPAAPTSLGSTTMATGSGAPMADNNEGADGVGNSSGNWHCDSQWLGDRVITTSTRTWALPTYNNHLYKQISSQSGASNDNHYFGYSTPWGYFDFNRFHCHFSPRDWQRLINNNWGFRPKRLNFKLFNIQVKEVTQNDGTTTIANNLTSTVQVFTDSEYQLPYVLGSAHQGCLPPFPADVFMVPQYGYLTLNNGSQAVGRSSFYCLEYFPSQMLRTGNNFTFSYTFEDVPFHSSYAHSQSLDRLMNPLIDQYLYYLNRTQSNSGTLQQSRLLFSQAGPTSMSLQAKNWLPGPCYRQQRLSKQANDNNNSNFPWTAATKYHLNGRDSLVNPGPAMASHKDDEEKFFPMHGTLIFGKQGTNANDADLEHVMITDEEEIRTTNPVATEQYGNVSNNLQNSNTGPTTENVNHQGALPGMVWQDRDVYLQGPIWAKIPHTDGHFHPSPLMGGFGLKHPPPQIMIKNTPVPANPPTNFSAAKFASFITQYSTGQVSVEIEWELQKENSKRWNPEIQYTSNYNKSVNVDFTVDANGVYSEPRPIGTRYLTRNL

SEQ ID NO: 445 - protein, 735 aa, Artificial Sequence
  Synthetic Polypeptide
MAADGYLPDWLEDTLSEGIRQWWKLKPGPPPPKPAERHKDDSRGLVLPGYKYLGPFNGLDKGEPVNEADAAALEHDKAYDRQLDSGDNPYLKYNHADAEFQERLKEDTSFGGNLARAVFQAKKRVLEPLGLVEEPVKTAPGKKRPVEHSPAEPDSSSGTGKSGQQPARKRLNFGQTGDADSVPDPQPLGQPPAAPSGLGTNTMASGSGAPMADNNEGADGVGNSSGNWHCDSTWMGDRVITTSTRTWALPTYNNHLYKQISSQSGAANDNHYFGYSTPWGYFDFNRFHCHFSPRDWQRLINNNWGFRPKRLNFKLFNIQVKEVTQNDGTTTIANNLTSTVQVFTDSEYQLPYVLGSAHQGCLPPFPADVFMVPQYGYLTLNNGSQAVGRSSFYCLEYFPSQMLRTGNNFTFSYTFEDVPFHSSYAHSQSLDRLMNPLIDQYLYYLNRTQSNSGTLQQSRLLFSQAGPTSMSLQAKNWLPGPCYRQQRLSKQANDNNNSNFPWTAATKYHLNGRDSLVNPGPAMASHKDDEEKFFPMHGTLIFGKQGTNANDADLEHVMITDEEEIRTTNPVATEQYGNVSNNLQNSNTGPTTENVNHQGALPGMVWQDRDVYLQGPIWAKIPHTDGHFHPSPLMGGFGLKHPPPQIMIKNTPVPANPPTNFSAAKFASFITQYSTGQVSVEIEWELQKENSKRWNPEIQYTSNYNKSVNVDFTVDANGVYSEPRPIGTRYLTRNL

SEQ ID NO: 446 - protein, 735 aa, Artificial Sequence
  Synthetic Polypeptide
MAADGYLPDWLEDTLSEGIRQWWKLKPGPPPPRPAERHQDDSRGLVLPGYKYLGPFNGLDKGEPVNEADAAALEHDKAYDRQLDSGDNPYLKYNHADAEFQERLKEDTSFGGNLGRAVFQAKKRVLEPLGLVEEPVKTAPGKKRPVEHSPAEPDSSSGTGKAGQQPARKRLNFGQTGDADSVPDPRPLGQPPAAPTSLGSTTMATGSGAPMADNNEGADGVGNSSGNWHCDSQWLGDRVITTSTRTWALPTYNNHLYKQISSQSGASNDNHYFGYSTPWGYFDFNRFHCHFSPRDWQRLINNNWGFRPKRLNFKLFNIQVKEVTQNDGTTTIANNLTSTVQVFTDSEYQLPYVLGSAHQGCLPPFPADVFMVPQYGYLTLNNGSQAVGRSSFYCLEYFPSQMLRTGNNFTFSYTFEDVPFHSSYAHSQSLDRLMNPLIDQYLYYLNRTQSNSGTLQQSRLLFSQAGPTSMSLQAKNWLPGPCYRQQRLSKQANDNNNSNFPWTAATKYHLNGRDSLVNPGPAMASHKDDEEKFFPMHGTLIFGKQGTNANDADLEHVMITDEEEIRTTNPVATEQYGNVSNNLQNSNTGPTTENVNHQGALPGMVWQDRDVYLQGPIWAKIPHTDGHFHPSPLMGGFGLKHPPPQIMIKNTPVPANPPTNFSAAKFASFITQYSTGQVSVEIEWELQKENSKRWNPEIQYTSNYNKSVNVDFTVDANGVYSEPRPIGTRYLTRNL

SEQ ID NO: 447 - protein, 735 aa, Artificial Sequence
  Synthetic Polypeptide
MAADGYLPDWLEDTLSEGIRQWWKLKPGPPPPKPAERHKDDSRGLVLPGYKYLGPFNGLDKGEPVNEADAAALEHDKAYDRQLDSGDNPYLKYNHADAEFQERLKEDTSFGGNLARAVFQAKKRVLEPLGLVEEPVKTAPGKKRPVEHSPAEPDSSSGTGKSGQQPARKRLNFGQTGDADSVPDPQPLGQPPAAPTSLGSTTMATGSGAPMADNNEGADGVGNSSGNWHCDSQWLGDRVITTSTRTWALPTYNNHLYKQISSQSGASNDNHYFGYSTPWGYFDFNRFHCHFSPRDWQRLINNNWGFRPKRLNFKLFNIQVKEVTQNDGTTTIANNLTSTVQVFTDSEYQLPYVLGSAHQGCLPPFPADVFMVPQYGYLTLNNGSQAVGRSSFYCLEYFPSQMLRTGNNFTFSYTFEDVPFHSSYAHSQSLDRLMNPLIDQYLYYLNRTQSNSGTLQQSRLLFSQAGPTSMSLQAKNWLPGPCYRQQRLSKQANDNNNSNFPWTAATKYHLNGRDSLVNPGPAMASHKDDEEKFFPMHGTLIFGKQGTNANDADLEHVMITDEEEIRTTNPVATEQYGNVSNNLQNSNTGPTTENVNHQGALPGMVWQDRDVYLQGPIWAKIPHTDGHFHPSPLMGGFGLKHPPPQIMIKNTPVPANPPTNFSAAKFASFITQYSTGQVSVEIEWELQKENSKRWNPEIQYTSNYNKSVNVDFTVDANGVYSEPRPIGTRYLTRNL

SEQ ID NO: 448 - protein, 735 aa, Artificial Sequence
  Synthetic Polypeptide
MAADGYLPDWLEDTLSEGIRQWWKLKPGPPPPRPAERHQDDSRGLVLPGYKYLGPFNGLDKGEPVNEADAAALEHDKAYDRQLDSGDNPYLKYNHADAEFQERLKEDTSFGGNLGRAVFQAKKRVLEPLGLVEEPVKTAPGKKRPVEHSPAEPDSSSGTGKAGQQPARKRLNFGQTGDADSVPDPQPLGQPPAAPTSLGSTTMATGSGAPMADNNEGADGVGNSSGNWHCDSQWLGDRVITTSTRTWALPTYNNHLYKQISSQSGASNDNHYFGYSTPWGYFDFNRFHCHFSPRDWQRLINNNWGFRPKRLNFKLFNIQVKEVTQNDGTTTIANNLTSTVRVFTDSEYQLPYVLGSAHQGCLPPFPADVFMVPQYGYLTLNNGSQAVGRSSFYCLEYFPSQMLRTGNNFTFSYTFEDVPFHSSYAHSQSLDRLMNPLIDQYLYYLNRTQSNSGTLQQSRLLFSQAGPTSMSLQAKNWLPGPCYRQQRLSKQANDNNNSNFPWTAATKYHLNGRDSLVNPGPAMASHKDDEEKFFPMHGTLIFGKQGTNANDADLEHVMITDEEEIRTTNPVATEQYGNVSNNLQNSNTGPTTENVNHQGALPGMVWQDRDVYLQGPIWAKIPHTDGHFHPSPLMGGFGLKHPPPQIMIKNTPVPANPPTNFSAAKFASFITQYSTGQVSVEIERELQKENSKRWNPEIQYTSNYNKSVNVDFTVGANGVYSEPRPIGTRYLTRNL

SEQ ID NO: 449 - protein, 735 aa, Artificial Sequence
  Synthetic Polypeptide
MAADGYLPDWLEDTLSEGIRQWWKLKPGPPPPKPAERHKDDSRGLVLPGYKYLGPFNGLDKGEPVNEADAAALEHDKAYDRQLDSGDNPYLKYNHADAEFQERLKEDTSFGGNLARAVFQAKKRVLEPLGLVEEPVKTAPGKKRPVEHSPAEPDSSSGTGKSGQQPARKRLNFGQTGDADSVPDPQPLGQPPAAPSGLGTNTMASGSGAPMADNNEGADGVGNSSGNWHCDSQWLGDRVITTSTRTWALPTYNNHLYKQISSQSGASNDNHYFGYSTPWGYFDFNRFHCHFSPRDWQRLINNNWGFRPKRLNFKLFNIQVKEVTQNDGTTTIANNLTSTVQVFTDSEYQLPYVLGSAHQGCLPPFPADVFMVPQYGYLTLNNGSQAVGRSSFYCLEYFPSQMLRTGNNFTFSYTFEDVPFHSSYAHSQSLDRLMNPLIDQYLYYLNRTQSNSGTLQQSRLLFSQAGPTSMSLQAKNWLPGPCYRQQRLSKQANDNNNSNFPWTAATKYHLNGRDSLVNPGPAMASHKDDEEKFFPMHGTLIFGKQGTNANDADLEHVMITDEEEIRTTNPVATEQYGNVSNNLQNSNTGPTTENVNHQGALPGMVWQDRDVYLQGPIWAKIPHTDGHFHPSPLMGGFGLKHPPPQIMIKNTPVPANPPTNFSAAKFASFITQYSTGQVSVEIEWELQKENSKRWNPEIQYTSNYNKSVNVDFTVDANGVYSEPRPIGTRYLTRNL

SEQ ID NO: 450 - protein, 735 aa, Artificial Sequence
  Synthetic Polypeptide
MAADGYLPDWLEDTLSEGIRQWWKLKPGPPPPRPAERHQDDSRGLVLPGYKYLGPFNGLDKGEPVNEADAAALEHDKAYDRQLDSGDNPYLKYNHADAEFQERLKEDTSFGGNLGRAVFQAKKRVLEPLGLVEEPVKTAPGKKRPVEHSPAEPDSSSGTGKAGQQPARKRLNFGQTGDADSVPDPQPLGQPPAAPTSLGSTTMATGSGAPMADNNEGADGVGNSSGNWHCDSQWLGDRVITTSTRTWALPTYNNHLYKQISSQSGASNDNHYFGYSTPWGYFDFNRFHCHFSPRDWQRLINNNWGFRPKRLNFKLFNIQVKEVTQNDGTTTIANNLTSTVQVFTDSEYQLPYVLGSAHQGCLPPFPADVFMVPQYGYLTLNNGSQAVGRSSFYCLEYFPSQMLRTGNNFTFSYTFEDVPFHSSYAHSQSLDRLMNPLIDQYLYYLNRTQSNSGTLQQSRLLFSQAGPTSMSLQAKNWLPGPCYRQQRLSKQANDNNNSNFPWTAATKYHLNGRDSLVNPGPAMASHKDDEEKFFPMHGTLIFGKQGTNANDADLEHVMITDEEEIRTTNPVATEQYGNVSNNLQNSNTGPTTENVNHQGALPGMVWQDRDVYLQGPIWAKIPHTDGHFHPSPLMGGFGLKHPPPQILIKNTPVPANPSTTFSAAKFASFITQYSTGQVSVEIEWELQKENSKRWNPEIQYTSNYNKSVNVDFTVDTNGVYSEPRPIGTRYLTRNL

SEQ ID NO: 451 - protein, 735 aa, Artificial Sequence
  Synthetic Polypeptide
MAADGYLPDWLEDTLSEGIRQWWKLKPGPPPPRPAERHQDDSRGLVLPGYKYLGPFNGLDKGEPVNEADAAALEHDKAYDRQLDSGDNPYLKYNHADAEFQERLKEDTSFGGNLGRAVFQAKKRVLEPLGLVEEPVKTAPGKKRPVEHSPAEPDSSSGTGKAGQQPARKRLNFGQTGDADSVPDPQPLGQPPAAPTSLGSTTMATGSGAPMADNNEGADGVGNSSGNWHCDSQWLGDRVITTSTRTWALPTYNNHLYKQISSQSGASNDNHYFGYSTPWGYFDFNRFHCHFSPRDWQRLINNNWGFRPKRLNFKLFNIQVKEVTQNDGTTTIANNLTSTVQVFTDSEYQLPYVLGSAHQGCLPPFPADVFMVPQYGYLTLNNGSQAVGRSSFYCLEYFPSQMLRTGNNFTFSYTFEDVPFHSSYAHSQSLDRLMNPLIDQYLYYLNRTQSNSGTLQQSRLLFSQAGPTSMSLQAKNWLPGPCYRQQRLSKQANDNNNSNFPWTAATKYHLNGRDSSVNPGPAMASHKDDEEKFFSMHGTLIFGKQGTNANDADLEHVMITDEEEIRTTNPVATEQYGNVSNNLQNSNTGPTTENVNHQGALPGMVWQDRDVYLQGPIWAKIPHTDGHFHPSPLMGGFGLKHPPPQIMIKNTPVPANPPTNFSAAKFASFITQYSTGQVSVEIEWELQKENSKRWNPEIQYTSNYNKSVNVDFTVDANGVYSEPRPIGTRYLTRNL

SEQ ID NO: 452 - protein, 735 aa, Artificial Sequence
  Synthetic Polypeptide
MAADGYLPDWLEDTLSEGIRQWWKLKPGPPPPRPAERHQDDSRGLVLPGYKYLGPFNGLDKGEPVNEADAAALEHDKAYDRQLDSGDNPYLKYNHADAEFQERLKEDTSFGGNLGRAVFQAKKRVLEPLGLVEEPVKTAPGKKRPVEHSPAEPDSSSGTGKAGQQPARKRLNFGQTGDADSVPDPQPLGQPPAAPTSLGSTTMATGSGAPMADNNEGADGVGNSSGNWHCDSQWLGDRVITTSTRTWALPTYNNHLYKQISSQSGASNDNHYFGYSTPWGYFDFNRFHCHFSPRDWQRLINNNWGFRPKRLNFKLFNIQVKEVTQNDGTTTIANNLTSTVQVFTDSEYQLPYVLGSAHQGCLPPFPAGVFMVPQYGYLTLNNGSQAVGRSSFYCLEYFPSQMLRTGNNFTFSYTFEDVPFHSSYAHSQSLDRLMNPLIDQYLYYLNRTQSNSGTLQQSRLLFSQAGPTSMSLQAKNWLPGPCCRQQRLSKQANDNNNSNFPWTAATKYHLNGRDSLVNPGPAMASHKDDEEKFFPMHGTLIFGKQGTNANDADLEHVMITDEEEIRTTNPVATEQYGNVSNNLQNSNTGPTTENVNHQGALPGMVWQDRDVYLQGPIWAKIPHTDGHFHPSPLMGGFGLKHPPPQIMIKNTPVPANPPTNFSAAKFASFITQYSTGQVSVEIEWELQKENSKRWNPEIQYTSNYNKSVNVDFTVDANGVYSEPRPIGTRYLTRNL

SEQ ID NO: 453 - protein, 735 aa, Artificial Sequence
  Synthetic Polypeptide
MAADGYLPDWLEDTLSEGIRQWWKLKPGPPPPRPAERHQDDSRGLVLPGYKYLGPFNGLDKGEPVNEADAAALEHDKAYDRQLDSGDNPYLKYNHADAEFQERLKEDTSFGGNLGRAVFQAKKRVLEPLGLVEEPVKTAPGKKRPVEHSPAEPDSSSGTGKAGQQPARKRLNFGQTGDADSVPDPQPPGQPPAAPTSLGSTTMATGSGAPMADNNEGADGVGNSSGNWHCDSQWLGDRVITTSTRTWALPTYNNHLYKQISSQSGASNDNHYFGYSTPWGYFDFNRFHCHFSPRDWQRLINNNWGFRPKRLNFKLFNIQVKEVTQNDGTTTIANNLTSTVQVFTDSEYQLPYVLGSAHQGCLPPFPADVFMVPQYGYLTLNNGSQAVGRSSFYCLEYFPSQMLRTGNNFTFSYTFEDVPFHSSYAHSQSLDRLMNPLIDQYLYYLNRTQSNSGTLQQSRLLFSQAGPTSMSLQAKNWLPGPCYRQQRLSKQANDNNNSNFPWTAATKYHLNGRDSLVNPGPAMASHKDDEEKFFPMHGTLIFGKQGTNANDADLEHVMITDEEEIRTTNPVATEQYGNVSNNLQNSNTGPTTENVNHQGALPGMVWQDRDVYLQGPIWAKIPHTDGHFHPSPLMGGFGLKHPPPQIMIKNTPVPANPPTNFSAAKFASFITQYSTGQVSVEIEWELQKENSKRWNPEIQYTSNYNKSVNVDFTVDANGVYSEPRPIGTRYLTRNL

SEQ ID NO: 454 - protein, 735 aa, Artificial Sequence
  Synthetic Polypeptide
MAADGYLPDWLEDTLSEGIRQWWKLKPGPPPPRPAERHQDDSRGLVLPGYKYLGPFNGLDKGEPVNEADAAALEHDKAYDRQLDSGDNPYLKYNHADAEFQERLKEDTSFGGNLGRAVFQAKKRVLEPLGLVEEPVKTAPGKKRPVEHSPAEPDSSSGTGKAGQQPARKRLNFGQTGDADSVPDPQPLGQPPAAPTSLGSTTMATGSGAPMADNNEGADGVGNSSGNWHCDSQWLGDRVITTSTRTWALPTYNNHHYKQISSQSGASNDNHYFGYSTPWGYFDFNRFHCHFSPRDWQRLINNNWGFRPKRLNFKLFNIQVKEVTQNDGTTTIANNLTSTVQVFTDSEYQLPYVLGSAHQGCLPPFPADVFMVPQYGYLTLNNGSQAVGRSSFYCLEYFPSQMLRTGNNFTFSYTFEDVPFHSSYAHSQSLDRLMNPLIDQYLYYLNRTQSNSGTLQQSRLLFSQAGPTSMSLQAKNWLPGPCYRQQRLSKQANDNNNSNFPWTAATKYHLNGRDSLVNPGPAMASHKDDEEKFFPMHGTLIFGKQGTNANDADLEHVMITDEEEIRTTNPVATEQYGNVSNNLQNSNTGPTTEDVNHQGALPGMVWQDRDVYLQGPIWAKIPHTDGHFHPSPLMGGFGLKHPPPQIMIKNTPVPANPPTNFSAAKFASFITQYSTGQVSVEIEWELQKENSKRWNPEIQYTSNYNKSVNVDFTVDANGVYSEPRPIGTRYLTRNL

SEQ ID NO: 455 - protein, 735 aa, Artificial Sequence
  Synthetic Polypeptide
MAADGYLPDWLEDTLSEGIRQWWKLKPGPPPPRPAERHQDDSRGLVLPGYKYLGPFNGLDKGEPVNEADAAALEHDKAYDRQLDSGDNPYLKYNHADAEFQERLKEDTSFGGNLGRAVFQAKKRVLEPLGLVEEPVKTAPGKKRPVEHSPAEPDSSSGTGKAGQQPARKRLNFGQTGDADSVPDPRPLGQPPAAPTSLGSTTMATGSGAPMADNNEGADGVGNSSGNWHCDSQWLGDRVITTSTRTWALPTYNNHLYKQISSQSGASNDNHYFGYSTPWGYFDFNRFHCHFSPRDWQRLINNNWGFRPKRLNFKLFNIQVKEVTQNDGTTTIANNLTSTVQVFTDSEYQLPYVLGSAHQGCLPPFPADVFMVPQYGYLTLNNGSQAVGRSSFYCLEYFPSQMLRTGNNFTFSYTFEDVPFHSSYAHSQSLDRLMNPLIDQYLYYLNRTQSNSGTLQQSRLLFSQAGPTSMSLQAKNWLPGPCYRQQRLSKQANDNNNSNFPWTAATKYHLNGRDSLVNPGPAMASHKDDEEKFFPMHGTLIFGKQGTNANDADLEHVMITDEEEIRTTDPVATEQYGNVSNNLQNSNTGPTTENVNHQGALPGMVWQDRDVYLQGPIWAKIPHTDGHFHPSPLMGGFGLKHPPPQIMIKNTPVPANPPTNFSAAKFASFITQYSTGQVSVEIEWELQKENSKRWNPEIQYTSNYNKSVNVDFTVDANGVYSEPRPIGTRYLTRNL

SEQ ID NO: 456 - protein, 735 aa, Artificial Sequence
  Synthetic Polypeptide
MAADGYLPDWLEDTLSEGIRQWWKLKPGPPPPRPAERHQDDSRGLVLPGYKYLGPFNGLDKGEPVNEADAAALEHDKAYDRQLDSGDNPYLKYNHADAEFQERLKEDTSFGGNLGRAVFQAKKRVLEPLGLVEEPVKTAPGKKRPVEHSPAEPDSSSGTGKAGQQPARKRLNFGQTGDADSVPDPQPLGQPPAAPTSLGSTTMATGSGAPMADNNEGADGVGNSSGNWHCDSQWLGDRVITTSTRTWALPTYNNHLYKQISSQSGASNDNHYFGYSTPWGYFDFNRFHCHFSPRDWQRLINNNWGFRPKRLNFKLFNIQVKEVTQNDGTTTIANNLTSTVQVFTDSEYQLPYVLGSAHQGCLPPFPADVFMVPQYGYLTLNNGSQAVGRSSFYCLEYFPSQMLRTGNNFTFSYTFEDVPFHSSYAHSQSLDRLMNPLIDQYLYYLNRTQSNSGTLQQSRLLFSQAGPTSMSLQAKNWLPGPCYRQQRLSKQANDNNNSNFPWTAATKYHLNGRDSLVNPGPAMASHKDDEEKFFPMHGTLIFGKQGTNANDADLEHVMITDEEEIRTTNPVATEQYGNVSNNLQNSNTGPTTGNVNHQGALPGMVWQDRDVYLQGPIWAKIPHTDGHFHPSPLMGGFGLKHPPPQIMIKNTPVPANPPTNFSAAKFASFITQYSTGQVSVEIEWELQKENSKRWNPEIQYTSNYNKSVNVDFTVDANGVYSEPRPIGTRYLTRNL

SEQ ID NO: 457 - protein, 735 aa, Artificial Sequence
  Synthetic Polypeptide
MAADGYLPDWLEDTLSEGIRQWWKLKPGPPPPRPAERHQDDSRGLVLPGYKYLGPFNGLDKGEPVNEADAAALEHDKAYDRQLDSGDNPYLKYNHADAEFQERLKEDTSFGGNLGRAVFQAKKRVLEPLGLVEEPVKTAPGKKRPVEHSPAEPDSSSGTGKAGQQPARKRLNFGQTGDADSVPDPQPLGQPPAAPTSLGSTTMATGSGAPMADNNEGADGVGNSSGDWHCDSQWLGDRVITTSTRTWALPTYNNHLYKQISSQSGASNDNHYFGYSTPWGYFDFNRFHCHFSPRDWQRLINNNWGFRPKRLNFKLFNIQVKEVTQNDGTTTIANNLTSTVQVFTDSEYQLPYVLGSAHQGCLPPFPADVFMVPQYGYLTLNNGSQAVGRSSFYCLEYFPSQMLRTGNNFTFSYTFEDVPFHSSYAHSQSLDRLMNPLIDQYLYYLNRTQSNSGTLQQSRLLFSQAGPTSMSLQAKNWLPGPCYRQQRLSKQANDNNNSNFPWTAATKYHLNGRDSLVNPGPAMASHKDDEEKFFPMHGTLIFGKQGTNANDADLEHVMITDEEEIRTTNPVATEQYGNVSNSLQNSNTGPTTENVNHQGALPGMVWQDRDVYLQGPIWAKIPHTDGHFHPSPLMGGFGLKHPPPQIMIKNTPVPANPPTNFSAAKFASFITQYSTGQVSVEIEWELQKENSKRWNPEIQYTSNYNKSVNVDFTVDANGVYSEPRPIGTRYLTRNL

SEQ ID NO: 458 - protein, 735 aa, Artificial Sequence
  Synthetic Polypeptide
MAADGYLPDWLEDILSEGIRQWWKLKPGPPPPKPAERHKDDSRGLVLPGYKYLGPFNGLDKGEPVNEADAAALEHDKAYDRQLDSGDNPYLKYNHADAEFQERLKEDTSFGGNLGRAVFQAKKRVLEPLGLVEEPVKTTPGKKRPVEQSPAEPDSSSGTGKAGNQPARKRLNFGQTGDADSVPDPQPLGQPPAAPSGLGSTTMATGSGAPMADNNEGADGVGNSSGNWHCDSQWLGDRVITTSTRTWALPTYNNHLYKQISSQSGASNDNHYFGYSTPWGYFDFNRFHCHFSPRDWQRLINNNWGFRPKRLNFKLFNIQVKEVTQNDGTTTIANNLTSTVQVFTDSEYQLPYVLGSAHQGCLPPFPADVFMVPQYGYLTLNNGSQAVGRSSFYCLEYFPSQMLRTGNNFTFSYTFEDVPFHSSYAHSQSLDRLMNPLIDQYLYYLNKTQSNSGTLQQSRLLFSQAGPTSMSLQAKNWLPGPCYRQQRLSKQANDNNNSNFPWTAATKYHLNGRDSLVNPGPAMASHKDDEEKFFPMHGTLIFGKQGTNANDADLDNVMITDEEEIRTTNPVATEQYGTVSNNLQNSNTGPTTGTVNHQGALPGMVWQDRDVYLQGPIWAKIPHTDGHFHPSPLMGGFGLKHPPPQIMIKNTPVPANPPTNFSSAKFASFITQYSTGQVSVEIEWELQKENSKRWNPEIQYTSNYNKSVNVDFTVDTNGVYSEPRPIGTRYLTRNL

SEQ ID NO: 459 - protein, 735 aa, Artificial Sequence
  Synthetic Polypeptide
MAADGYLPDWLEDILSEGIRQWWKLKPGPPPPKPAERHKDDSRGLVLPGYKYLGPFNGLDKGEPVNEADAAALEHDKAYDRQLDSGDNPYLKYNHADAEFQERLKEDTSFGGNLGRAVFQAKKRVLEPLGLVEEPVKTAPGKKRPVEQSPAEPDSSSGTGKAGNQPARKRLNFGQTGDADSVPDPQPLGQPPAAPSGLGSTTMATGSGAPMADNNEGADGVGNSSGNWHCDSQWLGDRVITTSTRTWALPTYNNHLYKQISSQSGASNDNHYFGYSTPWGYFDFNRFHCHFSPRDWQRLINNNWGFRPKRLNFKLFNIQVKEVTQNDGTTTIANNLTSTVQVFTDSEYQLPYVLGSAHQGCLPPFPADVFMVPQYGYLTLNNGSQAVGRSSFYCLEYFPSQMLRTGNNFTFSYTFEDVPFHSSYAHSQSLDRLMNPLIDQYLYYLNKTQSNSGTLQQSRLLFSQAGPTSMSLQAKNWLPGPCYRQQRLSKQANDNNNSNFPWTAATKYHLNGRDSLVNPGPAMASHKDDEEKFFPMHGTLIFGKQGTNANDADLDNVMITDEEEIRTTNPVATEQYGTVSNNLQNSNTGPTTGTVNHQGALPGMVWQDRDVYLQGPIWAKIPHTDGHFHPSPLMGGFGLKHPPPQIMIKNTPVPANPPTNFSSAKFASFITQYSTGQVSVEIEWELQKENSKRWNPEIQYTSNYNKSVNVDFTVDTNGVYSEPRPIGTRYLTRNL

SEQ ID NO: 460 - protein, 735 aa, Artificial Sequence
  Synthetic Polypeptide
MAADGYLPDWLEDILSEGIRQWWKLKPGPPPPKPAERHKDDSRGLVLPGYKYLGPFNGLDKGEPVNEADAAALEHDKAYDRQLDSGDNPYLKYNHADAEFQERLKEDTSFGGNLGRAVFQAKKRVLEPLGLVEEPVKTAPGKKRPVEQSPAEPDSSSGTGKAGNQPARKRLNFGQTGDADSVPDPQPLGQPPAAPSGLGSTTMATGSGAPMADNNEGADGVGNSSGNWHCDSQWLGDRVITTSTRTWALPTYNNHLYKQISSQSGASNDNHYFGYSTPWGYFDFNRFHCHFSPRDWQRLINNNWGFRPKRLNFKLFNIQVKEVTQNDGTTTIANNLTSTVQVFTDSEYQLPYVLGSAHQGCLPPFPADVFMVPQYGYLTLNNGSQAVGRSSFYCLEYFPSQMLRTGNNFTFSYTFEDVPFHSGYAHSQSLDRLMNPLIDQYLYYLNKTQSNSGTLQQSRLLFSQAGPTSMSLQAKNWLPGPCYRQQRLSKQANDNNNSNFPWTAATKYHLNGRDSLVNPGPAMASHKDDEEKFFPMHGTLIFGKQGTNANDADLDNVMITDEEEIRTTNPVATEQYGTVSNNLQNSNTGPTTGTVNHQGALPGMVWQDRDVYLQGPIWAKIPHTDGHFHPSPLMGGFGLKHPPPQIMIKNTPVPANPPTNFSSAKFASFITQYSTGQVSVEIEWELQKENSKRWNPEIQYTSNYNKSVNVDFTVDTNGVYSEPRPIGTRYLTRNL

SEQ ID NO: 461 - protein, 734 aa, Artificial Sequence
  Synthetic Polypeptide
MAADGYLPDWLEDILSEGIRQWWKLKPGPPPKPAERHKDDSRGLVLPGYKYLGPFNGLDKGEPVNEADAAALEHDKAYDRQLDSGDNPYLKYNHADAEFQERLKEDTSFGGNLGRAVFQAKKRVLEPLGLVEEPVKTAPGKKRPVEQSPAEPDSSSGTGKAGNQPARKRLNFGQTGDADSVPDPQPLGQPPAAPSGLGSTTMATGSGAPMADNNEGADGVGNSSGNWHCDSQWLGDRVITTSTRTWALPTYNNHLYKQISSQSGASNDNHYFGYSTPWGYFDFNRFHCHFSPRDWQRLINNNWGFRPKRLNFKLFNIQVKEVTQNDGTTTIANNLTSTVQVFTDSEYQLPYVLGSAHQGCLPPFPADVFMVPQYGYLTLNNGSQAVGRSSFYCLEYFPSQMLRTGNNFTFSYTFEDVPFHSSYAHSQSLDRLMNPLIDQYLYYLNKTQSNSGTLQQSRLLFSQAGPTSMSLQAKNWLPGPCYRQQRLSKQANDNNNSNFPWTAATKYHLNGRDSLVNPGPAMASHKDDEEKFFPMHGTLIFGKQGTNANDADLDNVMITDEEEIRTTNPVATEQYGTVSNNLQNSNTGPTTGTVNHQGALPGMVWQDRDVYLQGPIWAKIPHTDGHFHPSPLMGGFGLKHPPPQIMIKNTPVPANPPTNFSSAKFASFITQYSTGQVSVEIEWELQKENSKRWNPEIQYTSNYNKSVNVDFTVDTNGVYSEPRPIGTRYLTRNL

SEQ ID NO: 462 - protein, 735 aa, Artificial Sequence
  Synthetic Polypeptide
MAADGYLPDWLEDTLSEGIRQWWKLKPGPPPPRPAERHQDDSRGLVLPGYKYLGPFNGLDKGEPVNEADAAALEHDKAYDRQLDSGDNPYLKYNHADAEFQERLKEDTSFGGNLGRAVFQAKKRVLEPLGLVEEPVKTAPGKKRPVEHSPAEPDSSSGTGKAGQQPARKRLNFGQTGDADSVPDPQPLGQPPAAPTSLGSTTMATGSGAPMADNNEGADGVGNSSGNWHCDSQWLGDRVITTSTRTWALPTYNNHLYKQISSQSGASNDNHYFGYSTPWGYFDFNRFHCHFSPRDWQRLINNNWGFRPKRLNFKLFNIQVKEVTQNDGTTTIANNLTSTVQVFTDSEYQLPYVLGSAHQGCLPPFPADVFMVPQYGYLTLNNGSQAVGHSSSYCLEYFPSQMLRTGNNFTFSYTFEDVPFHSSYAHSQSLDRLMNPLIDQYLYYLNRTQSNSGTLQQSRLLFSQAGPTSMSLQAKNWLPGPCYRQQRLSKQANDNNNSNFPWTAATKYHLNGRDSLVNPGPAMASHKDDEEKFFPMHGTLIFGKQGTNANDADLEHVMITDEEEIRTTNPVATEQYGNVSNNLQNSNTGPTTENVNHQGALPGMVWQDRDVYLQGPIWAKIPHTDGHFHPSPLMGGFGLKHPPPQIMIKNTPVPANPPTNFSAAKFASFITQYSTGQVSVEIEWELQKENSKRWNPEIQYTSNYNKSVNVDFTVDTNGVYSEPRPIGTRYLTRNL

SEQ ID NO: 463 - protein, 735 aa, Artificial Sequence
  Synthetic Polypeptide
MAADGYLPDWLEDTLSEGIRQWWKLKPGPPPPKPAERHQDDSRGLVLPGHKYLGPFNGLDKGEPVNEADAAALEHDKAYDRQLDSGDNPYLKYNHADAEFQERLKEDTSFGGNLGRAVFQAKKRVLEPLGLVEEPVKTAPGKKRPVEHSPAEPDSSSGTGKAGQQPARKRLNFGQTGDADSVPDPQPLGQPPAAPTSLGSTTMATGSGAPMADNNEGADGVGNSSGNWHCDSQWLGDRVITTSTRTWALPTYNNHLYKQISSQSGASNDNHYFGYSTPWGYFDFNRFHCHFSPRDWQRLINNNWGFRPKRLNFKLFNIQVKEVTQNDGTTTIANNLTSTVQVFTDSEYQLPYVLGSAHQGCLPPFPADVFMVPQYGYLTLNNGSQAVGRSSFYCLEYFPSQMLRTGNNFTFSYTFEDVPFHSSYAHSQSLDRLMNPLIDQYLYYLNRTQSNSGTLQQSRLLFSQAGPTSMSLQAKNWLPGPCYRQQRLSKQANDNNNSNFPWTAATKYHLNGRDSLVNPGPAMASHKDDEEKFFPMHGTLIFGKQGTNANDADLEHVMITDEEEIRTTNPVATEQYGNVSNNLQNSNTGPTTENVNHQGALPGMVWQDRDVYLQGPIWAKIPHTDGHFHPSPLMGGFGLKHPPPQIMIKNTPVPANPPTNFSAAKFASFITQYSTGQVSVEIEWELQKENSKRWNPEIQYTSNYNKSVNVDFTVDANGVYSEPRPIGTRYLTRNL

SEQ ID NO: 464 - protein, 735 aa, Artificial Sequence
  Synthetic Polypeptide
MAADGYLPDWLEDTLSEGIRQWWKLKPGPPPPKPAERHKDDSRGLVLPGYKYLGPFNGLDKGEPVNEADAAALEHDKAYDRQLDSGDNPYLKYNHADAEFQERLKEDTSFGGNLGRAVFQAKKRVLEPLGLVEEPVKTAPGKKRPVEHSPAEPDSSSGTGKAGQQPARKRLNFGQTGDADSVPDPQPLGQPPAAPTSLGSTTMATGSGAPMADNNEGADGVGNSSGNWHCDSQWLGDRVITTSTRTWALPTYNNHLYKQISSQSGASNDNHYFGYSTPWGYFDFNRFHCHFSPRDWQRLINNNWGFRPKRLNFKLFNIQVKEVTQNDGTTTIANNLTSTVQVFTDSEYQLPYVLGSAHQGCLPPFPADVFMVPQYGYLTLNNGSQAVGRSSFYCLEYFPSQMLRTGNNFTFSYTFEDVPFHSSYAHSQSLDRLMNPLIDQYLYYLNRTQSNSGTLQQSRLLFSQAGPTSMSLQAKNWLPGPCYRQQRLSKQANDNNNSNFPWTAATKYHLNGRDSLVNPGPAMASHKDDEEKFFPMHGTLIFGKQGTNANDADLEHVMITDEEEIRTTNPVATEQYGNVSNNLQNSNTGPTTENVNHQGALPGMVWQDRDVYLQGPIWAKIPHTDGHFHPSPLMGGFGLKHPPPQIMIKNTPVPANPPTNFSAAKFASFITQYSTGQVSVEIEWELQKENSKRWNPEIQYTSNYNKSVNVDFTVDANGVYSEPRPIGTRYLTRNL

SEQ ID NO: 465 - protein, 735 aa, Artificial Sequence
  Synthetic Polypeptide
MAADGYLPDWLEDTLSEGIRQWWKLKPGPPPPRPAERHQDDSRGLVLPGYKYLGPFNGLDKGEPVNEADAAALEHDKAYDRQLDSGDNPYLKYNHADAEFQERLKEDTSFGGNLGRAVFQAKKRVLEPLGLVEEPVKTAPGKKRPVEHSPAEPDSSSGTGKAGQQPARKRLNFGQTGDADSVPDPQPLGQPPAAPTSLGSTTMATGSGAPMADNNEGADGVGNSSGNWHCDSQWLGDRVITTSTRTWALPTYNNHLYKQISSQSGASNDNHYFGYSTPWGYFDFNRFHCHFSPRDWQRLINNNWGFRPKRLNFKLFNIQVKEVTQNDGTTTIANNLTSTVQVFTDSEYQLPYVLGSAHQGCLPPFPADVFMVPQYGYLTLNNGSQAVGRSSSYCLEYFPSQMLRTGNNFTFSYTFEDVPFHSSYAHSQSLDRLMNPLIDQYLYYLNRTQSNSGTLQQSRLLFSQAGPTSMSLQAKNWLPGPCYRQQRLSKQANDNNNSNFPWTAATKYHLNGRDSLVNPGPAMASHKDDEEKFFPMHGTLIFGKQGTNANDADLEHVMITDEEEIRTTNPVATEQYGNVSNNLQNSNTGPTTENVNHQGALPGMVWQDRDVYLQGPIWAKIPHTDGHFHPSPLMGGFGLKHPPPQIMIKNTPVPANPPTNFSAAKFASFITQYSTGQVSVEIEWELQKENSKRWNPEIQYTSNYNKSVNVDFTVDANGVYSEPRPIGTRYLTRNL

SEQ ID NO: 466 - protein, 735 aa, Artificial Sequence
  Synthetic Polypeptide
MAADGYLPDWLEDTLSEGIRQWWKLKPGPPPPRPAERHQDDSRGLVLPGYKYLGPFNGLDKGEPVNEADAAALEHDKAYDRQLDSGDNPYLKYNHADAEFQERLKEDTSFGGNLGRAVFQAKKRVLEPLGLVEEPVKTAPGKKRPVEHSPAEPDSSSGTGKAGQQPARKRLNFGQTGDADSVPDPQPLGQPPAAPTSLGSTTMATGSGAPMADNNEGADGVGNSSGNWHCDSQWLGDRVITTSTRTWALPTYNNHLYKQISSQSGASNDNHYFGYSTPWGYFDFNRFHCHFSPRDWQRLINNNWGFRPKRLNFKLFNIQVKEVTQNDGTTTIANNLTSTVQVFTDSEYQLPYVLGSAHQGCLPPFPADVFMVPQYGYLTLNNGSQAVGRSSFYCLEYFPSQMLRTGNNFTFSYTFEDVPFHSSYAHSQSLDRLMNPLIDQYLYYPNRTQSNSGTLQQSRLLFSQAGPTSMSLQAKNWLPGPCYRQQRLSKQANDNNNSNFPWTAATKYHLNGRDSLVNPGPAMASHKDDEEKFFPMHGTLIFGKQGTNANDADLEHVMITDEEEIRTTNPVATEQYGNVSNNLQNSNTGPTTENVNHQGALPGMVWQDRDVYLQGPIWAKIPHTDGHFHPSPLMGGFGLKHPPPQIMIKNTPVPANPPTNFSAAKFASFITQYSTGQVSVEIEWELQKENSKRWNPEIQYTSNYNKSVNVDFTVDANGVYSEPRPIGTRYLTRNL

SEQ ID NO: 467 - protein, 735 aa, Artificial Sequence
  Synthetic Polypeptide
MAADGYLPDWLEDTLSEGIRQWWKLKPGPPPPRPAERHQDDSRGLVLPGYKYLGPFNGLDKGEPVNEADAAALEHDKAYDRQLDSGDNPYLKYNHADAEFQERLKEDTSFGGNLGRAVFQAKKRVLEPLGLVEEPVKTAPGKKRPVEHSPAEPDSSSGTGKAGQQPARKRLNFGQTGDADSVPDPQPLGQPPAAPTSLGSTTMATGSGAPMADNNEGADGVGNSSGNWHCDSQWLGDRVITTSTRTWALPTYNNHLYKQISSQSGASNDNHYFGYSTPWGYFDFNRFHCHFSPRDWQRLINNNWGFRPKRLNFKLFNIQVKEVTQNDGTTTIANNLTSTVQVFTDSEYQLPYVLGSAHQGCLPPFPADVFMVPQYGYLTLNNGSQAVGRSSFYCLEYFPSQMLRTGNNFTFSYTFEDVPFHSSYAHSQSLDRLMNPLIDQYLYYLNKTQSNSGTLQQSRLLFSQAGPTSMSLQAKNWLPGPCYRQQRLSKQANDNNNSNFPWTAATKYHLNGRDSLVNPGPAMASHKDDEEKFFPMHGTLIFGKQGTNANDADLDNVMITDEEEIRTTNPVATEQYGTVSNNLQNSNTGPTTGTVNHQGALPGMVWQDRDVYLQGPIWAKIPHTDGHFHPSPLMGGFGLKHPPPQIMIKNTPVPANPPTNFSSAKFASFITQYSTGQVSVEIEWELQKENSKRWNPEIQYTSNYNKSVNVDFTVDTNGVYSEPRPIGTRYLTRNL

SEQ ID NO: 468 - protein, 735 aa, Artificial Sequence
  Synthetic Polypeptide
MAADGYLPDWLEDTLSEGIRQWWKLKPGPPPPKPAERHQDDSRGLVLPGHKYLGPFNGLDKGEPVNEADAAALEHDKAYDRQLDSGDNPYLKYNHADAEFQERLKEDTSFGGNLGRAVFQAKKRVLEPLGLVEEPVKTAPGKKRPVEHSPAEPDSSSGTGKAGQQPARKRLNFGQTGDADSVPDPQPLGQPPAAPTSLGSTTMATGSGAPMADNNEGADGVGNSSGNWHCDSQWLGDRVITTSTRTWALPTYNNHLYKQISSQSGASNDNHYFGYSTPWGYFDFNRFHCHFSPRDWQRLINNNWGFRPKRLNFKLFNIQVKEVTQNDGTTTIANNLTSTVQVFTDSEYQLPYVLGSAHQGCLPPFPADVFMVPQYGYLTLNNGSQAVGHSSSYCLEYFPSQMLRTGNNFTFSYTFEDVPFHSSYAHSQSLDRLMNPLIDQYLYYLNRTQSNSGTLQQSRLLFSQAGPTSMSLQAKNWLPGPCYRQQRLSKQANDNNNSNFPWTAATKYHLNGRDSLVNPGPAMASHKDDEEKFFPMHGTLIFGKQGTNANDADLEHVMITDEEEIRTTNPVATEQYGNVSNNLQNSNTGPTTENVNHQGALPGMVWQDRDVYLQGPIWAKIPHTDGHFHPSPLMGGFGLKHPPPQIMIKNTPVPANPPTNFSAAKFASFITQYSTGQVSVEIEWELQKENSKRWNPEIQYTSNYNKSVNVDFTVDTNGVYSEPRPIGTRYLTRNL

SEQ ID NO: 469 - protein, 735 aa, Artificial Sequence
  Synthetic Polypeptide
MAADGYLPDWLEDTLSEGIRQWWKLKPGPPPPRPAERHQDDSRGLVLPGYKYLGPFNGLDKGEPVNEVDAAALEHDKAYDRQLDSGDNPYLKYNHADAEFQERLKEDTSFGGNLGRAVFQAKKRVLEPLGLVEEPVKTAPGKKRPVEHSPAEPDSSSGTGKAGQQPARKRLNFGQTGDADSVPDPQPLGQPPAAPTSLGSTTMATGSGAPMADNNEGADGVGNSSGNWHCDSQWLGDRVITTSTRTWALPTYNNHLYKQISSQSGASNDNHYFGYSTPWGYFDFNRFHCHFSPRDWQRLINNNWGFRPKRLNFKLFNIQVKEVTQSDGTTTIANNLTSTVQVFTDSEYQLPYVLGSAHQGCLPPFPADVFMVPQYGYLTLNNGSQAVGRSSFYCLEYFPSQMLRTGNNFTFSYTFEDVPFHSSYAHSQSLDRLMNPLIDQYLYYLNRTQSNSGTLQQSRLLFSQAGPTSMSLQAKNWLPGPCYRQQRLSKQANDNNNSNFPWTAATKYHLNGRDSLVNPGPAMASHKDDEEKFFPMHGTLIFGKQGTNANDADLEHVMITDEEEIRTTNPVATEQYGNVSNNLQNSNTGPTTENVNHQGALPGMVWQDRDVYLQGPIWAKIPHTDGHFHPSPLMGGFGLKHPPPQIMIKNTPVPANPPTNFSAAKFASFITQYSTGQVSVEIEWELQKENSKRWNPEIQYTSNYNKSVNVDFTVDANGVYSEPRPIGTRYLTRNL

SEQ ID NO: 470 - protein, 735 aa, Artificial Sequence
  Synthetic Polypeptide
MAADGYLPDWLEDTLSEGIRQWWKLKPGPPPPRPAERHQDDSRGLVLPGYKYLGPFNGLDKGEPVNEADAAALEHDKAYDRQLDSGDNPYLKYNHADAEFQERLKEDTSFGGNLGRAVFQAKKRVLEPLGLVEEPVKTAPGKKRPVEHSPAEPDSSSGTGKAGQQPARKRLNFGQTGDADSVPDPQPLGQPPAAPTSLGSTTMATGSGAPMADNNEGADGVGNSSGNWHCDSQWLGDRVITTSTRTWALPTYNNHLYKQISSQSGASNDNHYFGYSTPWGYFDFNRFHCHFSPRDWQRLINNNWGFRPKRLNFKLFNIQVKEVTQNDGTTTIANNLTSTVQVFTDSEYQLPYVLGSAHQGCLPPFPADVFMVPQYGYLTLNNGSQAVGRSSFYCLEYFPSQMLRTGNNFTFSYTFEDVPFHSSYAHSQSLDRLMNPLIDQYLYYLNRTQSNSGTLQQSRLLFSQAGPTSMSLQAKNWLPGPCYRQQRLSKQANDNNNSNFPWTAATKYHLNGRDSLVNPGPAMASHKDDEEKFFPMHGTLIFGKQGTNANDADLEHVMITDEEEIRTTNPVATEQYGNVSNNLQNSNTGPTTENVNHQGALPGMVWQDRDVYLQGPIWAKIPHTDGHFHPSPLMGGFGLKHPPPQIMIKNTPVPANPPTNFSAAKFASFITQYSTGQVSVEIEWELQKENSKRWNPEIQYTSNYNKSVNVDFTVDTNGVYSEPRPIGTRYLTRNL

SEQ ID NO: 471 - protein, 735 aa, Artificial Sequence
  Synthetic Polypeptide
MAADGYLPDWLEDTLSEGIRQWWKLKPGPPPPKPAERHQDDSRGLVLPGHKYLGPFNGLDKGEPVNEADAAALEHDKAYDRQLDSGDNPYLKYNHADAEFQERLKEDTSFGGNLGRAVFQAKKRVLEPLGLVEEPVKTAPGKKRPVEHSPAEPDSSSGTGKAGQQPARKRLNFGQTGDADSVPDPQPLGQPPAAPTSLGSTTMATGSGAPMADNNEGADGVGNSSGNWHCDSQWLGDRVITTSTRTWALPTYNNHLYKQISSQSGASNDNHYFGYSTPWGYFDFNRFHCHFSPRDWQRLINNNWGFRPKRLNFKLFNIQVKEVTQNDGTTTIANNLTSTVQVFTDSEYQLPYVLGSAHQGCLPPFPADVFMVPQYGYLTLNNGSQAVGHSSSYCLEYFPSQMLRTGNNFTFSYTFEDVPFHSSYAHSQSLDRLMNPLIDQYLYYLNRTQSNSGTLQQSRLLFSQAGPTSMSLQAKNWLPGPCYRQQRLSKQANDNNNSNFPWTAATKYHLNGRDSLVNPGPAMASHKDDEEKFFPMHGTLIFGKQGTNANDADLEHVMITDEEEIRTTNPVATEQYGNVSNNLQNSNTGPTTENVNHQGALPGMVWQDRDVYLQGPIWAKIPHTDGHFHPSPLMGGFGLKHPPPQIMIKNTPVPANPPTNFSAAKFASFITQYSTGQVSVEIEWELQKENSKRWNPEIQYTSNYNKSVNVDFTVDANGVYSEPRPIGTRYLTRNL

SEQ ID NO: 472 - protein, 735 aa, Artificial Sequence
  Synthetic Polypeptide
MAADGYLPDWLEDTLSEGIRQWWKLKPGPPPPRPAERHQDDSRGLVLPGYKYLGPFNGLDKGEPVNEADAAALEHDKAYDRQLDSGDNPYLKYNHADAEFQERLKEDTSFGGNLGRAVFQAKKRVLEPLGLVEEPVKTAPGKKRPVEHSPAEPDSSSGTGKAGQQPARKRLNFGQTGDADSVPDPQPLGQPPAAPTSLGSTTMATGSGAPMADNNEGADGVGNSSGNWHCDSQWLGDRVITTSTRTWALPTYNNHLYKQISSQSGASNDNHYFGYSTPWGYFDFNRFHCHFSPRDWQRLINNNWGFRPKRLNFKLFNIQVKEVTQNDGTTTIANNLTSTVQVFTDSEYQLPYVLGSAHQGCLPPFPADVFMVPQYGYLTLNNGSQAVGRSSFYCLEYFPSQMLRTGNNFTFSYTFEDVPFHSSYAHSQSLDRLMNPLIDQYLYYLNRTQSNSGTLQQSRLLFSQAGPTSMSLQAKNWLPGPCYRQQRLSKQANDNNNSNFPWTAATKYHLNGRDSLVNPGPAMASHKDDEEKFFPMHGTLIFGKQGTNANDADLEHVMITDEEEIRTTNPVATEQYGNVSNNLQNSNTGPTTENVNHQGALPGMVWQDRDVYLQGPIWAKIPHTDGHFHPSPLMGGFGLKHPPPQIMIKNTPVPANPPTNFSAAKFASFITQYSTGQASVEIEWELQKENSKRWNPEIQYTSNYNKSVNVDFTVDANGVYSEPRPIGTRYLTRNL

SEQ ID NO: 473 - protein, 735 aa, Artificial Sequence
  Synthetic Polypeptide
MAADGYLPDWLEDTLSEGIRQWWKLKPGPPPPKPAGRHKDDSRGLVLPGYKYLGPFNGLDKGEPVNEADAAALEHDKAYDRQLDSGDNPYLKYNHAGAEFQERLKEDTSFGGNLGRAVFQAKKRVLEPLGLVEEPVKTAPGKKRPVEHSPVEPDSSSGTGKAGQQPARKRLNFGQTGDADSVPDPQPLGQPPAAPTSLGSTTMATGSGAPMADNNEGADGVGNSSGNWHCDSQWLGDRVITTSTRTWALPTYNNHLYKQISSQSGAANDNHYFGYSTPWGYFDFNRFHCHFSPRDWQRLINNNWGFRPKRLNFKLFNIQVKEVTQNDGTTTIANNLTSTVQVFTDSEYQLPYVLGSAHQGCLPPFPADVFMVPQYGYLTLNNGSQAVGRSSFYCLEYFPSQMLRTGNNFTFSYTFEDVPFHSSYAHSQSLDRLMNPLIDQYLYYLNRTQSNSGTLQQSRLLFSQAGPTSMSLQAKNWLPGPCYRQQRLSKQANDNNNSNFPWTAATKYHLNGRDSLVNPGPAMASHKDDEEKFFPMHGTLIFGKQGTNANDADLEHVMITDEEEIRTTNPVATEQYGNVSNNLQNSNTGPTTENVNHQGALPGMVWQDRDVYLQGPIWAKIPHTDGHFHPSPLMGGFGLKHPPPQIMIKNTPVPANPPTNFSAAKFASFITQYSTGQVSVEIEWELQKENSKRWNPEIQYTSNYNKSVNVDFTVDANGVYSEPRPIGTRYLTRNL

SEQ ID NO: 474 - protein, 735 aa, Artificial Sequence
  Synthetic Polypeptide
MAADGYLPDWLEDTLSEGIRQWWKLKPGPPPPRPAERHQDDSRGLVLPGYKYLGPFNGLDKGEPVNEADAAALEHDKAYDRQLDSGDNPYLKYNHADAEFQERLKEDTSFGGNLGRAVFQAKKRVLEPLGLVEEPVKTAPGKKRPVEHSPAEPDSSSGTGKAGQQPARKRLNFGQTGDADSVPDPQPLGQPPAAPTSLGSTTMATGSGAPMADNNEGADGVGNSSGNWHCDSQWLGDRVITTSTRTWALPTYNNHLYKQISSQSGASNDNHYFGYSTPWGYFDFNRFHCHFSPRDWQRLINNNWGFRPKRLNFKLFNIQVKEVTQNDGTTTIANNLTSTVQVFTDSEYQLPYVLGSAHQGCLPPFPADVFMVPQYGYLTLNNGSQAVGRSSFYCLEYFPSQMLRTGNNFTFSYTFEDVPFHSSYAHSQSLDRLMNPLIDQYLYYLNRTQSNSGTLQQSRLLFSQAGPTSMSLQAKNWLPGPCYRQQRLSKQANDNNNSNFPWTAATKYHLNGRDSLVNPGPAMASHKDDEEKFFPMHGTLIFGKQGTNANDADLEHVMITDEEEIRTTNPVATEQYGNVSNNLQNSNTGPTTENVNHQGALPGMVWQDRDVYLQGPIWAKIPHTDGHFHPSPLMGGFGLKHPPPQIMIKNTPVPAYPPTNFSAAKFASFITQYSTRQVSVEIEWELQKENSKRWNPEIQYTSNYNKSVNVDFTVDANGVYSEPRPIGTRYLTRNL

SEQ ID NO: 475 - protein, 735 aa, Artificial Sequence
  Synthetic Polypeptide
MAADGYLPDWLEDTLSEGIRQWWKLKPGPPPPRPAERHQDDSRGLVLPGYKYLGPFNGLDKGEPVNEADAAALEHDKAYDRQLDSGDNPYLKYNHADAEFQERLKEDTSFGGNLGRAVFQAKKRVLEPLGLVEEPVKTAPGKKRPVEHSPAEPDSSSGTGKAGQQPARKRLNFGQTGDADSVPDPQPLGQPPAAPTSLGSTTMATGSGAPMADNNEGADGVGNSSGNWHCDSQWLGDRVITTSTRTWALPTYNNHLYKQISSQSGASNDNHYFGYSTPWGYFDFNRFHCHFSPRDWQRLINNNWGFRPKRLNFKLFNIQVKEVTQNDGTTTIANNLTSTVQVFTDSEYQLPYVLGSAHQGCLPPFPADVFMVPQYGYLTLNNGSQAVGRSSFYCLEYFPSQMLRTGNNFTFSYTFEDVPFHSSYAHSQSLDRLMNPLIDQYLYYLNRTQSNSGTLQQSRLLFSQAGPTSMSLQAKNWLPGPCYRQQRLSKQANDNNNSNFPWTAATKYHLNGRDSLVNPGPAMASHKDDEEKFFPMHGTLIFGKQGTNANDADLDNVMITDEEEIRTTNPVATEQYGTVSNNLQNSNTGPTTGTVNHQGALPGMVWQDRDVYLQGPIWAKIPHTDGHFHPSPLMGGFGLKHPPPQIMIKNTPVPANPPTNFSSAKFASFITQYSTGQVSVEIEWELQKENSKRWNPEIQYTSNYNKSVNVDFTVDTNGVYSEPRPIGTRYLTRNL

SEQ ID NO: 476 - protein, 735 aa, Artificial Sequence
  Synthetic Polypeptide
MAADGYLPDWLEDILSEGIRQWWKLKPGPPPPKPAERHKDDSRGLVLPGYKYLGPFNGLDKGEPVNEADAAALEHDKAYDRQLDSGDNPYLKYNHADAEFQERLKEDTSFGGNLGRAVFQAKKRVLEPLGLVEEPVKTAPGKKRPVEQSPAEPDSSSGTGKAGNQPARKRLNFGQTGDADSVPDPQPLGQPPAAPSGLGSTTMATGSGAPMADNNEGADGVGNSSGNWHCDSQWLGDRVITTSTRTWALPTYNNHLYKQISSQSGAANDNHYFGYSTPWGYFDFNRFHCHFSPRDWQRLINNNWGFRPKRLNFKLFNIQVKEVTQNDGTTTIANNLTSTVQVFTDSEYQLPYVLGSAHQGCLPPFPADVFMVPQYGYLTLNNGSQAVGRSSFYCLEYFPSQMLRTGNNFTFSYTFEDVPFHSSYAHSQSLDRLMNPLIDQYLYYLNKTQSNSGTLQQSRLLFSQAGPTSMSLQAKNWLPGPCYRQQRLSKQANDNNNSNFPWTAATKYHLNGRDSLVNPGPAMASHKDDEEKFFPMHGTLIFGKQGTNANDADLDNVMITDEEEIRTTNPVATEQYGTVSNNLQNSNTGPTTGTVNHQGALPGMVWQDRDVYLQGPIWAKIPHTDGHFHPSPLMGGFGLKHPPPQIMIKNTPVPANPPTNFSSAKFASFITQYSTGQVSVEIEWELQKENSKRWNPEIQYTSNYNKSVNVDFTVDTNGVYSEPRPIGTRYLTRNL

SEQ ID NO: 477 - protein, 735 aa, Artificial Sequence
  Synthetic Polypeptide
MAADGYLPDWLEDTLSEGIRQWWKLKPGPPPPRPAERHQDDSRGLVLPGYKYLGPFNGLDKGEPVNEADAAALEHDKAYDRQLDSGDNPYLKYNHAGAEFQERLKEDTSFGGNLGRAVFQAKKRVLEPLGLVEEPVKTAPGKKRPVEHSPVEPDSSSGTGKAGQQPARKRLNFGQTGDADSVPDPQPLGQPPAAPTSLGSTTMATGSGAPMADNNEGADGVGNSSGNWHCDSQWLGDRVITTSTRTWALPTYNNHLYKQISSQSGAANDNHYFGYSTPWGYFDFNRFHCHFSPRDWQRLINNNWGFRPKRLNFKLFNIQVKEVTQNDGTTTIANNLTSTVPVFTDSEYQLPYVLGSAHQGCLPPFPADVFMVPQYGYLTLNNGSQAVGRSSFYCLEYFPSQMLRTGNNFTFSYTFEDVPFHSSYAHSQSLDRLMNPLIDQYLYYLNKTQSNSGTLQQSRLLFSQAGPTSMSLQAKNWLPGPCYRQQRLSKQANDNNNSNFPWTAATKYHLNGRDSLVNPGPAMASHKDDEEKFFPMHGTLIFGKQGTNANDADLDNVMITDEEEIRTTNPVATEQYGTVSNNLQNSNTGPTTGTVNHQGALPGMVWQDRDVYLQGPIWAKIPHTDGHFHPSPLMGGFGLKHPPPQIMIKNTPVPANPPTNFSSAKFASFITQYSTGQVSVEIEWELQKENSKRWNPEIQYTSNYNKSVNVDFTVDTNGVYSEPRPIGTRYLTRNL

SEQ ID NO: 478 - protein, 734 aa, Artificial Sequence
  Synthetic Polypeptide
MAADGYLPDWLEDTLSEGIRQWWKLKPGPPPRPAERHQDDSRGLVLPGYKYLGPFNGLDKGEPVNEADAAALEHDKAYDRQLDSGDNPYLKYNHADAEFQERLKEDTSFGGNLGRAVFQAKKRVLEPLGLVEEPVKTAPGKKRPVEHSPAEPDSSSGTGKAGQQPARKRLNFGQTGDADSVPDPQPLGQPPAAPTSLGSTTMATGSGAPMADNNEGADGVGNSSGNWHCDSQWLGDRVITTSTRTWALPTYNNHLYKQISSQSGASNDNHYFGYSTPWGYFDFNRFHCHFSPRDWQRLINNNWGFRPKRLNFKLFNIQVKEVTQNDGTTTIANNLTSTVQVFTDSEYQLPYVLGSAHQGCLPPFPADVFMVPQYGYLTLNNGSQAVGRSSFYCLEYFPSQMLRTGNNFTFSYTFEDVPFHSSYAHSQSLDRLMNPLIDQYLYYLNRTQSNSGTLQQSRLLFSQAGPTSMSLQAKNWLPGPCYRQQRLSKQANDNNNSNFPWTAATKYHLNGRDSLVNPGPAMASHKDDEEKFFPMHGTLIFGKQGTNANDADLEHVMITDEEEIRTTNPVATEQYGNVSNNLQNSNTGPTTENVNHQGALPGMVWQDRDVYLQGPIWAKIPHTDGHFHPSPLMGGFGLKHPPPQIMIKNTPVPANPPTNFSAAKFASFITQYSTGQVSVEIEWELQKENSKRWNPEIQYTSNYNKSVNVDFTVDANGVYSEPRPIGTRYLTRNL

SEQ ID NO: 479 - protein, 735 aa, Artificial Sequence
  Synthetic Polypeptide
MAADGYLPDWLEDTLSEGIRQWWKLKPGPPPPKPAERHQDDSRGLVLPGHKYLGPFNGLDKGEPVNEADAAALEHDKAYDRQLDSGDNPYLKYNHADAEFQERLKEDTSFGGNLGRAVFQAKKRVLEPLGLVEEPVKTAPGKKRPVEHSPAEPDSSSGTGKAGQQPARKRLNFGQTGDADSVPDPQPLGQPPAAPTSLGSTTMATGSGAPMADNNEGADGVGNSSGNWHCDSQWLGDRVITTSTRTWALPTYNNHLYKQISSQSGASNDNHYFGYSTPWGYFDFNRFHCHFSPRDWQRLINNNWGFRPKRLNFKLFNIQVKEVTQNDGTTTIANNLTSTVQVFTDSEYQLPYVLGSAHQGCLPPFPADVFMVPQYGYLTLNNGSQAVGRSSFYCLEYFPSQMLRTGNNFTFSYTFEDVPFHSSYAHSQSLDRLMNPLIDQYLYYLNRTQSNSGTLQQSRLLFSQAGPTSMSLQAKNWLPGPCYRQQRLSKQANDNNNSNFPWTAATKYHLNGRDSLVNPGPAMASHKDDEEKFFPMHGTLIFGKQGTNANDADLEHVMITDEEEIRTTNPVATEQYGNVSNNLQNSNTGPTTENVNHQGALPGMVWQDRDVYLQGPIWAKIPHTDGHFHPSPLMGGFGLKHPPPQIMIKNTPVPANPPTNFSAAKFASFITQYSTGQVSVEIEWELQKENSKRWNPEIQYTSNYNKSVNVDFTVDTNGVYSEPRPIGTRYLTRNL

SEQ ID NO: 480 - protein, 735 aa, Artificial Sequence
  Synthetic Polypeptide
MAADGYLPDWLEDTLSEGIRQWWKLKPGPPPPRPAERHQDDSRGLVLPGYKYLGPFNGLDKGEPVNEADAAALEHDKAYDRQLDSGDNPYLKYNHADAEFQERLKEDTSFGGNLGRAVFQAKKRVLEPLGLVEEPVKTAPGKKRPVEHSPAEPDSSSGTGKAGQQPARKRLNFGQTGDADSVPDPQPLGQPPAAPTSLGSTTMATGSGAPMADNNEGADGVGNSSGNWHCDSQWLGDRVITTSTRTWALPTYNNHLYKQISSQSGASNDNHYFGYSTPWGYFDFNRFHCHFSPRDWQRLINNNWGFRPKRLNFKLFNIQVKEVTQNDGTTTIANNLTSTVQVFTDSEYQLPYVLGSAHQGCLPPFPADVFMVPQYGYLTLNNGSQAVGHSSSYCLEYFPSQMLRTGNNFTFSYTFEDVPFHSSYAHSQSLDRLMNPLIDQYLYYLNRTQSNSGTLQQSRLLFSQAGPTSMSLQAKNWLPGPCYRQQRLSKQANDNNNSNFPWTAATKYHLNGRDSLVNPGPAMASHKDDEEKFFPMHGTLIFGKQGTNANDADLEHVMITDEEEIRTTNPVATEQYGNVSNNLQNSNTGPTTENVNHQGALPGMVWQDRDVYLQGPIWAKIPHTDGHFHPSPLMGGFGLKHPPPQIMIKNTPVPANPPTNFSAAKFASFITQYSTGQVSVEIEWELQKENSKRWNPEIQYTSNYNKSVNVDFTVDANGVYSEPRPIGTRYLTRNL

SEQ ID NO: 481 - protein, 735 aa, Artificial Sequence
  Synthetic Polypeptide
MAADGYLPDWLEDTLSEGIRQWWKLKPGPPPPRPAERHQDDSRGLVLPGYKYLGPFNGLDKGEPVNEADAAALEHDKAYDRQLDSGDNPYLKYNHADAEFQERLKEDTSFGGNLGRAVFQAKKRVLEPLGLVEEPVKTAPGKKRPVEHSPAEPDSSSGTGKAGQQPARKRLNFGQTGDADSVPDPQPLGQPPAAPTSLGSTTMATGSGAPMADNNEGADGVGNSSGNWHCDSQWLGDRVITTSTRTRALPTYNNHLYKQISSQSGASNDNHYFGYSTPWGYFDFNRFHCHFSPRDWQRLTNNNWGFRPKRLNFKLFNIQVKEVTQNDGTTTIANNLTSTVQVFTDSEYQLPYVLGSAHQGCLPPFPADVFMVPQYGYLTLNNGSQAVGRSSFYCLEYFPSQMLRTGNNFTFSYTFEDVPFHSSYAHSQSLDRLMNPLIDQYLYYLNRTQSNSGTLQQSRLLFSQAGPTSMSLQAKNWLPGPCYRQQRLSKQANDNNNSNFPWTAATKYHLNGRDSLVNPGPAMASHKDDEEKFFPMHGTLIFGKQGTNANDADLEHVMITDEEEIRTTNPVATEQYGNVSNNLQNSNTGPTTENVNHQGALPGMVWQDRDVYLQGPIWAKIPHTDGHFHPSPLMGGFGLKHPPPQIMIKNTPVPANPPTNFSAAKFASFITQYSTGQVSVEIEWELQKENSKRWNPEIQYTSNYNKSVNVDFTVDANGVYSEPRPIGTRYLTRNL

SEQ ID NO: 482 - protein, 735 aa, Artificial Sequence
  Synthetic Polypeptide
MAADGYLPDWLEDTLSEGIRQWWKLKPGPPPPKPAERHKDDSRGLVLPGYKYLGPFNGLDKGEPVNEADAAALEHDKAYDRQLDSGDNPYLKYNHADAEFQERLKEDTSFGGNLARAVFQAKKRVLEPLGLVEEPVKTAPGKKRPVEHSPAGPDSSSGTGKSGQQPARKRLNFGQTGDADSVPDPQPLGQPPAAPSGLGTNTMASGSGAPMADNNEGADGVGNSSGNWHCDSTWMGDRVITTSTRTWALPTYNNHLYKQISSQSGAANDNHYFGYSTPWGYFDFNRFHCHFSPRDWQRLINNNWGFRPKRLNFKLFNIQVKEVTQNDGTTTIANNLTSTVQVFTDSEYQLPYVLGSAHQGCLPPFPADVFMVPQYGYLTLNNGSQAVGRSSFYCLEYFPSQMLRTGNNFTFSYTFEDVPFHSSYAHSQSLDRLMNPLIDQYLYYLNRTQSNSGTLQQSRLLFSQAGPTSMSLQAKNWLPGPCYRQQRLSKQANDNNNSNFPWTAATKYHLNGRDSLVNPGPAMASHKDDEEKFFPMHGTLIFGKQGTNANDADLEHVMITDEEEIRTTNPVATEQYGNVSNNLQNSNTGPTTENVNHQGALPGMVWQDRDVYLQGPIWAKIPHTDGHFHPSPLMGGFGLKHPPPQIMIKNTPVPANPPTNFSAAKFASFITQYSTGQVSVEIEWELQKENSKRWNPEIQYTSNYNKSVNVDFTVDANGVYSEPRPIGTRYLTRNL

SEQ ID NO: 483 - protein, 734 aa, Artificial Sequence
  Synthetic Polypeptide
MAADGYLPDWLEDTLSEGIRQWWKLKPGPPPPRPAERHQDDSRGLVLPGYKYLGPFNGLDKGEPVNEADAAALEHDKAYDRQLDSGDNPYLKYNHADAEFQERLKEDTSFGGNLGRAVFQAKKRVLEPLGLVEEPVKTAPGKKRPVEHSPAEPDSSSGTGKAGQQPARKRLNFGQTGDADSVPDPQPLGQPPAAPTSLGSTTMATGSGAPMADNNEGADGVGNSSGNWHCDSQWLGDRVITTSTRTWALPTYNNHLYKQISSQSGASNDNHYFGYSTPWGYFDFNRFHCHFSPRDWQRLINNNWGFRPKRLNFKLFNIQVKEVTQNDGTTTIANNLTSTVQVFTDSEYQLPYVLGSAHQGCLPPFPADVFMVPQYGYLTLNNGSQAVGRSSFYCLEYFPSQMLRTGNNFTFSYTFEDVPFHSSYAHSQSLDRLMNPLIDQYLYYLNRTQSNSGTLQQSRLLFSQAGPTSMSLQAKNWLPGPCYRQQRLSKQANDNNSNFPWTAATKYHLNGRDSLVNPGPAMASHKDDEEKFFPMHGTLIFGKQGTNANDADLEHVMITDEEEIRTTNPVATEQYGNVSNNLQNSNTGPTTENVNHQGALPGMVWQDRDVYLQGPIWAKIPHTDGHFHPSPLMGGFGLKHPPPQIMIKNTPVPANPPTNFSAAKFASFITQYSTGQVSVEIEWELQKENSKRWNPEIQYTSNYNKSVNVDFTVDANGVYSEPRPIGTRYLTRNL

SEQ ID NO: 484 - protein, 735 aa, Artificial Sequence
  Synthetic Polypeptide
MAADGYLPDWLEDTLSEGIRQWWKLKPGPPPPKPAERHKDDSRGLVLPGYKYLGPFNGLDKGEPVNEADAAALEHDKAYDRQLDSGDNPYLKYNHADAEFQERLKEDTSFGGNLARAVFQAKKRVLEPLGLVEEPVKTAPGKKRPVEHSPAGPDSSSGTGKSGQQPARKRLNFGQTGDADSVPDPQPLGQPPAAPTSLGSTTMATGSGAPMADNNEGADGVGNSSGNWHCDSQWLGDRVITTSTRTWALPTYNNHLYKQISSQSGASNDNHYFGYSTPWGYFDFNRFHCHFSPRDWQRLINNNWGFRPKRLNFKLFNIQVKEVTQNDGTTTIANNLTSTVQVFTDSEYQLPYVLGSAHQGCLPPFPADVFMVPQYGYLTLNNGSQAVGRSSFYCLEYFPSQMLRTGNNFTFSYTFEDVPFHSSYAHSQSLDRLMNPLIDQYLYYLNRTQSNSGTLQQSRLLFSQAGPTSMSLQAKNWLPGPCYRQQRLSKQANDNNNSNFPWTAATKYHLNGRDSLVNPGPAMASHKDDEEKFFPMHGTLIFGKQGTNANDADLEHVMITDEEEIRTTNPVATEQYGNVSNNLQNSNTGPTTENVNHQGALPGMVWQDRDVYLQGPIWAKIPHTDGHFHPSPLMGGFGLKHPPPQIMIKNTPVPANPPTNFSAAKFASFITQYSTGQVSVEIEWELQKENSKRWNPEIQYTSNYNKSVNVDFTVDANGVYSEPRPIGTRYLTRNL

SEQ ID NO: 485 - protein, 735 aa, Artificial Sequence
  Synthetic Polypeptide
MAADGYLPDWLEDTLSEGIRQWWKLKPGPPPPKPAGRHKDDSRGLVLPGYKYLGPFNGLDKGEPVNEADAAALEHDKAYDRQLDSGDNPYLKYNHAGAEFQERLKEDTSFGGNLGRAVFQAKKRVLEPLGLVEEPVKTAPGKKRPVEHSPVEPDSSSGTGKAGQQPARKRLNFGQTGDADSVPDPQPLGQPPAAPTSLGSTTMATGSGAPMADNNEGADGVGNSSGNWHCDSQWLGDRVITTSTRTWALPTYNNHLYKQISSQSGAANDNHYFGYSTPWGYFDFNRFHCHFSPRDWQRLINNNWGFRPKRLNFKLFNIQVKEVTQNDGTTTIANNLTSTVPVFTDSEYQLPYVLGSAHQGCLPPFPADVFMVPQYGYLTLNNGSQAVGRSSFYCLEYFPSQMLRTGNNFTFSYTFEDVPFHSSYAHSQSLDRLMNPLIDQYLYYLNKTQSNSGTLQQSRLLFSQAGPTSMSLQAKNWLPGPCYRQQRLSKQANDNNNSNFPWTAATKYHLNGRDSLVNPGPAMASHKDDEEKFFPMHGTLIFGKQGTNANDADLEHVMITDEEEIRTTNPVATEQYGNVSNNLQNSNTGPTTENVNHQGALPGMVWQDRDVYLQGPIWAKIPHTDGHFHPSPLMGGFGLKHPPPQIMIKNTPVPANPPTNFSAAKFASFITQYSTGQVSVEIEWELQKENSKRWNPEIQYTSNYNKSVNVDFTVDANGVYSEPRPIGTRYLTRNL

SEQ ID NO: 486 - protein, 735 aa, Artificial Sequence
  Synthetic Polypeptide
MAADGYLPDWLEDTLSEGIRQWWKLKPGPPPPKPAGRHKDDSRGLVLPGYKYLGPFNGLDKGEPVNEADAAALEHDKAYDRQLDSGDNPYLKYNHAGAEFQERLKEDTSFGGNLGRAVFQAKKRVLEPLGLVEEPVKTAPGKKRPVEHSPVEPDSSSGTGKAGQQPARKRLNFGQTGDADSVPDPQPLGQPPAAPTSLGSTTMATGSGAPMADNNEGADGVGNSSGNWHCDSQWLGDRVITTSTRTWALPTYNNHLYKQISSQSGAANDNHYFGYSTPWGYFDFNRFHCHFSPRDWQRLINNNWGFRPKRLNFKLFNIQVKEVTQNDGTTTIANNLTSTVPVFTDSEYQLPYVLGSAHQGCLPPFPADVFMVPQYGYLTLNNGSQAVGRSSFYCLEYFPSQMLRTGNNFTFSYTFEDVPFHSSYAHSQSLDRLMNPLIDQYLYYLNKTQSNSGTLQQSRLLFSQAGPTSMSLQAKNWLPGPCYRQQRLSKQANDNNNSNFPWTAATKYHLNGRDSLVNPGPAMASHKDDEEKFFPMHGTLIFGKQGTNANDADLDNVMITDEEEIRTTNPVATEQYGTVSNNLQNSNTGPTTGTVNHQGALPGMVWQDRDVYLQGPIWAKIPHTDGHFHPSPLMGGFGLKHPPPQIMIKNTPVPANPPTNFSAAKFASFITQYSTGQVSVEIEWELQKENSKRWNPEIQYTSNYNKSVNVDFTVDANGVYSEPRPIGTRYLTRNL

SEQ ID NO: 487 - protein, 735 aa, Artificial Sequence
  Synthetic Polypeptide
MAADGYLPDWLEDTLSEGIRQWWKLKPGPPPPRPAERHQDDSRGLVLPGYKYLGPFNGLDKGEPVNEADAAALEHDKAYDRQLDSGDNPYLKYNHADAEFQERLKEDTSFGGNLGRAVFQAKKRVLEPLGLVEEPVKTAPGKKRPVEHSPAEPDSSSGTGKAGQQPARKRLNFGQTGDADSVPDPQPLGQPPAAPTSLGSTTMATGSGAPMADNNEGADGVGNSSGNWHCDSQWLGDRVITTSTRTWALPTYNNHLYKQISSQSGASNDNHYFGYSTPWGYFDFNRFHCHFSPRDWQRLINNNWGFRPKRLNFKLFNIQVKEVTQNDGTTTIANNLTSTVQVFTDSEYQLPYVLGSAHQGCLPPFPADVFMVPQYGYLTLNNGSQAVGRSSFYCLEYFPSQMLRTGNNFTFSYTFEDVPFHSSYAHSQSLDRLMNPLIDQYLYYLNRTQSNSGTLQQSRLLFSQAGPTSMSLQAKNWLPGPCYRQQRLSKQANDNNNSNFPWTAATKYHLNGRDSLVNPGPAMASHKDDEEKFFPMHGTLIFGKQGTNANDADLEHVMITDEEEIRTTNPVATEQYGNVSNNLQNSNTGPTTENVNHQGALPGMVWQDRDVYLQGPIWAKIPHTDGHFHPSPLMGGFGLKHPPPQIMIKNTPVPANPPTNFSSAKFASFITQYSTGQVSVEIEWELQKENSKRWNPEIQYTSNYNKSVNVDFTVDTNGVYSEPRPIGTRYLTRNL

SEQ ID NO: 488 - protein, 735 aa, Artificial Sequence
  Synthetic Polypeptide
MAADGYLPDWLEDTLSEGIRQWWKLKPGPPPPKPAERHQDDSRGLVLPGYKYLGPFNGLDKGEPVNEADAAALEHDKAYDRQLDSGDNPYLKYNHADAEFQERLKEDTSFGGNLGRAVFQAKKRVLEPLGLVEEPVKTAPGKKRPVEHSPAEPDSSSGTGKAGQQPARKRLNFGQTGDADSVPDPQPLGQPPAAPTSLGSTTMATGSGAPMADNNEGADGVGNSSGNWHCDSQWLGDRVITTSTRTWALPTYNNHLYKQISSQSGAANDNHYFGYSTPWGYFDFNRFHCHFSPRDWQRLINNNWGFRPKRLNFKLFNIQVKEVTQNDGTTTIANNLTSTVPVFTDSEYQLPYVLGSAHQGCLPPFPADVFMVPQYGYLTLNNGSQAVGRSSFYCLEYFPSQMLRTGNNFTFSYTFEDVPFHSSYAHSQSLDRLMNPLIDQYLYYLNKTQSNSGTLQQSRLLFSQAGPTSMSLQAKNWLPGPCYRQQRLSKQANDNNNSNFPWTAATKYHLNGRDSLVNPGPAMASHKDDEEKFFPMHGTLIFGKQGTNANDADLDNVMITDEEEIRTTNPVATEQYGTVSNNLQNSNTGPTTGTVNHQGALPGMVWQDRDVYLQGPIWAKIPHTDGHFHPSPLMGGFGLKHPPPQIMIKNTPVPANPPTNFSSAKFASFITQYSTGQVSVEIEWELQKENSKRWNPEIQYTSNYNKSVNVDFTVDTNGVYSEPRPIGTRYLTRNL

SEQ ID NO: 489 - protein, 735 aa, Artificial Sequence
  Synthetic Polypeptide
MAADGYLPDWLEDTLSEGIRQWWKLKPGPPPPKPAERHKDDSRGLVLPGYKYLGPFNGLDKGEPVNEADAAALEHDKAYDRQLDSGDNPYLKYNHADAEFQERLKEDTSFGGNLARAVFQAKKRVLEPLGLVEEPVKTAPGKKRPVEHSPAGPDSSSGTGKSGQQPARKRLNFGQTGDADSVPDPQPLGQPPAAPSGLGTNTMASGSGAPMADNNEGADGVGNSSGNWHCDSTWMGDRVITTSTRTWALPTYNNHLYKQISSQSGAANDNHYFGYSTPWGYFDFNRFHCHFSPRDWQRLINNNWGFRPKRLNFELFNIQVKEVTQNDGTTTIANNLTSTVQVFTDSEYQLPYVLGSAHQGCLPPFPADVFMVPQYGYLTLNNGSQAVGRSSFYCLEYFPSQMLRTGNNFTFSYTFEDVPFHSSYAHSQSLDRLMNPLIDQYLYYLNRTQSNSGTLQQSRLLFSQAGPTSMSLQAKNWLPGPCYRQQRLSKQANDNNNSNFPWTAATKYHLNGRDSLVNPGPAMASHKDDEEKFFPMHGTLIFGKQGTNANDADLEHVMITDEEEIRTTNPVATEQYGNVSNNLQNSNTGPTTENVNHQGALPGMVWQDRDVYLQGPIWAKIPHTDGHFHPSPLMGGFGLKHPPPQIMIKNTPVPANPPTNFSAAKFASFITQYSTGQVSVEIEWELQKENSKRWNPEIQYTSNYNKSVNVDFTVDANGVYSEPRPIGTRYLTRNL

SEQ ID NO: 490 - protein, 735 aa, Artificial Sequence
  Synthetic Polypeptide
MAADGYLPDWLEDILSEGIRQWWKLKPGPPPPKPAERHKDDSRGLVLPGYKYLGPFNGLDKGEPVNEADAAALEHDKAYDRQLDSGDNPYLKYNHADAEFQERLKEDTSFGGNLGRAVFQAKKRVLEPLGLVEEPVKTAPGKKRPVEHSPAEPDSSSGTGKAGQQPARKRLNFGQTGDADSVPDPQPLGQPPAAPTSLGSTTMATGSGAPMADNNEGADGVGNSSGNWHCDSQWLGDRVITTSTRTWALPTYNNHLYKQISSQSGASNDNHYFGYSTPWGYFDFNRFHCHFSPRDWQRLINNNWGFRPKRLNFKLFNIQVKEVTQNDGTTTIANNLTSTVQVFTDSEYQLPYVLGSAHQGCLPPFPADVFMVPQYGYLTLNNGSQAVGRSSFYCLEYFPSQMLRTGNNFTFSYTFEDVPFHSSYAHSQSLDRLMNPLIDQYLYYLNRTQSNSGTLQQSRLLFSQAGPTSMSLQAKNWLPGPCYRQQRLSKQANDNNNSNFPWTAATKYHLNGRDSLVNPGPAMASHKDDEEKFFPMHGTLIFGKQGTNANDADLEHVMITDEEEIRTTNPVATEQYGNVSNNLQNSNTGPTTENVNHQGALPGMVWQDRDVYLQGPIWAKIPHTDGHFHPSPLMGGFGLKHPPPQIMIKNTPVPANPPTNFSAAKFASFITQYSTGQVSVEIEWELQKENSKRWNPEIQYTSNYNKSVNVDFTVDANGVYSEPRPIGTRYLTRNL

SEQ ID NO: 491 - protein, 735 aa, Artificial Sequence
  Synthetic Polypeptide
MAADGYLPDWLEDTLSEGIRQWWKLKPGPPPPRPAERHQDDSRGLVLPGYKYLGPFNGLDKGEPVNEADAAALEHDKAYDRQLDSGDNPYLKYNHADAEFQERLKEDTSFGGNLGRAVFQAKKRVLEPLGLVEEPVKTAPGKKRPVEHSPVEPDSSSGTGKAGQQPARKRLNFGQTGDADSVPDPQPLGQPPAAPTSLGSTTMATGSGAPMADNNEGADGVGNSSGNWHCDSQWLGDRVITTSTRTWALPTYNNHLYKQISSQSGAANDNHYFGYSTPWGYFDFNRFHCHFSPRDWQRLINNNWGFRPKRLNFKLFNIQVKEVTQNDGTTTIANNLTSTVPVFTDSEYQLPYVLGSAHQGCLPPFPADVFMVPQYGYLTLNNGSQAVGRSSFYCLEYFPSQMLRTGNNFTFSYTFEDVPFHSSYAHSQSLDRLMNPLIDQYLYYLNKTQSNSGTLQQSRLLFSQAGPTSMSLQAKNWLPGPCYRQQRLSKQANDNNNSNFPWTAATKYHLNGRDSLVNPGPAMASHKDDEEKFFPMHGTLIFGKQGTNANDADLDNVMITDEEEIRTTNPVATEQYGTVSNNLQNSNTGPTTGTVNHQGALPGMVWQDRDVYLQGPIWAKIPHTDGHFHPSPLMGGFGLKHPPPQIMIKNTPVPANPPTNFSSAKFASFITQYSTGQVSVEIEWELQKENSKRWNPEIQYTSNYNKSVNVDFTVDTNGVYSEPRPIGTRYLTRNL

SEQ ID NO: 492 - protein, 735 aa, Artificial Sequence
  Synthetic Polypeptide
MAADGYLPDWLEDTLSEGIRQWWKLKPGPPPPKPAERHKDDSRGLVLPGYKYLGPFNGLDKGEPVNEADAAALEHDKAYDRQLDSGDNPYLKYNHADAEFQERLKEDTSFGGNLARAVFQAKKRVLEPLGLVEEPVKTAPGKKRPVEHSPAEPDSSSGTGKAGQQPARKRLNFGQTGDADSVPDPQPLGQPPAAPTSLGSTTMATGSGAPMADNNEGADGVGNSSGNWHCDSQWLGDRVITTSTRTWALPTYNNHLYKQISSQSGASNDNHYFGYSTPWGYFDFNRFHCHFSPRDWQRLINNNWGFRPKRLNFKLFNIQVKEVTQNDGTTTIANNLTSTVQVFTDSEYQLPYVLGSAHQGCLPPFPADVFMVPQYGYLTLNNGSQAVGRSSFYCLEYFPSQMLRTGNNFTFSYTFEDVPFHSSYAHSQSLDRLMNPLIDQYLYYLNRTQSNSGTLQQSRLLFSQAGPTSMSLQAKNWLPGPCYRQQRLSKQANDNNNSNFPWTAATKYHLNGRDSLVNPGPAMASHKDDEEKFFPMHGTLIFGKQGTNANDADLEHVMITDEEEIRTTNPVATEQYGNVSNNLQNSNTGPTTENVNHQGALPGMVWQDRDVYLQGPIWAKIPHTDGHFHPSPLMGGFGLKHPPPQIMIKNTPVPANPPTNFSAAKFASFITQYSTGQVSVEIEWELQKENSKRWNPEIQYTSNYNKSVNVDFTVDANGVYSEPRPIGTRYLTRNL

SEQ ID NO: 493 - protein, 735 aa, Artificial Sequence
  Synthetic Polypeptide
MAADGYLPDWLEDTLSEGIRQWWKLKPGPPPPRPAERHQDDSRGLVLPGYKYLGPFNGLDKGEPVNEADAAALEHDKAYDRQLDSGDNPYLKYNHADAEFQERLKEDTSFGGNLGRAVFQAKKRVLEPLGLVEEPVKTAPGKKRPVEHSPAEPDSSSGTGKAGQQPARKRLNFGQTGDADSVPDPQPLGQPPAAPTSLGSTTMATGSGAPMADNNEGADGVGNSSGNWHCDSQWLGDRVITTSTRTWALPTYNNHLYKQISSQSGAANDNHYFGYSTPWGYFDFNRFHCHFSPRDWQRLINNNWGFRPKRLNFKLFNIQVKEVTQNDGTTTIANNLTSTVPVFTDSEYQLPYVLGSAHQGCLPPFPADVFMVPQYGYLTLNNGSQAVGRSSFYCLEYFPSQMLRTGNNFTFSYTFEDVPFHSSYAHSQSLDRLMNPLIDQYLYYLNKTQSNSGTLQQSRLLFSQAGPTSMSLQAKNWLPGPCYRQQRLSKQANDNNNSNFPWTAATKYHLNGRDSLVNPGPAMASHKDDEEKFFPMHGTLIFGKQGTNANDADLDNVMITDEEEIRTTNPVATEQYGTVSNNLQNSNTGPTTGTVNHQGALPGMVWQDRDVYLQGPIWAKIPHTDGHFHPSPLMGGFGLKHPPPQIMIKNTPVPANPPTNFSSAKFASFITQYSTGQVSVEIEWELQKENSKRWNPEIQYTSNYNKSVNVDFTVDTNGVYSEPRPIGTRYLTRNL

SEQ ID NO: 494 - protein, 735 aa, Artificial Sequence
  Synthetic Polypeptide
MAADGYLPDWLEDTLSEGIRQWWKLKPGPPPPKPAGRHKDDSRGLVLPGYKYLGPFNGLDKGEPVNEADAAALEHDKAYDRQLDSGDNPYLKYNHAGAEFQERLKEDTSFGGNLGRAVFQAKKRVLEPLGLVEEPVKTAPGKKRPVEHSPVEPDSSSGTGKAGQQPARKRLNFGQTGDADSVPDPQPLGQPPAAPTSLGSTTMATGSGAPMADNNEGADGVGNSSGNWHCDSQWLGDRVITTSTRTWALPTYNNHLYKQISSQSGAANDNHYFGYSTPWGYFDFNRFHCHFSPRDWQRLINNNWGFRPKRLNFKLFNIQVKEVTQNDGTTTIANNLTSTVPVFTDSEYQLPYVLGSAHQGCLPPFPADVFMVPQYGYLTLNNGSQAVGRSSFYCLEYFPSQMLRTGNNFTFSYTFEDVPFHSSYAHSQSLDRLMNPLIDQYLYYLNKTQSNSGTLQQSRLLFSQAGPTSMSLQAKNWLPGPCYRQQRLSKQANDNNNSNFPWTAATKYHLNGRDSLVNPGPAMASHKDDEEKFFPMHGTLIFGKQGTNANDADLDNVMITDEEEIRTTNPVATEQYGTVSNNLQNSNTGPTTGTVNHQGALPGMVWQDRDVYLQGPIWAKIPHTDGHFHPSPLMGGFGLKHPPPQIMIKNTPVPANPPTNFSSAKFASFITQYSTGQVSVEIEWELQKENSKRWNPEIQYTSNYNKSVNVDFTVDTNGVYSEPRPIGTRYLTRNL

SEQ ID NO: 495 - protein, 735 aa, Artificial Sequence
  Synthetic Polypeptide
MAADGYLPDWLEDTLSEGIRQWWKLKPGPPPPRPAERHQDDSRGLVLPGYKYLGPFNGLDKGEPVNEADAAALEHDKAYDRQLDSGDNPYLKYNHADAEFQERLKEDTSFGGNLGRAVFQAKKRVLEPLGLVEEPVKTAPGKKRPVEHSPAEPDSSSGTGKAGQQPARKRLNFGQTGDADSVPDPQPLGQPPAAPTSLGSTTMATGSGAPMADNNEGADGVGNSSGNWHCDSQWLGDRVITTSTRTWALPTYNNHLYKQISSQSGASNDNHYFGYSTPLGYFDFNRFHCHFSPRDWQRLINNNWGFRPKRLNFKLFNIQVKEVTQNDGTTTIANNLTSTVQVFTDSEYQLPYVLGSAHQGCLPPFPADVFMVPQYGYLTLNNGSQAVGRSSFYCLEYFPSQMLRTGNNFTFSYTFEDVPFHSSYAHSQSLDRLMNPLIDQYLYYLNRTQSNSGTLQQSRLLFSQAGPTSMSLQAKNWLPGPCYRQQRLSKQANDNNNSNFPWTAATKYHLNGRDSLVNPGPAMASHKDDEEKFFPMHGTLIFGKQGTNANDADLEHVMITDEEEIRTTNPVATEQYGNVSNNLQNSNTGPTTENVNHQGALPGMVWQDRDVYLQGPIWAKIPHTDGHFHPSPLMGGFGLKHPPPQIMIKNTPVPANPPTNFSAAKFASFITQYSTGQVSVEIEWELQKENSKRWNPEIQYTSNYNKSVNVDFTVDANGVYSEPRPIGTRYLTRNL

SEQ ID NO: 496 - protein, 735 aa, Artificial Sequence
  Synthetic Polypeptide
MAADGYLPDWLEDTLSEGIRQWWKLKPGPPPPKPAGRHKDDSRGLVLPGYKYLGPFNGLDKGEPVNEADAAALEHDKAYDRQLDSGDNPYLKYNHAGAEFQERLKEDTSFGGNLGRAVFQAKKRVLEPLGLVEEPVKTAPGKKRPVEHSPVEPDSSSGTGKAGQQPARKRLNFGQTGDADSVPDPQPLGQPPAAPTSLGSTTMATGSGAPMADNNEGADGVGNSSGNWHCDSQWLGDRVITTSTRTWALPTYNNHLYKQISSQSGAANDNHYFGYSTPWGYFDFNRFHCHFSPRDWQRLINNNWGFRPKRLNFKLFNIQVKEVTQNDGTTTIANNLTSTVPVFTDSEYQLPYVLGSAHQGCLPPFPADVFMVPQYGYLTLNNGSQAVGRSSFYCLEYFPSQMLRTGNNFTFSYTFEDVPFHSSYAHSQSLDRLMNPLIDQYLYYLNRTQSNSGTLQQSRLLFSQAGPTSMSLQAKNWLPGPCYRQQRLSKQANDNNNSNFPWTAATKYHLNGRDSLVNPGPAMASHKDDEEKFFPMHGTLIFGKQGTNANDADLEHVMITDEEEIRTTNPVATEQYGNVSNNLQNSNTGPTTENVNHQGALPGMVWQDRDVYLQGPIWAKIPHTDGHFHPSPLMGGFGLKHPPPQIMIKNTPVPANPPTNFSAAKFASFITQYSTGQVSVEIEWELQKENSKRWNPEIQYTSNYNKSVNVDFTVDANGVYSEPRPIGTRYLTRNL

SEQ ID NO: 497 - protein, 735 aa, Artificial Sequence
  Synthetic Polypeptide
MAADGYLPDWLEDILSEGIRQWWKLKPGPPPPKPAERHKDDSRGLVLPGYKYLGPFNGLDKGEPVNEADAAALEHDKAYDRQLDSGDNPYLKYNHADAEFQERLKEDTSFGGNLGRAVFQAKKRVLEPLGLVEEPVKTAPGKKRPVEQSPAEPDSSSGTGKAGNQPARKRLNFGQTGDADSVPDPQPLGQPPAAPSGLGSTTMATGSGAPMADNNEGADGVGNSSGNWHCDSQWLGDRVITTSTRTWALPTYNNHLYKQISSQSGAANDNHYFGYSTPWGYFDFNRFHCHFSPRDWQRLINNNWGFRPKRLNFKLFNIQVKEVTQNDGTTTIANNLTSTVPVFTDSEYQLPYVLGSAHQGCLPPFPADVFMVPQYGYLTLNNGSQAVGRSSFYCLEYFPSQMLRTGNNFTFSYTFEDVPFHSSYAHSQSLDRLMNPLIDQYLYYLNKTQSNSGTLQQSRLLFSQAGPTSMSLQAKNWLPGPCYRQQRLSKQANDNNNSNFPWTAATKYHLNGRDSLVNPGPAMASHKDDEEKFFPMHGTLIFGKQGTNANDADLDNVMITDEEEIRTTNPVATEQYGTVSNNLQNSNTGPTTGTVNHQGALPGMVWQDRDVYLQGPIWAKIPHTDGHFHPSPLMGGFGLKHPPPQIMIKNTPVPANPPTNFSSAKFASFITQYSTGQVSVEIEWELQKENSKRWNPEIQYTSNYNKSVNVDFTVDTNGVYSEPRPIGTRYLTRNL

SEQ ID NO: 498 - protein, 735 aa, Artificial Sequence
  Synthetic Polypeptide
MAADGYLPDWLEDTLSEGIRQWWKLKPGPPPPRPAERHQDDSRGLVLPGYKYLGPFNGLDKGEPVNEADAAALEHDKAYDRQLDSGDNPYLKYNHADAEFQERLKEDTSFGGNLGRAVFQAKKRVLEPLGLVEEPVKTAPGKKRPVEHSPAEPDSSSGTGKAGQQPARKRLNFGQTGDADSVPDPQPLGQPPAAPTSLGSTTMATGSGAPMADNNEGADGVGNSSGNWHCDSQWLGDRVITTSTRTWALPTYNNHLYKQISSQSGASNDNHYFGYSTPWGYFDFNRFHCHFSPRDWQRLINNNWGFRPKRLNFKLFNIQVKEVTQNDGTTTIANNLTSTVQVFTDSEYQLPYVLGSAHQGCLPPFPADVFMVPQYGYLTLNNGSQAVGRSSFYCLEYFPSQMLRTGNNFTFSYTFEDVPFHSSYAHSQSLDRLMNPLIDQYLYYLNRTQSNSGTLQQSRLLFSQAGPTSMSLQAKNWLPGPCYRQQRLSKQANDNNNSNFPWTAATKYHLNGRDSLVNPGPAMASHKDDEEKFFPMHGTLIFGKQGTNANDADLEHVMITDEEEIRTTNPVATEQYGNVSNNLQNSNTGPTTENVNHQGALPGMVWQDRDVYLQGPIWAKIPHTDGHFHPSPLMGGFGLKHPPPQIMIKNTPVPANPPTNFSAAKFASFITQYSTGQVSVEIEWELQKENSKRWNPEIQYTSNYNKSVNVDFTVDANGVYSEPRPIGTRYLTRNL

SEQ ID NO: 499 - protein, 735 aa, Artificial Sequence
  Synthetic Polypeptide
MAADGYLPDWLEDTLSEGIRQWWKLKPGPPPPKPAGRHKDDSRGLVLPGYKYLGPFNGLDKGEPVNEADAAALEHDKAYDRQLDSGDNPYLKYNHAGAEFQERLKEDTSFGGNLGRAVFQAKKRVLEPLGLVEEPVKTAPGKKRPVEHSPVEPDSSSGTGKAGQQPARKRLNFGQTGDADSVPDPQPLGQPPAAPTSLGSTTMATGSGAPMADNNEGADGVGNSSGNWHCDSQWLGDRVITTSTRTWALPTYNNHLYKQISSQSGASNDNHYFGYSTPWGYFDFNRFHCHFSPRDWQRLINNNWGFRPKRLNFKLFNIQVKEVTQNDGTTTIANNLTSTVQVFTDSEYQLPYVLGSAHQGCLPPFPADVFMVPQYGYLTLNNGSQAVGHSSFYCLEYFPSQMLRTGNNFTFSYTFEDVPFHSSYAHSQSLDRLMNPLIDQYLYYLNRTQSNSGTLQQSRLLFSQAGPTSMSLQAKNWLPGPCYRQQRLSKQANDNNNSNFPWTAATKYHLNGRDSLVNPGPAMASHKDDEEKFFPMHGTLIFGKQGTNANDADLEHVMITDEEEIRTTNPVATEQYGNVSNNLQNSNTGPTTENVNHQGALPGMVWQDRDVYLQGPIWAKIPHTDGHFHPSPLMGGFGLKHPPPQIMIKNTPVPANPPTNFSAAKFASFITQYSTGQVSVEIEWELQKENSKRWNPEIQYTSNYNKSVNVDFTVDTNGVYSEPRPIGTRYLTRNL

SEQ ID NO: 500 - protein, 735 aa, Artificial Sequence
  Synthetic Polypeptide
MAADGYLPDWLEDTLSEGIRQWWKLKPGPPPPKPAERHKDDSRGLVLPGYKYLGPFNGLDKGEPVNEADAAALEHDKAYDRQLDSGDNPYLKYNHADAEFQERLKEDTSFGGNLGRAVFQAKKRVLEPLGLVEEPVKTAPGKKRPVEHSPAEPDSSSGTGKAGQQPARKRLNFGQTGDADSVPDPQPLGQPPAAPTSLGSTTMATGSGAPMADNNEGADGVGNSSGNWHCDSQWLGDRVITTSTRTWALPTYNNHLYKQISSQSGASNDNHYFGYSTPWGYFDFNRFHCHFSPRDWQRLINNNWGFRPKRLNFKLFNIQVKEVTQNDGTTTIANNLTSTVQVFTDSEYQLPYVLGSAHQGCLPPFPADVFMVPQYGYLTLNNGSQAVGRSSFYCLEYFPSQMLRTGNNFTFSYTFEDVPFHSSYAHSQSLDRLMNPLIDQYLYYLNRTQSNSGTLQQSRLLFSQAGPTSMSLQAKNWLPGPCYRQQRLSKQANDNNNSNFPWTAATKYHLNGRDSLVNPGPAMASHKDDEEKFFPMHGTLIFGKQGTNANDADLEHVMITDEEEIRTTNPVATEQYGNVSNNLQNSNTGPTTENVNHQGALPGMVWQDRDVYLQGPIWAKIPHTDGHFHPSPLMGGFGLKHPPPQIMIKNTPVPANPPTNFSAAKFASFITQYSTGQVSVEIEWELQKENSKRWNPEIQYTSNYNKSVNVDFTVDTNGVYSEPRPIGTRYLTRNL

SEQ ID NO: 501 - protein, 735 aa, Artificial Sequence
  Synthetic Polypeptide
MAADGYLPDWLEDTLSEGIRQWWKLKPGPPPPKPAERHQDDSRGLVLPGHKYLGPFNGLDKGEPVNEADAAALEHDKAYDRQLDSGDNPYLKYNHADAEFQERLKEDTSFGGNLGRAVFQAKKRVLEPLGLVEEPVKTAPGKKRPVEHSPAEPDSSSGTGKAGQQPARKRLNFGQTGDADSVPDPQPLGQPPAAPTSLGSTTMATGSGAPMADNNEGADGVGNSSGNWHCDSQWLGDRVITTSTRTWALPTYNNHLYKQISSQSGASNDNHYFGYSTPWGYFDFNRFHCHFSPRDWQRLINNNWGFRPKRLNFKLFNIQVKEVTQNDGTTTIANNLTSTVQVFTDSEYQLPYVLGSAHQGCLPPFPADVFMVPQYGYLTLNNGSQAVGHSSSYCLEYFPSQMLRTGNNFTFSYTFEDVPFHSSYAHSQSLDRLMNPLIDQYLYYLNRTQSNSGTLQQSRLLFSQAGPTSMSLQAKNWLPGPCYRQQRLSKQANDNNNSNFPWTAATKYHLNGRDSLVNPGPAMASHKDDEEKFFPMHGTLIFGKQGTNANDADLEHVMITDEEEIRTTNPVATEQYGNVSNNLQNSNTGPTTENVNHQGALPGMVWQDRDVYLQGPIWAKIPHTDGHFHPSPLMGGFGLKHPPPQILIKNTPVPANPSTTFSAAKFASFITQYSTGQVSVEIEWELQKENSKRWNPEIQYTSNYNKSVNVDFTVDTNGVYSEPRPIGTRYLTRNL

SEQ ID NO: 502 - protein, 735 aa, Artificial Sequence
  Synthetic Polypeptide
MAADGYLPDWLEDTLSEGIRQWWKLKPGPPPPKPAERHKDDSRGLVLPGYKYLGPFNGLDKGEPVNEADAAALEHDKAYDRQLDSGDNPYLKYNHADAEFQERLKEDTSFGGNLARAVFQAKKRVLEPLGLVEEPVKTAPGKKRPVEHSPAEPDSSSGTGKSGQQPARKRLNFGQTGDADSVPDPQPLGQPPAAPSGLGTNTMASGSGAPMADNNEGADGVGNSSGNWHCDSTWMGDRVITTSTRTWALPTYNNHLYKQISSQSGASNDNHYFGYSTPWGYFDFNRFHCHFSPRDWQRLINNNWGFRPKRLNFKLFNIQVKEVTQNDGTTTIANNLTSTVQVFTDSEYQLPYVLGSAHQGCLPPFPADVFMVPQYGYLTLNNGSQAVGRSSFYCLEYFPSQMLRTGNNFTFSYTFEDVPFHSSYAHSQSLDRLMNPLIDQYLYYLNRTQSNSGTLQQSRLLFSQAGPTSMSLQAKNWLPGPCYRQQRLSKQANDNNNSNFPWTAATKYHLNGRDSLVNPGPAMASHKDDEEKFFPMHGTLIFGKQGTNANDADLEHVMITDEEEIRTTNPVATEQYGNVSNNLQNSNTGPTTENVNHQGALPGMVWQDRDVYLQGPIWAKIPHTDGHFHPSPLMGGFGLKHPPPQIMIKNTPVPANPPTNFSAAKFASFITQYSTGQVSVEIEWELQKENSKRWNPEIQYTSNYNKSVNVDFTVDANGVYSEPRPIGTRYLTRNL

SEQ ID NO: 503 - protein, 735 aa, Artificial Sequence
  Synthetic Polypeptide
MAADGYLPDWLEDILSEGIRQWWKLKPGPPPPKPAERHKDDSRGLVLPGYKYLGPFNGLDKGEPVNEADAAALEHDKAYDRQLDSGDNPYLKYNHADAEFQERLKEDTSFGGNLGRAVFQAKKRVLEPLGLVEEPVKTAPGKKRPVEQSPAEPDSSSGTGKAGNQPARKRLNFGQTGDADSVPDPQPLGQPPAAPSGLGSTTMATGSGAPMADNNEGADGVGNSSGNWHCDSQWLGDRVITTSTRTWALPTYNNHLYKQISSQSGAANDNHYFGYSTPWGYFDFNRFHCHFSPRDWQRLINNNWGFRPKRLNFKLFNIQVKEVTQNDGTTTIANNLTSTVQVFTDSEYQLPYVLGSAHQGCLPPFPADVFMVPQYGYLTLNNGSQAVGRSSFYCLEYFPSQMLRTGNNFTFSYTFEDVPFHSSYAHSQSLDRLMNPLIDQYLYYLNRTQSNSGTLQQSRLLFSQAGPTSMSLQAKNWLPGPCYRQQRLSKQANDNNNSNFPWTAATKYHLNGRDSLVNPGPAMASHKDDEEKFFPMHGTLIFGKQGTNANDADLEHVMITDEEEIRTTNPVATEQYGNVSNNLQNSNTGPTTENVNHQGALPGMVWQDRDVYLQGPIWAKIPHTDGHFHPSPLMGGFGLKHPPPQIMIKNTPVPANPPTNFSAAKFASFITQYSTGQVSVEIEWELQKENSKRWNPEIQYTSNYNKSVNVDFTVDANGVYSEPRPIGTRYLTRNL

SEQ ID NO: 504 - protein, 735 aa, Artificial Sequence
  Synthetic Polypeptide
MAADGYLPDWLEDTLSEGIRQWWKLKPGPPPPRPAERHQDDSRGLVLPGYKYLGPFNGLDKGEPVNEADAAALEHDKAYDRQLDSGDNPYLKYNHADAEFQERLKEDTSFGGNLGRAVFQAKKRVLEPLGLVEEPVKTAPGKKRPVEHSPAEPDSSSGTGKAGQQPARKRLNFGQTGDADSVPDPQPLGQPPAAPTSLGSTTMATGSGAPMADNNEGADGVGNSSGNWHCDSQWLGDRVITTSTRTWALPTYNNHLYKQISSQSGASNDNHYFGYSTPWGYFDFNRFHCHFSPRDWQRLINNNWGFRPKRLNFKLFNIQVKEVTQNDGTTTIANNLTSTVQVFTDSEYQLPYVLGSAHQGCLPPFPADVFMVPQYGYLTLNNGSQAVGRSSFYCLEYFPSQMLRTGNNFTFSYTFEDVPFHSSYAHSQSLDRLMNPLIDQYLYYLNRTQSNSGTLQQSRLLFSQAGPTSMSLQAKNWLPGPCYRQQRLSKQANDNNNSNFPWTAATKYHLNGRDSLVNPGPAMASHKDDEEKFFPMHGTLIFGKQGTNANDADLEHVMITDEEEIRTTNPVATEQYGNVSNNLQNSNTGPTTENVNHQGALPGMVWQDRDVYLQGPIWAKIPHTDGHFHPSPLMGGFGLKHPPPQILIKSTPVPANPSTTFSAAKFASFITQYSTGQVSVEIEWELQKENSKRWNPEIQYTSNYNKSVNVDFTVDTNGVYSEPRPIGTRYLTRNL

SEQ ID NO: 505 - protein, 735 aa, Artificial Sequence
  Synthetic Polypeptide
MAADGYLPDWLEDTLSEGIRQWWKLKPGPPPPRPAERHQDDSRGLVLPGYKYLGPFNGLDKGEPVNEADAAALEHDKAYDRQLDSGDNPYLKYNHADAEFQERLKEDTSFGGNLGRAVFQAKKRVLEPLGLVEEPVKTAPGKKRPVEHSPAEPDSSSGTGKAGQQPARKRLNFGQTGDADSVPDPQPLGQPPAAPTSLGSTTMATGSGAPMADNNEGADGVGNSSGNWHCDSQWLGDRVITTSTRTWALPTYNNHLYKQISSQSGASNDNHYFGYSTPWGYFDFNRFHCHFSPRDWQRLTNNNWGFRPKRLNFKLFNIQVKEVTQNDGTTTIANNLTSTVQVFTDSEYQLPYVLGSAHQGCLPPFPADVFMVPQYGYLTLNNGSQAVGRSSFYCLEYFPSQMLRTGNNFTFSYTFEDVPFHSSYAHSQSLDRLMNPLIDQYLYYLNRTQSNSGTLQQSRLLFSQAGPTSMSLQAKNWLPGPCYRQQRLSKQANDNNNSNFPWTAATKYHLNGRDSLVNPGPAMASHKDDEEKFFPMHGTLIFGKQGTNANDADLEHVMITDEEEIRTTNPVATEQYGNVSNNLQNSNTGPTTENVNHQGALPGMVWQDRDVYLQGPIWAKIPHTDGHFHPSPLMGGFGLKHPPPQIMIKNTPVPANPPTNFSAAKFASFITQYSTGQVSVEIEWELQKENSKRWNPEIQYTSNYNKSVNVDFTVDANGVYSEPRPIGTRYLTRNL

SEQ ID NO: 506 - protein, 735 aa, Artificial Sequence
  Synthetic Polypeptide
MAADGYLPDWLEDTLSEGIRQWWKLKPGPPPPKPAGRHKDDSRGLVLPGYKYLGPFNGLDKGEPVNEADAAALEHDKAYDRQLDSGDNPYLKYNHAGAEFQERLKEDTSFGGNLGRAVFQAKKRVLEPLGLVEEPVKTAPGKKRPVEHSPVEPDSSSGTGKAGQQPARKRLNFGQTGDADSVPDPQPLGQPPAAPTSLGSTTMATGSGAPMADNNEGADGVGNSSGNWHCDSQWLGDRVITTSTRTWALPTYNNHLYKQISSQSGASNDNHYFGYSTPWGYFDFNRFHCHFSPRDWQRLINNNWGFRPKRLNFKLFNIQVKEVTQNDGTTTIANNLTSTVPVFTDSEYQLPYVLGSAHQGCLPPFPADVFMVPQYGYLTLNNGSQAVGRSSFYCLEYFPSQMLRTGNNFTFSYTFEDVPFHSSYAHSQSLDRLMNPLIDQYLYYLNKTQSNSGTLQQSRLLFSQAGPTSMSLQAKNWLPGPCYRQQRLSKQANDNNNSNFPWTAATKYHLNGRDSLVNPGPAMASHKDDEEKFFPMHGTLIFGKQGTNANDADLDNVMITDEEEIRTTNPVATEQYGTVSNNLQNSNTGPTTGTVNHQRALPGMVWQDRDVYLQGPIWAKIPHTDGHFHPSPLMGGFGLKHPPPQIMIKNTPVPANPPTNFSSAKFASFITQYSTGQVSVEIEWELQKENSKRWNPEIQYTSNYNKSVNVDFTVDTNGVYSEPRPIGTRYLTRNL

SEQ ID NO: 507 - protein, 735 aa, Artificial Sequence
  Synthetic Polypeptide
MAADGYLPDWLEDTLSEGIRQWWKLKPGPPPPKPAGRHKDDSRGLVLPGYKYLGPFNGLDKGEPVNEADAAALEHDKAYDRQLDSGDNPYLKYNHAGAEFQERLKEDTSFGGNLGRAVFQAKKRVLEPLGLVEEPVKTAPGKKRPVEHSPVEPDSSSGTGKAGQQPARKRLNFGQTGDADSVPDPQPLGQPPAAPTSLGSTTMATGSGAPMADNNEGADGVGNSSGNWHCDSQWLGDRVITTSTRTWALPTYNNHLYKQISSQSGASNDNHYFGYSTPWGYFDFNRFHCHFSPRDWQRLINNNWGFRPKRLNFKLFNIQVKEVTQNDGTTTIANNLTSTVPVFTDSEYQLPYVLGSAHQGCLPPFPADVFMVPQYGYLTLNNGSQAVGRSSFYCLEHFPSQMLRTGNNFTFSYTFEDVPFHSSYAHSQSLDRLMNPLIDQYLYYLNKTQSNSGTLQQSRLLFSQAGPTSMSLQAKNWLPGPCYRQQRLSKQANDNNNSNFPWTAATKYHLNGRDSLVNPGPAMASHKDDEEKFFPMHGTLIFGKQGTNANDADLDNVMITDEEEIRTTNPVATEQYGTVSNNLQNSNTGPTTGTVNHQRALPGMVWQDRDVYLQGPIWAKIPHTDGHFHPSPLMGGFGLKHPPPQIMIKNTPVPANPPTNFSSAKFASFITQYSTGQVSVEIEWELQKENSKRWNPEIQYTSNYNKSVNVDFTVDTNGVYSEPRPIGTRYLTRNL

SEQ ID NO: 508 - protein, 735 aa, Artificial Sequence
  Synthetic Polypeptide
MAADGYLPDWLEDTLSEGIRQWWKLKPGPPPPKPAGRHKDDSRGLVLPGYKYLGPFNGLDKGEPVNEADAAALEHDKAYDRQLDSGDNPYLKYNHAGAEFQERLKEDTSFGGNLGRAVFQAKKRVLEPLGLVEEPVKTAPGKKRPVEHSPVEPDSSSGTGKAGQQPARKRLNFGQTGDADSVPDPQPLGQPPAAPTSLGSTTMATGSGAPMADSNEGADGVGNSSGNWHCDSQWLGDRVITTSTRTWALPTYNNHLYKQISSQSGASNDNHYFGYSTPWGYFDFNRFHCHFSPRDWQRLINNNWGFRPKRLNFKLFNIQVKEVTQNDGTTTIANNLTSTVPVFTDSEYQLPYVLGSAHQGCLPPFPADVFMVPQYGYLTLNNGSQAVGRSSFYCLEYFPSQMLRTGNNFTFSYTFEDVPFHSSYAHSQSLDRLMNPLIDQYLYYLNKTQSNSGTLQQSRLLFSQAGPTSMSLQAKNWLPGPCYRQQRLSKQANDNNNSNFPWTAATKYHLNGRDSLVNPGPAMASHKDDEEKFFPMHGTLIFGKQGTNANDADLDNVMITDEEEIRTTNPVATEQYGTVSNNLQNSNTGPTTGTVNHQRALPGMVWLDRDVYLQGPIWAKIPHTDGHFHPSPLMGGFGLKHPPPQIMIKNTPVPANPPTNFSSAKFASFITQYSTGQVSVEIEWELQKENSKRWNPEIQYTSNYNKSVNVDFTVDTNGVYSEPRPIGTRYLTRNL

SEQ ID NO: 509 - protein, 735 aa, Artificial Sequence
  Synthetic Polypeptide
MAADGYLPDWLEDTLSEGIRQWWRLKPGPPPPKPAGRHKDDSRGLVLPGYKYLGPFNGLDKGEPVNEADAAALEHDKAYDRQLDSGDNPYLKYNHAGAEFQERLKEDTSFGGNLGRAVFQAKKRVLEPLGLVEEPVKTAPGKKRPVEHSPVEPDSSSGTGKAGQQPARKRLNFGQTGDADSVPDPQPLGQPPAAPTSLGSTTMATGSGAPMADNNEGADGVGNSSGNWHCDSQWLGDRVITTSTRTWALPTYNNHLYKQISSQSGASNDNHYFGYSTPWGYFDFNRFHCHFSPRDWQRLINNNWGFRPKRLNFKLFNIQVKEVTQNDGTTTIANNLTSTVPVFTDSEYQLPYVLGSAHQGCLPPFPADVFMVPQYGYLTLNNGSQAVGRSSFYCLEYFPSQMLRTGNNFTFSYTFEDVPFHSSYAHSQSLDRLMNPLIDQYLYYLNKTQSNSGTLQQSRLLFSQAGPTSMSLQAKNWLPGPCYRQQRLSKQANDNNNSNFPWTAATKYHLNGRDSLVNPGPAMASHKDDEEKFFPMHGTLIFGKQGTNANDADLDNVMITDEEEIRTTNPVATEQYGTVSNNLQNSNTGPTTGTVNHQRALPGMVWQDRDVYLQGPIWAKIPHTDGHFHPSPLMGGFGLKHPPPQIMIKNTPVPANPPTNFSSAKFASFITQYSTGQVSVEIEWELQKENSKRWNPEIQYTSNYNKSVNVDFTVDTNGVYSEPRPIGTRYLTRNL

SEQ ID NO: 510 - protein, 735 aa, Artificial Sequence
  Synthetic Polypeptide
MAADGYLPDWLEDTLSEGIRQWWKLKPGPPPPKPAGRHKDDSRGLVLPGYKYLGPFNGLDKGEPVNEADAAALEHDKAYDRQLDSGDNPYLKYNHAGAEFQERLKEDTSFGGNLGRAVFQAKKRVLEPLGLVEEPVKTAPGKKRPVEHSPVEPDSSSGTGKAGQQPARKRLNFGQTGDADSVPDPQPLGQPPAAPTSLGSTTMATGSGAPMADNNEGADGVGNSSGNWHCDSQWLGDRVITTSTRTWALPTYNNHLYKQISSQSGASNDNHYFGYSTPWGYFDFNRFHCHFSPRDWQRLINNNWGFRPKRLNFKLFNIQVKEVTQNDGTTTIANNLTSTVPVFTDSEYQLPYVLGSAHQGCLPPFPADVFMVPQYGYLTLNNGSQAVGRSSFYCLEYFPSQMLRTGNNFTFSYTFEDVPFHSSYAHSQSLDRLMNPLIDQYLYYLNKTQSNSGTLQQSRLLFSQAGPTSMSLQAKNWLPGPCYRQQRLSKQANDNNNSNFPWTAATKYHLNGRDSLVNPGPAMASHKDDEEKFFPMHGTLIFGKQGTNANDADLDNVMITDEEEIRTTNPVATEQYGTVSNNLQNSNTGPTTGTVNHQRALPGMVWQDRDVYLQGPIWAKIPHTDGHFHPSPLMGGFGLKHPPPQIMIKNTPVPANPPTNFSSAKFASFITQYSTGQVSVEIEWELQKENSKRWNPEIQYTSNYNKSVNVDLTVDTNGVYSEPRPIGTRYLTRNL

SEQ ID NO: 511 - protein, 735 aa, Artificial Sequence
  Synthetic Polypeptide
MAADGYLPDWLEDTLSEGIRQWWKLKPGPPPPKPAGRHKDDSRGLVLPGYKYLGPFNGLDKGEPVNEADAAALEHDKAYDRQLDSGDNPYLKYNHAGAEFQERLKEDTSFGGNLGRAVFQAKKRVLEPLGLVEEPVKTAPGKKRPVEHSPVEPDSSSGTGKAGQQPARKRLNFGQTGDADSVPDPQPLGQPPAAPTSLGSTTMATGSGAPMADNNEGADGVGNSSGNWHCDSQWLGDRVITTSTRTWALPTYNNHLYKQISSQSGASNDNHYFGYSTPWGYFDFNRFHCHFSPRDWQRLINNNWGFRPKRLNFKLFNIQVKEVTQNDGTTTIANNLTSTVPVFTDSEYQLPYVLGSAHQGCLPPFPADVFMVPQYGYPTLNNGSQAVGRSSFYCLEYFPSQMLRTGNNFTFSYTFEDVPFHSSYAHSQSLDRLMNPLIDQYLYYLNKTQSNSGTLQQSRLLFSQAGPTSMSLQAKNWLPGPCYRQQRLSKQANDNNNSNFPWAAATKYHLNGRDSLVNPGPAMASHKDDEEKFFPMHGTLIFGKQGTNANDADLDNVMITDEEEIRTTNPVATEQYGTVSNNLQNSNTGPTTGTVNHQRALPGMVWQDRDVYLQGPIWAKIPHTDGHFHPSPLMGGFGLKHPPPQIMIKNTPVPANPPTNFSSAKFASFITQYSTGQVSVEIEWELQKENSKRWNPEIQYTSNYNKSVNVDFTVDTNGVYSEPRPIGTRYLTRNL

SEQ ID NO: 512 - protein, 735 aa, Artificial Sequence
  Synthetic Polypeptide
MAADGYLPDWLEDTLSEGIRQWWKLKPGPPPPKPAERHQDDSRGLVLPGYKYLGPFNGLDKGEPVNEADAAALEHDKAYDRQLDSGDNPYLKYNHADAEFQERLKEDTSFGGNLGRAVFQAKKRVLEPLGLVEEPVKTAPGKKRPVEHSPAEPDSSSGTGKAGQQPARKRLNFGQTGDADSVPDPQPLGQPPAAPTSLGSTTMATGSGAPMADNNEGADGVGNSSGNWHCDSQWLGDRVITTSTRTWALPTYNNHLYKQISSQSGASNDNHYFGYSTPWGYFDFNRFHCHFSPRDWQRLINNNWGFRPKRLNFKLFNIQVKEVTQNDGTTTIANNLTSTVQVFTDSEYQLPYVLGSAHQGCLPPFPADVFMVPQYGYLTLNNGSQAVGRSSFYCLEYFPSQMLRTGNNFTFSYTFEDVPFHSSYAHSQSLDRLMNPLIDQYLYYLNRTQSNSGTLQQSRLLFSQAGPTSMSLQAKNWLPGPCYRQQRLSKQANDNNNSNFPWTAATKYHLNGRDSLVNPGPAMASHKDDEEKFFPMHGTLIFGKQGTNANDADLEHVMITDEEEIRTTNPVATEQYGNVSNNLQNSNTGPTTENVNHQGALPGMVWQDRDVYLQGPIWAKIPHTDGHFHPSPLMGGFGLKHPPPQIMIKNTPVPANPPTNFSAAKFASFITQYSTGQVSVEIEWELQKENSKRWNPEIQYTSNYNKSVNVDFTVDTNGVYSEPRPIGTRYLTRNL

SEQ ID NO: 513 - protein, 734 aa, Artificial Sequence
  Synthetic Polypeptide
MAADGYLPDWLEDTLSEGIRQWWKLKPGPPPPKPAERHQDDSRGLVLPGYKYLGPFNGLDKGEPVNEADAAALEHDKAYDRQLDSGDNPYLKYNHADAEFQERLKEDTSFGGNLGRAVFQAKKRVLEPLGLVEEPVKTAPGKKRPVEHSPAEPDSSSGTGKAGQQPARKRLNFGQTGDADSVPDPQPLGQPPAAPTSLGSTTMATGSGAPMADNNEGADGVGNSSGNWHCDSQWLGDRVITTSTRTWALPTYNNHLYKQISSQSGASNDNHYFGYSTPWGYFDFNRFHCHFSPRDWQRLINNNWGFRPKRLNFKLFNIQVKEVTQNDGTTTIANNLTSTVQVFTDSEYQLPYVLGSAHQGCLPPFPADVFMVPQYGYLTLNNGSQAVGRSSFYCLEYFPSQMLRTGNNFTFSYTFEDVPFHSSYAHSQSLDRLMNPLIDQYLYYLNRTQSNSGTLQQSRLLFSQAGPTSMSLQAKNWLPGPCYRQQRLSKQANDNNSNFPWTAATKYHLNGRDSLVNPGPAMASHKDDEEKFFPMHGTLIFGKQGTNANDADLEHVMITDEEEIRTTNPVATEQYGNVSNNLQNSNTGPTTENVNHQGALPGMVWQDRDVYLQGPIWAKIPHTDGHFHPSPLMGGFGLKHPPPQIMIKNTPVPANPPTNFSAAKFASFITQYSTGQVSVEIEWELQKENSKRWNPEIQYTSNYNKSVNVDFTVDTNGVYSEPRPIGTRYLTRNL

SEQ ID NO: 514 - protein, 734 aa, Artificial Sequence
  Synthetic Polypeptide
MAADGYLPDWLEDTLSEGIRQWWKLKPGPPPKPAERHQDDSRGLVLPGYKYLGPFNGLDKGEPVNEADAAALEHDKAYDRQLDSGDNPYLKYNHADAEFQERLKEDTSFGGNLGRAVFQAKKRVLEPLGLVEEPVKTAPGKKRPVEHSPAEPDSSSGTGKAGQQPARKRLNFGQTGDADSVPDPQPLGQPPAAPTSLGSTTMATGSGAPMADNNEGADGVGNSSGNWHCDSQWLGDRVITTSTRTWALPTYNNHLYKQISSQSGASNDNHYFGYSTPWGYFDFNRFHCHFSPRDWQRLINNNWGFRPKRLNFKLFNIQVKEVTQNDGTTTIANNLTSTVQVFTDSEYQLPYVLGSAHQGCLPPFPADVFMVPQYGYLTLNNGSQAVGRSSFYCLEYFPSQMLRTGNNFTFSYTFEDVPFHSSYAHSQSLDRLMNPLIDQYLYYLNRTQSNSGTLQQSRLLFSQAGPTSMSLQAKNWLPGPCYRQQRLSKQANDNNNSNFPWTAATKYHLNGRDSLVNPGPAMASHKDDEEKFFPMHGTLIFGKQGTNANDADLEHVMITDEEEIRTTNPVATEQYGNVSNNLQNSNTGPTTENVNHQGALPGMVWQDRDVYLQGPIWAKIPHTDGHFHPSPLMGGFGLKHPPPQIMIKNTPVPANPPTNFSAAKFASFITQYSTGQVSVEIEWELQKENSKRWNPEIQYTSNYNKSVNVDFTVDTNGVYSEPRPIGTRYLTRNL

SEQ ID NO: 515 - protein, 735 aa, Artificial Sequence
  Synthetic Polypeptide
MAADGYLPDWLEDTLSEGIRQWWKLKPGPPPPKPAERHQDDSRGLVLPGYKYLGPFNGLDKGEPVNEADAAALEHDKAYDRQLDSGDNPYLKYNHADAEFQERLKEDTSFGGNLGRAVFQAKKRVLEPLGLVEEPVKTAPGKKRPVEHSPAEPDSSSGTGKAGQQPARKRLNFGQTGDADSVPDPQPLGQPPAAPTSLGSTTMATGSGAPMADNNEGADGVGNSSGNWHCDSQWLGDRVITTSTRTWALPTYNNHLYKQISSQSGASNDNHYFGYSTPWGYFDFNRFHCHFSPRDWQRLINNNWGFRPKRLNFKLFNIQVKEVTQNDGTTTIANNLTSTVQVFTDSEYQLPYVLGSAHQGCLPPFPADVFMVPQYGYLTLNNGSQAVGRSSFYCLEYFPSQMLRTGNNFTFSYTFEDVPFHSSYAHSQSLDRLMNPLIDQYLYYLNRTQSNSGTLQQSRLLFSQAGPTSMSLQAKNWLPGPCYRQQRLSKQANDNNNSNFPWTAATKYHLNGRDSLVNPGPAMASHKDDEEKFFPMHGTLIFGKQGTNANDADLEHVMITDEEEIRTTNPVATEQYGNVSNNLQNSNTGPTTENVNHQGALPGMVWQDRDAYLQGPIWAKIPHTDGHFHPSPLMGGFGLKHPPPQIMIKNTPVPANPPTNFSAAKFASFITQYSTGQVSVEIEWELQKENSKRWNPEIQYTSNYNKSVNVDFTVDTNGVYSEPRPIGTRYLTRNL

SEQ ID NO: 516 - protein, 735 aa, Artificial Sequence
  Synthetic Polypeptide
MAADGYLPDWLEDTLSEGIRQWWKLKPGPPPPKPAERHQDDSRGLVLPGYKYLGPFNGLDKGEPVNEADAAALEHDKAYDRQLDSGDNPYLKYNHADAEFQERLKEDTSFGGNLGRAVFQAKKRVLEPLGLVEEPAKTAPGKKRPVEHSPAEPDSSSGTGKAGQQPARKRLNFGQTGDADSVPDPQPLGQPPAAPTSLGSTTMATGSGAPMADNNEGADGVGNSSGNWHCDSQWLGDRVITTSTRTWALPTYNNHLYKQISSQSGASNDNHYFGYSTPWGYFDFNRFHCHFSPRDWQRLINNNWGFRPKRLNFKLFNIQVKEVTQNDGTTTIANNLTSTVQVFTDSEYQLPYVLGSAHQGCLPPFPADVFMVPQYGYLTLNNGSQAVGRSSFYCLEYFPSQMLRTGNNFTFSYTFEDVPFHSSYAHSQSLDRLMNPLIDQYLYYLNRTQSNSGTLQQSRLLFSQAGPTSMSLQAKNWLPGPCYRQQRLSKQANDNNNSNFPWTAATKYHLNGRDSLVNPGPAMASHKDDEEKFFPMHGTLIFGKQGTNANDADLEHVMITDEEEIRTTNPVATEQYGNVSNNLQNSNTGPTTENVNHQGALPGMVWQDRDVYLQGPIWAKIPHTDGHFHPSPLMGGFGLKHPPPQIMIKNTPVPANPPTNFSAAKFASFITQYSTGQVSVEIEWELQKENSKRWNPEIQYTSNYNKSVNVDFTVDTNGVYSEPRPIGTRYLTRNL

SEQ ID NO: 517 - protein, 735 aa, Artificial Sequence
  Synthetic Polypeptide
MAADGYLPDWLEDTLSEGIRQWWKLKPGPPPPKPAERHQDDSRGLVLPGYKYLGPFNGLDKGEPVNEADAAALEHDKAYDRQLDSGDNPYLKYNHADAEFQERLKEDTSFGGNLGRAVFQAKKRVLEPLGLVEEPVKTAPGKKRPVEHSPAEPDSSSGTGKAGQQPARKRLNFGQTGDADSVPDPQPLGQPPAAPTSLGSTTMATGSGAPMADNNEGADGVGNSSGNWHCDSQWLGDRVITTSTRTWALPTYNNHLYKQISSQSGASNDNHYFGYSTPWGYFDFNRFHCHFSPRDWQRLINNNWGFRPKRLNFKLFNIQVKEVTQNDGTTTIANNLTSTVQVFTDSEYQLPYVLGSAHQGCLPPFPADVFMVPQYGYLTLNNGSQAVGRSSFYCLEYFPSQMLRTGNNFTFSYTFEDVPFHSSYAHSQSLDRLMNPLIDQYLYYLNRTQSNSGTLQQSRLLFSQAGPTSMSLQAKNWLPGPCYRQQRLSKQANDNNNSNFPWTAATKYHLNGRDSLVNPGPAMASHKDDEEKFFPMHGTLIFGKQGTNANDADLEHVMITDEEEIRTTNPVATEQYGNVSNNLQNSNTGPTTENVNHQGALPGMVWQDRDVYLQGPIWAKIPHTDGHFHPSPLMGGFGLKHPPPQIMIKNTPVPANPPTNFSAAKFASFITQYSTGQVSVEIEWELQKENSKRWNPEIQYTSNYNKSVNVDFTVDTNGAYSEPRPIGTRYLTRNL

SEQ ID NO: 518 - protein, 735 aa, Artificial Sequence
  Synthetic Polypeptide
MAADGYLPDWLEDTLSEGIRQWWKLKPGPPPPKPAERHKDDSRGLVLPGYKYLGPFNGLDKGEPVNEADAAALEHDKAYDRQLDSGDNPYLKYNHADAEFQERLKEDTSFGGNLGRAVFQAKKRVLEPLGLVEEPVKTAPGKKRPVEHSPVEPDSSSGTGKAGQQPARKRLNFGQTGDADSVPDPQPLGQPPAAPTSLGSTTMATGSGAPMADNNEGADGVGNSSGNWHCDSQWSGDRVITTSTRTWALPTYNNHLYKQISSQSGASNDNHYFGYSTPWGYFDFNRFHCHFSPRDWQRLINNNWGFRPKRLNFKLFNIQVKEVTQNDGTTTIANNLTSTVQVFTDSEYQLPYVLGSAHQGCLPPFPADVFMVPQYGYLTLNNGSQAVGRSSFYCLEYFPSQMLRTGNNFTFSYTFEDVPFHSSYAHSQSLDRLMNPLIDQYLYYLNKTQSNSGTLQQSRLLFSQAGPTSMSLQAKNWLPGPCYRQQRLSKQANDNNNSNFPWTAATKYHLNGRDSLVNPGPAMASHKDDEEKFFPMHGTLIFGKQGTNANDADLDNVMITDEEEIRTTNPVATEQYGTVSNNLQNSNTGPTTGTVNHQGALPGMVWQDRDVYLQGPIWAKIPHTDGHFHPSPLMGGFGLKHPPPQIMIKNTPVPANPPTNFSSAKFASFITQYSTGQVSVEIEWELQKENSKRWNPEIQYTSNYNKSVNVDFTVDTNGVYSEPRPIGTRYLTRNL

SEQ ID NO: 519 - protein, 735 aa, Artificial Sequence
  Synthetic Polypeptide
MAADGYLPDWLEDALSEGIRQWWKLKPGPPPPKPAERHKDDSRGLVLPGYKYLGPFNGLDKGEPVNEADAAALEHDKAYDRQLDSGDNPYLKYNHADAEFQERLKEDTSFGGNLGRAVFQAKKRVLEPLGLVEEPVKTAPGKKRPVEHSPVEPDSSSGTGKAGQQPARKRLNFGQTGDADSVPDPQPLGQPPAAPTSLGSTTMATGSGAPMADNNEGADGVGNSSGNWHCDSQWSGDRVITTSTRTWALPTYNNHLYKQISSQSGASNDNHYFGYSTPWGYFDFNRFHCHFSPRDWQRLINNNWGFRPKRLNFKLFNIQVKEVTQNDSTTTIANNLTSTVQVFTDSEYQLPYVLGSAHQGCLPPFPADVFMVPQYGYLTLNNGSQAVGRSSFYCLEYFPSQMLRTGNNFTFSYTFEDVPFHSSYAHSQSLDRLMNPLIDQYLYYLNKTQSNSGTLQQSRLLFSQAGPTSMSPQAKNWLPGPCYRQQRLSKQANDNNNSNFPWTAATKYHLNGRDSLVNPGPAMASHKDDEEKFFPMHGTLIFGKQGTNANDADLDNVMITDEEEIRTTNPVATEQYGTVSNNLQNSNTGPTTGTVNHQGALPGMVWQDRDVYLQGPIWAKIPHTDGHFHPSPLMGGFGLKHPPPQIMIKNTPVPANPPTNFSSAKFASFITQYSTGQVSVEIEWELQKENSKRWNPEIQYTSNYNKSVNVDFTVDTNGVYSEPRPIGTRYLTRNL

SEQ ID NO: 520 - protein, 735 aa, Artificial Sequence
  Synthetic Polypeptide
MAADGYLPDWLEDTLSEGIRQWWKLKPGPPPPKPAERHKDDSRGLVLPGYKYLGPFNGLDKGEPVNEANAAALEHDKAYDRQLDSGDNPYLKYDHADAEFQERLKEDTSFGGNLGRAVFQAKKRVLEPLGLVEEPVKTAPGKKRSVEHSPVEPDSSSGTGKAGQQPARKRLNFGQTGDADSVPDPQPLGQPPAAPTSLGSTTMATGSGAPMADNNEGADGVGNSSGNWHCDSQWSGDRVITTSTRTWALPTYNNHLYKQISSQSGASNDNHYFGHSTPWGYFDFNRFHCHFSPRDWQRLINNNWGFRPKRLNFKLFNIQVKEVTQNDGTTTIANNLTSTVQVFTDSEYRLPYVLGSAHQGCLPPFPADVFMVPQYGYLTLNNGSQAVGRSSFYCLEYFPSQMLRTGNNFTFSYTFEDVPFHSSYAHSQSLDRLMNPLIDQYLYYLNKTQSNSGTLQQSRLLFSQAGPTSMSLQAKNWLPGPCYRQQRLSKQANDNNNSNFPWTVATKYHLNGRDSLVNPGPAMASHKDDEEKFFPMHGTLIFGKQGTNANDADLDNVMITDEEEIRTTNPVATEQYGTVSNNLQNSNTGPTTGTVNHQGALPGMVWQDRDVYLQGPIWAKIPHTDGHFHPSPLMGGFGLKHPPPQIMIKNTPVPANPPTNFSSAKFASFITQYSTGQVSVEIEWELQKENSKRWNPETQYTSNYNKSVNVDFTVDTNGVYSEPRPIGTRYLTRNL

SEQ ID NO: 521 - protein, 735 aa, Artificial Sequence
  Synthetic Polypeptide
MAADGYLPDWLEDTLSEGIRQWWKLKPGPPPPKPAERHKDDSRGLVLPGYKYLGPFNGLDKGEPVNEANAAALEHDKAYDRQLDSGDNPYLKYNHADAEFQERLKEDTSFGGNLGRAVFQAKKRVLEPLGLVEEPVKTAPGKKRPVEHSPVEPDSSSGTGKAGQQPARKRLNFGQTGDADSVPDPQPLGQPPAAPTSLGSTTMATGSGAPMADNNEGADGVGNSSGNWHCDSQWSGDRVITTSTRTWALPTYNNHLYKQISSQSGASNDNHYFGYSTPWGYFDFNRFHCRFSPRDWQRLINNNWGFRPKRLNFKLLNIQVKEVTQNDGTTTIANNLTSTVQVFTDSEYQLPYVLGSAHQGCLPPFPADVFMVPQYGYLTLNNGSQAVGRSSFYCLEYFPSQMLRTGNNFTFSYTFEDVPFHSSYAHSQSLDRLMNPLIDQYLYYLNKTQSNSGTLQQSRLLFSQAGPTSMSLQAKNWLPGPCYRQQRLSKQANDNNNSNFPWTAATKYHLNGRDSLVNPGPAMASHKDDEEKFFPMHGTLIFGKQGTNANDADLDNVMVTDEEEIRTTNPVATEQYGTVSNNLQNSNTGPTTGTVNHQGALPGMVWQDRDVYLQGPIWAKIPHTDGHFHPSPLMGGFGLKHPPPQIMIKNTPVPANPPTNFSSAKFASFITQYSTGQVSVEIEWELQKENSKRWNPETQYTSNYNKSVNVDFTVDTNGVYSEPRPIGTRYLTRNL

SEQ ID NO: 522 - protein, 735 aa, Artificial Sequence
  Synthetic Polypeptide
MAADGYLPDWLEDTLSEGIRQWWKLKPGPPPPKPAERHKDDSRGLVLPGYKYLGPFNGLDKGEPVNEADAAALEHDKAYDRQLDSGDNPYLKYNHADAEFQERLKEDTSFGGNLGRAVFQAKKRVLEPLGLVEEPVKTAPGKKRPVEHSPVEPDSSSGTGKAGQQPARKGLNFGQTGDADSVPDPRPLGQPPAAPASLGSTTMATGSGAPMADNNEGADGVGNSSGNWHCDSQWLGDRVITTSTRTWALPTYNNHLYKQISSQSGASNDNHYFGYSTPWGYFDFNRFHCHFSPRDWQRLINNNWGFRPKRLNFKLFNIQVKEVTQNDGTTTIANNLTSTVPVFTDSEYQLPYVLGSAHQGCLPPFPADVFMVPQYGYLTLNNGSQAVGRSSFYCLEYFPSQMLRTGNNFTFSYTFEDVPFHSSYAHSQSLDRLMNPLIDQYLYYLNKTQSNSGTLQQSRLLFSQAGPTSMSLQAKNWLPGPYYRQQRLSKQANDNNNSNFPWTAATKYHPNGRDSLVDPGPAMASHKDDEEKFFPMHGTLIFGKQGTNANDADLDNVMITDEEEIRTTNPVATGQYGTVSNNLQNSNTGPTTGTVNHQGALPGMVWQDRDVYLQGPIWAKIPHTDGHFHPSPLMGGFGLKHPPPQIMVKNTPVPANPPTNFSSAKFVSFITRYSTGQVSVEIEWELQKENSKRWNPEIQYTSNYNKSVNVDFTVDTNGVYSEPRPIGTRYLTRNL

SEQ ID NO: 523 - protein, 735 aa, Artificial Sequence
  Synthetic Polypeptide
MAADGYLPDWLEDTLSEGIRQWWKLKPGPPPPKPAERHKDDSRGLVLPGYKYLGPFNGPDKGEPVNEADAAALEHDKAYDRQLDSGDNPYLKYNHADAEFQERLKEDTSFGGNLGRAVFQAKKRVLEPLGLVEEPVKTAPGKKRPVEHSPVEPDSSSGTGKAGQQPARKRLNFGQTGDADSVPDPQPLGQPPAAPTSLGSTTMATGSGAPMADNNEGADGVGNSSGNWHCDSQWSGDRVITTSTRTWALPTYNNHLYKQISSQSGASNDNHYFGYSTPWGYFDFNRFHCHFSPRDWQRLINNNWGFRPKRLNFKLFNIQVKEVTQNDGTTTIANNLTSTVQVFTDSEYQLPYVLGSAHQGCLPPFPADVFMVPQYGYLTLNNGSQAVGRSSFYCLEYFPSQMLRTGNNFTFSYTFEDVPFHSSYAHSQSLDRLMNPLIDQYLYYLNKTQSNSGTLQQSRLLFSQAGPTSMSLQAKNWLPGPCYRQQRLSKQANDNNNSNFPWTAATKYHLNGRDSLVNPGPAMASHKDDEEKFFPMHGTLIFGKQGTNANDADLDNVMITDEEEIRTTNPVATEQYGTVSNNLQNSNTGPTTGTVNHQGALPGMVWQDRDVYLQGPIWAKIPHTDGHFHPSPLMGGFGLKHPPPQIMIKNTPVPANPPTNFSSAKFASFITQYSTGQVSVEIEWELQKENSKRWNPEIQYTSNYNKSVNVDFTVDTNGVYSEPRPIGTRYLTRNL

SEQ ID NO: 524 - protein, 735 aa, Artificial Sequence
  Synthetic Polypeptide
MAADGYLPDWLEDTLSEGIRQWWKLKPGPPPPKPAERHKDDSRGLVLPGYKYLGPFNGLDKGEPVNEADAAALEHDKAYDRQLDSGDNPYLKYNHADAEFQERLKEDTSFGGNLGRAVFQAKKRVLEPLGLVEEPVKTAPGKKRPVEHSPVEPDSSSGTGKAGQQPARKRLNFGQTGDADSVPDPQPLGQPPAAPTSLGSTTMATGSGAPMADNNEGADGVGNSSGNWHCDSQWSGDRVITTSTRTWALPTYNNHLYKQISSQSGASNDNHYFGYSTPWGYFDFNRFHCHFSPRDWQRLINNNWGFRPKRLNFKLFNIQVKEVTQNDGTTTIANNLTSTVQVFTDSEYQLPYVLGSAHQGCLPPFPADVFMVPQYGYLTLNNGSQAVGRSSFYCLEYFPSQMLRTGNNFTFSYTFEDVPFHSSYAHSQSLDRLMNPLIDQYLYYLNKTQSNSGTLQQSRLLFSQAGPTSMSLQAKNWLPGPCYRQQRLSKQANDNNNSNFPWTAATKYHLNGRDSLVNPGPAMASHKDDEEKFFPMHGTLIFGKQGTNANDADLDNVMITDEEEIRTTNPVATEQYGTVSNNLQNSNTGPTTGTVNHQGALPGMVWQDRDVYLQGPIWAKIPHTDGHFHPSPLMGGFGLKHPPPQIMIKNTPVPANPPTNFSSAKFASFITQYSTGQVSVEIEWELQKENSKRWNPETQYTSNYNKSVNVDFTVDTNGVYSEPRPIGTRYLTRNL

SEQ ID NO: 525 - protein, 735 aa, Artificial Sequence
  Synthetic Polypeptide
  misc_feature (574)..(574): Xaa can be any naturally occurring amino acid
MAADGYLPDWLEDTLSEGIRQWWKLKPGPPPPKPAERHKDDSRGLVLPGYKYLGPFNGLDKGEPVNEADAAALEHDKAYDRQLDSGDNPYLKYNHADAEFQERLKEDTSFGGNLGRAVFQAKKRVLEPLGLVEEPVKTAPGKKRPVEHSPVEPDSSSGTGKAGQQPARKGLNFGQTGDADSVPDPRPLGQPPAAPASLGSTTMATGSGAPMADNNEGADGVGNSSGNWHCDSQWLGDRVITTSTRTWALPTYNNHLYKQISSQSGASNDNHYFGYSTPWGYFDFNRFHCHFSPRDWQRLINNNWGFRPKRLNFKLFNIQVKEVTQNDGTTTIANNLTSTVPVFTDSEYQLPYVLGSAHQGCLPPFPADVFMVPQYGYLTLNNGSQAVGRSSFYCLEYFPSQMLRTGNNFTFSYTFEDVPFHSSYAHSQSLDRLMNPLIDQYLYYLNKTQSNSGTLQQSRLLFSQAGPTSMSLQAKNWLPGPYYRQQRLSKQANDNNNSNFPWTAATKYHPNGRDSLVDPGPAMASHKDDEEKFFPMHGTLIFGKQGTNANDADLDNVMITDEEEIRTTNPVATXQYGTVSNNLQNSNTGPTTGTVNHQGALPGMVWQDRDVYLQGPIWAKIPHTDGHFHPSPLMGGFGLKHPPPQIMVKNTPVPANPPTNFSSAKFASFITRYSTGQVSVEIEWELQKENSKRWNPEIQYTSNYNKSVNVDFTVDTNGVYSEPRPIGTRYLTRNL

SEQ ID NO: 526 - protein, 735 aa, Artificial Sequence
  Synthetic Polypeptide
MAADGYLPDWLEDTLSEGIRQWWKLKPGPPPPKPAERHKDDSRGLVLPGYKYLGPFNGLDKGEPVNEADAAAPEHDKAYDRQLDSGDNPYPKYNHADAEFQERLKEDTSFGGNLGRAVFQAKKRVLEPLGLVEEPVKTAPGKKRPVEHSPVEPDSSSGTGKAGQQPARKRLNFGQTGDADSVPDPQPLGQPPAAPTSLGSTTMATGSGAPMADNNEGADGVGNSSGNWHCDSQWSGDRVITTSTRTWALPTYNNHLYKQISSQSGASNDNHYFGYSTPWGYFDFNRFHCHFSPRDWQRLINNNWGFRPKRLNFKLFNIQVKEVTQNDGTTTIANNLTSTVQVFTDSEYQLPYVLGSAHQGCLPPFPADVFMVPQYGYLTLNNGSQAVGRSSFYCLEYFPSQMLRTGNNFTFSYTFEDVPFHSSYAHSQSLDRLMNPLIDQYLYYLNKTQSNSGTLQQSRLLFSQAGPTSMSLQAKNWLPGPCYRQQRLSKQANDNNNSNFPWTAATKYHLNGRDSLVNPGPAMASHKDDEEKFFPMHGTLIFGKQGTNANDADLDNVMITDEEEIRTTNPVATEQYGTVSNNLQNSNTGPTTGTVNHQGALPGMVWQDRDVYLQGPIWAKIPHTDGHFHPSPLMGGFGLKHPPPQIMIKNTPVPANPPTNFSSAKFASFITQYSTGQVSVEIEWELQKENSKRWNPEIQYTSNYNKSVNVDFTVDTNGVYSEPRPIGTRYLTRNL

SEQ ID NO: 527 - protein, 735 aa, Artificial Sequence
  Synthetic Polypeptide
MAADGYLPDWLEDTLSEGIRQWWKLKPGPPPPKPAERHKDDSRGLVLPGYKYLGPFNGLDKGEPVNEADAAALEHDKAYDRQLDSGDNPYLKYNHADAEFQERLKEDTSFGGNLGRAVFQAKKRVLEPLGLVVEPVKTAPGKKRPVEHSPVEPDSSSGTGKAGQQPARKRLNFGQTGDADSVPDPQPLGQPPAAPTSLGSTTMATGSGAPMADNNEGADGVGNSSGNWHCDSQWSGDRVITTSTRTWALPTYNNHLYKQISSRSGASNDNHYFGYSTPWGYFDFNGFHCHFSPRDWQRLINNNWGFRPKRLNFKLFNIQVKEVTQNDGTTTIANNLTSTVQVFTDSEYQLPHVLGSAHQGCLPPFPADVFMVPQYGYLTLNNGSQAVGRSSFYCPEYFPSQMLRTGNNFTFSYTFEDVPFHSSYAHSQSLDRLMNPLIDQYLYYLNKTQSNSGTLQQSRLLFSQAGPTSMSLQAKNWLPGPCYRQQRLSKQANGNNNSNFPWTAATKYHLNGRDSLVNPGPAMASHKDDEEKFFPMHGTLIFGKQGTNANDADLDNVMITDEEEIRTTNPVATEQYGTVSNNLQNSNTGPTTGTVNHQGALPGMVWQDRDVYLQGPIWAKIPHTDGHFHPSPLMGGFGLKHPPPQIMIKNTPVPANPPTNFSSAKFASFITQYSTGQVSVEIEWELQKENSKRWNPEIQYTSNYNKSVNVDFTVDTNGVYSEPRPIGTRYLTRNL

SEQ ID NO: 528 - protein, 735 aa, Artificial Sequence
  Synthetic Polypeptide
MAADGYLPDWLEDTLSEGIRQWWKLKPGPPPPKPAERHKDDSRGLVLPGYKYLGPFNGLDKGEPVNEADAAALEHDKAYDRQLDSGDNPYLKYNHADAEFQERLKEDTSFGGNLGRAVFQAKKRVLEPLGLVEEPVKTVPGKKRPVEHSPVEPDSSSGTGKAGQQPARKRLNFGQTGDADSVPDPQPLGQPPAAPTSLGSTTMATGSGAPMADNNEGADGVGNSSGNWHCDSQWSGDRVITTSTRTWALPTYNNHPYKQISSQSGASNDNHYFGYSTPWGYFDFNRFHCHFSPRDWQRLINNNWGFRPKRLNFKLFNIQVKEVTQNDGTTTIANNLTSTVQVFTDSEYQLPYVLGSAHQGRLPPFPADVFMVPQYGYLTLNNGSQAVGRSSFYCLEYFPSQMLRTGNNFTFSYTFEDVPFHSSYAHSQSLDRLMNPLIDQYLYYLNKTQSNSGTLQQSRLLFSQAGPTSMSLQAKNWLPGPCYRQQRLSKQADDNNNSNFPWTAATKYHLNGRDSLVNPGPAMASHKDDEEKFFPMHGTLIFGKQGTNANDADLDNVMITDEEEIRTTNPVATEQYGTVSNNLQNSNTGPTTGTVNHQGALPGMVWQDRDVYLQGPIWAKIPHTDGHFHPSPLMGGFGLKHPPPQIMIKNTPVPANPPTNFSSAKFASFITQYSTGQVSVEIEWELQKENSKRWNPEIQYTSNYNKSVNVDFTVDANGVYSEPRPIGTRYLTRNL

SEQ ID NO: 529 - protein, 735 aa, Artificial Sequence
  Synthetic Polypeptide
MAADGYLPDWLEDTLSEGIRQWWKLKPGPPPPKPAERHKDDSRGLVLSGYKYLGPFNGLDKGEPVNEADAAALEHDKAYDRQLDSGDNPYLKYNHADAEFQERLKEDTSFGGNLGRAVFQAKKRVLEPLGLVEEPVKTAPGKKRPVEHSPVEPDSSSGTGKAGQQPARKRLNFGQTGDADSVPDPQPLGQPPAAPTSLGSTTMATGSGAPMADNNEGADGVGNSSGNWHCDSQWSGDRVITTSTRTWALPTYNNHLYKQISSQSGASNDNHYFGYSTPWGYFDFNRFHCHFSPRDWQRLINNNWGFRPKRLNFKLFNIQVKEVTQNDGTTTIANNLTSTVQVFTDSEYQLPYVLGSAHQGCLPPFPADVFMVPQYGYLTLNNGSQAVGRSSFYCLEYFPSQMLRTGNNFTFSYTFEDVPFHSSYAHSQSLDRLMNPLIDQYLYYLNKTQSNSGTLQQSRLLFSQAGPTSMSLQAKNWLPGPCYRQQRLSKQANDNNNSNFPWTAATKYHLNGRDSLVNPGPAMASHKDDEEKFFPMHGTLIFGKQGTNANDADLDNVMITDEEEIRTTNPVATEQYGTVSNNLQNSNTGPTTGTVNHQGALPGMVWQDRDVYLQGPIWAKIPHTDGHFHPSPLMGGFGLKHPPPQIMIKNTPVPANPPTNFSSAKFASFITQYSTGQVSVEIEWELQKENSKRWNPEIQYTSNYNKSVNVDFTVDTNGVYSEPRPIGTRYLTRNL

SEQ ID NO: 530 - protein, 735 aa, Artificial Sequence
  Synthetic Polypeptide
MAADGYLPDWLEDTLSEGIRQWWKLKPGPPPPKPAERHKDDSRGLVLPGYKYLGPFNGLDKGEPVNEADAAALEHDKAYDRQLDSGDNPYLKYNHADAEFQERLKEDTSFGGNLGRAVFQAKKRVLEPLGLVEEPVKTAPGKKRPVEHSPVEPDSSSGTGKAGQQPARKRLNFGQTGDADSVPDPQPLGQPPAAPTSLGSTTMATGSGAPMADNNEGADGVGNSSGNWHCDSQWSGDRVITTSTRTWALPTYNNHLYKQISSQSGASNDNHYFGYSTPWGYFDFNRFHCHFSPRDWQRLINNNWGFRPKRLNFKLFNIQVKEVTQNDGTTTIANNLTSTVQVFTDSEYQLPYVLGSAHQGCLPPFPADVFMVPQYGYLTLNNGSQAVGRSSFYCLEYFPSQMLRTGNNFTFSYTFEDVPFHSSCAHSQSLDRLMNPLIDQYLYYLNKTQSNSGTLQQSRLLFSQAGPTSMSLQAKNWLPGPCYRQQRLSKQANDNNNSNFPWTAATKYHLNGRDSLVNPGPAMASHKDDEEKFFPMHGTLIFGKQGTNANDADLDNVMITDEEEIRTTNPVATEQYGTVSNNLQNSNTGPTTGTVNHQGALPGMVWQDRDVYLQGPIWAKIPHTDGHFHPSPLMGGFGLKHPPPQIMIKNTPVPANPPTNFSSAKFASFITQYSTGQVSVEIEWELQKENSKRWNPEIQYTSNYNKSVNVDFTVDTNGVYSEPRPIGTRYLTRNL

SEQ ID NO: 531 - protein, 735 aa, Artificial Sequence
  Synthetic Polypeptide
MAADGYLPDWLEDTLSEGIRQWWKLKPGPPPPKPAERHKDDSRGLVLPGYKYLGPFNGLDKGEPVNEADAAALEHDKAYDRQLDSGDNPYLKYNHADAEFQERLKEDTSFGGNLGRAVFQAKKRVLEPLGLVEEPVKTAPGKKRPVEHSPVEPDSSSGTGKAGQQPARKRLNFGQTGDADSVPDPQPLGQPPAAPTSLGSTTMATGSGAPMADNNEGADGVGNSSGNWHCDSQWSGDRVITTSTRTWALPTYNNHLYKQISSQSGASNDNHYFGYSTPWGYFDFNRFHCHFSPRDWQRLINNNWGFRPKRLNFKLFNIQVKEVTQNDGTTTIANNLTSTVPVFTDSEYQLPYVLGSAHQGCLPPFPADVFMVPQYGYLTLNNGSQAVGRSSFYCLEYFPSQMLRTGNNFTFSYTFEDVPFHSSYAHSQSLDRLMNPLIDQYLYYLNKTQSNSGTLQQSRLLFSQAGPTSMSLQAKNWLPGPYYRQQRLSKQANDNNNSNFPWTAATKYHPNGRDSLVDPGPAMASHKDDEEKFFPMHGTLIFGKQGTNANDADLDNVMITDEEEIRTTNPVATGQYGTVSNNLQNSNTGPTTGTVNHQGALPGMVWQDRDVYLQGPIWAKIPHTDGHFHPSPLMGGFGLKHPPPQIMVKNTPVPANPPTNFSSAKFASFITRYSTGQVSVEIEWELQKENSKRWNPEIQYTSNYNKSVNVDFTVDTNGVYSEPRPIGTRYLTRNL

SEQ ID NO: 532 - protein, 735 aa, Artificial Sequence
  Synthetic Polypeptide
MAADGYLPDWLEDTLSEGIRQWWKLKPGPPPPKPAERHKDDSRGLVLPGYKYLGPFNGPDKGEPVNEADAAALEHDKAYDRQLDSGDNPYLKYNHADAEFQERLKEDTSFGGNLGRAVFQAKKRVLEPLGLVEEPVKTAPGKKRPVEHSPVEPDSSSGTGKAGQQPARKRLNFGQTGDADSVPDPQPLGQPPAAPTSLGSTTMATGSGAPMADNNEGADGVGNSSGNWHCDSQWSGDRVITTSTRTWALPTYNNHLYKQISSQSGASNDNHYFGYSTPWGYFDFNRFHCHFSPRDWQRLINNNWGFRPKRLNFRLFNIQVKEVTQNDGTTTIANNLTSTVQVFTDSEYQLPYVLGSAHQGCLPPFPADVFMVPQYGYLTLNNGSQAVGRSSFYCLEYFPSQMLRTGNNFTFSYTFEDVPFHSSYAHSQSLDRLMNPLIDQYLYYLNKTQSNSGTLQQSRLLFSQAGPTSMSLQAKNWLPGPCYRQQRLSKQANDNNNSNFPWTAATKYHLNGRDSLVNPGPAMASHKDDEEKFFPMHGTLIFGKQGTNANDADLDNVMITDEEEIRTTNPVATEQYGTVSNNLQNSNTGPTTGTVNHQGALPGMVWQDRDVYLQGPIWAKIPHTDGHFHPSPLMGGFGLKHPPPQIMIKNTPVPANPPTNFSSAKFASFITQYSTGQVSVEIEWELQKENSKRWNPEIQYTSNYNKSVNVDFTVDTNGVYSEPRPIGTRYLTRNL

SEQ ID NO: 533 - protein, 735 aa, Artificial Sequence
  Synthetic Polypeptide
MAADGYLPDWLEDTLSEGIRQWWKLKPGPPPPKPAERHKDDSRGLVLPGYKYLGPFNGPDKGEPVNEADAAALEHDKAYDRQLDSGDNPYLKYNHADAEFQERLKEDTSFGGNLGRAVFQAKKRVLEPLGLVEEPVKTAPGKKRPVEHSPVEPDSSSGTGKAGQQPARKRLNFGQTGDADSVPDPQPLGQPPAAPTSLGSTTMATGSGAPMADNNEGADGVGNSSGNWHCDSQWSGDRVITTSTRTWALPTYNNHLYKQISSQSGASNDNHYFGYSTPWGYFDFNRFHCHFSPRDWQRLINNNWGFRPKRLNFRLFNIQVKEVTQNDGTTTIANNLTSTVQVFTDSEYQLPYVLGSAHQGCLPPFPADVFMVPQYGYLTLNNGGQAVGRSSFYCLEYFPSQMLRTGDNFTFSYTFEDVPFHSSYAHSQSLDRLMNPLIDQYLYYLNKTQSNSGTLQQSRLLFSQAGPTSMSLQAKNWLPGPCYRQQRLSKQANDNNNSNFPWTAATKYHLNGRDSLVNPGPAMASHKDDEEKFFPMHGTLIFGKQGTNANDADLDNVMITDEEEIRTTNPVATEQYGTVSNNLQNSNTGPTTGTVNHQGALPGMVWQDRDVYLQGPIWAKIPHTDGHFHPSPLMGGFGLKHPPPQIMIKNTPVPANPPTNFSSAKFASFITQYSTGQVSVEIEWELQKENSKRWNPEIQYTSNYNKSVNVDFTVDTNGVYSEPRPIGTRYLTRNL

SEQ ID NO: 534 - protein, 735 aa, Artificial Sequence
  Synthetic Polypeptide
MAADGYLPDWLEDTLSEGIRQWWKLKPGPPPPKPAERHKDDSRGLVLPGYKYLGPFNGLDKGEPVNEADAAALEHDKAYDRQLDSGDNPYLKYNHADAEFQERLKEDTSFGGNLGRAVFQAKKRVLEPLGLVEEPVKTAPGKKRPVEHSPVEPDSSSGTGKAGQQPARKRLNFGQTGDADSVPDPQPLGQPPAAPTSLGSTTMATGSGAPMADNNEGADGVGNSSGNWHCDSQWSGDRVITTSTRTWALPTYNNHLYKQISSQSGASNDNHYFGYSTPWGYFDFNRFHCHFSPRDWQRLINNNWGFRPKRLNFKLFNIQVKEVTQNDGTTTIANNLTSTVQVFTDSEYQLPYVLGSAHQGCLPPFPADVFMVPQYGYLTLNNGSQAVGRSSFYCLEYFPSQMLRTGNNFTFSYTFEDVPFHSSYAHSQSLDRLMNPLIDQYLYYLNKTQSNSGTLQQSRLLFSQAGPTSMSLQAKNWLPGPCYRQQRLSKQANDNNNSNFPWTAATKYHLNGRDSLVNPGPAMASHKDDEEKFFPMHGTLIFGKQGTNANDADLDNAMITDEEEIRTTNPVATEQYGTVSNNLQNSNTGPTTGTVNHQGALPGMVWQDRDVYLQGPIWAKIPHTDGHFHPSPLMGGFGLKHPPPQIMIKNTPVPANPPTNFSSAKFASFITQYSTGQVSVEIEWELQKENSKRWNPEIQYTSNYNKSVNVDFTVDTNGVYSEPRPIGTRYLTRNL

SEQ ID NO: 535 - protein, 735 aa, Artificial Sequence
  Synthetic Polypeptide
MAADGYLPDWLEDTLSEGIRQWWKLKPGPPPPKPAERHKDDSRGLVLPGYKYLGPFNGLDKGEPVNEANAAALEHDKAYDRQLDSGDNPYLKYNHADAEFQERLKEDTSFGGNLGRAVFQAKKRVLEPLGLVEEPVKTAPGKKRPVEHSPVEPDSSSGTGKAGQQPARKRLNFGQTGDADSVPDPQPLGQPPAAPTSLGSTTMATGSGAPMADNNEGADGVGNSSGNWHCDSQWSGDRVITTSTRTWALPTYNNHLYKQISSQSGASNDNHYFGYSTPWGYFDFNRFHCHFSPRDWQRLINNNWGFRPKRLNFKLFNIQVKEVTQNDGTTTIANNLTSTVQVFTDSEYQLPYVLGSAHQGCLPPFPADVFMVPQYGYLTLNNGSQAVGRSSFYCLEYFPSQMLRTGNNFTFSYTFEDVPFHSSYAHSQSLDRLMNPLIDQYLYYLNKTQSNSGTLQQSRLLFSQAGPTSMSLQAKNWLPGPCYRQQRLSKQANDNNNSNFPWTAATKYHLNGRDSLVNPGPAMASHKDDEEKFFPMHGTLIFGKQGTNANDADLDNVMITDEEEIRTTNPVATEQYGTVSNNLQNSNTGPTTGTVNHQGALPGMVWQDRDVYLQGPIWAKIPHTDGHFHPSPLMGGFGLKHPPPQIMIKNTPVPANPPTNFSSAKFASFITQYSTGQVSVEIEWELQKENSKRWNPETQYTSNYNKSVNVDFTVDTNGVYSEPRPIGTRYLTRNL

SEQ ID NO: 536 - protein, 735 aa, Artificial Sequence
  Synthetic Polypeptide
MAADGYLPDWLEDTLSEGIRQWWKLKPGPPPPKPAERHKDDSRGLVLPGYKYLGPFNGPDKGEPVNEADAAALEHDKAYDRQLDSGDNPYLKYNHADAEFQERLKEDTSFGGNLGRAVFQAKKRVLEPLGLVEEPVKTAPGKKRPVEHSPVEPDSSSGTGKAGQQPARKRLNFGQTGDADSVPDPQPLGQPPAAPTSLGSTTMATGSGAPMADNNEGADGVGNSSGNWHCDSQWSGDRVITTSTRTWALPTYNNHLYKQISSQSGASNDNHYFGYSTPWGYFDFNRFHCHFSPRDWQRLINNNWGFRPKRLNFRLFNIQVKEVTQNDGTTTIANNLTSTVQVFTDSEYQLPYVLGSAHQGCLPPFPADVFMVPQYGYLTLNNGSQAVGRSSFYCLEYFPSQMLRTGDNFTFSYTFEDVPFHSSYAHSQSLDRLMNPLIDQYLYYLNKTQSNSGTLQQSRLLFSQAGPTSMSLQAKNWLPGPCYRQQRLSKQANDNNNSNFPWTAATKYHLNGRDSLVNPGPAMASHKDDEEKFFPMHGTLIFGKQGTNANDADLDNVMITDEEEIRTTNPVATEQYGTVSNNLQNSNTGPTTGTVNHQGALPGMVWQDRDVYLQGPIWAKIPHTDGHFHPSPLMGGFGLKHPPPQIMIKNTPVPANPPTNFSSAKFASFITQYSTGQVSVEIEWELQKENSKRWNPEIQYTSNYNKSVNVDFTVDTNGVYSEPRPIGTRYLTRNL

SEQ ID NO: 537 - protein, 735 aa, Artificial Sequence
  Synthetic Polypeptide
MAADGYLPDWLEDTLSEGIRQWWKLKPGPPPPKPAERHKDDSRGLVLPGYKYLGPFNGLDKGEPVNEADAAALEHDKAYDRQLDSGDNPYLKYNHADAEFQERLKEDTSFGGNLGRAVFQAKKRVLEPLGLVEEPVKTAPGKKRPVEHSPVEPDSSSGTGKAGQQPARKGLNFGQTGDADSVPDPRPLGQPPAAPASLGSTTMATGSGAPMADNNEGADGVGNSSGNWHCDSQWLGDRVITTSTRTWALPTYNNHLYKQISSQSGASNDNHYFGYSTPWGYFDFNRFHCHFSPRDWQRLINNNWGFRPKRLNFKLFNIQVKEVTQNDGTTTIANNLTSTVPVFTDSEYQLPYVLGSAHQGCLPPFPADVFMVPQYGYLTLNNGSQAVGRSSFYCLEYFPSQMLRTGNNFTFSYTFEDVPFHSSYAHSQSLDRLMNPLIDQYLYYLNKTQSNSGTLQQSRLLFSQAGPTSMSLQAKNWLPGPYYRQQRLSKQANDNNNSNFPWTAATKYHPNGRDSLVDPGPAMASHKDDEEKFFPMHGTLIFGKQGTNANDADLDNVMITDEEEIRTTNPVATGQYGTVSNNLQNSNTGPTTGTVNHQGALPGMVWQDRDVYLQGPIWAKIPHTDGHFHPSPLMGGFGLKHPPPQIMVKNTPVPANPPTNFSSAKFASFITRYSTGQVSVEIEWELQKENSKRWNPEIQYTSNYNKSVNVDFTVDTNGVYSEPRPIGTRYLTRNL

SEQ ID NO: 538 - protein, 735 aa, Artificial Sequence
  Synthetic Polypeptide
MAADGYLPDWLEDTLSEGIRQWWKLKPGPPPPKPAERHKDDSRGLVLPGYKYLGPFNGLDKGEPVNEADAAALEHDKAYDRQLDSGDNPYLKYNHADAEFQERLKEDTSFGGNLGRAVFQAKKRVLEPLGLVEEPVKTVPGKKRPVEHSPVEPDSSSGTGKAGQQPARKRLNFGQTGDADSVPDPQPLGQPPAAPTSLGSTTMATGSGAPMADNNEGADGVGNSSGNWHCDSQWSGDRVITTSTRTWALPTYNNHPYKQISSQSGASNDNHYFGYSTPWGYFDFNRFHCHFSPRDWQRLINNNWGFRPKRLNFKLFNIQVKEVTQNDGTTTIANNLTSTVQVFTDSEYQLPYVLGSAHQGRLPPFPADVFMVPQYGYLTLNNGSQAVGRSSFYCLEYFPSQMLRTGNNFTFSYTFEDVPFHSSYAHSQSLDRLMNPLIDQYLYYLNKTQSNSGTLQQSRLLFSQAGPTSMSLQAKNWLPGPCYRQQRLSKQADDNNNSNFPWTAATKYHLNGRDSLVNPGPAMASHKDDEEKFFPMHGTLIFGKQGTNANDADLDNVMITDEEEIRTTNPVATEQYGTVSNNLQNSNTGPTTGTVNHQGALPGMVWQDRDVYLQGPIWAKIPHTDGHFHPSPLMGGFGLKHPPPQIMIKNTPVPANPPTNFSSAKFASFITQYSTGQVSVEIEWELQKENSKRWNPEIQYTSNYNKSVNVDFTVDTNGVYSEPRPIGTRYLTRNL

SEQ ID NO: 539 - protein, 735 aa, Artificial Sequence
  Synthetic Polypeptide
MAADGYLPDWLEDTLSEGIRQWWKLKPGPPPPKPAERHKDDSRGLVLPGYKYLGPFNGLDKGEPVNEADAAALEHDKAYDRQLDSGDNPYLKYNHADAEFQERLKEDTSFGGNLGRAVFQAKKRVLEPLGLVEEPVKTAPGKKRPVEQSPAEPDSSSGTGKAGNQPARKRLNFGQTGDADSVPDPQPLGQPPAAPSGLGSTTMATGSGAPMADNNEGADGVGNSSGNWHCDSQWLGDRVITTSTRTWALPTYNNHLYKQISSQSGASNDNHYFGYSTPWGYFDFNRFHCHFSPRDWQRLINNNWGFRPKRLNFKLFNIQVKEVTQNDGTTTIANNLTSTVQVFTDSEYQLPYVLGSAHQGCLPPFPADVFMVPQYGYLTLNNGSQAVGRSSFYCLEYFPSQMLRTGNNFTFSYTFEDVPFHSSYAHSQSLDRLMNPLIDQYLYYLNKTQSNSGTLQQSRLLFSQAGPTSMSLQAKNWLPGPCYRQQRLSKQANDNNNSNFPWTAATKYHLNGRDSLVNPGPAMASHKDDEEKFFPMHGTLIFGKQGTNANDADLDNVMITDEEEIRTTNPVATEQYGTVSNNLQNSNTGPTTGTVNHQGALPGMVWQDRDVYLQGPIWAKIPHTDGHFHPSPLMGGFGLKHPPPQIMIKNTPVPANPPTNFSSAKFASFITQYSTGQVSVEIEWELQKENSKRWNPEIQYTSNYNKSVNVDFTVDTNGVYSEPRPIGTRYLTRNL

SEQ ID NO: 540 - protein, 734 aa, Artificial Sequence
  Synthetic Polypeptide
MAADGYLPDWLEDTLSEGIRQWWKLKPGPPPKPAERHKDDSRGLVLPGYKYLGPFNGLDKGEPVNEADAAALEHDKAYDRQLDSGDNPYLKYNHADAEFQERLKEDTSFGGNLGRAVFQAKKRVLEPLGLVEEPVKTAPGKKRPVEQSPAEPDSSSGTGKAGNQPARKRLNFGQTGDADSVPDPQPLGQPPAAPSGLGSTTMATGSGAPMADNNEGADGVGNSSGNWHCDSQWLGDRVITTSTRTWALPTYNNHLYKQISSQSGASNDNHYFGYSTPWGYFDFNRFHCHFSPRDWQRLINNNWGFRPKRLNFKLFNIQVKEVTQNDGTTTIANNLTSTVQVFTDSEYQLPYVLGSAHQGCLPPFPADVFMVPQYGYLTLNNGSQAVGRSSFYCLEYFPSQMLRTGNNFTFSYTFEDVPFHSSYAHSQSLDRLMNPLIDQYLYYLNKTQSNSGTLQQSRLLFSQAGPTSMSLQAKNWLPGPCYRQQRLSKQANDNNNSNFPWTAATKYHLNGRDSLVNPGPAMASHKDDEEKFFPMHGTLIFGKQGTNANDADLDNVMITDEEEIRTTNPVATEQYGTVSNNLQNSNTGPTTGTVNHQGALPGMVWQDRDVYLQGPIWAKIPHTDGHFHPSPLMGGFGLKHPPPQIMIKNTPVPANPPTNFSSAKFASFITQYSTGQVSVEIEWELQKENSKRWNPEIQYTSNYNKSVNVDFTVDTNGVYSEPRPIGTRYLTRNL

SEQ ID NO: 541 - protein, 735 aa, Artificial Sequence
  Synthetic Polypeptide
MAADGYLPDWLEDTLSEGIRQWWKLKPGPPPPKPAERHKDDSRGLVLPGYKYLGPFNGLDKGEPVNEADAAALEHDKAYDRQLDSGDNPYLKYNHADAEFQERLKEDTSFGGNLGRAVFQAKKRVLEPLGLVEEPVKTAPGKKRPVEQSPAEPDSSSGTGKAGNQPARKRLNFGQTGDADSVPDPQPLGQPPAAPSGLGSTTMATGSGAPMADNNEGADGVGNSSGNWHCDSQWLGDRVITTSTRTWALPTYNNHLYKQISSQSGASNDNHYFGYSTPWGYFDFNRFHRHFSPRDWQRLINNNWGFRPKRLNFKLFNIQVKEVTQNDGTTTIANNLTSTVQVFTDSEYQLPYVLGSAHQGCLPPFPADVFMVPQYGYLTLNNGSQAVGRSSFYCLEYFPSQMLRTGNNFTFSYTFEDVPFHSSYAHSQSLDRLMNPLIDQYLYYLNKTQSNSGTLQQSRLLFSQAGPTSMSLQAKNWLPGPCYRQQRLSKQANDNNNSNFPWTAATKYHLNGRDSLVNPGPAMASHKDDEEKFFPMHGTLIFGKQGTNANDADLDNVMITDEEEIRTTNPVATEQYGTVSNNLQNSNTGPTTGTVNHQGALPGMVWQDRDVYLQGPIWAKIPHTDGHFHPSPLMGGFGLKHPPPQIMIKNTPVPANPPTNFSSAKFASFITQYSTGQVSVEIEWELQKENSKRWNPEIQYTSNYNKSVNVDFTVDTNGVYSEPRPIGTRYLTRNL

SEQ ID NO: 542 - protein, 734 aa, Artificial Sequence
  Synthetic Polypeptide
MAADGYLPDWLEDTLSEGIRQWWKLKPGPPPPKPAERHKDDSRGLVLPGYKYLGPFNGLDKGEPVNEADAAALEHDKAYDRQLDSGDNPYLKYNHADAEFQERLKEDTSFGGNLGRAVFQAKKRVLEPLGLVEEPVKTAPGKKRPVEQSPAEPDSSSGTGKAGNQPARKRLNFGQTGDADSVPDPQPLGQPPAAPSGLGSTTMATGSGAPMADNNEGADGVGNSSGNWHCDSQWLGDRVITTSTRTWALPTYNNHLYKQISSQSGASNDNHYFGYSTPWGYFDFNRFHCHFSPRDWQRLINNNWGFRPKRLNFKLFNIQVKEVTQNDGTTTIANNLTSTVQVFTDSEYQLPYVLGSAHQGCLPPFPADVFMVPQYGYLTLNNGSQAVGRSSFYCLEYFPSQMLRTGNNFTFSYTFEDVPFHSSYAHSQSLDRLMNPLIDQYLYYLNKTQSNSGTLQQSRLLFSQAGPTSMSLQAKNWLPGPCYRQQRLSKQANDNNSNFPWTAATKYHLNGRDSLVNPGPAMASHKDDEEKFFPMHGTLIFGKQGTNANDADLDNVMITDEEEIRTTNPVATEQYGTVSNNLQNSNTGPTTGTVNHQGALPGMVWQDRDVYLQGPIWAKIPHTDGHFHPSPLMGGFGLKHPPPQIMIKNTPVPANPPTNFSSAKFASFITQYSTGQVSVEIEWELQKENSKRWNPEIQYTSNYNKSVNVDFTVDTNGVYSEPRPIGTRYLTRNL

SEQ ID NO: 543 - protein, 735 aa, Artificial Sequence
  Synthetic Polypeptide
MAADGYLPDWLEDTLSEGIRQWWKLKPGPPPPRPAERHQDDSRGLVLPGYKYLGPFNGLDKGEPVNEADAAALEHDKAYDRQLDSGDNPYLKYNHADAEFQERLKEDTSFGGNLGRAVFQAKKRVLEPLGLVEEPVKTAPGKKRPVEHSPAEPDSSSGTGKAGQQPARKRLNFGQTGDADSVPDPQPLGQPPAAPTSLGSTTMATGSGAPMADNNEGADGVGNSSGNWHCDSQWLGDRVITTSTRTWALPTYNNHLYKQISSQSGASNDNHYFGYSTPWGYFDFNRFHCHFSPRDRQRLINNNWGFRPKRLNFKLFNIQVKEVTQNDGTTTIANNLTSTVQVFTDSEYQLPYVLGSAHQGCLPPFPADVFMVPQYGYLTLNNGSQAVGRSSFYCLEYFPSQMLRTGNNFTFSYTFEDVPFHSSYAHSQSLDRLMNPLIDQYLYYLNRTQSNSGTLQQSRLLFSQAGPTSMSLQAKNWLPGPCYRQQRLSKQANDNNNSNFPWTAATKYHLNGRDSLVNPGPAMASHKDDEEKFFPMHGTLIFGKQGTNANDADLEHVMITDEEEIRTTNPVATEQYGNVSNNLQNSNTGPTTENVNHQGALPGMVWQDRDVYLQGPIWAKIPHTDGHFHPSPLMGGFGLKHPPPQIMIKNTPVPANPPTNFSAAKFASFITQYSTGQVSVEIEWELQKENSKRWNPEIQYTSNYNKSVNVDFTVDANGVYSEPRPIGTRYLTRNL

SEQ ID NO: 544 - protein, 735 aa, Artificial Sequence
  Synthetic Polypeptide
MAADGYLPDWLEDTLSEGIRQWWKLKPGPPPPRPAERHQDDSRGLVLPGYKYLGPFNGLDKGEPVNEADAAALEHDKAYDRQLDSGDNPYLKYNHADAEFQERLKEDTSFGGNLGRAVFQAKKRVLEPLGLVEEPVKTAPGKKRPVEHSPAEPDSSSGTGKAGQQPARKRLNFGQTGDADSVPDPQPLGQPPAAPTSLGSTTMATGSGAPMADNNEGADGVGNSSGNWHCDSQWLGDRVITTSTRTWALPTYNNHLYKQISSQSGASNDNHYFGYSTPWGYFDFNRFHCHFSPRDWQRLINNNWGFRPKRLNFKLFNIQVKEVTQNDGTTTIANNLTSTVQVFTDSEYQLPYVLGSAHQGCLPPFPADVFMVPQYGYLTLNNGSQAVGRSSFYCLEYFPSQMLRTGNNFTFSYTFEDVPFHSSYAHSQSLDRLMNPLIDQYLYYLNRTQSNSGTLQQSRLLFSQAGPTSMSLQAKNWLPGPCYRQQRLSKQANDNNNSNFPWTAATKYRLNGRDSLVNPGPAMASHKDDEEKFFPMHGTLIFGKQGTNANDADLEHVMITDEEEIRTTNPVATEQYGNVSNNLQNSNTGPTTENVNHQGALPGMVWQDRDVYLQGPIWAKIPHTDGHFHPSPLMGGFGLKHPPPQIMIKNTPVPANPPTNFSAAKFASFITQYSTGQVSVEIEWELQKENSKRWNPEIQYTSNYNKSVNVDFTVDANGVYSEPRPIGTRYLTRNL

SEQ ID NO: 545 - protein, 735 aa, Artificial Sequence
  Synthetic Polypeptide
MAADGYLPDWLEDTLSEGIRQWWKLKPGPPPPRPAERHQDDSRGLVLPGYKYLGPFNGLDKGEPVNEADAAALEHDKAYDRQLDSGDNPYLKYNHADAEFQERLKEDTSFGGNLGRAVFQAKKRVLEPLGLVEEPVKTAPGKKRPVEHSPAEPDSSSGTGKAGQQPARKRLNFGQTGDADSVPDPQPLGQPPAAPTSLGSTTMATGSGAPMADNNEGADGVGNSSGNWHCDSQWLGVRVITTSTRTWALPTYNNHLYKQISSQSGASNDNHYFGYSTPWGYFDFNRFHCHFSPRDRQRLINNNWGFRPKRLNFKLFNIQVKEVTQNDGTTTIANNLTSTVQVFTDSEYQLPYVLGSAHQGCLPPFPADVFMVPQYGYLTLNNGSQAVGRSSFYCLEYFPSQMLRTGNNFTFSYTFEDVPFHSSYAHSQSLDRLMNPLIDQYLYYLNRTQSNSGTLQQSRLLFSQAGPTSMSLQAKNWLPGPCYRQQRLSKQANDNNNSNFPWTAATKYHLNGRDSLVNPGPAMASHKDDEEKFFPMHGTLIFGKQGTNANDADLEHVMITDEEEIRTTNPVATEQYGNVSNNLQNSNTGPTTENVNHQGALPGMVWQDRDVYLQGPIWAKIPHTDGHFHPSPLMGGFGLKHPPPQIMIKNTPVPANPPTNFSAAKFASFITQYSTGQVSVEIEWELQKENSKRWNPEIQYTSNYNKSVNVDFTVDANGVYSEPRPIGTRYLTRNL

SEQ ID NO: 546 - protein, 735 aa, Artificial Sequence
  Synthetic Polypeptide
MAADGYLPDWLEDTLSEGIRQWWKLKPGPPPPRPAERHQDDSRGLVLPGYKYLGPFNGLDKGEPVNEADAAALEHDKAYDRQLDSGDNPYLKYNHADAEFQERLKEDTSFGGNLGRAVFQAKKRVLEPLGLVEEPVKTAPGKKRPVEHSPAEPDSSSGTGKAGQQPARKRLNFGQTGDADSVPDPQPLGQPPAAPTSLGSTTMAIGSGAPMADNNEGADGVGNSSGNWHCDSQWLGDRVITTSTRTWALPTYNNHLYKQISSQSGASNDNHYFGYSTPWGYFDFNRFHCHFSPRDWQRLINNNWGFRPKRLNFKLFNIQVKEVTQNDGTTTIANNLTSTVQVFTDSEYQLPYVLGSAHQGCLPPFPADVFMVPQYGYLTLNNGSQAVGRSSFYCLEYFPSQMLRTGNNFTFSYTFEDVPFHSSYAHSQSLDRLMNPLIDQYLYYLNRTQSNSGTLQQSRLLFSQAGPTSMSLQAKNWLPGPCYRQQRLSKQANDNNNSNFPWTAATKYHLNGRDSLVNPGPAMASHKDDEEKFFPMHGTLIFGKQGTNANDADLEHVMITDEEEIRTTNPVATEQYGNVSNNLQNSNTGPTTENVNHQGALPGMVWQDRDVYLQGPIWAKIPHTDGHFHPSPLMGGFGLKHPPPQIMIKNTPVPANPPTNFSAAKFASFITQYSTGQVSVEIEWELQKENSKRWNPEIQYTSNYNKSVNVDFTVDANGVYSEPRPIGTRYLTRNL

SEQ ID NO: 547 - protein, 735 aa, Artificial Sequence
  Synthetic Polypeptide
MAADGYLPDWLEDTLSEGIRQWWKLKPGPPPPRPAERHQDDSRGLVLPGYKYLGPFNGLDKGEPVNEADAAALEHDKAYDRQLDSGDNPYLKYNHADAEFQERLKEDTSFGGNLGRAVFQAKKRVLEPLGLVEEPVKTAPGKKRPVEHSPAEPDSSSGTGKAGQQPARKRLNFGQTGDADSVPDPQPLGQPPAAPTSLGSTTMATGSGAPMADNNEGADGVGNSSGNWHCDSQWLGDRVITTSTRTWALPTYNNHLYKQISSQSGASNDNHYFGYSTPWGYLDFNRFHCHFSPRDWQRLINNNWGFRPKRLNFKLFNIQVKEVTQNDGTTTIANNLTSTVQVFTDSEYQLPYVLGSAHQGCLPPFPADVFMVPQYGYLTLNNGSQAVGRSSFYCLEYFPSQMLRTGNNFTFSYTFEDVPFHSSYAHSQSLDRLMNPLIDQYLYYLNRTQSNSGTLQQSRLLFSQAGPTSMSLQAKNWLPGPCYRQQRLSKQANDNNNSNFPWTAATKYHLNGRDSLVNPGPAMASHKDDEEKFFPMHGTLIFGKQGTNANDADLEHVMITDEEEIRTTNPVATEQYGNVSNNLQNSNTGPTTENVNHQGALPGMVWQDRDVYLQGPIWAKIPHTDGHFHPSPLMGGFGLKHPPPQIMIKNTPVPANPPTNFSAAKFASFITQYSTGQVSVEIEWELQKENSKRWNPEIQYTSNYNKSVNVDFTVDANGVYSEPRPIGTRYLTRNL

SEQ ID NO: 548 - protein, 735 aa, Artificial Sequence
  Synthetic Polypeptide
MAADGYLPDWLEDTLSEGIRQWWKLKPGPPPPKPAERHKDDSRGLVLPGYKYLGPFNGLDKGEPVNEADAAALEHDKAYDRQLDSGDNPYLKYNHADAEFQERLKEDTSFGGNLGRAVFQAKKRVLEPLGLVEEPVKTAPGKKRPVEHSPVEPDSSSGTGKAGQQPARKRLNFGQTGDADSVPDPQPLGQPPAAPTSLGSTTMATGSGAPMADNNEGADGVGNSSGNWHCDSQWLGDRVITTSTRTWALPTYNNHLYKQISSQSGAANDNHYFGYSTPWGYFDFNRFHCHFSPRDWQRLINNNWGFRPKRLNFKLFNIQVKEVTQNDGTTTIANNLTSTVQVFTDSEYQLPYVLGSAHQGCLPPFPADVFMVPQYGYLTLNNGSQAVGRSSFYCLEYFPSQMLRTGNNFTFSYTFEDVPFHSSYAHSQSLDRLMNPLIDQYLYYLNKTQSNSGTLQQSRLLFSQAGPTSMSLQAKNWLPGPCYRQQRLSKQANDNNNSNFPWTAATKYHLNGRDSLVNPGPAMASHKDDEEKFFPMHGTLIFGKQGTNANDADLDNVMITDEEEIRTTNPVATEQYGTVSNNLQNSNTGPTTGTVNHQGALPGMVWQDRDVYLQGPIWAKIPHTDGHFHPSPLMGGFGLKHPPPQIMIKNTPVPANPPTNFSSAKFASFITQYSTGQVSVEIEWELQKENSKRWNPEIQYTSNYNKSVNVDFTVDTNGVYSEPRPIGTRYLTRNL

SEQ ID NO: 549 - protein, 735 aa, Artificial Sequence
  Synthetic Polypeptide
MAADGYLPDWLEDTLSEGIRQWWKLKPGPPPPRPAERHQDDSRGLVLPGYKYLGPFNGLDKGEPVNEADAAALEHDKAYDRQLDSGDNPYLKYNHADAEFQERLKEDTSFGGNLGRAVFQAKKRVLEPLGLVEEPVKTAPGKKRPVEHSPAEPDSSSGTGKAGQQPARKRLNFGQTGDADSVPDPQPLGQPPAAPTSLGSTTMATGSGAPMADNNEGADGVGNSSGNWHCDSQWLGDRVITTSTRTWALPTYNNHLYKQISSQSGASNDNHYFGYSTPWGYFDFNRFHCHFSPRDWQRLINNNWGFRPKRLNFKLFNIQVKEVTQNDGTTTIANNLTSTVQVFTDSEYQLPYVLGSAHQGCLPPFPADVFMVPQYGYLTLNNGSQAVGRSSFYCLEYFPSQMLRTGNNFTFSYTFEDVPFHSSYAHSQSLDRLMNPLIDQYLYYLNRTQSNSGTLQQSRLLFSQAGPTSMSLQAKDWLPGPCYRQQRLSKQANDNNNSNFPWTAATKYHLNGRDSLVNPGPAMASHKDDEEKFFPMHGTLIFGKQGTNANDADLEHVMITDEEEIRTTNPVATEQYGNVSNNLQNSNTGPTTENVNHQGALPGMVWQDRDVYLQGPIWAKIPHTDGHFHPSPPMGGFGLKHPPPQIMIKNTPVPANPPTNFSAAKFASFITQYSTGLVSVEIEWELQKENSKRWNPEIQYTSNYNKSVNVDFTVDANGVYSEPRPIGTRYLTRNL

SEQ ID NO: 550 - protein, 735 aa, Artificial Sequence
  Synthetic Polypeptide
MAADGYLPDWLEDTLSEGIRQWWKLKPGPPPPKPAERHKDDSRGLVLPGYKYLGPFNGLDKGEPVNEADAAALEHDKAYDRQLDSGDNPYLKYNHADAEFQERLKEDTSFGGNLGRAVFQAKKRVLEPLGLVEEPVKTAPGKKRPVEHSPVEPDSSSGTGKAGQQPARKRLNFGQTGDADSVPDPQPLGQPPAAPSGLGTNTMATGSGAPMADNNEGADGVGNSSGNWHCDSTWMGDRVITTSTRTWALPTYNNHLYKQISSQSGASNDNHYFGYSTPWGYFDFNRFHCHFSPRDWQRLINNNWGFRPKRLSFKLFNIQVKEVTQNDGTTTIANNLTSTVQVFTDSEYQLPYVLGSAHQGCLPPFPADVFMVPQYGYLTLNNGSQAVGRSSFYCLEYFPSQMLRTGNNFTFSYTFEDVPFHSSYAHSQSLDRLMNPLIDQYLYYLSKTNAPSGTHQMSRLQFSQAGASDMSGPARNWLPGPCYRQQRVSKQAADNNNSDLPWTGATKYHLNGRDSLVNPGPAMASHKDDEEKFFLMSGVLIFGKQGSNENNVDIEKVMITDEEEIRTTNPVATEQYGSVSTNLQSANTSPATSDVNHQGVLPGMVWQDRDVYLQGPIWAKIPHTDGHFHPSPLMGGFGLKHPPPQILIKNTPVPANPSTTFSAAKFASFITQYSTGQVSVEIEWELQKENSKRWNPEIQYTSNYNKSVNVDFTVDTNGVYSEPRPIGTRYLTRNL

SEQ ID NO: 551 - protein, 735 aa, Artificial Sequence
  Synthetic Polypeptide
MAADGYLPDWLEDTLSEGIRQWWKLKPGPPPPRPAERHQDDSRGLVLPGYKYLGPFNGLDKGEPVNEADAAALEHDKAYDRQLDSGDNPYLKYNHADAEFQERLKEDTSFGGNLGRAVFQAKKRVLEPLGLVEEPVKTAPGKKRPVEHSPAEPDSSSGTGKAGQQPARKRLNFGQTGDADSVPDPQPLGQPPAAPTSLGSTTMATGSGAPMADNNEGADGVGNSSGNWHCDSQWLGDRVITTSTRTWALPTYNNHLYKQISSQSGASNDNHYFGYSTPWGYFDFNRFHCHFSPRDWQRLINNNWGFRPKRLNFKLFNIQVKEVTQNDGTTTIANNLTSTVQVFTDSEYQLPYVLGSAHQGCLPPFPADVFMVPQYGYLTLNNGSQAVGRSSFYCLEYFPSQMLRTGNNFTFSYTFEDVSFHSSYAHSQSLDRLMNPLIDQYLYYLNRTQSNSGTLQQSRLLFSQAGPTSMSLQAKNWLPGPCYRQQRLSKQANDNNNSNFPWTAATKYHLNGRDSLVNPGPAMASHKDDEEKFFPMHGTLIFGKQGTNANDADLEHVMITDEEEIRTTNPVATEQYGNVSNNLQNSNTGPTTENVNHQGALPGMVWQDRDVYLQGPIWAKIPHTDGHFHPSPLMGGFGLKHPPPQIMIKNTPVPANPPTNFSAAKFASFITQYSTGQVSVEIEWELQKENSKRWNPEIQYTSNYNKSVNVDFTVDANGVYSEPRPIGTRYLTRNL

SEQ ID NO: 552 - protein, 735 aa, Artificial Sequence
  Synthetic Polypeptide
MAADGYLPDWLEDTLSEGIRQWWKLKPGPPPPRPAERHQDDSRGLVLPGYKYLGPFNGLDKGEPVNEADAAALEHDKAYDRQLDSGDNPYLKYNHADAEFQERLKEDTSFGGNLGRAVFQAKKRVLEPLGLVEEPVKTAPGKKRPVEHSPAEPDSSSGTGKAGQQPARKRLNFGQTGDADSVPDPQPLGQPPAAPTSLGSTTMATGSGAPMADNNEGADGVGNSSGNWHCDSQWLGDRVITTSTRTWALPTYNNHLYKQISSQSGASNDNHYFGYSTPWGYFDFNRFHCHFSPRDWQRLINNNWGFRPKRLNFKLFNIQVKEVTQNDGTTTIANNLTSTVQVFTDSEYQLPYVLGSAHQGCLPPFPADVFMVPQYGYLTLNNGSQAVGRSSFYCLEYFPSQMLRTGNNFTFSYTFEDVPFHSSYAHSQSLDRLMNPLIDQYLYYLNRTQSNSGTLQQSRLLFSQAGPTSMSLQAKNWLPGPCYRQQRLSKQANDNNNSNFPWTAATKYHLNGRDSLVNPGPAMASHKDDEEKFFPMHGTLIFGKQGTNANDADLEHVMITDEEEIRTTNPVATEQYGNVSNNLQNSNTGPTTENVNHQGALLGMVWQDRDVYLQGPIWAKIPHTDGHFHPSPLMGGFGLKHPPPQIMIKNTPVPANPPTNFSAAKFASFITQYSTGQVSVEIEWELQKENSKRWNPEIQYTSNYNKSVNVDFTVDANGVYSEPRPIGTRYLTRNL

SEQ ID NO: 553 - protein, 735 aa, Artificial Sequence
  Synthetic Polypeptide
MAADGYLPDWLEDTLSEGIRQWWKLKPGPPPPRPAERHQDDSRGLVLPGYKYLGPFNGLDKGEPVNEADAAALEHDKAYDRQLDSGDNPYLKYNHADAEFQERLKEDTSFGGNLGRAVFQAKKRVLEPLGLVEEPVKTAPGKKRPVEHSPAEPDSSSGTGKAGQQPARKRLNFGQTGDADSVPDPQPLGQPPAAPTSLGSTTMATGSGAPMADNNEGADGVGNSSGNWHCDSQWLGDRVITTSTRTWALPTYNNHLYKQISSQSGASNDNHYFGYSTPWGYFDFNRFHCHFSPRDWQRLINNNWGFRPKRLNFKLFNIQVKEVTQNDGTATIANNLTSTVQVFTDSEYQLPYVLGSAHQGCLPPFPADVFMVPQYGYLTLNNGSQAVGRSSFYCLEYFPSQMLRTGNNFTFSYTFEDVPFHSSYAHSQSLDRLMNPLIDQYLYYLNRTQSNSGTLQQSRLLFSQAGPTSMSLQAKNWLPGPCYRQQRLSKQANDNNNSNFPWTAATKYHLNGRDSLVNPGPAMASHKDDEEKFFPMHGTLIFGKQGTNANDADLEHVMITDEEEIRTTNPVATEQYGNVSNNLQNSNTGPTTENVNHQGALPGMVWQDRDVYLQGPIWAKIPHTDGHFHPSPLMGGFGLKHPPPQIMIKNTPVPANPPTNFSAAKFASFITQYSTGQVSVEIEWELQKENSKRWNPEIQYTSNYNKSVNVDFTVDANGVYSEPRPIGTRYLTRNL

SEQ ID NO: 554 - protein, 735 aa, Artificial Sequence
  Synthetic Polypeptide
MAADGYLPDWLEDTLSEGIRQWWKLKPGPPPPKPAERHKDDSRGLVLPGYKYLGPFNGLDKGEPVNEADAAALEHDKAYDRQLDSGDNPYLKYNHADAEFQERLKEDTSFGGNLGRAVFQAKKRVLEPLGLVEEPVKTAPGKKRPVEHSPVEPDSSSGTGKAGQQPARKRLNFGQTGDADSVPDPQPLGQPPAAPTSLGSTTMATGSGAPMADNNEGADGVGNSSGNWHCDSQWLGDRVITTSTRTWALPTYNNHLYKQISSQSGASNDNHYFGYSTPWGYFDFNRFHCHFSPRDWQRLINNNWGFRPKRLNFKLFNIQVKEVTQNDGTTTIANNLTSTVQVFTDSEYQLPYVLGSAHQGCLPPFPADVFMVPQYGYLTLNNGSQAVGRSSFYCLEYFPSQMLRTGNNFTFSYTFEDVPFHSSYAHSQSLDRLMNPLIDQYLYYLNKTQSNSGTLQQSRLLFSQAGPTSMSLQAKNWLPGPCYRQQRLSKQANDNNNSNFPWTAATKYHLNGRDSLVNPGPAMASHKDDEEKFFPMHGTLIFGKQGTNANDADLDNVMITDEEEIRTTNPVATEQYGTVSNNLQNSNTGPTTGTVNHQGALPGMVWQDRDVYLQGPIWAKIPHTDGHFHPSPLMGGFGLKHPPPQIMIKNTPVPANPPTNFSSAKFASFITQYSTGQVSVEIEWELQKENSKRWNPEIQYTSNYNKSVNVDFTVDTNGVYSEPRPIGTRYLTRNL

SEQ ID NO: 555 - protein, 735 aa, Artificial Sequence
  Synthetic Polypeptide
MAADGYLPDWLEDTLSEGIRQWWKLKPGPPPPKPAERHKDDSRGLVLPGYKYLGPFNGLDKGEPVNEADAAALEHDKAYDRQLDSGDNPYLKYNHADAEFQERLKEDTSFGGNLGRAVFQAKKRVLEPLGLVEEPVKTAPGKKRPVEHSPVEPDSSSGTGKAGQQPARKRLNFGQTGDADSVPDPQPLGQPPAAPTSLGSTTMATGSGAPMADNNEGADGVGNSSGNWHCDSQWLGDRVITTSTRTWALPTYNNHLYKQISSQSGASNDNHYFGYSTPWGYFDFNRFHCHFSPRDWQRLINNNWGFRPKRLNFKLFNIQVKEVTQNDGTTTIANNLTSTVQVFTDSEYQLPYVLGSAHQGCLPPFPADVFMVPQYGYLTLNNGSQAVGRSSFYCLEYFPSQMLRTGNNFTLSYTFEDVPFHSSYAHSQSLDRLMNPLIDQYLYYLNKTQSNSGTLQQSRLLFSQAGPTSMSLQAKNWLPGPCYRQQRLSKQANDNNNSNFPWTAATKYHLNGRDSLVNPGPAMASHKDDEEKFFPMHGTLIFGKQGTNANDADLDNVMITDEEEIRTTNPVATEQYGTVSNNLQNSNTGPTTGTVNHQGALPGMVWQDRDVYLQGPIWAKIPHTDGHFHPSPLMGGFGLKHPPPQIMIKNTPVPANPPTNFSSAKFASFITQYSTGQVSVEIEWELQKENSKRWNPEIQYTSNYNKSVNVDFTVDTNGVYSEPRPIGTRYLTRNL

SEQ ID NO: 556 - protein, 735 aa, Artificial Sequence
  Synthetic Polypeptide
MAADGYLPDWLEDTLSEGIRQWWKLKPGPPPPKPAERHKDDSRGLVLPGYKYLGPFNGLDKGEPVNEADAAALEHDKAYDRQLDSGDNPYLKYNHADAEFQERLKEDTSFGGNLGRAVFQAKRRVLEPLGLVEEPVKTAPGKKRPVEHSPVEPDSSSGTGKAGQQPARKRLNFGQTGDADSVPDPQPLGQPPAAPTSLGSTTMATGSGAPMADNNEGADGVGNSSGNWHCDSQWLGDRVITTSTRTWALPTYNNHLYKQISSQSGASNDNHYFGYSTPWGYFDFNRFHCHFSPRDWQRLINNNWGFRPKRLNFKLFNIQVKEVTQNDGTTTIANNLTSTVQVFTDSEYQLPYVLGSAHQGCLPPFPADVFMVPQYGYLTLNNGSQAVGRSSFYCLEYFPSQMLRTGNNFTFSYTFEDVPFHSSYAHSQSLDRLMNPLIDQYLYYLNKTQSNSGTLQQSRLLFSQAGPTSMSLQAKNWLPGPCYRQQRLSKQANDNNNSNFPWTAATKYHLNGRDSLVNPGPAMASHKDDEEKFFPMHGTLIFGKQGTNANDADLDNVMITDEEEIRTTNPVATEQYGTVSNNLQNSNTGPTTGTVNHQGALPGMVWQDRDVYLQGPIWAKIPHTDGHFHPSPLMGGFGLKHPPPQIMIKNTPVPANPPTNFSSAKFASFITQYSTGQVSVEIEWELQKENSKRWNPEIQYTSNYNKSVNVDFTVDTNGVYSEPRPIGTRYLTRNL

SEQ ID NO: 557 - protein, 735 aa, Artificial Sequence
  Synthetic Polypeptide
MAADGYLPDWLEDTLSEGIRQWWKLKPGPPPPKPAERHKDDSRGLVLPGYKYLGPFNGLDKGEPVNEADAAALEHDKAYDRQLDSGDNPYLKYNHADAEFQERLKEDTSFGGNLGRAVFQAKKRVLEPLGLVEEPVKTAPGKKRPVEHSPVEPDSSSGTGKAGQQPARKRLNFGQTGDADSVPDPQPLGQPPAAPTSLGSTTMATGSGAPMADNNEGADGVGNSSGNWHCDSQWLGGRVITTSTRTWALPTYNNHLYKQISSQSGASNDNHYFGYSTPWGYFDFNRFHCHFSPRDWQRLINNNWGFRPKRLNFKLFNIQVKEVTQNDGTTTIANNLTSTVQVFTDSEYQLPYVLGSAHQGCLPPFPADVFMVPQYGYLTLNNGSQAVGRSSFYCLEYFPSQMLRTGNNFTFSYTFEDVPFHSSYAHSQSLDRLMNPLIDQYLYYLNKTQSNSGTLQQSRLLFSQAGPTSMSLQAKNWLPGPCYRQQRLSKQANDNNNSNFPWTAATKYHLNGRDSLVNPGPAMASHKDDEEKFFPMHGTLIFGKQGTNANDADLDNVMITDEEEIRTTNPVATEQYGTVSNNLQNSNTGPTTGTVNHQGALPGMVWQDRDVYLQGPIWAKIPHTDGHFHPSPLMGGFGLKHPPPQIMIKNTPVPANPPTNFSSAKFASFITQYSTGQVSVEIEWELQKENSKRWNPEIQYTSNYNKSVNVDFTVDTNGVYSEPRPIGTRYLTRNL

SEQ ID NO: 558 - protein, 734 aa, Artificial Sequence
  Synthetic Polypeptide
MAADGYLPDWLEDTLSEGIRQWWKLKPGPPPPKPAERHKDDSRGLVLPGYKYLGPFNGLDKGEPVNEADAAALEHDKAYDRQLDSGDNPYLKYNHADAEFQERLKEDTSFGGNLGRAVFQAKKRVLEPLGLVEEPVKTAPGKKRPVEHSPVEPDSSSGTGKAGQQPARKRLNFGQTGDADSVPDPQPLGQPPAAPTSLGSTTMATGSGAPMADNNEGADGVGNSSGNWHCDSQWLGDRVITTSTRTWALPTYNNHLYKQISSQSGASNDNHYFGYSTPWGYFDFNRFHCHFSPRDWQRLINNNWGFRPKRLNFKLFNIQVKEVTQNDGTTTIANNLTSTVQVFTDSEYQLPYVLGSAHQGCLPPFPADVFMVPQYGYLTLNNGSQAVGRSSFYCLEYFPSQMLRTGNNFTFSYTFEDVPFHSSYAHSQSLDRLMNPLIDQYLYYLNKTQSNSGTLQQSRLLFSQAGPTSMSLQAKNWLPGPCYRQQRLSKQANDNNSNFPWTAATKYHLNGRDSLVNPGPAMASHKDDEEKFFPMHGTLIFGKQGTNANDADLDNVMITDEEEIRTTNPVATEQYGTVSNNLQNSNTGPTTGTVNHQGALPGMVWQDRDVYLQGPIWAKIPHTDGHFHPSPLMGGFGLKHPPPQIMIKNTPVPANPPTNFSSAKFASFITQYSTGQVSVEIEWELQKENSKRWNPEIQYTSNYNKSVNVDFTVDTNGVYSEPRPIGTRYLTRNL

SEQ ID NO: 559 - protein, 735 aa, Artificial Sequence
  Synthetic Polypeptide
MAADGYLPDWLEDTLSEGIRQWWKLKPGPPPPKPAERHKDDSRGLVLPGYKYLGPFNGLDKGEPVNEADAAALEHDKAYDRQLDSGDNPYLKYNHADAEFQERLKEDTSFGGNLGRAVFQAKKRVLEPLGLVEEPVKTAPGKKRPVEHSPVEPDSSSGTGKAGQQPARKRLNFGQTGDADSVPDPQPLGQPPAAPTSLGSTTMATGSGAPMADNNEGADGVGNSSGNWHCDSQWLGDRVITTSTRTWALPTYNNHLYKQISSQSGASNDNHYFGYSTPWGYFDFNRFHCHFSPRDWQRLINNNWGFRPKRLNFKLFNIQVKEVTQNDGTTTIANNLTSTVQVFTDSEYQLPYVLGSAHQGCLPPFPADVFMVPQYGYLTLNNGSQAVGRSSFYCLEYFPSQMLRTGNNFTFSYTFEDVPFHSSYAHSQSLDRLMNPLIDQYLYYLNKTQSNSGTLQQPRLLFSQAGPTSMSLQAKNWLPGPCYRQQRLSKQANDNNNSNFPWTAATKYHLNGRDSLVNPGPAMASHKDDEEKFFPMHGTLIFGKQGTNANDADLDNVMITDEEEIRTTNPVATEQYGTVSNNLQNSNTGPTTGTVNHQGALPGMVWQDRDVYLQGPIWAKIPHTDGHFHPSPLMGGFGLKHPPPQIMIKNTPVPANPPTNFSSAKFASFITQYSTGQVSVEIEWELQKENSKRWNPEIQYTSNYNKSVNVDFTVDTNGVYSEPRPIGTRYLTRNL

SEQ ID NO: 560 - protein, 735 aa, Artificial Sequence
  Synthetic Polypeptide
MAADGYLPDWLEDTLSEGIRQWWKLKPGPPPPKPAERHKDDSRGLVLPGYKYLGPFNGLDKGEPVNEADAAALEHDKAYDRQLDSGDNPYLKYNHADAEFQERLKEDTSFGGNLGRAVFQAKKRVLEPLGLVEEPVKTAPGKKRPVEHSPVEPDSSSGTGKAGQQPARKRLNFGQTGDADSVPDPQPLGQPPAAPTSLGSTTMATGSGAPMADNNEGADGVGNSSGNWHCDSQWLGDRVITTSTRTWALPTYNNHLYKQISSQSGASNDNHYFGYSTPWGYFDFNRFHCHFSPRDWQRLINNNWGFRPKRLNFKLFNIQVKEVTQNDGTTTIANNLTSTVQVFTDSEYQLPYVLGSAHQGCLPPFPADVFMVPQYGYLTLNNGSQAVGRSSFYCLEYFPSQMLRTGNNFTFSCTFEDVPFHSSYAHSQSLDRLMNPLIDQYLYYLNKTQSNSGTLQQSRLLFSQAGPTSMSLQAKNWLPGPCYRQQRLSKQANDNNNSNFPWTAATKYHLNGRDSLVNPGPAMASHKDDEEKFFPMHGTLIFGKQGTNANDADLDNVMITDEEEIRTTNPVATEQYGTVSNNLQNSNTGPTTGTVNHQGALPGMVWQDRDVYLQGPIWAKIPHTDGHFHPSPLMGGFGLKHPPPQIMIKNTPVPANPPTNFSSAKFASFITQYSTGQVSVEIEWELQKENSKRWNPEIQYTSNYNKSVNVDFTVDTNGVYSEPRPIGTRYLTRNL

SEQ ID NO: 561 - protein, 735 aa, Artificial Sequence
  Synthetic Polypeptide
MAADGYLPDWLEDTLSEGIRQWWKLKPGPPPPKPAERHKDDSRGLVLPGYKYLGPFNGLDKGEPVNEADAAALEHDKAYDRQLDSGDNPYLKYNHADAEFQERLKEDTSFGGNLGRAVFQAKKRVLEPLGLVEEPVKTAPGKKRPVEHSPVEPDSSSGTGKAGQQPARKRLNFGQTGDADSVPDPQPLGQPPAAPTSLGSTTMATGSGAPMADNNEGADGVGNSSGNWHCDSQWLGDRVITTSTRTWALPTYNNHLYKQISSQSGASNDNHYFGYSTPWGYFDFNRFHCHFSPRDWQRLIDNNWGFRPKRLNFKLFNIQVKEVTQNDGTTTIANNLTSTVQVFTDSEYQLPYVLGSAHQGCLPPFSADVFMVPQYGYLTLNNGSQAVGRSSFYCLEYFPSQMLRTGNNFTFSYTFEDVPFHSSYAHSQSLDRLMNPLIDQYLYYLNKTQSNSGTLQQSRLLFSQAGPTSMSLQAKNWLPGPCYRQQRLSKQANDNNNSNFPWTAATKYHLNGRDSLVNPGPAMASHKDDEEKFFPMHGTLIFGKQGTNANDADLDNVMITDEEEIRTTNPVATEQYGTVSNNLQNSNTGPTTGTVNHQGALPGMVWQDRDVYLQGPIWAKIPHTDGHFHPSPLMGGFGLKHPPPQIMIKNTPVPANPPANFSSAKFASFITQYSTGQVSVEIEWELQKENSKRWNPEIQYTSNYNKSVNVDFTVDTNGVYSEPRPIGTRYLTRNL

SEQ ID NO: 562 - protein, 744 aa, Artificial Sequence
  Synthetic Polypeptide
MITTLDKSGMAADGYLPDWLEDTLSEGIRQWWKLKPGPPPPKPAERHKDDSRGLVLPGYKYLGPFNGLDKGEPVNEADAAALEHDKAYDRQLDSGDNPYLKYNHADAEFQERLKEDTSFGGNLGRAVFQAKKRVLEPLGLVEEPVKTAPGKKRPVEHSPVEPDSSSGTGKAGQQPARKRLNFGQTGDADSVPDPQPLGQPPAAPTSLGSTTMATGSGAPMADNNEGADGVGNSSGNWHCDSQWLGDRVITTSTRTWALPTYNNHLYKQISSQSGASNDNHYFGYSTPWGYFDFNRFHCHFSPRDWQRLINNNWGFRPKRLNFKLFNIQVKEVTQNDGTTTIANNLTGTVQVFTDSEYQLPYVLGSAHQGCLPPFPADVFMVPQYGYLTLNNGSQAVGRSSFYCLEYFPSQMLRTGNNFTFSYTFEDVPFHSSYAHSQSLDRLMNPLIDQYLYYLNKTQSNSGTLQQSRLLFSQAGPTSMSLQAKNWLPGPCYRQQRLSKQANDNNNSNFPWTAATKYHLNGRDSLVNPGPAMASHKDDEEKFFPMHGTLIFGKQGTNANDADLDNVMITDEEEIRTTNPVATEQYGTVSNNLQNSNTGPTTGTVNHQGALPGMVWQDRDVYLQGPIWAKIPHTDGHFHPSPLMGGFGLKHPPPQIMIKNTPVPANPPTNFSSAKFASFITQYSTGQVSVEIEWELQKENSKRWNPEIQYTSNYNKSVNVDFTVDTNGVYSEPRPIGTRYLTRNL

SEQ ID NO: 563 - protein, 744 aa, Artificial Sequence
  Synthetic Polypeptide
MITTLDKSGMAADGYLPDWLEDTLSEGIRQWWKLKPGPPPPKPAERHKDDSRGLVLPGYKYLGPFNGLDKGEPVNEADAAALEHDKAYDRQLDSGDNPYLKYNHADAEFQERLKEDTSFGGNLGRAVFQAKKRVLEPLGLVEEPVKTAPGKKRPVEHSPVEPDSSSGTGKAGQQPARKRLNFGQTGDADSVPDPQPLGQPPAAPTSLGSTTMATGSGAPMADNNEGADGVGNSSGNWHCDSQWLGDRVITTSTRTWALPTYNNHLYKQISSQSGASNDNHYFGYSTPWGYFDFNRFHCHFSPRDWQRLINNNWGFRPKRLNFKLFNIQVKEVTQNDGTTTIANNLTSTVQVFTDSEYQLPYVLGSAHQGCLPPFPADVFMVPQYGYLTLNNGSQAVGRSSFYCLEYFPSQMLRTGNNFTFSYTFEDVPFHSSYAHSQSLDRLMNPLIDQYLYYLNKTQSNSGTLQQSRLLFSQAGPTSMSLQAKNWLPGPCYRQQRLSKQANDNNNSNFPWTAATKYHLNGRDSLVNPGPAMASHKDDEEKFFPMHGTLIFGKQGTNANDADLDNVMITDEEEIRTTNPVATEQYGTVSNNLQNSNTGPTTGTVNHQGALPGMVWQDRDVYLQGPIWAKIPHTDGHFHPSPLMGGFGLKHPPPQIMIKNTPVPANPPTNFSSAKFASFITQYSTGQVSVEIEWELQKENSKRWNPEIQYTSNYNKSVNVDFSVDTNGVYSEPRPIGTRYLTRNL

SEQ ID NO: 564 - protein, 735 aa, Artificial Sequence
  Synthetic Polypeptide
MAADGYLPDWLEDTLSEGIRQWWKLKPGPPPPKPAERHKDDSRGLVLPGYKYLGPFNGLDKGEPVNEADAAALEHDKAYDRQLDSGDNPYLKYNHADAEFQERLKEDTSFGGNLGRAVFQAKKRVLEPLGLAEEPVKTAPGKKRPVEHSPVEPDSSSGTGKAGQQPARKRLNFGQTGDADSVPDPQPLGQPPAAPTSLGSTTMATGSGAPMADNNEGADGVGNSSGNWHCDSQWLGDRVITTSTRTWALPTYNNHLYKQISSQSGASNDNHYFGYSTPWGYFDFNRFHCHFSPRDWQRLINNNWGFRPKRLNFKLFNIQVKEVTQNDGTTTIANNLTSTVQVFTDSEYQLPYVLGSAHQGCLPPFPADVFMVPQYGYLTLNNGSQAVGRSSFYCLEYFPSQMLRTGNNFTFSYTFEDVPFHSSYAHSQSLDRLMNPLIDQYLYYLNKTQSNSGTLQQSRLLFSQAGPTSMSLQAKNWLPGPCYRQQRLSKQANDNNNSNFPWTAATKYHLNGRDSLVNPGPAMASHKDDEEKFFPMHGTLIFGKQGTNANDADLDNVMITDEEEIRTTNPVATEQYGTVSNNLQNSNTGPTTGTVNHQGALPGMVWQDRDVYLQGPIWAKIPHTDGHFHPSPLMGGFGLKHPPPQIMIKNTPVPANPPTNFSSAKFASFITQYSTGQVSVEIEWELQKENSKRWNPEIQYTSNYNKSVNVDFTVDTNGVYSEPRPIGTRYLTRNL

SEQ ID NO: 565 - protein, 735 aa, Artificial Sequence
  Synthetic Polypeptide
MAADGYLPDWLEDTLSEGIRQWWKLKPGPPPPKPAERHKDDSRGLVLPGYKYLGPFNGLDKGEPVNEADAAALEHDKAYDRQLDSGDNPYLKYNHADAEFQERLKEDTSFGGNLGRAVFQAKKRVLEPLGLVEEPVKTAPGKKRPVEHSPVEPDSSSGTGKAGQQPARKRLNFGQTGDADSVPDPQPLGQPPAAPTSLGSTTMATGSGAPMADNNEGADGVGNSSGNWHCDSQWLGDRVITTSTRTWALPTYNNHLYKQISSQSGASNDNHYFGYSTPWGYFDFNRFHCHFSPRDWQRLINNNWGFRPKRLNFKLFNIQVKEVTQNDGTTTIANNLTSTVQVFTDSEYQLPYVLGSAHQGCLPPFPADVFMVPQYGYLTLNNGSQAVGRSSFYCLEYFPSQMLRTGNNFTFSYTFEDVPFHSSYAHSQSLDRLMNPLIDQYLYYLNKTQSNSGTLQQSRLLFSQAGPTSMSLQAKNWLPGPCYRQQRLSKQANDNNNSNFPWAAATKYHLNGRDSLVNPGPAMASHKDDEEKFFPMHGTLIFGKQGTNANDADLDNVMITDEEEIRTTNPVATEQYGTVSNNLQNSNTGPTTGTVNHQGALPGMVWQDRDVYLQGPIWAKIPHTDGHFHPSPLMGGFGLKHPPPQIMIKNTPVPANPPTNFSSAKFASFITQYSTGQVSVEIEWELQKENSKRWNPEIQYTSNYNKSVNVDFTVDTNGVYSEPRPIGTRYLTRNL

SEQ ID NO: 566 - protein, 734 aa, Artificial Sequence
  Synthetic Polypeptide
MAADGYLPDWLEDTLSEGIRQWWKLKPGPPPPKPAERHKDDSRGLVLPGYKYLGPFNGLDKGEPVNEADAAALEHDKAYDRQLDSGDNPYLKYNHADAEFQERLKEDTSFGGNLGRAVFQAKKRVLEPLGLVEEPVKTAPGKKRPVEHSPVEPDSSSGTGKAGQQPARKRLNFGQTGDADSVPDPQPLGQPPAAPTSLGSTTMATGSGAPMADNNEGADGVGNSSGNWHCDSQWLGDRVITTSTRTWALPTYNNHLYKQISSQSGASNDNHYFGYSTPWGYFDFNRFHCHFSPRDWQRLINNNWGFRPKRLNFKLFNIQVKEVTQNDGTTTIANNLTSTVQVFTDSEYQLPYVLGSAHQGCLPPFPADVFMVPQYGYLTLNNGSQAVGRSSFYCLEYFPSQMLRTGNNFTFSCTFEDVPFHSSYAHSQSLDRLMNPLIDQYLYYLNKTQSNSGTLQQSRLLFSQAGPTSMSLQAKNWLPGPCYRQQRLSKQANDNNSNFPWTAATKYHLNGRDSLVNPGPAMASHKDDEEKFFPMHGTLIFGKQGTNANDADLDNVMITDEEEIRTTNPVATEQYGTVSNNLQNSNTGPTTGTVNHQGALPGMVWQDRDVYLQGPIWAKIPHTDGHFHPSPLMGGFGLKHPPPQIMIKNTPVPANPPTNFSSAKFASFITQYSTGQVSVEIEWELQKENSKRWNPEIQYTSNYNKSVNVDFTVDTNGVYSEPRPIGTRYLTRNL

SEQ ID NO: 567 - protein, 735 aa, Artificial Sequence
  Synthetic Polypeptide
MAADGYLPDWLEDTLSEGIRQWWKLKPGPPPPKPAERHKDDSRGLVLPGYKYLGPFNGLDKGEPVNEADAAALEHDKAYDRQLDSGDNPYLKYNHADAEFQERLKEDTSFGGNLGRAVFQAKKRVLEPLGLVEEPVKTAPGKKRPVEHSPVEPDSSSGTGKAGQQPARKRLNFGQTGDADSVPDPQPLGQPPAAPTSLGSTTMATGSGAPMADNNEGADGVGNSSGNWHCDSQWLGDRVITTSTRTWALPTYNNHLYKQISSQSGASNDNHYFGYSTPWGYFDFNRFHCHFSPRDWQRLINNNWGFRPKRLNFKLFNIQVKEVTQNDGTTTIANNLTSTVQVFTDSEYQLPYVLGSAHQGCLPPFPADVFMVPQYGYLTLNNGSQAVGRSSFYCLEYFPSQMLRTGNNFTFSCTFEDVPFHSSYAHSQSLDRLMNPLIDQYLYYLNKTQSNSGTLQQSRLLFSQAGPTSMSLQAKNWLPGPCYRQQRLSKQANDNNNSNFPWTAATKYHLNGRDSLVNPGPAMASHKDDEEKFFPMHGTLIFGKQGTNANDADLDNVMITDEEEIRTTNPVATEQYGTVSNNLQNSNTGPTTGTVNHQGALPGMVWQDRDVYLQGPIWAKIPHTDGHFHPSPLMGGFGLKHPPPQIMIKNTPVPANPPTNFSSAKFASFITQYSTGQVSVEIEWELQKENSKRWNPEIQYTSNYNKSVNVDFSVDTNGVYSEPRPIGTRYLTRNL

SEQ ID NO: 568 - protein, 735 aa, Artificial Sequence
  Synthetic Polypeptide
MAADGYLPDWLEDTLSEGIRQWWKLKPGPPPPKPAERHKDDSRGLVLPGYKYLGPFNGLDKGEPVNEADAAALEHDKAYDRQLDSGDNPYLKYNHADAEFQERLKEDTSFGGNLGRAVFQAKKRVLEPLGLVEEPVKTAPGKKRPVEHSPVEPDSSSGTGKAGQQPARKRLNFGQTGDADSVPDPQPLGQPPAAPTSLGSTTMATGSGAPMADNNEGADGVGNSSGNWHCDSQWLGDRVITTSTRTWALPTYNNHLYKQISSQSGASNDNHYFGYSTPWGYFDFNRFHCHFSPRDWQRLINNNWGFRPKRLNFKLFNIQVKEVTQNDGTTTIANNLTSTVQVFTDSEYQLPYVPGSAHQGCLPPFPADVFMVPQYGYLTLNNGSQAVGRSSFYCLEYFPSQMLRTGNNFTFSCTFEDVPFHSSYAHSQSLDRLMNPLIDQYLYYLNKTQSNSGTLQQPRLLFSQAGPTSMSLQAKNWLPGPCYRQQRLSKQANDNNNSNFPWTAATKYHLNGRDSLVNPGPAMASHKDDEEKFFPMHGTLIFGKQGTNANDADLDNVMITDEEEIRTTNPVATEQYGTVSNNLQNSNTGPTTGTVNHQGALPGMVWQDRDVYLQGPIWAKIPHTDGHFHPSPLMGGFGLKHPPPQIMIKNTPVPANPPTNFSSAKFASFITQYSTGQVSVEIEWELQKENSKRWNPEIQYTSNYNKSVNVDFTVDTNGVYSEPRPIGTRYLTRNL

SEQ ID NO: 569 - protein, 735 aa, Artificial Sequence; identical to SEQ ID NO: 498
  Synthetic Polypeptide

SEQ ID NO: 570 - protein, 735 aa, Artificial Sequence
  Synthetic Polypeptide
MAADGYLPDWLEDTLSEGIRQWWKLKPGPPPPRPAERHQDDSRGLVLPGYKYLGPFNGLDKGEPVNEADAAALEHDKAYDRQLDSGDNPYLKYNHADAEFQERLKEDTSFGGNLGRAVFQAKKRVLEPLGLVEEPVKTAPGKKRPVEHSPAEPDSSSGTGKAGQQPARKRLNFGQTGDADSVPDPQPLGQPPAAPTSLGSTTMATGSGAPMADNNEGADGVGNSSGNWHCDSQWLGDRVITTSTRTWALPTYNNHLYKQISSQSGASNDNHYFGYSTPWGYFDFNRFHCHFSPRDWQRLINNNWGFRPKRLNFKLFNIQVKEVTQNDGTTTIANNLTSTVQVFTDSEYQLPYVLGSAHQGCLPPFPADVFMVPQYGYLTLNNGSQAVGRSSFYCLEYFPSQMLRTGNNFTFSYTFEDVPFHSSYAHSQSLDRLMNPLIDQYLYYLNRTQSNSGTLQQSRLLFSQAGPTSMSLQAKNWLPGPCYRQQRLSKQANDNNNSNFPWTAATKYHLNGRDSLVNPGPAMASHKDDEEKFFPMHGTLIFGKQGTNANDADLEHVMITGEEEIRTTNPVATEQYGNVSNNLQNSNTGPTTENVNHQGALPGMVWQDRDVYLQGPIWAKIPHTDGHFHPSPLMGGFGLKHPPPQIMIKNTPVPANPPTNFSAAKFASFITQYSTGQVSVEIEWELQKENSKRWNPEIQYTSNYNKSVNVDFTVDANGVYSEPRPIGTRYLTRNL

SEQ ID NO: 571 - protein, 735 aa, Artificial Sequence
  Synthetic Polypeptide
MAADGYLPDWLEDTLSEGIRQWWKLKPGPPPPRPAERHQDDSRGLVLPGYKYLGPFNGLDKGEPVNEADAAALEHDKAYDRQLDSGDNPYLKYNHADAEFQERLKEDTSFGGNLGRAVFQAKKRVLEPLGLVEEPVKTAPGKKRPVEHSPAEPDSSSGTGKAGQQPARKRLNFGQTGDADSVPDPQPLGQPPAAPTSLGSTTMATGSGAPMADNNEGADGVGNSSGNWHCDSQWLGDRVITTSTRTWALPTYNNHLYKQISSQSGASNDNHYFGYSTPLGYFDFNRFHCHFSPRDWQRLINNNWGFRPKRLNFKLFNIQVKEVTQNDGTTTIANNLTSTVQVFTDSEYQLPYVLGSAHQGCLPPFPADVFMVPQYGYLTLNNGSQAVGRSSFYCLEYFPSQMLRTGNNFTFSYTFEDVPFHSSYAHSQSLDRLMNPLIDQYLYYLNRTQSNSGTLQQSRLLFSQAGPTSMSLQAKNWLPGPCYRQQRLSKQANDNNNSNFPWTAATKYHLNGRDSLVNPGPAMASHKDDEEKFFPMHGTLIFGKQGTNANDTDLEHVMITDEEEIRTTNPVATEQYGNVSNNLQNSNTGPTTENVNHQGALPGMVWQDRDVYLQGPIWAKIPHTDGHFHPSPLMGGFGLKHPPPQIMIKNTPVPANPPTNFSAAKFASFITQYSTGQVSVEIEWELQKENSKRWNPEIQYTSNYNKSVNVDFTVDANGVYSEPRPIGTRYLTRNL

SEQ ID NO: 572 - protein, 735 aa, Artificial Sequence
  Synthetic Polypeptide
MAADGYLPDWLEDTLSEGIRQWWKLKPGPPPPRPAERHQDDSRGLVLPGYKYLGPFNGLDKGEPVNEADAAALEHDKAYDRQLDSGDNPYLKYNHADAEFQERLKEDTSFGGNLGRAVFQAKKRVLEPLGLVEEPVKTAPGKKRPVEHSPAEPDSSSGTGKAGQQPARKRLNFGQTGDADSVPDPQPLGQPPAAPTSLGSTTMATGSGAPMADNNEGADGVGNSSGNWHCDSQWLGDRVITTSTRTWALPTYNNHLYKQISSQSGASNDNHYFGYSTPWGYFDFNRFHCHFSPRDWQRLINNNWGFRPKRLNFKLFNIQVKEVTQNDGTTTIANNLTSTVQVFTDSEYQLPYVLGSAHQGCLPPFPADVFMVPQYGYLTLNNGSQAVGRSSFYCLEYFPSQMLRTGNNFTFSYTFEDVPFHSSYAHSQSLDRLMNPLIDQYLYYLNRTQSNSGTLQQSRLLFSQAGPTSMSLQAKNWLPGPCYRQQRLSKQANDNNNSNFPWTAATKYHLNGRDSLVNPGPAMASHKDDEEKFFPMHGTLIFGKQGTNANDADLERVMITDEEEIRTTNPVATEQYGNVSNNLQNSNTGPTTENVNHQGALPGMVWQDRDVYLQGPIWAKIPHADGHFHPSPLMGGFGLKHPPPQIMIKNTPVPANPPTNFSAAKFASFITQYSTGQVSVEIEWELQKENSKRWNPEIQYTSNYNKSVNVDFTVDANGVYSEPRPIGTRYLTRNL

SEQ ID NO: 573 - protein, 735 aa, Artificial Sequence
  Synthetic Polypeptide
MAADGYLPDWLEDTLSEGIRQWWKLKPGPPPPRPAERHQDDSRGLVLPGYKYLGPFNGLDKGEPVNEADAAALEHDKAYDRQLDSGDNPYLKYNHADAEFQERLKEDTSFGGNLGRAVFQAKKRVLEPLGLVEEPVKTAPGKKRPVEHSPAEPDSSSGTGKAGQQPARKRLNFGQTGDADSVPDPQPLGQPPAAPTSLGSTTMATGSGAPMADNNEGADGVGNSSGNWHCDSQWLGDRVITTSTRTWALPTYNNHLYKQISSQSGASNDNHYFGYSTPWGYFDFNRFHCHFSPRDWQRLINNNWGFRPKRLNFKLFNIQVKEVTQNDGTTTIANNLTSTVQVFTDSEYQLPYVLGSAHQGCLPPFPADVFMVPQYGYLTLNNGSQAVGRSSFYCLEYFPSQMLRTGNNFTFSYTFEDVPFHSSYAHSQSLDRLMNPLIDQYLYYLNRTQSNSGTLQQSRLLFSQAGPTSMSLQAKNWLPGPCYRQQRLSKQANDNNNSNFPWTAATKYHLNGRDSLVNPGPAMASHKDDEEKFFPMHGTLIFGKQGTNANDADLEHVMITDEEEIRTTNPVATEQYGNVSNNLQNSNTGPTTENVNHQGALPGMVWQDRDVYLQGPIWAKIPHTDGHFHPSPLMGGFGLKHPPPQIMIKNTPVPANPPTNFSAAKFASFITRYSTGQVSAEIEWELQKENSKRWNPEIQYTSNYNKSVNVDFTVDANGVYSEPRPIGTRYLTRNL

SEQ ID NO: 574 - protein, 735 aa, Artificial Sequence
  Synthetic Polypeptide
MAADGYLPDWLEDILSEGIRQWWKLKPGPPPPKPAERHKDDSRGLVLPGYKYLGPFNGLDKGEPVNEADAAALEHDKAYDRQLDSGDNPYLKYNHADAEFQERLKEDTSFGGNLGRAVFQAKKRVLEPLGLVEEPVKTAPGKKRPVEQSPAEPDSSSGTGKAGNQPARKRLNFGQTGDADSVPDPQPLGQPPAAPSGLGSTTMATGSGAPMADNNEGADGVGNSSGNWHCDSQWLGDRVITTSTRTWALPTYNNHLYKQISSQSGAANDNHYFGYSTPWGYFDFNRFHCHFSPRDWQRLINNNWGFRPKRLNFKLFNIQVKEVTQNDGTTTIANNLTSTVQVFTDSEYQLPYVLGSAHQGCLPPFPADVFMVPQYGYLTLNNGSQAVGRSSFYCLEYFPSQMLRTGNNFTFSYTFEDVPFHSSYAHSQSLDRLMNPLIDQYLHYLNKTQSNSGTLQQSRLLFSQAGPTSMSLQAKNWLPGPCYRQQRLSKQANDNNNSNFPWTAATKYHLNGRDSLVNPGPAMASHKDDEEKFFPMHGTLIFGKQGTNANDADLDNVMITDEEEIRTTNPVATEQYGTVSNNLQNSNTGPTTGTVNHQGALPGMVWQDRDVYLQGPIWAKIPHTDGHFHPSPLMGGFGLKHPPPQIMIKNTPVPANPPTNFSSAKFASFITQYSTGQVSVEIEWELQKENSKRWNPEIQYTSNYNKSVNVDFTVDTNGVYSEPRPIGTRYLTRNL

SEQ ID NO: 575 - protein, 735 aa, Artificial Sequence
  Synthetic Polypeptide
MAADGYLPDWLEDTLSEGIRQWWKLKPGPPPPRPAERHQDDSRGLVLPGYKYLGPFNGLDKGEPVNEADAAALEHDKAYDRQLDSGDNPYLKYNHADAEFQERLKEDTSFGGNLGRAVFQAKKRVLEPLGLVEEPVKTAPGKKRPVEHSPAEPDSSSGTGKAGQQPARKRLNFGQTGDADSVPDPQPLGQPPAAPTSLGSTTMATGSGAPMADNNEGADGVGNSSGNWHCDSQWLGDRVITTSTRTWALPTYNNHLYKQISSQSGASNDNHYFGYSTPWGYFDFNRFHCHFSPRDWQRLINNNWGFRPKRLNFKLFNIQVKEVTQNDGTTTIANNLTSTVQVFTDSEYQLPYVLGSAHQGCLPPFPADVFMVPQYGYLTLNNGSQAVGRSSFYCLEYFPSQMLRTGNNFTFSYTFEDVPFHSSYAHSQSLDRLMNPLIDQYLYYLNRTQSNSGTLQQSRLLFSQAGPTSMSLQAKNWLPGPCYRQQRLSKQANDNNNSNFPWTAATKYHLNGRDSLVNPGPAMASHKDDEEKFFPMHGTLIFGKQGTNANDADLEHVMITDEEEIRTTNPVATEQYGNVSNNLQNSNTGPTTENVNRQGALPGMVWQDRDVYLQGPIWAKIPHTDGHFHPSPLMGGFGLKHPPPQIMIKNTPVPANPPTNFSAAKFASFITQYSTGQVSVEIEWELQKENSKRWNPEIQYTSNYNKSVNVDFTVDANGVYSEPRPIGTRYLTRNL

SEQ ID NO: 576 - protein, 735 aa, Artificial Sequence
  Synthetic Polypeptide
MAADGYLPDWLEDTLSEGIRQWWKLKPGPPPPRPAERHQDDSRGLVLPGYKYLGPFNGLDKGEPVNEADAAALEHDKAYDRQLDSGDNPYLKYNHADAEFQERLKEDTSFGGNLGRAVFQAKKRVLEPLGLVEEPVKTAPGKKRPVEHSPAEPDSSSGTGKAGQQPARKRLNFGQTGDADSVPDPQPLGQPPAAPTSLGSTTMATGSGAPMADNNEGADGVGNSSGNWHCDSQWLGDRVITTSTRTWALPTYNNHLYKQISSQSGASNDNHYFGYSTPWGYFDFNRFHCHFSPRDWQRLINNNWGFRPKRLNFKLFNIQVKEVTQNDGTTTIANNLTSTVQVFTDSEYQLPYVLGSAHQGCLPPFPADVFMVPQYGYLTLNNGSQAVGRSSFYCLEYFPSQMLRTGNNFTFSYTFEDVPFHSSYAHSQSLDRLMNPLIDQYLYYLNRTQSNSGTLQQSRLLFSQAAPTSMSLQAKNWLPGPCYRQQRLSKQANDNNNSNFPWTAATKYHLNGRDSLVNPGPAMASHKDDEEKFFPMHGTLIFGKQGTNANDTDLEHVMITDEEEIRTTNPVATEQYGNVSNNLQNSNTGPTTENVNHQGALPGMVWQDRDVYLQGPIWAKIPHTDGHFHPSPLMGGFGLKHPPPQIMIKNTPVPANPPTNFSAAKFASFITQYSTGQVSVEIEWELQKENSKRWNPEIQYTSNYNKSVNVDFTVDANGVYSEPRPIGTRYLTRNL

SEQ ID NO: 577 - protein, 735 aa, Artificial Sequence
  Synthetic Polypeptide
MAADGYLPDWLEDILSEGIRQWWKLKPGPPPPKPAERHKDDSRGLVLPGYKYLGPFNGLDKGEPVNEADAAALEHDKAYDRQLDSGDNPYLKYNHADAEFQERLKEDTSFGGNLGRAVFQAKKRVLEPLGLVEEPVKTAPGKKRPVEQSPAEPDSSSGTGKAGNQPARKRLNFGQTGDADSVPDPQPLGQPPAAPSGLGSTTMATGSGAPMADNNEGADGVGNSSGNWHCDSQWLGDRVITTSTRTWALPTYNNHLYKQISSQSGAANDNHYFGYSTPWGYFDFNRFHCHFSPRDWQRLINNNWGFRPKRLNFKLFNIQVKEVTQNDGTTTIANNLTSTVQVFTDSEYQLPYVLGSAHQGCLPPFPADVFMVPQYGYLTLNNGSQAVGRSSFYCLEYFPSQMLRTGNNFTFSYTFEDVPFHSSYAHSQSLDRLMNPLIDQYLYYLNKTQSNSGTLQQSRLLFSQAGPTSMSLQAKNWLPGPCYRQQRLSKQANDNNNSNFPWTAATKYHLNGRDSLVNPGPAMASHKDDEEKFFPMHGTLIFGKQGTNANDADLDNVMITDEEEIRTTNPVATEQYGTVSNNLQNSNTGPTTGTVNHQGALPGMVWQDRDVYLQGPIWAKIPHTDGHFHPSPLMGGFGLKHPPPQIMIKNTPVPANPPTNFSSAKFASFVTQYSTGQVSVEIEWELQKENSKRWNPEIQYTSNYNKSVNVDFTVDTNGVYSEPRPIGTRYLTRNL

SEQ ID NO: 578 - protein, 735 aa, Artificial Sequence
  Synthetic Polypeptide
MAADGYLPDWLEDTLSEGIRQWWKLKPGPPPPRPAERHQDDSRGLVLPGYKYLGPFNGLDKGEPVNEADAAALEHDKAYDRQLDSGDNPYLKYNHADAEFQERLKEDTSFGGNLGRAVFQAKKRVLEPLGLVEEPVKTAPGKKRPVEHSPAEPDSSSGTGKAGQQPARKRLNFGQTGDADSVPDPQPLGQPPAAPTSLGSTTMATGSGAPMADNNEGADGVGNSSGNWHCDSQWLGDRVITTSTRTWALPTYNNHLYKQISSQSGASNDNHYFGYSTPWGYFDFNRFHCHFSPRDWQRLINNNWGFRPKRLNFKLFNIQVKEVTQNDGTTTIANNLTSTVQVFTDSEYQLPYALGSAHQGCLPPFPADVFMVPQYGYLTLNNGSQAVGRSSFYCLEYFPSQMLRTGNNFTFSYTFEDVPFHSSYAHSQSLDRLMNPLIDQYLYYLNRTQSNSGTLQQSRLLFSQAGPTSMSLQAKNWLPGPCYRQQRLSKQANDNNNSNFPWTAATKYHLNGRDSLVNPGPAMASHKDDEEKFFPMHGTLIFGKQGTNANDTDLEHVMITDEEEIRTTNPVATEQYGNVSNNLQNSNTGPTTENVNHQGALPGMVWQDRDVYLQGPIWAKIPHTDGHFHPSPLMGGFGLKHPPPQIMIKNTPVPANPPTNFSAAKFASFITQYSTGQVSVEIEWELQKENSKRWNPEIQYTSNYNKSVNVDFTVDANGVYSEPRPIGTRYLTRNL

SEQ ID NO: 579 - protein, 735 aa, Artificial Sequence
  Synthetic Polypeptide
MAADGYLPDWLEDILSEGIRQWWKLKPGPPPPKPAERHKDDSRGLVLPGYKYLGPFNGLDKGEPVNEADAAALEHDKAYDRQLDSGDNPYLKYNHADAEFQERLKEDTSFGGNLGRAVFQAKKRVLEPLGLVEEPVKTAPGKKRPVEQSPAEPDSSSGTGKAGNQPARKRLNFGQTGDADSVPDPQPLGQPPAAPSGLGSTTMATGSGAPMADNNEGADGVGNSSGNWHCDSQWLGDRVITTSTRTWALPTYNNHLYKQISSQSGAANDNHYFGYSTPWGYFDFNRFHCHFSPRDWQRLINNNWGFRPKRLNFKLFSIQVKEVTQNDGTTTIANNLTSTVQVFTDSEYQLPYVLGSAHQGCLPPFPADVFMVPQYGYLTLNNGSQAVGRSSFYCLEYFPSQMLRTGNNFTFSYTFEDVPFHSSYAHSQSLDRLMNPLIDQYLYYLNKTQSNSGTLQQSRLLFSQAGPTSMSLQAKNWLPGPCYRQQRLSKQANDNNNSNFPWTAATKYHLNGRDSLVNPGPAMASHKDDEEKFFPMHGTLIFGKQGTNANDADLDNVMITDEEEIRTTNPVATEQYGTVSNNLQNSNTGPTTGTVNHQGALPGMVWQDRDVYLQGPIWAKIPHTDGHFHPSPLMGGFGLKHPPPQIMIKNTPVPANPPTNFSSAKFASFITQYSTGQVSVEIEWELQKENSKRWNPEIQYTSNYNKSVNVDFTVDTNGVYSEPRPIGTRYLTRNL

SEQ ID NO: 580 - protein, 735 aa, Artificial Sequence
  Synthetic Polypeptide
MAADGYLPDWLEDTLSEGIRQWWKLKPGPPPPRPAERHQDDSRGLVLPGYKYLGPFNGLDKGEPVNEADAAALEHDKAYDRQLDSGDNPYLKYNHADAEFQERLKEDTSFGGNLGRAVFQAKKRVLEPLGLVEEPVKTAPGKKRPVEHSPAEPDSSSGTGKAGQQPARKRLNFGQTGDADSVPDPQPLGQPPAAPTSLGSTTMATGSGAPMADNNEGADGVGNSSGNWHCDSQWLGDRVITTSTRTWALPTYNNHLYKQISSQSGASNDNHYLGYSTPWGYFDFNRFHCHFSPRDWQRLINNNWGFRPKRLNFKLFNIQVKEVTQNDGTTTIANNLTSTVQVFTDSEYQLPYVLGSAHQGCLPPFPADVFMVPQYGYLTLNNGSQAVGRSSFYCLEYFPSQMLRTGNNFTFSYTFEDVPFHSSYAHSQSLDRLMNPLIDQYLYYLNRTQSNSGTLQQSRLLFSQAAPTSMSLQAKNWLPGPCYRQQRLSKQANDNNNSNFPWTAATKYPLNGRDSLVNPGPAMASHKDDEEKFFPMHGTLIFGKQGTNANDTDLEHVMITDEEEIRTTNPVATEQYGNVSNNLQNSNTGPTTENVNHQGALPGMVWQDRDVYLQGPIWAKIPHTDGHFHPSPLMGGFGLKHPPPQIMIKNTPVPANPPTNFSAAKFASFITQYSTGQVSVEIEWELQKENSKRWNPEIQYTSNYNKSVNVDFTVDANGVYSEPRPIGTRYLTRNL

SEQ ID NO: 581 - protein, 735 aa, Artificial Sequence
  Synthetic Polypeptide
MAADGYLPDWLEDILSEGIRQWWKLKPGPPPPKPAERHKDDSRGLVLPGYKYLGPFNGLDKGEPVNEADAAALEHDKAYDRQLDSGDNPYLKYNHADAEFQERLKEDTSFGGNLGRAVFQAKKRVLEPLGLVEEPVKTAPGKKRPVEQSPAEPDSSSGTGKAGNQPARKRLNFGQTGDADSVPDPQPLGQPPAAPSGLGSTTMATGSGAPMADNNEGADGVGNSSGNWHCDSQWLGDRVITTSTRTWALPTYNNHLYKQISSQSGAANDNHYFGYSTPWGYFDFNRFHCHFSPRDWQRLINNNWGFRPKRLNFKLFNIQVKEVTQNDGTTTIANNLTSTVQVFTDSEYQLPYVLGSAHQGCLPPFPADVFMVPQYGYLTLNNGSQAVGRSSFYCLEYFPSQMLRTGNNFTFSYAFEDVPFHSSYAHSQSLDRLMNPLIDQYLYYLNKTQSNSGTLQQSRLLFSQAGPTSMSLQAKNWLPGPCYRQQRLSKQANDNNNSNFPWTAATKYHLNGRDSLVNPGPAMASHKDDEEKFFPMHGTLIFGKQGTNANDADLDNVMITDEEEIRTTNPVATEQYGTVSNNLQNSNTGPTTGTVNHQGALPGMVWQDRDVYLQGPIWAKIPHTDGHFHPSPLMGGFGLKHPPPQIMIKNTPVPANPPTNFSSAKFAPFITQYSTGQVSVEIEWELQKENSKRWNPEIQYTSNYNKSVNVDFTVDTNGVYSEPRPIGTRYLTRNL

SEQ ID NO: 582 - protein, 735 aa, Artificial Sequence
  Synthetic Polypeptide
MAADGYLPDWLEDTLSEGIRQWWKLKPGPPPPRPAERHQDDSRGLVLPGYKYLGPFNGLDKGEPVNEADAAALEHDKAYDRQLDSGDNPYLKYNHADAEFQERLKEDTSFGGNLGRAVFQAKKRVLEPLGLVEEPVKTAPGKKRPVEHSPAEPDSSSGTGKAGQQPARKRLNFGQTGDADSVPDPQPLGQPPAAPTSLGSTTMATGSGAPMADNNEGADGVGNSSGNWHCDSQWLGDRVITTSTRTWALPTYNNHLYKQISSQSGASNDNHYFGYSTPWGYFDFNRFHCHFSPRDWQRLINNNWGFRPKRLNFKLFNIQVKEVTQNDGTTTIANNLTSTVQVFTDSEYQLPYVLGSAHQGCLPPFPADVFMVPQYGYLTLNNGSQAVGRSSFYCLEYFPSQMLRTGNNFTFSYTFEDVPFHSSYAHSQSLDRLMNPLIDQYLYYLNRTQSNSGTLQQSRLLFSQAGPTSMSLQAKNWLPGPCYRQQRLSKQANDNNNSNFPWTAATKYHLNGRDSLVNPGPAMASHKDDEEKFFPMHGTLIFGKQGTNANDADLEHVMITDEEEIRTTNPVATEQYGNVSNNLQNSNTGPTTENVNHQGALPGMVWQDRDVYLQGPIWAKIPHTDGHFHPSPLMGGFGLKHPPPQIMIKNTPVPANPPTNFSAAKFASFITRYSTGQVSVEIEWELQKENSKRWNPEIQYTSNYNKSVNVDFTVDANGVYSEPRPIGTRYLTRNL

SEQ ID NO: 583 - protein, 735 aa, Artificial Sequence
  Synthetic Polypeptide
MAADGYLPDWLEDTLSEGIRQWWKLKPGPPPPRPAERHQDDSRGLVLPGYKYLGPFNGLDKGEPVNEADAAALEHDKAYDRQLDSGDNPYLKYNRADAEFQERLKEDTSFGGNLGRAVFQAKKRVLEPLGLVEEPVKTAPGKKRPVEHSPAEPDSSSGTGKAGQQPARKRLNFGQTGDADSVPDPQPLGQPPAAPTSLGSTTMATGSGAPMADNNEGADGVGNSSGNWHCDSQWLGDRVITTSTRTWALPTYNNHLYKQISSQSGASNDNHYFGYSTPWGYFDFNRFHCHFSPRDWQRLINNNWGFRPKRLNFKLFNIQVKEVTQNDGTTTIANNLTSTVQVFTDSEYQLPYVLGSAHQGCLPPFPADVFMVPQYGYLTLNNGSQAVGRSSFYCLEYFPSQMLRTGNNFTFSYTFEDVPFHSSYAHSQSLDRLMNPLIDQYLYYLNRTQSNSGTLQQSRLLFSQAGPTSMSLQAKNWLPGPCYRQQRLSKQANDNNNSNFPWTAATKYHLNGRDSLVNPGPAMASHKDDEEKFFPMHGTLIFGKQGTNANDTDLEHVMITDEEEIRTTNPVATEQYGNVSNNLQNSNTGPTTENVNHQGALPGMVWQDRDVYLQGPIWAKIPHTDGHFHPSPLMGGFGLKHPPPQIMIKNTPVPANPPTNFSAAKFASFITQYSTGQVSVEIEWELQKENSKRWNPEIQYTSNYNKSVNVDFTVDANGVYSEPRPIGTRYLTRNL

SEQ ID NO: 584 - protein, 735 aa, Artificial Sequence
  Synthetic Polypeptide
  misc_feature (628)..(628): Xaa can be any naturally occurring amino acid
MAADGYLPDWLEDTLSEGIRQWWKLKPGPPPPRPAERHQDDSRGLVLPGYKYLGPFNGLDKGEPVNEADAAALEHDKAYDRQLDSGDNPYLKYNHADAEFQERLKEDTSFGGNLGRAVFQAKKRVLEPLGLVEEPVKTAPGKKRPVEHSPAEPDSSSGTGKAGQQPARKRLNFGQTGDADSVPDPQPLGQPPAAPTSLGSTTMATGSGAPMADNNEGADGVGNSSGNWHCDSQWLGDRVITTSTRTWALPTYNNHLYKQISSQSGASNDNHYFGYSTPWGYFDFNRFHCHFSPRDWQRLINNNWGFRPKRLNFKLFNIQVKEVTQNDGTTTIANNLTSTVQVFTDSEYQLPYVLGSAHQGCLPPFPADVFMVPQYGYLTLNNGSQAVGRSSFYCLEYFPSQMLRTGNNFTFSYTFEDVPFHSSYAHSQSLDRLMNPLIDQYLYYLNRTQSNSGTLQQSRLLFSQAGPTSMSLQAKNWLPGPCYRQQRLSKQANDNNNSNFPWTAATKYHLNGRDSLVNPGPAMASHKDDEEKFFPMHGTLIFGKQGTNANDADLEHVMITDEEEIRTTNPVATEQYGNVSNNLQNSNTGPTTENVNHQGALPGMVWQDRDVYLQGPIWAKIPHTDGHXHPSPLMGGFGLKHPPPQIMIKNTPVPANPPTNFSAAKFASFITQYSTGQVSVEIEWELQKENSKRWNPEIQYTSNYNKSVNVDFTVDANGVYSEPRPIGTRYLTRNL

SEQ ID NO: 585 - protein, 735 aa, Artificial Sequence
  Synthetic Polypeptide
MAADGYLPDWLEDTLSEGIRQWWKLKPGPPPPRPAERHQDDSRGLVLPGYKYLGPFNGLDKGEPVNEADAAALEHDKAYDRQLDSGDNPYLKYNHADAEFQERLKEDTSFGGNLGRAVFQAKKRVLEPLGLVEEPVKTAPGKKRPAEHSPAEPDSSSGTGKAGQQPARKRLNFGQTGDADSVPDPQPLGQPPAAPTSLGSTTMATGSGAPMADNNEGADGVGNSSGNWHCDSQWLGDRVITTSTRTWALPTYNNHLYKQISSQSGASNDNHYFGYSTPWGYFDFNRFHCHFSPRDWQRLINNNWGFRPKRLNFKLFNIQVKEVTQNDGTTTIANNLTSTVQVFTDSEYQLPYVLGSAHQGCLPPFPADVFMVPQYGYLTLNNGSQAVGRSSFYCLEYFPSQMLRTGNNFTFSYTFEDVPFHSSYAHSQSLDRLMNPLIDQYLYYLNRTQSNSGTLQQSRLLFSQAGPTSMSLQAKNWLPGPCYRQQRLSKQANDNNNSNFPWTAATKYHLNGRDSLVNPGPAMASHKDDEEKFFPMHGTLIFGKQGTNANDADLEHVMITDEEEIRTTNPVATEQYGNVSNNLQNSNTGPTTENVNHQGALPGMVWQDRDVYLQGPIWAKIPHTDGHFHPSPLMGGFGLKHPPPQIMIKNTPVPANPPTNFSAAKFASFITQYSTGQVSVEIEWELQKENSKRWNPEIQYTSNYNKSVNVDFTVDANGVYSEPRPIGTRYLTRNL

SEQ ID NO: 586 - protein, 735 aa, Artificial Sequence
  Synthetic Polypeptide
MAADGYLPDWLEDTLSEGIRQWWKLKPGPPPPRPAERHQDDSRGLVLPGYKYLGPFNGLDKGEPVNEADAAALEHDKAYDRQLDSGDNPYLKYNHADAEFQERLKEDTSFGGNLGRAVFQAKKRVLEPLGLVEEPVKTAPGKKRPVEHSPAEPDSSSGTGKAGQQPARKRLNFGQTGDADSVPDPQPLGQPPAAPTSLGSTTMATGSGAPMADNNEGADGVGNSSGNWHCDSQWLGDRVITTSTRTWALPTYNNHLYKQISSQSGASNDNHYFGYSTPWGYFDFNRFHCHFSPRDWQRLINNNWGFRPKRLNFKLFNIQVKEVTQNDGTTTIANNLTSTVQVFTDSEYQLPYVLGSAHQGCLPPFPADVFMVPQYGYLTLNNGSQAVGRSSFYCLEYFPSQMLRTGNNFTFSYTFEDVPFHSSYAHSQSLDRLMNPLIDQYLYYLNRTQSNSGTLQQPRLLFSQAGPTSMSLQAKNWLPGPCYRQQRLSKQANDNNNSNFPWTAATKYHLNGRDSLVNPGPAMASHKDDEEKFFPMHGTLIFGKQGTNANDADLEHVMITDEEEIRTTNPVATEQYGNVSNNLQNSNTGPTTENVNHQGALPGMVWQDRDVYLQGPIWAKIPHTDGHFHPSPLMGGFGLKHPPPQIMIKNTPVPANPPTNFSAAKFASFITQYSTGQVSVEIEWELQKENSKRWNPEIQYTSNYNKSVNVDFTVDANGVYSEPRPIGTRYLTRNL

SEQ ID NO: 587 - protein, 735 aa, Artificial Sequence
  Synthetic Polypeptide
  misc_feature (552)..(552): Xaa can be any naturally occurring amino acid
MAADGYLPDWLEDTLSEGIRQWWKLKPGPPPPRPAERHQDDSRGLVLPGYKYLGPFNGLDKGEPVNEADAAALEHDKAYDRQLDSGDNPYLKYNHADAEFQERLKEDTSFGGNLGRAVFQAKKRVLEPLGLVEEPVKTAPGKKRPVEHSPAEPDSSSGTGKAGQQPARKRLNFGQTGDADSVPDPQPLGQPPAAPTSLGSTTMATGSGAPMADNNEGADGVGNSSGNWHCDSQWLGDRVITTSTRTWALPTYNNHLYKQISSQSGASNDNHYFGYSTPWGYFDFNRFHCHFSPRDWQRLINNNWGFRPKRLNFKLFNIQVKEVTQNDGTTTIANNLTSTVQVFTDSEYQLPYVLGSAHQGCLPPFPADVFMVPQYGYLTLNNGSQAVGRSSFYCLEYFPSQMLRTGNNFTFSYTFEDVPFHSSYAHSQSLDRLMNPLIDQYLYYLNRTQSNSGTLQQSRLLFSQAGPTSMSLQAKNWLPGPCYRQQRLSKQANDNNNSNFPWTAATKYHLNGRDSLVNPGPAMASHKDDEEKFFPMHGTLIFGKQGTNANDXDLEHVMITDEEEIRTTNPVATEQYGNVSNNLQNSNTGPTTENVNHQGALPGMVWQDRDVYLQGPIWAKIPHTDGHFHPSPLMGGFGLKHPPPQIMIKNTPVPANPPTNFSAAKFASFITQYSTGQVSVEIEWELQKENSKRWNPETQYTSNYNKSVNVDFTVDANGVYSEPRPIGTRYLTRNL

SEQ ID NO: 588 - protein, 735 aa, Artificial Sequence
  Synthetic Polypeptide
MAADGYLPDWLEDTLSEGIRQWWKLKPGPPLPRPAERHQDDSRGLVLPGYKYLGPFNGLDKGEPVNEADAAALEHDKAYDRQLDSGDNPYLKYNHADAEFQERLKEDTSFGGNLGRAVFQAKKRVLEPLGLVEEPVKTAPGKKRPVEHSPAEPDSSSGTGKAGQQPARKRLNFGQTGDADSVPDPQPLGQPPAAPTSLGSTTMATGSGAPMADNNEGADGVGNSSGNWHCDSQWLGDRVITTSTRTWALPTYNNHLYKQISSQSGASNDNHYFGYSTPWGYFDFNRFHCHFSPRDWQRLINNNWGFRPKRLNFKLFNIQVKEVTQNDGTTTIANNLTSTVQVFTDSEYRLPYVLGSAHQGCLPPFPADVFMVPQYGYLTLNNGSQAVGRSSFYCLEYFPSQMLRTGNNFTFSYTFEDVPFHSSYAHSQSLDRLMNPLIDQYLYYLNRTQSNSGTLQQSRLLFSQAGPTSMSLQAKNWLPGPCYRQQRLSKQANDNNNSNFPWTAATKYHLNGRDSLVNPGPAMASHKDDEEKFFPMHGTLIFGKQGTNANDADLEHVMITDEEEIRTTNPVATEQYGNVSNNLQNSNTGPTTENVNHQGALPGMVWQDRDVYLQGPIWAKIPHTDGHFHPSPLMGGFGLKHPPPQIMIKNTPVPANPPTNFSAAKFASFITQYSTGQVSVEIEWELQKENSKRWNPEIQYTSNYNKSVNVDFTVDANGVYSEPRPIGTRYLTRNL

SEQ ID NO: 589 - protein, 735 aa, Artificial Sequence
  Synthetic Polypeptide
MAADGYLPDWLEDTLSEGIRQWWKLKPGPPPPRPAERHQDDSRGLVLPGYKYLGPFNGLDKGEPVNEADAAALEHDKAYDRQLDSGDNPYLKYNHADAEFQERLKEDTSFGGNLGRAVFQAKKRVLEPLGLVEEPVKTAPGKKRPVEHSPAEPDSSSGTGKAGQQPARKRLNFGQTGDADSVPDPQPLGQPPAAPTSLGSTTMATGSGAPMADNNEGADGVGNSSGNWHCDSQWLGDRVITTSTRTWALPTYNNHLYKQISSQSGASNDNHYFGYSTPWGYFDFNRFHCHFSPRDWQRLINNNWGFRPKRLNFKLFNIQVKEVTQNDGTTTIANNLTSTVQVFTDSEYQLPYVLGSAHQGCLPPFPADVFMVPQYGYLTLNNGSQAVGRSSFYCLEYFPSQMLRTGNNFTFSYTFEDVPFHSSYAHSQSLDRLMNPLTDQYLYYLNRTQSNSGTLQQSRLLFSQAGPTSMSLQAKNWLPGPCYRQQRLSKQANDNNNSNFPWTAATKYHLNGRDSLVNPGPAMASHKDDEEKFFPMHGTLIFGKQGTNANDTDLEHVMITDEEEIRTTNPVATEQYGNVSNNLQNSNTGPTTENVNHQGALPGMVWQDRDVYLQGPIWAKIPHTDGHFHPSPLMGGFGLKHPPPQIMIKNTPVPANPPTNFSAAKFASFITQYSTGQVSVEIEWELQKENSKRWNPEIQYTSNYNKSVNVDFTVDANGVYSEPRPIGTRYLTRNL

SEQ ID NO: 590 - protein, 735 aa, Artificial Sequence
  Synthetic Polypeptide
MAADGYLPDWLEDTLSEGIRQWWKLKPGPPPPRPAERHQDDSRGLVLPGYKYLGPFNGLDKGEPVNEADAAALEHDKAYDRQLDSGDNPYLKYNHADAEFQERLKEDTSFGGNLGRAVFQAKKRVLEPLGLVEEPVKTAPGKKRPVEHSPAEPDSSSGTGKAGQQPARKRLNFGQTGDADSVPDPQPLGQPPAAPTSLGSTTMATGSGAPMADNNEGADGVGNSSGNWHCDSQWLGDRVITTSTRTWALPTYNNHLYRQISSQSGASNDNHYFGYSTPWGYFDFNRFHCHFSPRDWQRLINNNWGFRPKRLNFKLFNIQVKEVTQNDGTTTIANNLTSTVQVFTDSEYQLPYVLGSAHQGCLPPFPADVFMVPQYGYLTLNNGSQAVGRSSFYCLKYFPSQMLRTGNNFTFSYTFEDVPFHSSYAHSQSLDRLMNPLIDQYLYYLNRTQSNSGTLQQSRLLFSQAGPTSMSLQAKNWLPGPCYRQQRLSKQANDNNNSNFPWTAATKYHLNGRDSLVNPGPAMASHKDDEEKFFPLHGTLIFGKQGTNANDTDLEHVMITDEEEIRTTNPVATEQYGNVSNNLQNSNTGPTTENVNHQGALPGMVWQDRDVYLQGPIWAKIPHTDGHFHPSPLMGGFGLKHPPPQIMIKNTPVPANPPTNFSAAKFASFITQYSTGQVSVEIEWELQKENSKRWNPEIQYTSNYNKSVNVDFTVDANGVYSEPRPIGTRYLTRNL

SEQ ID NO: 591 - protein, 735 aa, Artificial Sequence
  Synthetic Polypeptide
MAADGYLPDWLEDTLSEGIRQWWKLKPGPPPPRPAERHQDDSRGLVLPGYKYLGPFNGLDKGEPVNEADAAALEHDKAYDRQLDSGDNPYLKYNHADAEFQERLKEDTSFGGNLGRAVFQAKKRVLEPLGLVEEPVKTAPGKKRPVEHSPAEPDSSSGTGKAGQQPARKRLNFGQTGDADSVPDPQPLGQPPAAPTSLGSTTMATGSGAPMADNNEGADGVGNSSGNWHCDSQWLGDRVITTSTRTWALPTYNNHLYRQISSQSGASNDNHYFGYSTPWGYFDFNRFHCHFSPRDWQRLINNNWGFRPKRLNFKLFNIQVKEVTQNDGTTTIANNLTSTVQVFTDSEYQLPYVLGSAHQGCLPPFPADVFMVPQYGYLTLNNGSQAVGRSSFYCLEYFPSQMLRTGNNFTFSYTFEDVPFHSSYAHSQSLDRLMNPLIDQYLYYLNRTQSNSGTLQQSRLLFSQAGPTSMSLQAKNWLPGPCYRQQRLSKQANDNNNSNFPWTAATKYHLNGRDSLVNPGPAMASHKDDEEKFFPMHGTLIFGKQGTNANDTDLEHVMITDEEEIRTTNPVATEQYGNVSNNLQNSNTGPTTENVNHQGALPGMVWQDRDVYLQGPIWAKIPHTDGHFHPSPLMGGFGLKHPPPQIMIKNTPVPANPPTNFSAAKFASFITQYSTGQVSVEIEWVLQKENSKRWNPEIQYTSNYNKSVNVDFTVDANGVYSEPRPIGTRYLTRNL

SEQ ID NO: 592 - protein, 735 aa, Artificial Sequence
  Synthetic Polypeptide
MAADGYLPDWLEDTLSEGIRQWWKLKPGPPPPRPAERHQDDSRGLVLPGYKYLGPFNGLDKGEPVNEADAAALEHDKAYDRQLDSGDNPYLKYNHADAEFQERLKEDTSFGGNLGRAVFQAKKRVLEPLGLVEEPVKTAPGKKRPVEHSPAEPDSSSGTGKAGQQPARKRLNFGQTGDADSVPDPQPLGQPPAAPTSLGSTTMATGSGAPMADNNEGADGVGNSSGNWHCDSQWLGDRVITTSTRTWALPTYNNHLYKQISSQSGASNDNHYFGYSTPWGYFDFNRFHCHFSPRDWQRLINNNWGFRPKRLNFKLFNIQVKEVTQNDGTTTIANNLISTVQVFTDSEYQLPYVLGSAHQGCLPPFPADVFMVPQYGYLTLNNGSQAVGRSSFYCLEYFPSQMLRTGNNFTFSYTFEDVPFHSSYAHSQSLDRLMNPLIDQYLYYLNRTQSNSGTLQQSRLLFSQAGPTSMSLQAKNWLPGPCYRQQRLSKQANDNNNSNFPWTAATKYHLNGRDSLVNPGPAMASHKDDEEKFFPMHGTLIFGKQGTNANDADLEHVMITDEEEIRTTNPVATEQYGNVSNNLQNSNTGPTTENVNHQGALPGMVWQDRDVYLQGPIWAKIPHTDGHFHPSPLMGGFGLKHPPPQIMIKNTPVPANPPTNFSAAKFASFITQYSTGQVSVEIEWELQKENSKRWNPEIQYTSNYNKSVNVDFTVDANGVYSEPRPIGTRYLTRNL

SEQ ID NO: 593 - protein, 734 aa, Artificial Sequence
  Synthetic Polypeptide
MAADGYLPDWLEDILSEGIRQWWKLKPGPPPPKPAERHKDDSRGLVLPGYKYLGPFNGLDKGEPVNEADAAALEHDKAYDRQLDSGDNPYLKYNHADAEFQERLKEDTSFGGNLGRAVFQAKKRVLEPLGLVEEPVKTAPGKKRPVEQSPAEPDSSSGTGKAGNQPARKRLNFGQTGDADSVPDPQPLGQPPAAPSGLGSTTMATGSGAPMADNNEGADGVGNSSGNWHCDSQWLGDRVITTSTRTWALPTYNNHLYKQISSQSGAANDNHYFGYSTPWGYFDFNRFHCHFSPRDWQRLINNNWGFRPKRLNFKLFNIQVKEVTQNDGTTTIANNLTSTVQVFTDSEYQLPYVLGSAHQGCLPPFPADVFMVPQYGYLTLNNGSQAVGRSSFYCLEYFPSQMLRTGNNFTFSYTFEDVPFHSSYAHSQSLDRLMNPLIDQYLYYLNKTQSNSGTLQQSRLLFSQAGPTSMSLQAKNWLPGPCYRQQRLSKQANDNNSNFPWTAATKYHLNGRDSLVNPGPAMASHKDDEEKFFPMHGTLIFGKQGTNANDADLDNVMITDEEEIRTTNPVATEQYGTVSNNLQNSNTGPTTGTVNHQGALPGMVWQDRDVYLQGPIWAKIPHTDGHFHPSPLMGGFGLKHPPPQIMIKNTPVPANPPTNFSSAKFASFITQYSTGQVSVEIEWELQKENSKRWNPEIQYTSNYNKSVNVDFTVDTNGVYSEPRPIGTRYLTRNL

SEQ ID NO: 594 - protein, 735 aa, Artificial Sequence
  Synthetic Polypeptide
MAADGYLPDWLEDILSEGIRQWWKLKPGPPPPKPAERHKDDSRGLVLPGYKYLGPFNGLDKGEPVNEADAAALEHDKAYDRQLDSGDNPYLKYNHADAEFQERLKEDTSFGGNLGRAVFQAKKRVLEPLGLVEEPVKTAPGKKRPVEQSPAEPDSSSGTGKAGNQPARKRLNFGQTGDADSVPDPQPLGQPPAAPSGLGSTTMATGSGAPMADNNEGADGVGNSSGNWHCDSQWLGDRVITTSTRTWALPTYNNHLYKQISSQSGAANDSHYFGYSTPWGYFDFNRFHCHFSPRDWQRLINNNWGFRPKRLNFKLFNIQVKEVTQNDGTTTIANNLTSTVQVFTDSEYQLPYVLGSAHQGCLPPFPADVFMVPQYGYLTLNNGSQAVGRSSFYCLEYFPSQMLRTGNNFTFSYTFEDVPFHSSYAHSQSLDRLMNPLIDQYLYYLNKTQSNSGTLQQSRLLFSQAGPTSMSLQAKNWLPGPCYRQQRLSKQANDNNNSNFPWTAATKYHLNGRDSLVNPGPAMASHKDDEEKFFPMHGTLIFGKQGTNANDADLDNVMITDEEEIRTTNPVATEQYGTVSNNLQNSNTGPTTGTVNHQGALPGMVWQDRDVYLQGPIWAKIPHTDGHFHPSPLMGGFGLKHPPPQIMIKNTPVPANPPTNFSSAKFASFITQYSTGQVSVEIEWELQKENSKRWNPEIQYTSNYNKSVNVDFTVDTNGVYSEPRPIGTRYLTRNL

SEQ ID NO: 595 - protein, 735 aa, Artificial Sequence
  Synthetic Polypeptide
MAADGYLPDWLEDTLSEGIRQWWKLKPGPPPPRPAERHQDDSRGLVLPGYKYLGPFNGLDKGEPVNEADAAALEHDKAYDRQLDSGDNPYLKYNHADAEFQERLKEDTSFGGNLGRAVFQAKKRVLEPLGLVEEPVKTAPGKKRPVEHSPAEPDSSSGTGKAGQQPARKRLNFGQTGDADSVPDPQPLGQPPAAPTSLGSTTMATGSGAPMADNNEGADGVGNSSGNWHCDSQWLGDRVITTSTRTWALPTYNNHLYKQISSQSGASNDNHYFGYSTPWGYFDFNRFHCHFSPRDWQRLINNNWGFRPKRLNFKLFNIQVKEVTQNDGTTTIANNLTSTVQVFTDSEYQLPYVLGSAHQGCLPPFPADVFMVPQYGYLTLNNGSQAVGRSSFYCLEYFPSQMLRTGNNFTFSYTFEDVPFHSSYAHSQSLDRLMNPLIDQYLYYLNRTQSNSGTLQQSRLLFSQAGPTSMSLQAKNWLPGPCYRQQRLSKQANDNNNSNFPWTAATKYHLNGRDSLVNPGPAMASHKDDEEKFFPMHGTLIFGKQGTNANDTDLEHVMITDEEEIRTTNPVATEQYGNVSNNLQNSNTGPTTENVNHQGALPGMVWQDRDVYLQGPIWAKIPHTDGHFHPSPLMGGFGLKHPPPQIMIKNTPVPANPPTNFSAAKFASFITQYSTGQVSVEIEWELQKENSKRWNPEIQYTSNYNKSVNVDFTVDANGVYSEPRPIGTRYLTRNL

SEQ ID NO: 596 - protein, 734 aa, Artificial Sequence
  Synthetic Polypeptide
MAADGYLPDWLEDILSEGIRQWWKLKPGPPPKPAERHKDDSRGLVLPGYKYLGPFNGLDKGEPVNEADAAALEHDKAYDRQLDSGDNPYLKYNHADAEFQERLKEDTSFGGNLGRAVFQAKKRVLEPLGLVEEPVKTAPGKKRPVEQSPAEPDSSSGTGKAGNQPARKRLNFGQTGDADSVPDPQPLGQPPAAPSGLGSTTMATGSGAPMADNNEGADGVGNSSGNWHCDSQWLGDRVITTSTRTWALPTYNNHLYKQISSQSGAANDNHYFGYSTPWGYFDFNRFHCHFSPRDWQRLINNNWGFRPKRLNFKLFNIQVKEVTQNDGTTTIANNLTSTVQVFTDSEYQLPYVLGSAHQGCLPPFPADVFMVPQYGYLTLNNGSQAVGRSSFYCLEYFPSQMLRTGNNFTFSYTFEDVPFHSSYAHSQSLDRLMNPLIDQYLYYLNKTQSNSGTLQQSRLLFSQAGPTSMSLQAKNWLPGPCYRQQRLSKQANDNNNSNFPWTAATKYHLNGRDSLVNPGPAMASHKDDEEKFFPMHGTLIFGKQGTNANDADLDNVMITDEEEIRTTNPVATEQYGTVSNNLQNSNTGPTTGTVNHQGALPGMVWQDRDVYLQGPIWAKIPHTDGHFHPSPLMGGFGLKHPPPQIMIKNTPVPANPPTNFSSAKFASFITQYSTGQVSVEIEWELQKENSKRWNPEIQYTSNYNKSVNVDFTVDTNGVYSEPRPIGTRYLTRNL

SEQ ID NO: 597 - protein, 735 aa, Artificial Sequence
  Synthetic Polypeptide
MAADGYLPDWLEDTLSEGIRQWWKLKPGPPPPRPAERHQDDSRGLVLPGYKYLGPFNGLDKGEPVNEADAAALEHDKAYDRQLDSGDNPYLKYNHADAEFQERLKEDTSFGGNLGRAVFQAKKRVLEPLGLVEEPVKTAPGKKRPVEHSPAEPDSSSGTGKAGQQPARKRLNFGQTGDADSVPDPQPLGQPPAAPTSLGSTTMATGSGAPMADNNEGADGVGNSSGNWHCDSQWLGDRVITTSTRTWALPTYNNHLYKQISSQSGASNDNHYFGYSTPWGYFDFNRFHCHFSPRDWQRLINNNWGFRPKRLNFKLFNIQVKEVTQNDGTTTIANNLTSTVQVFTDSEYQLPYVLGSAHQGCLPPFPADVFMVPQYGYLTLNNGSQAVGRSSFYCLEYFPSQMLRTGNNFTFSYTFGDVPFHSSYAHSQSLDRLMNPLIDQYLYYLNRTQSNSGTLQQSRLLFSQAGPTSMSLQAKNWLPGPCYRQQRLSKQANDNNNSNFPWTAATKYHLNGRDSLVNPGPAMASHKDDEEKFFPMHGTLIFGKQGTNANDADLEHVMITDEEEIRTTNPVATEQYGNVSNNLQNSNTGPTTENVNHQGALPGMVWQDRDVYLQGPIWAKIPHTDGHFHPSPLMGGFGLKHPPPQIMIKNTPVPANPPTNFSAAKFASFITQYSTGQVSVEIEWELQKENSKRWNPEIQYTSNYNKSVNVDFTVDANGVYSEPRPIGTRYLTRNL

SEQ ID NO: 598 - protein, 735 aa, Artificial Sequence
  Synthetic Polypeptide
MAADGYLPDWLEDTLSEGIRQWWKLKPGPPPPRPAERHQDDSRGLVLPGYKYLGPFNGLDKGEPVNEADAAALEHDKAYDRQLDSGDNPYLKYNHADAEFQERLKEDTSFGGNLGRAVFQAKKRVLEPLGLVEEPVKTAPGKKRPVEHSPAEPDSSSGTGKAGQQPARKRLNFGQTGDADSVPDPQPLGQPPAAPTSLGSTTMATGSGAPMADNNEGADGVGNSSGNWHCDSQWLGDRVITTSTRTWALPTYNNHLYKQISSQSGASNDSHYFGYSTPWGYFDFNRFHCHFSPRDWQRLINNNWGFRPKRLNFKLFNIQVKEVTQNDGTTTIANNLTSTVQVFTDSEYQLPYVLGSAHQGCLPPFPADVFMVPQYGYLTLNNGSQAVGRSSFYCLEYFPSQMLRTGNNFTFSYTFEDVPFHSSYAHSQSLDRLMNPLIDQYLYYLNRTQSNSGTLQQSRLLFSQAGPTSMSLQAKNWLPGPCYRQQRLSKQANDNNNSNFPWTAATKYHLNGRDSLVNPGPAMASHKDDEEKFFPMHGTLIFGKQGTNANDADLEHVMITDEEEIRTTNPVATEQYGNVSNNLQNSNTGPTTENVNHQGALPGMVWQDRDVYLQGPIWAKIPHTDGHFHPSPLMGGFGLKHPPPQIMIKNTPVPANPPTNFSAAKFASFITQYSTGQVSVEIEWELQKENSKRWNPEIQYTSNYNKSVNVDFTVDANGVYSEPRPIGTRYLTRNL

SEQ ID NO: 599 - protein, 735 aa, Artificial Sequence
  Synthetic Polypeptide
MAADGYLPDWLEDTLSEGIRQWWKLKPGPPPPRPAERHQDDSRGLVLPGYKYLGPFNGLDKGEPVNEADAAALEHDKAYDRQLDSGDNPYLKYNHADAEFQERLKEDTSFGGNLGRAVFQAKKRVLEPLGLVEEPVKTAPGKKRPVEHSPAEPDSSSGTGKAGQQPARKRLNFGQTGDADSVPDPQPLGQPPAAPTSLGSTTMATGSGAPMADNNEGADGVGNSSGNWHCDSQWLGDRVITTSTRTWALPTYNNHLYKQISSQSGASNDNHYFGYSTPWGYFDFNRFHCHFSPRDWQRLINNNWGFRPKRLNFKLFNIQVKEVTQNDGTTTIANNLTSTIQVFTDSEYQLPYVLGSAHQGCLPPFPADVFMVPQYGYLTLNNGSQAVGRSSFYCLEYFPSQMLRTGNNFTFSYTFEDVPFHSSYAHSQSLDRLMNPLIDQYLYYLNRTQSNSGTLQQSRLLFSQAGPTSMSLQAKNWLPGPCYRQQRLSKQANDNNNSNFPWTAATKYHLNGRDSLVNPGPAMASHKDDEEKFFPMHGTLIFGKQGTNANDADLEHVMITDEEEIRTTNPVATEQYGNVSNNLQNSNTGPTTENVNHQGALPGMVWQDRDVYLQGPIWAKIPHTDGHFHPSPLMGGFGLKHPPPQIMIKNTPVPANPPTNFSAAKFASFITQYSTGQVSVEIEWELQKENSKRWNPEIQYTSNYNKSVNVDFTVDANGVYSEPRPIGTRHLTRNL

SEQ ID NO: 600 - protein, 735 aa, Artificial Sequence
  Synthetic Polypeptide
MAADGYLPDWLEDTLSEGIRQWWKLKPGPPPPRPAERHQDDSRGLVLPGYKYLGPFNGLDKGEPVNEADAAALEHDKAYDRQLDSGDNPYLKYNHADAEFQERLKEDTSFGGNLGRAVFQAKKRVLEPLGLVEEPVKTAPGKKRPVEHSPAEPDSSSGTGKAGQQPARKRLNFGQTGDADSVPDPQPLGQPPAAPTSLGSTTMATGSGAPMADNNEGADGVGNSSGNWHCDSQWLGDRVITTSTRTWALPTYNNHLYKQISSQSGASNDNHYFGYSTPWGYFDFNRFHCHFSPRDWQRLINNNWGFRPKRLNFKLFNIQVKEVTQNDGTTTIANNLTSTVQVFTDSEYQLPYVLGSAHQGCLPPFPADVFMVPQYGYLTLNNGSQAVGRSSFYCLEYFPSQMLRTGNNFTFSYTFEDVPFHSSYAHSQSLDRLMNPLIDQYLYYLNRTQSNSGTLQQSGLLFSQAGPTSMSLQAKNWLPGPCYRQQRLSKQANDNNNSNFPWTAATKYHLNGRDSLVNPGPAMASHKDDEEKFFPMHGTLIFGKQGTNANDTDLEHVMITDEEEIRTTNPVATEQYGNVSNNLQNSNTGPTTENVNHQGALPGMVWQDRDVYLQGPIWAKIPHTDGHFHPSPLMGGFGLKHPPPQIMIKNTPVPANPPTNFSAAKFASFITQYSTGQVSVEIEWELQKENSKRWNPEIQYTSNYNKSVNVDFTVDANGVYSEPRPIGTRYLTRNL

SEQ ID NO: 601 - protein, 735 aa, Artificial Sequence
  Synthetic Polypeptide
MAADGYLPDWLEDTLSEGIRQWWKLKPGPPPPRPAERHQDDSRGLVLPGYKYLGPFNGLDKGEPVNEADAAALEHDKAYDRQLDSGDNPYLKYNHADAEFQERPKEDTSFGGNLGRAVFQAKKRVLEPLGLVEEPVKTAPGKKRPVEHSPAEPDSSSGTGKAGQQPARKRLNFGQTGDADSVPDPQPLGQPPAAPTSLGSTTMATGSGAPMADNNEGADGVGNSSGNWHCDSQWLGDRVITTSTRTWALPTYNNHLYKQISSQSGASNDNHYFGYSTPWGYFDFNRFHCHFSPRDWQRLINNNWGFRPKRLNFKLFNIQVKEVTQNDGTTTIANNLTSTVQVFTDSEYQLPYVLGSAHQGCLPPFPADVFMVPQYGYLTLNNGSQAVGRSSFYCLEYFPSQMLRTGNNFTFSYTFEDVPFHSSYAHSQSLDRLMNPLIDQYLYYLNRTQSNSGTLQQSRLLFSQAGPTSMSLQAKNWLPGPCYRQQRLSKQANDNNNSNFPWTAATKYHLNGRDSLVNPGPAMASHKDDEEKFFPMHGTLIFGKQGTNANDADLEHVMITDEEEIRTTNPVATEQYGNVSNNLQNSNTGPTTENVNHQGALPGMVWQDRDVYLQGPIWAKIPHTDGHFHPSPLMGGFGLKHPPPQIMIKNTPVPANPPTNFSAAKFASFITRYSTGQVSVEIEWELQKENSKRWNPEIQYTSNYNKSVNVDFTVDANGVYSEPRPIGTRYLTRNL

SEQ ID NO: 602 - protein, 735 aa, Artificial Sequence
  Synthetic Polypeptide
MAADGYLPDWLEDTLSEGIRQWWKLKPGPPPPKPAERHKDDSRGLVLPGYKYLGPFNGLDKGEPVNEADAAALEHDKAYDRQLDSGDNPYLKYNHADAELQERLKEDTSFGGNLGRAVFQAKKRVLEPLGLVEEPVKTAPGKKRPVEHSPVEPDSSSGTGKAGQQPARKRLNFGQTGDADSVPDPQPLGQPPAAPTSLGSTTMATGSGAPMADNNEGADGVGNSSGNWHCDSQWSGDRVITTSTRTWALPTYNNHLYKQISSQSGASNDNHYFGYSTPWGYFDFNRFHCHFSPRDWQRLINNNWGFRPKRLNFKLFNIQVKGVTQNDGTTTIANNLTSTVQVFTDSEYQLPYVLGSAHQGCLPPFPADVFMVPQYGYLTLNNGSQAVGRSSFYCLEYFPSQMLRTGNNFTFSYTFEDVPFHSSYAHSQSLDRLMNPLIDQYLYYLNKTQSNSGTLQQSRLLFSQAGPTSMSLQAKNWLPGPCYRQQRLSKQANDNNNSNFPWTAATKYHLNGRDSLVNPGPAMASHKDDEEKFFPMHGTLIFGKQGTNANDADLDNVMITDEEEIRTTNPVATEQYGTVSNNLQNSNTGPTTGTVNHQGALPGMVWQDRDVYLQGPIWAKIPHTDGHFHPSPLMGGFGLKHPPPQIMIKNTPVPANPPTNFSSAKFASFITQYSTGQVSVEIEWELQKENSKRWNPEIQYTSNYNKSVNVDFTVDTNGVYSEPRPIGTRYLTRNL

SEQ ID NO: 603 - protein, 735 aa, Artificial Sequence
  Synthetic Polypeptide
MAADGYLPDWLEDILSEGIRQWWKLKPGPPPPKPAERHKDDSRGLVLPGYKYLGPFNGLDKGEPVNEADAAALEHDKAYDRQLDSGDNPYLKYNHADAEFQERLKEDTSFGGNLGRAVFQAKKRVLEPLGLVEEPVKTAPGKKRPVEQSPAEPDSSSGTGKAGNQPARKRLNFGQTGDADSVPDPQPLGHPPAAPSGLGSTTMATGSGAPMADNNEGADGVGNSSGNWHCDSQWLGDRVITTSTRTWALPTYNNHLYKQISSQSGASNDNHYFGYSTPWGYFDFNRFHCHFSPRDWQRLINNNWGFRPKRLNFKLFNIQVKEVTQNDGTTTIANNLTSTVQVFTDSEYQLPYVLGSAHQGCLPPFPADVFMVPQYGYLTLNNGSQAVGRSSFYCLEYFPSQMLRTGNNFTFSYTFEDVPFHSSYAHSQSLDRLMNPLIDQYLYYLNKTQSNSGTLQQSRLLFSQAGPTSMSLQAKNWLPGPCYRQQRLSKQANDNNNSNFPWTAATKYHLNGRDSLVNPGPAMASHKDDEEKFFPMHGTLIFGKQGTNANDADLDNVMITDEEEIRTTNPVATEQYGTVSNNLQNSNTGPTTGTVNHQGALPGMVWQDRDVYLQGPIWAKIPHTDGHFHPSPLMGGFGLKHPPPQIMIKNTPVPANPPTNFSSAKFASFITQYSTGQVSVEIEWELQKENSKRWNPEIQYTSNYNKSVNVDFTVDTNGVYSEPRPIGTRYLTRNL

SEQ ID NO: 604 - protein, 735 aa, Artificial Sequence
  Synthetic Polypeptide
MAADGYLPDWLEDILSEGIRQWWKLKPGPPPPKPAERHKDDSRGLVLPGYKYLGPFNGLDKGEPVNEADAAALEHDKAYDRQLDSGDNPYLKYNHADAEFQERLKEDTSFGGNLGRAVFQAKKRVLEPLGLVEEPVKTAPGKKRPVEQSPAEPDSSSGTGKAGNQPARKRLNFGQTGDADSVPDPQPLGQPPAAPSGLGSTTMATGSGAPMADNNEGADGVGNSSGNWHCDSQWLGDRVITTSTRTWALPTYNNHLYKQISSQSGASNDNHYFGYSTPWGYFDFNRFHCHFSPRDWQRLINNNWGFRPKRLNFKLFNIQVKEVTQNDGTTTIANNLTSTVQVFTDSEYQLPYVLGSAHQGCLPPFPADVFMVPQYGYLTLNNGSQAVGRSSFYCLEYFPSQMLRTGNNFTFSYTFEDVPFHSSYAHSQSLDRLMNPLIDQYLYYLNKTQSNSGTLQQSRLLFSQAGPTSMSLQAKNWLPGPCYRQQRLSKQVNDNNNSNFPWTAATKYHLNGRDSLVNPGPAMASHKDDEEKFFPMHGTLIFGKQGTNANDADLDNVMITDEEEIRTTNPVATEQYGTVSNNLQNSNTGPTTGTVNHQGALPGMVWQDRDVYLQGPIWAKIPHTDGHFHPSPLMGGFGLKHPPPQIMIKNTPVPANPPTNFSSAKFASFITQYSTGQVSVEIEWELQKENSKRWNPEIQYTSNYNKSVNVDFTVDTNGVYSEPRPIGTRYLTRNL

SEQ ID NO: 605 - protein, 735 aa, Artificial Sequence
  Synthetic Polypeptide
MAADGYLPDWLEDILSEGIRQWWKLKPGPPPPKPAERHKDDSRGLVLPGYKYLGPFNGLDKGEPVNEADAAALEHDKAYDRQLDSGDNPYLKYNHADAEFQERLKEDTSFGGNLGRAVFQAKKRVLEPLGLVEEPVKTAPGKKRPVEQSPAEPDSSSGAGKAGNQPARKRLNFGQTGDADSVPDPQPLGQPPAAPSGLGSTTMATGSGAPMADNNEGADGVGNSSGNWHCDSQWLGDRVITTSTRTWALPTYNNHLYKQISSQSGASNDNHYFGYSTPWGYFDFNRFHCHFSPRDWQRLINNNWGFRPKRLNFKLFNIQVKEVTQNDGTTTIANNLTSTVQVFTDSEYQLPYVLGSAHQGCLPPFPADVFMVPQYGYLTLNNGSQAVGRSSFYCLEYFPSQMLRTGNNFTFSYTFEDVPFHSSYAHSQSLDRLMNPLIDQYLYYLTKTQSNSGTLQQSRLLFSQAGPTSMSLQAKNWLPGPCYRQQRLSKQANDNNNSNFPWTAATKYHLNGRDSLVNPGPAMASHKDDEEKFFPMHGTLIFGKQGTNANDADLDNVMITDEEEIRTTNPVATEQYGTVSNNLQNSNTGPTTGTVDHQGALPGMVWQDRDVYLQGPIWAKIPHTDGHFHPSPLMGGFGLKHPPPQIMIKNTPVPANPPTNFSSAKFASFITQYSTGQVSVEIEWELQKENSKRWNPEIQYTSNYNKSVNVDFTVDTNGVYSEPRPIGTRYLTRNL

SEQ ID NO: 606 - protein, 735 aa, Artificial Sequence
  Synthetic Polypeptide
MAADGYLPDWLEDILSEGIRQWWKLKPGPPPPKPAERHKDDSRGLVLPGYKYLGPFNGLDKGEPVNEADAAALEHDKAYDRQLDSGDNPYLKYNHADAEFQERLKEDTSFGGNLGRAVFQAKKRVLEPLGLVEEPVKTAPGKKRPVEQSPAEPDSSSGTGKAGNQPARKRLNFGQTGDADSVPDPQPLGQPPAAPSGLGSTTMATGSGAPMADNNEGADGVGNSSGNWHCDSQWLGDRVITTSTRTWALPTYNNHLYKQISSQSGASNDNHYFGYSTPWGYFDFNRFHCHFSPRDWQRLINNNWGFRPKRLNFKLFNIQVKEVTQNDGTTTIANNLTSTVQVFTDSEYQLPYVLGSAHQGCLPPFPADVFMVPQYGYLTLNNGSQAVGRSSFYCLEYFPSQMLRTGNNFTFSYTFEDVPFHSSYAHSQSLDRLMNPLIDQYLYYLNKTQSNSGTLQQSRLLLSQAGPTSMSLQAKNWLPGPCYRQQRLSKQANDNNNSNFPWTAATKYHLNGRDSLVNPGPAMASHKDDEEKFFPMHGTLIFGKQGTNANDADLDNVMITDEEEIRTTNPVATEQYGTVSNNLQNSNTGPTTGTVNHQGALPGMVWQDRDVYLQGPIWAKIPHTDGHFHPSPLMGGFGLKHPPPQIMIKNTPVPANPPTNFSSAKFASFITQYSTGQVSVEIEWELQKENSKRWNPEIQYTSNYNKSVNVDFTVDTNGVYSEPRPIGTRYLTRNL

SEQ ID NO: 607 - protein, 735 aa, Artificial Sequence
  Synthetic Polypeptide
MAADGYLPDWLEDTLSEGIRQWWKLKPGPPPPKPAERHKDDSRGLVLPGYKYLGPFNGLDKGEPVNEADAAALEHDKAYDRQLDSGDNPYLKYNHADAEFQERLKEDTSFGGNLGRAVFQAKKRVLEPLGLVEEPVKTAPGKKRPVEHSPVEPDSSSGTGKAGQQPARKRLNFGQTGDADSVPDPQPLGQPPAAPTSLGSTTMATGSGAPMADNNEGADGVDNSSGNWHCDSQWSGDRVITTSTRTWALPTYNNHLYKQISSQSGASNDNHYFGYSTPWGYFDFNRFHCHFSPRDWQRLINNNWGFRPKRLNFKLFNIQVKEVTQNDGTTTIANNLTSTVQVSTDSEYQLPYVLGSAHQGCLPPFPADVFMVPQYGYLTLNNGSQAVGRSSFYCLEYFPSQMLRTGNNFTFSYTFEDVPFHSSYAHSQSLDRLMNPLIDQYLYYLNKTQSNSGTLQQSRLLFSQAGPTSMSLQAKNWLPGPCYRQQRLSKQANDNNNSNFPWTAATKYHLNGRDSLVNPGPAMASHKDDEEKFFPMHGTLIFGKQGTNANDADLDNVMITDEEEIRTTNPVATEQYGTVSNNLQNSNTGPTTGTVNHQGALPGMVWQDRDVYLQGPIWAKIPHTDGHFHPSPLMGGFGLKHPPPQIMIKNTPVPANPPTNFSSAKFASFITQYSTGQVSVEIEWELQKENSKRWNPEIQYTSNYNKSVNVDFTVDTNGVYSEPRPIGTRYLTRNL

SEQ ID NO: 608 - protein, 735 aa, Artificial Sequence
  Synthetic Polypeptide
MAADGYLPDWLEDTLSEGIRQWWKLKPGPPPPKPAERHKDDSRGLVLPGYKYLGPFNGLDKGEPVNEADAAALEHDKAYDRQLDSGDNPYLKYNHADAEFQERLKEDTSFGGNLGRAVFQAKKRVLEPLGLVEEPVKTAPGKKRPVEHSPVEPDSSSGTGKAGQQPARKRLNFGQTGDADSVPDPQPLGQPPAAPTSLGSTTMATGSGAPMADNNEGADGVGNSSGNWHCDSQWSGDRVITTSTRTWALPTYNNHLYKQISSQSGASNDNHYFGYSTPWGYFDFNRFHCHFSPRDWQRLINNNWGFRPKRLNFKLFNIQVKEVTQNDGTTTIANNLTSTVQVFTDSEYQLPYVLGSAHQGCLPPFPADVFMVPQYGYLTLNNGSQAVGRSSFYCLEYFPSQMLRTGNNFTFSYTFEDVPFHSSYAHSQSLDRLMNPLIDQYLYYLNKTQSNSGTLQQSRLLFSQAGPTSMSLQAKNWLPGPCCRQQRLSKQANDNNNSNFPWTAATKYHLNGRDSLVNPGPAMASHKDDEEKFFPMHGTLIFGKQGTNANDADLDNVMITDEEEIRTTNPVATEQYGTVSNNLQNSNTGPTTGTVNHQGALPGMVWQDRDVYLQGPIWAKIPHTDGHFHPSPLMGGFGLKHPPPQIMIKNTPVPANPPTNFSSAKFASFITQYSTGQVSVEIEWELQKENSKRWNPEIQYTSNYNKSVNVDFTVDTNGVYSEPRPIGTRYLTRNL

SEQ ID NO: 609 - protein, 735 aa, Artificial Sequence
  Synthetic Polypeptide
MAADGYLPDWLEDILSEGIRQWWKLKPGPPPPKPAERHKDDSRGLVLPGYKYLGPFNGLDKGEPVNEADAAALEHDKAYDRQLDSGDNPYLKYNHADAEFQERLKEDTSFGGNLGRAVFQAKKRVLEPLGLVEEPVKTAPGKKRPVEQSPAEPDSSSGTGKAGNQPARKRLNFGQTGDADSVPDPQPLGQPPAAPSGLGSTTMATGSGAPMADNNEGADGVGNSSGNWHCDSQWLGDRVITTSTRTWALPTYNNHLYKQISSQSGASNDNHYFGYSTPWGYFDFNRFHCHFSPRDWQRLINNNWGFRPKRLNFKLFNIQVKEVTQNDGTTTIANNLTSTVQVFTDSEYQLPYVLGSAHQGCLPPFPADVFMVPQYGYLTLNNGSQAVGRSSFYCLEYFPSQMLRTGNNFTFSYTFEDVPFHSSYAHSQSLDRLMNPLIDQYLYYLNKTQSNSGTLQQSRLLFSQAGPTSMSLQAKNWLPGPCYRQQRLSKQANDNNNSNFPWTAATKYHLNGRDSLVNPGPAMASHKDDEEKFFPMHGTLIFGKQGTNANDADLDNVMITDEEEIRTTNPVATEQYGTVSNNLQNSNTGPTTGTVNHQGALPGMVWQDRDVYLQGPIWAKIPHTDGHFHPSPLMGGFGLKHPPPQIMIKNTPVPANPPTNFSSAKFASFITQYSTGQVSVEIERELQKENSKRWNPEIQYTSNYNKSVNVDFTVDTNGVYSEPRPIGTRYLTRNL

SEQ ID NO: 610 - protein, 735 aa, Artificial Sequence
  Synthetic Polypeptide
MAADGYLPDWLEDILSEGVRQWWKLKPGPPPPKPAERHKDDSRGLVLPGYKYLGPFNGLDKGEPVNEADAAALEHDKAYDRQLDSGDNPYLKYNHADAEFQERLKEDTSFGGNLGRAVFQAKKRVLEPLGLVEEPVKTAPGKKRPVEQSPAEPDSSSGTGKAGNQPARKRLNFGQTGDADSVPDPQPLGQPPAAPSGLGSTTMATGSGAPMADNNEGADGVGNSSGNWHCDSQWLGDRVITTSTRTWALPTYNNHLYKQISSQSGASNDNHYFGYSTPWGYFDFNRFHCHFSPRDWQRLINNNWGFRPKRLNFKLFNIQVKEVTQNDGTTTIANNLTSTVQVFTDSEYQLPYVLGSAHQGCLPPFPADVFMVPQYGYLTLNNGSQAVGRSSFYCLEYFPSQMLRTGNNFTFSYTFEDVPFHSSYAHSQSLDRLMNPLIDQYLYYLNKTQSNSGTLQQSRLLFSQAGPTSMSLQAKNWLPGPCYRQQRLSKQANDNNNSNFPWTAATKYHLNGRDSLVNPGPAMASHKDDEEKFFPMHGTLIFGKQGTNANDADLDNVMITDEEEIRTTNPVATEQYGTVSNNLQNSNTGPTTGTVNHQGALPGMVWQDRDVYLQGPIWAKIPHTDGHFHPSPLMGGFGLKHPPPQIMIKNTPVPANPPTNFSSAKFASFITQYSTGQVSVEIEWELQKENSKRWNPEIQYTSNYNKSVNVDFTVDTNGVYSEPRPIGTRYLTRNL

SEQ ID NO: 611 - protein, 735 aa, Artificial Sequence
  Synthetic Polypeptide
MAADGYLPDWLEDTLSEGIRQWWKLKPGPPPPKPAERHKDDSRGLVLPGYKYLGPFNGLDKGEPVNEADAAALEHDKAYDRQLDSGDNPYLKYNHADAEFQERLKEDTSFGGNLGRAVFQAKKRVLEPLGLVEEPVKTAPGKKRPVEHSPVEPDSSSGTGKAGQQPARKRLNFGQTGDADSVPDPQPLGQPPAAPTSLGSTTMATGSGAPMADNNEGADGVGNSSGNWHCDSQWSGDRVITTSTRTWALPTYNNHLYKQISSQSGASNDNHYFGYSTPWGYFDFNRFHCHFSPRDWQRLINNNWGFRPKRLNFKLFNIQVKEVTQNDGTTTIANNLTSTVQVSTDSEYQLPYVLGSAHQGCLPPFPADVFMVPQYGYLTLNNGSQAVGRSSFYCLEYFPSQMLRTGNNFTFSYTFEDVPFHSSYAHSQSLDRLMNPLIDQYLYYLNKTQSNSGTLQQSRLLFSQAGPTSMSLQAKNWLPGPCYRQQRLSKQANDNNNSNFPWTAATKYHLNGRDSLVNPGPAMASHKDDEEKFFPMHGTLIFGKQGTNANDADLDNVMITDEEEIRTTNPVATEQYGTVSNNLQNSNTGPTTGTVNHQGALPGMVWQDRDVYLQGPIWAKIPHTDGHFHPSPLMGGFGLKHPPPQIMIKNTPVPANPPTNFSSAKFASFITQYSTGQVSVEIEWELQKENSKRWNPEIQYTSNYNKSVNVDFTVDTNGVYSEPRPIGTRYLTRNL

SEQ ID NO: 612 - protein, 735 aa, Artificial Sequence
  Synthetic Polypeptide
MAADGYLPDWLEDILSEGIRQWWKLKPGPPPPKPAERHKDDSRGLVLPGYKYLGPFNGLDKGEPVNEADAAALEHDKAYDRQLDSGDNPYLKYNHADAEFQERLKEDTSFGGNLGRAVFQAKKRVLEPLGLVEEPVKTAPGKKRPVEQSPAEPDSSSGTGKAGNQPARKRLNFGQTGDADSVPDPQPLGQPPAAPSGLGSTTMATGSGAPMADNNEGADGVGNSSGNWHCDSQWLGDRVITTSTRTWALPTYNNHLYKQISSQSGASNDNHYFGYSTPWGYFDFNRFHCHFSPRDWQRLINNNWGFRPKRLNFKLFNIQVKEVTQNDGTTTIANNLTSTVQVFTDSEYQLPYVLGSAHQGCLPPFPADVFMVPQYGYLTLNNGSQAVGRSSFYCLEYFPSQMLRTGNNFTFSYTFEDVPFHSSYAHSQSLDRLMNPLIDQYLYYLNKTQSNSGTLQQSRLLFSQAGPTSMSLQAKNWLPGPCYRQQRLSKQANDNNNSNFPWTAATKYHLNGRDSLVNPGPAMASHKDDEEKFFPMHGTLIFGKQGTNANDADLDNVMITDEEEIRTTNPVATEQYGTVSNNLQNSNTGPTTGTVNHQGALPGMVWQDRDVYLQGPIWAKIPHTDGHFHPSPLMGGFGLKHPPPQIMIKNTPVPVNPPTNFSSAKFASFITQYSTGQVSVEIEWELQKENSKRWNPEIQYTSNYNKSVNVDFTVDTNGVYSEPRPIGTRYLTRNL

SEQ ID NO: 613 - protein, 735 aa, Artificial Sequence
  Synthetic Polypeptide
MAADGYLPDWLEDTLSEGIRQWWKLKPGPPPPKPAERHKDDSRGLVLPGYKYLGPFNGLDKGEPVNEADAAALEHDKAYDRQLDSGDNPYLKYNHADAEFQERLKEDTSFGGNLARAVFQAKKRVLEPLGLVEEPVKTAPGKKRPVEHSPAEPDSSSGTGKSGQQPARKRLNFGQTGDADSVPDPQPLGQPPAAPSGLGSTTMATGSGAPMADNNEGADGVGNSSGNWHCDSQWLGDRVITTSTRTWALPTYNNHLYKQISSQSGASNDNHYFGYSTPWGYFDFNRFHCHFSPRDWQRLINNNWGFRPKRLNFKLFNIQVKEVTQNDGTTTIANNLTSTVQVFTDSEYQLPYVLGSAHQGCLPPFPADVFMVPQYGYLTLNNGSQAVGRSSFYCLEYFPSQMLRTGNNFTFSYTFEDVPFHSSYAHSQSLDRLMNPLIDQYLYYLNKTQSNSGTLQQSRLLFSQAGPTSMSLQAKNWLPGPCYRQQRLSKQANDNNNSNFPWTAATKYHLNGRDSLVNPGPAMASHKDDEEKFFPMHGTLIFGKQGTNANDADLDNVMITDEEEIRTTNPVATEQYGTVSNNLQNSNTGPTTGTVNHQGALPGMVWQDRDVYLQGPIWAKIPHTDGHFHPSPLMGGFGLKHPPPQIMIKNTPVPANPPTNFSSAKFASFITQYSTGQVSVEIEWELQKENSKRWNPEIQYTSNYNKSVNVDFTVDTNGVYSEPRPIGTRYLTRNL

SEQ ID NO: 614 - protein, 735 aa, Artificial Sequence
  Synthetic Polypeptide
MAADGYLPDWLEDILSEGIRQWWKLKPGPPPPKPAERHKDDSRGLVLPGYKYLGPFNGLDKGEPVNEADAAALEHDKAYDRQLDSGDNPYLKYNHADAEFQERLKEDTSFGGNLGRAVFQAKKRVLEPLGLVEEPVKTAPGKKRPVEQSPAEPDSSSGTGKAGNQPARKRLNFGQTGDADSVPDPQPLGQPPAAPSGLGSTTMATGSGAPMADNNEGADGVGNSSGNWHCDSQWLGDRVITTSTRTWALPTYNNHLYKQISSQSGASNDNHYFGYSTPWGYFDFNRFHCHFSPRDWQRLINNNWGFRPKRLNFKLFNIQVKEVTQNDGTTTIANNLTSTVQVFTDSEYQLPYVLGSAHQGCLPPFPADVFMVPQYGYLTLNNGSQAVGRSSFYCLEYFPSQMLRTGNNFTFSYTFEDVPFHSSYAHSQSLDRLMNPLIDQYLYYLNKTQSNSGTLQQSRLLFSQAGPTSMSLQAKNWLPGPCYRQQRLSKQANDNNNSNFPWTAATKYHLNGRDSLVNPGPAMASHKDDEEKFFPMHGTLIFGKQGTNANDADLDNVMITDEEEIRTTNPVATEQYGTVSNNLQNSNTGPTTGTVNHQGALPGMVWQDRDVYLQGPIWAKIPHTDGHFHPSPLMGGFGLKHPPPQIMIKNTPVPANPPTNFSSAKFASFITQYSTGQVSVGIEWELQKENSKRWNPEIQYTSNYNKSVNVDFTVDTNGVYSEPRPIGTRYLTRNL

SEQ ID NO: 615 - protein, 734 aa, Artificial Sequence
  Synthetic Polypeptide
MAADGYLPDWLEDILSEGIRQWWKLKPGPPPPKPAERHKDDSRGLVLPGYKYLGPFNGLDKGEPVNEADAAALEHDKAYDRQLDSGDNPYLKYNHADAEFQERLKEDTSFGGNLGRAVFQAKKRVLEPLGLVEEPVKTAPGKKRPVEQSPAEPDSSSGTGKAGNQPARKRLNFGQTGDADSVPDPQPLGQPPAAPSGLGSTTMATGSGAPMADNNEGADGVGNSSGNWHCDSQWLGDRVITTSTRTWALPTYNNHLYKQISSQSGASNDNHYFGYSTPWGYFDFNRFHCHFSPRDWQRLINNNWGFRPKRLNFKLFNIQVKEVTQNDGTTTIANNLTSTVQVFTDSEYQLPYVLGSAHQGCLPPFPADVFMVPQYGYLTLNNGSQAVGRSSFYCLEYFPSQMLRTGNNFTFSYTFEDVPFHSSYAHSQSLDRLMNPLIDQYLYYLNKTQSNSGTLQQSRLLFSQAGPTSMSLQAKNWLPGPCYRQQRLSKQANDNNSNFPWTAATKYHLNGRDSLVNPGPAMASHKDDEEKFFPMHGTLIFGKQGTNANDADLDNVMITDEEEIRTTNPVATEQYGTVSNNLQNSNTGPTTGTVNHQGALPGMVWQDRDVYLQGPIWAKIPHTDGHFHPSPLMGGFGLKHPPPQIMIKNTPVPANPPTNFSSAKFASFITQYSTGQVSVEIEWELQKENSKRWNPEIQYTSNYNKSVNVDFTVDTNGVYSEPRPIGTRYLTRNL

SEQ ID NO: 616 - protein, 735 aa, Artificial Sequence
  Synthetic Polypeptide
MAADGYLPDWLEDTLSEGIRQWWKLKPGPPPPKPAERHKDDSRGLVLPGYKYLGPFNGLDKGEPVNEADAAALEHDKAYDRQLDSGDNPYLKYNHADAEFQERLKEDTSFGGNLGRAVFQAKKRVLEPLGLVVEPVKTAPGKKRPVEHSPVEPDSSSGTGKAGQQPARKRLNFDQTGGADSVPDPQPLGQPPAAPTSLGSTTMATGSGAPMADNNEGADGVGNSSGNWHCDSQWSGDRVITTSTRTWALPTYNNHLYKQISSRSGASNDNHYFGYSTPWGYFDFNGFHCHFSPRDWQRLINNNWGFRPKRLNFKLFNIQVKEVTQNDGTTTIANNLTSTVQVFTDSEYQLPHVLGSAHQGCLPPFPADVFMVPQYGYLTLNNGSQAVGRSSFYCPGYFPSQMLRTGNNFTFSYTFEDVPFHSSYAHSQSLDRLMNPLIDQYLYYLNKTQSNSGTLQQSRLLFSQAGPTSMSLQAKNWLPGPCYRQQRLSKQANGNNNSNFPWTAATKYHLNGRDSLVNPGPAMASHKDDEEKFFPMHGTLIFGKQGTNANDADLDNVMITDEEEIRTTNPVATEQYGTVSNNLQNSNTGPTTGTVNHQGALPGMVWQDRDVYLQGPIWAKIPHTDGHFHPSPLMGGFGLKHPPPQIMIKNTPVPANPPTNFSSAKFASFITQYSTGQVSVEIEWELQKENSKRWNPEIQYTSNYNKSVNVDFTVDTNGVYSEPRPIGTRYLTRNL

SEQ ID NO: 617 - protein, 734 aa, Artificial Sequence
  Synthetic Polypeptide
MAADGYLPDWLEDTLSEGIRQWWKLKPGPPPPKPAERHKDDSRGLVLPGYKYLGPFNGLDKGEPVNEADAAALEHDKAYDRQLDSGDNPYLKYNHADAEFQERLKEDTSFGGNLGRAVFQAKKRVLEPLGLVEEPVKTAPGKKRPVEHSPVEPDSSSGTGKAGQQPARKRLNFGQTGDADSVPDPQPLGQPPAAPTSLGSTTMATGSGAPMADNNEGADGVGNSSGNWHCDSQWSGDRVITTSTRTWALPTYNNHLYKQISSQSGASNDNHYFGYSTPWGYFDFNRFHCHFSPRDWQRLINNNWGFRPKRLNFKLFNIQVKEVTQNDGTTTIANNLTSTVQVFTDSEYQLPYVLGSAHQGCLPPFPADVFMVPQYGYLTLNNGSQAVGRSSFYCLEYFPSQMLRTGNNFTFSYTFEDVPFHSSYAHSQSLDRLMNPLIDQYLYYLNKTQSNSGTLQQSRLLFSQAGPTSMSLQAKNWLPGPCYRQQRLSKQANDNNSNFPWTAATKYHLNGRDSLVNPGPAMASHKDDEEKFFPMHGTLIFGKQGTNANDADLDNVMITDEEEIRTTNPVATEQYGTVSNNLQNSNTGPTTGTVNHQGALPGMVWQDRDVYLQGPIWAKIPHTDGHFHPSPLMGGFGLKHPPPQIMIKNTPVPANPPTNFSSAKFASFITQYSTGQVSVEIEWELQKENSKRWNPEIQYTSNYNKSVNVDFTVDTNGVYSEPRPIGTRYLTRNL

SEQ ID NO: 618 - protein, 735 aa, Artificial Sequence
  Synthetic Polypeptide
MAADGYLPDWLEDILSEGIRQWWKLKPGPPPPKPAERHKDDSRGLVLPGYKYLGPFNGLDKGEPVNEADAAALEHDKAYDRQLDSGDNPYLKYNHADAEFQERLKEDTSFGGNLGRAVFQAKKRVLEPLGLVEEPVKTAPGKKRPVEQSPAEPDSSSGTGKAGNQPARKRLNFGQTGDADSVPDPQPLGQPPAAPSGLGSTTMATGSGAPMADNNEGADGVGNSSGNWHCDSQWLGDRVITTSTRTWALPTYNNHLYKQISSQSGASNDNHYFGYSTPWGYFDFNRFHCHFSPRDWQRLINNNWGFRPKRLNFKLFNIQVKEVTQNDGTTTIANNLTSTVQVFTDSEYQLPYVLGSAHQGCLPPFPADVFMVPQYGYLTLNNGSQAVGRSSFYCLEYFPSQMLRTGNNFTFSYTFEDVPFHSSYAHSQSLDRLMNPLIDQYLYYLNKTQSNSGTLQQSRLLFSQAGPTSMSLQAKNWLPGPCYRQQRLSKQANDNNNSNFPWTAATKYHLNGRDSLVNPGPAMASHKDDEEKFFPMHGTLIFGKQGTNANDADLDNVMITDEEEIRTTNPVATEQYGTVSNNLQNSNTGPTTGTVNHQGALPGMVWQDRDVYLQGPIWAKIPHTDGHFHPSPLMGGFGLKHPPPQIMIKNTPVPANPPTNFSSAKFASFITQYSTGQVSVGIEWVLQKENSKRWNPEIQYTSNYNKSVNVDFTVDTNGVYSEPRPIGTRYLTRNL

SEQ ID NO: 619 - protein, 735 aa, Artificial Sequence
  Synthetic Polypeptide
MAADGYLPDWLEDTLSEGIRQWWKLKPGPPPPKPAERHKDDSRGLVLPGYKYLGPFNGLDKGEPVNEADAAALEHDKAYDRQLDSGDNPYLKYNHADAEFQERLKEDTSFGGNLARAVFQAKKRVLEPLGLVEEPVKTAPGKKRPVEQSPAEPDSSSGTGKAGNQPARKRLNFGQTGDADSVPDPQPLGQPPAAPSGLGSTTMATGSGAPMADNNEGADGVGNSSGNWHCDSQWLGDRVITTSTRTWALPTYNNHLYKQISSQSGASNDNHYFGYSTPWGYFDFNRFHCHFSPRDWQRLINNNWGFRPKRLNFKLFNIQVKEVTQNDGTTTIANNLTSTVQVFTDSEYQLPYVLGSAHQGCLPPFPADVFMVPQYGYLTLNNGSQAVGRSSFYCLEYFPSQMLRTGNNFTFSYTFEDVPFHSSYAHSQSLDRLMNPLIDQYLYYLNKTQSNSGTLQQSRLLFSQAGPTSMSLQAKNWLPGPCYRQQRLSKQANDNNNSNFPWTAATKYHLNGRDSLVNPGPAMASHKDDEEKFFPMHGTLIFGKQGTNANDADLDNVMITDEEEIRTTNPVATEQYGTVSNNLQNSNTGPTTGTVNHQGALPGMVWQDRDVYLQGPIWAKIPHTDGHFHPSPLMGGFGLKHPPPQIMIKNTPVPANPPTNFSSAKFASFITQYSTGQVSVEIEWELQKENSKRWNPEIQYTSNYNKSVNVDFTVDTNGVYSEPRPIGTRYLTRNL

SEQ ID NO: 620 - protein, 735 aa, Artificial Sequence
  Synthetic Polypeptide
MAADGYLPDWLEDILSEGIRQWWKLKPGPPPPKPAERHKDDSRGLVLPGYKYLGPFNGLDKGEPVNEADAAALEHDKAYDRQLDSGDNPYLKYNHADAEFQERLKEDTSFGGNLGRAVFQAKKRVLEPLGLVEEPVKTAPGKKRPVEQSPAEPDSSSGAGKAGNQPARKRLNFGQTGDADSVPDPQPLGQPPAAPSGLGSTTMATGSGAPMADNNEGADGVGNSSGNWHCDSQWLGDRVITTSTRTWALPTYNNHLYKQISSQSGASNDNHYFGYSTPWGYFDFNRFHCHFSPRDWQRLINNNWGFRPKRLNFKLFNIQVKEVTQNDGTTTIANNLTSTVQVFTDSEYQLPYVLGSAHQGCLPPFPADVFMVPQYGYLTLNNGSQAVGRSSFYCLEYFPSQMLRTGNNFTFSYTFEDVPFHSSYAHSQSLDRLMNPLIDQYLYYLNKTQSNSGTLQQSRLLFSQAGPTSMSLQAKNWLPGPCYRQQRLSKQANDNNNSNFPWTAATKYHLNGRDSLVNPGPAMASHKDDEEKFFPMHGTLIFGKQGTNANDADLDNVMITDEEEIRTTNPVATEQYGTVSNNLQNSNTGPTTGTVNHQGALPGMVWQDRDVYLQGPIWAKIPHTDGHFHPSPLMGGFGLKHPPPQIMIKNTPVPANPPTNFSSAKFASFITQYSTGQVSVEIEWELQKENSKRWNPEIQYTSNYNKSVNVDFTVDTNGVYSEPRPIGTRYLTRNL

SEQ ID NO: 621 - protein, 735 aa, Artificial Sequence
  Synthetic Polypeptide
MAADGYLPDWLKDILSEGIRQWWKLKPGPPPPKPAERHKDDSRGLVLPGYKYLGPFNGLDKGEPVNEADAAALEHDKAYDRQLDSGDNPYLKYNHADAEFQERLKEDTSFGGNLGRAVFQAKKRVLEPLGLVEEPVKTAPGKKRPVEQSPAEPDSSSGTGKAGNQPARKRLNFGQTGDADSVPDPQPLGQPPAAPSGLGSTTMATGSGAPMADNNEGADGVGNSSGNWHRDSQWLGDRVITTSTRTWALPTYNNHLYKQISSQSGASNDNHYFGYSTPWGYFDFNRFHCHFSPRDWQRLINNNWGFRPKRLNFKLFNIQVKEVTQNDGTTTIANNLTSTVQVFTDSEYQLPYVLGSAHQGCLPPFPADVFMVPQYGYLTLNNGSQAVGRSSFYCLEYFPSQMLRTGNNFTFSYTFEDVPFHSSYAHSQSLDRLMNPLIDQYLYYLNKTQSNSGTLQQSRLLFSQAGPTSMSLQAKNWLPGPCYRQQRLSKQANDNNNSNFPWTAATKYHLNGRDSLVNPGPAMASHKDDEEKFFPMHGTLIFGKQGTNANDADLDNVMITDEEEIRTTNPVATEQYGTVSNNLQNSNTGPTTGTVNHQGALPGMVWQDRDVYLQGPIWAKIPHTDGHFHPSPLMGGFGLKHPPPQIMIKNTPVPVNPPTNFSSAKFASFITQYSTGQVSVEIEWELQKENSKRWNPEIQYTSNYNKSVNVDFTVDTNGVYSEPRPIGTRYLTRNL

SEQ ID NO: 622 - protein, 735 aa, Artificial Sequence
  Synthetic Polypeptide
MAADGYLPDWLEDILSEGIRRWWKLKPGPPPPKPAERHKDDSRGLVLPGYKYLGPFNGLDKGEPVNEADAAALEHDKAYDRQLDSGDNPYLKYNHADAEFQERLKEDTSFGGNLGRAVFQAKKRVLEPLGLVEEPVKTAPGKKRPVEQSPAEPDSSSGTGKAGNQPARKRLNFGQTGDADSVPDPQPLGQPPAAPSGLGSTTMATGSGAPMADNNEGADGVGNSSGNWHCDSQWLGDRVITTSTRTWALPTYNNHLYKQISSQSGASNDNHYFGYSTPWGYFDFNRFHCHFSPRDWQRLINNNWGFRPKRLNFKLFNIQVKEVTQNDGTTTIANNLTSTVQVFTDSEYQLPYVLGSAHQGCLPPFPADVFMVPQYGYLTLNNGSQAVGRSSFYCLEYFPSQMLRTGNNFTFSYTFEDVPFHSSYAHSQSLDRLMNPLIDQYLYYLNKTQSNSGTLQQSRLLFSQAGPTSMSLQAKNWLPGPCYRQQRLSKQANDNNNSNFPWTAATKYHLNGRDSLVNPGPAMASHKDDEEKFFPMHGTLIFGKQGTNANDADLDNVMITDEEEIRTTNPVATERYGTVSNNLQNSNTGPTTGTVNHQGALPGMVWQDRDVYLQGPIWAKIPHTDGHFHPSPLMGGFGLKHPPPQIMIKNTPVPANPPTNFSSAKFASFITQYSTGQVSVEIEWELQKENSKRWNPEIQYTSNYNKSVNVDFTVDTNGVYSEPRPIGTRYLTRNL

SEQ ID NO: 623 - protein, 735 aa, Artificial Sequence
  Synthetic Polypeptide
MAADGYLPDWLEDTLSEGIRQWWKLKPGPPPPKPAERHKDDSRGLVLPGYKYLGPFNGLDKGEPVNEADAAALEHDKAYDRQLDSGDNPYLKYNHADAEFQERLKEDTSFGGNLARAVFQAKKRVLEPLGLVEEPVKTAPGKKRPVEHSPAEPDSSSGTGKSGQQPARKRLNFGQTGDADSVPDPQPLGQPPAAPSGLGTNTMASGSGAPMADNNEGADGVGNSSGNWHCDSQWLGDRVITTSTRTWALPTYNNHLYKQISSQSGASNDNHYFGYSTPWGYFDFNRFHCHFSPRDWQRLINNNWGFRPKRLNFKLFNIQVKEVTQNDGTTTIANNLTSTVQVFTDSEYQLPYVLGSAHQGCLPPFPADVFMVPQYGYLTLNNGSQAVGRSSFYCLEYFPSQMLRTGNNFTFSYTFEDVPFHSSYAHSQSLDRLMNPLIDQYLYYLNKTQSNSGTLQQSRLLFSQAGPTSMSLQAKNWLPGPCYRQQRLSKQANDNNNSNFPWTAATKYHLNGRDSLVNPGPAMASHKDDEEKFFPMHGTLIFGKQGTNANDADLDNVMITDEEEIRTTNPVATEQYGTVSNNLQNSNTGPTTGTVNHQGALPGMVWQDRDVYLQGPIWAKIPHTDGHFHPSPLMGGFGLKHPPPQIMIKNTPVPANPPTNFSSAKFASFITQYSTGQVSVEIEWELQKENSKRWNPEIQYTSNYNKSVNVDFTVDTNGVYSEPRPIGTRYLTRNL

SEQ ID NO: 624 - protein, 735 aa, Artificial Sequence
  Synthetic Polypeptide
MAADGYLPDWLEDTLSEGIRQWWKLKPGPPPPKPAERHKDDSRGLVLPGYKYLGPFNGLDKGEPVNEADAAALEHDKAYDRQLDSGDNPYLKYNHADAEFQERLKEDTSFGGNLARAVFQAKKRVLEPLGLVEEPVKTAPGKKRPVEHSPAEPDSSSGTGKSGQQPARKRLNFGQTGDADSVPDPQPLGQPPAAPSGLGTNTMASGSGAPMADNNEGADGVGNSSGNWHCDSTWMGDRVITTSTRTWALPTYNNHLYKQISSQSGASNDNHYFGYSTPLGYFDFNRFHCHFSPRDWQRLINNNWGFRPKRLNFKLFNIQVKEVTQNDGTTTIANNLTSTVQVFTDSEYQLPYVLGSAHQGCLPPFPADVFMVPQYGYLTLNNGSQAVGRSSFYCLEYFPSQMLRTGNNFTFSYTFEDVPFHSSYAHSQSLDRLMNPLIDQYLYYLNKTQSNSGTLQQSRLLFSQAGPTSMSLQAKNWLPGPCYRQQRLSKQANDNNNSNFPWTAATKYHLNGRDSLVNPGPAMASHKDDEEKFFPMHGTLIFGKQGTNANDADLDNVMITDEEEIRTTNPVATEQYGTVSNNLQNSNTGPTTGTVNHQGALPGMVWQDRDVYLQGPIWAKIPHTDGHFHPSPLMGGFGLKHPPPQIMIKNTPVPANPPTNFSSAKFASFITQYSTGQVSVEIEWELQKENSKRWNPEIQYTSNYNKSVNVDFTVDTNGVYSEPRPIGTRYLTRNL

SEQ ID NO: 625 - protein, 735 aa, Artificial Sequence
  Synthetic Polypeptide
MAADGYLPDWLEDTLSEGIRQWWKLKPGPPPPKPAERHKDDSRGLVLPGYKYLGPFNGLDKGEPVNEADAAALEHDKAYDRQLDSGDNPYLKYNHADAEFQERLKEDTSFGGNLARAVFQAKKRVLEPLGLVEEPVKTAPGKKRPVEHSPAEPDSSSGTGKSGQQPARKRLNFGQTGDADSVPDPQPLGQPPAAPSGLGTNTMASGSGAPMADNNEGADGVGNSSGNWHCDSTWMGDRVITTSTRTWALPTYNNHLYKQISSQSGASNDNHYFGYSTPWGYFDFNRFHCHFSPRDWQRLINNNWGFRPKRLNFKLFNIQVKEVTQNDGTTTIANNLTSTVQVFTDSEYQLPYVLGSAHQGCLPPFPADVFMVPQYGYLTLNNGSQAVGRSSFYCLEYFPSQMLRTGNNFTFSYTFEDVPFHSSYAHSQSLDRLMNPLIDQYLYYLNKTQSNSGTLQQSRLLFSQAGPTSMSLQAKNWLPGPCYRQQRLSKQANDNNNSNFPWTAATKYHLNGRDSLVNPGPAMASHKDDEEKFFPMHGTLIFGKQGTNANDADLDNVMITDEEEIRTTNPVATEQYGTVSNNLQNSNTGPTTGTVNHQGALPGMVWQDRDVYLQGPIWAKIPHTDGHFHPSPLMGGFGLKHPPPQIMIKNTPVPANPPTNFSSAKFASFITQYSTGQVSVEIEWELQKENSKRWNPEIQYTSNYNKSVNVDFTVDTNGVYSEPRPIGTRYLTRNL

SEQ ID NO: 626 - protein, 735 aa, Artificial Sequence
  Synthetic Polypeptide
MAADGYLPDWLEDTLSEGIRQWWKLKPGPPPPKPAERHKDDSRGLVLPGYKYLGPFNGLDKGEPVNEADAAALEHDKAYDRQLDSGDNPYLKYNHADAEFQERLKEDTSFGGNLGRAVFQAKKRVLEPLGLVVEPVKTAPGKKRPVEHSPVEPDSSSGTGKAGQQPARKRLNFDQTGDADSVPDPQPLGQPPAAPTSLGSTTMATGSGAPMADNNEGADGVGNSSGNWHCDSQWSGDRVITTSTRTWALPTYNNHLYKQISSRSGASNDNHYFGYSTPWGYFDFNGFHCHFSPRDWQRLINNNWGFRPKRLNFKLFNIQVKEVTQNDGTTTIANNLTSTVQVFTDSEYQLPHVLGSAHQGCLPPFPADVFMVPQYGYLTLNNGSQAVGRSSFYCPGYFPSQMLRTGNNFTFSYTFEDVPFHSSYAHSQSLDRLMNPLIDQYLYYLNKTQSNSGTLQQSRLLFSQAGPTSMSLQAKNWLPGPCYRQQRLSKQANGNNNSNFPWTAATKYHLNGRDSLVNPGPAMASHKDDEEKFFPMHGTLIFGKQGTNANDADLDNVMITDEEEIRTTNPVATEQYGTVSNNLQNSNTGPTTGTVNHQGALPGMVWQDRDVYLQGPIWAKIPHTDGHFHPSPLMGGFGLKHPPPQIMIKNTPVPANPPTNFSSAKFASFITQYSTGQVSVEIEWELQKENSKRWNPEIQYTSNYNKSVNVDFTVDTNGVYSEPRPIGTRYLTRNL

SEQ ID NO: 627 - protein, 735 aa, Artificial Sequence
  Synthetic Polypeptide
MAADGYLPDWLEDILSEGIRQWWKLKPGPPPPKPAERHKDDSRGLVLPGYKYLGPFNGLDKGEPVNEADAAALEHDKAYDRQLDSGDNPYLKYNHADAEFQGRLKEDTSFGGNLGRAVFQAKKRVLEPLGLVEEPVKTAPGKKRPVEQSPAEPDSSSGTGKAGNQPARKRLNFGQTGDADSVPDPQPLGQPPAAPSGLGSTTMATGSGAPMADNNEGADGVGNSSGNWHCDSQWLGDRVITTSTRTWALPTYNNHLYKQISSQSGASNDNHYFGYSTPWGYFDFNRFHCHFSPRDWQRLINNNWGFRPKRLNFKLFNIQVKEVTQNDGTTTIANNLTSTVQVFTDSEYQLPYVLGSAHQGCLPPFPADVFMVPQYGYLTLNNGSQAVGRSSFYCLEYFPSQMLRTGNNFTFSYTFEDVPFHSSYAHSQSLDRLMNPLIDQYLYYLNKTQSNSGTLQQSRLLFSQAGPTSMSLQAKNWLPGPCYRQQRLSKQANDNNNSNFPWTAATKYHLNGRDSLVNPGPAMASHKDDEEKFFPMHGTLIFGKQGTNANDADLDNVMITDEEEIRTTNPVATEQYGTVSNNLQNSNTGPTTGTVNHQGALPGMVWQDRDVYLQGPIWAKIPHTDGHFHPSPLMGGFGLKHPPPQIMIKNTPVPANPPTNFSSAKFASFITQYSTGQVSVEIEWELQKENSKRWNPEIQYTSNYNKSVNVDFTVDTNGVYSEPRPIGTRYLTRNL

SEQ ID NO: 628 - protein, 735 aa, Artificial Sequence
  Synthetic Polypeptide
MAADGYLPDWLEDILSEGIRQWWKLKPGPPPPKPAERHKDDSRGLVLPGYKYLGPFNGLDKGEPVNEADAAALEHDKAYDRQLDSGDNPYLKYNHADAEFQERLKEDTSFGGNLGRAVFQAKKRALEPLGLVEEPVKTAPGKKRPVEQSPAEPDSSSGTGKAGNQPARKRSNFGQTGDADSVPDPQPLGQPPAAPSGLGSTTMATGSGAPMADNNEGADGVGNSSGNWHCDSQWLGDRVITTSTRTWALPTYNNHLYKQISSQSGASNDNHYFGYSTPWGYFDFNRFHCHFSPRDWQRLINNNWGFRPKRLNFKLFNIQVKEVTQNDGTTTIANNLTSTVQVFTDSEYQLPYVLGSAHQGCLPPFPADVFMVPQYGYLTLNNGSQAVGRSSFYCLEYFPSQMLRTGNNFTFSYTFEDVPFHSSYAHSQSLDRLMNPLIGQYLYYLNKTQSNSGTLQQSRLLFSQAGPTSMSLQAKNWLPGPCYRQQRLSKQANDNNNSNFPWTAATKYHLNGRDSLVNPGPAMASHKDDEEKFFPMHGTLIFGKQGTNANDADLDNVMITDEEEIRTTNPVATEQYGTVSNNLQNSNTGPTTGTVNHQGALPGMVWQDRDVYLQGPIWAKIPHTDGHFHPSPLMGGFGLKHPPPQIMIKNTPVPANPPTNFSSAKFASFITQYSTGQVSVEIEWELQKENSKRWNPEIQYTSNYNKSVNVDFTVDTNGVYSEPRPIGTRYLTRNL

SEQ ID NO: 629 - protein, 738 aa, Artificial Sequence
  Synthetic Polypeptide
MAADGYLPDWLEDNLSEGIREWWALKPGAPKPKANQQKQDDGRGLVLPGYKYLGPFNGLDKGEPVNAADAAALEHDKAYDQQLQAGDNPYLRYNHADAEFQERLQEDTSFGGNLGRAVFQAKKRVLEPLGLVEEGAKTAPGKERPVEPSPQRSPDSSTGIGKEGQQPARKRLNFGQTGDSESVPDPQPLGEPPAAPSGVGPNTMAAGGGAPMADNNEGADGVGSSSGNWHCDSTWLGDRVITTSTRTWALPTYNNHLYKQISNGTSGGATNDNTYFGYSTPWGYFDFNRFHCHFSPRDWQRLINNNWGFRPKRLSFKLFNIQVKEVTQNEGTKTTANNLTSTIQVFTDSEYQLPYVLGSAHQGCLPPFPADVFTIPQYGYLTLNNGSQAVGRSSFYCLEYFPSQMLRTGNNFQFTYTFEDVPFHSSYAHSQSLDRLMNPLIDQYLYYLSRIQTTGGTANTQTLGFSQGGPNTMANQAKNWLPGPCYRQQRVSTTTGQNNNSNFAWTAGTKYHLNGRNSLANPGIAMATHKDDEERFFPSNGILIFGKQNAARDNADYSDVMPTSEEEIKTTNPVATEEYGIVADNLQQQNTAPQIGTVNSQGALPGMVWQNRDVYLQGPIWAKIPHTDGNFHPSPLMGGFGLKHPPPQILIKNTPVPADPPTTFNQSKLNSFITQYSTGQVSVEIEWELQKENSKRWNPEIQYTSNYYKSTSVDFAVNTEGVYSEPRPIGTRYLTRNL

SEQ ID NO: 630 - protein, 738 aa, Artificial Sequence
  Synthetic Polypeptide
MAADGYLPDWLEDNLSEGIREWWALKPGAPKPKANQQKQDDGRGLVLPGYKYLGPFNGLDKGEPVNAADAAALEHDKAYDQQLQAGDNPYLRYNHADAEFQERLQEDTSFGGNLGRAVFQAKKRVLEPLGLVEEGAKTAPGKKRPVEPSPQRSPDSSTGIGKGGQQPARKRLNFGQTGDSESVPDPQPLGEPPAAPSGVGPNTMAAGGGAPMADNNEGADGVGSSSGNWHCDSTWLGDRVITTSTRTWALPTYNNHLYKQISNGTSGGATNDNTYFGYSTPWGYFDFNRFHCHFSPRDWQRLINNNWGFRPKRLSFKLFNIQVKEVTQNEGTKTIANNLTSTIQVFTDSEYQLPYVLGSAHQGCLPPFPADVFTIPQYGYLTLNNGSQAVGRSSFYCLEYFPSQMLRTGNNFQFTYTFEDVPFHSSYAHSQSLDRLMNPLIDQYLYYLSRIQTTGGTANTQTLGFSQGGPNTMANQAKNWLPGPCYRQQRVSTTTGQNNNSNFAWTAGTKYHLNGRNSLANPGIAMATHKDDEERFFPSNGILIFGKQNAARDNADYSDVMPTSEEEIKTTNPVATEEYGIVADNLQQQNTAPQIGTVNSQGALPGMVWQNRDVYLQGPIWAKIPHTDGNFHPSPLMGGFGLKHPPPQILIKNTPVPADPPTTFNQSKLNSFITQYSTGQVSVEIEWELQKENSKRWNPEIQYTSNYYKSTSVDFAVNTEGVYSEPRPIGTRYLTRNL

SEQ ID NO: 631 - protein, 738 aa, Artificial Sequence
  Synthetic Polypeptide
MAADGYLPDWLEDNLSEGIREWWALKPGAPKPKANQQKQDDGRGLVLPGYKYLGPFNGLDKGEPVNAADAAALEHDKAYDQQLQAGDNPYLRYNHADAEFQERLQEDTSFGGNLGRAVFQAKKRVLEPLGLVEEGAKTAPGKERPVEPSPQRSPDSSTGIGKKGQQPARKRLNFGQTGDSESVPDPQPLGEPPAAPSGVGPNTMAAGGGAPMADNNEGADGVGSSSGNWHCDSTWLGDRVITTSTRTWALPTYNNHLYKQISNGTSGGATNDNTYFGYSTPWGYFDFNRFHCHFSPRDWQRLINNNWGFRPKRLSFKLFNIQVKEVTQNEGTKTTANNLTSTIQVFTDSEYQLPYVLGSAHQGCLPPFPADVFTIPQYGYLTLNNGSQAVGRSSFYCLEYFPSQMLRTGNNFQFTYTFEDAPFHSSYAHSQSLDRLMNPLIDQYLYYLSRIQTTGGTANTQTLGFSQGGPNTMANQAKNWLPGPCYRQQRVSTTTGQNNNSNFAWTAGTKYHLNGRNSLANPGIAMATHKDDEERFFPSNGILIFGKQNAARDNADYSDVMPTSEEEIKTTNPVATEEYGIVADNLQQQNTAPQIGTVNSQGALPGMVWQNRDVYLQGPIWAKIPHTDGNFHPSPLMGGFGLKHPPPQILIKNTPVPADPPTTFNQSKLNSFITQYSTGQVSVEIEWELQKENSKRWNPEIQYTSNYYKSTSVDFAVNTEGVYSEPRPIGTRYLTRNL

SEQ ID NO: 632 - protein, 738 aa, Artificial Sequence
  Synthetic Polypeptide
MAADGYLPDWLEDNLSEGIREWWALKPGAPKPKANQQKQDDGRGLVLPGYKYLGPFNGLDKGEPVNAADAAALEHDKAYDQQLQAGDNPYLRYNHADAEFQERLQEDTSFGGNLGRAVFQAKKRVLEPLGLVEEGAKTAPGKKRPVEPSPQRSPDSSTGIGKEGQQPARKRLNFGQTGDSESVPDPQPLGEPPAAPSGVGPNTMAAGGGAPMADNNEGADGVGSSSGNWHCDSTWLGDRVITTSTRTWALPTYNNHLYKQISNGTSGGATNDNTYFGYSTPWGYFDFNRFHCHFSPRDWQRLINNNWGFRPKRLSFKLFNIQVKEVTQNEGTKTIANNLTSTIQVFTDSEYQLPYVLGSAHQGCLPPFPADVFTIPQYGYLTLNNGSQAVGRSSFYCLEYFPSQMLRTGNNFQFTYTFEDVPFHSSYAHSQSLDRLMNPLIDQYLYYLSRIQTTGGTANTQTLGFSQGGPNTMANQAKNWLPGPCYRQQRVSTTTGQNNNSNFAWTAGTKYHLNGRNSLANPGIAMATHKDDEERFFPSNGILIFGKQNAARDNADYSDVMPTSEEEIKTTNPVATEEYGIVADNLQQQNTAPQIGTVNSQGALPGMVWQNRDVYLQGPIWAKIPHTDGNFHPSPLMGGFGLKHPPPQILIKNTPVPADPPTTFNQSKLNSFITQYCTGQVSVEIEWELQKENSKRWNPEIQYTSNYYKSTSVDFAVNTEGVYSEPRPIGTRYLTRNL

SEQ ID NO: 633 - protein, 738 aa, Artificial Sequence
  Synthetic Polypeptide
MAADGYLPDWLEDNLSEGIREWWALKPGAPKPKANQQKQDDGRGLVLPGYKYLGPFNGLDKGEPVNAADAAALEHDKAYDQQLQAGDNPYLRYNHADAEFQERLQEDTSFGGNLGRAVFQAKKRVLEPLGLVEEGAKTAPGKKRPVEPSPQRSPDSSTGIGKEGQQPARKRLNFGQTGDSESVPDPQPLGEPPAAPSGVGPNTMAAGGGAPMADNNEGADGVGSSSGNWHCDSTWLGDRVITTSTRTWALPTYNNHLYKQISNGTSGGATNDNTYFGYSTPWGYFDFNRFHCHFSPRDWQRLINNNWGFRPKRLSFKLFNIQVKEVTQNEGTKTIANNLTSTIQVFTDSEYQLPYVLGSAHQGCLPPFPADVFTIPQYGYLTLNNGSQAVGRSSFYCLEYFPSQMLRTGNNFQFTYTFEDVPFHSSYAHSQSLDRLMNPLIDQYLYYLSRIQTTGGTANTQTLGFSQGGPNTMANQAKNWLPGPCYRQQRVSTTTGQNNNSNFAWTAGTKYHLNGRNSLANPGIAMATHKDDEERFFPSNGILIFGKQNAARDNADYSDVMPTSEEEIKTTNPVATEEYGIVADNLQQQNTAPQIGTVNSQGALPGMVWQNRDVYLQGPIWAKIPHTDGNFHPSPLMGGFGLKHPPPQILIKNTPVPADPPTTFNQSKLNSFITQYSTGQVSVEIEWELQKENSKRWNPEIQYTSNYYKSTSVDFAVNTEGVYSEPRPIGTRYLTRNL

SEQ ID NO: 634 - protein, 738 aa, Artificial Sequence
  Synthetic Polypeptide
MAADGYLPDWLEDNLSEGIREWWALKPGAPKPKANQQKQDDGRGLVLPGYKYLGPFNGLDKGEPVNAADAAALEHDKAYDQQLQAGDNPYLRYNHADAEFQERLQEDTSFGGNLGRAVFQAKKRVLEPLGLVEEGAKTAPGKERPVEPSPQRSPDSSTGIGKKGQQPARKRLNFGQTGDSESVPDPQPLGEPPAAPSGVGPNTMAAGGGAPMADNNEGADGVGSSSGNWHCDSTWLGDRVITTSTRTWALPTYNNHLYKQIPNGTSGGATNDNTYFGYSTPWGYFDFNRFHCHFSPRDWQRLINNNWGFRPKRLSFKLFNIQVKEVTQNEGTKTTANNLTSTIQVFTDSEYQLPYVLGSAHQGCLPPFPADVFTIPQYGYLTLNNGSQAVGRSSFYCLEYFPSQMLRTGNNFQFTYTFEDVPFHSSYAHSQSLDRLMNPLIDQYLYYLSRIQTTGGTANTQTLGFSQGGPNTMANQAKNWLPGPCYRQQRVSTTTGQNNNSNFAWTAGTKYHLNGRNSLANPGIAMATHKDDEERFFPSNGILIFGKQNAARDNADYSDVMPTSEEEIKTTNPVATEEYGIVADNLQQQNTAPQIGTVNSQGALPGMVWQNRDVYLQGPIWAKIPHTDGNFHPSPLMGGFGLKHPPPQILIKNTPVPADPPTTFNQSKLNSFITQYSTGQVSVEIEWELQKENSKRWNPEIQYTSNYYKSTSVDFAVNTEGVYSEPRPIGTRYLTRNL

SEQ ID NO: 635 - protein, 738 aa, Artificial Sequence
  Synthetic Polypeptide
MAADGYLPDWLEDNLSEGIREWWALKPGAPKPKANQQKQDDGRGLVLPGYKYLGPFNGLDKGEPVNAADAAALEHDKAYDQQLQAGDNPYLRYNHADAEFQERLQEDTSFGGNLGRAVFQAKKRVLEPLGLVEEGAKTAPGKKRPVEPSPQRSPDSSTGIGKEGQQPARKRLNFGQTGDSESVPDPQPLGEPPAAPSGVGPNTMAAGGGAPMADNNEGADGVGSSSGNWHCDSTWLGDRVITTSTRTWALPTYNNHLYKQISNGTSGGATNDNTYFGYSTPWGYFDFNRFHCHFSPRDWQRLINNNWGFRPKRLSFKLFNIQVKEVTQNEGTKTTANNLTSTIQVFTDSEYQLPYVLGSAHQGCLPPFPADVFTIPQYGYLTLNNGSQAVGRSSFYCLEYFPSQMLRTGNNFQFTYTFEDVPFHSSYAHSQSLDRLMNPLIDQYLYYLSRIQTTGGTANTQTLGFSQGGPNTMANQAKNWLPGPCYRQQRVSTTTGQNNNSNFAWTAGTKYHLNGRNSLANPGIAMATHKDDEERFFPSNGILIFGKQNAARDNADYSDVMPTSEEEIKTTNPVATEEYGIVADNLQQQNTAPQIGTVNSQGALPGMVWQNRDVYLQGPIWAKIPHTDGNFHPSPLMGGFGLKHPPPQILIKNTPVPADPPTTFNQSKLNSFITQYSTGQVSVEIEWELQKENSKRWNPEIQYTSNYYKSTSVDFAVNTEGVYSEPRPIGTRYLTRNL

SEQ ID NO: 636 - protein, 738 aa, Artificial Sequence
  Synthetic Polypeptide
MAADGYLPDWLEDNLSEGIREWWALKPGAPKPKANQQKQDDGRGLVLPGYKYLGPFNGLDKGEPVNAADAAALEHDKAYDQQLQAGDNPYLRYNHADAEFQERLQEDTSFGGNLGRAVFQAKKRVLEPLGLVEEGAKTAPGKERPVEPSPQRSPDSSTGIGKKGQQPARKRLNFGQTGDSESVPDPQPLGEPPAAPSGVGPNTMAAGGGAPMADNNEGADGVGSSSGNWHCDSTWLGDRVITTSTRTWALPTYNNHLYKQISNGTSGGATNDNTYFGYSTPWGYFDFNRFHCHFSPRDWQRLINNNWGFRPKRLSFKLFNIQVKEVTQNEGTKTTANNLTSTIQVFTDSEYQLPYVLGSAHQGCLPPFPADVFTIPQYGYLTLNNGSQAVGRSSFYCLEYFPSQMLRTGNNFQFTYTFEDVPFHSSYAHSQSLDRLMNPLIDQYLYYLSRIQTTGGTANTQTLGFSQGGPNTMANQAKNWLPGPCYRQQRVSTTTGQNNNSNFAWTAGTKYHLNGRNSLANPGIAMATHKDDEERFFPSNGILIFGKQNAARDNADYSDVMPTSEEEIKTTNPVATEEYGIVADNLQQQNTAPQIGTVNSQGALPGMVWQNRDVYLQGPIWAKIPHTDGNFHPSPLMGGFGLKHPPPQILIKNTPVPADPPTTFNQSKLNSFITQYSTGQVSVEIEWELQKENSKRWNPEIQYTSNYYKSTSVDFAVNTEGVYSEPRPIGTRYLTRNL

SEQ ID NO: 637 - protein, 738 aa, Artificial Sequence
  Synthetic Polypeptide
MAADGYLPDWLEDNLSEGIREWWALKPGAPKPKANQQKQDDGRGLVLPGYKYLGPFNGLDKGEPVNAADAAALEHDKAYDQQLQAGDNPYLRYNHADAEFQERLQEDTSFGGNLGRAVFQAKKRVLEPLGLVEEGAKTAPGKERPVEPSPQRSPDSSTGIGKKGQQPARKRLNFGQTGDSESVPDPQPLGEPPAAPSGVGPNTMAAGGGAPMADNNEGADGVGSSSGNWHCDSTWLGDRVITTSTRTWALPTYNNHLYKQISNGTSGGATNDNTYFGYSTPWGYFDFNRFHCHFSPRDWQRLINNNWGFRPKRLSFKLFNIQVKEVTQNEGTKTIANNLTSTIQVFTDSEYQLPYVLGSAHQGCLPPFPADVFTIPQYGYLTLNNGSQAVGRSSFYCLEYFPSQMLRTGNNFQFTYTFEDVPFHSSYAHSQSLDRLMNPLIDQYLYYLSRIQTTGGTANTQTLGFSQGGPNTMANQAKNWLPGPCYRQQRVSTTTGQNNNSNFAWTAGTKYHLNGRNSLANPGIAMATHKDDEERFFPSNGILIFGKQNAARDNADYSDVMPTSEEEIKTTNPVATEEYGIVADNLQQQNTAPQIGTVNSQGALPGMVWQNRDVYLQGPIWAKIPHTDGNFHPSPLMGGFGLKHPPPQILIKNTPVPADPPTTFNQSKLNSFITQYSTGQVSVEIEWELQKENSKRWNPEIQYTSNYYKSTSVDFAVNTEGVYSEPRPIGTRYLTRNL

SEQ ID NO: 638 - protein, 738 aa, Artificial Sequence
  Synthetic Polypeptide
MAADGYLPDWLEDNLSEGIREWWALKPGAPKPKANQQKQDDGRGLVLPGYKYLGPFNGLDKGEPVNAADAAALEHDKAYDQQLQAGDNPYLRYNHADAEFQERLQEDTSFGGNLGRAVFQAKKRVLEPLGLVEEGAKTAPGKKRPVEPSPQRSPDSSTGIGKKGQQPARKRLNFGQTGDSESVPDPQPLGEPPAAPSGVGPNTMAAGGGAPMADNNEGADGVGSSSGNWHCDSTWLGDRVITTSTRTWALPTYNNHLYKQISNGTSGGATNDNTYFGYSTPWGYFDFNRFHCHFSPRDWQRLINNNWGFRPKRLSFKLFNIQVKEVTQNEGTKTIANNLTSTIQVFTDSEYPLPYVLGSAHQGCLPPFPADVFTIPQYGYLTLNNGSQAVGRSSFYCLEYFPSQMLRTGNNFQFTYTFEDVPFHSSYAHSQSLDRLMNPLIDQYLYYLSRIQTTGGTANTQTLGFSQGGPNTMANQAKNWLPGPCYRQQRVSTTTGQNNNSNFAWTAGTKYHLNGRNSLANPGIAMATHKDDEERFFPSNGILIFGKQNAARDNADYSDVMPTSEEEIKTTNPVATEEYGIVADNLQQQNTAPQIGTVNSQGALPGMVWQNRDVYLQGPIWAKIPHTDGNFHPSPLMGGFGLKHPPPQILIKNTPVPADPPTTFNQSKLNSFITQYSTGQVSVEIEWELQKENSKRWNPEIQYTSNYYKSTSVDFAVNTEGVYSEPRPIGTRYLTRNL

SEQ ID NO: 639 - protein, 738 aa, Artificial Sequence
  Synthetic Polypeptide
MAADGYLPDWLEDNLSEGIREWWALKPGAPKPKANQQKQDDGRGLVLPGYKYLGPFNGLDKGEPVNAADAAALEHDKAYDQQLQAGDNPYLRYNHADAEFQERLQEDTSFGGNLGRAVFQAKKRVLEPLGLVEEGAKTAPGKKRPVEPSPQRSPDSSTGIGKKGQQPARKRLNFGQTGDSESVPDPQPLGEPPAAPSGVGPNTMAAGGGAPMADNNEGADGVGSSSGNWHCDSTWLGDRVITTSTRTWALPTYNNHLYKQISNGTSGGATNDNTYFGYSTPWGYFDFNRFHCHFSPRDWQRLINNNWGFRPKRLSFKLFNIQVKEVTQNEGTKTIANNLTSTIQVFTDSEYQLPYVLGSAHQGCLPPFPADVFTIPQYGYLTLNNGSQAVGRSSFYCLEYFPSQMLRTGNNFQFTYTFEDVPFHSSYAHSQSLDRLMNPLIDQYLYYLSRIQTTGGTANTQTLGFSQGGPNTMANQAKNWLPGPCYRQQRVSTTTGQNNNSNFAWTAGTKYHLNGRNSLANPGIAMATHKDDEERFFPSNGILIFGKQNAARDNADYSDVMPTSEEEIKTTNPVATEEYGIVADNLQQQNTAPQIGTVNSQGALPGMVWQNRDVYLQGPIWAKIPHTDGNFHPSPLMGGFGLKHPPPQILIKNTPVPADPPTTFNQSKLNSFITQYGTGQVSVEIEWELQKENSKRWNPEIQYTSNYYKSTSVDFAVNTEGVYSEPRPIGTRYLTRNL

SEQ ID NO: 640 - protein, 738 aa, Artificial Sequence
  Synthetic Polypeptide
MAADGYLPDWLEDNLSEGIREWWALKPGAPKPKANQQKQDDGRGLVLPGYKYLGPFNGLDKGEPVNAADAAALEHDKAYDQQLQAGDNPYLRYNHADAEFQERLQEDTSFGGNLGRAVFQAKKRVLEPLGLVEEGAKTAPGKKRPVEPSPQRSPDSSTGIGKKGQQPARKRLNFGQTGDSESVPDPQPLGEPPAAPSGVGPNTMAAGGGAPMADNNEGADGVGSSSGNWHCDSTWLGDRVITTSTRTWALPTYNNHLYKQISNGTSGGATNDNTYFGYSTPWGYFDFNRFHCHFSPRDWQRLINNNWGFRPKRLSFKPFNIQVKEVTQNEGTKTIANNLTSTIQVFTDSEYQLPYVLGSAHQGCLPPFPADVFTIPQYGYLTLNNGSQAVGRSSFYCLEYFPSQMLRTGNNFQFTYTFEDVPFHSSYAHSQSLDRLMNPLIDQYLYYLSRIQTTGGTANTQTLGFSQGGPNTMANQAKNWLPGPCYRQQRVSTTTGQNNNSNFAWTAGTKYHLNGRNSLANPGIAMATHKDDEERFFPSNGILIFGKQNAARDNADYSDVMPTSEEEIKTTNPVATEEYGIVADNLQQQNTAPQIGTVNSQGALPGMVWQNRDVYLQGPIWAKIPHTDGNFHPSPLMGGFGLKHPPPQILIKNTPVPADPPTTFNQSKLNSFITQYSTGQVSVEIEWELQKENSKRWNPEIQYTSNYYKSTSVDFAVNTEGVYSEPRPIGTRYLTRNL

SEQ ID NO: 641 - protein, 738 aa, Artificial Sequence
  Synthetic Polypeptide
MAADGYLPDWLEDNLSEGIREWWALKPGAPKPKANQQKQDDGRGLVLPGYKYLGPFNGLDKGEPVNAADAAALEHDKAYDQQLQAGDNPYLRYNHADAEFQERLQEDTSFGGNLGRAVFQAKKRVLEPLGLVEEGAKTAPGKKRPVEPSPQRSPDSSTGIGKKGQQPARKRLNFGQTGDSESVPDPQPLGEPPAAPSGVGPNTMAAGGGAPMADNNEGADGVGSSSGNWHCDSTWLGDRVITTSTRTWALPTYNNHLYKQISNGTSGGATNDNTYFGYSTPWGYFDFNRFHCHFSPRDWQRLINNNWGFRPKRLSFKLFNIQVKEVTQNEGTKTIANNLTSTIQVFTDSEYQLPYVLGSAHQGCLPPFPADVFTIPQYGYLTLNNGSQAVGRSSFYCLEYFPSQMLRTGNNFQFTYTFEDVPFHSSYAHSQSLDRLMNPLIDQYLYYLSRIQTTGGTANTQALGFSQGGPNTMANQAKNWLPGPCYRQQRVSTTTGQNNNSNFAWTAGTKYHLNGRNSLANPGIAMATHKDDEERFFPSNGILIFGKQNAARDNADYSDVMPTSEEEIKTTNPVATEEYGIVADNLQQQNTAPQIGTVNSQGALPGMVWQNRDVYLQGPIWAKIPHTDGNFHPSPLMGGFGLKHPPPQILIKNTPVPADPPTTFNQSKLNSFITQYSTGQVSVEIEWELQKENSKRWNPEIQYTSNYYKSTSVDFAVNTEGVYSEPRPIGTRYLTRNL

SEQ ID NO: 642 - protein, 738 aa, Artificial Sequence
  Synthetic Polypeptide
MAADGYLPDWLEDNLSEGIREWWALKPGAPKPKANQQKQDDGRGLVLPGYKYLGPFNGLDKGEPVNAADAAALEHDKAYDQQLQAGDNPYLRYNHADAEFQERLQEDTSFGGNLGRAVFQAKKRVLEPLGLVEEGAKTAPGKKRPVEPSPQRSPDSSTGIGKKGQQPARKRLNFGQTGDSESVPDPQPLGEPPAAPSGVGPNTMAAGGGAPMADNNEGADGVGSSSGNWHCDSTWLGDRVITTSTRTWALPTYNNHLYKQISNGTSGGATNDNTYFGYSTPWGYFDFNRFHCHFSPRDWQRLINNNWGFRPKRLSFKLFNIQVKEVTQNEGTKTIANNLTSTIQVFTDSEYQLPYVLGSAHQGCLPPFPADVFTIPQYGYLTLNNGSQAVGRSSFYCLEYFPSQMLRTGNNFQFTYTFEDVPFHSSYAHSQSLDRLMNPLIDQYLYYLSRIQTTGGTANTQTLGFSQGGPNTMANQAKNWLPGPCYRQQRVSTTTGQNNNSNFAWTAGTKYHLNGRNSLANPGIAMATHKDDEERFFPSNGILIFGKQNAARDNADYSDVMPTSEEEIKTTNPVATEGYGIVADNLQQQNTAPQIGTVNSQGALPGMVWQNRDVYLQGPIWAKIPHTDGNFHPSPLMGGFGLKHPPPQILIKNTPVPADPPTTFNQSKLNSFITQYSTGQVSVEIEWELQKENSKRWNPEIQYTSNYYKSTSVDFAVNTEGVYSEPRPIGTRYLTRNL

SEQ ID NO: 643 - protein, 738 aa, Artificial Sequence
  Synthetic Polypeptide
MAADGYLPDWLEDNLSEGIREWWALKPGAPKPKANQQKQDDGRGLVLPGYKYLGPFNGLDKGEPVNAADAAALEHDKAYDQQLQAGDNPYLRYNHADAEFQERLQEDTSFGGNLGRAVFQAKKRVLEPLGLVEEGAKTAPGKKRPVEPSPQRSPDSSTGIGKKGQQPARKRLNFGQTGDSESVPDPQPLGEPPAAPSGVGPNTMAAGGGAPMADNNEGADGVGSSSGNWHCDSTWLGDRVITTSTRTWALPTYNNHLYKQISNGTSGGATNDNTYFGYSTPWGYFDFNRFHCHFSPRDWQRLINNNWGFRPKRLSFKLFNIQVKEVTQNEGTKTIANNLTSTIQVFTDSEYQLPYVLGSAHQGCLPPFPADVFTIPQYGYLTLNNGSQAVGRSSFYCLEYFPSQMLRTGNNFQFTYTFEDVPFHSSYAHSQSLDRLMNPLIDQYLYYLSRIQTTGGTANTQTLGFSQGGPNTMANQAKNWLPGPCYRQQRVSTTTGQNNNSNFAWTAGTKYHLNGRNSLANPGIAMATRKDDEERFFPSNGILIFGKQNAARDNADYSDVMPTSEEEIKTTNPVATEEYGIVADNLQQQNTAPQIGTVNSQGALPGMVWQNRDVYLQGPIWAKIPHTDGNFHPSPLMGGFGLKHPPPQILIKNTPVPADPPTTFNQSKLNSFITQYSTGQVSVEIEWELQKENSKRWNPEIQYTSNYYKSTSVDFAVNTEGVYSEPRPIGTRYLTRNL

SEQ ID NO: 644 - protein, 738 aa, Artificial Sequence
  Synthetic Polypeptide
MAADGYLPDWLEDNLSEGIREWWALKPGAPKPKANQQKQDDGRGLVLPGYKYLGPFNGLDKGEPVNAADAAALEHDKAYDQQLQAGDNPYLRYNHADAEFQERLQEDTSFGGNLGRAVFQAKKRVLEPLGLVEEGAKTAPGKKRPVEPSPQRSPDSSTGIGKKGQQPARKRLNFGQTGDSESVPDPQPLGEPPAAPSGVGPNTMAAGGGAPMADNNEGADGVGSSSGNWHCDSTWLGDRVITTSTRTWALPTYNNHLYKQISNGTSGGATNDNTYFGYSTPWGYFDFNRFHCHFSPRDWQRLINNNWGFRPKRLSFKLFNIQVKEVTQNEGTKTIANNLTSTIQVFTDSEYQLPYVLGSAHQGCLPPFPADVFTIPQYGYLTLNNGSQAVGRSSFYCLEYFPSQMLRTGNNFQFTYTFEDVPFHSSYAHSQSLDRLMNPLIDQYLYYLSRIQTTGGTANTQTLGFSQGGPNTMANQAKNWLPGPCYRQQRVSTTTGQNNNSNFAWTAGTKYHLNGRNSLANPGIAMATHKDDEERFFPSNGILIFGKQNAARDNADYSDVMPTSEEEIKTTNPVATEEYGIVADNLQQQNTAPQIGTVNSQGALPGMVWQNRDVYLQGPIWAKIPHTDGNFHPSPLMGGFGLKHPPPQILIKNTPVPADPPTTFNQSKPNSFITQYSTGQVSVEIEWELQKENSKRWNPEIQYTSNYYKSTSVDFAVNTEGVYSEPRPIGTRYLTRNL

SEQ ID NO: 645 - protein, 738 aa, Artificial Sequence
  Synthetic Polypeptide
MAADGYLPDWLEDNLSEGIREWWALKPGAPKPKANQQKQDDGRGLVLPGYKYLGPFNGLDKGEPVNAADAAALEHDKAYDQQLQAGDNPYLRYNHADAEFQERLQEDTSFGGNLGRAVFQAKKRVLEPLGLVEEGAKTAPGKKRPVEPSPQRSPDSSTGIGKKGQQPARKRLNFGQTGDSESVPDPQPLGEPPAAPSGVGPNTMAAGGGAPMADNNEGADGVGSSSGNWHCDSTWLGDRVITTSTRTWALPTYNNHLYKQISNGTSGGATNDNTYFGYSTPWGYFDFNRFHCHFSPRDWQRLINNNWGFRPKRLSFKLFNIQVKEVTQNEGTKTIANNLTSTIQVFTDSEYQLPYVLGSAHQGCLPPFPADVFTIPQYGYLTLNNGSQAVGRSSFYCLEYFPSQMLRTGNNFQFTYTFEDVPFHSSYAHSQSLDRLMNPLIDQYLYYLSRIQTTGGTANTQTLGFSQGGPNTMANQAKNWLPGPCYRQQRVSTTTGQNNNSNFAWTAGTKYHLNGRNSLANPGIAMATHKDDEERFFSSNGILIFGKQNAARDNADYSDVMPTSEEEIKTTNPVATEEYGIVADNLQQQNTAPQIGTVNSQGALPGMVWQNRDVYLQGPIWAKIPHTDGNFHPSPLMGGFGLKHPPPQILIKNTPVPADPPTTFNQSKLNSFITQYSTGQVSVEIEWELQKENSKRWNPEIQYTSNYYKSTSVDFAVNTEGVYSEPRPIGTRYLTRNL

SEQ ID NO: 646 - protein, 738 aa, Artificial Sequence
  Synthetic Polypeptide
MAADGYLPDWLEDNLSEGIREWWALKPGAPKPKANQQKQDDGRGLVLPGYKYLGPFNGLDKGEPVNAADAAALEHDKAYDQQLQAGDNPYLRYNHADAEFQERLQEDTSFGGNLGRAVFQAKKRVLEPLGLVEEGAKTAPGKKRPVEPSPQRSPDSSTGIGKKGQQPARKRLNFGQTGDSESVPDPQPLGEPPAAPSGVGPNTMAAGGGAPMADNNEGADGVGSSSGNWHCDSTWLGDRVITTSTRTWALPTYNNHLYKQISNGTSGGATNDNTYFGYSTPWGYFDFNRFHCHFSPRDWQRLINNNWGFRPKRLSFKLFNIQVKEVTQNEGTKTIANNLTSTIQVFTDSEYQLPYVLGSAHQGCLPPFPADVFTIPQYGYLTLNNGSQAVGRSSFYCLEYFPSQMLRTGNNFQFTYTFEDVPFHSSYAHSQSLDRLMNPLIDQYLYYLSRIQTTGGTANTQTLGFSQGGPNTMANQAKNWLPGPCYRQQRVSTTTGQNNNSNFAWAAGTKYHLNGRNSLANPGIAMATHKDDEERFFPSNGILIFGKQNAARDNADYSDVMPTSEEEIKTTNPVATEEYGIVADNLQQQNTAPQIGTVNSQGALPGMVWQNRDVYLQGPIWAKIPHTDGNFHPSPLMGGFGLKHPPPQILIKNTPVPADPPTTFNQSKLNPFITQYSTGQVSVEIEWELQKENSKRWNPEIQYTSNYYKSTSVDFAVNTEGVYSEPRPIGTRYLTRNL

SEQ ID NO: 647 - protein, 738 aa, Artificial Sequence
  Synthetic Polypeptide
MAADGYLPDWLEDNLSEGIREWWALKPGAPKPKANQQKQDDGRGLVLPGYKYLGPFNGLDKGEPVNAADAAALEHDKAYDQQLQAGDNPYLRYNHADAEFQERLQEDTSFGGNLGRAVFQAKKRVLEPLGLVEEGAKTAPGKKRPVEPSPQRSPDSSTGIGKKGQQPARKRLNFGQTGDSESVPDPQPLGEPPAAPSGVGPNTMAAGGGAPMADNNEGADGVGSSSGNWHCDSTWLGDRVITTSTRTWALPTYNNHLYKQISNGTSGGATNDNTYFGYSTPWGYFDFNRFHCHFSPRDWQRLINNNWGFRPKRLSFKLFNIQVKEVTQNEGTKTIANNPTSTIQVFTDSEYQLPYVLGSAHQGCLPPFPADVFTIPQYGYLTLNNGSQAVGRSSFYCLEYFPSQMLRTGNNFQFTYTFEDVPFHSSYAHSQSLDRLMNPLIDQYLYYLSRIQTTGGTANTQTLGFSQGGPNTMANQAKNWLPGPCYRQQRVSTTTGQNNNSNFAWTAGTKYHLNGRNSLANPGIAMATHKDDEERFFPSNGILIFGKQNAARDNADYSDVMPTSEEEIKTTNPVATEEYGIVADNLQQQNTAPQIGTVNSQGALPGMVWQNRDVYLQGPIWAKIPHTDGNFHPSPLMGGFGLKHPPPQILIKNTPVPADPPTTFNQSKLNSFITQYSTGQVSVEIEWELQKENSKRWNPEIQYTSNYYKSTSVDFAVNTEGVYSEPRPIGTRYLTRNL

SEQ ID NO: 648 - protein, 738 aa, Artificial Sequence
  Synthetic Polypeptide
MAADGYLPDWLEDNLSEGIREWWALKPGAPKPKANQQKQDDGRGLVLPGYKYLGPFNGLDKGEPVNAADAAALEHDKAYDQQLQAGDNPYLRYNHADAEFQERLQEDTSFGGNLGRAVFQAKKRVLEPLGLVEEGAKTAPGKKRPVEPSPQRSPDSSTGIGKKGQQPARKRLNFGQTGDSESVPDPQPLGEPPAAPSGVGPNTMAAGGGAPMADNNEGADGVGSSSGNWHCDSTWLGDRVITTSTRTWALPTYNNHLYKQISNGTSGGATNDNTYFGYSTPWGYFDFNRFHCRFSPRDWQRLINNNWGFRPKRLSFKLFNIQVKEVTQNEGTKTIANNLTSTIQVFTDSEYQLPYVLGSAHQGCLPPFPADVFTIPQYGYLTLNNGSQAVGRSSFYCLEYFPSQMLRTGNNFQFTYTFEDVPFHSSYAHSQSLDRLMNPLIDQYLYYLSRIQTTGGTANTQTLGFSQGGPNTMANQAKNWLPGPCYRQQRVSTTTGQNNNSNFAWTAGTKYHLNGRNSLANPGIAMATHKDDEERFFPSNGILIFGKQNAARDNADYSDVMPTSEEEIKTTNPVATEEYGIVADNLQQQNTAPQIGTVNSQGALPGMVWQNRDVYLQGPIWAKIPHTDGNFHPSPLMGGFGLKHPPPQILIKNTPVPADPPTTFNQSKLNSFITQYSTGQVSVEIEWELQKENSKRWNPEIQYTSNYYKSTSVDFAVNTEGVYSEPRPIGTRYLTRNL

SEQ ID NO: 649 - protein, 738 aa, Artificial Sequence
  Synthetic Polypeptide
MAADGYLPDWLEDNLSEGIREWWALKPGAPKPKANQQKQDDGRGLVLPGYKYLGPFNGLDKGEPVNAADAAALEHDKAYDQQLQAGDNPYLRYNHADAEFQERLQEDTSFGGNLGRAVFQAKKRVLEPLGLVEEGAKTAPGKKRPVEPSPQRSPDSSTGIGKKGQQPARKRLNFGQTGDSESVPDPQPLGEPPAAPSGVGPNTMAAGGGAPMADNNEGADGVGSSSGNWHCDSTWLGDRVITTSTRTWALPTYNNHLYKQISNGTSGGATNDNTYFGYSTPWGYFDFNRFHCHFSPRDWQRLINNNWGFRPKRLSFKLFNIQVKEVTQNEGTKTIANNLTSTIQVFTDSEYQLPYVLGSAHQGCLPPFPADVFTIPQYGYLTLNNGSQAVGRSSFYCLEYFPSQMLRTGNNFQFTYTFEDVPFHSSYAHSQSLDRLMNPLIDQYLYYLSRIQTTGGTANTQTLGFSQGGPNTMANQAKNWLPGPCYRQQRVSTTTGQNNNSNFAWTAGTKYHLNGRNSLANPGIAMATHKDDEERFFPSNGILIFGKQNAARDNADYSDVMPTSEEEIKTTNPVATEEYGIVADNLQQQNAAPQIGTVNSQGALPGMVWQNRDVYLQGPIWAKIPHTDGNFHPSPLMGGFGLKHPPPQILIKNTPVPADPPTTFNQSKLNSFITQYSTGQVSVEIEWELQKENSKRWNPEIQYTSNYYKSTSVDFAVNTEGVYSEPRPIGTRYLTRNL

SEQ ID NO: 650 - protein, 738 aa, Artificial Sequence
  Synthetic Polypeptide
MAADGYLPDWLEDNLSEGIREWWALKPGAPKPKANQQKQDDGRGLVLPGYKYLGPFNGLDKGEPVNAADAAALEHDKAYDQQLQAGDNPYLRYNHADAEFQERLQEDTSFGGNLGRAVFQAKKRVLEPLGLVEEGAKTAPGKKRPVEPSPQRSPDSSTGIGKKGQQPARKRLNFGQTGDSESVPDPQPLGEPPAAPSGVGPNTMAAGGGAPMADNNEGADGVGSSSGNWHCDSTWLGDRVITTSTRTWALPTYNNHLYKQISNGTSGGATNDNTYFGYSTPWGYFDFNRFHCHFSPRDWQRLINNNWGFRPKRLSFKLFNIQVKEVTQNEGTKTIANSLTSTIQVFTDSEYQLPYVLGSAHQGCLPPFPADVFTIPQYGYLTLNNGSQAVGRSSFYCLEYFPSQMLRTGNNFQFTYTFEDVPFHSSYAHSQSLDRLMNPLIDQYLYYLSRIQTTGGTANTQTLGFSQGGPNTMANQAKNWLPGPCYRQQRVSTTTGQNNNSNFAWTAGTKYHLNGRNSLANPGIAMATHKDDEERFFPSNGILIFGKQNAARDNADYSDVMPTSEEEIKTTNPVATEEYGIVADNLQQQNTAPQIGTVNSQGALPGMVWQNRDVYLQGPIWAKIPHTDGNFHPSPLMGGFGLKHPPPQILIKNTPVPADPPTTFNQSKLNSFITQYSTGQVSVEIEWELQKENSKRWNPEIQYTSNYYKSASVDFAVNTEGVYSEPRPIGTRYLTRNL

SEQ ID NO: 651 - protein, 738 aa, Artificial Sequence
  Synthetic Polypeptide
MAADGYLPDWLEDNLSEGIREWWALKPGAPKPKANQQKQDDGRGLVLPGYKYLGPFNGLDKGEPVNAADAAALEHDKAYDQQLQAGDNPYLRYNHADAEFQERLQEDTSFGGNLGRAVFQAKKRVLEPLGLVEEGAKTAPGKKRPVEPSPQRSPDSSTGIGKKGQQPARKRLNFGQTGDSESVPDPQPLGEPPAAPSGVGPNTMAAGGGAPMADNNEGADGVGSSSGNWHCDSTWLGDRVITTSTRTWALPTYNNHLYKQISNGTSGGATNDNTYFGYSTPWGYFDFNRFHCHFSPRDWQRLINNNWGFRPKRLSFKLFNIQVKEVTQNEGTKTIANNLTSTIQVFTDSEYQLPYVLGSAHQGCLPPFPADVFTIPQYGYLTLNNGSQAVGRSSFYCLEYFPSQMLRTGNNFQFTYTFEDVPFHSSYAHSQSLDRLMNPLIDQYLYYLSRIQTTGGTANTQTLGFSQGGPNTMANQAKNWLPGPCYRQQRVSTTTGQNNNSNFAWTAGTKYHLNGGNSLANPGIAMATHKDDEERFFPSNGILIFGKQNAARDNADYSDVMPTSEEEIKTTNPVATEEYGIVADNLQQQNTAPQIGTVNSQGALPGMVWQNRDVYLQGPIWAKIPHTDGNFHPSPLMGGFGLKHPPPQILIKNTPVPADPPTTFNQSKLNSFITQYSTGQVSVEIEWELQKENSKRWNPEIQYTSNYYKSTSVDFAVNTEGVYSEPRPIGTRYLTRNL

SEQ ID NO: 652 - protein, 738 aa, Artificial Sequence
  Synthetic Polypeptide
MAADGYLPDWLEDNLSEGIREWWALKPGAPKPKANQQKQDDGRGLVLPGYKYLGPFNGLDKGEPVNAADAAALEHDKAYDQQLQAGDNPYLRYNHADAEFQERLQEDTSFGGNLGRAVFQAKKRVLEPLGLVEEGAKTAPGKKRPVEPSPQRSPDSSTGIGKKGQQPARKRLNFGQTGDSESVPDPQPLGEPPAAPSGVGPNTMAAGGGAPMADNNEGADGVGSSSGNWHCDSTWLGDRVITTSTRTWALPTYNNHLYKQISNGTSGGATNDNTYFGYSTPWGYFDFNRFHCHFSPRDWQRLINNNWGFRPKRLSFKLFNIQVKEVTQNEGTKTIANNLTSTIQVFTDSEYQLPYVLGSAHQGCLPPFPADVFTIPQYGYLTLNNGSQAVGRSSFYCLEYFPSQMLRTGNNFQFTYTFEDVPFHSSYAHSQSLDRLMNPLIDQYLYYLSRIQTTGGTANTQTLGFSQGGPNTMANQAKNWLPGPCYRQQRVSTTTGQNNNSNFAWTAGTKYHLNGRNSLANPGIAMATHKDDEERFFPSNGILIFGKQNAARDNADYSDVMPTSEEEIKTTNPVATEEYGIVADNLQQQNTAPQIGTVNSQGALPGMVWQNRDVYLQGPIWAKIPHTDGNFHPSPLMGGFGLKHPPPQILIKNTPVPADPPTTFNQSRLNSFITQYSTGQVSVEIEWELQKENSKRWNPEIQYTSNYYKSTSVDFAVNTEGVYSEPRPIGTRYLTRNL

SEQ ID NO: 653 - protein, 738 aa, Artificial Sequence
  Synthetic Polypeptide
MAADGYLPDWLEDNLSEGIREWWALKPGAPKPKANQQKQDDGRGLVLPGYKYLGPFNGLDKGEPVNAADAAALEHDKAYDQQLQAGDNPYLRYNHADAEFQERLQEDTSFGGNLGRAVFQAKKRVLEPLGLVEEGAKTAPGKKRPVEPSPQRSPDSSTGIGKKGQQPARKRLNFGQTGDSESVPDPQPLGEPPAAPSGVGPNTMAAGGGAPMADNNEGADGVGSSSGNWHCDSTWLGDRVITTSTRTWALPTYNNHLYKQISNGTSGGAANDNTYFGYSTPWGYFDFNRFHCHFSPRDWQRLINNNWGFRPKRLSFKLFNIQVKEVTQNEGTKTIANNLTSTIQVFTDSEYQLPYVLGSAHQGCLPPFPADVFTIPQYGYLTLNNGSQAVGRSSFYCLEYFPSQMLRTGNNFQFTYTFEDVPFHSSYAHSQSLDRLMNPLIDQYLYYLSRIQTTGGTANTQTLGFSQGGPNTMANQAKNWLPGPCYRQQRVSTTTGQNNNSNFAWTAGTKYHLNGRNSLANPGIAMATHKDDEERFFPSNGILIFGKQNAARDNADYSDVMPTSEEEIKTTNPVATEEYGIVADNLQQQNTAPQIGTVNSQGALPGMVWQNRDVYLQGPIWAKIPHTDGNFHPSPLMGGFGLKHPPPQILIKNTPVPADPPTTFNQSKLNSFITQYSTGQVSVEIEWELQKENSKRWNPEIQYTSNYYKSTSVDFAVNTEGVYSEPRPIGTRYLTRNL

SEQ ID NO: 654 - protein, 738 aa, Artificial Sequence
  Synthetic Polypeptide
MAADGYLPDWLEDNLSEGIREWWALKPGAPKPKANQQKQDDGRGLVLPGYKYLGPFNGLDKGEPVNAADAAALEHDKAYDQQLQAGDNPYLRYNHADAEFQERLQEDTSFGGNLGRAVFQAKKRVLEPLGLVEEGAKTAPGKKRPVEPSPQRSPDSSTGIGKKGQQPARKRLNFGQTGDSESVPDPQPLGEPPAAPSGVGPNTMAAGGGAPMAGNNEGADGVGSSSGNWHCDSTWLGDRVITTSTRTWALPTYNNHLYKQISNGTSGGATNDNTYFGYSTPWGYFDFNRFHCHFSPRDWQRLINNNWGFRPKRLSFKLFNIQVKEVTQNEGTKTIANNLTSTIQVFTDSEYQLPYVLGSAHQGCLPPFPADVFTIPQYGYLTLNNGSQAVGRSSFYCLEYFPSQMLRTGNNFQFTYTFEDVPFHSSYAHSQSLDRLMNPLIDQYLYYLSRIQTTGGTANTQTLGFSQGGPNTMANQAKNWLPGPCYRQQRVSTTTGQNNNSNFAWTAGTKYHLNGRNSLANPGIAMATHKDDEERFFPSNGILIFGKQNAARDNADYSDVMPTSEEEIKTTNPVATEEYGIVADNLQQQNTAPQIGTVNSQGALPGMVWQNRDVYLQGPIWAKIPHTDGNFHPSPLMGGFGLKHPPPQILIKNTPVPADPPTTFNQSKLNSFITQYSTGQVSVEIEWELQKENSKRWNPEIQYTSNYYKSTSVDFAVNTEGVYSEPRPIGTRYLTRNL

SEQ ID NO: 655 - protein, 738 aa, Artificial Sequence
  Synthetic Polypeptide
MAADGYLPDWLEDNLSEGIREWWALKPGAPKPKANQQKQDDGRGLVLPGYKYLGPFNGLDKGEPVNAADAAALEHDKAYDQQLQAGDNPYLRYNHADAEFQERLQEDTSFGGNLGRAVFQAKKRVLEPLGLVEEGAKTAPGKKRPVEPSPQRSPDSSTGIGRKGQQPARKRLNFGQTGDSESVPDPQPLGEPPAAPSGVGPNTMAAGGGAPMADNNEGADGVGSSSGNWHCDSTWLGDRVITTSTRTWALPTYNNHLYKQISNGTSGGATNDNTYFGYSTPWGYFDFNRFHCHFSPRDWQRLINNNWGFRPKRLSFKLFNIQVKEVTQNEGTKTIANNLTSTIQVFTDSEYQLPYVLGSAHQGCLPPFPADVFTIPQYGYLTLNNGSQAVGRSSFYCLEYFPSQMLRTGNNFQFTYTFEDVPFHSSYAHSQSLDRLMNPLIDQYLYYLSRIQTTGGTANTQTLGFSQGGPNTMANQAKNWLPGPCYRQQRVSTTTGQNNNSNFAWTAGTKYHLNGRNSLANPGIAMATHKDDEERFFPSNGILIFGKQNAARDNADYSDVMPTSEEEIKTTNPVATEEYGIVADNLQQQNTAPQIGTVNSQGALPGMVWQNRDVYLQGPIWAKIPHTDGNFHPSPLMGGFGLKHPPPQILIKNTPVPADPPTTFNQSKLNSFITQYSTGQVSVEIEWELQKENSKRWNPEIQYTSNYYKSTSVDFAVNTEGVYSEPRPIGTRYLTRNL

SEQ ID NO: 656 - protein, 738 aa, Artificial Sequence
  Synthetic Polypeptide
MAADGYLPDWLEDNLSEGIREWWALKPGAPKPKANQQKQDDGRGLVLPGYKYLGPFNGLDKGEPVNAADAAALEHDKAYDQQLQAGDNPYLRYNHADAEFQERLQEDTSFGGNLGRAVFQAKKRVLEPLGLVEEGAKTAPGKKRPVEPSPQRSPDSSTGIGKKGQQPARKRLNFGQTGDSESVPDPQPLGEPPAAPSGVGPNTMAAGGGAPMADNNEGADGVGSSSGNWHCDSTWLGDRVITTSTRTWALPTYNNHLYKQISNGTSGGATNDNTYFGYGTPWGYFDFNRFHCHFSPRDWQRLINNNWGFRPKRLSFKLFNIQVKEVTQNEGTKTIANNLTSTIQVFTDSEYQLPYVLGSAHQGCLPPFPADVFTIPQYGYLTLNNGSQAVGRSSFYCLEYFPSQMLRTGNNFQFTYTFEDVPFHSSYAHSQSLDRLMNPLIDQYLYYLSRIQTTGGTANTQTLGFSQGGPNTMANQAKNWLPGPCYRQQRVSTTTGQNNNSNFAWTAGTKYHLNGRNSLANPGIAMATHKDDEERFFPSNGILIFGKQNAARDNADYSDVMPTSEEEIKTTNPVATEEYGIVADNLQQQNTAPQIGTVNSQGALPGMVWQNRDVYLQGPIWAKIPHTDGNFHPSPLMGGFGLKHPPPQILIKNTPVPADPPTTFNQSKLNSFITQYSTGQVSVEIEWELQKENSKRWNPEIQYTSNYYKSTSVDFAVNTEGVYSEPRPIGTRYLTRNL

SEQ ID NO: 657 - protein, 738 aa, Artificial Sequence
  Synthetic Polypeptide
MAADGYLPDWLEDNLSEGIREWWALKPGAPKPKANQQKQDDGRGLVLPGYKYLGPFNGLDKGEPVNAADAAALEHDKAYDQQLQAGDNPYLRYNHADAEFQERLQEDTSFGGNLGRAVFQAKKRVLEPLGLVEEGAKTAPGKKRPVEPSPQRSPDSSTGIGKKGQQPARKRLNFGQTGDSESVPDPQPLGEPPAAPSGVGPNTMAAGGGAPMADNNEGADGVGSSSGNWHCDSTWLGDRVITTSTRTWALPTYNNHLYKQISNGTSGGATNDNTYFGYSTPWGYFDFNRFHCHFSPRDWQRLINNNWGFRPKRLSFKLFNIQVKEVTQNEGTKTIANNLTSTIQVFTDSEYQLPYVLGSAHQGCLPPFPADVFTIPQYGYLTLNNGSQAVGRSSFYCLEYFPSQMLRTGNNFQFTYTFEDVPFHSSYAHSQSLDRPMNPLIDQYLYYLSRIQTTGGTANTQTLGFSQGGPNTMANQAKNWLPGPCYRQQRVSTTTGQNNNSNFAWTAGTKYHLNGRNSLANPGIAMATHKDDEERFFPSNGILIFGKQNAARDNADYSDVMPTSEEEIKTTNPVATEEYGIVADNLQQQNTAPQIGTVNSQGALPGMVWQNRDVYLQGPIWAKIPHTDGNFHPSPLMGGFGLKHPPPQILIKNTPVPADPPTTFNQSKLNSFITQYSTGQVSVEIEWELQKENSKRWNPEIQYTSNYYKSTSVDFAVNTEGVYSEPRPIGTRYLTRNL

SEQ ID NO: 658 - protein, 738 aa, Artificial Sequence
  Synthetic Polypeptide
MAADGYLPDWLEDNLSEGIREWWALKPGAPKPKANQQKQDDGRGLVLPGYKYLGPFNGLDKGEPVNAADAAALEHDKAYDQQLQAGDNPYLRYNHADAEFQERLQEDTSFGGNLGRAVFQAKKRVLEPLGLVEEGAKTAPGKKRPVEPSPQRSPDSSTGIGKKGQQPARKRLNFGQTGDSESVPDPQPLGEPPAAPSGVGPNTMAAGGGAPMADNNEGADGVGSSSGNWHCDSTWLGDRVITTSTRTWALPTYNNHLYKQISNGTSGGATNDNTYFGYSTPWGYFDFNRFHCHFSPRDWQRLINNNWGFRPKRLSLKLFNIQVKEVTQNEGTKTIANNLTSTIQVFTDSEYQLPYVLGSAHQGCLPPFPADVFTIPQYGYLTLNNGSQAVGRSSFYCLEYFPSQMLRTGNNFQFTYTFEDVPFHSSYAHSQSLDRLMNPLIDQYLYYLSRIQTTGGTANTQTLGFSQGGPNTMANQAKNWLPGPCYRQQRVSTTTGQNNNSNFAWTAGTKYHLNGRNSLANPGIAMATHKDDEERFFPSNGILIFGKQNAARDNADYSDVMPTSEEEIKTTNPVATEEYGIVADNLQQQNTAPQIGTVNSQGALPGMVWQNRDVYLQGPIWAKIPHTDGNFHPSPLMGGFGLKHPPPQILIKNTPVPADPPTTFNQSKLNSFITQYSTGQVSVEIEWELQKENSKRWNPEIQYTSNYYKSTSVDFAVNTEGVYSEPRPIGTRYLTRNL

SEQ ID NO: 659 - protein, 738 aa, Artificial Sequence
  Synthetic Polypeptide
MAADGYLPDWLEDNLSEGIREWWALKPGAPKPKANQQKQDDGRGLVLPGYKYLGPFNGLDKGEPVNAADAAALEHDKAYDQQLQAGDNPYLRYNHADAEFQERLQEDTSFGGNLGRAVFQAKKRVLEPLGLVEEGAKTAPGKKRPVEPSPQRSPDSSTGIGKKGQQPARKRLNFGQTGDSESVPDPQPLGEPPAAPSGVGPNTMAAGGGAPMADNNEGADGVGSSSGNWHCDSTWLGDRVITTSTRTWALPTYNNHLYKQISNGTSGGATNDNTYFGYSTPWGYFDFNRFHCHFSPRDWQRLINNNWGFRPKRLSFKLFNIQVKEVTQNEGTKTIANNLTSTIQVFTDSEYQLPYVLGSAHQGCLPPFPADVFTIPQYGYLTLNNGSQAVGRSSFYCLEYFPSQMLRTGNNFQFTYTFEDVPFHSSYAHSQSLDRLMNPLIDQYLYYLSRIQTTGGTANTQTLGFSQGGPNTMANQAKNWLPGPCYRQQRVSTTTGQNNNSNFAWTAGTKYHLNGRNSLANPGIAMATHKDDEERFFPSNGILIFGKQNAARDNADYSDVTPTSEEEIKTTNPVATEEYGIVADNLQQQNTAPQIGTVNSQGALPGMVWQNRDVYLQGPIWAKIPHTDGNFHPSPLMGGFGLKHPPPQILIKNTPVPADPPTTFNQSKLNSFITQYSTGQVSVEIEWELQKENSKRWNPEIQYTSNYYKSTSVDFAVNTEGVYSEPRPIGTRYLTRNL

SEQ ID NO: 660 - protein, 738 aa, Artificial Sequence
  Synthetic Polypeptide
MAADGYLPDWLEDNLSEGIREWWALKPGAPKPKANQQKQDDGRGLVLPGYKYLGPFNGLDKGEPVNAADAAALEHDKAYDQQLQAGDNPYLRYNHADAEFQERLQEDTSFGGNLGRAVFQAKKRVLEPLGLVEEGAKTAPGKKRPVEPSPQRSPDSSTGIGKKGQQPARKRLNFGQTGDSESVPDPQPLGEPPAAPSGVGPNTMAAGGGAPMADNNEGADGVGSSSGNWHCDSTWLGDRVITTSTRTWALPTYNNHLYKQISNGTSGGATNDNTYFGYSTPWGYFDFNRFHCHFSPRDWQRLINNNWGFRPKRLSFKLFNIQVKEVTQNEGTKTIANNLTSTIQVFTDSEYQLPYVLGSAHQGCLPPFPADVFTIPQYGYLTLNNGSQAVGRSSFYCLEYFPSQMLRTGNNFQFTYTFEDVPFHSSYAHSQSLDRLMNPLIDQYLYYLSRIQTTGGTANTQTLGFSQGGPNTMANQAKNWLPGPCYRQQRVSTTTGQNNNSNFAWTAGTKYHLNGRNSLANPGIAMATHKDDEERFFPSNGILIFGKQNAARDNADYSDVMPTSEEEIKTTNPVATEEYGIVADNLQQQNTAPQIGTVNSQGALPGMVRQNRDVYLQGPIWAKIPHTDGNFHPSPLMGGFGLKHPPPQILIKNTPVPADPPTTFNQSKLNSFITQYSTGQVSVEIEWELQKENSKRWNPEIQYTSNYYKSTSVDFAVNTEGVYSEPRPIGTRYLTRNL

SEQ ID NO: 661 - protein, 738 aa, Artificial Sequence
  Synthetic Polypeptide
MAADGYLPDWLEDNLSEGIREWWALKPGAPKPKANQQKQDDGRGLVLPGYKYLGPFNGLDKGEPVNAADAAALEHDKAYDQQLQAGDNPYLRYNHADAEFQERLQEDTSFGGNLGRAVFQAKKRVLEPLGLVEEGAKTAPGKKRPVEPSPQRSPDSSTDIGKKGQQPARKRLNFGQTGDSESVPDPQPLGEPPAAPSGVGPNTMAAGGGAPMADNNEGADGVGSSSGNWHCDSTWLGDRVITTSTRTWALPTYNNHLYKQISNGTSGGATNDNTYFGYSTPWGYFDFNRFHCHFSPRDWQRLINNNWGFRPKRLSFKLFNIQVKEVTQNEGTKTIANNLTSTIQVFTDSEYQLPYVLGSAHQGCLPPFPADVFTIPQYGYLTLNNGSQAVGRSSFYCLEYFPSQMLRTGNNFQFTYTFEDVPFHSSYAHSQSLDRLMNPLIDQYLYYLSRIQTTGGTANTQTLGFSQGGPNTMANQAKNWLPGPCYRQQRVSTTTGQNNNSNFAWTAGTKYHLNGRNSLANPGIAMATHKDDEERFFPSNGILIFGKQNAARDNADYSDVMPTSEEEIKTTNPVATEEYGIVADNLQQQNTAPQIGTVNSQGALPGMVWQNRDVYLQGPIWAKIPHTDGNFHPSPLMGGFGLKHPPPQILIKNTPVPADPPTTFNQSKLNSFITQYSTGQVSVEIEWELQKENSKRWNPEIQYTSNYYKSTSVDFAVNTEGVYSEPRPIGTRYLTRNL

SEQ ID NO: 662 - protein, 738 aa, Artificial Sequence
  Synthetic Polypeptide
MAADGYLPDWLEDNLSEGIREWWALKPGAPKPKANQQKQDDGRGLVLPGYKYLGPFNGLDKGEPVNAADAAALEHDKAYDQQLQAGDNPYLRYNHADAEFQERLQEDTSFGGNLGRAVFQAKKRVLEPLGLVEEGAKTAPGKKRPVEPSPQRSPDSSTGIGKKGQQPAGKRLNFGQTGDSESVPDPQPLGEPPAAPSGVGPNTMAAGGGAPMADNNEGADGVGSSSGNWHCDSTWLGDRVITTSTRTWALPTYNNHLYKQISNGTSGGATNDNTYFGYSTPWGYFDFNRFHCHFSPRDWQRLINNNWGFRPKRLSFKLFNIQVKEVTQNEGTKTIANNLTSTIQVFTDSEYQLPYVLGSAHQGCLPPFPADVFTIPQYGYLTLNNGSQAVGRSSFYCLEYFPSQMLRTGNNFQFTYTFEDVPFHSSYAHSQSLDRLMNPLIDQYLYYLSRIQTTGGTANTQTLGFSQGGPNTMANQAKNWLPGPCYRQQRVSTTTGQNNNSNFAWTAGTKYHLNGRNSLANPGIAMATHKDDEERFFPSNGILIFGKQNAARDNADYSDVMPTSEEEIKTTNPVATEEYGIVADNLQQQNTAPQIGTVNSQGALPGMVWQNRDVYLQGPIWAKIPHTDGNFHPSPLMGGFGLKHPPPQILIKNTPVPADPPTTFNQSKLNSFITQYSTGQVSVEIEWELQKENSKRWNPEIQYTSNYYKSTSVDFAVNTEGVYSEPRPIGTRYLTRNL

SEQ ID NO: 663 - protein, 738 aa, Artificial Sequence
  Synthetic Polypeptide
MAADGYLPDWLEDNLSEGIREWWALKPGAPKPKANQQKQDDGRGLVLPGYKYLGPFNGLDKGEPVNAADAAALEHDKAYDQQLQAGDNPYLRYNHADAEFQERLQEDTSFGGNLGRAVFQAKKRVLEPLGLVEEGAKTAPGKKRPVEPSPQRSPDSSTGIGKKGQQPARKRLNFGQTGDSESVPDPQPLGEPPAAPSGVGPNTMAAGGGAPMADNNEGADGVGSSSGNWHCDSTWLGDRVITTSTRTWALPTYNNHLYKQISNGTSGGATNDNTYFGYSTPWGYFDFNRFHCHFSPRDWQRLINNNWGFRPKRLSFKLFNIQVKEVTQNEGTKTIANNLTSTIQVFTDSEYQLPYVLGSAHQGCLPPFPADVFTIPQYGYLTLNNGSQAVGRPSFYCLEYFPSQMLRTGNNFQFTYTFEDVPFHSSYAHSQSLDRLMNPLIDQYLYYLSRIQTTGGTANTQTLGFSQGGPNTMANQAKNWLPGPCYRQQRVSTTTGQNNNSNFAWTAGTKYHLNGRNSLANPGIAMATHKDDEERFFPSNGILIFGKQNAARDNADYSDVMPTSEEEIKTTNPVATEEYGIVADNLQQQNTAPQIGTVNSQGALPGMVWQNRDVYLQGPIWAKIPHTDGNFHPSPLMGGFGLKHPPPQILIKNTPVPADPPTTFNQSKLNSFITQYSTGQVSVEIEWELQKENSKRWNPEIQYTSNYYKSTSVDFAVNTEGVYSEPRPIGTRYLTRNL

SEQ ID NO: 664 - protein, 738 aa, Artificial Sequence
  Synthetic Polypeptide
MAADGYLPDWLEDNLSEGIREWWALKPGAPKPKANQQKQDDGRGLVLPGYKYLGPFNGLDKGEPVNAADAAALEHDKAYDQQLQAGDNPYLRYNHADAEFQERLQEDTSFGGNLGRAVFQAKKRVLEPLGLVEEGAKTAPGKKRPVEPSPQRSPDSSTGIGKKGQQPARKRLNFGQTGDSESVPDPQPLGEPPAAPSGVGPNTMAAGGGAPMADNNEGADGVGSSSGNWHCDSTWLGDRVITTSTRTWALPTYNNHLYKQISNGTSGGATNDNTYFGYSTPWGYFDFNRFHCHFSPRDWQRLINNNWGFRPKRLSFKLFNIQVKAVTQNEGTKTIANNLTSTIQVFTDSEYQLPYVLGSAHQGCLPPFPADVFTIPQYGYLTLNNGSQAVGRSSFYCLEYFPSQMLRTGNNFQFTYTFEDVPFHSSYAHSQSLDRLMNPLIDQYLYYLSRIQTTGGTANTQTLGFSQGGPNTMANQAKNWLPGPCYRQQRVSTTTGQNNNSNFAWTAGTKYHLNGRNSLANPGIAMATHKDDEERFFPSNGILIFGKQNAARDNADYSDVMPTSEEEIKTTNPVATEEYGIVADNLQQQNTAPQIGTVNSQGALPGMVWQNRDVYLQGPIWAKIPHTDGNFHPSPLMGGFGLKHPPPQILIKNTPVPADPPTTFNQSKLNSFITQYSTGQVSVEIEWELQKENSKRWNPEIQYTSNYYKSTSVDFAVNTEGVYSEPRPIGTRYLTRNL

SEQ ID NO: 665 - protein, 738 aa, Artificial Sequence
  Synthetic Polypeptide
MAADGYLPDWLEDNLSEGIREWWALKPGAPKPKANQQKQDDGRGLVLPGYKYLGPFNGLDKGEPVNAADAAALEHDKAYDQQLQAGDNPYLRYNHADAEFQERLQEDTSFGGNLGRAVFQAKKRVLEPLGLVEEGAKTAPGKKRPVEPSPQRSPDSSTGIGKKGQQPARKRLNFGQTGDSESVPDPQPLGEPPAAPSGVGPNTMAAGGGAPMADNNEGADGVGSSSGNWHCDSTWLGDRVITTSTRTWALPTYNNHLYKQISNGTSGGATNDNTYFGYSTPWGYFDFNRFHCHFSPRDWQRLINNNWGFRPKRLSFKLFNIQVKEVTQNEGTKTIANNLTSTIQVFTDSEYQLPYVLGSAHQGCLPPFPADVFTIPQYGYLTLNNGSQAVGRSSFYCLEYFPSQMLRTGNNFQFTYTFEDVPFHSSYAHSQSLDRLMNPLIDQYLYYLSRIQTTGGTANTQTLGFSQGGPNTMANQAKNWLPGPCYRQQRVSTTTGQNNNSNFAWTAGTKYHLNGRNSLANPGIAMATHKDDEERFFPSNGILIFGKQNAARDNADYSDVMPTSEEEIKTTNPVATEEYGIVADNLQQQNTAPQIGTVNSQGALPGMVWQNRDVYLQGPIWAKIPHTDGNFHPSPLMGGFGLKHPPPQILIKNTPVPADPPTAFNQSKLNSFITQYSTGQVSVEIEWELQKENSKRWNPEIQYTSNYYKSTSVDFAVNTEGVYSEPRPIGTRYLTRNL

SEQ ID NO: 666 - protein, 738 aa, Artificial Sequence
  Synthetic Polypeptide
MAADGYLPDWLEDNLSEGIREWWALKPGAPKPKANQQKQDDGRGLVLPGYKYLGPFNGLDKGEPVNAADAAALEHDKAYDQQLQAGDNPYLRYNHADAEFQERLQEDTSFGGNLGRAVFQAKKRVLEPLGLVEEGAKTAPGKKRPVEPSPQRSPDSSTGIGKKGQQPARKRLNFGQTGDSESVPDPQPLGEPPAAPSGVGPNTMAAGGGAPMADNNEGADGVGSSSGNWHCDSTWLGDRVITTSTRTWALPTYNNHLYKQISNGTSGGATNDNTYFGYSTPWGYFDFNRFRCHFSPRDWQRLINNNWGFRPKRLSFKLFNIQVKEVTQNEGTKTIANNLTSTIQVFTDSEYQLPYVLGSAHQGCLPPFPADVFTIPQYGYLTLNNGSQAVGRSSFYCLEYFPSQMLRTGNNFQFTYTFEDVPFHSSYAHSQSLDRLMNPLIDQYLYYLSRIQTTGGTANTQTLGFSQGGPNTMANQAKNWLPGPCYRQQRVSTTTGQNNNSNFAWTAGTKYHLNGRNSLANPGIAMATHKDDEERFFPSNGILIFGKQNAARDNADYSDVMPTSEEEIKTTNPVATEEYGIVADNLQQQNTAPQIGTVNSQGALPGMVWQNRDVYLQGPIWAKIPHTDGNFHPSPLMGGFGLKHPPPQILIKNTPVPADPPTTFNQSKLNSFITQYSTGQVSVEIEWELQKENSKRWNPEIQYTSNYYKSTSVDFAVNTEGVYSEPRPIGTRYLTRNL

SEQ ID NO: 667 - protein, 738 aa, Artificial Sequence
  Synthetic Polypeptide
MAADGYLPDWLEDNLSEGIREWWALKPGAPKPKANQQKQDDGRGLVLPGYKYLGPFNGLDKGEPVNAADAAALEHDKAYDQQLQAGDNPYLRYNHADAEFQERLQEDTSFGGNLGRAVFQAKKRVLEPLGLVEEGAKTAPGKKRPVEPSPQRSPDSSTGIGKKGQQPARKRLNFGQTGDSESVPDPQPLGEPPAAPSGVGPNTMAAGGGAPMADNNEGADGVGSSSGNWHCDSTWLGDRVITTSTRTWALPTYNNHLYKQISNGTSGGATNDNTYFGYSTPWGYFDFNRFHCHFSPRDWQRLINNNWGFRPKRLSFKLFNIQVKEVTQNEGTKTIANNLTSTIQVFTDSEYQLPYVLGSAHQGCLPPFPADVFTIPQYGYLTLNNGSQAVGRSSFYCLEYFPSQMLRTGNNFQFTYTLEDVPFHSSYAHSQSLDRLMNPLIDQYLYYLSRIQTTGGTANTQTLGFSQGGPNTMANQAKNWLPGPCYRQQRVSTTTGQNNNSNFAWTAGTKYHLNGRNSLANPGIAMATHKDDEERFFPSNGILIFGKQNAARDNADYSDVMPTSEEEIKTTNPVATEEYGIVADNLQQQNTAPQIGTVNSQGALPGMVWQNRDVYLQGPIWAKIPHTDGNFHPSPLMGGFGLKHPPPQILIKNTPVPADPPTTFNQSKLNSFITQYSTGQVSVEIEWELQKENSKRWNPEIQYTSNYYKSTSVDFAVNTEGVYSEPRPIGTRYLTRNL

SEQ ID NO: 668 - protein, 738 aa, Artificial Sequence
  Synthetic Polypeptide
MAADGYLPDWLEDNLSEGIREWWALKPGAPKPKANQQKQDDGRGLVLPGYKYLGPFNGLDKGEPVNAADAAALEHDKAYDQQLQAGDNPYLRYNHADAEFQERLQEDTSFGGNLGRAVFQAKKRVLEPLGLVEEGAKTAPGKKRPVEPSPQRSPDSSTGIGKKGQQPARKRLNFGQTGDSESVPDPQPLGEPPAAPSGVGPNTMAAGGGAPMADNNEGADGVGSSSGNWHCDSTWLGDRVITTSTRTWALPTYNNHLYKQISNGTSGGATNDNTYFGYSTPWGYFDFNRFHCHFSPRDWQRLINNNWGFRPKRLSFKLFNIQVKEVTQNEGTKTIANNLTSTIQVFTDSEYQLPYVLGSAHQGCLPPFPADVFTIPQYGYLTLNNGSQAVGRSSFYCLEYFPSQMLRTGNNFQFTYTFEDVPFHSSYAHSQSLDRLMNPLIDQYLYYLSRIQTTGGTANTQTLGFSQGGPNTMANQAKNWLPGPCYRQQRVSTTTGQNNNSNFAWTAGTKYHLNGRNSLANPGIAMATHKDDEERFFPSNGILIFGKQNAARDNADYSDVMPTSEEEIKTTNPVATEEYGIVADNLQQQSTAPQIGTVNSQGALPGMVWQNRDVYLQGPIWAKIPHTDGNFHPSPLMGGFGLKHPPPQILIKNTPVPADPPTTFNQSKLNSFITQYSTGQVSVEIEWELQKENSKRWNPEIQYTSNYYKSTSVDFAVNTEGVYSEPRPIGTRYLTRNL

SEQ ID NO: 669 - protein, 738 aa, Artificial Sequence
  Synthetic Polypeptide
MAADGYLPDWLEDNLSEGIREWWALKPGAPKPKANQQKQDDGRGLVLPGYKYLGPFNGLDKGEPVNAADAAALEHDKAYDQQLQAGDNPYLRYNHADAEFQERLQEDTSFGGNLGRAVFQAKKRVLEPLGLVEEGAKTAPGKKRPVEPSPQRSPDSSTGIGKKGQQPARKRLNFGQTGDSESVPDPQPLGEPPAAPSGVGPNTMAAGGGAPMADNNEGADGVGSSSGNWHCDSTWLGDRVITTSTRTWALPTYNNHLYKQISNGTSGGATNDNTYFGYSTPWGYFDFNRFHCHFSPRDWQRLINNNWGFRPKRLSFKLFNIQVKEVTQNEGTKTIANNLTSTIQVFTDSEYQLPYVLGSAHQGCLPPFPADVFTIPQYGYLTLNNGSQAVGRSSFYCLEYFPSQMLRTGNNFQFTYTFEDVPFHSSYAHSQSLDRLMNPLIDQYLYYLSRIQTTGGTANTQTLGFSQGGPNTMANQAKNWLPGPCYRQQRVSTTTGQNNNSNFAWTAGTKYHLNGRNSLANPGIAMATHKDDEERFFPSNGILIFGKQNAARDNADYSDVMPTSEEEIKTTNPVATEEYGIVADNLQQQNTAPQIGTVSSQGALPGMVWQNRDVYLQGPIWAKIPHTDGNFHPSPLMGGFGLKHPPPQILIKNTPVPADPPTTFNQSKLNSFITQYSTGQVSVEIEWELQKENSKRWNPEIQYTSNYYKSTSVDFAVNTEGVYSEPRPIGTRYLTRNL

SEQ ID NO: 670 - protein, 738 aa, Artificial Sequence
  Synthetic Polypeptide
MAADGYLPDWLEDNLSEGIREWWALKPGAPKPKANQQKQDDGRGLVLPGYKYLGPFNGLDKGEPVNAADAAALEHDKAYDQQLQAGDNPYLRYNHADAEFQERLQEDTSFGGNLGRAVFQAKKRVLEPLGLVEEGAKTAPGKKRPVEPSPQRSPDSSTGIGKKGQQPARKRLNFGQTGDSESVPDPQPLGEPPAAPSGVGPNTMAAGGGAPMADNNEGADGVGSSSGNWHCDSTWLGDRVITTSTRTWALPTYNNHLYKQISNGTSGGATNDNTYFGYSTPWGYFDFNRFHCHFSPRDWQRLINNNWGFRPKRLSFKLFNIQVKEVTQNEGTKTIANNLTSTIQVFTDSEYQLPYVLGSAHQGCLPPFPADVFTIPQYGYLTLNNGSQAVGRSSFYCLEYFPSQMLRTGNNFQFTYTFEDVPFHSSYAHSQSLDRLMNPLIDQYLYYLSRIQTTGGTANTQTLGFSQGGPNTMANQAKNWLPGPCYRQQRVSTTTGQNNNSNFAWTAGTKYHLNGRNSLANPGIAMATHKDDEERFFPSNGILIFGKQSAARDNADYSDVMPTSEEEIKTTNPVATEEYGIVADNLQQQNTAPQIGTVNSQGALPGMVWQNRDVYLQGPIWAKIPHTDGNFHPSPLMGGFGLKHPPPQILIKNTPVPADPPTTFNQSKLNSFITQYSTGQVSVEIEWELQKENSKRWNPEIQYTSNYYKSTSVDFAVNTEGVYSEPRPIGTRYLTRNL

SEQ ID NO: 671 - protein, 738 aa, Artificial Sequence
  Synthetic Polypeptide
MAADGYLPDWLEDNLSEGIREWWALKPGAPKPKANQQKQDDGRGLVLPGYKYLGPFNGLDKGEPVNAADAAALEHDKAYDQQLQAGDNPYLRYNHADAEFQERLQEDTSFGGNLGRAVFQAKKRVLEPLGLVEEGAKTAPGKKRPVEPSPQRSPDSSTGIGKKGQQPARKRLNFGQTGDSESVPDPQPLGEPPAAPSGVGPNTMAAGGGAPMADNNEGADGVGSSSGNWHCDSTWLGDRVITTSTRTWALPTYNNHLYKQISNGTSGGATNDNTYFGYSTPWGYFDFNRFHCHFSPRDWQRLINNNWGFRPKRLSFKLFNIQVKEVTQNEGTKTIANNLTSTIQVFTDSEYQLPYVLGSAHQGCLPPFPADVFTIPQYGYLTLNNGSQAVGRSSFYCLEYFPSQMLRTGNNFQFTYTFEDVPFHSSYAHSQSLDRLMNPLIDQYLYYLSRIQTAGGTANTQTLGFSQGGPNTMANQAKNWLPGPCYRQQRVSTTTGQNNNSNFAWTAGTKYHLNGRNSLANPGIAMATHKDDEERFFPSNGILIFGKQNAARDNADYSDVMPTSEEEIKTTNPVATEEYGIVADNLQQQNTAPQIGTVNSQGALPGMVWQNRDVYLQGPIWAKIPHTDGNFHPSPLMGGFGLKHPPPQILIKNTPVPADPPTTFNQSKLNSFITQYSTGQVSVEIEWELQKENSKRWNPEIQYTSNYYKSTSVDFAVNTEGVYSEPRPIGTRYLTRNL

SEQ ID NO: 672 - protein, 738 aa, Artificial Sequence
  Synthetic Polypeptide
MAADGYLPDWLEDNLSEGIREWWALKPGAPKPKANQQKQDDGRGLVLPGYKYLGPFNGLDKGEPVNAADAAALEHDKAYDQQLQAGDNPYLRYNHADAEFQERLQEDTSFGGNLGRAVFQAKKRVLEPLGLVEEGAKTAPGKKRPVEPSPQRSPDSSTGIGKKGQQPARKRLNFGQTGDSESVPDPQPLGEPPAAPSGVGPNTMAAGGGAPMADNNEGADGVGSSSGNWHCDSTWLGDRVITTSTRTWALPTYNNHLYKQISNGTSGGATNDNTYFGYSTPWGYFDFNRFHCHFSPRDWQRLINNNWGFRPKRLSFKLFNIQVKEVTQNEGTKTIANNLTSTIQVFTDSEYQLPYVLGSAHQGCLPPFPADVFTIPQYGYLTLNNGSQAVGRSSFYCLEYFPSQMLRTGNNFQFTYTFEDVPFHSSYAHSQNLDRLMNPLIDQYLYYLSRIQTTGGTANTQTLGFSQGGPNTMANQAKNWLPGPCYRQQRVSTTTGQNNNSNFAWTAGTKYHLNGRNSLANPGIAMATHKDDEERFFPSNGILIFGKQNAARDNADYSDVMPTSEEEIKTTNPVATEEYGIVADNLQQQNTAPQIGTVNSQGALPGMVWQNRDVYLQGPIWAKIPHTDGNFHPSPLMGGFGLKHPPPQILIKNTPVPADPPTTFNQSKLNSFITQYSTGQVSVEIEWELQKENSKRWNPEIQYTSNYYKSTSVDFAVNTEGVYSEPRPIGTRYLTRNL

SEQ ID NO: 673 - protein, 738 aa, Artificial Sequence
  Synthetic Polypeptide
MAADGYLPDWLEDNLSEGIREWWALKPGAPKPKANQQKQDDGRGLVLPGYKYLGPFNGLDKGEPVNAADAAALEHDKAYDQQLQAGDNPYLRYNHADAEFQERLQEDTSFGGNLGRAVFQAKKRVLEPLGLVEEGAKTAPGKKRPVEPSPQRSPDSSTGIGKKGQQPARKRLNFGQTGDSESVPDPQPLGEPPAAPSGVGPNTMAAGGGAPMADNNEGADGVGSSSGNWHCDSTWLGDRVITTSTRTWALPTYNNHLYKQISNGTSGGATNDNTYFGYSTPWGYFDFNRFHCHFSPRDWQRLINNNWGFRPKRLSFKLFNIQVKAVTQNEGTKTIANNLTSTIQVFTDSEYQLPYVLGSAHQGCLPPFPADVFTIPQYGYLTLNNGSQAVGRSSFYCLEYFPSQMLRTGNNFQFTYTFEDVPFHSSYAHSQSLDRLMNPLIDQYLYYLSRIQTTGGTANTQTLGFSQGGPNTMANQAKNWLPGPCYRQQRVSTTTGQNNNSNFAWTAGTKYHLNGRNSLANPSIAMATHKDDEERFFPSNGILIFGKQNAARDNADYSDVMPTSEEEIKTTNPVATEEYGIVADNLQQQNTAPQIGTVNSQGALPGMVWQNRDVYLQGPIWAKIPHTDGNFHPSPLMGGFGLKHPPPQILIKNTPVPADPPTTFNQSKLNSFITQYSTGQVSVEIEWELQKENSKRWNPEIQYTSNYYKSTSVDFAVNTEGVYSEPRPIGTRYLTRNL

SEQ ID NO: 674 - protein, 738 aa, Artificial Sequence
  Synthetic Polypeptide
MAADGYLPDWLEDNLSEGIREWWALKPGAPKPKANQQKQDDGRGLVLPGYKYLGPFNGLDKGEPVNAADAAALEHDKAYDQQLQAGDNPYLRYNHADAEFQERLQEDTSFGGNLGRAVFQAKKRVLEPLGLVEEGAKTAPGKKRPVEPSPQRSPDSSTGIGKKGQQPARKRLNFGQTGDSESVPDPQPLGEPPAAPSGVGPNTMAAGGGAPMADNNEGADGVGSSSGNWHCDSTWLGDRVITTSTRTWALPTYNNHLYKQISNGTSGGATNDNTYFGYSTPWGYFDFNRFHCHFSPRDWQRLINNNWGFRPKRLSFKLFNIQVKEVTQNEGTKTIANNLTSTIQVFTDSEYQLPYVLGSAHQGCLPPFPADVFTIPQYGYLTLNNGSQAVGRSSFYCLEYFPSQMLRTGNNFQFTYTFEDVPFHSSYAHSQSLDRLMNPLIDQYLYYLSRIQTTGGTANTQTLGFSQGGPNTMANQAKNWLPGPCYRQQRVSTTTGQNNNSNFAWTAGTKYHLNGRNSLANPGIAMATHKDDEERFFPSNGILIFGKQNAARDNADYSDVMPTSEEEIKTTNPVATEEYDIVADNLQQQNTAPQIGTVNSQGALPGMVWQNRDVYLQGPIWAKIPHTDGNFHPSPLMGGFGLKHPPPQILIKNTPVPADPPTTFNQSKLNSFITQYSTGQVSVEIEWELQKENSKRWNPEIQYTSNYYKSTSVDFAVNTEGVYSEPRPIGTRYLTRNL

SEQ ID NO: 675 - protein, 738 aa, Artificial Sequence
  Synthetic Polypeptide
MAADGYLPDWLEDNLSEGIREWWALKPGAPKPKANQQKQDDGRGLVLPGYKYLGPFNGLDKGEPVNAADAAALEHDKAYDQQLQAGDNPYLRYNHADAEFQERLQEDTSFGGNLGRAVFQAKKRVLEPLGLVEEGAKTAPGKKRPVEPSPQRSPDSSTGIGKKGQQPARKRLNFGQTGDSESVPDPQPLGEPPAAPSGVGPNTMAAGGGAPMADNNEGADGVGSSSGNWHCDSTWLGDRVITTSTRTWALPTYNNHLYKQISNGTSGGATNDNTYFGYSTPWGYFDFNRFHCHFSPRDWQRLINNNWGFRPKRLSFKLFNIQVKEVTQNEGTKTIANNLTSTIQVFTDSEYQLPYVLGSAHQGCLPPFPADVFTIPQYGYLTLNNGSQAVGRSSFYCLEYFPSQMLRTGNNFQFTYTFEDVPFHSSYAHSQSLDRLMNPLIDQYLYYLSRIQTTGGTANTQTPGFSQGGPNTMANQAKNWLPGPCYRQQRVSTTTGQNNNSNFAWTAGTKYHLNGRNSLANPGIAMATHKDDEERFFPSNGILIFGKQNAARDNADYSDVMPTSEEEIKTTNPVATEEYGIVADNLQQQNTAPQIGTVNSQGALPGMVWQNRDVYLQGPIWAKIPHTDGNFHPSPLMGGFGLKHPPPQILIKNTPVPADPPTTFNQSKLNSFITQYSTGQVSVEIEWELQKENSKRWNPEIQYTSNYYKSTSVDFAVNTEGVYSEPRPIGTRYLTRNL

SEQ ID NO: 676 - protein, 738 aa, Artificial Sequence
  Synthetic Polypeptide
MAADGYLPDWLEDNLSEGIREWWALKPGAPKPKANQQKQDDGRGLVLPGYKYLGPFNGLDKGEPVNAADAAALEHDKAYDQQLQAGDNPYLRYNHADAEFQERLQEDTSFGGNLGRAVFQAKKRVLEPLGLVEEGAKTAPGKKRPVEPSPQRSPDSSTGIGKKGQQPARKRLNFGQTGDSESVPDPQPLGEPPAAPSGVGPNTMAAGGGAPMADNNEGADGVGSSSGNWHCDSTWLGDRVITTSTRTWALPTYNNHLYKQISNGTSGGATNDNTYFGYSTPWGYFDFNRFHCHFSPRDWQRLINNNWGFRPKRLSFKLFNIQVKEVTQNEGTKTIANNLTSTIQVFTDSEYQLPYVLGSAHQGCLPPFPADVFTIPQYGYLTLNNGSQAVGRSSSYCLEYFPSQMLRTGNNFQFTYTFEDVPFHSSYAHSQSLDRLMNPLIDQYLYYLSRIQTTGGTANTQTLGFSQGGPNTMANQAKNWLPGPCYRQQRVSTTTGQNNNSNFAWTAGTKYHLNGRNSLANPGIAMATHKDDEERFFPSNGILIFGKQNAARDNADYSDVMPTSEEEIKTTNPVATEEYGIVADNLQQQNTAPQIGTVNSQGALPGMVWQNRDVYLQGPIWAKIPHTDGNFHPSPLMGGFGLKHPPPQILIKNTPVPADPPTTFNQSKLNSFITQYSTGQVSVEIEWELQKENSKRWNPEIQYTSNYYKSTSVDFAVNTEGVYSEPRPIGTRYLTRNL

SEQ ID NO: 677 - protein, 738 aa, Artificial Sequence
  Synthetic Polypeptide
MAADGYLPDWLEDNLSEGIREWWALKPGAPKPKANQQKQDDGRGLVLPGYKYLGPFNGLDKGEPVNAADAAALEHDKAYDQQLQAGDNPYLRYNHADAEFQERLQEDTSFGGNLGRAAFQAKKRVLEPLGLVEEGAKTAPGKKRPVEPSPQRSPDSSTGIGKKGQQPARKRLNFGQTGDSESVPDPQPLGEPPAAPSGVGPNTMAAGGGAPMADNNEGADGVGSSSGNWHCDSTWLGDRVITTSTRTWALPTYNNHLYKQISNGTSGGATNDNTYFGYSTPWGYFDFNRFHCHFSPRDWQRLINNNWGFRPKRLSFKLFNIQVKEVTQNEGTKTIANNLTSTIQVFTDSEYQLPYVLGSAHQGCLPPFPADVFTIPQYGYLTLNNGSQAVGRSSFYCLEYFPSQMLRTGNNFQFTYTFEDVPFHSSYAHSQSLDRLMNPLIDQYLYYLSRIQTTGGTANTQTLGFSQGGPNTMANQAKNWLPGPCYRQQRVSTTTGQNNNSNFAWTAGTKYHLNGRNSLANPGIAMATHKDDEERFFPSNGILIFGKQNAARDNADYSDVMPTSEEEIKTTNPVATEEYGIVADNLQQQNTAPQIGTVNSQGALPGMVWQNRDVYLQGPIWAKIPHTDGNFHPSPLMGGFGLKHPPPQILIKNTPVPADPPTTFNQSKLNSFITQYSTGQVSVEIEWELQKENSKRWNPEIQYTSNYYKSTSVDFAVNTEGVYSEPRPIGTRYLTRNL

SEQ ID NO: 678 - protein, 738 aa, Artificial Sequence
  Synthetic Polypeptide
MAADGYLPDWLEDNLSEGIREWWALKPGAPKPKANQQKQDDGRGLVLPGYKYLGPFNGLDKGEPVNAADAAALEHDKAYDQQLQAGDNPYLRYNHADAEFQERLQEDTSFGGNLGRAVFQAKKRVLEPLGLVEEGAKTAPGKKRPVEPSPQRSPDSSTGIGKKGQQPARKRLNFGQTGDSESVPDPQPLGEPPAAPSGVGPNTMAAGGGAPMADNNEGADGVGSSSGNWHCDSTWLGDRVITTSTRTWALPTYNNHLYKQISNGTSGGATDDNTYFGYSTPWGYFDFNRFHCHFSPRDWQRLINNNWGFRPKRLSFKLFNIQVKEVTQNEGTKTIANNLTSTIQVFTDSEYQLPYVLGSAHQGCLPPFPADVFTIPQYGYLTLNNGSQAVGRSSFYCLEYFPSQMLRTGNNFQFTYTFEDVPFHSSYAHSQSLDRLMNPLIDQYLYYLSRIQTTGGTANTQTLGFSQGGPNTMANQAKNWLPGPCYRQQRVSTTTGQNNNSNFAWTAGTKYHLNGRNSLANPGIAMATHKDDEERFFPSNGILIFGKQNAARDNADYSDVMPTSEEEIKTTNPVATEEYGIVADNLQQQNTAPQIGTVNSQGALPGMVWQNRDVYLQGPIWAKIPHTDGNFHPSPLMGGFGLKHPPPQILIKNTPVPADPPTTFNQSKLNSFITQYSTGQVSVEIEWELQKENSKRWNPEIQYTSNYYKSTSVDFAVNTEGVYSEPRPIGTRYLTRNL

SEQ ID NO: 679 - protein, 738 aa, Artificial Sequence
  Synthetic Polypeptide
MAADGYLPDWLEDNLSEGIREWWALKPGAPKPKANQQKQDDGRGLVLPGYKYLGPFNGLDKGEPVNAADAAALEHDKAYDQQLQAGDNPYLRYNHADAEFQERLQEDTSFGGNLGRAVFQAKKRVLEPLGLVEEGAKTAPGKKRPVEPSPQRSPDSSTGIGKKGQQPARKRLNFGQTGDSESVPDPQPLGEPPAAPSGVGPNTMAAGGGAPMADNNEGADGVGSSSGNWHCDSTWLGDRVITTSTRTWALPTYNNHLYKQISNGTSGGATNDNTYFGYSTPWGYFDFNRFHCHFSPRDWQRLINNNWGFRPKRLSFKLFNIQVKEVTQNEGTKTIANNLTSTIQVFTDSEYQLPYVLGSAHQGCLPPFPADVFTIPQYGYLTLNNGSQAVGRSSFYCLEYFPSQMLRTGNNFQFTYTFEDVPFHSSYAHSQSLDRLMNPLIDQYLYYLSRIQTTGGTANTQTLGFSQGGPNTMANQAKNWLPGPCYRQQRVSTTTGQNNNSNFAWTAGTKYHLNGRNSLANPGIAMATHKDDEERFFPSNGILIFGKQNATRDNADYSDVMPTSEEEIKTTNPVATEEYGIVADNLQQQNTAPQIGTVNSQGALPGMVWQNRDVYLQGPIWAKIPHTDGNFHPSPLMGGFGLKHPPPQILIKNTPVPADPPTTFNQSKLNSFITQYSTGQVSVEIEWELQKENSKRWNPEIQYTSNYYKSTSVDFAVNTEGVYSEPRPIGTRYLTRNL

SEQ ID NO: 680 - protein, 738 aa, Artificial Sequence
  Synthetic Polypeptide
MAADGYLPDWLEDNLSEGIREWWALKPGAPKPKANQQKQDDGRGLVLPGYKYLGPFNGLDKGEPVNAADAAALEHDKAYDQQLQAGDNPYLRYNHADAEFQERLQEDTSFGGNLGRAVFQAKKRVLEPLGLVEEGAKTAPGKKRPVEPSPQRSPDSSTGIGKKGQQPARKRLNFGQTGDSESVPDPQPLGEPPAAPSGVGPNTMAAGGGAPMADNNEGADGVGSSSGNWHCDSTWLGDRVITTSTRTWALPTYNNHLYKQISNGTSGGATNDNTYFGYSTPWGYFDFNRFHCHFSPRDWQRLINNNWGFRPKRLSFKLFNIQVKEVTQNEGTKTIANNLTSTIQVFTDSEYQLPYVLGSAHQGCLPPFPADVFTIPQYGYLTLNNGSQAVGRSSFYCLEYFPSQMLRTGNNFQFTYTFEDVPFHSSYAHSQSLDRLMNPLIDQYLYYLSRIQTTGGTANTQTLGFSQGGPNTMANQAKNWLPGPCYRQQRVSTTTGQNNNSNFAWTAGTKYHLNGRNSLANPGIAMATHKDDEERFFPSNGILIFGKQNAARDNADYSDVMPTSEEEIKTTNPVATEEHGIVADNLQQQNTAPQIGTVNSQGALPGMVWQNRDVYLQGPIWAKIPHTDGNFHPSPLMGGFGLKHPPPQILIKNTPVPADPPTTFNQSKLNSFITQYSTGQVSVEIEWELQKENSKRWNPEIQYTSNYYKSTSVDFAVNTEGVYSEPRPIGTRYLTRNL

SEQ ID NO: 681 - protein, 738 aa, Artificial Sequence
  Synthetic Polypeptide
MAADGYLPDWLEDNLSEGIREWWALKPGAPKPKANQQKQDDGRGLVLPGYKYLGPFNGLDKGEPVNAADAAALEHDKAYDQQLQAGDNPYLRYNHADAEFQERLQEDTSFGGNLGRAVFQAKKRVLEPLGLVEEGAKTAPGKKRPVEPSPQRSPDSSTGIGKKGQQPARKRLNFGQTGDSESVPDPQPLGEPPAAPSGVGPNTMAAGGGAPMADNNEGADGVGSSSGNWHCDSTWLGDRVITTSTRTWALPTYNNHLYKQISNGTSGGATNDNTYFGYSTPWGYFDFNRFHCHFSPRDWQRLINNNWGFRPKRLSFKLFNIQVKEVTQNEGTKTIANNLTSTIQVFTDSEYQLPYVLGSAHQGCLPPFPADVFTIPQYGYLTLNNGSQAVGRSSFYCLEYFPSQMLRTGNNFQFTYTFEDVPFHSSYARSQSLDRLMNPLIDQYLYYLSRIQTTGGTANTQTLGFSQGGPNTMANQAKNWLPGPCYRQQRVSTTTGQNNNSNFAWTAGTKYHLNGRNSLANPGIAMATHKDDEERFFPSNGILIFGKQNAARDNADYSDVMPTSEEEIKTTNPVATEEYGIVADNLQQQNTAPQIGTVNSQGALPGMVWQNRDVYLQGPIWAKIPHTDGNFHPSPLMGGFGLKHPPPQILIKNTPVPADPPTTFNQSKLNSFITQYSTGQVSVEIEWELQKENSKRWNPEIQYTSNYYKSTSVDFAVNTEGVYSEPRPIGTRYLTRNL

SEQ ID NO: 682 - protein, 738 aa, Artificial Sequence
  Synthetic Polypeptide
MAADGYLPDWLEDNLSEGIREWWALKPGAPKPKANQQKQDDGRGLVLPGYKYLGPFNGLDKGEPVNAADAAALEHDKAYDQQLQAGDNPYLRYNHADAEFQERLQEDTSFGGNLGRAVFQAKKRVLEPLGLVEEGAKTAPGKKRPVEPSPQRSPDSSTGIGKKGQQPARKRLNFGQTGDSESVPDPQPLGEPPAAPSGVGPNTMAAGGGAPMADNNEGADGVGSSSGNWHCDSTWLGDRVITTSTRTWALPTYNNHLYKQISNGTSGGATNDNTYFGYSTPWGYFDFNRFHCHFSPRDWQRLINNNWGFRPKRLSFKLFNIQVKEVTQNEGTKTIANNLTSTIQVFTDSEYQLPYVLGSAHQGCLPPLPADVFTIPQYGYLTLNNGSQAVGRSSFYCLEYFPSQMLRTGNNFQFTYTFEDVPFHSSYAHSQSLDRLMNPLIDQYLYYLSRIQTTGGTANTQTLGFSQGGPNTMANQAKNWLPGPCYRQQRVSTTTGQNNNSNFAWTAGTKYHLNGRNSLANPGIAMATHKDDEERFFPSNGILIFGKQNAARDNADYSDVMPTSEEEIKTTNPVATEEYGIVADNLQQQNTAPQIGTVNSQGALPGMVWQNRDVYLQGPIWAKIPHTDGNFHPSPLMGGFGLKHPPPQILIKNTPVPADPPTTFNQSKLNSFITQYSTGQVSVEIEWELQKENSKRWNPEIQYTSNYYKSTSVDFAVNTEGVYSEPRPIGTRYLTRNL

SEQ ID NO: 683 - protein, 738 aa, Artificial Sequence
  Synthetic Polypeptide
MAADGYLPDWLEDNLSEGIREWWALKPGAPKPKANQQKQDDGRGLVLPGYKYLGPFNGLDKGEPVNAADAAALEHDKAYDQQLQAGDNPYLRYNHADAEFQERLQEDTSFGGNLGRAVFQAKKRVLEPLGLVEEGAKTAPGKKRPVEPSPQRSPDSSTGIGKKGQQPARKRLNFGQTGDSESVPDPQPLGEPPAAPSGVGPNTMAAGGGAPMADNNEGADGVGSSSGNWHCDSTWLGDRVITTSTRTRALPTYNNHLYKQISNGTSGGATNDNTYFGYSTPWGYFDFNRFHCHFSPRDWQRLINNNWGFRPKRLSFKLFNIQVKEVTQNEGTKTIANNLTSTIQVFTDSEYQLPYVLGSAHQGCLPPFPADVFTIPQYGYLTLNNGSQAVGRSSFYCLEYFPSQMLRTGNNFQFTYTFEDVPFHSSYAHSQSLDRLMNPLIDQYLYYLSRIQTTGGTANTQTLGFSQGGPNTMANQAKNWLPGPCYRQQRVSTTTGQNNNSNFAWTAGTKYHLNGRNSLANPGIAMATHKDDEERFFPSNGILIFGKQNAARDNADYSDVMPTSEEEIKTTNPVATEEYGIVADNLQQQNTAPQIGTVNSQGALPGMVWQNRDVYLQGPIWAKIPHTDGNFHPSPLMGGFGLKHPPPQILIKNTPVPADPPTTFNQSKLNSFITQYSTGQVSVEIEWELQKENSKRWNPEIQYTSNYYKSTSVDFAVNTEGVYSEPRPIGTRYLTRNL

SEQ ID NO: 684 - protein, 738 aa, Artificial Sequence
  Synthetic Polypeptide
MAADGYLPDWLEDNLSEGIREWWALKPGAPKPKANQQKQDDGRGLVLPGYKYLGPFNGLDKGEPVNAADAAALEHDKAYDQQLQAGDNPYLRYNHADAEFQERLQEDTSFGGNLGRAVFQAKKRVLEPLGLVEEGAKTAPGKKRPVEPSPQRSPDSSTGIGKKGQQPARKRLNFGQTGDSESVPDPQPLGEPPAAPSGVGPNTMAAGGGAPMADNNEGADGVGSSSGNWHCDSTWLGDRVITTSTRTWALPTYNNHLYKQISNGTSGGATNDNTYFGYSTPWGYFDFNRFHCHFSPRDWQRLINNNWGFRPKRLSFKLFNIQVKEVTQNEGTKTIANNLTSTIQVFTDSEYQLPYVLGSAHQGCLPPFPADVFTIPQYGYLTLNNGSQAVGRSSFYCLEYFPSQMLRTGNNFQFTYTFEDVPFHSSYAHSQSLDRLMNPLIDQYLYYLSRIQTTGGTANTQTLGFSQGGPNTMANQAKNWLPGPCYRQQRVSTTTGQNNNSNFAWTAGTKYHLNGRNSLANPGIAMTTHKDDEERFFPSNGILIFGKQNAARDNADYSDVMPTSEEEIKTTNPVATEEYGIVADNLQQQNTAPQIGTVNSQGALPGMVWQNRDVYLQGPIWAKIPHTDGNFHPSPLMGGFGLKHPPPQILIKNTPVPADPPTTFNQSKLNSFITQYSTGQVSVEIEWELQKENSKRWNPEIQYTSNYYKSTSVDFAVNTEGVYSEPRPIGTRYLTRNL

SEQ ID NO: 685 - protein, 738 aa, Artificial Sequence
  Synthetic Polypeptide
MAADGYLPDWLEDNLSEGIREWWALKPGAPKPKANQQKQDDGRGLVLPGYKYLGPFNGLDKGEPVNAADAAALEHDKAYDQQLQAGDNPYLRYNHADAEFQERLQEDTSFGGNLGRAVFQAKKRVLEPLGLVEEGAKTAPGKKRPVEPSPQRSPDSSTGIGKKGQQPARKRLNFGQTGDSESVPDPQPLGEPPAAPSGVGPNTMAAGGGAPMADNNEGADGVGSSSGNWHCDSTWLGDRVITTSTRTWALPTYNNHLYKQISNGTSGGATNDNTYFGYSTPWGYFDFNRFHCHFSPRDWQRLINNNWGFRPKRLSFKLFNIQVKEVTQNEGTKTIANNLTSTIQVFTDSEYQLPYVLGSAHQGCLPPFPADVFTIPQYGYLTLNNGSQAVGRSSFYCLEYFPSQMLRTGNNFQFTYTFEDVPFHSSYAHSQSLDRLMNPLIDQYLYYLSRIQTTGGTANTQTLGFSQGGPNTMANQAKNWLPGPCYRQQRVSTTTGQNNNSNFAWTAGTKYHLNGRNSLANPGIAMATHKDDEERFFPSNGILIFGKQNAARDNADYSDVMPTSEEEIKTTNPVATEEYGIVADNLQQQNTAPQIGTVNSQGVLPGMVWQNRDVYLQGPIWAKIPHTDGNFHPSPLMGGFGLKHPPPQILIKNTPVPADPPTTFNQSKLNSFITQYSTGQVSVEIEWELQKENSKRWNPEIQYTSNYYKSTSVDFAVNTEGVYSEPRPIGTRYLTRNL

SEQ ID NO: 686 - protein, 738 aa, Artificial Sequence
  Synthetic Polypeptide
MAADGYLPDWLEDNLSEGIREWWALKPGAPKPKANQQKQDDGRGLVLPGYKYLGPFNGLDKGEPVNAADAAALEHDKAYDQQLQAGDNPYLRYNHADAEFQERLQEDTSFGGNLGRAVFQAKKRVLEPLGLVEEGAKTAPGKKRPVEPSPQRSPDSSTGIGKKGQQPARKRLNFGQTGDSESVPDPQPLGEPPAAPSGVGPNTMAAGGGAPMADNNEGADGVGSSSGNWHCDSTWLGDRVITTSTRTWALPTYNNHLYKQISNGTSGGATNDNTYFGYSTPWGYFDFNRFHCHFSPRDWQRLVNNNWGFRPKRLSFKLFNIQVKEVTQNEGTKTIANNLTSTIQVFTDSEYQLPYVLGSAHQGCLPPFPADVFTIPQYGYLTLNNGSQAVGRSSFYCLEYFPSQMLRTGNNFQFTYTFEDVPFHSSYAHSQSLDRLMNPLIDQYLYYLSRIQTTGGTANTQTLGFSQGGPNTMANQAKNWLPGPCYRQQRVSTTTGQNNNSNFAWTAGTKYHLNGRNSLANPGIAMATHKDDEERFFPSNGILIFGKQNAARDNADYSDVMPTSEEEIKTTNPVATEEYGIVADNLQQQNTAPQIGTVNSQGALPGMVWQNRDVYLQGPIWAKIPHTDGNFHPSPLMGGFGLKHPPPQILIKNTPVPADPPTTFNQSKLNSFITQYSTGQVSVEIEWELQKENSKRWNPEIQYTSNYYKSTSVDFAVNTEGVYSEPRPIGTRYLTRNL

SEQ ID NO: 687 - protein, 738 aa, Artificial Sequence
  Synthetic Polypeptide
MAADGYLPDWLEDNLSEGIREWWALKPGAPKPKANQQKQDDGRGLVLPGYKYLGPFNGLDKGEPVNAADAAALEHDKAYDQQLQAGDNPYLRYNHADAEFRERLQEDTSFGGNLGRAVFQAKKRVLEPLGLVEEGAKTAPGKKRPVEPSPQRSPDSSTGIGKKGQQPARKRLNFGQTGDSESVPDPQPLGEPPAAPSGVGPNTMAAGGGAPMADNNEGADGVGSSSGNWHCDSTWLGDRVITTSTRTWALPTYNNHLYKQISNGTSGGATNDNTYFGYSTPWGYFDFNRFHCHFSPRDWQRLINNNWGFRPKRLSFKLFNIQVKEVTQNEGTKTIANNLTSTIQVFTDSEYQLPYVLGSAHQGCLPPFPADVFTIPQYGYLTLNNGSQAVGRSSFYCLEYFPSQMLRTGNNFQFTYTFEDVPFHSSYAHSQSLDRLMNPLIDQYLYYLSRIQTTGGTANTQTLGFSQGGPNTMANQAKNWLPGPCYRQQRVSTTTGQNNNSNFAWTAGTKYHLNGRNSLANPGIAMATHKDDEERFFPSNGILIFGKQNAARDNADYSDVMPTSEEEIKTTNPVATEEYGIVADNLQQQNTAPQIGTVNSQGALPGMVWQNRDVYLQGPIWAKIPHTDGNFHPSPLMGGFGLKHPPPQILIKNTPVPADPPTTFNQSKLNSFITQYSTGQVSVEIEWELQKENSKRWNPEIQYTSNYYKSTSVDFAVNTEGVYSEPRPIGTRYLTRNL

SEQ ID NO: 688 - protein, 738 aa, Artificial Sequence
  Synthetic Polypeptide
MAADGYLPDWLEDNLSEGIREWWALKPGAPKPKANQQKQDDGRGLVLPGYKYLGPFNGLDKGEPVNAADAAALEHDKAYDQQLQAGDNPYLRYNHADAEFQERLQEDTSFGGNLGRAVFQAKKRVLEPLGLVEEGAKTAPGKKRPVEPSPQRSPDSSTGIGKKGQQPARKRLNFGQTGDSESVPDPQPLGEPPAAPSGVGPNTMAAGGGAPMADNNEGADGVGSSSGNWHCDSTWLGDRVITTSTRTWALPTYNNHLYKQISNGTSGGATNDNTYFGYSTPWGYFDFNRFHCHFSPRDWQRLINNNWGFRPKRLSFKLFNIQVKEVTQNEGTKTIANNLTSTIQVFTDSEYQLPYVLGSAHQGCLPPFPADVFTIPQYGYPTLNNGSQAVGRSSFYCLEYFPSQMLRTGNNFQFTYTFEDVPFHSSYAHSQSLDRLMNPLIDQYLYYLSRIQTTGGTANTQTLGFSQGGPNTMANQAKNWLPGPCYRQQRVSTTTGQNNNSNFAWTAGTKYHLNGRNSLANPGIAMATHKDDEERFFPSNGILIFGKQNAARDNADYSDVMPTSEEEIKTTNPVATEEYGIVADNLQQQNTAPQIGTVNSQGALPGMVWQNRDVYLQGPIWAKIPHTDGNFHPSPLMGGFGLKHPPPQILIKNTPVPADPPTTFNQSKLNSFITQYSTGQVSVEIEWELQKENSKRWNPEIQYTSNYYKSTSVDFAVNTEGVYSEPRPIGTRYLTRNL

SEQ ID NO: 689 - protein, 738 aa, Artificial Sequence
  Synthetic Polypeptide
MAADGYLPDWLEDNLSEGIREWWALKPGAPKPKANQQKQDDGRGLVLPGYKYLGPFNGLDKGEPVNAADAAALEHDKAYDQQLQAGDNPYLRYNHADAEFQERLQEDTSFGGNLGRAVFQAKKRVLEPLGLVEEGAKTAPGKKRPVEPSPQRSPDSSTGIGKKGQQPARKRLNFGQTGDSESVPDPQPLGEPPAAPSGVGPNTMTAGGGAPMADNNEGADGVGSSSGNWHCDSTWLGDRVITTSTRTWALPTYNNHLYKQISNGTSGGATNDNTYFGYSTPWGYFDFNRFHCHFSPRDWQRLINNNWGFRPKRLSFKLFNIQVKEVTQNEGTKTIANNLTSTIQVFTDSEYQLPYVLGSAHQGCLPPFPADVFTIPQYGYLTLNNGSQAVGRSSFYCLEYFPSQMLRTGNNFQFTYTFEDVPFHSSYAHSQSLDRLMNPLIDQYLYYLSRIQTTGGTANTQTLGFSQGGPNTMANQAKNWLPGPCYRQQRVSTTTGQNNNSNFAWTAGTKYHLNGRNSLANPGIAMATHKDDEERFFPSNGILIFGKQNAARDNADYSDVMPTSEEEIKTTNPVATEEYGIVADNLQQQNTAPQIGTVNSQGALPGMVWQNRDVYLQGPIWAKIPHTDGNFHPSPLMGGFGLKHPPPQILIKNTPVPADPPTTFNQSKLNSFITQYSTGQVSVEIEWELQKENSKRWNPEIQYTSNYYKSTSVDFAVNTEGVYSEPRPIGTRYLTRNL

SEQ ID NO: 690 - protein, 738 aa, Artificial Sequence
  Synthetic Polypeptide
MAADGYLPDWLEDNLSEGIREWWALKPGAPKPKANQQKQDDGRGLVLPGYKYLGPFNGLDKGEPVNAADAAALEHDKAYDQQLQAGDNPYLRYNHADAEFQERLQEDTSFGGNLGRAVFQAKKRVLEPLGLVEEGAKTAPGKKRPVEPSPQRSPDSSTGIGKKGQQPARKRLNFGQTGDSESVPDPQPLGEPPAAPSGVGPNTMAAGGGAPMADNNEGADGVGSSSGNWHCDSTWLGDRVITTSTRTWALPTYNNHLYKQISNGTSGGATNDNTYFGYSTPWGYFDFNRFHCHFSPRDWQRLINNNWGFRPKRLSFKLFNIQVKEVTQNEGTKTIANNLTSTIQVFTDSEYQLPYVLGSAHQGCLPPFPADVFTIPQYGYLTLNNGSQAVGRSSFYCLEYFPSQMLRTGNNFQFTYTFEDVPFHSSYAHSQSLDRLMNPLIDQYLYYLSRIQTTGGTANTQTLGFSQGGPNTMANQAKNWLPGPCYRQQRVSTTTGQNNNSNFAWTAGTKYHLNGRNSLANPGIAMATHKDDEERFFPSNGILIFGKQNAARDNADYSDVMPTSEEEIKTTNPVATEEYGIVTDNLQQQNTAPQIGTVNSQGALPGMVWQNRDVYLQGPIWAKIPHTDGNFHPSPLMGGFGLKHPPPQILIKNTPVPADPPTTFNQSKLNSFITQYSTGQVSVEIEWELQKENSKRWNPEIQYTSNYYKSTSVDFAVNTEGVYSEPRPIGTRYLTRNL

SEQ ID NO: 691 - protein, 738 aa, Artificial Sequence
  Synthetic Polypeptide
MAADGYLPDWLEDNLSEGIREWWALKPGAPKPKANQQKQDDGRGLVLPGYKYLGPFNGLDKGEPVNAADAAALEHDKAYDQQLQAGDNPYLRYNHADAEFQERLQEDTSFGGNLGRAVFQAKKRVLEPLGLVEEGAKTAPGKKRPVEPSPQRSPDSSTGIGKKGQQPARKRLNFGQTGDSESVPDPQPLGEPPAAPSGVGPNTMAAGGGAPMADNNEGADGVGSSSGNWHCDSTWLGDRVITTSTRTWALPTYNNHLYKQISNGTSGGATNDNTYFGYSTPWGYFDFNRFHCHFSPRDWQRLINNNWGFRPKRLSFKLFNIQVKEVTQNEGTKTIANNLTSTIQVFTDSEYQLPYVLGSAHQGCLPPFPADVFTIPQYGYLTLNNGSQAVGRSSFYCLEYFPSQMLRTGNNFQFTYTFEDVPFHSSYAHSQSLDRLMNPLIDQYLYYLSRIQTTGGTANTQTLGFSQGGPNTMANQAKNWLPGPCYRQQRVSTTTGQNNNSNFAWTAGTKYHLNGRNSLANPGIAMATHKDDEERFFPSNGILIFGKQNAARDNADYSDVMPTSEEEIKTTNPVATEEYGIVADNLQQQNTAPQIGTVNSQGALPGMVWQNRDVYLQGPIWAKIPHTDGNFHPSPLMGGFGLKHPPPQILIKNTPVPADPPTTFNQSKLNSFITQYSTGQVSVEIEWELQKENSKRWNPEIQYTSNYYKSTSVDFAINTEGVYSEPRPIGTRYLTRNL

SEQ ID NO: 692 - protein, 738 aa, Artificial Sequence
  Synthetic Polypeptide
MAADGYLPDWLEDNLSEGIREWWALKPGAPKPKANQQKQDDGRGLVLPGYKYLGPFNGLDKGEPVNAADAAALEHDKAYDQQLQAGDNPYLRYNHADAEFQERLQEDTSFGGNLGRAVFQAKKRVLEPLGLVEEGAKTAPGKKRPVEPSPQRSPDSSTGIGKKGQQPARKRLNFGQTGDSESVPDPQPLGEPPAAPSGVGPNTMAAGGGAPMADNNEGADGVGSSSGNWHCDSTWLGDRVITTSTRTWALPTYNNHLYKQISNGTSGGATNDNTYFGYSTPWGYFDFNRFHCHFSPRDWQRLINNNWGFRPKRLSFKLFNIQVKEVTQNEGTKTIANNLTSTIQVFTDSEYQLPYVLGSAHQGCLPPFPADVFTIPQYGYLTLNNGSQAVGRSSFYCLEYFPSQMLRTGNNFQFTYTFEDVPFHSSYAHSQSLDRLMNPLIDQYLYYLSRIQTTGGTANTQTLGFSQGGPNTMANQAKNWLPGPCYRQQRVSTTTGQNNNSNFAWTAGTKYHLNGRNSLANPGIAMATHKDDEERFFPSNGILIFGKQNAARDNADYSDVMPTSEEEIKTTNPVATEEYGIVADNLQQQNTAPQIGTVNSQGALPGMVWQNRDVYLQGPIWAKIPHADGNFHPSPLMGGFGLKHPPPQILIKNTPVPADPPTTFNQSKLNSFITQYSTGQVSVEIEWELQKENSKRWNPEIQYTSNYYKSTSVDFAVNTEGVYSEPRPIGTRYLTRNL

SEQ ID NO: 693 - protein, 738 aa, Artificial Sequence
  Synthetic Polypeptide
MAADGYLPDWLEDNLSEGIREWWALKPGAPKPKANQQKQDDGRGLVLPGYKYLGPFNGLDKGEPVNAADAAALEHDKAYDQQLQAGDNPYLRYNHADAEFQERLQEDTSFGGNLGRAVFQAKKRVLEPLGLVEEGAKTAPGKKRPVEPSPQRSPDSSTGIGKKGQQPARKRLNFGQTGDSESVPDPQPLGEPPAAPSGVGPNTMAAGGGAPMADNNEGADGVGSSSGNWHCNSTWLGDRVITTSTRTWALPTYNNHLYKQISNGTSGGATNDNTYFGYSTPWGYFDFNRFHCHFSPRDWQRLINNNWGFRPKRLSFKLFNIQVKEVTQNEGTKTIANNLTSTIQVFTDSEYQLPYVLGSAHQGCLPPFPADVFTIPQYGYLTLNNGSQAVGRSSFYCLEYFPSQMLRTGNNFQFTYTFEDVPFHSSYAHSQSLDRLMNPLIDQYLYYLSRIQTTGGTANTQTLGFSQGGPNTMANQAKNWLPGPCYRQQRVSTTTGQNNNSNFAWTAGTKYHLNGRNSLANPGIAMATHKDDEERFFPSNGILIFGKQNAARDNADYSDVMPTSEEEIKTTNPVATEEYGIVADNLQQQNTAPQIGTVNSQGALPGMVWQNRDVYLQGPIWAKIPHTDGNFHPSPLMGGFGLKHPPPQILIKNTPVPADPPTTFNQSKLNSFITQYSTGQVSVEIEWELQKENSKRWNPEIQYTSNYYKSTSVDFAVNTEGVYSEPRPIGTRYLTRNL

SEQ ID NO: 694 - protein, 738 aa, Artificial Sequence
  Synthetic Polypeptide
MAADGYLPDWLEDNLSEGIREWWALKPGAPKPKANQQKQDDGRGLVLPGYKYLGPFNGLDKGEPVNAADAAALEHDKAYDQQLQAGDNPYLRYNHADAEFQERLQEDTSFGGNLGRAVFQAKKRVLEPLGLVEEGAKTAPGKKRPVEPSPQRSPDSSTGIGKKGQQPARKRLNFGQTGDSESVPDPQPLGEPPAAPSGVGPNTMAAGGGAPMADNNEGADGVGSSSGNWHCDSTWLGDRVITTSTRTWALPTYNNHLYKQISNGTSGGATNDNTYFGYSTPWGYFDFNRFHCHFSPRDWQRLINNNWGFRPKRLSFKLFNIQVKEVTQNEGTKTIANNLTSTIQVFTDSEYQLPYVLGSAHQGCLPPFPADVFTIPQYGYLTLNNGSQAVGRSSFYCLEYFPSQMLRTGNNFQFTYTFEDVPFHSSYAHSQSLDRLMNPLIDQYLYYLSRIQTTGGTANTQTLGFSQGGPNTMANQAKNWLPGPCYRQQRVSTTTGQNNNSNFAWTAGTKYHLNGRNSLANPGIAMATHKDDEERFFPSNGILIFGKQNAARDNADYSDVMPTSEEEIKTTNPVATEEYGIVADNLQQQNTAPQIGTVNSQGALPGMVWQNRDVYLQGPIWAKIPHTDGNFHPSPLMGGFGLKHPPPQILIKNTPVPADPPTTFNQSKLNSFITQYSTGQVSVEIEWELQKENSKRWNPEIQYTSNYYKSTSVDFAVNTEGAYSEPRPIGTRYLTRNL

SEQ ID NO: 695 - protein, 738 aa, Artificial Sequence
  Synthetic Polypeptide
MAADGYLPDWLEDNLSEGIREWWALKPGAPKPKANQQKQDDGRGLVLPGYKYLGPFNGLDKGEPVNAADAAALEHDKAYDQQLQAGDNPYLRYNHADAEFQERLQEDTSFGGNLGRAVFQAKKRVLEPLGLVEEGAKTAPGKKRPVEPSPQRSPDSSTGIGKKGQQPARKRLNFGQTGDSESVPDPQPLGEPPAAPSGVGPNTMAAGGGAPMADNNEGADGVGSSSGNWHCDSTWLGDRVITTSTRTWALPTYNNHLYKQISNGTSGGATNDNTYFGYSTPWGYFDFNRFHCHFSPRDWQRLINNNWGFRPKRLSFKLFNIQVKEVTQNEGTKTIANNLTSTIQVFTDSEYQLPYVLGSAHQGCLPPFPADVFTIPQYGYLTLNNGSQAVGRSSFYCLEYFPSQMLRTGNNFQFTYTFEDVPFHSSYAHSQSLDRLMNPLIDQYLYYLSRIQTTGGTANTQTLGFSQGGPNTMANQAKNWLPGPCYRQQRVSTTTGQNNNSNFAWTAGTKYHLNGRNSLANPGIAMATHKDDEERFFPSNGILIFGKQNAARDNADYSDVMPTSEEEIKTTNPVATEECGIVADNLQQQNTAPQIGTVNSQGALPGMVWQNRDVYLQGPIWAKIPHTDGNFHPSPLMGGFGLKHPPPQILIKNTPVPADPPTTFNQSKLNSFITQYSTGQVSVEIEWELQKENSKRWNPEIQYTSNYYKSTSVDFAVNTEGVYSEPRPIGTRYLTRNL

SEQ ID NO: 696 - protein, 738 aa, Artificial Sequence
  Synthetic Polypeptide
MAADGYLPDWLEDNLSEGIREWWALKPGAPKPKANQQKQDDGRGLVLPGYKYLGPFNGLDKGEPVNAADAAALEHDKAYDQQLQAGDNPYLRYNHADAEFQERLQEDTSFGGNLGRAVFQAKKRVLEPLGLVEEGAKTAPGKKRPVEPSPQRSPDSSTGIGKKGQQPARKRLNFGQTGDSESVPDPQPLGEPPAAPSGVGPNTMAAGGGAPMADNNEGADGVGSSSGNWHCDSTWLGDRVITTSTRTWALPTYNNHLYKQISNGTSGGATNDNTYFGYSTPWGYFDFNRFHCHFSPRDWQRLINNNWGFRPKRLSFKLFNIQVKEVTQNEGTKTIANNLTSTIQVFTDSEYQLPYVLGSAHQGCLPPFPADVFTIPQYGYLTLNNGSQAVGRSSFYCLEYFPSQMLRTGNNFQFTYTFEDVPFHSSYAHSQSLDRLMNPLIDQYLYYLSRIQTTGGTANTQTLGFSQGGPNTMANQAKNWLPGPCYRQQRVSTTTGQNNNSNFAWTAGTKYHLNGRNSLANPGIAMATHKDDEERFFPSNGILIFGKQNAARDNADYSDVMPTSEEEIKTTNPVATEEYGIVADNLQQQNTAPQIGTVNSQGALPGMVWQNRDVYLQGPIWAKIPHTDGNFHPSPLMGGFGLKHPPPQILIKNTPVPADPPTTFNQSKLNSFITQYSTGQVSVEIEWELQKENSKRWNPEIRYTSNYYKSTSVDFAVNTEGVYSEPRPIGTRYLTRNL

SEQ ID NO: 697 - protein, 738 aa, Artificial Sequence
  Synthetic Polypeptide
MAADGYLPDWLEDNLSEGIREWWALKPGAPKPKANQQKQDDGRGLVLPGYKYLGPFNGLDKGEPVNAADAAALEHDKAYDQQLQAGDNPYLRYNHADAEFQERLQEDTSFGGNLGRAVFQAKKRVLEPLGLVEEGAKTAPGKKRPVEPSPQRSPDSSTGIGKKGQQPARKRLNFGQTGDSESVPDPQPLGEPPAAPSGVGPNTMAAGGGAPMADNNEGADGVGSSSGNWHCDSTWLGDRVITTSTRTWALPTYNNHLYKQISNGTSGGATNDNTYFGYSTPWGYFDFNRFHCHFSPRDWQRLINNNWGFRPKRLSFKLFNIQVKEVTQNEGTKTIANNLTSTIQVFTDSEYQLPYVLGSAHQGCLPPFPADVFTIPQYGYLTLNNGSQAVGRSSFYCLEYFPSQMLRTGNNFQFTYTFEDVPFHSSYAHSQSLDRLMNPLIDQYLYYLSRIQTTGGTANTQTLGFSQGGPNTMANQAKNWLPGPCYRQQRVSTTTGQNNNSNFAWTAGTKYHLNGRNSLANPGIAMATHKDDEERFFPSNGILIFGKQNAARDNADCSDVMPTSEEEIKTTNPVATEEYGIVADNLQQQNTAPQIGTVNSQGALPGMVWQNRDVYLQGPIWAKIPHTDGNFHPSPLMGGFGLKHPPPQILIKNTPVPADPPTTFNQSKLNSFITQYSTGQVSVEIEWELQKENSKRWNPEIQYTSNYYKSTSVDFAVNTEGVYSEPRPIGTRYLTRNL

SEQ ID NO: 698 - protein, 738 aa, Artificial Sequence
  Synthetic Polypeptide
MAADGYLPDWLEDNLSEGIREWWALKPGAPKPKANQQKQDDGRGLVLPGYKYLGPFNGLDKGEPVNAADAAALEHDKAYDQQLQAGDNPYLRYNHADAEFQERLQEDTSFGGNLGRAVFQAKKRVLEPLGLVEEGAKTAPGKKRPVEPSPQRSPDSSTGIGKKGQQPARKRLNFGQTGDSESVPDPQPLGEPPAAPSGVGPNTMAAGGGAPMADNNEGADGVGSSSGNWHCDSTWLGDRVITTSTRTWALPTYNNHLYKQISNGTSGGATNDNTYFGYSTPWGYFDFNRFHCHFSPRDWQRLINNNWGFRPKRLSFKLFNIQVKEVTQNEGTKTIANNLTSTIQVFTDSEYQLPYVLGSAHQGCLPPFPADVFTIPQYGYLTLNNGSQAVGRSSFYCLEYFPSQMLRTGNNFQFTYTFEDVPFHSSYAHSQSLDRLMNPLIDQYLYYLSRIQTTGGTANTQTLGFSQGGPNTMANQAKNWLPGPCYRQQRVSTTTGQNNNSNFAWTAGTKYHLNGRNSLANPGIAMATHKDDEERFFPSNGILIFGKQNAARDNADYSDVMPTSEEEIKTTNPVATEEYGIAADNLQQQNTAPQIGTVNSQGALPGMVWQNRDVYLQGPIWAKIPHTDGNFHPSPLMGGFGLKHPPPQILIKNTPVPADPPTTFNQSKLNSFITQYSTGQVSVEIEWELQKENSKRWNPEIQYTSNYYKSTSVDFAVNTEGVYSEPRPIGTRYLTRNL

SEQ ID NO: 699 - protein, 738 aa, Artificial Sequence
  Synthetic Polypeptide
MAADGYLPDWLEDNLSEGIREWWALKPGAPKPKANQQKQDDGRGLVLPGYKYLGPFNGLDKGEPVNAADAAALEHDKAYDQQLQAGDNPYLRYNHADAEFQERLQEDTSFGGNLGRAVFQAKKRVLEPLGLVEEGAKTAPGKKRPVEPSPQRSPDSSTGIGKKGQQPARKRLNFGQTGDSESVPDPQPLGEPPAAPSGVGPNTMAAGGGAPMADNNEGADGVGSSSGNWHCDSTWLGDRVITTSTRTWALPTYNNHLYKQISNGTSGGATNDNTYFGYSTPWGYFDFNRFHCHFSPRDWQRLINNNWGFRPKRLSFKLFNIQVKEVTQNEGTKTIANNLTSTIQVFTDSEYQLPYVLGSAHQGCLPPFPADVFTIPQYGYLTLNNGSQAVGRSSFYCLEYFPSQMLRTGNNFQFTYTFEDVPFHSSYAHSQSLDRLMNPLIDQYLYYLSRIQTTGGTANTQTLGFSQGGPNTMANQAKNWLPGPCYRQQRVSTTTGQNNNSNFAWTAGTKYHLNGRNSLANPGIAMATHKDDEERFFPSNGILIFGKQNAARDNADYSDVMPTSEEEIKTTNPVATEEYGIVADNLQQQNTAPQIGTVNSQGALPGMIWQNRDVYLQGPIWAKIPHTDGNFHPSPLMGGFGLKHPPPQILIKNTPVPADPPTTFNQSKLNSFITQYSTGQVSVEIEWELQKENSKRWNPEIQYTSNYYKSTSVDFAVNTEGVYSEPRPIGTRYLTRNL

SEQ ID NO: 700 - protein, 738 aa, Artificial Sequence
  Synthetic Polypeptide
MAADGYLPDWLEDNLSEGIREWWALKPGAPKPKANQQKQDDGRGLVLPGYKYLGPFNGLDKGEPVNAADAAALEHDKAYDQRLQAGDNPYLRYNHADAEFQERLQEDTSFGGNLGRAVFQAKKRVLEPLGLVEEGAKTAPGKKRPVEPSPQRSPDSSTGIGKKGQQPARKRLNFGQTGDSESVPDPQPLGEPPAAPSGVGPNTMAAGGGAPMADNNEGADGVGSSSGNWHCDSTWLGDRVITTSTRTWALPTYNNHLYKQISNGTSGGATNDNTYFGYSTPWGYFDFNRFHCHFSPRDWQRLINNNWGFRPKRLSFKLFNIQVKEVTQNEGTKTIANNLTSTIQVFTDSEYQLPYVLGSAHQGCLPPFPADVFTIPQYGYLTLNNGSQAVGRSSFYCLEYFPSQMLRTGNNFQFTYTFEDVPFHSSYAHSQSLDRLMNPLIDQYLYYLSRIQTTGGTANTQTLGFSQGGPNTMANQAKNWLPGPCYRQQRVSTTTGQNNNSNFAWTAGTKYHLNGRNSLANPGIAMATHKDDEERFFPSNGILIFGKQNAARDNADYSDVMPTSEEEIKTTNPVATEEYGIVADNLQQQNTAPQIGTVNSQGALPGMVWQNRDVYLQGPIWAKIPHTDGNFHPSPLMGGFGLKHPPPQILIKNTPVPADPPTTFNQSKLNSFITQYSTGQVSVEIEWELQKENSKRWNPEIQYTSNYYKSTSVDFAVNTEGVYSEPRPIGTRYLTRNL

SEQ ID NO: 701 - protein, 738 aa, Artificial Sequence
  Synthetic Polypeptide
MAADGYLPDWLEDNLSEGIREWWALKPGAPKPKANQQKQDDGRGLVLPGYKYLGPFNGLDKGEPVNAADAAALEHDKAYDQQLQAGDNPYLRYNHADAEFQERLQEDTSFGGNLGRAVFQAKKRVLEPLGLVEEGAKTAPGKKRPVEPSPQRSPDSSTGIGKKGQQPARKRLNFGQTGDSESVPDPQPLGEPPAAPSGVGPNTMAAGGGAPMADNNEGADGVGSSSGNWHCDSTWLGDRVITTSTRTWALPTYNNHLYKQISNGTSGGATNDNTYFGYSTPWGYFDFNRFHCHFSPRDWQRLINNNWGFRPKRLSFKLFNIQVKEVTQNEGTKTIANNLTSTIQVFTDSEYQLPYVLGSAHQGCLPPFPADVFTIPQYGYLTLNNGSQAVGRSSFYCLEYFPSQMLRTGNNFQFTYTFEDVPFHSSYAHSQSLDRLMNPLIDQYLYYLSRIQTTGGTANTQTLGFSQGGPNTMANQAKNWLPGPCYRQQRVSTTTGQNNNSNFAWTAGTKYHLNGRNSLANPGIAMATHKDDEERFFPSNGILIFGKQNAARDNADYSDVMPTSEEEIKTTNPVATEEYGIVADNLQQQNTAPQIGTVNGQGALPGMVWQNRDVYLQGPIWAKIPHTDGNFHPSPLMGGFGLKHPPPQILIKNTPVPADPPTTFNQSKLNSFITQYSTGQVSVEIEWELQKENSKRWNPEIQYTSNYYKSTSVDFAVNTEGVYSEPRPIGTRYLTRNL

SEQ ID NO: 702 - protein, 738 aa, Artificial Sequence
  Synthetic Polypeptide
MAADGYLPDWLEDNLSEGIREWWALKPGAPKPKANQQKQDDGRGLVLPGYKYLGPFNGLDKGEPVNAADAAALEHDKAYDQQLQAGDNPYLRYNHADAEFQERLQEDTSFGGNLGRAVFQAKKRVLEPLGLVEEGAKTAPGKKRPVEPSPQRSPDSSTGIGKKGQQPARKRLNFGQTGDSESVPDPQPLGEPPAAPSGVGPNTMAAGGGAPMADNNEGADGVGSSSGNWHCDSTWLGDRVITTSTRTWALPTYNNHLYKQISNGTSGGATNDNTYFGYSTPWGYFDFNRFHCHFSPRDWQRLINNNWGFRPKRLSFKLFNIQVKEVTQNEGTKTIANNLTSTIQVFTDSEYQLPYVLGSAHQGCLPPFPADVFTIPQYGYLTLNNGSQAVGRSSFYCLEYFPSQMLRTGNNFQFTYTFEDVPFHSSYAHSQSLDRLMNPLIDQYLYYLSRIQTTGGTANTQTLGFSQGGPNTMANQAKNWLPGPCYRQQRVSTTTGQNNNSNFAWTAGTKYHLNGRNSLANPGIAMATHKDDEECFFPSNGILIFGKQNAARDNADYSDVMPTSEEEIKTTNPVATEEYGIVADNLQQQNTAPQIGTVNSQGALPGMVWQNRDVYLQGPIWAKIPHTDGNFHPSPLMGGFGLKHPPPQILIKNTPVPADPPTTFNQSKLNSFITQYSTGQVSVEIEWELQKENSKRWNPEIQYTSNYYKSTSVDFAVNTEGVYSEPRPIGTRYLTRNL

SEQ ID NO: 703 - protein, 738 aa, Artificial Sequence
  Synthetic Polypeptide
MAADGYLPDWLEDNLSEGIREWWALKPGAPKPKANQQKQDDGRGLVLPGYKYLGPFNGLDKGEPVNAADAAALEHDKAYDQQLQAGDNPYLRYNHADAEFQERLQEDTSFGGNLGRAVFQAKKRVLEPLGLVEEGAKTAPGKKRPVEPSPQRSPDSSTGIGKKGQQPARKRLNFGQTGDSESVPDPQPLGEPPAAPSGVGPNTMAAGGGAPMADNNEGADGVGSSSGNWHCDSTWLGDRVITTSTRTWALPTYNNHLYKQISNGTSGGATNDNTYFGYSTPWGYFDFNRFHCHFSPRDWQRLINNNWGFRPKRLSFKLFNIQVKEVTQNEGTKTIANNLTSTIQVFTDSEYQLPYVLGSAHQGCLPPFPADVFTIPQYGYLTLNNGSQAVGRSSFYCLEYFPSQMLRTGNNFQFTYTFEDVPFHSSYAHSQSLDRLMNPLIDQYLYYLSRIQTTGGTANTQTLGFSQGGPNTMANQAKNWLPGPCYRQQRVSTTTGQNNNSNFAWTAGTKYHLNGRNSLANPGIAMATHKDDEERFFPSNGILIFGKQNAARDNADYSDVMPTSEEEIKTTNPVATEEYGIVADNLQQQNTAPQIGTVNSQGALPGMVWQNRDAYLQGPIWAKIPHTDGNFHPSPLMGGFGLKHPPPQILIKNTPVPADPPTTFNQSKLNSFITQYSTGQVSVEIEWELQKENSKRWNPEIQYTSNYYKSTSVDFAVNTEGVYSEPRPIGTRYLTRNL

SEQ ID NO: 704 - protein, 738 aa, Artificial Sequence
  Synthetic Polypeptide
MAADGYLPDWLEDNLSEGIREWWALKPGAPKPKANQQKQDDGRGLVLPGYKYLGPFNGLDKGEPVNAADAAALEHDKAYDQQLQAGDNPYLRYNHADAEFQERLQEDTSFGGNLGRAVFQAKKRVLEPLGLVEEGAKTAPGKKRPVEPSPQRSPDSSTGIGKKGQQPARKRLNFGQTGDSESVPDPQPLGEPPAAPSGVGPNTMAAGGGAPMADNNEGADGVGSSSGNWHCDSTWLGDRVITTSTRTWALPTYNNHLYKQISNGTSGGATNDNTYFGYSTPWGYFDFNRFHCHFSPRDWQRLINNNWGFRPKRLSFKLFNIQVKEVTQNEGTKTIANNLTSTIQVFTDSEYQLPYVLGSAHQGCLPPFPADVFTIPQYGYLTLNNGSQAAGRSSFYCLEYFPSQMLRTGNNFQFTYTFEDVPFHSSYAHSQSLDRLMNPLIDQYLYYLSRIQTTGGTANTQTLGFSQGGPNTMANQAKNWLPGPCYRQQRVSTTTGQNNNSNFAWTAGTKYHLNGRNSLANPGIAMATHKDDEERFFPSNGILIFGKQNAARDNADYSDVMPTSEEEIKTTNPVATEEYGIVADNLQQQNTAPQIGTVNSQGALPGMVWQNRDVYLQGPIWAKIPHTDGNFHPSPLMGGFGLKHPPPQILIKNTPVPADPPTTFNQSKLNSFITQYSTGQVSVEIEWELQKENSKRWNPEIQYTSNYYKSTSVDFAVNTEGVYSEPRPIGTRYLTRNL

SEQ ID NO: 705 - protein, 738 aa, Artificial Sequence
  Synthetic Polypeptide
MAADGYLPDWLEDNLSEGIREWWALKPGAPKPKANQQKQDDGRGLVLPGYKYLGPFNGLDKGEPVNAADAAALEHDKAYDQQLQAGDNPYLRYNHADAEFQERLQEDTSFGGNLGRAVFQAKKRVLEPLGLVEEGAKTAPGKKRPVEPSPQRSPDSSTGIGKKGQQPARKRLNFGQTGDSESVPDPQPLGEPPAAPSGVGPNTMAAGGGAPMADNNEGADGVGSSSGNWHCDSTWLGDRVITTSTRTWALPTYNNHLYKQISNGTSGGATNDNTYFGYSTPWGYFDFNRFHCHFSPRDWQRLINNNWGFRPKRLSFKLFNIQVKEVTQNEGTKTIANNLTSTIQVFTDSEYQLPYVLGSAHQGCLPPFPADVFTIPQYGYLTLNNGSQAVGRSSFYCLEYFPSQMLRTGNNFQFTYTFEDVPFHSSYAHSQSLDRLMNPLIDQYLYYLSRIQTTGGTANTQTLGFSQGGPNTMANQAKNWLPGPCYRQQRVSTTTGQNNNSNFAWTAGTKYHLNGRNSLANPGIAMATHKDDEERFFPSNGILIFGKQNAARDNADYSDVMPTSEEEIKTTNPVATEEYGIVADNLQQQNTAPQIGTVNSQGALPGMVWQNRDVYLQGPIWAKIPHTDGNFHPSPLMGGFGLKHPPPQILIKNTPVPADPPTTFNQSKLNSFITQYSTGQVSVEIEWELQKENSKRWNPEIQYTSNYYKSTSVDLAVNTEGVYSEPRPIGTRYLTRNL

SEQ ID NO: 706 - protein, 738 aa, Artificial Sequence
  Synthetic Polypeptide
MAADGYLPDWLEDNLSEGIREWWALKPGAPKPKANQQKQDDGRGLVLPGYKYLGPFNGLDKGEPVNAADAAALEHDKAYDQQLQAGDNPYLRYNHADAEFQERLQEDTSFGGNLGRAVFQAKKRVLEPLGLVEEGAKTAPGKKRPVEPSPQRSPDSSTGIGKKGQQPARKRLNFGQTGDSESVPDPQPLGEPPAAPSGVGPNTMAAGGGAPMADNNEGADGVGSSSGNWHCDSTWLGDRVITTSTRTWALPTYNNHLYKQISNGTSGGATNDNTYFGYSTPWGYFDFNRFHCHFSPRDWQRLINNNWGFRPKRLSFKLFNIQVKEVTQNEGTKTIANNLTSTIQVFTDSEYQLPYVLGSAHQGCLPPFPADVFTIPQYGYLTLNNGSQAVGRSSFYCLEYFPSQMLRTGNNFQFTYTFEDVPFHSSYAHSQSLDRLMNPLIDQYLYYLSRIQTTGGTANTQTLGFSQGGPNTMANQAKNWLPGPCYRQQRVSTTTGQNNNSNFAWTAGTKYHLNGRNSLANPGIAMATHKDDEERFFPSNGILIFGKQNAARDNADYSDVMPTSEEEIKTTNPVATEEYGIVADNLQQQNTAPQIGTVNSQGALPGMVWQNRDVYLQGPIWAKIPHTDGNFHPSPLMGGFGLKHPPPQILIKNTPVPADPPTTFNQSKLNSFITQYSTGQVSVEIEWEPQKENSKRWNPEIQYTSNYYKSTSVDFAVNTEGVYSEPRPIGTRYLTRNL

SEQ ID NO: 707 - protein, 738 aa, Artificial Sequence
  Synthetic Polypeptide
MAADGYLPDWLEDNLSEGIREWWALKPGAPKPKANQQKQDDGRGLVLPGYKYLGPFNGLDKGEPVNAADAAALEHDKAYDQQLQAGDNPYLRYNHADAEFQERLQEDTSFGGNLGRAVFQAKKRVLEPLGLVEEGAKTAPGKKRPVEPSPQRSPDSSTGIGKKGQQPARKRLNFGQTGDSESVPDPQPLGEPPAAPSGVGPNTMAAGGGAPMADNNEGADGVGSSSGNWHCDSTWLGDRVITTSTRTWALPTYNNHLYKQISNGTSGGATNDNTYFGYSTPWGYFDFNRFHCHFSPRDWQRPINNNWGFRPKRLSFKLFNIQVKEVTQNEGTKTIANNLTSTIQVFTDSEYQLPYVLGSAHQGCLPPFPADVFTIPQYGYLTLNNGSQAVGRSSFYCLEYFPSQMLRTGNNFQFTYTFEDVPFHSSYAHSQSLDRLMNPLIDQYLYYLSRIQTTGGTANTQTLGFSQGGPNTMANQAKNWLPGPCYRQQRVSTTTGQNNNSNFAWTAGTKYHLNGRNSLANPGIAMATHKDDEERFFPSNGILIFGKQNAARDNADYSDVMPTSEEEIKTTNPVATEEYGIVADNLQQQNTAPQIGTVNSQGALPGMVWQNRDVYLQGPIWAKIPHTDGNFHPSPLMGGFGLKHPPPQILIKNTPVPADPPTTFNQSKLNSFITQYSTGQVSVEIEWELQKENSKRWNPEIQYTSNYYKSTSVDFAVNTEGVYSEPRPIGTRYLTRNL

SEQ ID NO: 708 - protein, 738 aa, Artificial Sequence
  Synthetic Polypeptide
MAADGYLPDWLEDNLSEGIREWWALKPGAPKPKANQQKQDDGRGLVLPGYKYLGPFNGLDKGEPVNAADAAALEHDKAYDQQLQAGDNPYLRYNHADAEFQERLQEDTSFGGNLGRAVFQAKKRVLEPLGLVEEGAKTAPGKKRPVEPSPQRSPDSSTGIGKKGQQPARKRLNFGQTGDSESVPDPQPLGEPPAAPSGVGPNTMAAGGGAPMADNNEGADGVGSSSGNWHCDSTWLGDRVITTSTRTWALPTYNNHLYKQISNGTSGGATNDNTYFGYSTPWGYFDFNRFHCHFSPRDWQRLINNNWGFRPKRLSFKLFNIQVKEVTQNEGTKTIANNLTSTIQVFTDSEYQLPYVLGSAHQGCLPPFPADVFTIPQYGYLTLNNGSQAVGRSSFYCLEYFPSQMLRTGNNFQFTYTFEDVPFHSSYAHSQSLDRLMNPLIDQYLYYLSRIQTTGGTANTQTLGFSQGGPNTMANQAKNWLPGPCYRQQRVSTTTGQNNNSNFAWTAGTKYHLNGRNSLANPGIAMATHKDDEERFFPSNGILIFGKQNAARDNADYSDVMPTSEEEIKTTNPAATEEYGIVADNLQQQNTAPQIGTVNSQGALPGMVWQNRDVYLQGPIWAKIPHTDGNFHPSPLMGGFGLKHPPPQILIKNTPVPADPPTTFNQSKLNSFITQYSTGQVSVEIEWELQKENSKRWNPEIQYTSNYYKSTSVDFAVNTEGVYSEPRPIGTRYLTRNL

SEQ ID NO: 709 - protein, 738 aa, Artificial Sequence
  Synthetic Polypeptide
MAADGYLPDWLEDNLSEGIREWWALKPGAPKPKANQQKQDDGRGLVLPGYKYLGPFNGLDKGEPVNAADAAALEHDKAYDQQLQAGDNPYLRYNHADAEFQERLQEDTSFGGNLGRAVFQAKKRVLEPLGLVEEGAKTAPGKKRPVEPSPQRSPDSSTGIGKKGQQPARKRLNFGQTGDSESVPDPQPLGEPPAAPSGVGPNTMAAGGGAPMADNNEGADGVGSSSGNWHCDSTWLGDRVITTSTRTWALPTYNNHLYKQISNGTSGGATNDNTYFGYSTPWGYFDFNRFHCHFSPRDWQRLINNNWGFRPKRLSFKLFNIQVKEVTQNEGTKTIANNLTSTIQVFTDSEYQLPYVLGSAHQGCLPPFPADVFTIPQYDYLTLNNGSQAVGRSSFYCLEYFPSQMLRTGNNFQFTYTFEDVPFHSSYAHSQSLDRLMNPLIDQYLYYLSRIQTTGGTANTQTLGFSQGGPNTMANQAKNWLPGPCYRQQRVSTTTGQNNNSNFAWTAGTKYHLNGRNSLANPGIAMATHKDDEERFFPSNGILIFGKQNAARDNADYSDVMPTSEEEIKTTNPVATEEYGIVADNLQQQNTAPQIGTVNSQGALPGMVWQNRDVYLQGPIWAKIPHTDGNFHPSPLMGGFGLKHPPPQILIKNTPVPADPPTTFNQSKLNSFITQYSTGQVSVEIEWELQKENSKRWNPEIQYTSNYYKSTSVDFAVNTEGVYSEPRPIGTRYLTRNL

SEQ ID NO: 710 - protein, 738 aa, Artificial Sequence
  Synthetic Polypeptide
MAADGYLPDWLEDNLSEGIREWWALKPGAPKPKANQQKQDDGRGLVLPGYKYLGPFNGLDKGEPVNAADAAALEHDKAYDQQLQAGDNPYLRYNHADAEFQERLQEDTSFGGNLGRAVFQAKKRVLEPLGLVEEGAKTAPGKKRPVEPSPQRSPDSSTGIGKKGQQPARKRLNFGQTGDSGSVPDPQPLGEPPAAPSGVGPNTMAAGGGAPMADNNEGADGVGSSSGNWHCDSTWLGDRVITTSTRTWALPTYNNHLYKQISNGTSGGATNDNTYFGYSTPWGYFDFNRFHCHFSPRDWQRLINNNWGFRPKRLSFKLFNIQVKEVTQNEGTKTIANNLTSTIQVFTDSEYQLPYVLGSAHQGCLPPFPADVFTIPQYGYLTLNNGSQAVGRSSFYCLEYFPSQMLRTGNNFQFTYTFEDVPFHSSYAHSQSLDRLMNPLIDQYLYYLSRIQTTGGTANTQTLGFSQGGPNTMANQAKNWLPGPCYRQQRVSTTTGQNNNSNFAWTAGTKYHLNGRNSLANPGIAMATHKDDEERFFPSNGILIFGKQNAARDNADYSDVMPTSEEEIKTTNPVATEEYGIVADNLQQQNTAPQIGTVNSQGALPGMVWQNRDVYLQGPIWAKIPHTDGNFHPSPLMGGFGLKHPPPQILIKNTPVPADPPTTFNQSKLNSFITQYSTGQVSVEIEWELQKENSKRWNPEIQYTSNYYKSTSVDFAVNTEGVYSEPRPIGTRYLTRNL

SEQ ID NO: 711 - protein, 738 aa, Artificial Sequence
  Synthetic Polypeptide
MAADGYLPDWLEDNLSEGIREWWALKPGAPKPKANQQKQDDGRGLVLPGYKYLGPFNGLDKGEPVNAADAAALEHDKAYDQQLQAGDNPYLRYNHADAEFQERLQEDTSFGGNLGRAVFQAKKRVLEPLGLVEEGAKTAPGKKRPVEPSPQRSPDSSTGIGKKGQQPARKRLNFGQTGDSESVPDPQPLGEPPAAPSGVGPNTMAAGGGAPMADNNEGADGVGSSSGNWHCDSTWLGDRVITTSTRTWALPTYNNHLYKQISNGTSGGATNDNTYFGYSTPWGYFDFNRFHCHFSPRDWQRLINNNWGFRPKRLSFKLFNIQVKEVTQNEGTKAIANNLTSTIQVFTDSEYQLPYVLGSAHQGCLPPFPADVFTIPQYGYLTLNNGSQAVGRSSFYCLEYFPSQMLRTGNNFQFTYTFEDVPFHSSYAHSQSLDRLMNPLIDQYLYYLSRIQTTGGTANTQTLGFSQGGPNTMANQAKNWLPGPCYRQQRVSTTTGQNNNSNFAWTAGTKYHLNGRNSLANPGIAMATHKDDEERFFPSNGILIFGKQNAARDNADYSDVMPTSEEEIKTTNPVATEEYGIVADNLQQQNTAPQIGTVNSQGALPGMVWQNRDVYLQGPIWAKIPHTDGNFHPSPLMGGFGLKHPPPQILIKNTPVPADPPTTFNQSKLNSFITQYSTGQVSVEIEWELQKENSKRWNPEIQYTSNYYKSTSVDFAVNTEGVYSEPRPIGTRYLTRNL

SEQ ID NO: 712 - protein, 738 aa, Artificial Sequence
  Synthetic Polypeptide
MAADGYLPDWLEDNLSEGIREWWALKPGAPKPKANQQKQDDGRGPVLPGYKYLGPFNGLDKGEPVNAADAAALEHDKAYDQQLQAGDNPYLRYNHADAEFQERLQEDTSFGGNLGRAVFQAKKRVLEPLGLVEEGAKTAPGKKRPVEPSPQRSPDSSTGIGKKGQQPARKRLNFGQTGDSESVPDPQPLGEPPAAPSGVGPNTMAAGGGAPMADNNEGADGVGSSSGNWHCDSTWLGDRVITTSTRTWALPTYNNHLYKQISNGTSGGATNDNTYFGYSTPWGYFDFNRFHCHFSPRDWQRLINNNWGFRPKRLSFKLFNIQVKEVTQNEGTKTIANNLTSTIQVFTDSEYQLPYVLGSAHQGCLPPFPADVFTIPQYGYLTLNNGSQAVGRSSFYCLEYFPSQMLRTGNNFQFTYTFEDVPFHSSYAHSQSLDRLMNPLIDQYLYYLSRIQTTGGTANTQTLGFSQGGPNTMANQAKNWLPGPCYRQQRVSTTTGQNNNSNFAWTAGTKYHLNGRNSLANPGIAMATHKDDEERFFPSNGILIFGKQNAARDNADYSDVMPTSEEEIKTTNPVATEEYGIVADNLQQQNTAPQIGTVNSQGALPGMVWQNRDVYLQGPIWAKIPHTDGNFHPSPLMGGFGLKHPPPQILIKNTPVPADPPTTFNQSKLNSFITQYSTGQVSVEIEWELQKENSKRWNPEIQYTSNYYKSTSVDFAVNTEGVYSEPRPIGTRYLTRNL

SEQ ID NO: 713 - protein, 738 aa, Artificial Sequence
  Synthetic Polypeptide
MAADGYLPDWLEDNLSEGIREWWALKPGAPKPKANQQKQDDGRGLVLPGYKYLGPFNGLDKGEPVNAADAAALEHDKAYDQQLQAGDNPYLRYNHADAEFQERLQEDTSFGGNLGRAVFQAKKRVLEPLGLVEEGAKTAPGKKRPVEPSPQRSPDSSTGIGKKGQQPARKRLNFGQTGDSESVPDPQPLGEPPAAPSGVGPNTMAAGGGAPMADNNEGADGVGSSSGNWHCDSTWLGDRVITTSTRTWALPTYNNHLYKQISNGTSGGATNDNTYFGYSTPWGYFDFNRFHCHFSPRDWQRLINNNWGFRPKRLSFKLFNIQVKEVTQNEGTKTIANNLTSTIQVFTDSEYQLPYVLGSAHQGCLPPFPADVFTIPQYGYLTLNNGSQAVGRSSFYCLEYFPSQMLRTGNNFQFTYTFEDVPFHSSYAHSQSLDRLMNPLIDQYLYYLSRIQTTGGTANTQTLGFSQGGPNTMANRAKNWLPGPCYRQQRVSTTTGQNNNSNFAWTAGTKYHLNGRNSLANPGIAMATHKDDEERFFPSNGILIFGKQNAARDNADYSDVMPTSEEEIKTTNPVATEEYGIVADNLQQQNTAPQIGTVNSQGALPGMVWQNRDVYLQGPIWAKIPHTDGNFHPSPLMGGFGLKHPPPQILIKNTPVPADPPTTFNQSKLNSFITQYSTGQVSVEIEWELQKENSKRWNPEIQYTSNYYKSTSVDFAVNTEGVYSEPRPIGTRYLTRNL

SEQ ID NO: 714 - protein, 738 aa, Artificial Sequence
  Synthetic Polypeptide
MAADGYLPDWLEDNLSEGIREWWALKPGAPKPKANQQKQDDGRGLVLPGYKYLGPFNGLDKGEPVNAADAAALEHDKAYDQQLQAGDNPYLRYNHADAEFQERLQEDTSFGGNLGRAVFQAKKRVLEPLGLVEEGAKTAPGKKRPVEPSPQRSPDSSTGIGKKGQQPARKRLNFGQTGDSESVPDPQPLGEPPAAPSGVGPNTMAAGGGAPMADNNEGADGVGSSSGNWHCDSTWLGDRVITTSTRTWALPTYNNHLYKQISNGTSGGATNDNTYFGYSTPWGYFDFNRFHCHFSPRDWQRLINNNWGFRPKRLSFKLFNIQVKEVTQNEGTKTIANNLTSTIQVFTDSEYQLPYVLGSAHQGCLPPFPADVFTIPQYGYLTLNNGSQAVGRSSFYCLEYFPSQMLRTGNNFQFTYTFEDVPFHSSYAHSQSLDRLMNPLIDQYLYYLSRIQTTGGTANTQTLGFSQGGPNTMANQAKNWLPGPCYRQQRVSTTTGQNNNSNFARTAGTKYHLNGRNSLANPGIAMATHKDDEERFFPSNGILIFGKQNAARDNADYSDVMPTSEEEIKTTNPVATEEYGIVADNLQQQNTAPQIGTVNSQGALPGMVWQNRDVYLQGPIWAKIPHTDGNFHPSPLMGGFGLKHPPPQILIKNTPVPADPPTTFNQSKLNSFITQYSTGQVSVEIEWELQKENSKRWNPEIQYTSNYYKSTSVDFAVNTEGVYSEPRPIGTRYLTRNL

SEQ ID NO: 715 - protein, 738 aa, Artificial Sequence
  Synthetic Polypeptide
MAADGYLPDWLEDNLSEGIREWWALKPGAPKPKANQQKQDDGRGLVLPGYKYLGPFNGLDKGEPVNAADAAALEHDKAYDQQLQAGDNPYLRYNHADAEFQERLQEDTSFGGNLGRAVFQAKKRVLEPLGLVEEGAKTAPGKKRPVEPSPQRSPDSSTGIGKKGQQPARKRLNFGQTGDSESVPDPQPLGEPPAAPSGVGPNTMAAGGGAPMADNNEGADGVGSSSGNWHCDSTWLGDRVITTSTRTWALPTYNNHLYKQISNGTSGGATNDNTYFGYSTPWGYFDFNRSHCHFSPRDWQRLINNNWGFRPKRLSFKLFNIQVKEVTQNEGTKTIANNLTSTIQVFTDSEYQLPYVLGSAHQGCLPPFPADVFTIPQYGYLTLNNGSQAVGRSSFYCLEYFPSQMLRTGNNFQFTYTFEDVPFHSSYAHSQSLDRLMNPLIDQYLYYLSRIQTTGGTANTQTLGFSQGGPNTMANQAKNWLPGPCYRQQRVSTTTGQNNNSNFAWTAGTKYHLNGRNSLANPGIAMATHKDDEERFFPSNGILIFGKQNAARDNADYSDVMPTSEEEIKTTNPVATEEYGIVADNLQQQNTAPQIGTVNSQGALPGMVWQNRDVYLQGPIWAKIPHTDGNFHPSPLMGGFGLKHPPPQILIKNTPVPADPPTTFNQSKLNSFITQYSTGQVSVEIEWELQKENSKRWNPEIQYTSNYYKSTSVDFAVNTEGVYSEPRPIGTRYLTRNL

SEQ ID NO: 716 - protein, 738 aa, Artificial Sequence
  Synthetic Polypeptide
MAADGYLPDWLEDNLSEGIREWWALKPGAPKPKANQQKQDDGRGLVLPGYKYLGPFNGLDKGEPVNAADAAALEHDKAYDQQLQAGDNPYLRYNHADAEFQERLQEDTSFGGNLGRAVFQAKKRVLEPLGLVEEGAKTAPGKKRPVEPSPQRSPDSSTGIGKKGQQPARKRLNFGQTGDSESVPDPQPLGEPPAAPSGVGPNTMAAGGGAPMADNNEGADGVGSSSGNWHCDSTWLGDRVITTSTRTWALPTYNNHLYKQISNGTSGGATNDNTYFGYSTPWGYFDFNRFHCHFSPRDWQRLINNNWGFRPKRLSFKLFNIQVKEVTQNEGTKTIANNLTSTIQVFTDSEYQLPYVLGSAHQGCLPPFPADVFTIPQYGYLTLNNGSQAVGRSSFYCLEYFPSQMLRTGNNFQFTYTFEDVPFHSSYAHSQSLDRLMNPLIDQYLYYLSRIQTTGGTANTQTLGFGQGGPNTMANQAKNWLPGPCYRQQRVSTTTGQNNNSNFAWTAGTKYHLNGRNSLANPGIAMATHKDDEERFFPSNGILIFGKQNAARDNADYSDVMPTSEEEIKTTNPVATEEYGIVADNLQQQNTAPQIGTVNSQGALPGMVWQNRDVYLQGPIWAKIPHTDGNFHPSPLMGGFGLKHPPPQILIKNTPVPADPPTTFNQSKLNSFITQYSTGQVSVEIEWELQKENSKRWNPEIQYTSNYYKSTSVDFAVNTEGVYSEPRPIGTRYLTRNL

SEQ ID NO: 717 - protein, 738 aa, Artificial Sequence
  Synthetic Polypeptide
MAADGYLPDWLEDNLSEGIREWWALKPGAPKPKANQQKQDDGRGLVLPGYKYLGPFNGLDKGEPVNAADAAALEHDKAYDQQLQAGDNPYLRYNHADAEFQERLQEDTSFGGNLGRAVFQAKKRVLEPLGLVEEGAKTAPGKKRPVEPSPQRSPDSSTGIGKKGQQPARKRLNFGQTGDSESVPDPQPLGEPPAAPSGVGPNTMAAGGGAPMADNNEGADGVGSSSGNWHCDSTWLGDRVITTSTRTWALPTYNNHLYKQISNGTSGGATNDNTYFGYSTPWGYFDFNRFHCHFSPRDWQRLINNNWGFRPKRLSFKLFNIQVKEVTQNEGTKTIANNLTSTIQVFTDSEYQLPYVLGSAHQGCLPPFPADVFTIPQYGYLTLNNGSQAVGRSSFYCLEYFPSQMLRTGNNFQFTYTFEDVPFHSSYAHSQSLDRLMNPLIDQYLYYLSRIQTTGGTANTQTLGFSQGGPNTMANQAKNWLPGPCYRQQRASTTTGQNNNSNFAWTAGTKYHLNGRNSLANPGIAMATHKDDEERFFPSNGILIFGKQNAARDNADYSDVMPTSEEEIKTTNPVATEEYGIVADNLQQQNTAPQIGTVNSQGALPGMVWQNRDVYLQGPIWAKIPHTDGNFHPSPLMGGFGLKHPPPQILIKNTPVPADPPTTFNQSKLNSFITQYSTGQVSVEIEWELQKENSKRWNPEIQYTSNYYKSTSVDFAVNTEGVYSEPRPIGTRYLTRNL

SEQ ID NO: 718 - protein, 738 aa, Artificial Sequence
  Synthetic Polypeptide
MAADGYLPDWLEDNLSEGIREWWALKPGAPKPKANQQKQDDGRGLVLPGYKYLGPFNGLDKGEPVNAADAAALEHDKAYDQQLQAGDNPYLRYNHADAEFQERLQEDTSFGGNLGRAVFQAKKRVLEPLGLVEEGAKTAPGKKRPVEPSPQRSPDSSTGIGKKGQQPARKRLNFGQTGDSESVPDPQPLGEPPAAPSGVGPNTMAAGGGAPMADNNEGADGVGSSSGNWHCDSTWLGDRVITTSTRTWALPTYNNHLYKQISNGTSGGATNDNTYFGYSTPWGYFDFNRFHCHFSPRDWQRLINNNWGFRPKRLSFKLFNIQVKEVTQNEGTKTIANNLTSTIQVFTDSEYQLPYVLGSAHQGCLPPFPADVFTIPQYGYLTLNNGSQAVGRSSFYCLEYFPSQMLRTGNNFQFTYTFEDVPFHSSYAHSQSLDRLMNPLIDQYLYYLSRIQTTGGTANTQTLGFSQGGPNTMANQAKNWLPGPCYRQQRVSTTTGQNNNSNFAWTAGTKYHLNGRNSLANPGIAMATHKDDEERFFPSNGILIFGKQNAARDNADYSDVIPTSEEEIKTTNPVATEEYGIVADNLQQQNTAPQIGTVNSQGALPGMVWQNRDVYLQGPIWAKIPHTDGNFHPSPLMGGFGLKHPPPQILIKNTPVPADPPTTFNQSKLNSFITQYSTGQVSVEIEWELQKENSKRWNPEIQYTSNYYKSTSVDFAVNTEGVYSEPRPIGTRYLTRNL

SEQ ID NO: 719 - protein, 738 aa, Artificial Sequence
  Synthetic Polypeptide
MAADGYLPDWLEDNLSEGIREWWALKPGAPKPKANQQKQDDGRGLVLPGYKYLGPFNGLDKGEPVNAADAAALEHDKAYDQQLQAGDNPYLRYNHADAEFQERLQEDTSFGGNLGRAVFQAKKRVLEPLGLVEEGAKTAPGKKRPVEPSPQRSPDSSTGIGKKGQQPARKRLNFGQTGDSESVPDPQPLGEPPAAPSGVGPNTMAAGGGAPMADNNEGADGVGSSSGNWHCDSTWLGDRVITTSTRTWALPTYNNHLYKQISNGTSGGATNDNTYFGYSTPWGYFDFNRFHCHFSPRDWQRLINNNWGFRPKRLSFKLFNIQVKEVTQNEGTKTIANNLTSTIQVFTDSEYQLPYVLGSAHQGCLPPFPADVFTIPQYGYLTLNNGSQAVGRSSFYCLEYFPSQMLRTGNNFQFTYTFEDVPFHSSYAHSQSLDRLMNPLIDQYLYYLSRIQTTGGTANTQTLGFSQGGPNTMANQAKNWLPGPCYRQQRVSTTTGQNNNSNFAWTAGTKYHLNGRNSLANPGIAMATHKDDEERFFPSNGILIFGKQNAARDNADYSDVMPTSEEEIKTTNPVATEEYGIVADNLQQQNTAPQIGTANSQGALPGMVWQNRDVYLQGPIWAKIPHTDGNFHPSPLMGGFGLKHPPPQILIKNTPVPADPPTTFNQSKLNSFITQYSTGQVSVEIEWELQKENSKRWNPEIQYTSNYYKSTSVDFAVNTEGVYSEPRPIGTRYLTRNL

SEQ ID NO: 720 - protein, 738 aa, Artificial Sequence
  Synthetic Polypeptide
MAADGYLPDWLEDNLSEGIREWWALKPGAPKPKANQQKQDDGRGLVLPGYKYLGPFNGLDKGEPVNAADAAALEHDKAYDQQLQAGDNPYLRYNHADAEFQERLQEDTSFGGNLGRAVFQAKKRVLEPLGLVEEGAKTAPGKKRPVEPSPQRSPDSSTGIGKKGQQPARKRLNFGQTGDSESVPDPQPLGEPPAAPSGVGPNTMAAGGGAPMADNNEGADGVGSSSGNWHCDSTWLGDRVITTSTRTWALPTYNNHLYKQISNGTSGGATNDNTYFGYSTPWGYFDFNRFHCHFSPRDWQRLINNNWGFRPKRLSFKLFNIQVKEVTQNEGTKTIANNLTSTIQVFTDSEYQLPYVLGSAHQGCLPPFPADVFTIPQYGYLTLNNGSQAVGRSSFYCLEYFPSQMLRTGNNFQFTYTFEDVPFHSSYAHSQSLDRLMNPLIDQYLYYLSRIQTTGGTANTQTLGFSQGGPNTMANQAKNWLPGPCYRQQRVSTTTGQNNNSNFAWTAGTKYHLNGRNSLANPGIAMATHKDDEERFFPSNGILIFGKQNAARDNADYSDVMPTSEEEIKTTNPVATEEYGIVADNLQQQNTAPQIGTVNSQGALPGMVWQNRDVYLQGPIWAKIPHTDGNFHPSPLMGGFGLKHPPPQILIKNTPVPADPPTTFNQSKLNSFITQYSTGQVGVEIEWELQKENSKRWNPEIQYTSNYYKSTSVDFAVNTEGVYSEPRPIGTRYLTRNL

SEQ ID NO: 721 - protein, 738 aa, Artificial Sequence
  Synthetic Polypeptide
MAADGYLPDWLEDNLSEGIREWWALKPGAPKPKANQQKQDDGRGLVLPGYKYLGPFNGLDKGEPVNAADAAALEHGKAYDQQLQAGDNPYLRYNHADAEFQERLQEDTSFGGNLGRAVFQAKKRVLEPLGLVEEGAKTAPGKKRPVEPSPQRSPDSSTGIGKKGQQPARKRLNFGQTGDSESVPDPQPLGEPPAAPSGVGPNTMAAGGGAPMADNNEGADGVGSSSGNWHCDSTWLGDRVITTSTRTWALPTYNNHLYKQISNGTSGGATNDNTYFGYSTPWGYFDFNRFHCHFSPRDWQRLINNNWGFRPKRLSFKLFNIQVKEVTQNEGTKTIANNLTSTIQVFTDSEYQLPYVLGSAHQGCLPPFPADVFTIPQYGYLTLNNGSQAVGRSSFYCLEYFPSQMLRTGNNFQFTYTFEDVPFHSSYAHSQSLDRLMNPLIDQYLYYLSRIQTTGGTANTQTLGFSQGGPNTMANQAKNWLPGPCYRQQRVSTTTGQNNNSNFAWTAGTKYHLNGRNSLANPGIAMATHKDDEERFFPSNGILIFGKQNAARDNADYSDVMPTSEEEIKTTNPVATEEYGIVADNLQQQNTAPQIGTVNSQGALPGMVWQNRDVYLQGPIWAKIPHTDGNFHPSPLMGGFGLKHPPPQILIKNTPVPADPPTTFNQSKLNSFITQYSTGQVSVEIEWELQKENSKRWNPEIQYTSNYYKSTSVDFAVNTEGVYSEPRPIGTRYLTRNL

SEQ ID NO: 722 - protein, 738 aa, Artificial Sequence
  Synthetic Polypeptide
MAADGYLPDWLEDNLSEGIREWWALKPGAPKPKANQQKQDDGRGLVLPGYKYLGPFNGLDKGEPVNAADAAALEHDKAYDQQLQAGDNPYLRYNHADAEFQERLQEDTSFGGNLGRAVFQAKKRVLEPLGLVEEGAKTAPGKKRPVEPSPQRSPDSSTGIGKKGQQPARKRLNFGQTGDSESVPDPQPLGEPPAAPSGVGPNTMAAGGGAPMADNNEGADGVGSSSGNWHCDSTWLGDRVITTSTRTWALPTYNNHLYKQISNGTSGGATNDNTYFGYSTPWGYFDFNRFHCHFSPRDWQRLINNNWGFRPKRLSFKLFNIQVKEVTQNEGTKTIANNLTSTIQVFTDSEYQLPYVLGSAHQGCLPPFPADVFTIPQYGYLTLNNGSQAVGRSSFYCLEYFPSQMLRTGNNFQFTYTFEDVPFHSSYAHSQSLDRLMNPLIDQYLYYLSRIQTTGGTANTQTLGFSQGGPNTMANQAKNWLPGPCYRQQRVSTTTGQNNNSNFAWTAGTKYHLNGRNSLANPGIAMATHKDDEERFFPSNGILIFGKQNAARDNADYSDVMPTSEEEIKTTNPVATGEYGIVADNLQQQNTAPQIGTVNSQGALPGMVWQNRDVYLQGPIWAKIPHTDGNFHPSPLMGGFGLKHPPPQILIKNTPVPADPPTTFNQSKLNSFITQYSTGQVSVEIEWELQKENSKRWNPEIQYTSNYYKSTSVDFAVNTEGVYSEPRPIGTRYLTRNL

SEQ ID NO: 723 - protein, 738 aa, Artificial Sequence
  Synthetic Polypeptide
MAADGYLPDWLEDNLSEGIREWWALKPGAPKPKANQQKQDDGRGLVLPGYKYLGPFNGLDKGEPVNAADAAALEHDKAYDQQLQAGDNPYLRYNHADAEFQERLQEDTSFGGNLGRAVFQAKKRVLEPLGLVEEGAKTAPGKKRPVEPSPQRSPDSSTGIGKKGQQPARKRLNFGQTGDSESVPDPQPLGEPPAAPSGVGPNTMAAGGGAPMADNNEGADGVGSSSGNWHCDSTWLGDRVITTSTRTWALPTHNNHLYKQISNGTSGGATNDNTYFGYSTPWGYFDFNRFHCHFSPRDWQRLINNNWGFRPKRLSFKLFNIQVKEVTQNEGTKTIANNLTSTIQVFTDSEYQLPYVLGSAHQGCLPPFPADVFTIPQYGYLTLNNGSQAVGRSSFYCLEYFPSQMLRTGNNFQFTYTFEDVPFHSSYAHSQSLDRLMNPLIDQYLYYLSRIQTTGGTANTQTLGFSQGGPNTMANQAKNWLPGPCYRQQRVSTTTGQNNNSNFAWTAGTKYHLNGRNSLANPGIAMATHKDDEERFFPSNGILIFGKQNAARDNADYSDVMPTSEEEIKTTNPVATEEYGIVADNLQQQNTAPQIGTVNSQGALPGMVWQNRDVYLQGPIWAKIPHTDGNFHPSPLMGGFGLKHPPPQILIKNTPVPADPPTTFNQSKLNSFITQYSTGQVSVEIEWELQKENSKRWNPEIQYTSNYYKSTSVDFAVNTEGVYSEPRPIGTRYLTRNL

SEQ ID NO: 724 - protein, 738 aa, Artificial Sequence
  Synthetic Polypeptide
MAADGYLPDWLEDNLSEGIREWWALKPGAPKPKANQQKQDDGRGLVLPGYKYLGPFNGLDKGEPVNAADAAALEHDKAYDQQLQAGDNPYLRYNHADAEFQERLQEDTSFGGNLGRAVFQAKKRVLEPLGLVEEGAKTAPGKKRPVEPSPQRSPDSSTGIGKKGQQPARKRLNFGQTGDSESVPDPQPLGEPPAAPSGVGPNTMAAGGGAPMADNNEGADGVGSSSGNWHCDSTWLGDRVITTSTRTWALPTYNNHLYKQISNGTSGGATNDNTYFGYSTPWGYFDFNRFHCHFSPRDWQRLINNNWGFRPKRLSFKLFNIQVKEVTQNEGTKTIANNLTSTIQVFTDSEYQLPYVLGSAHQGCLPPFPADVFTIPQYGYLTLNNGSQAVGRSSFYCLEYFPSQMLRTGNNFQFTYTFEDVPFHSSYAHSQSLDRLMNPLIDQYLYYLSRIQTTGGTANTQTLGFSQGGPNTMANQAKNWLPGPCYRQQRVSTTTGQNNNSNFAWTAGTKYHLNGRNSLANPGIAMATHKDDEERFFPSNGILIFGKQNAAIDNADYSDVMPTSEEEIKTTNPVATEEYGIVADNLQQQNTAPQIGTVNSQGALPGMVWQNRDVYLQGPIWAKIPHTDGNFHPSPLMGGFGLKHPPPQILIKNTPVPADPPTTFNQSKLNSFITQYSTGQVSVEIEWELQKENSKRWNPEIQYTSNYYKSTSVDFAVNTEGVYSEPRPIGTRYLTRNL

SEQ ID NO: 725 - protein, 738 aa, Artificial Sequence
  Synthetic Polypeptide
MAADGYLPDWLEDNLSEGIREWWALKPGAPKPKANQQKQDDGRGLVLPGYKYLGPFNGLDKGEPVNAADAAALEHDKAYDQQLQAGDNPYLRYNHADAEFQERLQEDTSFGGNLGRAVFQAKKRVLEPLGLVEEGAKTAPGKKRPVEPSPQRSPDSSTGIGKKGQQPARKRLNFGQTGDSESVPDPQPLGEPPAAPSGVGPNTMAAGGGAPMADNNEGADGVGSSSGNWHCDSTWLGDRVITTSTRTWALPTYNNHLYKQISNGTSGGATNDNTYFGYSTPWGYFDFNRFHCHFSPRDWQRLINNNWGFRPKRLSFKLFNIQVKEVTQNEGTKTIANNLTSTIQVFTDSEYQLPYVLGSAHQGCLPPFPADVFTIPQYGYLTLNNGSQAVGRSSFYCLEYFPSQMLRTGNNFQFTYTFEDVPFHSSYAHSQSLDRLMNPLIDQYLYYLSRIQTTGGTANTQTLGFSQGGPNTMANQAKNWLPGPCYRQQRVSTTTGQNNNSNFAWTAGTKYHLNGRNSLANPGIAMATHKDDEGRFFPSNGILIFGKQNAARDNADYSDVMPTSEEEIKTTNPVATEEYGIVADNLQQQNTAPQIGTVNSQGALPGMVWQNRDVYLQGPIWAKIPHTDGNFHPSPLMGGFGLKHPPPQILIKNTPVPADPPTTFNQSKLNSFITQYSTGQVSVEIEWELQKENSKRWNPEIQYTSNYYKSTSVDFAVNTEGVYSEPRPIGTRYLTRNL

SEQ ID NO: 726 - protein, 738 aa, Artificial Sequence
  Synthetic Polypeptide
MAADGYLPDWLEDNLSEGIREWWALKPGAPKPKANQQKQDDGRGLVLPGYKYLGPFNGLDKGEPVNAADAAALEHDKAYDQQLQAGDNPYLRYNHADAEFQERLQEDTSFGGNLGRAVFQAKKRVLEPLGLVEEGAKTAPGKKRPVEPSPQRSPDSSTGIGKKGQQPARKRLNFGQTGDSESVPDPQPLGEPPAAPSGVGPNTMAAGGGAPMADNNEGADGVGSSSGNWHCDSTWLGDRVITTSTRTWALPTYNNHLYKQISNGTSGGATNDNTYFGYSTPWGYFDFNRFHCHFSPRDWQRLINNNWGFRTKRLSFKLFNIQVKEVTQNEGTKTIANNLTSTIQVFTDSEYQLPYVLGSAHQGCLPPFPADVFTIPQYGYLTLNNGSQAVGRSSFYCLEYFPSQMLRTGNNFQFTYTFEDVPFHSSYAHSQSLDRLMNPLIDQYLYYLSRIQTTGGTANTQTLGFSQGGPNTMANQAKNWLPGPCYRQQRVSTTTGQNNNSNFAWTAGTKYHLNGRNSLANPGIAMATHKDDEERFFPSNGILIFGKQNAARDNADYSDVMPTSEEEIKTTNPVATEEYGIVADNLQQQNTAPQIGTVNSQGALPGMVWQNRDVYLQGPIWAKIPHTDGNFHPSPLMGGFGLKHPPPQILIKNTPVPADPPTTFNQSKLNSFITQYSTGQVSVEIEWELQKENSKRWNPEIQYTSNYYKSTSVDFAVNTEGVYSEPRPIGTRYLTRNL

SEQ ID NO: 727 - protein, 738 aa, Artificial Sequence
  Synthetic Polypeptide
MAADGYLPDWLEDNLSEGIREWWALKPGAPKPKANQQKQDDGRGLVLPGYKYLGPFNGLDKGEPVNAADAAALEHDKAYDQQLQAGDNPYLRYNHADAEFQERLQEDTSFGGNLGRAVFQAKKRVLEPLGLVEEGAKTAPGKKRPVEPSPQRSPDSSTGIGKKGQQPARKRLNFGQTGDSESVPDPQPLGEPPAAPSGVGPNTMAAGGGAPMADNNEGADGVGSSSGNWHCDSTWLGDRVITTSTRTWALPTYNNHLYKQISNGTSGGATNDNTYFGYSTPWGYFDFNRFHCHFSPRDWQRLINNNWGFRPKRLSFKLFNIQVKEVTQNEGTKTIANNLTSTIQVFTDSEYQLPYVLGSAHQGCLPPFPADVFTIPQYGYLTLNNGSQAVGRSSFYCLEYFPSQMLRTGNNFQFTYTFEDVPFHSSYAHSQSLDRLMNPLIDQYLYYLSRIQTTGGTANTQTLGFSQGGPNTMANQAKNWLPGPCYRQQRVSTTTGQNNNSNFAWTAGTKYHLNGRNSLANPGIAMATHKDDEERFFPSNGILIFGKQNAARDNADYSDVMPTSEEEIKTTNPVATEEYGIVADNLQQQNTAPQIGTVNSQGALPGMVWQNRDVYLQGPIWAKIPHTDGNFHPSPLMGGFGLKHPPPQILIKNTPVPADPPTTFNQSKLNSFITQCSTGQVSVEIEWELQKENSKRWNPEIQYTSNYYKSTSVDFAVNTEGVYSEPRPIGTRYLTRNL

SEQ ID NO: 728 - protein, 738 aa, Artificial Sequence
  Synthetic Polypeptide
MAADGYLPDWLEDNLSEGIREWWALKPGAPKPKANQQKQDDGRGLVLPGYKYLGPFNGLDKGEPVNAADAAALEHDKAYDQQLQAGDNPYLRYNHADAEFQERLQEDTSFGGNLGRAVFQAKKRVLEPLGLVEEGAKTAPGKKRPVEPSPQRSPDSSTGIGKKGQQPARKRLNFGQTGDSESVPDPQPLGEPPAAPSGVGPNTMAAGGGAPMADNNEGADGVGSSSGNWHCDSTWLGDRVITTSTRTWALPTYNNHLYKQISNGTSGGATNDNTYFGYSTPWGYFDFNRFHCHFSPRDWQRLINNNWGFRPKRLSFKLFNIQVKEVTQNEGTKTIANNLTSTIQVFTDSEYQLPYVLGSAHQGCLPPFPADVFTIPQYGYLTLNNGSQAVGRSSFYCLEYFPSQMLRTGNNFQFTYTFEDVPFRSSYAHSQSLDRLMNPLIDQYLYYLSRIQTTGGTANTQTLGFSQGGPNTMANQAKNWLPGPCYRQQRVSTTTGQNNNSNFAWTAGTKYHLNGRNSLANPGIAMATHKDDEERFFPSNGILIFGKQNAARDNADYSDVMPTSEEEIKTTNPVATEEYGIVADNLQQQNTAPQIGTVNSQGALPGMVWQNRDVYLQGPIWAKIPHTDGNFHPSPLMGGFGLKHPPPQILIKNTPVPADPPTTFNQSKLNSFITQYSTGQVSVEIEWELQKENSKRWNPEIQYTSNYYKSTSVDFAVNTEGVYSEPRPIGTRYLTRNL

SEQ ID NO: 729 - protein, 738 aa, Artificial Sequence
  Synthetic Polypeptide
MAADGYLPDWLEDNLSEGIREWWALKPGAPKPKANQQKQDDGRGLVLPGYKHLGPFNGLDKGEPVNAADAAALEHDKAYDQQLQAGDNPYLRYNHADAEFQERLQEDTSFGGNLGRAVFQAKKRVLEPLGLVEEGAKTAPGKKRPVEPSPQRSPDSSTGIGKKGQQPARKRLNFGQTGDSESVPDPQPLGEPPAAPSGVGPNTMAAGGGAPMADNNEGADGVGSSSGNWHCDSTWLGDRVITTSTRTWALPTYNNHLYKQISNGTSGGATNDNTYFGYSTPWGYFDFNRFHCHFSPRDWQRLINNNWGFRPKRLSFKLFNIQVKEVTQNEGTKTIANNLTSTIQVFTDSEYQLPYVLGSAHQGCLPPFPADVFTIPQYGYLTLNNGSQAVGRSSFYCLEYFPSQMLRTGNNFQFTYTFEDVPFHSSYAHSQSLDRLMNPLIDQYLYYLSRIQTTGGTANTQTLGFSQGGPNTMANQAKNWLPGPCYRQQRVSTTTGQNNNSNFAWTAGTKYHLNGRNSLANPGIAMATHKDDEERFFPSNGILIFGKQNAARDNADYSDVMPTSEEEIKTTNPVATEEYGIVADNLQQQNTAPQIGTVNSQGALPGMVWQNRDVYLQGPIWAKIPHTDGNFHPSPLMGGFGLKHPPPQILIKNTPVPADPPTTFNQSKLNSFITQYSTGQVSVEIEWELQKENSKRWNPEIQYTSNYYKSTSVDFAVNTEGVYSEPRPIGTRYLTRNL

SEQ ID NO: 730 - protein, 738 aa, Artificial Sequence
  Synthetic Polypeptide
MAADGYLPDWLEDNLSEGIREWWALKPGAPKPKANQQKQDDGRGLVLPGYKYLGPFNGLDKGEPVNAADAAALEHDKAYDQQLQAGDNPYLRYNHADAEFQERLQEDTSFGGNLGRAVFQAKKRVLEPLGLVEEGAKTAPGKKRPVEPSPQRSPDSSTGIGKKGQQPARKRLNFGQTGDSESVPDPQPLGEPPAAPSGVGPNTMAAGGGAPMADNNEGADGVGSSSGNWHCDSTWLGDRVITTSTRTWALPTYNNHLYKQISNGTSGGATNDNTYFGYSTPWGYFDFNRFHCHFSPRDWQRLINNNWGFRPKRLSFKLFNIQVKEVTQNEGTKTIANNLTSTIQVFTDSEYQLPYVLGSAHQGCLPPFPADVFTIPQYGYLTLNNGSQAVGRSSFYCLEYFPSQMLRTGNNFQFTYTFEDVPFHSSYAHSQSLDRLMNPLIDQYLYYLSRIQTTGGTANTQTLGFSQGGPNTMANQAKNWLPGPCYRQQRVSATTGQNNNSNFAWTAGTKYHLNGRNSLANPGIAMATHKDDEERFFPSNGILIFGKQNAARDNADYSDVMPTSEEEIKTTNPVATEEYGIVADNLQQQNTAPQIGTVNSQGALPGMVWQNRDVYLQGPIWAKIPHTDGNFHPSPLMGGFGLKHPPPQILIKNTPVPADPPTTFNQSKLNSFITQYSTGQVSVEIEWELQKENSKRWNPEIQYTSNYYKSTSVDFAVNTEGVYSEPRPIGTRYLTRNL

SEQ ID NO: 731 - protein, 738 aa, Artificial Sequence
  Synthetic Polypeptide
MAADGYLPDWLEDNLSEGIREWWALKPGAPKPKANQQKQDDGRGLVLPGYKYLGPFNGLDKGEPVNAADAAALEHDKAYDQQLQAGDNPYLRYNHADAEFQERLQEDTSFGGNLGRAVFQAKKRVLEPLGLVEEGAKTAPGKKRPVEPSPQRSPDSSTGIGKKGQQPARKRLNFGQTGGSESVPDPQPLGEPPAAPSGVGPNTMAAGGGAPMADNNEGADGVGSSSGNWHCDSTWLGDRVITTSTRTWALPTYNNHLYKQISNGTSGGATNDNTYFGYSTPWGYFDFNRFHCHFSPRDWQRLINNNWGFRPKRLSFKLFNIQVKEVTQNEGTKTIANNLTSTIQVFTDSEYQLPYVLGSAHQGCLPPFPADVFTIPQYGYLTLNNGSQAVGRSSFYCLEYFPSQMLRTGNNFQFTYTFEDVPFHSSYAHSQSLDRLMNPLIDQYLYYLSRIQTTGGTANTQTLGFSQGGPNTMANQAKNWLPGPCYRQQRVSTTTGQNNNSNFAWTAGTKYHLNGRNSLANPGIAMATHKDDEERFFPSNGILIFGKQNAARDNADYSDVMPTSEEEIKTTNPVATEEYGIVADNLQQQNTAPQIGTVNSQGALPGMVWQNRDVYLQGPIWAKIPHTDGNFHPSPLMGGFGLKHPPPQILIKNTPVPADPPTTFNQSKLNSFITQYSTGQVSVEIEWELQKENSKRWNPEIQYTSNYYKSTSVDFAVNTEGVYSEPRPIGTRYLTRNL

SEQ ID NO: 732 - protein, 738 aa, Artificial Sequence
  Synthetic Polypeptide
MAADGYLPDWLEDNLSEGIREWWALKPGAPKPKANQQKQDDGRGLVLPGYKYLGPFNGLDKGEPVNAADAAALEHDKAYDQQLQAGDNPYLRYNHADAEFQERLQEDTSFGGNLGRAVFQAKKRVLEPLGLVEEGAKTAPGKKRPVEPSPQRSPDSSTGIGKKGQQPARKRLNFGQTGDSESVPDPQPLGEPPAAPSGVGPNTMAAGGGAPMADNNEGADGVGSSSGNWHCDSAWLGDRVITTSTRTWALPTYNNHLYKQISNGTSGGATNDNTYFGYSTPWGYFDFNRFHCHFSPRDWQRLINNNWGFRPKRLSFKLFNIQVKEVTQNEGTKTIANNLTSTIQVFTDSEYQLPYVLGSAHQGCLPPFPADVFTIPQYGYLTLNNGSQAVGRSSFYCLEYFPSQMLRTGNNFQFTYTFEDVPFHSSYAHSQSLDRLMNPLIDQYLYYLSRIQTTGGTANTQTLGFSQGGPNTMANQAKNWLPGPCYRQQRVSTTTGQNNNSNFAWTAGTKYHLNGRNSLANPGIAMATHKDDEERFFPSNGILIFGKQNAARDNADYSDVMPTSEEEIKTTNPVATEEYGIVADNLQQQNTAPQIGTVNSQGALPGMVWQNRDVYLQGPIWAKIPHTDGNFHPSPLMGGFGLKHPPPQILIKNTPVPADPPTTFNQSKLNSFITQYSTGQVSVEIEWELQKENSKRWNPEIQYTSNYYKSTSVDFAVNTEGVYSEPRPIGTRYLTRNL

SEQ ID NO: 733 - protein, 738 aa, Artificial Sequence
  Synthetic Polypeptide
MAADGYLPDWLEDNLSEGIREWWALKPGAPKPKANQQKQDDGRGLVLPGYKYLGPFNGLDKGEPVNAADAAALEHDKAYDQQLQAGDNPYLRYNHADAEFQERLQEDTSFGGNLGRAVFQAKKRVLEPLGLVEEGAKTAPGKKRPVEPSPQRSPDSSTGIGKKGQQPARKRLNFGQTGDSESVPDPQPLGEPPAAPSGVGPNTMAAGGGAPMADNNEGADGVGSSSGNWHCDSTWLGDRVITTSTRTWALPTYNNHLYKQISNGTSGGATNDNTYFGYSTPWGYFDFNRFHCHFSPRDWQRLINNNWGFRPKRLSFKLFNIQVKEVTQNEGTKTIANNLTSTIQVFTDSEYQLPYVLGSAHRGCLPPFPADVFTIPQYGYLTLNNGSQAVGRSSFYCLEYFPSQMLRTGNNFQFTYTFEDVPFHSSYAHSQSLDRLMNPLIDQYLYYLSRIQTTGGTANTQTLGFSQGGPNTMANQAKNWLPGPCYRQQRVSTTTGQNNNSNFAWTAGTKYHLNGRNSLANPGIAMATHKDDEERFFPSNGILIFGKQNAARDNADYSDVMPTSEEEIKTTNPVATEEYGIVADNLQQQNTAPQIGTVNSQGALPGMVWQNRDVYLQGPIWAKIPHTDGNFHPSPLMGGFGLKHPPPQILIKNTPVPADPPTTFNQSKLNSFITQYSTGQVSVEIEWELQKENSKRWNPEIQYTSNYYKSTSVDFAVNTEGVYSEPRPIGTRYLTRNL

SEQ ID NO: 734 - protein, 738 aa, Artificial Sequence
  Synthetic Polypeptide
MAADGYLPDWLEDNLSEGIREWWALKPGAPKPKANQQKQDDGRGLVLPGYKYLGPFNGLDKGEPVNAADAAALEHDKAYDQQLQAGDNPYLRYNHADAEFQERLQEDTSFGGNLGRAVFQAKKRVLEPLGLVEEGAKTAPGKKRPVEPSPQRSPDSSTGIGKKGQQPARKRLNFGQTGDSESVPDPQPLGEPPAAPSGVGPNTMAAGGGAPMADNNEGADGVGSSSGNWHCDSTWLGDRVITTSTRTWALPTYNNHLYKQISNGTSGGATNDNTYFGYSTPWGYFDFNRFHCHFSPRDWQRLINNNWGFRPKRLSFKLFNIQVKEVTQNEGTKTIANNLTSTIQVFTDSEYQLPYVLGSAHQGCLPPFPADVFTIPQYGYLTLNNGSQAVGRSSFYCLEYFPSQMLRTGNNFQFTYTFEDVPFHSSYAHSQSLDRLMNPLIDQYLYYLSRIQTTGGTANTQTLGFSQGGPNTMANQAKNWLPGPCYRQQRVSTTTGQNNNSNFAWTAGTKYHLNGRNSLANPGIAMATHKDDEERFFPSNGILIFGKQNAARDNADYSDVMPTSEEEIKTTNPVATEEYGIVADNLQQQNTAPQIGTVNSQGALPGMVWQNRDVYLQGPIWAKIPHTDGNFHPSPLMGGFGLKHPPPQILIKNTPVSADPPTTFNQSKLNSFITQYSTGQVSVEIEWELQKENSKRWNPEIQYTSNYYKSTSVDFAVNTEGVYSEPRPIGTRYLTRNL

SEQ ID NO: 735 - protein, 738 aa, Artificial Sequence
  Synthetic Polypeptide
MAADGYLPDWLEDNLSEGIREWWALKPGAPKPKANQQKQDDGRGLVLPGYRYLGPFNGLDKGEPVNAADAAALEHDKAYDQQLQAGDNPYLRYNHADAEFQERLQEDTSFGGNLGRAVFQAKKRVLEPLGLVEEGAKTAPGKKRPVEPSPQRSPDSSTGIGKKGQQPARKRLNFGQTGDSESVPDPQPLGEPPAAPSGVGPNTMAAGGGAPMADNNEGADGVGSSSGNWHCDSTWLGDRVITTSTRTWALPTYNNHLYKQISNGTSGGATNDNTYFGYSTPWGYFDFNRFHCHFSPRDWQRLINNNWGFRPKRLSFKLFNIQVKEVTQNEGTKTIANNLTSTIQVFTDSEYQLPYVLGSAHQGCLPPFPADVFTIPQYGYLTLNNGSQAVGRSSFYCLEYFPSQMLRTGNNFQFTYTFEDVPFHSSYAHSQSLDRLMNPLIDQYLYYLSRIQTTGGTANTQTLGFSQGGPNTMANQAKNWLPGPCYRQQRVSTTTGQNNNSNFAWTAGTKYHLNGRNSLANPGIAMATHKDDEERFFPSNGILIFGKQNAARDNADYSDVMPTSEEEIKTTNPVATEEYGIVADNLQQQNTAPQIGTVNSQGALPGMVWQNRDVYLQGPIWAKIPHTDGNFHPSPLMGGFGLKHPPPQILIKNTPVPADPPTTFNQSKLNSFITQYSTGQVSVEIEWELQKENSKRWNPEIQYTSNYYKSTSVDFAVNTEGVYSEPRPIGTRYLTRNL

SEQ ID NO: 736 - protein, 738 aa, Artificial Sequence
  Synthetic Polypeptide
MAADGYLPDWLEDNLSEGIREWWALKPGAPKPKANQQKQDDGRGLVLPGYKYLGPFNGLDKGEPVNAADAAALEHDKAYDQQLQAGDNPYLRYNHADAEFQERLQEDTSFGGNLGRAVFQAKKRVLEPLGLVEEGAKTAPGKKRPVEPSPQRSPDSSTGIGKKGQQPARKRLNFGQTGDSESVPDPQPLGEPPAAPSGVGPNTMAAGGGAPMADNNEGADGVGSSSGNWHCDSTWLGDRVITTSTRTWALPTYNNHLYKQISNGTSGGATNDNTYFGYSTPWGYFDFNRFHCHFSPRDWQRLINNNWGFRPKRLSFKLFNIQVKEVTQNEGTKTIANNLTSTIQVFTDSEYQLPYVLGSAHQGCLPPFPADVFTIPQYGYLTLNNGSQAVGRSSFYCLEYFPSQMLRTGNNFQFTYTFEDVPFHSSYAHSQSLDRLMNPLIDQYLYYLSRIQTTGGTANTQTLGFSQGGPNTMANQAKNWLPGPCYRQQRVSTTTGQNNNSNFAWTAGTKYRLNGRNSLANPGIAMATHKDDEERFFPSNGILIFGKQNAARDNADYSDVMPTSEEEIKTTNPVATEEYGIVADNLQQQNTAPQIGTVNSQGALPGMVWQNRDVYLQGPIWAKIPHTDGNFHPSPLMGGFGLKHPPPQILIKNTPVPADPPTTFNQSKLNSFITQYSTGQVSVEIEWELQKENSKRWNPEIQYTSNYYKSTSVDFAVNTEGVYSEPRPIGTRYLTRNL

SEQ ID NO: 737 - protein, 738 aa, Artificial Sequence
  Synthetic Polypeptide
MAADGYLPDWLEDNLSEGIREWWALKPGAPKPKANQQKQDDGRGLVLPGYKYLGPFNGLDKGEPVNAADAAALEHDKAYDQQLQAGDNPYLRYNHADAEFQERLQEDTSFGGNLGRAVFQAKKRVLEPLGLVEEGAKTAPGKKRPVEPSPQRSPDSSTGIGKKGQQPARKRLNFGQTGDSESAPDPQPLGEPPAAPSGVGPNTMAAGGGAPMADNNEGADGVGSSSGNWHCDSTWLGDRVITTSTRTWALPTYNNHLYKQISNGTSGGATNDNTYFGYSTPWGYFDFNRFHCHFSPRDWQRLINNNWGFRPKRLSFKLFNIQVKEVTQNEGTKTIANNLTSTIQVFTDSEYQLPYVLGSAHQGCLPPFPADVFTIPQYGYLTLNNGSQAVGRSSFYCLEYFPSQMLRTGNNFQFTYTFEDVPFHSSYAHSQSLDRLMNPLIDQYLYYLSRIQTTGGTANTQTLGFSQGGPNTMANQAKNWLPGPCYRQQRVSTTTGQNNNSNFAWTAGTKYHLNGRNSLANPGIAMATHKDDEERFFPSNGILIFGKQNAARDNADYSDVMPTSEEEIKTTNPVATEEYGIVADNLQQQNTAPQIGTVNSQGALPGMVWQNRDVYLQGPIWAKIPHTDGNFHPSPLMGGFGLKHPPPQILIKNTPVPADPPTTFNQSKLNSFITQYSTGQVSVEIEWELQKENSKRWNPEIQYTSNYYKSTSVDFAVNTEGVYSEPRPIGTRYLTRNL

SEQ ID NO: 738 - protein, 738 aa, Artificial Sequence
  Synthetic Polypeptide
MAADGYLPDWLEDNLSEGIREWWALKPGAPKPKANQQKQDDGRGLVLPGYKYLGPFNGLDKGEPVNAADAAALEHDKAYDQQLQAGDNPYLRYNHADAEFQERLQEDTSFGGNLGRAVFQAKKRVLEPLGLVEEGAKTAPGKKRPVEPSPQRSPDPSTGIGKKGQQPARKRLNFGQTGDSESVPDPQPLGEPPAAPSGVGPNTMAAGGGAPMADNNEGADGVGSSSGNWHCDSTWLGDRVITTSTRTWALPTYNNHLYKQISNGTSGGATNDNTYFGYSTPWGYFDFNRFHCHFSPRDWQRLINNNWGFRPKRLSFKLFNIQVKEVTQNEGTKTIANNLTSTIQVFTDSEYQLPYVLGSAHQGCLPPFPADVFTIPQYGYLTLNNGSQAVGRSSFYCLEYFPSQMLRTGNNFQFTYTFEDVPFHSSYAHSQSLDRLMNPLIDQYLYYLSRIQTTGGTANTQTLGFSQGGPNTMANQAKNWLPGPCYRQQRVSTTTGQNNNSNFAWTAGTKYHLNGRNSLANPGIAMATHKDDEERFFPSNGILIFGKQNAARDNADYSDVMPTSEEEIKTTNPVATEEYGIVADNLQQQNTAPQIGTVNSQGALPGMVWQNRDVYLQGPIWAKIPHTDGNFHPSPLMGGFGLKHPPPQILIKNTPVPADPPTTFNQSKLNSFITQYSTGQVSVEIEWELQKENSKRWNPEIQYTSNYYKSTSVDFAVNTEGVYSEPRPIGTRYLTRNL

SEQ ID NO: 739 - protein, 738 aa, Artificial Sequence
  Synthetic Polypeptide
MAADGYLPDWLEDNLSEGIREWWALKPGAPKPKANQQKQDDGRGLVLPGYKYLGPFNGLDKGEPVNAADAAALEHDKAYDQQLQAGDNPYLRYNHADAEFQERLQEDTSFGGNLGRAVFQAKKRVLEPLGLVEEGAKTAPGKKRPVEPSPQRSPDSSTGIGKKGQQPARKRLNFGQTGDSESVPDPQPLGEPPAAPSGVGPNTMAAGGGAPMADNNEGADGVGSSSGNWHCDSTWLGDRVITTSTRTWALPTYNNHLYKQISNGTSGGATNDNTYFGYSTPWGYFDFNRFHCHFSPRDWQRLINNNWGFRPKRLSFKLFNIQVKEVTQNEGTKTIANNLTSTIQVFTDSEYRLPYVLGSAHQGCLPPFPADVFTIPQYGYLTLNNGSQAVGRSSFYCLEYFPSQMLRTGNNFQFTYTFEDVPFHSSYAHSQSLDRLMNPLIDQYLYYLSRIQTTGGTANTQTLGFSQGGPNTMANQAKNWLPGPCYRQQRVSTTTGQNNNSNFAWTAGTKYHLNGRNSLANPGIAMATHKDDEERFFPSNGILIFGKQNAARDNADYSDVMPTSEEEIKTTNPVATEEYGIVADNLQQQNTAPQIGTVNSQGALPGMVWQNRDVYLQGPIWAKIPHTDGNFHPSPLMGGFGLKHPPPQILIKNTPVPADPPTTFNQSKLNSFITQYSTGQVSVEIEWELQKENSKRWNPEIQYTSNYYKSTSVDFAVNTEGVYSEPRPIGTRYLTRNL

SEQ ID NO: 740 - protein, 738 aa, Artificial Sequence
  Synthetic Polypeptide
MAADGYLPDWLEDNLSEGIREWWALKPGAPKPKANQQKQDDGRGLVLPGYKYLGPFNGLDKGEPVNAADAAALEHDKAYDQQLQAGDNPYLRYNHADAEFQERLQEDTSFGGNLGRAVFQAKKRVLEPLGLVEEGAKTAPGKKRPVEPSPQRSPDSSTGIGKKGQQPARKRLNFGQTGDSESVPDPQPLGEPPAAPSGVGPNTMAAGGGAPMADNNEGADGVGSSSGNWHCDSTWLGDRVITTSTRTWALPTYNNHLYKQISNGTSGGATNDNTYFGYSTPWGYFDFNRFHCHFSPRDWQRLINNNWGFRPKRLSFKLFNIQVKEVTQNEGTKTIANNLTSTIQVFTDSEYQLPYVLGSAHQGCLPPFPADVFTIPQYGYLTLNNGSQAVGRSSFYCLEYFPSQMLRTGNNFQFTYTFEDVPFHSSYAHSQSLDRLMNPLIDQYLYYLSRIQTTGGTANTQTLGFSQGGPNTMANQAKNWLPGPCYRQQRVSTTTGQNNNSNFAWTAGTKYHLNGRNSLANPGIAMATHKDDEERFFPSNGILIFGKQNAARDNADYSDVMPTSEEEIKTTNPVATEEYGIVADNLQQQNTAPQIGTVNSQGALPGMVWQNRDVYLQGPIWAKIPHTDGNFHPSPLMGGFGLKHPPPQILIKNTPVPADPPTTFNQPKLNSFITQYSTGQVSVEIEWELQKENSKRWNPEIQYTSNYYKSTSVDFAVNTEGVYSEPRPIGTRYLTRNL

SEQ ID NO: 741 - protein, 738 aa, Artificial Sequence
  Synthetic Polypeptide
MAADGYLPDWLEDNLSEGIREWWALKPGAPKPKANQQKQDDGRGLVLPGYKYLGPFNGLDKGEPVNAADAAALEHDKAYDQQLQAGGNPYLRYNHADAEFQERLQEDTSFGGNLGRAVFQAKKRVLEPLGLVEEGAKTAPGKKRPVEPSPQRSPDSSTGIGKKGQQPARKRLNFGQTGDSESVPDPQPLGEPPAAPSGVGPNTMAAGGGAPMADNNEGADGVGSSSGNWHCDSTWLGDRVITTSTRTWALPTYNNHLYKQISNGTSGGATNDNTYFGYSTPWGYFDFNRFHCHFSPRDWQRLINNNWGFRPKRLSFKLFNIQVKEVTQNEGTKTIANNLTSTIQVFTDSEYQLPYVLGSAHQGCLPPFPADVFTIPQYGYLTLNNGSQAVGRSSFYCLEYFPSQMLRTGNNFQFTYTFEDVPFHSSYAHSQSLDRLMNPLIDQYLYYLSRIQTTGGTANTQTLGFSQGGPNTMANQAKNWLPGPCYRQQRVSTTTGQNNNSNFAWTAGTKYHLNGRNSLANPGIAMATHKDDEERFFPSNGILIFGKQNAARDNADYSDVMPTSEEEIKTTNPVATEEYGIVADNLQQQNTAPQIGTVNSQGALPGMVWQNRDVYLQGPIWAKIPHTDGNFHPSPLMGGFGLKHPPPQILIKNTPVPADPPTTFNQSKLNSFITQYSTGQVSVEIEWELQKENSKRWNPEIQYTSNYYKSTSVDFAVNTEGVYSEPRPIGTRYLTRNL

SEQ ID NO: 742 - protein, 738 aa, Artificial Sequence
  Synthetic Polypeptide
MAADGYLPDWLEDNLSEGIREWWALKPGAPKPKANQQKQDDGRGLVLPGYKYLGPFNGLDKGEPVNAADAAALEHDKAYDQQLQAGDNPYLRYNHADAEFQERLQEDTSFGGNLGRAVFQAKKRVLEPLGLVEEGAKTAPGKKRPVEPSPQRSPDSSTGIGKKGQQPARKRLNFGQTGDSESVPDPQPLGEPPAAPSGVGPNTMAAGGGAPMADNNEGADGVGSSSGNWHCDSTWLGDRVITTSTRTWALPTYNNHLYKQISNGTSGGATNDNTYFGYSTPWGYFDFNRFHCHFSPRDWQRLINNNWGFRPKRLSFKLFNIQVKEVTQNEGTKTIANNLTSTIQVFTDSEYQLPYVLGSAHQGCLPPFPADVFTIPQYGYLTLNNGSQAVGRSSFYCLEYFPSQMLRTGNNFQFTYTFEDVPFHSSYAHSQSLDRLMNPLIDQYLYYLSRIQTTGGTANTQTLGFSQGGPNTMANQAKNWLPGPCYRQQRVSTATGQNNNSNFAWTAGTKYHLNGRNSLANPGIAMATHKDDEERFFPSNGILIFGKQNAARDNADYSDVMPTSEEEIKTTNPVATEEYGIVADNLQQQNTAPQIGTVNSQGALPGMVWQNRDVYLQGPIWAKIPHTDGNFHPSPLMGGFGLKHPPPQILIKNTPVPADPPTTFNQSKLNSFITQYSTGQVSVEIEWELQKENSKRWNPEIQYTSNYYKSTSVDFAVNTEGVYSEPRPIGTRYLTRNL

SEQ ID NO: 743 - protein, 738 aa, Artificial Sequence
  Synthetic Polypeptide
MAADGYLPDWLEDNLSEGIREWWALKPGAPKPKANQQKQDDGRGLVLPGYKYLGPFNGLDKGEPVNAADAAALEHDKAYDQQLQAGDNPYLRYNHADAEFQERLQEDTSFGGNLGRAVFQAKKRVLEPLGLVEEGAKTAPGKKRPVEPSPQRSPDSSTGIGKKGQQPARKRLNFGQTGDSESVPDPQPLGEPPAAPSGVGPNTMAAGGGAPMADNNEGADGVGSSSGNWHCDSTWLGDRVITTSTRTWALPTYNNHLYKQISNGTSGGATNDNTYFGYSTPWGYFDFNRFHCHFSPRDWQRLINNNWGFRPKRLSFKLFNIQVKEVTQNEGTKTIANNLTSTIQVFTDSEYQLPYVLGSAHQGCPPPFPADVFTIPQYGYLTLNNGSQAVGRSSFYCLEYFPSQMLRTGNNFQFTYTFEDVPFHSSYAHSQSLDRLMNPLIDQYLYYLSRIQTTGGTANTQTLGFSQGGPNTMANQAKNWLPGPCYRQQRVSTTTGQNNNSNFAWTAGTKYHLNGRNSLANPGIAMATHKDDEERFFPSNGILIFGKQNAARDNADYSDVMPTSEEEIKTTNPVATEEYGIVADNLQQQNTAPQIGTVNSQGALPGMVWQNRDVYLQGPIWAKIPHTDGNFHPSPLMGGFGLKHPPPQILIKNTPVPADPPTTFNQSKLNSFITQYSTGQVSVEIEWELQKENSKRWNPEIQYTSNYYKSTSVDFAVNTEGVYSEPRPIGTRYLTRNL

SEQ ID NO: 744 - protein, 738 aa, Artificial Sequence
  Synthetic Polypeptide
MAADGYLPDWLEDNLSEGIREWWALKPGAPKPKANQQKQDDGRGLVLPGYKYLGPFNGLDKGEPVNAADAAALEHDKAYDQQPQAGDNPYLRYNHADAEFQERLQEDTSFGGNLGRAVFQAKKRVLEPLGLVEEGAKTAPGKKRPVEPSPQRSPDSSTGIGKKGQQPARKRLNFGQTGDSESVPDPQPLGEPPAAPSGVGPNTMAAGGGAPMADNNEGADGVGSSSGNWHCDSTWLGDRVITTSTRTWALPTYNNHLYKQISNGTSGGATNDNTYFGYSTPWGYFDFNRFHCHFSPRDWQRLINNNWGFRPKRLSFKLFNIQVKEVTQNEGTKTIANNLTSTIQVFTDSEYQLPYVLGSAHQGCLPPFPADVFTIPQYGYLTLNNGSQAVGRSSFYCLEYFPSQMLRTGNNFQFTYTFEDVPFHSSYAHSQSLDRLMNPLIDQYLYYLSRIQTTGGTANTQTLGFSQGGPNTMANQAKNWLPGPCYRQQRVSTTTGQNNNSNFAWTAGTKYHLNGRNSLANPGIAMATHKDDEERFFPSNGILIFGKQNAARDNADYSDVMPTSEEEIKTTNPVATEEYGIVADNLQQQNTAPQIGTVNSQGALPGMVWQNRDVYLQGPIWAKIPHTDGNFHPSPLMGGFGLKHPPPQILIKNTPVPADPPTTFNQSKLNSFITQYSTGQVSVEIEWELQKENSKRWNPEIQYTSNYYKSTSVDFAVNTEGVYSEPRPIGTRYLTRNL

SEQ ID NO: 745 - protein, 738 aa, Artificial Sequence
  Synthetic Polypeptide
MAADGYLPDWLEDNLSEGIREWWALKPGAPKPKANQQKQDDGRGLVLPGYKYLGPFNGLDKGEPVNAADAAALEHDKAYDQQLQAGDNPYLRYNHADAEFQERLQEDTSFGGNLGRAVFQAKKRVLEPLGLVEEGAKTAPGKKRPVEPSPQRSPDSSTGIGKKGQQPARKRLNFGQTGDSESVPDPQPLGEPPAAPSGVGPNTMAAGGGAPMADNNEGADGVGSSSGNWHCDSTWLGDRVITTSTRTWALPTYNNHLYKQISNGTSGGATNDNTYFGYSTPWGYFDFNRFHCHFSPRDWQRLINNNWGFRPKRLSFKLFNIQVKEVTQNEGTKTIANNLTSTIQVFTDSEYQLPYVLGSAHQGCLPPFPADVFTIPQYGYLTLNNGSQAVGRSSFYCLEYLPSQMLRTGNNFQFTYTFEDVPFHSSYAHSQSLDRLMNPLIDQYLYYLSRIQTTGGTANTQTLGFSQGGPNTMANQAKNWLPGPCYRQQRVSTTTGQNNNSNFAWTAGTKYHLNGRNSLANPGIAMATHKDDEERFFPSNGILIFGKQNAARDNADYSDVMPTSEEEIKTTNPVATEEYGIVADNLQQQNTAPQIGTVNSQGALPGMVWQNRDVYLQGPIWAKIPHTDGNFHPSPLMGGFGLKHPPPQILIKNTPVPADPPTTFNQSKLNSFITQYSTGQVSVEIEWELQKENSKRWNPEIQYTSNYYKSTSVDFAVNTEGVYSEPRPIGTRYLTRNL

SEQ ID NO: 746 - protein, 738 aa, Artificial Sequence
  Synthetic Polypeptide
MAADGYLPDWLEDNLSEGIREWWALKPGAPKPKANQQKQDDGRGLVLPGYKYLGPFNGLDKGEPVNAADAAALEHDKAYDQQLRAGDNPYLRYNHADAEFQERLQEDTSFGGNLGRAVFQAKKRVLEPLGLVEEGAKTAPGKKRPVEPSPQRSPDSSTGIGKKDQQPARKRLNFGQTGDSESVPDPQPLGEPPAAPSGVGPNTMAAGGGAPMADNNEGADGVGSSSGNWHCDSTWLGDRVITTSTRTWALPTYNNHLYKQISNGTSGGATNDNTYFGYSTPWGYFDFNRFHCHFSPRDWQRLINNNWGFRPKRLSFKLFNIQVKEVTQNEGTKTIANNLTSTIQVFTDSEYQLPYVLGSAHQGCLPPFPADVFTIPQYGYLTLNNGSQAVGRSSFYCLEYFPSQMLRTGNNFQFTYTFEDVPFHSSYAHSQSLDRLMNPLIDQYLYYLSRIQTTGGTANTQTLGFSQGGPNTMANQAKNWLPGPCYRQQRVSTTTGQNNNSNFAWTAGTKYHLNGRNSLANPGIAMATHKDDEERFFPSNGILIFGKQNAARDNADYSDVMPTSEEEIKTTNPVATEEYGIVADNLQQQNTAPQIGTVNSQGALPGMVWQNRDVYLQGPIWAKIPHTDGNFHPSPLMGGFGLKHPPPQILIKNTPVPADPPTTFNQSKLNSFITQYSTGQVSVEIEWELQKENSKRWNPEIQYTSNYYKSTSVDFAVNTEGVYSEPRPIGTRYLTRNL

SEQ ID NO: 747 - protein, 738 aa, Artificial Sequence
  Synthetic Polypeptide
MAADGYLPDWLEDNLSEGIREWWALKPGAPKPKANQQKQDDGRGLVLPGYKYLGPFNGLDKGEPVNAADAAALEHDKAYDQQLQAGDNPYLRYNHADAEFQERLQEDTSFGGNLGRAVFQAKKRVLEPLGLVEEGAKTAPGKKRPVEPSPQRSPDSSTGIGKKGQQPARKRLNFGQTGDSESVPDPQPLGEPPAAPSGVGPNTMAAGGGAPMADNNEGADGVGSSSGNWHCDSTWLGDRVITTSTRTWALPTYNNHLYKQISNGTSGGATNDNTYFGYSTPWGYFDFNRFHCHFSPRDWQRLINNNWGFRPKRLSFKLFNIQVKEVTQNEGTKTIANNLTSTIQVFTDSEYQLPYVLGSAHQGCLPPFPADVFTIPQYGYLTLNNGSQAVGRSSFYCLEYFPSQMLRTGNNFQFTYTFEDVPFHSSYAHSQSLDRLMNPLIDQYLYYLSRIQTTGGTANTQTLGFSQGGPNTMANQAKNWLPGPCYRQQRVSTTTGQNNNSNFAWTAGTKYHLNGRNSLANPGIAMATHKDDEERFFPSNGILIFGKQNAARDNADYSDVMPTSEEEIKTTNPVATEEYGIVADNLQQQNTAPQIGTVNSQGALPGMVWQNRDVYLQGPIWAKIPRTDGNFHPSPLMGGFGLKHPPPQILIKNTPVPADPPTTFNQSKLNSFITQYSTGQVSVEIEWELQKENSKRWNPEIQYTSNYYKSTSVDFAVNTEGVYSEPRPIGTRYLTRNL

SEQ ID NO: 748 - protein, 738 aa, Artificial Sequence
  Synthetic Polypeptide
MAADGYLPDWLEDNLSEGIREWWALKPGAPKPKANQQKQDDGRGLVLPGYKYLGPFNGLDKGEPVNAADAAALEHDKAYDQQLQAGDNPYLRYNHADAEFQERLQEDTSFGGNLGRAVFQAKKRVLEPLGLVEEGAKTAPGKKRPVEPSPQRSPDSSTGIGKKGQQPARKRLNFGQTGDSESVPDPQPLGEPPAAPSGVGPNTMAAGGGAPMADNNEGADGVGSSSGNWHCDSTWLGDRVITTSTRTWALPTYNNHLYKQISNGTSGGATNDNTYFGYSTPWGYFDFNRFHCHFSPRDWQRLINNNWGFRPKRLSFKLFNIQVKEVTQNEGTKTIANNLTSTIQVFTDSEYQLPYVLGSAHQGCLPPFPADVFTIPQYGYLTLNNGSQAVGRSSFYCLEYFPSQMLRTGNNFQFTYTFEDVPFHSSYAHSQSLDRLMNPLIDQYLYYLSRIQTTGGTANTQTLGFSQGGPNTMANQAKNWLPGPCYRQQRVSTTTGQNNNSNFAWTAGTKYHLNGRNSLANPGIAMATHKDDEERFFPSNGILIFGKQNAARDNADYSDVMPTSEEEIKTTNPVATEEYGIVADNLQQQNTAPQIGTVNSQGALPGMVWQNRDVYLQGPIWAKIPHTDGNFHPSPLMGGFGLKHPPPQILIKNTPVPADPPTTFNQSKLNSFITQYSTGQVSVEIGWELQKENSKRWNPEIQYTSNYYKSTSVDFAVNTEGVYSEPRPIGTRYLTRNL

SEQ ID NO: 749 - protein, 738 aa, Artificial Sequence
  Synthetic Polypeptide
MAADGYLPDWLEDNLSEGIREWWALKPGAPKPKANQQKQDDGRGLVLPGYKYLGPFNGLDKGEPVNAADAAALEHDKAYDQQLQAGDNPYLRYNHADAEFQERLQEDTSFGGNLGRAVFQAKKRVLEPLGLVEEGAKTAPGKKRPVEPSPQRSPDSSTGIGKKGQQPARKRLNFGQTGDSESVPDPQPLGEPPAAPSGVGPNTMATGGGAPMADNNEGADGVGSSSGNWHCDSTWLGDRVITTSTRTWALPTYNNHLYKQISNGTSGGATNDNTYFGYSTPWGYFDFNRFHCHFSPRDWQRLINNNWGFRPKRLSFKLFNIQVKEVTQNEGTKTIANNLTSTIQVFTDSEYQLPYVLGSAHQGCLPPFPADVFTIPQYGYLTLNNGSQAVGRSSFYCLEYFPSQMLRTGNNFQFTYTFEDVPFHGSYAHSQSLDRLMNPLIDQYLYYLSRIQTTGGTANTQTLGFSQGGPNTMANQAKNWLPGPCYRQQRVSTTTGQNNNSNFAWTAGTKYHLNGRNSLANPGIAMATHKDDEERFFPSNGILIFGKQNAARDNADYSDVMPTSEEEIKTTNPVATEEYGIVADNLQQQNTAPQIGTVNSQGALPGMVWQNRDVYLQGPIWAKIPHTDGNFHPSPLMGGFGLKHPPPQILIKNTPVPADPPTTFNQSKLNSFITQYSTGQVSVEIEWELQKENSKRWNPEIQYTSNYYKSTSVDFAVNTEGVYSEPRPIGTRYLTRNL

SEQ ID NO: 750 - protein, 738 aa, Artificial Sequence
  Synthetic Polypeptide
MAADGYLPDWLEDNLSEGIREWWALKPGAPKPKANQQKQDDGRGLVLPGYKYLGPFNGLDKGEPVNAADAAALEHDKAYDQQLQAGDNPYLRYNHADAEFQERLQEDTSFGGNLGRAVFQAKKRVLEPLGLVEEGAKTAPGKKRPVEPSPQRSPDSSTGIGKKGQQPARKRLNFGQTGDSESVPDPQPLGEPPAAPSGVGPNTMAAGGGAPMADNNEGADGVGSSSGNWHCDSTWLGDRVITTSTRTWALPTYNNHLYKQISNGTSGGATNDNTYFGYSTPWGYFDFNRFHCHFSPRDWQRLINNNWGFRPKRLSFKLFNIQVKEVTQNEGTKTIANNLTSTIQVFTDSEYLLPYVLGSAHQGCLPPFPADVFTIPQYGYLTLNNGSQAVGRSSFYCLEYFPSQMLRTGNNFQFTYTFEDVPFHSSYAHSQSLDRLMNPLIDQYLYYLSRIQTTGGTANTQTLGFSQGGPNTMANQAKNWLPGPCYRQQRVSTTTGQNNNSNFAWTAGTKYHLNGRNSLANPGIAMATHKDDEERFFPSNGILIFGKQNAARDNADYSDVMPTSEEEIKTTNPVATEEYGIVADNLQQQNTAPQIGTVNSQGALPGMVWQNRDVYLQGPIWAKIPHTDGNFHPSPLMGGFGLKHPPPQILIKNTPVPADPPTTFNQSKLNSFITQYSTGQVSVEIEWELQKENSKRWNPEIQYTSNYYKSTSVDFAVNTEGVYSEPRPIGTRYLTRNL

SEQ ID NO: 751 - protein, 738 aa, Artificial Sequence
  Synthetic Polypeptide
MAADGYPPDWLEDNLSEGIREWWALKPGAPKPKANQQKQDDGRGLVLPGYKYLGPFNGLDKGEPVNAADAAALEHDKAYDQQLQAGDNPYLRYNHADAEFQERLQEDTSFGGNLGRAVFQAKKRVLEPLGLVEEGAKTAPGKKRPVEPSPQRSPDSSTGIGKKGQQPARKRLNFGQTGDSESVPDPQPLGEPPAAPSGVGPNTMAAGGGAPMADNNEGADGVGSSSGNWHCDSTWLGDRVITTSTRTWALPTYNNHLYKQISNGTSGGATNDNTYFGYSTPWGYFDFNRFHCHFSPRDWQRLINNNWGFRPKRLSFKLFNIQVKEVTQNEGTKTIANNLTSTIQVFTDSEYQLPYVLGSAHQGCLPPFPADVFTIPQYGYLTLNNGSQAVGRSSFYCLEYFPSQMLRTGNNFQFTYTFEDVPFHSSYAHSQSLDRLMNPLIDQYLYYLSRIQTTGGTANTQTLGFSQGGPNTMANQAKNWLPGPCYRQQRVSTTTGQNNNSNFAWTAGTKYHLNGRNSLANPGIAMATHKDDEERFFPSNGILIFGKQNAARDNADYSDVMPTSEEEIKTTNPVATEEYGIVADNLQQQNTAPQIGTVNSQGALPGMVWQNRDVYLQGPIWAKIPHTDGNFHPSPLMGGFGLKHPPPQILIKNTPVPADPPTTFNQSKLNSFITQYSTGQVSVEIEWELQKENSKRWNPEIQYTSNYYKSTSVDFAVNTEGVYSEPRPIGTRYLTRNL

SEQ ID NO: 752 - protein, 738 aa, Artificial Sequence
  Synthetic Polypeptide
MAADGYLPDWLEDNLSEGIREWWALKPGAPKPKANQQKQDDGRGLVLPGYKYLGPFNGLDKGEPVNAADAAALEHDKAYDQQLQAGDNPYLRYNHADAEFQERLQEDTSFGGNLGRAVFQAKKRVLEPLGLVEEGAKTAPGKKRPVEPSPQRSPDSSTGIGKKGQQPARKRLNFGQTGDSESVPDPQPLGEPPAAPSGVGPNTMAAGGGAPMADNNEGADGVGSSSGNWHCDSTWLGDRVITTSTRTWALPTYNNHLYKQISNGTSGGATNDNTYFGYSTPWGYFDFNRFHCHFSPRDWQRLINNNWGFRPKRLSFKLFNIQVKEVTQNEGTKTIANNLTSTIQVFTDSEYQLPYVLGSAHQGCLPPFPADVFTIPQYGYLTLNNGSQAVGRSSFYCLEYFPSQMLRTGNNFQFTYTFEDVPFHSSYAHSQSLDRLMNPLIDQYLYYLSRIQTTGGTANTQTLGSSQGGPNTMANQAKNWLPGPCYRQQRVSTTTGQNNNSNFAWTAGTKYHLNGRNSLANPGIAMATHKDDEERFFPSNGILIFGKQNAARDNADYSDVMPTSEEEIKTTNPVATEEYGIVADNLQQQNTAPQIGTVNSQGALPGMVWQNRDVYLQGPIWAKIPHTDGNFHPSPLMGGFGLKHPPPQILIKNTPVPADPPTTFNQSKLNSFITQYSTGQVSVEIEWELQKENSKRWNPEIQYTSNYYKSTSVDFAVNTEGVYSEPRPIGTRYLTRNL

SEQ ID NO: 753 - protein, 738 aa, Artificial Sequence
  Synthetic Polypeptide
MAADGYLPDWLEDNLSEGIREWWALKPGAPKPKANQQKQDDGRGLVLPGYKYLGPFNGLDKGEPVNAADAAALEHDKAYDQQLQAGDNPYLRYNHADAEFQERLQEDTSFGGNLGRAVFQAKKRVLEPLGLVEEGAKTAPGKKRPVEPSPQRSPDSSTGIGKKGQQPARKRLNFGQTGDSESVPDPQPLGEPPAAPSGVGPNTMAAGGGAPMADNNEGADGVGSSSGNWHCDSTWLGDRVITTSTRTWALPTYNNHLYKQISNGTSGGATNDNTYFGYSTPWGYFDFNRFHCHFSPRDWQRLINNNWGFRPKRLSFKLFNIQVKEVTQNEGTKTIANNLTSTIQVFTDSEYQLPYVLGSAHQGCLPPFPADVFTIPQYGYLTLNNGSQAVGRSSFYCLEYFPSQMLRTGNNFQFTYTFEDVPFHSSYAHSQSLDRLMNPLIGQYLYYLSRIQTTGGTANTQTLGFSQGGPNTMANQAKNWLPGPCYRQQRVSTTTGQNNNSNFAWTAGTKYHLNGRNSLANPGIAMATHKDDEERFFPSNGILIFGKQNAARDNADYSDVMPTSEEEIKTTNPVATEEYGIVADNLQQQNTAPQIGTVNSQGALPGMVWQNRDVYLQGPIWAKIPHTDGNFHPSPLMGGFGLKHPPPQILIKNTPVPADPPTTFNQSKLNSFITQYSTGQVSVEIEWELQKENSKRWNPEIQYTSNYYKSTSVDFAVNTEGVYSEPRPIGTRYLTRNL

SEQ ID NO: 754 - protein, 738 aa, Artificial Sequence
  Synthetic Polypeptide
MAADGYLPDWLEDNLSEGIREWWALKPGAPKPKANQQKQDDGRGLVLPGYKYLGPFNGLDKGEPVNAADAAALEHDKAYDQQLQAGDNPYLRYNHADAEFQERLQEDTSFGGNLGRAVFQAKKRVLEPLGLVEEGAKTAPGKKRPVEPSPQRSPDSSTGIGKKGQQPARKRLNFGQTGDSESVPDPQPLGEPPAAPSGVGPNTMAAGGGAPMADNNEGADGVGSSSGNWHCDSTWLGDRVITTSTRTWALPTYNNHLYKQISNGTSGGATNDNTYFGYSTPWGYFDFNRFHCHFSPRDWQRLINNNWGFRPKRPSFKLFNIQVKEVTQNEGTKTIANNLTSTIQVFTDSEYQLPYVLGSAHQGCLPPFPADVFTIPQYGYLTLNNGSQAVGRSSFYCLEYFPSQMLRTGNNFQFTYTFEDVPFHSSYAHSQSLDRLMNPLIDQYLYYLSRIQTTGGTANTQTLGFSQGGPNTMANQAKNWLPGPCYRQQRVSTTTGQNNNSNFAWTAGTKYHLNGRNSLANPGIAMATHKDDEERFFPSNGILIFGKQNAARDNADYSDVMPTSEEEIKTTNPVATEEYGIVADNLQQQNTAPQIGTVNSQGALPGMVWQNRDVYLQGPIWAKIPHTDGNFHPSPLMGGFGLKHPPPQILIKNTPVPADPPTTFNQSKLNSFITQYSTGQVSVEIEWELQKENSKRWNPEIQYTSNYYKSTSVDFAVNTEGVYSEPRPIGTRYLTRNL

SEQ ID NO: 755 - protein, 738 aa, Artificial Sequence
  Synthetic Polypeptide
MAADGYLPDWLEDNLSEGIREWWALKPGAPKPKANQQKQDDGRGLVLPGYKYLGPFNGLDKGEPVNAADAAALEHDKAYDQQLQAGDNPYLRYNHADAEFQERLQEDTSFGGNLGRAVFQAKKRVLEPLGLVEEGAKTAPGKKRPVEPSPQRSPDSSTGIGKKGQQPARKRLNFGQTGDSESVPDPQPLGEPPAAPSGVGPNTMAAGGGAPMADNNEGADGVGSSSGNWHCDSTWLGDRVITTSTRTWALPTYNNHLYKQISNGTSGGATNDNTYFGYSTPWGYFDFNRFHCHFSPRDWQRLINNNWGFRPKRLSFKLFNIQVKEVTQNEGTKTIANNLTSTIQVFTDSEYQLPYVLGSAHQGCLPPFPADVFTIPQYGYLTLNNGSQAVGRSSFYCLEYFPSQMLRTGNNFQFTYTFEDVPFHSSYAHSQSLDRLMNPLIDQYLYYLSRIQTTGGTANTQTLGFSQGGPNTMANQAKNWLPGPCYRQQRVSTTTGQNNNSNFAWTAGTKYHLNGRNSLANPGIAMATHKDDGERFFPSNGILIFGKQNAARDNADYSDVMPTSEEEIKTTNPVATEEYGIVADNLQQQNTAPQIGTVNSQGALPGMVWQNRDVYLQGPIWAKIPHTDGNFHPSPLMGGFGLKHPPPQILIKNTPVPADPPTTFNQSKLNSFITQYSTGQVSVEIEWELQKENSKRWNPEIQYTSNYYKSTSVDFAVNTEGVYSEPRPIGTRYLTRNL

SEQ ID NO: 756 - protein, 738 aa, Artificial Sequence
  Synthetic Polypeptide
MAADGYLPDWLEDNLSEGIREWWALKPGAPKPKANQQKQDDGRGLVLPGYKYLGPFNGLDKGEPVNAADAAALEHDKAYDQQLQAGDNPYLRYNHADAEFQERLQEDTSFGGNLGRAVFQAKKRVLEPLGLVEEGAKTAPGKKRPVEPSPQRSPDSSTGIGKKGQQPARKRLNFGQTGDSESVPDPQPLGEPPAAPSGVGPNTMAAGGGAPMADNNEGADGVGSSSGNWHCDSTWLGDRVITTSTRTWAPPTYNNHLYKQISNGTSGGATNDNTYFGYSTPWGYFDFNRFHCHFSPRDWQRLINNNWGFRPKRLSFKLFNIQVKEVTQNEGTKTIANNLTSTIQVFTDSEYQLPYVLGSAHQGCLPPFPADVFTIPQYGYLTLNNGSQAVGRSSFYCLEYFPSQMLRTGNNFQFTYTFEDVPFHSSYAHSQSLDRLMNPLIDQYLYYLSRIQTTGGTANTQTLGFSQGGPNTMANQAKNWLPGPCYRQQRVSTTTGQNNNSNFAWTAGTKYHLNGRNSLANPGIAMATHKDDEERFFPSNGILIFGKQNAARDNADYSDVMPTSEEEIKTTNPVATEEYGIVADNLQQQNTAPQIGTVNSQGALPGMVWQNRDVYLQGPIWAKIPHTDGNFHPSPLMGGFGLKHPPPQILIKNTPVPADPPTTFNQSKLNSFITQYSTGQVSVEIEWELQKENSKRWNPEIQYTSNYYKSTSVDFAVNTEGVYSEPRPIGTRYLTRNL

SEQ ID NO: 757 - protein, 738 aa, Artificial Sequence
  Synthetic Polypeptide
MAADGYLPDWLEDNLSEGIREWWALKPGAPKPKANQQKQDDGRGLVLPGYKYLGPFNGLDKGEPVNAADAAALEHDKAYDQQLQAGDNPYLRYNHADAEFQERLQEDTSFGGNLGRAVFQAKKRVLEPLGLVEEGAKTAPGKKRPVEPSPQRSPDSSTGIGKKGQQPARKRLNFGQTGDSESVPDPQPLGEPPAAPSGVGPNTMAAGGGAPMADNNEGADGVGSSSGNWHCDSTWLGDRVITTSTRTWALPTYNNHLYKQISNGTSGGATNDNTYFGYSTPWGYFDFNRFHCHFSPRDWQRLINNNWGFRPKRLGFKLFNIQVKEVTQNEGTKTIANNLTSTIQVFTDSEYQLPYVLGSAHQGCLPPFPADVFTIPQYGYLTLNNGSQAVGRSSFYCLEYFPSQMLRTGNNFQFTYTFEDVPFHSSYAHSQSLDRLMNPLIDQYLYYLSRIQTTGGTANTQTLGFSQGGPNTMANQAKNWLPGPCYRQQRVSTTTGQNNNSNFAWTAGTKYHLNGRNSLANPGIAMATHKDDEERFFPSNGILIFGKQNAARDNADYSDVMPTSEEEIKTTNPVATEEYGIVADNLQQQNTAPQIGTVNSQGALPGMVWQNRDVYLQGPIWAKIPHTDGNFHPSPLMGGFGLKHPPPQILIKNTPVPADPPTTFNQSKLNSFITQYSTGQVSVEIEWELQKENSKRWNPEIQYTSNYYKSTSVDFAVNTEGVYSEPRPIGTRYLTRNL

SEQ ID NO: 758 - protein, 738 aa, Artificial Sequence
  Synthetic Polypeptide
MAADGYLPDWLEDNLSEGIREWWALKPGAPKPKANQQKQDDGRGLVLPGYKYLGPFNGLDKGEPVNAADAAALEHDKAYDQQLQAGDNPYLRYNHADAEFQERLQEDTSFGGNLGRAVFQAKKRVLEPLGLVEEGAKTAPGKKRPVEPSPQRSPDSSTGIGKKGQQPARKRLNFGRTGDSESVPDPQPLGEPPAAPSGVGPNTMAAGGGAPMADNNEGADGVGSSSGNWHCDSTWLGDRVITTSTRTWALPTYNNHLYKQISNGTSGGATNDNTYFGYSTPWGYFDFNRFHCHFSPRDWQRLINNNWGFRPKRLSFKLFNIQVKEVTQNEGTKTIANNLTSTIQVFTDSEYQLPYVLGSAHQGCLPPFPADVFTIPQYGYLTLNNGSQAVGRSSFYCLEYFPSQMLRTGNNFQFTYTFEDVPFHSSYAHSQSLDRLMNPLIDQYLYYLSRIQTTGGTANTQTLGFSQGGPNTMANQAKNWLPGPCYRQQRVSTTTGQNNNSNFAWTAGTKYHLNGRNSLANPGIAMATHKDDEERFFPSNGILIFGKQNAARDNADYSDVMPTSEEEIKTTNPVATEEYGIVADNLQQQNTAPQIGTVNSQGALPGMVWQNRDVYLQGPIWAKIPHTDGNFHPSPLMGGFGLKHPPPQILIKNTPVPADPPTTFNQSKLNSFITQYSTGQVSVEIEWELQKENSKRWNPEIQYTSNYYKSTSVDFAVNTEGVYSEPRPIGTRYLTRNL

SEQ ID NO: 759 - protein, 738 aa, Artificial Sequence
  Synthetic Polypeptide
MAADGYLPDWLEDNLSEGIREWWALKPGAPKPKANQQKQDDGRGLVLPGYKYLGPFNGLDKGEPVNAADAAALEHDKAYDQQLQAGDNPYLRYNHADAEFQERLQEDTSFGGNLGRAVFQAKKRVLEPLGLVEEGAKTAPGKKRPVEPSPQRSPDSSTGIGKKGQQPARKRLNFGQTGDSESVPDPQPLGEPPAAPSGVGPNTMAAGGGAPMADNNEGADGVGSSSGNWHCDSTWLGDRVITTSTRTWALPTYNNHLYKQISNGTSGGATNDNTYFGYSTPWGYFDFNRFHCHFSPRDWQRLINNNWGFRPKRLSFKLFNIQVKEVTQNEGTKTIANNLTSTIQVFTDSEYQLPYVLGSAHQGCLPPFPADVFTIPQYGYLTLNNGSQAVGRSSFYCLEYFPSQMLRTGNNFQFTYTFEDVPFHSSYAHSQSLDRLMNPLIDQYLYYLSRIQTTGGTANTQTLGFSQGGPNTVANQAKNWLPGPCYRQQRVSTTTGQNNNSNFAWTAGTKYHLNGRNSLANPGIAMATHKDDEERFFPSNGILIFGKQNAARDNADYSDVMPTSEEEIKTTNPVATEEYGIVADNLQQQNTAPQIGTVNSQGALPGMVWQNRDVYLQGPIWAKIPHTDGNFHPSPLMGGFGLKHPPPQILIKNTPVPADPPTTFNQSKLNSFITQYSTGQVSVEIEWELQKENSKRWNPEIQYTSNYYKSTSVDFAVNTEGVYSEPRPIGTRYLTRNL

SEQ ID NO: 760 - protein, 738 aa, Artificial Sequence
  Synthetic Polypeptide
MAADGYLPDWLEDNLSEGIREWWALKPGAPKPKANQQKQDDGRGLVLPGYKYLGPFNGLDKGEPVNAADAAALEHDKAYDQQLQAGDNPYLRYNHADAEFQERLQEDTSFGGNLGRAVFQAKKRVLEPLGLVEEGAKTAPGKKRPVEPSPQRSPDSSTGIGKKGQQPARKRLNFGQTGDSESVPDPQPLGEPPAAPSGVGPNTMAAGGGAPMADNNEGADGVGSSSGNWHCDSTWLGDRVITTSTRTWALPTYNNHLYKQISNGTSGGATNDNTYFGYSTPWGYFDFNRFHCHFSPRDWQRLINNNWGFRPKRLSFKLFNIQVKEVTQNEGTKTIANNLTSTIQVFTDSEYQLPYVLGSAHQGCLPPFPADVFTIPQYGYLTLNNGSQAVGRSSFYCPEYFPSQMLRTGNNFQFTYTFEDVPFHSSYAHSQSLDRLMNPLIDQYLYYLSRIQTTGGTANTQTLGFSQGGPNTMANQAKNWLPGPCYRQQRVSTTTGQNNNSNFAWTAGTKYHLNGRNSLANPGIAMATHKDDEERFFPSNGILIFGKQNAARDNADYSDVMPTSEEEIKTTNPVATEEYGIVADNLQQQNTAPQIGTVNSQGALPGMVWQNRDVYLQGPIWAKIPHTDGNFHPSPLMGGFGLKHPPPQILIKNTPVPADPPTTFNQSKLNSFITQYSTGQVSVEIEWELQKENSKRWNPEIQYTSNYYKSTSVDFAVNTEGVYSEPRPIGTRYLTRNL

SEQ ID NO: 761 - protein, 738 aa, Artificial Sequence
  Synthetic Polypeptide
MAADGYLPDWLEDNLSEGIREWWALKPGAPKPKANQQKQDDGRGLVLPGYKYLGPFNGLDKGEPVNAADAAALEHDKAYDQQLQAGDNPYLRYNHADAEFQERLQEDTSFGGNLGRAVFQAKKRVLEPLGLVEEGAKTAPGKKRPVEPSPQRSPDSSTGIGKKGQQPARKRLNFGQTGDSESVPDPQPLGEPPAAPSGVGPNTMAAGGGAPMADNNEGADGVGSSSGNWHCDSTWLGDRVITTSTRTWALPTYNNHLYKQISNGTSGGATNDNTYFGYSTPWGYFDFNRFHCHFSPRDWQRLINNNWGFRPKRLSFKLFNIQVKEVTQNEGTKTIANNLTSTIQVFTDSEYQLPYVLGSAHQGCLPPFPADVFTIPQYGYLTLNNGSQAVGRSSFYCLEYFPSQMLRTGNNFQFTYTFEDVPFHSSYAHSQSLDRLMNPLIDQYLYYLSRIQTTGGTANTQTLGFSQGGPNTMANQAKNWLPGPCYRQQRVSTTTGQNNNSNFAWTAGTKYHLNGRNSLANPGIAMATHKDDEERFFPSNGILIFGKQNAARDNADYSDVMPTSEEEIKTTNPVATEEYGIVADSLQQQNTAPQIGTVNSQGALPGMVWQNRDVYLQGPIWAKIPHTDGNFHPSPLMGGFGLKHPPPQILIKNTPVPADPPTTFNQSKLNSFITQYSTGQVSVEIEWELQKENSKRWNPEIQYTSNYYKSTSVDFAVNTEGVYSEPRPIGTRYLTRNL

SEQ ID NO: 762 - protein, 738 aa, Artificial Sequence
  Synthetic Polypeptide
MAADGYLPDWLEDNLSEGIREWWALKPGAPKPKANQQKQGDGRGLVLPGYKYLGPFNGLDKGEPVNAADAAALEHDKAYDQQLQAGDNPYLRYNHADAEFQERLQEDTSFGGNLGRAVFQAKKRVLEPLGLVEEGAKTAPGKKRPVEPSPQRSPDSSTGIGKKGQQPARKRLNFGQTGDSESVPDPQPLGEPPAAPSGVGPNTMAAGGGAPMADNNEGADGVGSSSGNWHCDSTWLGDRVITTSTRTWALPTYNNHLYKQISNGTSGGATNDNTYFGYSTPWGYFDFNRFHCHFSPRDWQRLINNNWGFRPKRLSFKLFNIQVKEVTQNEGTKTIANNLTSTIQVFTDSEYQLPYVLGSAHQGCLPPFPADVFTIPQYGYLTLNNGSQAVGRSSFYCLEYFPSQMLRTGNNFQFTYTFEDVPFHSSYAHSQSLDRLMNPLIDQYLYYLSRIQTTGGTANTQTLGFSQGGPNTMANQAKNWLPGPCYRQQRVSTTTGQNNNSNFAWTAGTKYHLNGRNSLANPGIAMATHKDDEERFFPSNGILIFGKQNAARDNADYSDVMPTSEEEIKTTNPVATEEYGIVADNLQQQNTAPQIGTVNSQGALPGMVWQNRDVYLQGPIWAKIPHTDGNFHPSPLMGGFGLKHPPPQILIKNTPVPADPPTTFNQSKLNSFITQYSTGQVSVEIEWELQKENSKRWNPEIQYTSNYYKSTSVDFAVNTEGVYSEPRPIGTRYLTRNL

SEQ ID NO: 763 - protein, 738 aa, Artificial Sequence
  Synthetic Polypeptide
MAADGYLPDWLEDNLSEGIREWWALKPGAPKPKANQQKQDDGRGLVLPGYKYLGPFNGLDKGEPVNAADAAALEHDKAYDQQLQAGDNPYLRYNHADAEFQERLQEDTSFGGNLGRAVFQAKKRVLEPLGLVEEGAKTAPGKKRPVEPSPQRSPDSSTGIGKKGQQPARKRLNFGQTGDSESVPDPQPLGEPPAAPSGVGPNTMAAGGGAPMADNNEGADGVGSSSGNWHCDSTWLGDRVITTSTRTWALPTYNNHLYKQISNGTSGGATNDNTYFGYSTPWGYFDFNRFHCHFSPRDWQRLINNNWGFRPKRLSSKLFNIQVKEVTQNEGTKTIANNLTSTIQVFTDSEYQLPYVLGSAHQGCLPPFPADVFTIPQYGYLTLNNGSQAVGRSSFYCLEYFPSQMLRTGNNFQFTYTFEDVPFHSSYAHSQSLDRLMNPLIDQYLYYLSRIQTTGGTANTQTLGFSQGGPNTMANQAKNWLPGPCYRQQRVSTTTGQNNNSNFAWTAGTKYHLNGRNSLANPGIAMATHKDDEERFFPSNGILIFGKQNAARDNADYSDVMPTSEEEIKTTNPVATEEYGIVADNLQQQNTAPQIGTVNSQGALPGMVWQNRDVYLQGPIWAKIPHTDGNFHPSPLMGGFGLKHPPPQILIKNTPVPADPPTTFNQSKLNSFITQYSTGQVSVEIEWELQKENSKRWNPEIQYTSNYYKSTSVDFAVNTEGVYSEPRPIGTRYLTRNL

SEQ ID NO: 764 - protein, 738 aa, Artificial Sequence
  Synthetic Polypeptide
MAADGYLPDWLEDNLSEGIREWWALKPGAPKPKANQQKQDDGRGLVLPGYKYLGPFNGLDKGEPVNAADAAALEHDKAYDQQLQAGDNPYLRYNHADAEFQERLQEDTSFGGNLGRAVFQAKKRVLEPLGLVEEGAKTAPGKKRPVEPSPQRSPDSSTGIGKKGQQPARKRLNFGQTGDSESVPDPQPLGEPPAAPSGVGPNTMAAGGGAPMADNNEGADGVGSSSGNWHCDSTWLGDRVITTSTRTWALPTYNNHLYKQISNGTSGGATNDNTYFGYSTPWGYFDFNRFHCHFSPRDWQRLINNNWGFRPKRLSFKLFNIQVKEVTQNEGTKTIANNLTSTIQVFTDSEYQLPYVLGSAHQGCLPPFPADVFTIPQYGYLTLNNGSQAVGRSSFYCLEYFPSQMLRTGNNFQFTYAFEDVPFHSSYAHSQSLDRLMNPLIDQYLYYLSRIQTTGGTANTQTLGFSQGGPNTMANQAKNWLPGPCYRQQRVSTTTGQNNNSNFAWTAGTKYHLNGRNSLANPGIAMATHKDDEERFFPSNGILIFGKQNAARDNADYSDVMPTSEEEIKTTNPVATEEYGIVADNLQQQNTAPQIGTVNSQGALPGMVWQNRDVYLQGPIWAKIPHTDGNFHPSPLMGGFGLKHPPPQILIKNTPVPADPPTTFNQSKLNSFITQYSTGQVSVEIEWELQKENSKRWNPEIQYTSNYYKSTSVDFAVNTEGVYSEPRPIGTRYLTRNL

SEQ ID NO: 765 - protein, 738 aa, Artificial Sequence
  Synthetic Polypeptide
MAADGYLPDWLEDNLSEGIREWWALKPGAPKPKANQQKQDDGRGLVLPGYKYLGPFNGLDKGEPVNAADAAALEHDKAYDQQLQAGDNPYLRYNHADAEFQERLQEDTSFGGNLGRAVFQAKKRVLEPLGLVEEGAKTAPGKKRPVEPSPQRSPDSSTGIGKKGQQPARKRLNFGQTGDSESVPDPQPLGEPPAAPSGVGPNTMAAGGGAPMADNNEGADGVGSSSGNWHCDSTWLGDRVITTSTRTWALPAYNNHLYKQISNGTSGGATNDNTYFGYSTPWGYFDFNRFHCHFSPRDWQRLINNNWGFRPKRLSFKLFNIQVKEVTQNEGTKTIANNLTSTIQVFTDSEYQLPYVLGSAHQGCLPPFPADVFTIPQYGYLTLNNGSQAVGRSSFYCLEYFPSQMLRTGNNFQFTYTFEDVPFHSSYAHSQSLDRLMNPLIDQYLYYLSRIQTTGGTANTQTLGFSQGGPNTMANQAKNWLPGPCYRQQRVSTTTGQNNNSNFAWTAGTKYHLNGRNSLANPGIAMATHKDDEERFFPSNGILIFGKQNAARDNADYSDVMPTSEEEIKTTNPVATEEYGIVADNLQQQNTAPQIGTVNSQGALPGMVWQNRDVYLQGPIWAKIPHTDGNFHPSPLMGGFGLKHPPPQILIKNTPVPADPPTTFNQSKLNSFITQYSTGQVSVEIEWELQKENSKRWNPEIQYTSNYYKSTSVDFAVNTEGVYSEPRPIGTRYLTRNL

SEQ ID NO: 766 - protein, 738 aa, Artificial Sequence
  Synthetic Polypeptide
MAADGYLPDWLEDNLSEGIREWWALKPGAPKPKANQQKQDDGRGLVLPGYKYLGPFNGLDKGEPVNAADAAALEHDKAYDQQLQAGDNPYLRYNHADAEFQERLQEDTSFGGSLGRAVFQAKKRVLEPLGLVEEGAKTAPGKKRPVEPSPQRSPDSSTGIGKKGQQPARKRLNFGQTGDSESVPDPQPLGEPPAAPSGVGPNTMAAGGGAPMADNNEGADGVGSSSGNWHCDSTWLGDRVITTSTRTWALPTYNNHLYKQISNGTSGGATNDNTYFGYSTPWGYFDFNRFHCHFSPRDWQRLINNNWGFRPKRLSFKLFNIQVKEVTQNEGTKTIANNLTSTIQVFTDSEYQLPYVLGSAHQGCLPPFPADVFTIPQYGYLTLNNGSQAVGRSSFYCLEYFPSQMLRTGNNFQFTYTFEDVPFHSSYAHSQSLDRLMNPLIDQYLYYLSRIQTTGGTANTQTLGFSQGGPNTMANQAKNWLPGPCYRQQRVSTTTGQNNNSNFAWTAGTKYHLNGRNSLANPGIAMATHKDDEERFFPSNGILIFGKQNAARDNADYSDVMPTSEEEIKTTNPVATEEYGIVADNLQQQNTAPQIGTVNSQGALPGMVWQNRDVYLQGPIWAKIPHTDGNFHPSPLMGGFGLKHPPPQILIKNTPVPADPPTTFNQSKLNSFITQYSTGQVSVEIEWELQKENSKRWNPEIQYTSNYYKSTSVDFAVNTEGVYSEPRPIGTRYLTRNL

SEQ ID NO: 767 - protein, 738 aa, Artificial Sequence
  Synthetic Polypeptide
MAADGYLPDWLEDNLSEGIREWWALKPGAPKPKANQQKQDDGRGLVLPGYKYLGPFNGLDKGEPVNAADAAALEHDKAYDQQLQAGDNPYLRYNHADAEFQERLQEDTSFGGNLGRAVFQAKKRVLEPLGLVEEGAKTAPGKKRPVEPSPQRSPDSSTGIGKKGQQPARKRLNFGQTGDSESVPDPQPLGEPPAAPSGVGPNTMAAGGGAPMADNNEGADGVGSSSGNWHCDSTWLGDRVITTSTRTWALPTYNNHLYKQISNGTSGGATNDNTYFGYSTPWGYFDFNRFHCHFSPRDWQRLINNNWGFRPKRLSFKLFNIQVKEVTQNEGTKTIANNLTSTIQVFTDSEYQLPYVLGSAHQGCLPPFPADVFTIPQYGYLTLNNGSQAVGRSSFYCLEYFPSQMLRTGNNFQFTYTFEDVPFHSSYAHSQSLDRLMNPLIDQYLYYLSRIQTTGGTANTQTLGFSQGGPNTMANQATNWLPGPCYRQQRVSTTTGQNNNSNFAWTAGTKYHLNGRNSLANPGIAMATHKDDEERFFPSNGILIFGKQNAARDNADYSDVMPTSEEEIKTTNPVATEEYGIVADNLQQQNTAPQIGTVNSQGALPGMVWQNRDVYLQGPIWAKIPHTDGNFHPSPLMGGFGLKHPPPQILIKNTPVPADPPTTFNQSKLNSFITQYSTGQVSVEIEWELQKENSKRWNPEIQYTSNYYKSTSVDFAVNTEGVYSEPRPIGTRYLTRNL

SEQ ID NO: 768 - protein, 738 aa, Artificial Sequence
  Synthetic Polypeptide
MAADGYLPDWLEDNLSEGIREWWALKPGAPKPKANQQKQDDGRGLVLPGYKYLGPFNGLDKGEPVNAADAAALEHDKAYGQQLQAGDNPYLRYNHADAEFQERLQEDTSFGGNLGRAVFQAKKRVLEPLGLVEEGAKTAPGKKRPVEPSPQRSPDSSTGIGKKGQQPARKRLNFGQTGDSESVPDPQPLGEPPAAPSGVGPNTMAAGGGAPMADNNEGADGVGSSSGNWHCDSTWLGDRVITTSTRTWALPTYNNHLYKQISNGTSGGATNDNTYFGYSTPWGYFDFNRFHCHFSPRDWQRLINNNWGFRPKRLSFKLFNIQVKEVTQNEGTKTIANNLTSTIQVFTDSEYQLPYVLGSAHQGCLPPFPADVFTIPQYGYLTLNNGSQAVGRSSFYCLEYFPSQMLRTGNNFQFTYTFEDVPFHSSYAHSQSLDRLMNPLIDQYLYYLSRIQTTGGTANTQTLGFSQGGPNTMANQAKNWLPGPCYRQQRVSTTTGQNNNSNFAWTAGTKYHLNGRNSLANPGIAMATHKDDEERFFPSNGILIFGKQNAARDNADYSDVMPTSEEEIKTTNPVATEEYGIVADNLQQQNTAPQIGTVNSQGALPGMVWQNRDVYLQGPIWAKIPHTDGNFHPSPLMGGFGLKHPPPQILIKNTPVPADPPTTFNQSKLNSFITQYSTGQVSVEIEWELQKENSKRWNPEIQYTSNYYKSTSVDFAVNTEGVYSEPRPIGTRYLTRNL

SEQ ID NO: 769 - protein, 738 aa, Artificial Sequence
  Synthetic Polypeptide
MAADGYLPDWLEDNLSEGIREWWALKPGAPKPKANQQKQDDGRGLVLPGYKYLGPFNGLDKGEPVNAADAAALEHDKAYDQQLQAGDNPYLRYNHADAEFQERLQEDTSFGGNLGRAVFQAKKRVLEPLGLVEEGAKTAPGKKRPVEPSPQRSPDSSTGIGKKGQQPARKRLNFGQTGDSESVPDPQPLGEPPAAPSGVGPNTMAAGGGAPMADNNEGADGVGSSSGNWHCDSTWLGDRVITTSTRTWALPTYNNHLYKQISNGTSGGATNDNTYFGYSTPWGYFDFNRFHCHFSPRDWQRLINNNWGFRPKRLSFKLLNIQVKEVTQNEGTKTIANNLTSTIQVFTDSEYQLPYVLGSAHQGCLPPFPADVFTIPQYGYLTLNNGSQAVGRSSFYCLEYFPSQMLRTGNNFQFTYTFEDVPFHSSYAHSQSLDRLMNPLIDQYLYYLSRIQTTGGTANTQTLGFSQGGPNTMANQAKNWLPGPCYRQQRVSTTTGQNNNSNFAWTAGTKYHLNGRNSLANPGIAMATHKDDEERFFPSNGILIFGKQNAARDNADYSDVMPTSEEEIKTTNPVATEEYGIVADNLQQQNTAPQIGTVNSQGALPGMVWQNRDVYLQGPIWAKIPHTDGNFHPSPLMGGFGLKHPPPQILIKNTPVPADPPTTFNQSKLNSFITQYSTGQVSVEIEWELQKENSKRWNPEIQYTSNYYKSTSVDFAVNTEGVYSEPRPIGTRYLTRNL

SEQ ID NO: 770 - protein, 738 aa, Artificial Sequence
  Synthetic Polypeptide
MAADGYLPDWLEDNLSEGIREWWALKPGAPKPKANQQKQDDGRGLVLPGYKYLGPFNGLDKGEPVNAADAAALEHDKAYDQQLQAGDNPYLRYNHADAEFQERLQEDTSFGGNLGRAVFQAKKRVLEPLGLVEEGAKTAPGKKRPVEPSPQRSPDSSTGIGKKGQQPARKRLNFGQTGDSESVPDPQPLGEPPAAPSGVGPNTMAAGGGAPMADNNEGADGVGSSSGNWHCDSTWLGDRVITTSTRTWALPTYNNHLYKQISNGTSGGATNDNTYFGYSTPWGYFDFNRFHCHFSPRDWQRLINNNWGFRPKRLSFKLFNIQVKEVTQNEGTKTIANNLTSTIQVFTDSEYQLPYVLGSAHQGCLPPFPADVFTIPQYGYLTLNNGSQAVGRSSFYCLEYFPSQMLRTGNNFQFTYTFEDVPFHSSYAHSQSLDRLMNPLIDQYLYYLSRIQTTGGTANTQTLGFSQGGPNTMANQAKNWLPGPCYRQQRVSTTTGQNNNSNFAWTAGTKYHLNGRNSLANPGIAMATHKDDEERFFPSNGILIFGKQNAARDNADYSDVVPTSEEEIKTTNPVATEEYGIVADNLQQQNTAPQIGTVNSQGALPGMVWQNRDVYLQGPIWAKIPHTDGNFHPSPLMGGFGLKHPPPQILIKNTPVPADPPTTFNQSKLNSFITQYSTGQVSVEIEWELQKENSKRWNPEIQYTSNYYKSTSVDFAVNTEGVYSEPRPIGTRYLTRNL

SEQ ID NO: 771 - protein, 738 aa, Artificial Sequence
  Synthetic Polypeptide
MAADGYLPDWLEDNLSEGIREWWALKPGAPKPKANQQKQDDGRGLVLPGYKYLGPFNGLDKGEPVNAADAAALEHDKAYDQQLQAGDNPYLRYNHADAEFQERLQEDTSFGGNLGRAVFQAKKRVLEPLGLVEEGAKTAPGKKRPVEPSPQRSPDSSTGIGKKGRQPARKRLNFGQTGDSESVPDPQPLGEPPAAPSGVGPNTMAAGGGAPMADNNEGADGVGSSSGNWHCDSTWLGDRVITTSTRTWALPTYNNHLYKQISNGTSGGATNDNTYFGYSTPWGYFDFNRFHCHFSPRDWQRLINNNWGFRPKRLSFKLFNIQVKEVTQNEGTKTIANNLTSTIQVFTDSEYQLPYVLGSAHQGCLPPFPADVFTIPQYGYLTLNNGSQAVGRSSFYCLEYFPSQMLRTGNNFQFTYTFEDVPFHSSYAHSQSLDRLMNPLIDQYLYYLSRIQTTGGTANTQTLGFSQGGPNTMANQAKNWLPGPCYRQQRVSTTTGQNNNSNFAWTAGTKYHLNGRNSLANPGIAMATHKDDEERFFPSNGILIFGKQNAARDNADYSDVMPTSEEEIKTTNPVATEEYGIVADNLQQQNTAPQIGTVNSQGALPGMVWQNRDVYLQGPIWAKIPHTDGNFHPSPLMGGFGLKHPPPQILIKNTPVPADPPTTFNQSKLNSFITQYSTGQVSVEIEWELQKENSKRWNPEIQYTSNYYKSTSVDFAVNTEGVYSEPRPIGTRYLTRNL

SEQ ID NO: 772 - protein, 738 aa, Artificial Sequence
  Synthetic Polypeptide
MAADGYLPDWLEDNLSEGIREWWALKPGAPKPKANQQKQDDGRGLVLPGYKYLGPFNGLDKGEPVNAADAAALEHDKAYDQQLQAGDNPYLRYNHADAEFQERLQEDTSFGGNLGRAVFQAKKRVLEPLGLVEEGAKTAPGKKRPVESSPQRSPDSSTGIGKKGQQPARKRLNFGQTGDSESVPDPQPLGEPPAAPSGVGPNTMAAGGGAPMADNNEGADGVGSSSGNWHCDSTWLGDRVITTSTRTWALPTYNNHLYKQISNGTSGGATNDNTYFGYSTPWGYFDFNRFHCHFSPRDWQRLINNNWGFRPKRLSFKLFNIQVKEVTQNEGTKTIANNLTSTIQVFTDSEYQLPYVLGSAHQGCLPPFPADVFTIPQYGYLTLNNGSQAVGRSSFYCLEYFPSQMLRTGNNFQFTYTFEDVPFHSSYAHSQSLDRLMNPLIDQYLYYLSRIQTTGGTANTQTLGFSQGGPNTMANQAKNWLPGPCYRQQRVSTTTGQNNNSNFAWTAGTKYHLNGRNSLANPGIAMATHKDDEERFFPSNGILIFGKQNAARDNADYSDVMPTSEEEIKTTNPVATEEYGIVADNLQQQNTAPQIGTVNSQGALPGMVWQNRDVYLQGPIWAKIPHTDGNFHPSPLMGGFGLKHPPPQILIKNTPVPADPPTTFNQSKLNSFITQYSTGQVSVEIEWELQKENSKRWNPEIQYTSNYYKSTSVDFAVNTEGVYSEPRPIGTRYLTRNL

SEQ ID NO: 773 - protein, 738 aa, Artificial Sequence
  Synthetic Polypeptide
MAADGYLPDWLEDNLSEGIREWWALKPGAPKPKANQQKQDDGRGLVLPGYKYLGPFNGLDKGEPVNAADAAALEHDKAYDQQLQAGDNPYLRYNHADAEFQERLQEDTSFGGNLGRAVFQAKKRVLEPLGLVEEGAKTAPGKKRPVEPSPQRSPDSSTGIGKKGQQPARKRLNFGQTGDSESVPDPQPLGEPPAAPSGAGPNTMAAGGGAPMADNNEGADGVGSSSGNWHCDSTWLGDRVITTSTRTWALPTYNNHLYKQISNGTSGGATNDNTYFGYSTPWGYFDFNRFHCHFSPRDWQRLINNNWGFRPKRLSFKLFNIQVKEVTQNEGTKTIANNLTSTIQVFTDSEYQLPYVLGSAHQGCLPPFPADVFTIPQYGYLTLNNGSQAVGRSSFYCLEYFPSQMLRTGNNFQFTYTFEDVPFHSSYAHSQSLDRLMNPLIDQYLYYLSRIQTTGGTANTQTLGFSQGGPNTMANQAKNWLPGPCYRQQRVSTTTGQNNNSNFAWTAGTKYHLNGRNSLANPGIAMATHKDDEERFFPSNGILIFGKQNAARDNADYSDVMPTSEEEIKTTNPVATEEYGIVADNLQQQNTAPQIGTVNSQGALPGMVWQNRDVYLQGPIWAKIPHTDGNFHPSPLMGGFGLKHPPPQILIKNTPVPADPPTTFNQSKLNSFITQYSTGQVSVEIEWELQKENSKRWNPEIQYTSNYYKSTSVDFAVNTEGVYSEPRPIGTRYLTRNL

SEQ ID NO: 774 - protein, 738 aa, Artificial Sequence
  Synthetic Polypeptide
MAADGYLPDWLEDNLSEGIREWWALKPGAPKPKANQQKQDDGRGLVLPGYKYLGPFNGLDKGEPVNAADAAALEHDKAYDQQLQAGDNPYLRYNHADAEFQERLQEDTSFGGNLGRAVFQAKKRVLEPLGLVEEGAKTAPGKKRPVEPSPQRSPDSSTGIGKKGQQPARKRLNFGQTGDSESVPDPQPLGEPPAAPSGVGPNTMAAGGGAPMADNNEGADGVGSSSGNWHCDSTWLGDRVITTSTRTWALPTYNNHLYKQISNGTSGGATNDNTYFGYSTPWGYFDFNRFHCHFSPRDWQRLINNNWGFRPKRLSFKLFNIQVKEVTQNEGTKTIANNLTSTIQVFTDSEYQLPYVLGSAHQGCLPPFPADVFTIPQYGYLTLNNGSQAVGRSSFYCLEYFPSQMLRTGNNFQFTYTFEDVPFHSSYAHSQSLDRLMNPLIDQYPYYLSRIQTTGGTANTQTLGFSQGGPNTMANQAKNWLPGPCYRQQRVSTTTGQNNNSNFAWTAGTKYHLNGRNSLANPGIAMATHKDDEERFFPSNGILIFGKQNAARDNADYSDVMPTSEEEIKTTNPVATEEYGIVADNLQQQNTAPQIGTVNSQGALPGMVWQNRDVYLQGPIWAKIPHTDGNFHPSPLMGGFGLKHPPPQILIKNTPVPADPPTTFNQSKLNSFITQYSTGQVSVEIEWELQKENSKRWNPEIQYTSNYYKSTSVDFAVNTEGVYSEPRPIGTRYLTRNL

SEQ ID NO: 775 - protein, 738 aa, Artificial Sequence
  Synthetic Polypeptide
MAADGYLPDWLEDNLSEGIREWWALKPGAPKPKANQQKQDDGRGLVLPGYKYLGPFNGLDKGEPVNAADAAALEHDKAYDQQLQAGDNPYLRYNHADAEFQERLQEDTSFGGNLGRAVFQAKKRVLEPLGLVEEGAKTAPGKKRPVEPSPQRSPDSSTGIGKKGQQPARKRLNFGQTGDSESVPDPQPLGEPPAAPSGVGPNTMAAGGGAPMADNNEGADGVGSSSGNWHCDSTWLGDRVITTSTRTWALPTYNNHLYKQISNGTSGGATNDNTYFGYSTPWGYFDFNRFHCHFSPRDWQRLINNNWGFRPKRLSFKLFNIQVKEVTQNEGTKTIANNLTSTIQVFTDSEYQLPYVLGSAHQGCLPPFPADVFTIPQYGYLTLNNGSQAVGRSSFYCLEYFPSQMLRTGNNFQFTYTFEDVPFHSSYAHSQSLDRLMNPLIDQYLYYLSRIQTTGGTANTQTLGFSQGGPNTMANQAKNWLPGPCYRQQRVSTTTGQSNNSNFAWTAGTKYHLNGRNSLANPGIAMATHKDDEERFFPSNGILIFGKQNAARDNADYSDVMPTSEEEIKTTNPVATEEYGIVADNLQQQNTAPQIGTVNSQGALPGMVWQNRDVYLQGPIWAKIPHTDGNFHPSPLMGGFGLKHPPPQILIKNTPVPADPPTTFNQSKLNSFITQYSTGQVSVEIEWELQKENSKRWNPEIQYTSNYYKSTSVDFAVNTEGVYSEPRPIGTRYLTRNL

SEQ ID NO: 776 - protein, 738 aa, Artificial Sequence
  Synthetic Polypeptide
MAADGYLPDWLEDNLSEGIREWWALKPGAPKPKANQQKQDDGRGLVLPGYKYLGPFNGLDKGEPVNAADAAALEHDKAYDQQLQAGDNPYLRYNHADAEFQERLQEDTSFGGNLGRAVFQAKKRVLEPLGLVEEGAKTAPGKKRPVEPSPQRSPDSSTGIGKKGQQPARKRLNFGQTGDSESVPDPQPLGEPPAAPSGVGPNTMAAGGGAPMADNNEGADGVGSSSGNWHCDSTWLGDRVITTSTRTWALPTYNNHLYKQISNGTSGGATNDNTYFGYSTPWGYFDFNRFHCHFSPRDWQRLINNNWGFRPKRLSFKLFNIQVKEVTQNEGTKTIANNLTSTIQVFTDSEYQLPYVLGSAHQGCLPPFPADVFTIPQYGYLTLNNGSQAVGRSSFYCLEYFPSQMLRTGNNFQFTYTFEDVPFHSSYAHSQSLDRLMNPLIDQYLYYLSRIQTTGGTANTQTLGFSQGGPNTMANQAKNWLPGPRYRQQRVSTTTGQNNNSNFAWTAGTKYHLNGRNSLANPGIAMATHKDDEERFFPSNGILIFGKQNAARDNADYSDVMPTSEEEIKTTNPVATEEYGIVADNLQQQNTAPQIGTVNSQGALPGMVWQNRDVYLQGPIWAKIPHTDGNFHPSPLMGGFGLKHPPPQILIKNTPVPADPPTTFNQSKLNSFITQYSTGQVSVEIEWELQKENSKRWNPEIQYTSNYYKSTSVDFAVNTEGVYSEPRPIGTRYLTRNL

SEQ ID NO: 777 - protein, 738 aa, Artificial Sequence
  Synthetic Polypeptide
MAADGYLPDWLEDNLSEGIREWWALKPGAPKPKANQQKQDDGRGLVLPGYKYLGPFNGLDKGEPVNAADAAALEHDKAYDQQLQAGDNPYLRYNHADAEFQERLQEDTSFGGNLGRAVFQAKKRVLEPLGLVEEGAKTAPGKKRPVEPSPQRSPDSSTGIGKKGQQPARKRLNFGQTGDSESVPDPQPLGEPPAAPSGVGPNTMAAGGGAPMADNNEGADGVGSSSGNWHCDSTWLGDRVITTSTRTWALPTYNNHLYKQISNGTSGGATNDNTYFGYSTPWGYFDFNRFHCHFSPRDWQRLINNNWGFRPKRLSFKLFNIQVKEVTQNEGTKTIANNLTSTIQVFTDSEYQLPYVLGSAHQGCLPPFPADVFTIPQYGYLTLNNGSQAVGRSSFYCLEYFPSQMLRTGNNFQFTYTFEDVPFHSSYAHSQSLDRLMNPLIDQYLYYLSRIQTTGGTANTQTLGFSQGGPNTMANQAKNWLPGPCYRQQRVSTTTGQNNNSNFAWTAGTKYHLNGRNSLANPGIAMATHKDDEERFFPSNGILIFGKQNAARDNADYSDVMPTSEEEIKTTNPVATEEYGIVADNLQQQNTAPQIGTVNSQGALPGMVWQNRDVYLQGPIWAKIPHTDGNFHPSPLMGGFGLKHPPPQILIKNAPVPADPPTTFNQSKLNSFITQYSTGQVSVEIEWELQKENSKRWNPEIQYTSNYYKSTSVDFAVNTEGVYSEPRPIGTRYLTRNL

SEQ ID NO: 778 - protein, 738 aa, Artificial Sequence
  Synthetic Polypeptide
MAADGYLPDWLEDNLSEGIREWWALKPGAPKPKANQQKQDDGRGLVLPGYKYLGPFNGLDKGEPVNAADAAALEHDKAYDQQLQAGDNPYLRYNHADAEFQERLQEDTSFGGNLGRAVFQAKKRVLEPLGLVEEGAKTAPGKKRPVEPSPQRSPDSSTGIGKKGQQPARKRLNFGQTGDSESVPDPQPLGEPPAAPSGVGPNTMAAGGGAPMADNNEGADGVGSSSGNWHCDSTWLGDRVITTSTRTWALPTYNNHLYKQISNGTSGGATNDNTYFGYSTPWGYFDFNRFHCHFSPRDRQRLINNNWGFRPKRLSFKLFNIQVKEVTQNEGTKTIANNLTSTIQVFTDSEYQLPYVLGSAHQGCLPPFPADVFTIPQYGYLTLNNGSQAVGRSSFYCLEYFPSQMLRTGNNFQFTYTFEDVPFHSSYAHSQSLDRLMNPLIDQYLYYLSRIQTTGGTANTQTLGFSQGGPNTMANQAKNWLPGPCYRQQRVSTTTGQNNNSNFAWTAGTKYHLNGRNSLANPGIAMATHKDDEERFFPSNGILIFGKQNAARDNADYSDVMPTSEEEIKTTNPVATEEYGIVADNLQQQNTAPQIGTVNSQGALPGMVWQNRDVYLQGPIWAKIPHTDGNFHPSPLMGGFGLKHPPPQILIKNTPVPADPPTTFNQSKLNSFITQYSTGQVSVEIEWELQKENSKRWNPEIQYTSNYYKSTSVDFAVNTEGVYSEPRPIGTRYLTRNL

SEQ ID NO: 779 - protein, 738 aa, Artificial Sequence
  Synthetic Polypeptide
MAADGYLPDWLEDNLSEGIREWWALKPGAPKPKANQQKQDDGRGLVLPGYKYLGPFNGLDKGEPVNAADAAALEHDKAYDQQLQAGDNPYLRYNHADAEFQERLQEDTSFGGNLGRAVFQAKKRVLEPLGLVEEGAKTAPGKKRPVEPSPQRSPDSSTGIGKKGQQPARKRLNFGQTGDSESVPDPQPLGEPPAAPSGVGPNTMAAGGGAPMADNNEGADGVGSSSGNWHCDSTWLGDRVITTSTRTWALPTYNNHLYKQISNGTSGGATNDNTYFGYSTPWGYFDFNRFHCHFSPRDWQRLINNNWGFRPKRLSFKLFNIQVKEVTQNEGTKTIANNLTSTIQVFTDSEYQLPYVLGSAHQGCLPPFPADVFTIPQYGYLTLNNGSQAVGRSSFYCLEYFPSQMLRTGNNFQFTYTFEDVPFHSSYAHSQSLDRLMNPLIDQYLYYLSRIQTTGGTANTQTLGFSQGGPNTMANQAKNWLPGPCYRQQRVSTTTGQNNNSNFAWTAGTKYHLNGRNSLANPGIAMATHKDDEERFFPSNGILIFGKQNAARDNADYSDVMPTSEEEIKTTNPVATEEYGIVADNLQQQNTAPQIGTVNSQGALPGMVWQNRDVYLQGPIWAKIPHTDGSFHPSPLMGGFGLKHPPPQILIKNTPVPADPPTTFNQSKLNSFITQYSTGQVSVEIEWELQKENSKRWNPEIQYTSNYYKSTSVDFAVNTEGVYSEPRPIGTRYLTRNL

SEQ ID NO: 780 - protein, 738 aa, Artificial Sequence
  Synthetic Polypeptide
MAADGYLPDWLEDNLSEGIREWWALKPGAPKPKANQQKQDDGRGLVLPGYKYLGPFNGLDKGEPVNAADAAALEHDKAYDQQLQAGDNPYLRYNHADAEFQERLQEDTSFGGNLGRAVFQAKKRVLEPLGLVEEGAKTAPGKKRPVEPSPQRSPDSSTGIGKKGQQPARKRLNFGQTGDSESVPDPQPLGEPPTAPSGVGPNTMAAGGGAPMADNNEGADGVGSSSGNWHCDSTWLGDRVITTSTRTWALPTYNNHLYKQISNGTSGGATNDNTYFGYSTPWGYFDFNRFHCHFSPRDWQRLINNNWGFRPKRLSFKLFNIQVKEVTQNEGTKTIANNLTSTIQVFTDSEYQLPYVLGSAHQGCLPPFPADVFTIPQYGYLTLNNGSQAVGRSSFYCLEYFPSQMLRTGNNFQFTYTFEDVPFHSSYAHSQSLDRLMNPLIDQYLYYLSRIQTTGGTANTQTLGFSQGGPNTMANQAKNWLPGPCYRQQRVSTTTGQNNNSNFAWTAGTKYHLNGRNSLANPGIAMATHKDDEERFFPSNGILIFGKQNAARDNADYSDVMPTSEEEIKTTNPVATEEYGIVADNLQQQNTAPQIGTVNSQGALPGMVWQNRDVYLQGPIWAKIPHTDGNFHPSPLMGGFGLKHPPPQILIKNTPVPADPPTTFNQSKLNSFITQYSTGQVSVEIEWELQKENSKRWNPEIQYTSNYYKSTSVDFAVNTEGVYSEPRPIGTRYLTRNL

SEQ ID NO: 781 - protein, 738 aa, Artificial Sequence
  Synthetic Polypeptide
MAADGYLPDWLEDNLSEGIREWWALKPGAPKPKANQQKQDDGRGLVLPGYKYLGPFNGLDKGEPVNAADAAALEHDKAYDQQLQAGDNPYLRYNHADAEFQERLQEDTSFGGNLGRAVFQAKKRVLEPLGLVEEGAKTAPGKKRPVEPSPQRSPDSSTGIGKKGQQPARKRLNFGQTGDSESVPDPQPLGEPPAAPSGVGPNTMAAGGGAPMADNNEGADGVGSSSGNWHCDSTWLGDRVITTSTRTWALPTYNNHLYKQISNGTSGGATNDNTYFGYSTPWGYFDFNRFHCHFSPRDWQRLINNNWGFRPKRLSFKLFNIQVKEVTQNEGTKTIANNLTSTIQVFTDSEYQLPYVLGSAHQGCLPPFPADVFTIPQYGYLTLNNGSQAVGRSSFYCLEYFPSQMLRTGNNFQFTYTFEDVPFHSSYAHSQSLDRLMNPLIDQYLYYLSRIQTTGGTANTQTLGFSQGGPNTMANQAKNWLPGPCYRQQRVSTTTGQNNNSNFAWTAGTKYHLNGRNSLANPGIAMATHKDDEERFFPSNGILIFGKQNAARDNADYSDVMPTSEEEIKTTNPVATEEYGIVADNLQQQNTAPQIGTVNSQGALPGMVWQNRDVYLQGPIWAKIPHTDGNFHPSPLMGGFGLKHPPPQILIKNTPVPADPPTTFNQSKLNSFITQYSTGQVSVEIEWELQKENSKRWNPEIQYTSNYYKSTSVDFAVNAEGVYSEPRPIGTRYLTRNL

SEQ ID NO: 782 - protein, 738 aa, Artificial Sequence
  Synthetic Polypeptide
MAADGYLPDWLEDNLSEGIREWWALKPGAPKPKANQQKQDDGRGLVLPGYKYLGPFNGLDKGEPVNAADAAALEHDKAYDQQLQAGDNPYLRYNHADAEFQERLQEDTSFGGNLGRAVFQAKKRVLEPLGLVEEGAKTAPGKKRPVEPSPQRSPDSSTGIGKKGQQPARKRLNFGQTGDSESVPDPQPLGEPPAAPSGVGPNTMAAGGGAPMADNNEGADGAGSSSGNWHCDSTWLGDRVITTSTRTWALPTYNNHLYKQISNGTSGGATNDNTYFGYSTPWGYFDFNRFHCHFSPRDWQRLINNNWGFRPKRLSFKLFNIQVKEVTQNEGTKTIANNLTSTIQVFTDSEYQLPYVLGSAHQGCLPPFPADVFTIPQYGYLTLNNGSQAVGRSSFYCLEYFPSQMLRTGNNFQFTYTFEDVPFHSSYAHSQSLDRLMNPLIDQYLYYLSRIQTTGGTANTQTLGFSQGGPNTMANQAKNWLPGPCYRQQRVSTTTGQNNNSNFAWTAGTKYHLNGRNSLANPGIAMATHKDDEERFFPSNGILIFGKQNAARDNADYSDVMPTSEEEIKTTNPVATEEYGIVADNLQQQNTAPQIGTVNSQGALPGMVWQNRDVYLQGPIWAKIPHTDGNFHPSPLMGGFGLKHPPPQILIKNTPVPADPPTTFNQSKLNSFITQYSTGQVSVEIEWELQKENSKRWNPEIQYTSNYYKSTSVDFAVNTEGVYSEPRPIGTRYLTRNL

SEQ ID NO: 783 - protein, 738 aa, Artificial Sequence
  Synthetic Polypeptide
MAADGYLPDWLEDNLSEGIREWWALKPGAPKPKANQQKQDDGRGLVLPGYKYLGPFNGLDKGEPVNAADAAALEHDKAYDQQLQAGDNPYLRYNHADAEFQERLQEDTSFGGNLGRAVFQAKKRVLEPLGLVEEGAKTAPGKKRPVEPSPQRSPDSSTGIGKKGQQPARKRLNFGQTGDSESVPDPQPLGEPPAAPSGVGPNTMAAGGGAPMADNNEGADGVGSSSGNWHCDSTWLGDRAITTSTRTWALPTYNNHLYKQISNGTSGGATNDNTYFGYSTPWGYFDFNRFHCHFSPRDWQRLINNNWGFRPKRLSFKLFNIQVKEVTQNEGTKTIANNLTSTIQVFTDSEYQLPYVLGSAHQGCLPPFPADVFTIPQYGYLTLNNGSQAVGRSSFYCLEYFPSQMLRTGNNFQFTYTFEDVPFHSSYAHSQSLDRLMNPLIDQYLYYLSRIQTTGGTANTQTLGFSQGGPNTMANQAKNWLPGPCYRQQRVSTTTGQNNNSNFAWTAGTKYHLNGRNSLANPGIAMATHKDDEERFFPSNGILIFGKQNAARDNADYSDVMPTSEEEIKTTNPVATEEYGIVADNLQQQNTAPQIGTVNSQGALPGMVWQNRDVYLQGPIWAKIPHTDGNFHPSPLMGGFGLKHPPPQILIKNTPVPADPPTTFNQSKLNSFITQYSTGQVSVEIEWELQKENSKRWNPEIQYTSNYYKSTSVDFAVNTEGVYSEPRPIGTRYLTRNL

SEQ ID NO: 784 - protein, 738 aa, Artificial Sequence
  Synthetic Polypeptide
MAADGYLPDWLEDNLSEGIREWWALKPGAPKPKANQQKQDDGRGLVLPGYKYLGPFNGLDKGEPVNAADAAALEHDKAYDQQLQAGDNPYLRYNHADAEFQERLQEDTSFGGNLGRAVFQAKKRVLEPLGLVEEGAKTAPGKKRPVEPSPQRSPDSSTGIGKKGQQPARKRLNFGQTGDSESVPDPQPLGEPPAAPSGVGPNTMAAGGGAPMADNNEGADGVGSSSGNWHCDSTWLGDRVITTSTRTWALPTYNNHLYKQISNGTSGGATNDNTYFGYSTPWGYFDFNRFHCHFSPRDWQRLINNNWGFRPKRLSFKLFNIQVKEVTQNEGTKTIANNLTSTIQVFTDSEYQLPYVLGSAHQGCLPPFPADVFTIPQYGYLTLNNGSQAVGRSSFYCLEYFPSQMLRTGNNFQFTYTFEDVPFHSSYAHSQSLDRLMNPLIDQYLYYLSRIQTTGGTANTQTLGFSQGGPNTMANQAKNWLPGPCYRQQRVSTTTGQNNNSNFAWTAGTKYHLNGRNSLANPGVAMATHKDDEERFFPSNGILIFGKQNAARDNADYSDVMPTSEEEIKTTNPVATEEYGIVADNLQQQNTAPQIGTVNSQGALPGMVWQNRDVYLQGPIWAKIPHTDGNFHPSPLMGGFGLKHPPPQILIKNTPVPADPPTTFNQSKLNSFITQYSTGQVSVEIEWELQKENSKRWNPEIQYTSNYYKSTSVDFAVNTEGVYSEPRPIGTRYLTRNL

SEQ ID NO: 785 - protein, 738 aa, Artificial Sequence
  Synthetic Polypeptide
MAADGYLPDWLEDNLSEGIREWWALKPGAPKPKANQQKQDDGRGLVLPGYKYLGPFNGLDKGEPVNAADAAALEHDKAYDQQLQAGDNPYLRYNHADAEFQERLQEDTSFGGNLGRAVFQAKKRVLEPLGLVEEGAKTAPGKKRPVEPSPQRSPDSSTGIGKKGQQPARKRLNFGQTGDSESVPDPQPLGEPPAAPSGVGPNTMAAGGGAPMADNNEGADGVGSSSGNWHCDSTWLGDRVITTSTRTWALPTYNNHLYKQISNGTSGGATNDNTYFGYSTPWGYFDFNRFHCHFSPRDWQRLINNNWGFRPKRLSFKLFNIQVKEVTQNEGTKTIANNLTGTIQVFTDSEYQLPYVLGSAHQGCLPPFPADVFTIPQYGYLTLNNGSQAVGRSSFYCLEYFPSQMLRTGNNFQFTYTFEDVPFHSSYAHSQSLDRLMNPLIDQYLYYLSRIQTTGGTANTQTLGFSQGGPNTMANQAKNWLPGPCYRQQRVSTTTGQNNNSNFAWTAGTKYHLNGRNSLANPGIAMATHKDDEERFFPSNGILIFGKQNAARDNADYSDVMPTSEEEIKTTNPVATEEYGIVADNLQQQNTAPQIGTVNSQGALPGMVWQNRDVYLQGPIWAKIPHTDGNFHPSPLMGGFGLKHPPPQILIKNTPVPADPPTTFNQSKLNSFITQYSTGQVSVEIEWELQKENSKRWNPEIQYTSNYYKSTSVDFAVNTEGVYSEPRPIGTRYLTRNL

SEQ ID NO: 786 - protein, 738 aa, Artificial Sequence
  Synthetic Polypeptide
MAADGYLPDWLEDNLSEGIREWWALKPGAPKPKANQQKQDDGRGLVLPGYKYLGPFNGLDKGEPVNAADAAALEHDKAYDQQLQAGDNPYLRYNHADAEFQERLQEDTSFGGNLGRAVFQAKKRVLEPLGLVEEGAKTAPGKKRPVEPSPQRSPDSSTGIGKKGQQPARKRLNFGQTGDSESVPDPQPLGEPPAAPSGVGPNTMAAGGGAPMADNNEGADGVGSSSGNWHCDSTWLGDRVITTSTRTWALPTYNNHLYKQISNGTSGGATNDNTYFGYSTPWGYFDFNRFHCHFSPRDWQRLINNNWGFRPKRLSFKLFNIQVKEVTQNEGTKTIANNLTSTIQVFTDSEYQLPYVLGSAHQGCLPPFPADVFTIPQYGYLTLNNGSQAVGRSSFYCLEYFPSQMLRTGNNFQFTYTFEDVPFHSSYAHSQSLDRLMNPLIDQYLYYLSRIQTTGGTANTQTLGFSQGGPNTMANQAKNWLPGPCYRQQRVSTTTGQNNNSNFAWTAGTKYHLNGRNSLANPGIAMATHKDDEERFFPSNGILIFGKQNAVRDNADYSDVMPTSEEEIKTTNPVATEEYGIVADNLQQQNTAPQIGTVNSQGALPGMVWQNRDVYLQGPIWAKIPHTDGNFHPSPLMGGFGLKHPPPQILIKNTPVPADPPTTFNQSKLNSFITQYSTGQVSVEIEWELQKENSKRWNPEIQYTSNYYKSTSVDFAVNTEGVYSEPRPIGTRYLTRNL

SEQ ID NO: 787 - protein, 738 aa, Artificial Sequence
  Synthetic Polypeptide
MAADGYLPDWLEDNLSEGIREWWALKPGAPKPKANQQKQDDGRGLVLPGYKYLGPFNGLDKGEPVNAADAAALEHDKAYDQQLQAGDNPYLRYNHADAEFQERLQEDTSFGGNLGRAVFQAKKRVLEPLGLVEEGAKTAPGKKRPVEPSPQRSPDSSTGIGKKGQQPARKRLNFGQTGDSESVPDPQPLGEPPAAPSGVGPNTMAAGGGAPMADNNEGADGVGSSSGNWHCDSTWLGDRVITTSTRTWALPTYNNHLYKQISNGTSGGATNDNTYFGYSTPWGYFDFNRFHCHFSPRDWQRLINNNWGFRPKRLSFKLFNIQVKEVTQNEGTKTIANNLTSTIQVFTDSEYQLPYVLGSAHQGCLPPFPADVFTIPQYGYLTLNNGSQAVGRSSFYCLEYFPSQMLRTGNNFQFTYTFEDVPFHSSYAHSQSLDRLMNPLIDQYLYYLSRIQTTGGTANTQTLGFSQGGPNTMANQAKNWLPGPCYRQQRVSTTTGQNNNSNFAWTAGTKYHLNGRNSLANPGIAMATHKDDEERFFPSNGILIFGKQNAARDNADYSDVMPTSEEEIKTTNPVATEEYGIVADNLQQQNTAPQIGTVNSQGALPGMVWQNRDVYLQGPIWAKIPHTDGNFHPSPLMGGFGLKHPPPQILIKNTPVPADPPTTFNQSKLNSFIAQYSTGQVSVEIEWELQKENSKRWNPEIQYTSNYYKSTSVDFAVNTEGVYSEPRPIGTRYLTRNL

SEQ ID NO: 788 - protein, 738 aa, Artificial Sequence
  Synthetic Polypeptide
MAADGYLPDWLEDNLSEGIREWWALKPGAPKPKANQQKQDDGRGLVLPGYKYLGPFNGLDKGEPVNAADAAALEHDKAYDQQLQAGDNPYLRYNHADAEFQERLQEDTSFGGNLGRAVFQAKKRVLEPLGLVEEGAKTAPGKKRPVEPSPQRSPDSSTGIGKKGQQPARKRLNFGQTGDSESVPDPQPLGEPPAAPSGVGPNTMAAGGGAPMADNNEGADGVGSSSGNWHCDSTWLGDRVITTSTRTWALPTYNNHLYKQISNGTSGGATNDNTYFGYSTPWGYFDFNRFHCHFSPRDWQRLINNNWGFRPKRLSFKLFNIQVKEVTQNEGTKTIANNLTSTIQVFTDSEYQLPYVLGSAHQGCLPPFPADVFTIPQYGYLTLNNGSQAVGRSSFYCLEYFPSQMLRTGNNFQFTYTFEDVPFHSSYAHSQSLDRLMNPLIDQYLYYLSRIQTTGGTANTQTLGFSQGGPNTMANQAKNWLPGPCYRQQRVSTTTGQNNNSNFAWTAGTKYHLNGRNSLANPGIAMATHKDGEERFFPSNGILIFGKQNAARDNADYSDVMPTSEEEIKTTNPVATEEYGIVADNLQQQNTAPQIGTVNSQGALPGMVWQNRDVYLQGPIWAKIPHTDGNFHPSPLMGGFGLKHPPPQILIKNTPVPADPPTTFNQSKLNSFITQYSTGQVSVEIEWELQKENSKRWNPEIQYTSNYYKSTSVDFAVNTEGVYSEPRPIGTRYLTRNL

SEQ ID NO: 789 - protein, 738 aa, Artificial Sequence
  Synthetic Polypeptide
MAADGYLPDWLEDNLSEGIREWWALKPGAPKPKANQQKQDDGRGLVLPGYKYLGPFNGLDKGEPVNAADAAALEHDKAYDQQLQAGDNPYLRYNHADAEFQERLQEDTSFGGNLGRAVFQAKKRVLEPLGLVEEGAKTAPGKKRPVEPSPQRSPDSSTGIGKKGQQPARKRLNFGQTGDSESVPDPQPLGEPPAAPSGVGPNTMAAGGGAPMADNNEGADGVGSSSGNWHCDSTWLGDRVITTSTRTWALPTYNNHLYKQISNGTSGGATNDNTYFGYSTPWGYFDFNRFHCHFSPRDWQRLINNNWGFRPKRLSFKLFNIQVKEVTQNEGTKTIANNLTSTIQVFTDSEYQLPYVLGSAHQGCLPPFPADVFTIPQYGYLTLNNGSQAVGRSSFYCLEYFPSQMLRTGNNFQFTYTFEDVPFHSSYAHSQSLDRLMNPLIDQYLYYLSRIQTTGGTANTQTLGFSQGGPNTMANQAKNWLPGPCYRQQRVSTTTGQNNNSNFAWTAGTKYHLNGRNSLANPGIAMATHKGDEERFFPSNGILIFGKQNAARDNADYSDVMPTSEEEIKTTNPVATEEYGIVADNLQQQNTAPQIGTVNSQGALPGMVWQNRDVYLQGPIWAKIPHTDGNFHPSPLMGGFGLKHPPPQILIKNTPVPADPPTTFNQSKLNSFITQYSTGQVSVEIEWELQKENSKRWNPEIQYTSNYYKSTSVDFAVNTEGVYSEPRPIGTRYLTRNL

SEQ ID NO: 790 - protein, 738 aa, Artificial Sequence
  Synthetic Polypeptide
MAADGYLPDWLEDNLSEGIREWWALKPGAPKPKANQQKQDDGRGLVLPGYKYLGPFNGLDKGEPVNAADAAALEHDKAYNQQLQAGDNPYLRYNHADAEFQERLQEDTSFGGNLGRAVFQAKKRVLEPLGLVEEGAKTAPGKKRPVEPSPQRSPDSSTGIGKKGQQPARKRLNFGQTGDSESVPDPQPLGEPPAAPSGVGPNTMAAGGGAPMADNNEGADGVGSSSGNWHCDSTWLGDRVITTSTRTWALPTYNNHLYKQISNGTSGGATNDNTYFGYSTPWGYFDFNRFHCHFSPRDWQRLINNNWGFRPKRLSFKLFNIQVKEVTQNEGTKTIANNLTSTIQVFTDSEYQLPYVLGSAHQGCLPPFPADVFTIPQYGYLTLNNGSQAVGRSSFYCLEYFPSQMLRTGNNFQFTYTFEDVPFHSSYAHSQSLDRLMNPLIDQYLYYLSRIQTTGGTANTQTLGFSQGGPNTMANQAKNWLPGPCYRQQRVSTTTGQNNNSNFAWTAGTKYHLNGRNSLANPGIAMATHKDDEERFFPSNGILIFGKQNAARDNADYSDVMPTSEEEIKTTNPVATEEYGIVADNLQQQNTAPQIGTVNSQGALPGMVWQNRDVYLQGPIWAKIPHTDGNFHPSPLMGGFGLKHPPPQILIKNTPVPADPPTTFNQSKLNSFITQYSTGQVSVEIEWELQKENSKRWNPEIQYTSNYYKSTSVDFAVNTEGVYSEPRPIGTRYLTRNL

SEQ ID NO: 791 - protein, 738 aa, Artificial Sequence
  Synthetic Polypeptide
MAADGYLPDWLEDNLSEGIREWWALKPGAPKPKANQQKQDDGRGLVLPGYKYLGPFNGLDKGEPVNAADAAALEHDKAYDQQLQAGDNPYLRYNHADAEFQERLQEDTSFGGNLGRAVFQAKKRVLEPLGLVEEGAKTAPGKKRPVEPSPQRSPDSSTGIGKKGQQPARKRLNFGQTGDSESVPDPQPLGEPPAAPSGVGPNTMAAGGGAPMADNNEGADGVGSSSGNWHCDSTWLGDRVITTSTRTWALPTYNNHLYKQISNGTSGGATNDNTYFGYSTPWGYFDFNRFHCHFSPRDWQRLINNNWGFRPKRLSFKLFNIQVKEVTQNEGTKTIANNLTSTIQVFTDSEYQLPYVLGSAHQGCLPPFPADVFTIPQYGYLTLNNGSQAVGRSSFYCLEYFPSQMLRTGNNFQFTYTFEDVPFHSSYAHSQSLDRLMNPLIDQYLYYLSRIQTTGGTANTQTLGFSQGGPNTMANQAKNWLPGPCYRQQRVSTTTGQNNNSNFAWTAGTKYHLNGRNSLANPGIAMATHKDDEERFFPSNGILIFGKQNAARDNADYSDVMPTSEEEIKTTNPVATEEYGIVADNLQQQNTAPQIGTVNSQGALPGMVWQNRDVYLQGPTWAKIPHTDGNFHPSPLMGGFGLKHPPPQILIKNTPVPADPPTTFNQSKLNSFITQYSTGQVSVEIEWELQKENSKRWNPEIQYTSNYYKSTSVDFAVNTEGVYSEPRPIGTRYLTRNL

SEQ ID NO: 792 - protein, 738 aa, Artificial Sequence
  Synthetic Polypeptide
MAADGYLPDWLEDNLSEGIREWWALKPGAPKPKANQQKQDDGRGLVLPGYKYLGPFNGLDKGEPVNAADAAALEHDKAYDQQLQAGDNPYLRYNHADAEFQERLQEDTSFGGNLGRAVFQAKKRVLEPLGLVEEGAKTAPGKKRPVEPSPQRSPDSSTGIGKKGQQPARKRLNFGQTGDSESVPDPQPLGEPPAAPSGVGPNTMAAGGGAPMADNNEGADGVGSSSGNWHCDSTWLGDRVITTSTRTWALPTYNNHLYKQISNGTSGGATNDNTYFGYSTPWGYFDFNRFHCHFSPRDWQRLINNNWGFRPKRLSFKLFNIQVKEVTQNEGTKTIANNLTSTIQVFTDSEYQLPYVLGSAHQGCLPPFPADVFTIPQYGYLTLNNGSQAVGRSSFYCLEYFPSQMLRTGNNFQFTYTFEDVPFHSSYAHSQSLDRLMNPLIDQYLYYLSRIQTTGGTANTQTLGFSQGGPNTMANQAKNWLPGPCYRQQRVSTTTGQNNNSNFAWTAGTKYHLNGRNSLANPGIAMATHKDDEERFFPSNGILIFGKQNAARDNADYSDVMPTSEEEIKTTNPVATEEYGIVADNLRQQNTAPQIGTVNSQGALPGMVWQNRDVYLQGPIWAKIPHTDGNFHPSPLMGGFGLKHPPPQILIKNTPVPADPPTTFNQSKLNSFITQYSTGQVSVEIEWELQKENSKRWNPEIQYTSNYYKSTSVDFAVNTEGVYSEPRPIGTRYLTRNL

SEQ ID NO: 793 - protein, 738 aa, Artificial Sequence
  Synthetic Polypeptide
MAADGYLPDWLEDNLSEGIREWWALKPGAPKPKANQQKQDDGRGLVLPGYKYLGPFNGLDKGEPVNAADAAALEHDKAYDQQLQAGDNPYLRYNHADAEFQERLQEDTSFGGNLGRAVFQAKKRVLEPLGLVEEGAKTAPGKKRPVEPSPQRSPDSSTGIGKKGQQPARKRLNFGQTGDSESVPDPQPLGEPPAAPSGVGPNTMAAGGGAPMADNNEGADGVGSSSGNWHCDSTWLGDRVITTSTRTWALPTYNNHLYKQISNGTSGGATNDNTYFGYSTPWGYFDFNRFHCHFSPRDWQRLINNNWGFRPKRLSFKLFNIQVKEVTQNEGTKTIANNLTSTIQVFTDSEYQLPYVLGSAHQGCLPPFPADVFTIPQYGYLTLNNGSQAVGRSSFYCLEYFPSQMLRTGNNFQFTYTFEDVPFHSSYAHSQSLDRLMNPLIDQYLYYLSRIQTTGGTANTQTLGFSQGGPNTMANQAKNWLPGPCYRQQRVSTTTGQNNNSNFAWTAGTKYHLNGRNSLANPGIAMATHKDDEERFFPSNGILIFGKQNAARDNADYSDAMPTSEEEIKTTNPVATEEYGIVADNLQQQNTAPQIGTVNSQGALPGMVWQNRDVYLQGPIWAKIPHTDGNFHPSPLMGGFGLKHPPPQILIKNTPVPADPPTTFNQSKLNSFITQYSTGQVSVEIEWELQKENSKRWNPEIQYTSNYYKSTSVDFAVNTEGVYSEPRPIGTRYLTRNL

SEQ ID NO: 794 - protein, 738 aa, Artificial Sequence
  Synthetic Polypeptide
MAADGYLPDWLEDNLSEGIREWWALKPGAPKPKANQQKQDDGRGLVLPGYKYLGPFNGLDKGEPVNAADAAALEHDKAYDQQLQAGDNPYLRYNHADAEFQERLQEDTSFGGNLGRAVFQAKKRVLEPLGLVEEGAKTAPGKKRPVEPSPQRSPDSSTGIGKKGQQPARKRLNFGQTGDSESVPDPQPLGEPPAAPSGVGPNTMAAGGGAPMADNNEGADGVGSSSGNWHCDSTWLGDRVITTSTRTWALPTYNNHLYKQISNGTSGGATNGNTYFGYSTPWGYFDFNRFHCHFSPRDWQRLINNNWGFRPKRLSFKLFNIQVKEVTQNEGTKTIANNLTSTIQVFTDSEYQLPYVLGSAHQGCLPPFPADVFTIPQYGYLTLNNGSQAVGRSSFYCLEYFPSQMLRTGNNFQFTYTFEDVPFHSSYAHSQSLDRLMNPLIDQYLYYLSRIQTTGGTANTQTLGFSQGGPNTMANQAKNWLPGPCYRQQRVSTTTGQNNNSNFAWTAGTKYHLNGRNSLANPGIAMATHKDDEERFFPSNGILIFGKQNAARDNADYSDVMPTSEEEIKTTNPVATEEYGIVADNLQQQNTAPQIGTVNSQGALPGMVWQNRDVYLQGPIWAKIPHTDGNFHPSPLMGGFGLKHPPPQILIKNTPVPADPPTTFNQSKLNSFITQYSTGQVSVEIEWELQKENSKRWNPEIQYTSNYYKSTSVDFAVNTEGVYSEPRPIGTRYLTRNL

SEQ ID NO: 795 - protein, 738 aa, Artificial Sequence
  Synthetic Polypeptide
MAADGYLPDWLEDNLSEGIREWWALKPGAPKPKANQQKQDDGRGLVLPGYKYLGPFNGLDKGEPVNAADAAALEHDKAYDQQLQAGDNPYLRYNHADAEFQERLQEDTSFGGNLGRAVFQAKKRVLEPLGLVEEGAKTAPGKKRPVEPSPQRSPDSSTGIGKKGQQPARKRLNFGQTGDSESVPDPQPLGEPPAAPSGVGPNTMAAGGGAPMADNNEGADGVGSSSGNWHCDSTWLGDRVITTSTRTWALPTYNNHLYKQISNGTSGGATNDNTYFGYSTPWGYFDFNRFHCHFSPRDWQRLINNNWGFRPKRLSFKLFNIQVKEVAQNEGTKTIANNLTSTIQVFTDSEYQLPYVLGSAHQGCLPPFPADVFTIPQYGYLTLNNGSQAVGRSSFYCLEYFPSQMLRTGNNFQFTYTFEDVPFHSSYAHSQSLDRLMNPLIDQYLYYLSRIQTTGGTANTQTLGFSQGGPNTMANQAKNWLPGPCYRQQRVSTTTGQNNNSNFAWTAGTKYHLNGRNSLANPGIAMATHKDDEERFFPSNGILIFGKQNAARDNADYSDVMPTSEEEIKTTNPVATEEYGIVADNLQQQNTAPQIGTVNSQGALPGMVWQNRDVYLQGPIWAKIPHTDGNFHPSPLMGGFGLKHPPPQILIKNTPVPADPPTTFNQSKLNSFITQYSTGQVSVEIEWELQKENSKRWNPEIQYTSNYYKSTSVDFAVNTEGVYSEPRPIGTRYLTRNL

SEQ ID NO: 796 - protein, 738 aa, Artificial Sequence
  Synthetic Polypeptide
MAADGYLPDWLEDNLSEGIREWWALKPGAPKPKANQQKQDDGRGLVLPGYKYLGPFNGLDKGEPVNAADAAALEHDKAYDQQLQAGDNPYLRYNHADAEFQERLQEDTSFGGNLGRAVFQAKKRVLEPLGLVEEGAKTAPGKKRPVEPSPQRSPDSSTGIGKKGQQPARKRLNFGQTGDSESVPDPQPLGEPPAAPSGVGPNTMAAGGGAPMADNNEGADGVGSSSGNWHCDSTWLGDRVITTSTRTWALPTYNNHLYKQISNGTSGGATNDNTYFGYSTPWGYFDFNRFHCHFSPRDWQRLINNNWGFRPKRLSFKLFNIQVKEVTQNEGTKTIANNLTSTIQVFTDSEYQLPYVLGSAHQGCLPPFPADVFTIPQYGYLTLNNGSQAVGRSSFYCLEYFPSQMLRTGNNFQFTYTFEDVPFHSSYAHSQSLDRLMNPLIDQYLYYLSRIQTTGGTANTQTLGFSQGGPNTMANQAKNWLPGPCYRQQRVSTTTGQNNNSNFAWTAGTKYHLNGRNSLANPGIAMATHKDDEERFFPSNGILIFGKQNAARDNADYSDVMPTSEEEIKTTNPVATEEYGIVADNLQQQNTAPQIGTVNSQGALPGMVWQNRDVYLQGPIWAKIPHTDGNFHPSPLMGGFGLKHPPPQILIKNTPVPADPPTTFNQSKLNSFITQYSTGQVSAEIEWELQKENSKRWNPEIQYTSNYYKSTSVDFAVNTEGVYSEPRPIGTRYLTRNL

SEQ ID NO: 797 - protein, 738 aa, Artificial Sequence
  Synthetic Polypeptide
MAADGYLPDWLEDNLSEGIREWWALKPGAPKPKANQQKQDDGRGLVLPGYKYLGPFNGLDKGEPVNAADAAALEHDKAYDQQLQAGDNPYLRYNHADAEFQERLQEDTSFGGNLGRAVFQAKKRVLEPLGLVEEGAKTAPGKKRPVEPSPQRSPDSSTGIGKKGQQPARKRLNFGQTGDSESVPDPQPLGEPPAAPSGVGPNTMAAGGGAPMADNNEGADGVGSSSGNWHCDSTWLGDRVITTSTRTWALPTYNNHLYKQISNGTSGGATNDNTYFGYSTPWGYFDFNRFHCHFSPRDWQRLINNNWGFRPKRLSFKLFNIQVKEVTQNEGTKTIANNLTSTIQVFTDSEYQLPYVLGSAHQGCLPPFPADVFTIPQYGYLTLNNGSQAVGRSSFYCLEYFPSQMLRTGNNFQFTYTFEDVPFHSSYAHSQGLDRLMNPLIDQYLYYLSRIQTTGGTANTQTLGFSQGGPNTMANQAKNWLPGPCYRQQRVSTTTGQNNNSNFAWTAGTKYHLNGRNSLANPGIAMATHKDDEERFFPSNGILIFGKQNAARDNADYSDVMPTSEEEIKTTNPVATEEYGIVADNLQQQNTAPQIGTVNSQGALPGMVWQNRDVYLQGPIWAKIPHTDGNFHPSPLMGGFGLKHPPPQILIKNTPVPADPPTTFNQSKLNSFITQYSTGQVSVEIEWELQKENSKRWNPEIQYTSNYYKSTSVDFAVNTEGVYSEPRPIGTRYLTRNL

SEQ ID NO: 798 - protein, 738 aa, Artificial Sequence
  Synthetic Polypeptide
MAADGYLPDWLEDNLSEGIREWWALKPGAPKPKANQQKQDDGRGLVLPGYKYLGPFNGLDKGEPVNAADAAALEHDKAYDQQLQAGDNPYLRYNHADAEFQERLQEDTSFGGNLGRAVFQAKKRVLEPLGLVEEGAKTAPGKKRPVEPSPQRSPDSSTGIGKKGQQPARKRLNFGQTGDSESVPDPQPLGEPPAAPSGVGPNTMAAGGGAPMADNNEGADGVGSSSGNWHCDSTWLGDRVITTSTRTWALPTYNNHLYKQISNGTSGGATNDNTYFGYSTPWGYFDFNRFHCHFSPRDWQRLINNNWGFRPKRLSFKLFNIQVKEVTQNEGTKTIANNLTSTIQVFTDSEYQLPYVLGSAHQGCLPPFPADVFTIPQYGYLTLNNGSQAVGRSSFYCLEYFPSQMLRTGSNFQFTYTFEDVPFHSSYAHSQSLDRLMNPLIDQYLYYLSRIQTTGGTANTQTLGFSQGGPNTMANQAKNWLPGPCYRQQRVSTTTGQNNNSNFAWTAGTKYHLNGRNSLANPGIAMATHKDDEERFFPSNGILIFGKQNAARDNADYSDVMPTSEEEIKTTNPVATEEYGIVADNLQQQNTAPQIGTVNSQGALPGMVWQNRDVYLQGPIWAKIPHTDGNFHPSPLMGGFGLKHPPPQILIKNTPVPADPPTTFNQSKLNSFITQYSTGQVSVEIEWELQKENSKRWNPEIQYTSNYYKSTSVDFAVNTEGVYSEPRPIGTRYLTRNL

SEQ ID NO: 799 - protein, 738 aa, Artificial Sequence
  Synthetic Polypeptide
MAADGYLPDWLEDNLSEGIREWWALKPGAPKPKANQQKQDDGRGLVLPGYKYLGPFNGLDKGEPVNAADAAALEHDKAYDQQLQAGDNPYLRYNHADAEFQERLQEDTSFGGNLGRAVFQAKKRVLEPLGLVEEGAKTAPGKKRPVEPSPQRSPDSSTGIGKKGQQPARKRLNFGQTGDSESVPDPQPLGEPPAAPSGVGPNTMAAGGGAPMADNNEGADGVGSSSGNWHCDSTWLGDRVITTSTRTWALPTYNNHLYKQISNGTSGGATNDNTYFGYSTPWGYFDFNRFHCHFSPRDWQRLINNNWGFRPKRLSFKLFNIQVKEVTQNEGTKTIANNLTSTIQVFTDSEYQLPYVLGSAHQGCLPPFPADVFTIPQYGYLTLNNGSQAVGRSSFYCLEYFPSQMLRTGNNFQFTYTFEDVPFHSSYAHSQSLDRLMNPLIDQYLYYLSRIQTTGGTANTQTLGFSQGGPNTMANQAKNWLPGPCYRQQRVSTTTGQNNNSNFAWTAGTKYHLNGRNSLANPGIAMATHKDDEERFFPSNGILIFGKQNAARDNADYSDVMPTSEEEIKTTNPVATEEYGIVADNLQQQNTAPQIGTVNSQGALPGMVWQNRDVYLQGPIWAKIPHTDGNFHPSPLMGGFGLKHPPPQILIKNTPVPADPPTTFNQSKLNSFITQYSTGQVSVEIEWELRKENSKRWNPEIQYTSNYYKSTSVDFAVNTEGVYSEPRPIGTRYLTRNL

SEQ ID NO: 800 - protein, 738 aa, Artificial Sequence
  Synthetic Polypeptide
MAADGYLPDWLEDNLSEGIREWWALKPGAPKPKANQQKQDDGRGLVLPGYKYLGPFNGLDKGEPVNAADAAALEHDKAYDQQLQAGDNPYLRYNHADAEFQERLQEDTSFGGNLGRAVFQAKKRVLEPLGLVEEGAKTAPGKKRPVEPSPQRSPDSSTGIGKKGQQPARKRLNFGQTGDSESVPDPQPLGEPPAAPSGVGPNTMAAGGGAPMADNNEGADGVGSSSGNWHCDSTWLGDRVITTSTRTWALPTYNNHLYKQISNGTSGGATNDNTYFGYSTPWGYFDFNRFHCHFSPRDWQRLINNNWGFRPKRLSFKLFNIQVKEVTQNEGTKTIANNLTSTIQVFTDSEYQLPYVLGSAHQGCLPPFPADVFTIPQYGYLTLNNGSQAVGRSSFYCLEYFPSQMLRTGNNFQFTYTFEDAPFHSSYAHSQSLDRLMNPLIDQYLYYLSRIQTTGGTANTQTLGFSQGGPNTMANQAKNWLPGPCYRQQRVSTTTGQNNNSNFAWTAGTKYHLNGRNSLANPGIAMATHKDDEERFFPSNGILIFGKQNAARDNADYSDVMPTSEEEIKTTNPVATEEYGIVADNLQQQNTAPQIGTVNSQGALPGMVWQNRDVYLQGPIWAKIPHTDGNFHPSPLMGGFGLKHPPPQILIKNTPVPADPPTTFNQSKLNSFITQYSTGQVSVEIEWELQKENSKRWNPEIQYTSNYYKSTSVDFAVNTEGVYSEPRPIGTRYLTRNL

SEQ ID NO: 801 - protein, 738 aa, Artificial Sequence
  Synthetic Polypeptide
MAADGYLPDWLEDNLSEGIREWWALKPGAPKPKANQQKQDDGRGLVLPGYKYLGPFNGLDKGEPVNAADAAALEHDKAYDQQLQAGDNPYLRYNHADAEFQERLQEDTSFGGNLGRAVFQAKKRVLEPLGLVEEGAKTAPGKKRPVEPSPQRSPDSSTGIGKKGQQPARKRLNFGQTGDSESVPDPQPLGEPPAAPSGVGPNTMAAGGGAPMADNNEGADGVGSSSGNWHCDSTWLGDRVITASTRTWALPTYNNHLYKQISNGTSGGATNDNTYFGYSTPWGYFDFNRFHCHFSPRDWQRLINNNWGFRPKRLSFKLFNIQVKEVTQNEGTKTIANNLTSTIQVFTDSEYQLPYVLGSAHQGCLPPFPADVFTIPQYGYLTLNNGSQAVGRSSFYCLEYFPSQMLRTGNNFQFTYTFEDVPFHSSYAHSQSLDRLMNPLIDQYLYYLSRIQTTGGTANTQTLGFSQGGPNTMANQAKNWLPGPCYRQQRVSTTTGQNNNSNFAWTAGTKYHLNGRNSLANPGIAMATHKDDEERFFPSNGILIFGKQNAARDNADYSDVMPTSEEEIKTTNPVATEEYGIVADNLQQQNTAPQIGTVNSQGALPGMVWQNRDVYLQGPIWAKIPHTDGNFHPSPLMGGFGLKHPPPQILIKNTPVPADPPTTFNQSKLNSFITQYSTGQVSVEIEWELQKENSKRWNPEIQYTSNYYKSTSVDFAVNTEGVYSEPRPIGTRYLTRNL

SEQ ID NO: 802 - protein, 738 aa, Artificial Sequence
  Synthetic Polypeptide
MAADGYLPDWLEDNLSEGIREWWALKPGAPKPKANQQKQDDGRGLVLPGYKYLGPFNGLDKGEPVNAADAAALEHDKAYDQQLQAGDNPYLRYNHADAEFQERLQEDTSFGGNLGRAVFQAKKRVLEPLGLVEEGAKTAPGKKRPVEPSPQRSPDSSTGIGKKGQQPARKRLNFGQTGDSESVPDPQPLGEPPAAPSGVGPNTMAAGGGAPMADNNEGADGVGSSSGNWHCDSTWLGDRVITTSTRTWALPTYNNHLYKQISNGTSGGATNDNTYFGYSTPWGYFDFNRFHCHFSPRDWQRLINNNWGFRPKRLSFKLFNIQVKEVTQNEGTKTIANNLTSTIQVFTDSEYQLPYVLGSAHQGCLPPFPADVFTIPQYGYLTLNNGSQAVGRSSFYCLEYFPSQMLRTGNNFQFTYTFEDVPFHSSYAHSQSLDRLMNPLIDQYLYYLSRIQTTGGTANTQTLGFSQGGPNTMANQAKNWLPGPCYRQQRVSTTTGQNNNSNFAWTAGTKYHLNGRNSLANPGIAMATHKDDEERFFPSNGILIFGKQNAARDNADYSDVMPTSEEEIKTTNPVATEEYGIVADNLQQQNTAPQIGTVNSQGALPGMVWQNRDVYLQGPIWAKIPHTDGNFHPSPLMGGFGLKHPPPQILIKNTPVPADPPTTFNQSKLNSFITQYSTGQVSVEIEWELQKENSKRRNPEIQYTSNYYKSTSVDFAVNTEGVYSEPRPIGTRYLTRNL

SEQ ID NO: 803 - protein, 738 aa, Artificial Sequence
  Synthetic Polypeptide
MAADGYLPDWLEDNLSEGIREWWALKPGAPKPKANQQKQDDGRGLVLPGYKYLGPFNGLDKGEPVNAADAAALEHDKAYDQQLQAGDNPYLRYNHADAEFQERLQEDTSFGGNLGRAVFQAKKRVLEPLGLVEEGAKTAPGKKRPVEPSPQRSPDSSTGIGKKGQQPARKRLNFGQTGDSEPVPDPQPLGEPPAAPSGVGPNTMAAGGGAPMADNNEGADGVGSSSGNWHCDSTWLGDRVITTSTRTWALPTYNNHLYKQISNGTSGGATNDNTYFGYSTPWGYFDFNRFHCHFSPRDWQRLINNNWGFRPKRLSFKLFNIQVKEVTQNEGTKTIANNLTSTIQVFTDSEYQLPYVLGSAHQGCLPPFPADVFTIPQYGYLTLNNGSQAVGRSSFYCLEYFPSQMLRTGNNFQFTYTFEDVPFHSSYAHSQSLDRLMNPLIDQYLYYLSRIQTTGGTANTQTLGFSQGGPNTMANQAKNWLPGPCYRQQRVSTTTGQNNNSNFAWTAGTKYHLNGRNSLANPGIAMATHKDDEERFFPSNGILIFGKQNAARDNADYSDVMPTSEEEIKTTNPVATEEYGIVADNLQQQNTAPQIGTVNSQGALPGMVWQNRDVYLQGPIWAKIPHTDGNFHPSPLMGGFGLKHPPPQILIKNTPVPADPPTTFNQSKLNSFITQYSTGQVSVEIEWELQKENSKRWNPEIQYTSNYYKSTSVDFAVNTEGVYSEPRPIGTRYLTRNL

SEQ ID NO: 804 - protein, 738 aa, Artificial Sequence
  Synthetic Polypeptide
MAADGYLPDWLEDNLSEGIREWWALKPGAPKPKANQQKQDDGRGLVLPGYKYLGPFNGLDKGEPVNAADAAALEHDKAYDQQLQAGDNPYLRYNHADAEFQERLQEDTSFGGNLGRAVFQAKKRVLEPLGLVEEGAKTAPGKKRPVEPSPQRSPDSSTGIGKKGQQPARKRLNFGQTGDSESVPDPQPLGEPPAAPSGVGPNTMAAGGGAPMADNNEGADGVGSSSGNWHCDSTWLGDRVITTSTRTWALPTYNNHLYKQISNGTSGGATNDNTYFGYSTPWGYFDFNRFHCHFSPRDWQRLINNNWGFRPKRLSFKLFNIQVKEVTQNEGTKTIANNLTSTIQVFTDSEYQLPYVLGSAHQGCLPPFPADVFTIPQYGYLTLNNGSQAVGRSSFYCLEYFPSQMLRTGNNFQFTYTFEDVPFHSSYAHSQSLDRLMNPLIDQYLYYLSRIQTTGGTANTQTLGFSQGGPNTMANQAKNWLPGPCYRQQRVSTTTGQNNNSNFAWTAGTKYHLNGRNSLANPGIAMATHKDDEERFFPSNGIPIFGKQNAARDNADYSDVMPTSEEEIKTTNPVATEEYGIVADNLQQQNTAPQIGTVNSQGALPGMVWQNRDVYLQGPIWAKIPHTDGNFHPSPLMGGFGLKHPPPQILIKNTPVPADPPTTFNQSKLNSFITQYSTGQVSVEIEWELQKENSKRWNPEIQYTSNYYKSTSVDFAVNTEGVYSEPRPIGTRYLTRNL

SEQ ID NO: 805 - protein, 738 aa, Artificial Sequence
  Synthetic Polypeptide
MAADGYLPDWLEDNLSEGIREWWALKPGAPKPKANQQKQDDGRGLVLPGYKYLGPFNGLDKGEPVNAADAAALEHDKAYDQQLQAGDNPYLRYNHADAEFQERLQEDTSFGGNLGRAVFQAKKRVLEPLGLVEEGAKTAPGKKRPVEPSPQRSPDSSTGIGKKGQQPARKRLNFGQTGDSESVPDPQPLGEPPAAPSGVGPNTMAAGGGAPMADNNEGADGVGSSSGNWHCDSTWLGDRVITTSTRTWALPTYNNHLYKQISNGTSGGATNDNTYFGYSTPWGYFDFNRFHCHFSPRDWQRLINNNWGFRPKRLSFKLFNIQVKEVTQNEGTKTIANNLTSTIQVFTDSEYQLPYVLGSAHQGCLPPFPADVFTIPQYGYLTLNNGSQAVGRSSFYCLEYFPSQMLRTGNNFQFTYTFEDVPFHSSYAHSQSLDRLMNPLIDQYLYYLSRIQTTGGTANTQTLGFSQGGPNTMANQAKNWLPGPCYRQQRVSTTTGQNNNSNFAWTAGTKYHLNGRNSLANPGIAMATHKDDEERFFPSNGILIFGKQNAARDNADYSDVMPTSEEEIKTTNPVATEEYGIVADNLQQQNTAPQIGTVNSQGALPGMVWQNRDVYLQGPIWAKIPHTDGNFHPSPLMGGFGLKHPPPQILIKNTPVPADPPTTFNQSKLNSFITQYSTGQVSVEIEWELQKENSKRWNPEIQHTSNYYKSTSVDFAVNTEGVYSEPRPIGTRYLTRNL

SEQ ID NO: 806 - protein, 738 aa, Artificial Sequence
  Synthetic Polypeptide
MAADGYLPDWLEDNLSEGIREWWALKPGAPKPKANQQKQDDGRGLVLPGYKYLGPFNGLDKGEPVNAADAAALEHDKAYDQQLQAGDNPYLRYNHADAEFQERLQEDTSFGGNLGRAVFQAKKRVLEPLGLVEEGAKTAPGKKRPVEPSPQRSPDSSTGIGKKGQQPARKRLNFGQTGDSESVPDPQPLGEPPAAPSGVGPNTMAAGGGAPMADNNEGADGVGSSSGNWHCDSTWLGDRVITTSTRTWALPTYNNHLYKQISNGTSGGATNDNTYFGYSTPWGYFDFNRFHCHFSPRDWQRLINNNWGFRPKRLSFKLFNIQVKEVTQNEGTKTIANNLTSTIQVFTDSEYQLPYVLGSAHQGCLPPFPADVFTIPQYGYLTLNNGSQAVGRSSFYCLEYFPSQMLRTGNNFQFTYTFEDVPFHSSYAHSQSLDRLMNPLIDQYLYYLSRIQTTGGTANTQTLGFSQGGPNTMANQAKNWLPGPCYRQQRVSTTTGQNNNSNFAWTAGTKYHLNGRNSLANPGIAMATHKDDEERFFPSNGILIFGKQNAARDNADYSDVMPTSEEEIKTTNPVATEEYGIVADNLQQQNTAPQIGTVNSQGALPGMVWQNRDVYLQGPIWAKIPHTDGNFHPSPLMGGFGLKHPPPQILIKNTPVPADPPTTFNQSKLNPFITQYSTGQVSVEIEWELQKENSKRWNPEIQYTSNYYKSTSVDFAVNTEGVYSEPRPIGTRYLTRNL

SEQ ID NO: 807 - protein, 738 aa, Artificial Sequence
  Synthetic Polypeptide
MAADGYLPDWLEDNLSEGIREWWALKPGAPKPKANQQKQDDGRGLVLPGYKYLGPFNGLDKGEPVNAADAAALEHDKAYDQQLQAGDNPYLRYNHADAEFQERLQEDTSFGGNLGRAVFQAKKRVLEPLGLVEEGAKTAPGKKRPVEPSPQRSPDSSTGIGKKGQQPARKRLNFGQTGDSESVPDPQPLGEPPAAPSGVGPNTMAAGGGAPMADNNEGADGVGSSSGNWHCDSTWLGDRVITTSTRTWALPTYNNHLYKQISNGTSGGATNDNTYFGYSTPWGYFDFNRFHCHFSPRDWQRLINNNWGFRPKRLSFKLFNIQVKEVTQNEGTKTIANNLTSTIQVFTDSEYQLPYVLGSAHQGCLPPFPADVFTIPQYGYLTLNNGSQAVGRSSFYCLEYFPSQMLRTGNNFQFTYTFEDVPFHSSYAHSQSLDRLMNPLIDQYLYYLSRIQTTGGTANTQTLGFSQGGPNTMANQAKNWLPGPCYRQQRVSTTTGQNNNSNFAWTAGTKYHLNGRNSLANPGIAMATHKDDEERFFPSNGILIFGKQNAARDNADYSDVMPTSEEEIKTTNPVATEEYGIVADNLQQQNTAPQIGTVNSQGALPGMVWQNRDVYLQGPIWAKIPHTDGNFRPSPLMGGFGLKHPPPQILIKNTPVPADPPTTFNQSKLNSFITQYSTGQVSVEIEWELQKENSKRWNPEIQYTSNYYKSTSVDFAVNTEGVYSEPRPIGTRYLTRNL

SEQ ID NO: 808 - protein, 738 aa, Artificial Sequence
  Synthetic Polypeptide
MAADGYLPDWLEDNLSEGIREWWALKPGAPKPKANQQKQDDGRGLVLPGYKYLGPFNGLDKGEPVNAADAAALEHDKAYDQQLQAGDNPYLRYNHADAEFQERLQEDTSFGGNLGRAVFQAKKRVLEPLGLVEEGAKTAPGKKRPVEPSPQRSPDSSTGIGKKGQQPARKRLNFGQTGDSESVPDPQPLGEPPAAPSGVGPNTMAAGGGAPMADNNEGADGVGSSSGNWHCDSTWLGDRVITTSTRTWALPTYNNHLYKQISNGTSGGATNDNTYFGYSTPWGYFDFNRFHCHFSPRDWQRLINNNWGFRPKRLSFKLFNIQVKEVTQNEGTKTIANNLTSTIQVFTDSEYQLPYVLGSAHQGCLPPFPADVFTIPQYGYLTLNNGSQAVGRSSFYCLEYFPSQMLRTGNNFQFTYTFEDVPFHSSYAHSQSLDRLMNPLIDQYLYYLSRIQTTGGTANTQTLGFSQGGPNTMANQAKNWLPGPCYRQQRVSTTTGQNNNSNFAWTAGTKYHLNGRNSLANPGIAMATHKDDEERFFPSNGILIFGKQNAARDNADYSDVMPTSEEEIKTTNPVATEEYGIVADNLQQQNTAPQIGTVNSQGALPGMVWQNRDVYLQGPIWAKIPHTDGNFHPSPLMGGFGLKHPPPQILIKNTPVPADPPTTFNQSKLNSFITQYSTGQVSVEIEWELQKENSKRWNPEIQYTSNYYKSTSVDFAVNTEGVYSEPRPIGARYLTRNL

SEQ ID NO: 809 - protein, 738 aa, Artificial Sequence
  Synthetic Polypeptide
MAADGYLPDWLEDNLSEGIREWWALKPGAPKPKANQQKQDDGRGLVLPGYKYLGPFNGLDKGESVNAADAAALEHDKAYDQQLQAGDNPYLRYNHADAEFQERLQEDTSFGGNLGRAVFQAKKRVLEPLGLVEEGAKTAPGKKRPVEPSPQRSPDSSTGIGKKGQQPARKRLNFGQTGDSESVPDPQPLGEPPAAPSGVGPNTMAAGGGAPMADNNEGADGVGSSSGNWHCDSTWLGDRVITTSTRTWALPTYNNHLYKQISNGTSGGATNDNTYFGYSTPWGYFDFNRFHCHFSPRDWQRLINNNWGFRPKRLSFKLFNIQVKEVTQNEGTKTIANNLTSTIQVFTDSEYQLPYVLGSAHQGCLPPFPADVFTIPQYGYLTLNNGSQAVGRSSFYCLEYFPSQMLRTGNNFQFTYTFEDVPFHSSYAHSQSLDRLMNPLIDQYLYYLSRIQTTGGTANTQTLGFSQGGPNTMANQAKNWLPGPCYRQQRVSTTTGQNNNSNFAWTAGTKYHLNGRNSLANPGIAMATHKDDEERFFPSNGILIFGKQNAARDNADYSDVMPTSEEEIKTTNPVATEEYGIVADNLQQQNTAPQIGTVNSQGALPGMVWQNRDVYLQGPIWAKIPHTDGNFHPSPLMGGFGLKHPPPQILIKNTPVPADPPTTFNQSKLNSFITQYSTGQVSVEIEWELQKENSKRWNPEIQYTSNYYKSTSVDFAVNTEGVYSEPRPIGTRYLTRNL

SEQ ID NO: 810 - protein, 738 aa, Artificial Sequence
  Synthetic Polypeptide
MAADGYLPDWLEDNLSEGIREWWALKPGAPKPKANQQKQDDGRGLVLPGYKYLGPFNGLDKGEPVNAADAAALEHDKAYDQQLQAGDNPYLRYNHADAEFQERLQEDTSFGGNLGRAVFQAKKRVLEPLGLVEEGAKTAPGKKRPVEPSPQRSPDSSTGIGKKGQQPARKRLNFGQTGDSESVPDPQPLGEPPAAPSGVGPNTMAAGGGAPMADNSEGADGVGSSSGNWHCDSTWLGDRVITTSTRTWALPTYNNHLYKQISNGTSGGATNDNTYFGYSTPWGYFDFNRFHCHFSPRDWQRLINNNWGFRPKRLSFKLFNIQVKEVTQNEGTKTIANNLTSTIQVFTDSEYQLPYVLGSAHQGCLPPFPADVFTIPQYGYLTLNNGSQAVGRSSFYCLEYFPSQMLRTGNNFQFTYTFEDVPFHSSYAHSQSLDRLMNPLIDQYLYYLSRIQTTGGTANTQTLGFSQGGPNTMANQAKNWLPGPCYRQQRVSTTTGQNNNSNFAWTAGTKYHLNGRNSLANPGIAMATHKDDEERFFPSNGILIFGKQNAARDNADYSDVMPTSEEEIKTTNPVATEEYGIVADNLQQQNTAPQIGTVNSQGALPGMVWQNRDVYLQGPIWAKIPHTDGNFHPSPLMGGFGLKHPPPQILIKNTPVPADPPTTFNQSKLNSFITQYSTGQVSVEIEWELQKENSKRWNPEIQYTSNYYKSTSVDFAVNTEGVYSEPRPIGTRYLTRNL

SEQ ID NO: 811 - protein, 738 aa, Artificial Sequence
  Synthetic Polypeptide
MAADGYLPDWLEDNLSEGIREWWALKPGAPKPKANQQKQDDGRGLVLPGYKYLGPFNGLDKGEPVNAADAAALEHDKAYDQQLQAGDNPYLRYNHADAEFQERLQEDTSFGGNLGRAVFQAKKRVLEPLGLVEEGAKTAPGKKRPVEPSPQRSPDSSTGIGKKGQQPARKRLNFGQTGDSESVPDPQPLGEPPAAPSGVGPNTMAAGGGAPMADNNEGADGVGSSSGNWHCDSTWLGDRVITTSTRTWALPTYNNHLYKQISNGTSGGATNDNTYFGYSTPWGYFDFNRFHCHFSPRDWQRLINNNWGFRPKRLSFKLFNIQVKEVTQNEGTKTIANNLTSTIQVFTDSEYQLPYVLGSAHQGCLPPFPADVFTIPQYGYLTLNNGSQAVGRSSFYCLEYFPSQMLRTGNNFQFTYTFEDVPFHSSYAHSQSLDRLMNPLIDQYLYYLSRIQTTGGTANTQTLGFSQGGPNTMANQAKNWLPGPCYRQQRVSTTTGQNNNSNFAWTAGTKYHLNGRNSLANPGIAMATHKDDEERFFPSNGILIFGKQNAARDNADYGDVMPTSEEEIKTTNPVATEEYGIVADNLQQQNTAPQIGTVNSQGALPGMVWQNRDVYLQGPIWAKIPHTDGNFHPSPLMGGFGLKHPPPQILIKNTPVPADPPTTFNQSKLNSFITQYSTGQVSVEIEWELQKENSKRWNPEIQYTSNYYKSTSVDFAVNTEGVYSEPRPIGTRYLTRNL

SEQ ID NO: 812 - protein, 738 aa, Artificial Sequence
  Synthetic Polypeptide
MAADGYLPDWLEDNLSEGIREWWALKPGAPKPKANQQKQDDGRGLVLPGYKYLGPFNGLDKGEPVNAADAAALEHDKAYDQQLQAGDNPYLRYNHADAEFQERLQEDTSFGGNLGRAVFQAKKRVLEPLGLVEEGAKTAPGKRRPVEPSPQRSPDSSTGIGKKGQQPARKRLNFGQTGDSESVPDPQPLGEPPAAPSGVGPNTMAAGGGAPMADNNEGADGVGSSSGNWHCDSTWLGDRVITTSTRTWALPTYNNHLYKQISNGTSGGATNDNTYFGYSTPWGYFDFNRFHCHFSPRDWQRLINNNWGFRPKRLSFKLFNIQVKEVTQNEGTKTIANNLTSTIQVFTDSEYQLPYVLGSAHQGCLPPFPADVFTIPQYGYLTLNNGSQAVGRSSFYCLEYFPSQMLRTGNNFQFTYTFEDVPFHSSYAHSQSLDRLMNPLIDQYLYYLSRIQTTGGTANTQTLGFSQGGPNTMANQAKNWLPGPCYRQQRVSTTTGQNNNSNFAWTAGTKYHLNGRNSLANPGIAMATHKDDEERFFPSNGILIFGKQNAARDNADYSDVMPTSEEEIKTTNPVATEEYGIVADNLQQQNTAPQIGTVNSQGALPGMVWQNRDVYLQGPIWAKIPHTDGNFHPSPLMGGFGLKHPPPQILIKNTPVPADPPTTFNQSKLNSFITQYSTGQVSVEIEWELQKENSKRWNPEIQYTSNYYKSTSVDFAVNTEGVYSEPRPIGTRYLTRNL

SEQ ID NO: 813 - protein, 738 aa, Artificial Sequence
  Synthetic Polypeptide
MAADGYLPDWLEDNLSEGIREWWALKPGAPKPKANQQKQDDGRGLVLPGYKYLGPFNGLDKGEPVNAADAAALEHDKAYDQQLQAGDNPYLRYNHADAEFQERLQEDTSFGGNLGRAVFQAKKRVLEPLGLVEEGAKTAPGKKRPVEPSPQRSPDSSTGIGKKGQQPARKRLNFGQTGDSESVPDPQPLGEPPAAPSGVGPNTMAAGGGAPMADNNEGADGVGSSSGNWHCDSTWLGDRVITTSTRTWALPTYNNHLYKQISNGTSGGATNDNTYFGYSTPWGYFDFNRFHCHFSPRDWQRLINNNWGFRPKRLSFKLFNIQVKEVTQNEGTKTIANNLTSTIQVFTDSEYQLPYVLGSAHQGCLPPFPADVFTIPQYGYLTLNNGSQAVGRSSFYCLEYFPSQMLRTGNNFQFTYTFEDVPFHSSYAHSQSLDRLMNPLIDQYLYYLSRIQTTGGTANTQTLGFSQGGPNTMANQAKNWLPGPCYRQQRVPTTTGQNNNSNFAWTAGTKYHLNGRNSLANPGIAMATHKDDEERFFPSNGILIFGKQNAARDNADYSDVMPTSEEEIKTTNPVATEEYGIVADNLQQQNTAPQIGTVNSQGALPGMVWQNRDVYLQGPIWAKIPHTDGNFHPSPLMGGFGLKHPPPQILIKNTPVPADPPTTFNQSKLNSFITQYSTGQVSVEIEWELQKENSKRWNPEIQYTSNYYKSTSVDFAVNTEGVYSEPRPIGTRYLTRNL

SEQ ID NO: 814 - protein, 738 aa, Artificial Sequence
  Synthetic Polypeptide
MAADGYLPDWLEDNLSEGIREWWALKPGAPKPKANQQKQDDGRGLVLPGYKYLGPFNGLDKGEPVNAADAAALEHDKAYDQQLQAGDNPYLRYNHADAEFQERLQEDTSFGGNLGRAVFQAKKRVLEPLGLVEEGAKTAPGKKRPVEPSPQRSPDSSTGIGKKGQQPARKRLNFGQTGDSESVPDPQPLGEPPAAPSGVGPNTMAAGGGAPMADNNEGADGVGSSSGNWHCDSTWLGDRVITTSTRTWALPTYNNHLYKQISNGTSGGATNDNTYFGYSTPWGYFDFNRFHCHFSPRDWQRLINNNWGFRPKRLSFKLFNIQVKEVTQNEGTKTIANNLTSTIQVFTDSEYQLPYVLGSAHQGCLPPFPADVFTIPQYGYLTLNNGSQAVGRSSFYCLEYFPSQMLRTGNNFQFTYTFEDVPFHSSYAHSQSLDRLMNPLIDQYLYYLSRIQTTGGTANTQTLGFSQGGPNTMANQAKNWLPGPCYRQQRVSTTTGQNNNSNFAWTAGTKYHLNGRNSLANPGIAMATHKDDEERFFPSNGILIFGKQNAARDNADYSDVMPTSEEEIKTTNPVATEEYGIVADNLQQQNTAPQIGTVNSQGALPGMVWQNRDVYLQGPIWAKIPHTDGNFHPSPLMGGFGLKHPPPQILIKNTPVPADPPTTFNQSKLNSFITQYSTGQVSVEIEWELQKENSKRWNPEIQYTSNYYKSTSVDFAVNTEGVYSEPRPIGTRYLTRNL

SEQ ID NO: 815 - protein, 738 aa, Artificial Sequence
  Synthetic Polypeptide
MAADGYLPDWLEDNLSEGIREWWALKPGAPKPKANQQKQDDGRGLVLPGYKYLGPFNGLDKGEPVNAADAAALEHDKAYDQQLQAGDNPYLRYNHADAEFQERLQEDTSFGGNLGRAVFQAKKRVLEPLGLVEEGAKTAPGKKRPVEPSPQRSPDSSTGIGKKGQQPARKRLNFGQTGDSESVPDPQPLGEPPAAPSGVGPNTMAAGGGAPMADNNEGADGVGSSSGNWHCDSTWLGDRVITTSTRTWALPTYNNHLYKQISNGTSGGATNDNTYFGYSTPWGYFDFNRFHRHFSPRDWQRLINNNWGFRPKRLSFKLFNIQVKEVTQNEGTKTIANNLTSTIQVFTDSEYQLPYVLGSAHQGCLPPFPADVFTIPQYGYLTLNNGSQAVGRSSFYCLEYFPSQMLRTGNNFQFTYTFEDVPFHSSYAHSQSLDRLMNPLIDQYLYYLSRIQTTGGTANTQTLGFSQGGPNTMANQAKNWLPGPCYRQQRVSTTTGQNNNSNFAWTAGTKYHLNGRNSLANPGIAMATHKDDEERFFPSNGILIFGKQNAARDNADYSDVMPTSEEEIKTTNPVATEEYGIVADNLQQQNTAPQIGTVNSQGALPGMVWQNRDVYLQGPIWAKIPHTDGNFHPSPLMGGFGLKHPPPQILIKNTPVPADPPTTFNQSKLNSFITQYSTGQVSVEIEWELQKENSKRWNPEIQYTSNYYKSTSVDFAVNTEGVYSEPRPIGTRYLTRNL

SEQ ID NO: 816 - protein, 738 aa, Artificial Sequence
  Synthetic Polypeptide
MAADGYLPDWLEDNLSEGIREWWALKPGAPKPKANQQKQDDGRGLVLPGYKYLGPFNGLDKGEPVNAADAAALEHDKAYDQQLQAGDNPYLRYNHADAEFQERLQEDTSFGGNLGRAVFQAKKRVLEPLGLVEEGAKTAPGKKRPVEPSPQRSPDSSTGIGKKGQQPARKRLNFGQTGDSESVPDPQPLGEPPAAPSGVGPNTMAAGGGAPMADNNEGADGVGSSSGNWHCDSTWLGDRVITTSTRTWALPTYNNHLYKQISNGTSGGATNDNTYFGYSTPWGYFDFNRFHCHFSPRDWQRLINNNWGFRPKRLSFKLFNIQVKEVTQNEGTKTIANNLTSTIQVFTDSECQLPYVLGSAHQGCLPPFPADVFTIPQYGYLTLNNGSQAVGRSSFYCLEYFPSQMLRTGNNFQFTYTFEDVPFHSSYAHSQSLDRLMNPLIDQYLYYLSRIQTTGGTANTQTLGFSQGGPNTMANQAKNWLPGPCYRQQRVSTTTGQNNNSNFAWTAGTKYHLNGRNSLANPGIAMATHKDDEERFFPSNGILIFGKQNAARDNADYSDVMPTSEEEIKTTNPVATEEYGIVADNLQQQNTAPQIGTVNSQGALPGMVWQNRDVYLQGPIWAKIPHTDGNFHPSPLMGGFGLKHPPPQILIKNTPVPADPPTTFNQSKLNSFITQYSTGQVSVEIEWELQKENSKRWNPEIQYTSNYYKSTSVDFAVNTEGVYSEPRPIGTRYLTRNL

SEQ ID NO: 817 - protein, 738 aa, Artificial Sequence
  Synthetic Polypeptide
MAADGYLPDWLEDNLSEGIREWWALKPGAPKPKANQQKQDDGRGLVLPGYKYLGPFNGLDKGEPVNAADAAALEHDKAYDQQLQAGDNPYLRYNHADAEFQERLQEDTSFGGNLGRAVFQAKKRVLEPLGLVEEGAKTAPGKKRPVEPSPQRSPDSSTGIGKKGQQPARKRLNFGQTGDSESVPDPQPLGEPPAAPSGVGPNTMAAGGGAPMADNNEGADGVGSSSGNWHCDSTWLGDRVITTSTRTWALPTYNNHLYKQISNGTSGGATNDNAYFGYSTPWGYFDFNRFHCHFSPRDWQRLINNNWGFRPKRLSFKLFNIQVKEVTQNEGTKTIANNLTSTIQVFTDSEYQLPYVLGSAHQGCLPPFPADVFTIPQYGYLTLNNGSQAVGRSSFYCLEYFPSQMLRTGNNFQFTYTFEDVPFHSSYAHSQSLDRLMNPLIDQYLYYLSRIQTTGGTANTQTLGFSQGGPNTMANQAKNWLPGPCYRQQRVSTTTGQNNNSNFAWTAGTKYHLNGRNSLANPGIAMATHKDDEERFFPSNGILIFGKQNAARDNADYSDVMPTSEEEIKTTNPVATEEYGIVADNLQQQNTAPQIGTVNSQGALPGMVWQNRDVYLQGPIWAKIPHTDGNFHPSPLMGGFGLKHPPPQILIKNTPVPADPPTTFNQSKLNSFITQYSTGQVSVEIEWELQKENSKRWNPEIQYTSNYYKSTSVDFAVNTEGVYSEPRPIGTRYLTRNL

SEQ ID NO: 818 - protein, 738 aa, Artificial Sequence
  Synthetic Polypeptide
MAADGYLPDWLEDNLSEGIREWWALKPGAPKPKANQQKQDDGRGLVLPGYKYLGPFNGLDKGEPVNAADAAALEHDKAYDQQLQAGDNPYLRYNHADAEFQERLQEDTSFGGNLGRAVFQAKKRVLEPLGLVEEGAKTAPGKKRPVEPSPQRSPDSSTGIGKKGQQPARKRLNFGQTGDSESVPDPQPLGEPPAAPSGVGPNTMAAGGGAPMADNNEGADGVGSSSGNWHCDSTWLGDRVITTSTRTWALPTYNNHLYKQISNGTSGGATNDNTYFGYSTPWGYFDFNRFHCHFSPRDWQRLINNNWGFRPKRLSFKLFNIQVKEVTQNEGTKTIANNLTSTIQVFTDSEYQLPYVLGSAHQGCLPPFPADVFTIPQYGYLTLNNGSQAVGRSSFYCLEYFPSQMLRTGNNFQFTYTFEDVPFHSSYAHSQSLDRLMNPLIDQYLYYLSRIQTTGGTANTQTLGFSQGGPNTMANQAKNWLPGPCYRQQRVSTTTGQNNNSNFAWTAGTKYHLNGRNSLANPGIAMATHKDDEERFFPSNGILIFGKQNAARGNADYSDVMPTSEEEIKTTNPVATEEYGIVADNLQQQNTAPQIGTVNSQGALPGMVWQNRDVYLQGPIWAKIPHTDGNFHPSPLMGGFGLKHPPPQILIKNTPVPADPPTTFNQSKLNSFITQYSTGQVSVEIEWELQKENSKRWNPEIQYTSNYYKSTSVDFAVNTEGVYSEPRPIGTRYLTRNL

SEQ ID NO: 819 - protein, 738 aa, Artificial Sequence
  Synthetic Polypeptide
MAADGYLPDWLEDNLSEGIREWWALKPGAPKPKANQQKQDDGRGLVLPGYKYLGPFNGLDKGEPVNAADAAALEHDKAYDQQLQAGDNPYLRYNHADAEFQERLQEDTSFGGNLGRAVFQAKKRVLEPLGLVEEGAKTAPGKKRPVEPSPQRSPDSSTGIGKKGQQPARKRLNFGQTGDSESVPDPQPLGEPPAAPSGVGPNTMAAGGGAPMADNNEGADGVGSSSGNWHCDSTWLGDRVITTSTRTWALPTYNNHLYKQISNGTSGGATNDNTYFGYSTPWGYFDFNRFHCHFSPRDWQRLINNNWGFRPKRLSFKLFNIQVKEVTQNEGTKTIANNLTSTIQVFTDSEYQLPYVLGSAHQGCLPPFPADVFTIPQYGYLTLNNGSQAVGRSSFYCLEYFPSQMLGTGNNFQFTYTFEDVPFHSSYAHSQSLDRLMNPLIDQYLYYLSRIQTTGGTANTQTLGFSQGGPNTMANQAKNWLPGPCYRQQRVSTTTGQNNNSNFAWTAGTKYHLNGRNSLANPGIAMATHKDDEERFFPSNGILIFGKQNAARDNADYSDVMPTSEEEIKTTNPVATEEYGIVADNLQQQNTAPQIGTVNSQGALPGMVWQNRDVYLQGPIWAKIPHTDGNFHPSPLMGGFGLKHPPPQILIKNTPVPADPPTTFNQSKLNSFITQYSTGQVSVEIEWELQKENSKRWNPEIQYTSNYYKSTSVDFAVNTEGVYSEPRPIGTRYLTRNL

SEQ ID NO: 820 - protein, 738 aa, Artificial Sequence
  Synthetic Polypeptide
MAADGYLPDWLEDNLSEGIREWWALKPGAPKPKANQQKQDDGRGLVLPGYKYLGPFNGLDKGEPVNAADAAALEHDKAYDQQLQAGDNPHLRYNHADAEFQERLQEDTSFGGNLGRAVFQAKKRVLEPLGLVEEGAKTAPGKKRPVEPSPQRSPDSSTGIGKKGQQPARKRLNFGQTGDSESVPDPQPLGEPPAAPSGVGPNTMAAGGGAPMADNNEGADGVGSSSGNWHCDSTWLGDRVITTSTRTWALPTYNNHLYKQISNGTSGGATNDNTYFGYSTPWGYFDFNRFHCHFSPRDWQRLINNNWGFRPKRLSFKLFNIQVKEVTQNEGTKTIANNLTSTIQVFTDSEYQLPYVLGSAHQGCLPPFPADVFTIPQYGYLTLNNGSQAVGRSSFYCLEYFPSQMLRTGNNFQFTYTFEDVPFHSSYAHSQSLDRLMNPLIDQYLYYLSRIQTTGGTANTQTLGFSQGGPNTMANQAKNWLPGPCYRQQRVSTTTGQNNNSNFAWTAGTKYHLNGRNSLANPGIAMATHKDDEERFFPSNGILIFGKQNAARDNADYSDVMPTSEEEIKTTNPVATEEYGIVADNLQQQNTAPQIGTVNSQGALPGMVWQNRDVYLQGPIWAKIPHTDGNFHPSPLMGGFGLKHPPPQILIKNTPVPADPPTTFNQSKLNSFITQYSTGQVSVEIEWELQKENSKRWNPEIQYTSNYYKSTSVDFAVNTEGVYSEPRPIGTRYLTRNL

SEQ ID NO: 821 - protein, 738 aa, Artificial Sequence
  Synthetic Polypeptide
MAADGYLPDWLEDNLSEGIREWWALKPGAPKPKANQQKQDDGRGLVLPGYKYLGPFNGLDKGEPVNAADAAALEHDKAYDQQLQAGDNPYLRYNHADAEFQERLQEDTSFGGNLGRAVFQAKKRVLEPLGLVEEGAKTAPGKKRPVEPSPQRSPDSSTGIGKKGQQPARKRLNFGQTGDSESVPDPQPLGEPPAAPSGVGPNTMAAGGGAPMADNNEGADGVGSSSGNWHCDSTWLGDRVITTSTRTWALPTYNNHLYKQISNGTSGGATNDNTYFGYSTPWGYFDFNRFHCHFSPRDWQRLINNNWGFRPKRLSFKLFNIQVKEVTQNEGTKTIANNLTSTIQVFTDSEYQLPYVLGPAHQGCLPPFPADVFTIPQYGYLTLNNGSQAVGRSSFYCLEYFPSQMLRTGNNFQFTYTFEDVPFHSSYAHSQSLDRLMNPLIDQYLYYLSRIQTTGGTANTQTLGFSQGGPNTMANQAKNWLPGPCYRQQRVSTTTGQNNNSNFAWTAGTKYHLNGRNSLANPGIAMATHKDDEERFFPSNGILIFGKQNAARDNADYSDVMPTSEEEIKTTNPVATEEYGIVADNLQQQNTAPQIGTVNSQGALPGMVWQNRDVYLQGPIWAKIPHTDGNFHPSPLMGGFGLKHPPPQILIKNTPVPADPPTTFNQSKLNSFITQYSTGQVSVEIEWELQKENSKRWNPEIQYTSNYYKSTSVDFAVNTEGVYSEPRPIGTRYLTRNL

SEQ ID NO: 822 - protein, 738 aa, Artificial Sequence
  Synthetic Polypeptide
MAADGYLPDWLEDNLSEGIREWWALKPGAPKPKANQQKQDDGRGLVLPGYKYLGPFNGLDKGEPVNAADAAALEHDKAYDQQLQAGDNPYLRYNHADAEFQERLQEDTSFGGNLGRAVFQAKKRVLEPLGLVGEGAKTAPGKKRPVEPSPQRSPDSSTGIGKKGQQPARKRLNFGQTGDSESVPDPQPLGEPPAAPSGVGPNTMAAGGGAPMADNNEGADGVGSSSGNWHCDSTWLGDRVITTSTRTWALPTYNNHLYKQISNGTSGGATNDNTYFGYSTPWGYFDFNRFHCHFSPRDWQRLINNNWGFRPKRLSFKLFNIQVKEVTQNEGTKTIANNLTSTIQVFTDSEYQLPYVLGSAHQGCLPPFPADVFTIPQYGYLTLNNGSQAVGRSSFYCLEYFPSQMLRTGNNFQFTYTFEDVPFHSSYAHSQSLDRLMNPLIDQYLYYLSRIQTTGGTANTQTLGFSQGGPNTMANQAKNWLPGPCYRQQRVSTTTGQNNNSNFAWTAGTKYHLNGRNSLANPGIAMATHKDDEERFFPSNGILIFGKQNAARDNADYSDVMPTSEEEIKTTNPVATEEYGIVADNLQQQNTAPQIGTVNSQGALPGMVWQNRDVYLQGPIWAKIPHTDGNFHPSPLMGGFGLKHPPPQILIKNTPVPADPPTTFNQSKLNSFITQYSTGQVSVEIEWELQKENSKRWNPEIQYTSNYYKSTSVDFAVNTEGVYSEPRPIGTRYLTRNL

SEQ ID NO: 823 - protein, 738 aa, Artificial Sequence
  Synthetic Polypeptide
MAADGYLPDWLEDNLSEGIREWWALKPGAPKPKANQQKQDDGRGLVLPGYKYLGPFNGLDKGEPVNAADAAALEHDKAYDQQLQAGDNPYLRYNHADAEFQERLQEDTSFGGNLGRAVFQAKKRVLEPLGLVEEGAKTAPGKKRPVEPSPQRSPDSSTGIGKKGQQPARKRLNFGQTGDSESVPDPQPLGEPPAAPSGVGPNTMAAGGGAPMADNNEGADGVGSSSGNWHCDSTWLGDRVITTSTRTWALPTYNNHLYKQISNGTSGGATNDNTYFGYSTPWGYFDFNRFHCHFSPRDWQRLINNNWGFRPKRLSFKLFNIQVKEVTQNEGTKTIANNLTSTIQVFTDSEYQLPYVLGSAHQGCLPPFPADVFTIPQYGYLTLNNGSQAVGRSSFYCLEYFPSQMLRTGNNFQFTYTFEDVPFHSSYAHSQSLDRLMNPLIDQYLYYLSRIQTTGGTANTQTLGFSQGGPNTMANQAKNWLPGPCYRQQRVSTTTGQNNNSNFAWTAGTKYHLNGRNSLANPGIAMATHKDDEERFFPSNGILIFGKQNAARDNADYSDVMPTSEEEIKTTNPVATEEYGIVADNLQQQNTAPQIGTVNSQGALPGMVWQNRDVYLQGPIWAKIPHTDGNFHPSPLMGGFGLKHPPPQILIKNTPVPADPPTTFNQSKLNSFITQYSTGQVSVEIEWELQKESSKRWNPEIQYTSNYYKSTSVDFAVNTEGVYSEPRPIGTRYLTRNL

SEQ ID NO: 824 - protein, 738 aa, Artificial Sequence
  Synthetic Polypeptide
MAADGYLPDWLEDNLSEGIREWWALKPGAPKPKANQQKQDDGRGLVLPGYKYLGPFNGLDKGEPVNAADAAALEHDKAYDQQLQAGDNPYLRYNHADAEFQERLQEDTSFGGNLGRAVFQAKKRVLEPLGLVEEGAKTAPGKKRPVEPSPQRSPDSSTGIGKKGQQPARKRLNFGQTGDSESVPDPQPLGEPPAAPSGVGPNTMAAGGGAPMADNNEGADGVGSSSGNWHCDSTWLGDRVITTSTRTWALPTYNNHLYKQISNGTSGGATNDNTYFGYSTPWGYFDFNRFHCHFSPRDWQRLINNNWGFRPKRLSFKLFNIQVKEVTQNEGTKTIANNLTSTIQVFTDSEYQLPYVLGSAHQGCLPPFPADVFTIPQYGYLTLNNGSQAVGRSSFYCLEYFPSQMLRTGNNFQFTYTFEDVPFHSSYAHSQSLDRLMNPLIDQYLYYLSRIQTTGGTANTQTLGFSQGGPNTMANQAKNWLPGPCYRQQRVSTTTGQNNNSNFAWTAGTKYHLNGRNSLANPGIAMATHKDDEERFFPSNGILIFGKQNAARDNADYSDVMPASEEEIKTTNPVATEEYGIVADNLQQQNTAPQIGTVNSQGALPGMVWQNRDVYLQGPIWAKIPHTDGNFHPSPLMGGFGLKHPPPQILIKNTPVPADPPTTFNQSKLNSFITQYSTGQVSVEIEWELQKENSKRWNPEIQYTSNYYKSTSVDFAVNTEGVYSEPRPIGTRYLTRNL

SEQ ID NO: 825 - protein, 738 aa, Artificial Sequence
  Synthetic Polypeptide
MAADGYLPDWLEDNLSEGIREWWALKPGAPKPKANQQKQDDGRGLVLPGYKYLGPFNGLDKGEPVNAADAAALEHDKAYDQQLQAGDNPYLRYNHADAEFQERLQEDTSFGGNLGRAVFQAKKRVLEPLGLVEEGAKTAPGKKRPVEPSPQRSPDSSTGIGKKGQQPARKRLNFGQTGDSESVPDPQPLGEPPAAPSGVGPNTMAAGGGAPMADNNEGADGVGSSSGNWHCDSTWLGDRVITTSTRTWALPTYNNHLYKQISNGTSGGATNDNTYFGYSTPWGYFDFNRFHCHFSPRDWQRLINNNWGFRPKRLSFKLFNIQVKEVTQNEGTKTIANNLTSTIQVFTDSEYQLPYVLGSAHQGCLPPFPADVLTIPQYGYLTLNNGSQAVGRSSFYCLEYFPSQMLRTGNNFQFTYTFEDVPFHSSYAHSQSLDRLMNPLIDQYLYYLSRIQTTGGTANTQTLGFSQGGPNTMANQAKNWLPGPCYRQQRVSTTTGQNNNSNFAWTAGTKYHLNGRNSLANPGIAMATHKDDEERFFPSNGILIFGKQNAARDNADYSDVMPTSEEEIKTTNPVATEEYGIVADNLQQQNTAPQIGTVNSQGALPGMVWQNRDVYLQGPIWAKIPHTDGNFHPSPLMGGFGLKHPPPQILIKNTPVPADPPTTFNQSKLNSFITQYSTGQVSVEIEWELQKENSKRWNPEIQYTSNYYKSTSVDFAVNTEGVYSEPRPIGTRYLTRNL

SEQ ID NO: 826 - protein, 738 aa, Artificial Sequence
  Synthetic Polypeptide
MAADGYLPDWLEDNLSEGIREWWALKPGAPKPKANQQKQDDGRGLVLPGYKYLGPFNGLDKGEPVNAADAAALEHDKAYDQQLQAGDNPYLRYNHADAEFQERLQEDTSFGGNLGRAVFQAKKRVLEPLGLVEEGAKTAPGKKRPVEPSPQRSPDSSTGIGKKGQQPARKRLNFGQTGDSESVPDPQPLGEPPAAPSGVGPNTMAAGGGAPMADNNEGADGVGSSSGNWHCDSTWLGDRVITTSTRTWALPTYNNHLYKQISNGTSGGATNDNTYFGYSTPWGYFDFNRFHCHFSPRDWQRLINNNWGFRPKRLSFKLFNIQVKEVTQNEGTKTIANNLTSTIRVFTDSEYQLPYVLGSAHQGCLPPFPADVFTIPQYGYLTLNNGSQAVGRSSFYCLEYFPSQMLRTGNNFQFTYTFEDVPFHSSYAHSQSLDRLMNPLIDQYLYYLSRIQTTGGTANTQTLGFSQGGPNTMANQAKNWLPGPCYRQQRVSTTTGQNNNSNFAWTAGTKYHLNGRNSLANPGIAMATHKDDEERFFPSNGILIFGKQNAARDNADYSDVMPTSEEEIKTTNPVATEEYGIVADNLQQQNTAPQIGTVNSQGALPGMVWQNRDVYLQGPIWAKIPHTDGNFHPSPLMGGFGLKHPPPQILIKNTPVPADPPTTFNQSKLNSFITQYSTGQVSVEIEWELQKENSKRWNPEIQYTSNYYKSTSVDFAVNTEGVYSEPRPIGTRYLTRNL

SEQ ID NO: 827 - protein, 738 aa, Artificial Sequence
  Synthetic Polypeptide
MAADGYLPDWLEDNLSEGIREWWALKPGAPKPKANQQKQDDGRGLVLPGYKYLGPFNGLDKGEPVNAADAAALEHDKAYDQQLQAGDNPYLRYNHADAEFQERLQEDTSFGGNLGRAVFQAKKRVLEPLGLVEEGAKTAPGKKRPVEPSPQRSPDSSTGIGKKGQQPARKRLNFGQTGDSESVPDPQPLGEPPAAPSGVGPNTMAAGGGAPMADNNEGADGVGSSSGNWHCDSTWLGDRVITTSTRTWALPTYNNHLYKQISNGTSGGATNDNTYFGYSTPWGYFDFNRFHCHFSPRDWRRLINNNWGFRPKRLSFKLFNIQVKEVTQNEGTKTIANNLTSTIQVFTDSEYQLPYVLGSAHQGCLPPFPADVFTIPQYGYLTLNNGSQAVGRSSFYCLEYFPSQMLRTGNNFQFTYTFEDVPFHSSYAHSQSLDRLMNPLIDQYLYYLSRIQTTGGTANTQTLGFSQGGPNTMANQAKNWLPGPCYRQQRVSTTTGQNNNSNFAWTAGTKYHLNGRNSLANPGIAMATHKDDEERFFPSNGILIFGKQNAARDNADYSDVMPTSEEEIKTTNPVATEEYGIVADNLQQQNTAPQIGTVNSQGALPGMVWQNRDVYLQGPIWAKIPHTDGNFHPSPLMGGFGLKHPPPQILIKNTPVPADPPTTFNQSKLNSFITQYSTGQVSVEIEWELQKENSKRWNPEIQYTSNYYKSTSVDFAVNTEGVYSEPRPIGTRYLTRNL

SEQ ID NO: 828 - protein, 738 aa, Artificial Sequence
  Synthetic Polypeptide
MAADGYLPDWLEDNLSEGIREWWALKPGAPKPKANQQKQDDGRGLVLPGYKYLGPFNGLDKGEPVNAADAAALEHDKAYDQQLQAGDNPYLRYNHADAEFQERLQEDTSFGGNLGRAVFQAKKRVLEPLGLVEEGAKTAPGKKRPVEPSPQRSPDSSTGIGKKGQQPARKRLNFGQTGDSESVPDPQPLGEPPAAPSGVGPNTMAAGGGAPMADNNEGADGVGSSSGNWHCDSTWLGDRVITTSTRTWALPTYNNHLYKQISNGTSGGATNDNTYFGYSTPWGYFDFNRFHCHFSPRDWQRLINNNWGFRPKRLSFKLFNIQVKEVTQNEGTKTIANNLTSTIQVFTDSEYQLPYVLGSAHQGCLPPFPADVFMIPQYGYLTLNNGSQAVGRSSFYCLEYFPSQMLRTGNNFQFTYTFEDVPFHSSYAHSQSLDRLMNPLIDQYLYYLSRTQTTGGTASTQTLGFSQGGPNTMANQAKNWLPGPCYRQQRVSTTTGQNNNSNFAWTAGTKYHLNGRNSLANPGIAMATHKDDEERFFPSNGILIFGKQNAARDNADYSDVMLTSEEEIKTTNPVATEEYGIVADNLQQQNTAPQIGTVNSQGALPGMVWQNRDVYLQGPIWAKIPHTDGNFHPSPLMGGFGLKHPPPQILIKNTPVPADPPTTFNQSKLNSFITQYSTGQVSVEIEWELQKENSKRWNPEIQYTSNYYKSTSVDFAVNTEGVYSEPRPIGTRYLTRNL

SEQ ID NO: 829 - protein, 738 aa, Artificial Sequence
  Synthetic Polypeptide
MAADGYLPDWLEDNLSEGIREWWALKPGAPKPKANQQKQDDGRGLVLPGYKYLGPFNGLDKGEPVNAADAAALEHDKAYDQQLQAGDNPYLRYNHADAEFQERLQEDTSFGGNLGRAVFQAKKRVLEPLGLVEEGAKTAPGKKRPVEPSPQRSPDSSTGIGKKGQQPARKRLNFGQTGDSESVPDPQPLGEPPAAPSGVGPNTMAAGGGAPMADNNEGADGVGSSSGNWHCDSTWLGDRVITTSTRTWALPTYNNHLYKQISNGTSGGATNDNTYFGYSTPWGYFDFNRFHCHFSPRDWQRLINNNWGFRPKRLSFKLFNIQVKEVTQNEGTKTIANNLTSTIQVFTDSEYQLPYVLGSAHQGCLPPFPADVFMIPQYGYLTLNNGSQAVGRSSFYCLEYFPSQMLRTGNNFQFTYTFEDVPFHSSYAHSQSLDRLMNPLIDQYLYYLSRTQTTGGTANTQTLGFSQGGPNTMANQAKNWLPGPCYRQQRVSTTTGQNNNSNFAWTAGTKYHLNGRNSLANPGIAMATHKDDEERFFPSNGILIFGKQNAARDNADYSDVMLTSEEEIKTTNPVATEEYGIVADNLQQQNTAPQIGTVNSQGALPGMVWQNRDVYLQGPIWAKIPHTDGNFHPSPLMGGFGLKHPPPQILIKNTPVPADPPTTFNQSKLNSFITQYSTGQVSVEIEWELQKENSKRWNPEIQYTSNYYKSTSVDFAVNTEGVYSEPRPIGTRYLTRNL

SEQ ID NO: 830 - protein, 738 aa, Artificial Sequence
  Synthetic Polypeptide
MAADGYLPDWLEDNLSEGIREWWALKPGAPKPKANQQKQDDGRGQVLPGYKYLGPFNGLDKGEPVNAADAAALEHDKAYDQQLQAGDNPYLRYNHADAEFQERLQEDTSFGGNLGRAVFQAKKRVLEPLGLVEEGAKTAPGKKRPVEPSPQRSPDSSTGIGKKGQQPARKRLNFGQTGDSESVPDPQPLGEPPAAPSGVGPNTMAAGGGAPMADNNEGADGVGSSSGNWHCDSTWLGDRVITTSTRTWALPTYNNHLYKQISNGTSGGATNDNTYFGYSTPWGYFDFNRFHCHFSPRDWQRLINNNWGFRPKRLSFKLFNIQVKEVTQNEGTKTIANNLTSTIQVFTDSEYQLPYVLGSAHQGCLPPFPADVFMIPQYGYLTLNNGSQAVGRSSFYCLEYFPSQMLRTGNNFQFTYTFEDVPFHSSYAHSQSLDRLMNPLIDQYLYYLSRTQTTGGTANTQTLGFSQGGPNTMANQAKNWLPGPCYRQQRVSTTTGQNNNSNFAWTAGTKYHLNGRNSLANPGIAMATHKDDEERFFPSNGILIFGKQNAARDNADYSDVMLTSEEEIKTTNPVATEEYGIVADNLQQQNTAPQIGTVNSQGALPGMVWQNRDVYLQGPVWAKIPHTDGNFHPSPLMGGFGLKHPPPQILIKNTPVPADPPTTFNQSKLNSFITQYSTGQVSVEIEWELQKENSKRWNPEIQYTSNYYKSTSVDFAVNTEGVYSEPRPIGTRYLTRNL

SEQ ID NO: 831 - protein, 738 aa, Artificial Sequence
  Synthetic Polypeptide
MAADGYLPDWLEDNLSEGIREWWALKPGAPKPKANQQKQDDGRGLVLPGYKYLGPFNGLDKGEPVNAADAAALEHDKAYDQQLQAGDNPYLRYNHADAEFQERLQEDTSFGGNLGRAVFQAKKRVLEPLGLVEEGAKTAPGKKRPVEPSPQRSPDSSTGIGKKGQQPARKRLNFGQTGDSESVPDPQPLGEPPAAPSGVGPNTMAAGGGAPMADNNEGADGVGSSSGNWHCDSTWLGDRVITTSTRTWALPTYNNHLYKQISNGTSGGATNDNTYFGYSTPWGYFDFNRFHCHFSPRDWQRLINSNWGFRPKRLSFKLFNIQVKEVTQNEGTKTIANNLTSTIQVFTDSEYQLPYVLGSAHQGCLPPFPADVFMIPQYGYLTLNNGSQAVGRSSFYCLEYFPSQMLRTGNNFQFTYTFEDVPFHSSYAHSQSLDRLMNPLIDQYLYYLSRTQTTGGTANTQTLGFSQGGPNTMANQAKNWLPGPCYRQQRVSTTTGQNNNSNFAWTAGTKYHLNGRNSLANPGIAMATHKDDEERFFPSNGILIFGKQNAARDNADYSDVMLTSEEEIKTTNPVATEEYGIVADNLQQQNTAPQIGTVNSQGALPGMVWQNRDVYLQGPIWAKIPHTDGNFHPSPLMGGFGLKHPPPQILIKNTPVPADPPTTFNQSKLNSFITQYSTGQVSVEIEWELQKENSKRWNPEIQYTSNYYKSTSVDFAVNTEGVYSEPRPIGTRYLTRNL

SEQ ID NO: 832 - protein, 738 aa, Artificial Sequence
  Synthetic Polypeptide
MAADGYLPDWLEDNLSEGIREWWALKPGAPKPKANQQKQDDGRGLVLPGYKYLGPFNGLDKGEPVNAADAAALEHDKAYDQQLQAGDNPYLRYNHADAEFQERLQEDTSFGGNLGRAVFQAKKRVLEPLGLVEEGAKTAPGKKRPVEPSPQRSPDSSTGIGKKGQQPARKRLNFGQTGDSESVPDPQPLGEPPAAPSGVGPNTMAAGGGAPMADNNEGADGVGSSSGNWHCDSTWLGDRVITTSTRTWALPTYNNHLYKQISNGTSGGATNDNTYFGYSTPWGYFDFNRFHCHFSPRDWQRLINNNWGFRPKRLSFKLFNIQVKEVTQNEGTKTIANNLTSTIQVFTDSEYQLPYVLGSAHQGCLPPFPADVFTIPQYGYLTLNNGSQAVGRSSFYCLEYFPSQMLRTGNNFQFTYTFEDVPFHSSYAHSQSLDRLMNPLIDQYLYYLSRTQTTGGTANTQTLGFSQGGPNTMANQAKNWLPGPCYRQQRVSTTTGQNNNSNFAWTAGTKYHLNGRNSLANPGIAMATHKDDEERFFPSNGILIFGKQNAARDNADYSDVMLTSEEEIKTTNPVATEEYGIVADNLQQQNTAPQIGTVNSQGALPGMVWQNRDVYLQGPIWAKIPHTDGNFHPSPLMGGFGLKHPPPQILIKNTPVPADPPTTFNQSKLNSFITQYSTGQVSVEIEWELQKENSKRWNPEIQYTSNYYKSTSVDFAVNTEGVYSEPRPIGTRYLTRNL

SEQ ID NO: 833 - protein, 738 aa, Artificial Sequence
  Synthetic Polypeptide
MAADGYLPDWLEDNLSEGIREWWALKPGAPKPKANQQKQDDGRGLVLPGYKYLGPFNGLDKGEPVNAADAAALEHDKAYDQQLQAGDNPYLRYNHADAEFQERLQEDTSFGGNLGRAVFQAKKRVLEPLGLVEEGAKTAPGKKRPVEPSPQRSPDSSTGIGKKGQQPARKRLNFGQTGDSESVPDPQPLGEPPAAPSGVGPNTMAAGGGAPMADNNEGADGVGSSSGNWHCDSTWLGDRVITTSTRTWALPTYNNHLYKQISNGTSGGATNDNTYFGYSTPWGYFDFNRFHCHFSPRDWQRLIDNNWGFRPKRLSFKLFNIQVKEVTQNEGTKTIANNLTSTIQVFTDSEYQLPYVLGSAHQGCLPPFPADVFMIPQYGYLTLNNGSQAVGRSSFYCLEYFPSQMLRTGNNFQFTYTFEDVPFHSSYAHSQSLDRLMNPLIDQYLYYLSRTQTTGGTANTQTLGFSQGGPNTMANQAKNWLPGPCYRQQRVSTTTGQNNNSNFAWTAGTKYHLNGRNSLANPGIAMATHKDDEERFFPSNGILIFGKQNAARDNADYSDVMLTSEEEIKTTNPVATEEYGIVADNLQQQNTAPQIGTVNSQGALPGMVWQNRDVYLQGPIWAKIPHTDGNFHPSPLMGGFGLKHPPPQILIKNTPVPADPPTTFNQSKLNSFITQYSTGQVSVEIEWELQKENSKRWNPEIQYTSNYYKSTSVDFAVNTEGVYSEPRPIGTRYLTRNL

SEQ ID NO: 834 - protein, 738 aa, Artificial Sequence
  Synthetic Polypeptide
MAADGYLPDWLEDNLSEGIREWWALKPGAPKPKANQQKQDDGRGLVLPGYKYLGPFNGLDKGEPVNAADAAALEHDKAYDQQLQAGDNPYLRYNHADAEFQERLQEDTSFGGNLGRAVFQAKKRVLEPLGLVEEGAKTAPGKKRPVEPSPQRSPDSSTGIGKKGQQPARKRLNFGQTGDSESVPDPQPLGEPPAAPSGVGPNTMAAGGGAPMADNNEGADGVGSSSGNWHCDSTWLGDRVITTSTRTWALPAYNNHLYKQISNGTSGGATNDNTYFGYSTPWGYFDFNRFHCHFSPRDWQRLINNNWGFRPKRLSFKLFNIQVKEVTQNEGTKTIANNLTSTIQVFTDSEYQLPYVLGSAHQGCLPPFPADVFTIPQYGYLTLNNGSQAVGRSSFYCLEYFPSQMLRTGNNFQFTYTFEDVPFHSSYAHSQSLDRLMNPLIDQYLYYLSRTQTTGGTANTQTLGFSQGGPNTMANQAKNWLPGPCYRQQRVSTTTGQNNNSNFAWTAGTKYHLNGRNSLANPGIAMATHKDDEERFFPSNGILIFGKQNAARDNADYSDVMLTSEEEIKTTNPVATEEYGIVADNLQQQNTAPQIGTVNSQGALPGMVWQNRDVYLQGPIWAKIPHTDGNFHPSPLMGGFGLKHPPPQILIKNTPVPADPPTTFNQSKLNSFITQYSTGQVSVEIEWELQKENSKRWNPEIQYTSNYYKSTNVDFAVNTEGVYSEPRPIGTRYLTRNL

SEQ ID NO: 835 - protein, 738 aa, Artificial Sequence
  Synthetic Polypeptide
MAADGYLPDWLEDNLSEGIREWWALKPGAPKPKANQQKQDDGRGLVLPGYKYLGPFNGLDKGEPVNAADAAALEHDKAYDQQLQAGDNPYLRYNHADAEFQERLQEDTSFGGNLGRAVFQAKKRVLEPLGLVEEGAKTAPGKKRPVEPSPQRSPDSSTGIGKKGQQPARKRLNFGQTGDSESVPDPQPLGEPPAAPSGVGPNTMAAGGGAPMADNNEGADGVGSSSGNWHCDSTWLGDRVITTSTRTWALPTYNNHLYKQISNGTSGGATNDNTYFGYSTPWGYFDFNRFHCHFSPRDWQRLINNNWGFRPKRLSFKLFNIQVKEVTQNEGTKTIANNLTSTIQVFTDSEYQLPYVLGSAHQGCLPPFPADVFMIPQYGYLTLNDGSQAVGRSSFYCLEYFPSQMLRTGNNFQFTYTFEDVPFHSSYAHSQSLDRLMNPLIDQYLYYLSRTQTTGGTANTQTLGFSQGGPNTMANQAKNWLPGPCYRQQRVSTTTGQNNNSNFAWTAGTKYHLNGRNSLANPGIAMATHKDDEERFFPSNGILIFGKQNAARDNADYSDVMLTSEEEIKTTNPVATEEYGIVADNLQQQNTAPQIGTVNSQGALPGMVWQNRDVYLQGPIWAKIPHTDGNFHPSPLMGGFGLKHPPPQILIKNTPVPADPPTTFNQSKLNSFITQYSTGQVSVEIEWELQKENSKRWNPEIQYTSNYYKSTSVDFAVNTEGVYSEPRPIGTRYLTRNL

SEQ ID NO: 836 - protein, 738 aa, Artificial Sequence
  Synthetic Polypeptide
MAADGYLPDWLEDNLSEGIREWWALKPGAPKPKANQQKQDDGRGLVLPGYKYLGPFNGLDKGEPVNAADAAALEHDKAYDQQLQAGDNPYLRYNHADAEFQERLQEDTSFGGNLGRAVFQAKKRVLEPLGLVEEGAKTAPGKKRPVEPSPQRSPDSSTGIGKKGQQPARKRLNFGQTGDSESVPDPQPLGEPPAAPSGVGPNTMAAGGGAPMADNNEGADGVGSSSGNWHCDSTWLGDRVITTSTRTWAQPTYNNHLYKQISNGTSGGATNDNTYFGYSTPWGYFDFNRFHCHFSPRDWQRLINNNWGFRPKRLSFKLFNIQVKEVTQNEGTKTIANNLTSTIQVFTDSEYQLPYVLGSAHQGCLPPFPADVFMIPQYGYLTLNNGSQAVGRSSFYCLEYFPSQMLRTGNNFQFTYTFEDVPFHSSYAHSQSLDRLMNPLIDQYLYYLSRTQTTGGTANTQTLGFSQGGPNTMANQAKNWLPGPCYRQQRVSTTTGQNNNSNFAWTAGTKYHLNGRNSLANPGIAMATHKDDEERFFPSNGILIFGKQNAARDNADYSDVMLTSEEEIKTTNPVATEEYGIVADNLQQQNTAPQIGTVNSQGALPGMVWQNRDVYLQGPIWAKIPHTDGNFHPSPLMGGFGLKHPPPQILIKNTPVPADPPTTFNQSKLNSFITQYSTGQVSVEIEWELQKENSKRWNPEIQYTSNYYKSTSVDFAVNTEGVYSEPRPIGTRYLTRNL

SEQ ID NO: 837 - protein, 735 aa, Artificial Sequence
  Synthetic Polypeptide
MAADGYLPDWLEDTLSEGIRQWWKLKPGPPPPKPAERHKDDSRGLVLPGYKYLGPFNGLDKGEPVNEADAAALEHDKAYDRQLDSGDNPYLKYNHADAEFQERLKEDTSFGGNLGRAVFQAKKRVLEPLGLVEEPVKTAPGKKRPVEHSPAEPDSSSGTGKAGQQPARKRLNFGQTGDADSVPDPQPLGQPPAAPSGLGTNTMATGSGAPMADNNEGADGVGNSSGNWHCDSTWMGDRVITTSTRTWALPTYNNHLYKQISSQSGASNDNHYFGYSTPWGYFDFNRFHCHFSPRDWQRLINNNWGFRPKRLSFKLFNIQVKEVTQNDGTTTIANNLTSTVQVFTDSEYQLPYVLGSAHQGCLPPFPADVFMVPQYGYLTLNNGSQAVGRSSFYCLEYFPSQMLRTGNNFTFSYTFEDVPFHSSYAHSQSLDRLMNPLIDQYLYYLSKTNAPSGTTTMSRLQFSQAGASDIRDQSRNWLPGPCYRQQRVSKTAADNNNSDYSWTGATKYHLNGRDSLVNPGPAMASHKDDEEKYFPQSGVLIFGKQGSNKTNVDIEKVMITDEEEIRTTNPVATEQYGAVSTNLQSGNTQAATSDVNTQGVLPGMVWQDRDVYLQGPIWAKIPHTDGHFHPSPLMGGFGLKHPPPQILIKNTPVPANPSTTFSAAKFASFITQYSTGQVSVEIEWELQKENSKRWNPEIQYTSNYNKSVNVDFTVDTNGVYSEPRPIGTRYLTRNL

SEQ ID NO: 838 - protein, 735 aa, Artificial Sequence
  Synthetic Polypeptide
MAADGYLPDWLEDTLSEGIRQWWKLKPGPPPPKPAERHKDDSRGLVLPGYKYLGPFNGLDKGEPVNEADAAALEHDKAYDRQLDSGDNPYLKYNHADAEFQERLKEDTSFGGNLGRAVFQAKKRVLEPLGLVEEPVKTAPGKKRPVEHSPAEPDSSSGTGKAGQQPARKRLNFGQTGDADSVPDPQPLGQPPAAPSGLGTNTMATGSGAPMADNNEGADGVGNSSGNWHCDSTWMGDRVITTSTRTWALPTYNNHLYKQISSQSGASNDNHYFGYSTPWGYFDFNRFHCHFSPRDWQRLINNNWGFRPKRLSFKLFNIQVKEVTQNDGTTTIANNLTSTVQVFTDSEYQLPYVLGSAHQGCLPPFPADVFMVPQYGYLTLNNGSQAVGRSSFYCLEYFPSQMLRTGNNFTFSYTFEDVPFHSSYAHSQSLDRLMNPLIDQYLYYLSKTNAPSGTTTMSRLQFSQAGASDIRDQSRNWLPGPCYRQQRVSKTAADNNNSDYSWTGATKYHLNGRDSLVNPGPAMASHKDDEEKIFPQSGVLIFGKQGSNKTNVDIEKVMITDEEEIRTTNPVATEQYGAVSTNLQSGNTQAATSDVNTQGVLPGMVWQDRDVYLQGPIWAKIPHTDGHFHPSPLMGGFGLKHPPPQILIKNTPVPANPSTTFSAAKFASFITQYSTGQVSVEIEWELQKENSKRWNPEIQYTSNYNKSVNVDFTVDTNGVYSEPRPIGTRYLTRNL

SEQ ID NO: 839 - protein, 735 aa, Artificial Sequence
  Synthetic Polypeptide
MAADGYLPDWLEDTLSEGIRQWWKLKPGPPPPKPAERHKDDSRGLVLPGYKYLGPFNGLDKGEPVNEADAAALEHDKAYDRQLDSGDNPYLKYNHADAEFQERLKEDTSFGGNLGRAVFQAKKRVLEPLGLVEEPVKTAPGKKRPVEHSPAEPDSSSGTGKAGQQPARKRLNFGQTGDADSVPDPQPLGQPPAAPSGLGTNTMATGSGAPMADNNEGADGVGNSSGNWHCDSTWMGDRVITTSTRTWALPTYNNHLYKQISSQSGASNDNHYFGYSTPWGYFDFNRFHCHFSPRDWQRLINNNWGFRPKRLSFKLFNIQVKEVTQNDGTTTIANNLTSTVQVFTDSEYQLPYALGSAHQGCLPPFPADVFMVPQYGYLTLNNGSQAVGRSSFYCLEYFPSQMLRTGNNFTFSYTFEDVPFHSSYAHSQSLDRLMNPLIDQYLYYLSKTNAPSGTTTMSRLQFSQAGASDIRDQSRNWLPGPCYRQQRVSKTAADNNNSDYSWTGATKYHPNGRDSLVNPGPAMASHKDDEEKYFPQSGVLIFGKQGSNKTNVDIEKVMITDEEEIRTTNPVATEQYGAVSTNLQSGNTQAATSDVNTQGVLPGMVWQDRDVYLQGPIWAKIPHTDGHSHPSPLMGGFGLKHPPPQILIKNTPVPANPSTTFSAAKFASFITQYSTGQVSVEIEWELQKENSKRWNPEIQYTSNYNKSVNVDFTVDTNGVYSEPRPIGTRYLTRNL

SEQ ID NO: 840 - protein, 734 aa, Artificial Sequence
  Synthetic Polypeptide
MAADGYLPDWLEDTLSEGIRQWWKLKPGPPPPKPAERHKDDSRGLVLPGYKYLGPFNGLDKGEPVNEADAAALEHDKAYDRQLDSGDNPYLKYNHADAEFQERLKEDTSFGGNLGRAVFQAKKRVLEPLGLVEEPVKTAPGKKRPVEHSPAEPDSSSGTGKAGQQPARKRLNFGQTGDADSVPDPQPLGQPPAAPSGLGTNTMATGSGAPMADNNEGADGVGNSSGNWHCDSTWMGDRVITTSTRTWALPTYNNHLYKQISSQSGASNDNHYFGYSTPWGYFDFNRFHCHFSPRDWQRLINNNWGFRPKRLSFKLFNIQVKEVTQNDGTTTIANNLTSTVQVFTDSEYQLPYVLGSAHQGCLPPFPADVFMVPQYGYLTLNNGSQAVGRSSFYCLEYFPSQMLRTGNNFTFSYTFEDVPFHSSYAHSQSLDRLMNPLIDQYLYYLSKTNAPSGTTTMSRLQFSQAGASDIRDQSRNWLPGPCYRQQRVSKTAADNNSDYSWTGATKYHLNGRDSLVNPGPAMASHKDDEEKYFPQSGVLIFGKQGSNKTNVDIEKVMITDEEEIRTTNPVATEQYGAVSTNLQSGNTQAATSDVNTQGVLPGMVWQDRDVYLQGPIWAKIPHTDGHFHPSPLMGGFGLKHPPPQILIKNTPVPANPSTTFSAAKFASFITQYSTGQVSVEIEWELQKENSKRWNPEIQYTSNYNKSVNVDFTVDTNGVYSEPRPIGTRYLTRNL

SEQ ID NO: 841 - protein, 735 aa, Artificial Sequence
  Synthetic Polypeptide
MAADGYLPDWLEDTLSEGIRQWWKLKPGPPPPKPAERHKDDSRGLVLPGYKYLGPFNGLDKGEPVNEADAAALEHDKAYDRQLDSGDNPYLKYNHADAEFQERLKEDTSFGGNLARAVFQAKKRVLEPLGLVEEPVKTAPGKKRPVEHSPAEPDSSSGTGKSGQQPARKRLNFGQTGDADSVPDPQPLGQPPAAPSGLGTNTMASGSGAPMADNNEGADGVGNSSGNWHCDSTWMGDRVITTSTRTWALPTYNNHLYKQISSQSGASNDNHYFGYSTPWGYFDFNRFHCHFSPRDWQRLINNNWGFRPKRLNFKLFNIQVKEVTQNDGTTTIANNLTSTVQVFTDSEYQLPYVLGSAHQGCLPPFPADVFMVPQYGYLTLNNGSQAVGRSSFYCLEYFPSQMLRTGNNFTFSYTFEDVPFHSSYAHSQSLDRLMNPLIDQYLYYLSRTNTPSGTTTQSRLQFSQAGASDIRDQSRNWLPGPCYRQQRVSKTAADNNNSDYSWTGATKYHLNGRDSLVNPGTAMASHKDDEEKYFPQSGVLIFRKQDSGKTNVDIEKVMITDEEEIRTTNPVATEQYGSVSTNLQSGNTQAATSDVNTQGVLPGMVWQDRDVYLQGPIWAKIPHTDGHFHPSPLMGGLGQKHPPPQSLIKNTPVPANPSTTFSAAKFASFITQYSTGQVSVEIEWELQKENSKRWNPEIQYTSNYNKSVNVDFTVDTNGVYSEPRPIGTRYLTRNL

SEQ ID NO: 842 - protein, 735 aa, Artificial Sequence
  Synthetic Polypeptide
MAADGYLPDWLEDTLSEGIRQWWKLKPGPPPPKPAERHKDDSRGLVLPGYKYLGPFNGLDKGEPVNEADAAALEHDKAYDRQLDSGDNPYLKYNHADAEFQERLKEDTSFGGNLARAVFQAKKRVLEPLGLVEEPVKTAPGKKRPVEHSPAEPDSSSGTGKSGQQPARKRLNFGQTGDADSVPDPQPLGQPPAAPSGLGTNTMASGSGAPMADNNEGADGVGNSSGNWHCDSTWMGDRVITTSTRTWALPTYNNHLYKQISSQSGASNDNHYFGYSTPWGYFDFNRFHCHFSPRDWQRLINNNWGFRPKRLNFKLFNIQVKEVTQNDGTTTIANNLTSTVQVFTDSEYQLPYVLGSAHQGCLPPFPADVFMVPQYGYLTLNNGSQAVGRSSFYCLEYFPSQMLRTGNNFTFSYTFEDVPFHSSYAHSQSLDRLMNPLIDQYLYYLSRTNTPSGTTTQSRLQFSQAGASDIRDQSRNWLPGPCYRQQRVSKTAADNNNSDYSWTGATKYHLNGRDSLVNPGTAMASHKDDEEKYFPQSGVLIFGKQDSGKTNVDIEKVMITDEEEIRTTNPVATEQYGSVSTNLQSGNTQAATSDVNTQGVLPGMVWQDRDVYLQGPIWAKIPHTDGHFHPSPLMGGLGQKHPPPQILIKNTPVPANPSTTFSAAKFASFITQYSTGQVSVEIEWELQKENSKRWNPEIQYTSNYNKSVNVDFTVDTNGVYSEPRPIGTRYLTRNL

SEQ ID NO: 843 - protein, 735 aa, Artificial Sequence
  Synthetic Polypeptide
MAADGYLPDWLEDTLSEGIRQWWKLKPGPPPPKPAERHKDDSRGLVLPGYKYLGPFNGLDKGEPVNEADAAALEHDKAYDRQLDSGDNPYLKYNHADAEFQERLKEDTSFGGNLARAVFQAKKRVLEPLGLVEEPVKTAPGKKRPVEHSPAEPDSSSGTGKSGQQPARKRLNFGQTGDADSVPDPQPLGQPPAAPSGLGTNTMASGSGAPMADNNEGADGVGNSSGNWHCDSTWMGDRVITTSTRTWALPTYNNHLYKQISSQSGASNDNHYFGYSTPWGYFDFNRFHCHFSPRDWQRLINNNWGFRPKRLNFKLFNIQVKEVTQNDGTTTIANNLTSTVQVFTDSEYQLPYVLGSAHQGCLPPFPADVFMVPRYGYLTLNNGSQAVGRSSFYCLEYFPSQMLRTGNNFTFSYTFEDVPFHSSYAHSQSLDRLMNPLIDQYLYYLSRTNTPSGTTTQSRLQFSQAGASDIRDQSRNWLPGPCYRQQRVSKTAADNNNSDYSWTGATKYHLNGRDSLVNPGTAMASHKDDEEKYFPQSGVLIFRKQDSGKTNVDIEKVMITDEEEIRTTNPVATEQYGSVSTNLQSGNTQAATSDVNTQGVLPGMVWQDRDVYLQGPIWAKIPHTDGHFHPSPLMGGFGLKHPPPQILIKNTPVPANPSTTFSAAKFASFITQYSTGQVSVEIEWELQKENSKRWNPEIQYTSNYNKSVNVDFTVDTNGVYSEPRPIGTRYLTRNL

SEQ ID NO: 844 - protein, 735 aa, Artificial Sequence
  Synthetic Polypeptide
MAADGYLPDWLEDTLSEGIRQWWKLKPGPPPPKPAERHKDDSRGLVLPGYKYLGPFNGLDKGEPVNEADAAALEHDKAYDRQLDSGDNPYLKYNHADAEFQERLKEDTSFGGNLARAVFQAKKRVLEPLGLVEEPVKTAPGKKRPVEHSPAEPDSSSGTGKSGQQPARKRLNFGQTGDADSVPDPQPLGQPPAAPSGLGTNTMASGSGAPMADNNEGADGVGNSSGNWHCDSTWMGDRVITTSTRTWALPTYNNHLYKQISSQSGASNDNHYFGYSTPWGYFDFNRFHCHFSPRDWQRLINNNWGFRPKRLNFKLFNIQVKEVTQNDGTTTIANNLTSTVQVFTDSEYQLPYVLGSAHQGCLPPFPADVFMVPQYGYLTLNNGSQAVGRSSFYCLEYFPSQMLRTGNNFTFSYTFEDVPFHSSYAHSQSLDRLMNPLIDQYLYYLSRTNTPSGTTTQSRLQFSQAGASDIRDQSRNWLPGPCYRQQRVSKTAADNNNSDYSWTGATKYHLNGRDSLVNPGTAMASHKDDEEKYFPQSGVLIFRKQDSGKTNVDIEKVMITDEEEIRTTNPVATEQYGSVSTNLQSGNTQAATSDVNTQGVLPGMVWQDRDVYLQGPIWAKIPHTDGHFHPSPLMGGFGLKHPPPQILIKNTPVPANPSTTFSAAKFASFITQYSTGQVSVEIEWELQKENSKRWNPEIQYTSNYNKSVNVDFTVDTNGVYSEPRPIGTRYLTRNL

SEQ ID NO: 845 - protein, 735 aa, Artificial Sequence
  Synthetic Polypeptide
MAADGYLPDWLEDTLSEGIRQWWKLKPGPPPPKPAERHKDDSRGLVLPGYKYLGPFNGLDKGEPVNEADAAALEHDKAYDRQLDSGDNPYLKYNHADAEFQERLKEDTSFGGNLARAVFQAKKRVLEPLGLVEEPVKTAPGKKRPVEHSPAEPDSSSGTGKSGQQPARKRLNFGQTGDADSVPDPQPLGQPPAAPSGLGTNTMASGSGAPMADNNEGADGVGNSSGNWHCDSTWMGDRVITTSTRTWALPTYNNHLYKQISSQSGASNDNHYFGYSTPWGYFDFNRFHCHFSPRDWQRLINNNWGFRPKRLNFKLFNIQVKEVTQNDGTTTIANNLTSTVQVFTDSEYQLPYVLGSAHQGCLPPFPADVFMVPRYGYLTLNNGSQAVGRSSFYCLEYFPSQMLRTGNNFTFSYTFEDVPFHSSYAHSQSLDRLMNPLIDQYLYYLSRTNTPSGTTTQSRLQFSQAGASDIRDQSRNWLPGPCYRQQRVSKTAADNNNSDYSWTGATKYHLNGRDSLVNPGTAMASHKDDEEKYFPQSGVLIFGKQDSGKTNVDIEKVMITDEEEIRTTNPVATEQYGSVSTNLQSGNTQAATSDVNTQGVLPGMVWQDRDVYLQGPIWAKIPHTDGHFHPSPLMGGFGLKHPPPQILIKNTPVPANPSTTFSAAKFASFITQYSTGQVSVEIEWELQKENSKRWNPEIQYTSNYNKSVNVDFTVDTNGVYSEPRPIGTRYLTRNL

SEQ ID NO: 846 - protein, 735 aa, Artificial Sequence
  Synthetic Polypeptide
MAADGYLPDWLEDTLSEGIRQWWKLKPGPPPPKPAERHKDDSRGLVLPGYKYLGPFNGLDKGEPVNEADAAALEHDKAYDRQLDSGDNPYLKYNHADAEFQERLKEDTSFGGNLARAVFQAKKRVLEPLGLVEEPVKTAPGKKRPVEHSPAEPDSSSGTGKSGQQPARKRLNFGQTGDADSVPDPQPLGQPPAAPSGLGTNTMASGSGAPMADNNEGADGVGNSSGNWHCDSTWMGDRVITTSTRTWALPTYNNHLYKQISSQSGASNDNHYFGYSTPWGYFDFNRFHCHFSPRDWQRLINNNWGFRPKRLNFKLFNIQVKEVTQNDGTTTIANNLTSTVQVFTDSEYQLPYVLGSAHQGCLPPFPADVFMVPQYGYLTLNNGSQAVGRSSFYCLEYFPSQMLRTGNNFTFSYTFEDVPFHSSYAHSQSLDRLMNPLIDQYLYYLSRTNTPSGTTTQSRLQFSQAGASDIRDQSRNWLPGPCYRQQRVSKTAADNNNSDYSWTGATKYHLNGRDSLVNPGTAMASHKDDEEKYFPQSGVLIFGKQDSGKTNVDIEKVMITDEEEIRTTNPVATEQYGSVSTNLQSGNTQAATSDVNTQGVLPGMVWQDRDVYLQGPIWAKIPHTDGHFHPSPLMGGLGQKHPPPQSLIKNTPVPANPSTTFSAAKFASFITQYSTGQVSVEIEWELQKENSKRWNPEIQYTSNYNKSVNVDFTVDTNGVYSEPRPIGTRYLTRNL

SEQ ID NO: 847 - protein, 735 aa, Artificial Sequence
  Synthetic Polypeptide
MAADGYLPDWLEDTLSEGIRQWWKLKPGPPPPKPAERHKDDSRGLVLPGYKYLGPFNGLDKGEPVNEADAAALEHDKAYDRQLDSGDNPYLKYNHADAEFQERLKEDTSFGGNLARAVFQAKKRVLEPLGLVEEPVKTAPGKKRPVEHSPAEPDSSSGTGKSGQQPARKRLNFGQTGDADSVPDPQPLGQPPAAPSGLGTNTMASGSGAPMADNNEGADGVGNSSGNWHCDSTWMGDRVITTSTRTWALPTYNNHLYKQISSQSGASNDNHYFGYSTPWGYFDFNRFHCHFSPRDWQRLINNNWGFRPKRLNFKLFNIQVKEVTQNDGTTTIANNLTSTVQVFTDSEYQLPYVLGSAHQGCLPPFPADVFMVPQYGYLTLNNGSQAVGRSSFYCLEYFPSQMLRTGNNFTFSYTFEDVPFHSSYAHSQSLDRLMNPLIDQYLYYLSRTNTPSGTTTQSRLQFSQAGASDIRDQSRNWLPGPCYRQQRVSKTAADNNNSDYSWTGATKYHLNGRDSLVNPGTAMASHKDDEEKYFPQSGVLIFGKQDSEKTNVDIEKVMITDEEEIRTTNPVATEQYGSVSTNLQSGNTQAATSDVNTQGVLPGMVWQDRDVYLQGPIWAKIPHTDGHFHPSPLMGGFGLKHPPPQILIKNTPVPANPSTTFSAAKFASFITQYSTGQVSVEIEWELQKENSKRWNPEIQYTSNYNKSVNVDFTVDTNGVYSEPRPIGTRYLTRNL

SEQ ID NO: 848 - protein, 735 aa, Artificial Sequence
  Synthetic Polypeptide
MAADGYLPDWLEDTLSEGIRQWWKLKPGPPPPKPAERHKDDSRGLVLPGYKYLGPFNGLDKGEPVNEADAAALEHDKAYDRQLDSGDNPYLKYNHADAEFQERLKEDTSFGGNLARAVFQAKKRVLEPLGLVEEPVKTAPGKKRPVEHSPAEPDSSSGTGKSGQQPARKRLNFGQTGDADSVPDPQPLGQPPAAPSGLGTNTMASGSGAPMADNNEGADGVGNSSGNWHCDSTWMGDRVITTSTRTWALPTYNNHLYKQISSQSGASNDNHYFGYSTPWGYFDFNRFHCHFSPRDWQRLINNNWGFRPKRLNFKLFNIQVKEVTQNDGTTTIANNLTSTVQVFTDSEYQLPYVLGSAHQGCLPPFPADVFMVPQYGYLTLNNGSQAVGRSSFYCLEYFPSQMLRTGNNFTFSYTFEDVPFHSSYAHSQSLDRLMNPLIDQYLYYLSRTNTPSGTTTQSRLQFSQAGASDIRDQSRNWLPGPCYRQQRVSKTAADNNNSDYSWTGATKYHLNGRDSLVNPGTAMASHKDDEEKYFPQSGVLIFGKQDSGKTNVDIEKVMITDEEEIRTTNPVATEQYGSVSTNLQSGNTQAATSDVNTQGVLPGMVWQDRDVYLQGPIWAKIPHTDGHFHPSPLMGGFGLKHPPPQILIKNTPVPANPSTTFSAAKFASFITQYSTGQVSVEIEWELQKENSKRWNPEIQYTSNYNKSVNVDFTVDTNGVYSEPRPIGTRYLTRNL

SEQ ID NO: 849 - protein, 735 aa, Artificial Sequence
  Synthetic Polypeptide
MAADGYLPDWLEDTLSEGIRQWWKLKPGPPPPKPAERHKDDSRGLVLPGYKYLGPFNGLDKGEPVNEADAAALEHDKAYDRQLDSGDNPYLKYNHADAEFQERLKEDTSFGGNLARAVFQAKKRVLEPLGLVEEPVKTAPGKKRPVEHSPAEPDSSSGTGKSGQQPARKRLNFGQTGDADSVPDPQPLGQPPAAPSGLGTNTMASGSGAPMADNNEGADGVGNSSGNWHCDSTWMGDRVITTSTRTWALPTYNNHLYKQISSQSGASNDNHYFGYSTPWGYFDFNRFHCHFSPRDWQRLINNNWGFRPKRLNFKLFNIQVKEVTQNDGTTTIANNLTSTVQVFTDSEYQLPYVLGSAHQGCLPPFPADVFMVPQYGYLTLNNGSQAVGRSSFYCLEYFPSQMLRTGNNFTFSYTFEDVPFHSSYAHSQSLDRLMNPLIDQYLYYLSRTNTPSGTTTQSRLQFSQAGASDIRDQSRNWLPGPCYRQQRVSKTAADNNNSDYSWTGATKYHLNGRDSLVNPGTAMASHKDDEEKYFPQSGVLIFGKQDSGKTNVDIEKVMITDEEEIRTTNPVATEQYGSVSTNLQSGNTQAATSDVNTQGVLPGMVWQDRDVYLQGPIWAKIPHTDGHFHPSPLMGGFGQKHPPPQSLIKNTPVPANPSTTFSAAKFASFITQYSTGQVSVEIEWELQKENSKRWNPEIQYTSNYNKSVNVDFTVDTNGVYSEPRPIGTRYLTRNL

SEQ ID NO: 850 - protein, 735 aa, Artificial Sequence
  Synthetic Polypeptide
MAADGYLPDWLEDTLSEGIRQWWKLKPGPPPPKPAERHKDDSRGLVLPGYKYLGPFNGLDKGEPVNEADAAALEHDKAYDRQLDSGDNPYLKYNHADAEFQERLKEDTSFGGNLARAVFQAKKRVLEPLGLVEEPVKTAPGKKRPVEHSPAEPDSSSGTGKSGQQPARKRLNFGQTGDADSVPDPQPLGQPPAAPSGLGTNTMASGSGAPMADNNEGADGVGNSSGNWHCDSTWMGDRVITTSTRTWALPTYNNHLYKQISSQSGASNDNHYFGYSTPWGYFDFNRFHCHFSPRDWQRLINNNWGFRPKRLNFKLFNIQVKEVTQNDGTTTIANNLTSTVQVFTDSEYQLPYVLGSAHQGCLPPFPADVFMVPQYGYLTLNNGSQAVGRSSFYCLEYFPSQMLRTGNNFTFSHTFEDVPFHSSYAHSQSLDRLMNPLIDQYLYYLSRTNTPSGTTTQSRLQFSQAGASDIRDQSRNWLPGPCYRQQRVSKTAADNNNSDYSWTGATKYHLNGRDSLVNPGTAMASHKDDEEKYFPQSGVLIFGKQDSGKTNVDIEKVMITDEEEIRTTNPVATEQYGSVSTNLQSGNTQAATSDVNTQGVLPGMVWQDRDVYLQGPIWAKIPHTDGHFHPSPLMGGFGLKHPPPQILIKNTPVPANPSTTFSAAKFASFITQYSTGQVSVEIEWELQKENSKRWNPEIQYTSNYNKSVNVDFTVDTNGVYSEPRPIGTRYLTRNL

SEQ ID NO: 851 - protein, 735 aa, Artificial Sequence
  Synthetic Polypeptide
MAADGYLPDWLEDTLSEGIRQWWKLKPGPPPPKPAERHKDDSRGLVLPGYKYLGPFNGLDKGEPVNEADAAALEHDKAYDRQLDSGDNPYLKYNHADAEFQERLKEDTSFGGNLARAVFQAKKRVLEPLGLVEEPVKTAPGKKRPVEHSPAEPDSSSGTGKSGQQPAGKRLNFGRTGDADSVPDPQPLGQPPAAPSGLGTNTMASGSGAPMADNNEGADGVGNSSGNWHCDSTWMGDRVITTSTRTWALPTYNNHLYKQISSQSGASNDNHYFGYSTPWGYFDFNRFHCHFSPRDWQRLINNNWGFRPKRLNFKLFNIQVKEVTQNDGTTTIANNLTSTVQVFTDSEYQLPYVLGSAHQGCLPPFPADVFMVPQYGYLTLNNGSQAVGRSSFYCLEYFPSQMLRTGNNFTFSYTFEDVPFHSSYAHSQSLDRLMNPLIDQYLYYLSRTNTPSGTTTQSRLQFSPAGASDIRDQSRNWLPGPCYRQQRVSKTAADNNNSDYSWTGATKYHLNGRDSLVNPGTAMASHKDDEEKYFPQSGVLIFGKQDSGKTNVDIEKVMITDEEEIRTTNPVATEQYGSVSTNLQSGNTQAATSDVNTQGVLPGMVWQDRDVYLQGPIWAKIPHTDGHFHPSPLMGGFGLKHPPPQILIKNTPVPANPSTTFSAAKFASFITQYSTGQVSVEIEWELQKENSKRWNPEIQYTSNYNKSVNVDFTVDTNGVYSEPRPIGTRYLTRNL

SEQ ID NO: 852 - protein, 734 aa, Artificial Sequence
  Synthetic Polypeptide
MAADGYLPDWLEDTLSEGIRQWWKLKPGPPPPKPAERHKDDSRGLVLPGYKYLGPFNGLDKGEPVNEADAAALEHDKAYDRQLDSGDNPYLKYNHADAEFQERLKEDTSFGGNLARAVFQAKKRVLEPLGLVEEPVKTAPGKKRPVEHSPAEPDSSSGTGKSGQQPARKRLNFGQTGDADSVPDPQPLGQPPAAPSGLGTNTMASGSGAPMADNNEGADGVGNSSGNWHCDSTWMGDRVITTSTRTWALPTYNNHLYKQISSQSGASNDNHYFGYSTPWGYFDFNRFHCHFSPRDWQRLINNNWGFRPKRLNFKLFNIQVKEVTQNDGTTTIANNLTSTVQVFTDSEYQLPYVLGSAHQGCLPPFPADVFMVPQYGYLTLNNGSQAVGRSSFYCLEYFPSQMLRTGNNFTFSYTFEDVPFHSSYAHSQSLDRLMNPLIDQYLYYLSRTNTPSGTTTQSRLQFSQAGASDIRDQSRNWLPGPCYRQQRVSKTAADNNSDYSWTGATKYHLNGRDSLVNPGTAMASHKDDEEKYFPQSGVLIFGKQDSGKTNVDIEKVMITDEEEIRTTNPVATEQYGSVSTNLQSGNTQAATSDVNTQGVLPGMVWQDRDVYLQGPIWAKIPHTDGHFHPSPLMGGFGLKHPPPQILIKNTPVPANPSTTFSAAKFASFITQYSTGQVSVEIEWELQKENSKRWNPEIQYTSNYNKSVNVDFTVDTNGVYSEPRPIGTRYLTRNL

SEQ ID NO: 853 - protein, 738 aa, Artificial Sequence
  Synthetic Polypeptide
MAADGYLPDWLEDNLSEGIREWWALKPGAPKPKANQQKQDDGRGLVLPGYKYLGPFNGLDKGEPVNAADAAALEHDKAYDQQLQAGDNPYLRYNHADAEFQERLQEDTSFGGNLGRAVFQAKKRVLEPLGLVEEGAKTAPGKKRPVEPSPQRSPDSSTGIGKKGQQPARKRLNFGQTGDSESVPDPQPLGEPPAAPSGVGPNTMAAGGGAPMADNNEGADGVGSSSGNWHCDSTWLGDRVITASTRTWALPTYNNHLYKQISNGTSGGATNDNTYFGYSTPWGYFDFNRFHCHFSPRDWQRLINNNWGFRPKRLSFKLFNIQVKEVTQNEGTKTIANNLTSTIQVFTDSEYQLPYVLGSAHQGCLPPFPADVFTIPQYGYLTLNNGSQAVGRSSFYCLEYFPSQMLRTGNNFQFTYTFEDVPFHSSYAHSQSLDRLMNPLIDQYLYYLSRTQTTGGTANTQTLGFSQGGPNTMANQAKNWLPGPCYRQQRVSTTTGQNNNSNFAWTAGTKYHLNGRNSLANPGIAMATHKDDEERFFPSNGILIFGKQNAARDNADYSDVMLTSEEEIKTTNPVATEEYGIVADNLQQQNTAPQIGTVNSQGALPGMVWQNRDVYLQGPIWAKIPHTDGNFHPSPLMGGFGLKHPPPQILIKNTPVPADPPTTFNQSKLNSFITQYSTGQVSVEIEWELQKENSKRWNPEIQYTSNYYKSTSVDFAVNTEGVYSEPRPIGTRYLTRNL

SEQ ID NO: 854 - protein, 738 aa, Artificial Sequence
  Synthetic Polypeptide
MAADGYLPDWLEDNLSEGIREWWALKPGAPKPKANQQKQDDGRGLVLPGYKYLGPFNGLDKGGPVNAADAAALEHDKAYDQQLQAGDNPYLRYNHADAEFQERLQEDTSFGGNLGRAVFQAKKRVLEPLGLVEEGAKTAPGKKRPVEPSPQRSPDSSTGIGKKGQQPARKRLNFGQTGDSESVPDPQPLGEPPAAPSGVGPNTMAAGGGAPMADNNEGADGVGSSSGNWHCDSTWLGDRVITTSTRTWALPTYNNHLYKQISNGTSGGATNDNTYFGYSTPWGYFDFNRFHCHFSPRDWQRLINNNWGFRPKRLSFKLFNIQVKEVTQNEGTKTIANNLTSTIQVFTDSEYQLPYVLGSAHQGCLPPFPADVFMIPQYGYLTLNNGSQAVGRSSFYCLEYFPSQMLRTGNNFQFTYTFEDVPFHSSYAHSQSLDRLMNPLIDQYLYYLSRTQTTGGTANTQTLGFSQGGPNTMANQAKNWLPGPCYRQQRVSTTTGQNNNSNFAWTAGTKYHLNGRNSLANPGIAMATHKDDEERFFPSNGILIFGKQNAARDNADYSDVMLTSEEEIKTTNPVATEEYGIVADNLQQQNTAPQIGTVNSQGALPGMVWQNRDVYLQGPIWAKIPHTDGNFHPSPLMGGFGLKHPPPQILIKNTPVPADPPTTFNQSKLNSFITQYSTGQVSVEIEWELQKENSKRWNPEIQYTSNYYKSTSVDFAVNTEGVYSEPRPIGTRYLTRNL

SEQ ID NO: 855 - protein, 738 aa, Artificial Sequence
  Synthetic Polypeptide
MAADGYLPDWLEDNLSEGIREWWALKPGAPKPKANQQKQDDGRGLVLPGYKYLGPFNGLDKGEPVNAADAAALEHDKAYDQQLQAGDNPYLRYNHADAEFQERLQEDTSFGGNLGRAVFQAKKRVLEPLGLVEEGAKTAPGKKRPVEPSPQRSPDSSTGIGKKGQQPARKRLNFGQTGDSESVPDPQPLGEPPAAPSGVGPNTMAAGGGAPMADNNEGADGVGSSSGNWHCDSTWLGDRVITTSTRTWALPTYNNHLYRQISNGTSGGATNDNTYFGYSTPWGYFDFNRFHCHFSPRDWQRLINNNWGFRPKRLSFKLFNIQVKEVTQNEGTKTIANNLTSTIQVFTDSEYQLPYVLGSAHQGCLPPFPADVFMIPQYGYLTLNNGSQAVGRSSFYCLEYFPSQMLRTGNNFQFTYTFEDVPFHSSYAHSQSLDRLMNPLIDQYLYYLSRTQTTGGTANTQTLGFSQGGPNTMANQAKNWLPGPCYRQQRVSTTTGQNNNSNFAWTAGTKYHLNGRNSLANPGIAMATHKDDEERFFPSNGILIFGKQNAARDNADYSDVMLTSEEEIKTTNPVATEEYGIVADNLQQQNTAPQIGTVNSQGALPGMVWQNRDVYLQGPIWAKIPHTDGNFHPSPLMGGFGLKHPPPQILIKNTPVPADPPTTFNQSKLNSFITQYSTGQVSVEIEWELQKENSKRWNPEIQYTSNYYKSTSVDFAVNTEGVYSEPRPIGTRYLTRNL

SEQ ID NO: 856 - protein, 738 aa, Artificial Sequence
  Synthetic Polypeptide
MAADGYLPDWLEDNLSEGIREWWALKPGAPKPKANQQKQDDGRGLVLPGYKYLGPFNGLDKGEPVNAADAAALEHDKAYDQQLQAGDNPYLRYNHADAEFQERLQEDTSFGGNLGRAVFQAKKRVLEPLGLVEEGAKTAPGKKRPVEPSPQRSPDSSTGIGKKGQQPARKRLNFGQTGDSESVPDPQPLGEPPAAPSGVGPNTMAAGGGAPMADSNEGADGVGSSSGNWHCDSTWLGDRVITTSTRTWALPTYNNHLYKQISNGTSGGATNDNTYFGYSTPWGYFDFNRFHCHFSPRDWQRLINNNWGFRPKRLSFKLFNIQVKEVTQNEGTKTIANNLTSTIQVFTDSEYQLPYVLGSAHQGCLPPFPADVFMIPQYGYLTLNNGSQAVGRSSFYCLEYFPSQMLRTGNNFQFTYTFEDVPFHSSYAHSQSLDRLMNPLIDQYLYYLSRTQTTGGTANTQTLGFSQGGPNTMANQAKNWLPGPCYRQQRVSTTTGQNNNSNFAWTAGTKYHLNGRNSLANPGIAMATHKDDEERFFPSNGILIFGKQNAARDNADYSDVMLTSEEEIKTTNPVATEEYGIVADNLQQQNTAPQIGTVNSQGALPGMVWQNRDVYLQGPIWAKIPHTDGNFHPSPLMGGFGLKHPPPQILIKNTPVPADPPTTFNQSKLNSFITQYSTGQVSVEIEWELQKENSKRWNPEIQYTSNYYKSTSVDFAVNTEGVYSEPRPIGTRYLTRNL

SEQ ID NO: 857 - protein, 738 aa, Artificial Sequence
  Synthetic Polypeptide
MAADGYLPDWLEDNLSEGIREWWALKPGAPKPKANQQKQDDGRGLVLPGYKYLGPFNGLDKGEPVNAADAAALEHDKAYDQQLQAGDNPYLRYNHADAEFQERLQEDTSFGGNLGRAVFQAKKRVLEPLGLVEEGAKTAPGKKRPVEPSPQRSPDSSTGIGKKGQQPARKRLNFGQTGDSESVPDPQPLGEPPAAPSGVGPNTMAAGGGAPMADNNEGADGVGSSSGNWHCDSTWLGDRVITTSTRTWALPTYNNHLYKQISNGTSGGATNDNTYFGYSTPWGYFDFNRFHCHFSPRDWQRLINNNWGFRPKRLSFKLFNIQVKEVTQNEGTKTIANNLTSTIQVFTDSEYQLPYVLGSAHQGCLPPFPADVFMIPQYGYLTLNNGSQAMGRSSFYCLEYFPSQMLRTGNNFQFTYTFEDVPFHSSYAHSQSLDRLMNPLIDQYLYYLSRTQATGGTANTQTLGFSQGGPNTMANQAKNWLPGPCYRQQRVSTTTGQNNNSNFAWTAGTKYHLNGRNSLANPGIAMATHKDDEERFFPSNGILIFGKQNAARDNADYSDVMLTSEEEIKTTNPVATEEYGIVADNLQQQNTAPQIGTVNSQGALPGMVWQNRDVYLQGPIWAKIPHTDGNFHPSPLMGGFGLKHPPPQILIKNTPVPADPPTTFNQSKLNSFITQYSTGQVSVEIEWELQKENSKRWNPEIQYTSNYYKSTSVDFAVNTEGVYSEPRPIGTRYLTRNL

SEQ ID NO: 858 - protein, 738 aa, Artificial Sequence
  Synthetic Polypeptide
MAADGYLPDWLEDNLSEGIREWWALKPGAPKPKANQQKQDDGRGLVLPGYKYLGPFNGLDKGEPVNAADAAALEHDKAYDQQLQAGNNPYLRYNHADAEFQERLQEDTSFGGNLGRAVFQAKKRVLGPLGLVEEGAKTAPGKKRPVEPSPQRSPDSSTGIGKKGQQPARKRLNFGQTGDSESVPDPQPLGEPPAAPSGVGPNTMAAGGGAPMADNNEGADGVGSSSGNWHCDSTWLGDRVITTSTRTWALPTYNNHLYKQISNGTSGGATNDNTYFGYSTPWGYFDFNRFHCHFSPRDWQRLINNNWGFRPKRLSFKLFNIQVKEVTQNEGTKTIANNLTSTIQVFTDSEYQLPYVLGSAHQGCLPPFPADVFMIPQYGYLTLNNGSRAVGRSSFYCLEYFPSQMLRTGNNFQFTYTFEDVPFHSSYAHSQSLDRLMNPLIDQYLYYLSRTQTTGGTANTQTLGFSQGGPNTMANQAKNWLPGPCYRQQRVSTTTGQNNNSNFAWTAGTKYHLNGRNSLANPGIAMATHKDDEERFFPSNGILIFGKQNAARDNADYSDVMLTSEEEIKTTNPVATEEYGIVADNLQQQNTAPQIGTVNSQGALPGMVWQNRDVYLQGPIWAKIPHTDGNFHPSPLMGGFGLKHPPPQILIKNTPVPADPPTTFNQSKLNSFITQYSTGQVSVEIEWELQKENSKRWNPEIQYTSNYYKSTSVDFAVNTEGVYSEPRPIGTRYLTRNL

SEQ ID NO: 859 - protein, 738 aa, Artificial Sequence
  Synthetic Polypeptide
MAADGYLPDWLEDNLSEGIREWWALKPGAPKPKANQQKQDDGRGLVLPGYKYLGPFNGLDKGEPVNAADAAALEHDKAYDQQLQAGDNPYLRYNHADAEFQERLQEDTSFGGNLGRAVFQAKKRVLEPLGLVEEGAKTAPGKKRPVEPSPQRSPDSSTGIGKKGQQPARKRLNFGQTGDSESVPDPQPLGEPPAAPSGVGPNTMAAGGGAPMADNNEGADGVGSSSGNWHCDSTWLGDRVITTSTRTWALPTYNNHLYKQISNGTSGGATNDNTYFGYSTPWGYFDFNRFHCHFSPRDWQRLINNNWGFRPKRLSFKLFNIQVKEVTQNEGTKTIANNLTSTIQVFTDSEYQLPYVLGSAHQGCLPPFPADVFMIPQYGYLTLNNGSQAVGRSSFYCLEYFPSQMLRTGNNFQFTYTFEDVPFHSSYAHSQSLDRLMNPLIDQYLYYLSRTQTTGGTANTQTLGFSQGGPNTMANQAKNWLPGPCYRQQRVSTTTGQNNNSDFAWTAGTKYHLNGRNSLANPGIAMATHKDDEERFFPSNGILIFGKQNAARDNADYSDVMLTSEEEIKTTNPVATEEYGIVADNLQQQNTAPQIGTVNSQGALPGMVWQNRDVYLQGPVWAKIPHTDGNFHPSPLMGGFGLKHPPPQILIKNTPVPADPPTTFNQSKLNSFITQYSTGQVSVEIEWELQKENSKRWNPEIQYTSNYYKSTSVDFAVNTEGVYSEPRPIGTRYLTRNL

SEQ ID NO: 860 - protein, 738 aa, Artificial Sequence
  Synthetic Polypeptide
MAADGYLPDWLEDNLSEGIREWWALKPGAPKPKANQQKQDDGRGLVLPGYKYLGPFNGLDKGEPVNAADAAALEHDKAYDQQLQAGDNPYLRYNHADAEFQERLQEDTSFGGSLGRAVFQAKKRVLEPLGLVEEGAKTAPGKKRPVEPSPQRSPDSSTGIGKKGQQPARKRLNFGQTGDSESVPDPQPLGEPPAAPSGVGPNTMAAGGGAPMADNNEGADGVGSSSGNWHCDSTWLGDRVITTSTRTWALPTYNNHLYKQISNGTSGGATNDNTYFGYSTPWGYFDFNRFHCHFSPRDWQRLINNNWGFRPKRLSFKLFNIQVKEVTQNEGTKTIANNLTSTIQVFTDSEYQLPYVLGSAHQGCLPPFPADVFMIPQYGYLTLNNGSQAVGRSSFYCLEYFPSQMLRTGNNFQFTYTFEDVPFHSSYAHSQSLDRLMNPLIDQYLYYLSRTQTTGGTANTQTLGFSQGGPNTMANQAKNWLPGPCYRQQRVSTTTGQNNNSNFAWTAGTKYHLNGRNSLANPGIAMATHKDDEERFFPSNGILIFGKQNAARDNADYSDVMLTSEEEIKTTNPVATEEYGIVADNLQQQNTAPQIGTVNSQGALPGMVWQNRDVYLQGPIWAKIPHTDGNFHPSPLMGGFGLKHPPPQILIKNTPVPADPPTTFNQSKLNSFITQYSTGQVSVEIEWELQKENSKRWNPEIQYTSNYYKSTSVDFAVNTEGVYSEPRPIGTRYLTRNL

SEQ ID NO: 861 - protein, 738 aa, Artificial Sequence
  Synthetic Polypeptide
MAADGYLPDWLEDNLSEGIREWWALKPGAPKPKANQQKQDDGRGLVLPGYKYLGPFNGLDKGEPVNAADAAALEHDKAYDQQLQAGDNPYQRYNHADAEFQERLQEDTSFGGNLGRAVFQAKKRVLEPLGLVEEGAKTAPGKKRPVEPSPQRSPDSSTGIGKKGQQPARKRLNFGQTGDSESVPDPQPLGEPPAAPSGVGPNTMAAGGGAPMADNNEGADGVGSSSGNWHCDSAWLGDRVITTSTRTWALPTYNNHLYKQISNGTSGGATNDNTYFGYSTPWGYFDFNRFHCHFSPRDWQRLINNNWGFRPKRLSFKLFNIQVKEVTQNEGTKTIANNLTSTIQVFTDSEYQLPYVLGSAHQGCLPPFPADVFTIPQYGYLTLNNGSQAVGRSSFYCLEYFPSQMLRTGNNFQFTYTFEDVPFHSSYAHSQSLDRLMNPLIDQYLYYLSRTQTTGGTANTQTLGFSQGGPNTMANQAKNWLPGPCYRQQRVSTTTGQNNNSNFAWTAGTKYHLNGRNSLANPGIAMATHKDDEERFFPSNGILIFGKQNAARDNADYSDVMLTSEEEIKTTNPVATEEYGIVADNLQQQNTAPQIGTVNSQGALPGMVWQNRDVYLQGPIWAKIPHTDGNFHPSPLMGGFGLKHPPPQILIKNTPVPADPPTTFNQSKLNSFITQYSTGQVSVEIEWELQKENSKRWNPEIQYTSNYYKSTSVDFAVNTEGVYSEPRPIGTRYLTRNL

SEQ ID NO: 862 - protein, 738 aa, Artificial Sequence
  Synthetic Polypeptide
MAADGYLPDWLEDNLSEGIREWWALKPGAPKPKANQQKQDDGRGLVLPGYKYLGPFNGLDKGEPVNAADTAALEHDKAYDQQLQAGDNPYLRYNHADAEFQERLQEDTSFGGNLGRAVFQAKKRVLEPLGLVEEGAKTAPGKKRPVEPSPQRSPDSSTGIGKKGQQPARKRLNFGQTGDSESVPDPQPLGEPPAAPSGVGPNTMAAGGGAPMADNNEGADGVGSSSGNWHCDSTWLGDRVITTSTRTWALPTYNNHLYKQISNGTSGGATNDNTYFGYSTPWGYFDFNRFHCHFSPRDWQRLINNNWGFRPKRLSFKLFNIQVKEVTQNEGTKTIANNLTSTIQVFTDSEYQLPYVLGSAHQGCLPPFPADVFMIPQYGYLTLNNGSQAVGRSSFYCLEYFPSQMLRTGNNFQFTYTFEDVPFHSSYAHSQSLDRLMNPLIDQYLYYLSRTQTTGGTANTQTLGFSQGGPNTMANQAKNWLPGPCYRQQRVSTTTGQNNNSNFAWTAGTKYHLNGRNSLANPGIAMATHKDDEERFFPSNGILIFGKQNAARDNADYSDVMLTSEEEIKTTNPVATEEYGIVADNLQQQNTAPQIGTVNSQGALPGMVWQNRDVYLQGPIWAKIPHTDGNFHPSPLMGGFGLKHPPPQILIKNTPVPADPPTTFNQSKLNSFITQYSTGQVSVEIEWELQKENSKRWNPEIQYTSNYYKSTSVDFAVNTEGVYSEPRPIGTRYLTRNL

SEQ ID NO: 863 - protein, 738 aa, Artificial Sequence
  Synthetic Polypeptide
MAADGYLPDWLEDNLSEGIREWWALKPGAPKPKANQQKQDDGRGLVLPGYKYLGPFNGLDKGEPVNAADAAALEHDKAYDQQLQAGDNPYLRYNHADAEFQERLQEDTSFGGNLGRAVFQAKKRVLEPLGLVEEGAKTAPGKKRPVEPSPQRSPDSSTGIGKKGQQPARKRLNFGQTGDSESVPDPQPLGEPPAAPSGVGPNTMAAGGGAPMADNNEGADGVGSSSGNWHCDSTWLGDRVITTSTRTWALPTYNNHLYKQISNGTSGGATNDNTYFGYSTPWGYFDFNRFHCHFSPRDWQRLINNNWGFRPKRLSFKLFNIQVKEVTQNEGTKTIANNLTSTIQVFTDSEYQLPYVLGSAHQGCLPPFPADVFMIPQYGYLTLNNGSQAVGRSSFYCLEYFPSQMLRTGNNFQFTYTFEDVPFHSSYAHSQSLDRLMNPLIDQYLYYLSRTQTTGGTANTQTLGFSQGGPNTMANQAKNWLPGPCYRQQRVSTTTGQNNNSNFAWTAGTKYHLNGRNSLANPGIAMATHKDDEERFFPSNGILIFGKQNAARDNADYSDVMLTSEEEIKTTNPVATEEYGIVADNLQQQNAAPQIGTVNSQGALPGMVWQNRDVYLQGPIWAKIPHTDGNFHPSPLMGGFGLKHPPPQILIKNTPVPADPPTTFNQSKLNSFITQYSTGQVSVEIEWELQKENSKRWNPEIQYTSNYYKSTSVDFAVNTEGVYSEPRPIGTRYLTRNL

SEQ ID NO: 864 - protein, 738 aa, Artificial Sequence
  Synthetic Polypeptide
MAADGYLPDWLEDNLSEGIREWWALKPGAPKPKANQQKQDDGRGLVLPGYKYLGPFNGLDKGEPVNAADAAALEHDKAYDQQLQAGDNPYLRYNHADAEFQERLQEDTSFGGNLGRAVFQAKKRVLEPLGLVEEGAKTAPGKKRPVEPSPQRSPDSSTGIGKKGQQPARKRLNFGQTGDSESVPDPQPLGEPPAAPSGVGPNTMAAGGGAPMADNNEGADGVGSSSGNWHCDSTWLGDRVITTSTRTWALPTYNNHLYKQISNGTSGGATNDNTYFGYSTPWGYFDFNRFHCHFSPRDWQRLINNNWGFRPKRLSFKLFNIQVKEVTQNEGTKTIANNLTSTIQVFTDSEYQLPYVLGSAHQGCLPPFPADVFTIPQYGYLTLNNGSQAVGRSSFYCLEYFPSQMLRTGNNFQFTYTFEDVPFHSSYAHSQSLDRLMNPLIDQYLYYLSRTQTTGGTANTQTLGFSQGGPNTMANQAKNWLPGPCYRQQRVSTTTGRNNNSNFAWTAGTKYHLNGRNSLANPGIAMATHKDDEERFFPSNGILIFGKQNAARDNADYSDVMLTSEEEIKTTNPVATEEYGIVADNLQQQNTAPQIGTVNSQGALPGMVWQNRDVYLQGPIWAKIPHTDGNFHPSPLMGGFGLKHPPPQILIKNTPVPADPPTTFNQSKLNSFITQYSTGQVSVEIEWELQKENSKRWNPEIQYTSNYYKSTSVDFAVNTEGVYSEPRPIGTRYLTRNL

SEQ ID NO: 865 - protein, 738 aa, Artificial Sequence
  Synthetic Polypeptide
MAADGYLPDWLEDNLSEGIREWWALKPGAPKPKANQQKQDDGRGLVLPGYKYLGPFNGLDKGEPVNAADAAALEHDKAYDQQLQAGDNPYLRYNHADAEFQERLQEDTSFGGNLGRAVFQAKKRVLEPLGLVEEGAKTAPGKKRPVEPSPQRSPDSSTGIGKKGQQPARKRLNFGQTGDSESVPDPQPLGEPPAAPSGVGPNTMAAGGGAPMADNNEGADGVGSSSGNWHCDSTWLGDRVITTSTRTWALPTYNNHLYKQISNGTSGGATNDNTYFGYSTPWGYFDFNRFHCHFSPRDWQRLINNNWGFRPKRLSFKLFNIQVKEVTQNEGTKTIANNLTSTIQVFTDSEYQLPYVLGSAHQGCLPPFPADVFTIPQYGYLTLNNGSQAVGRSSFYCLEYFPSQMLRTGNNFQFTYTFEDVPFHSSYAHSQSLDRLMNPLIDQYLYYLSRTQTTGGTANTQTLGFSQGGPNTMANQAKNWLPGPCYRQQRVSTTTGQNNNSNFAWTAGTKYHLNGRNSLANPGIAMATHKDDEERFFPSNGILIFGKQNAARDNADYSDVVLTSEEEIKTTNPVATEEYGIVADNLQQQNTAPQIGTVNSQGALPGMVWQNRDVYLQGPIWAKIPHTDGNFHPSPLMGGFGLKHPPPQILIKNTPVPADPPTTFNQSKLNSFITQYSTGQVSVEIEWELQKENSKRWNPEIQYTSNYYKSTSVDFAVNTEGVYSEPRPIGTRYLTRNL

SEQ ID NO: 866 - protein, 738 aa, Artificial Sequence
  Synthetic Polypeptide
MAADGYLPDWLEDNLSEGIREWWALKPGAPKPKANQQKQDDGRGLVLPGYKYLGPFNGLDKGEPVNAADAAALEHDKAYDQQLQAGDNPYLRYNHADAEFQERLQEDTSFGGNLGRAVFQAKKRVLEPLGLVEEGAKTAPGKKRPVEPSPQRSPDSSTGIGKKGQQPARKRLNFGQTGDSESVPDPQPLGEPPAAPSGVGPNTMAAGGGAPMADNNEGADGVGSSSGNWHCDSTWLGDRVITTSTRTWALPTYNNHLYKQISNGTSGGATNDNTYFGYSTPWGYFDFNRFHCHFSPRDWQRLINNNWGFRPKRLSFKLFNIQVKEVTQNEGTKTIANNLTSTIQVFTDSEYQLPYVLGSAHQGCLPPFPADVFMIPQYGYLTLNNGSQAVGRSSFYCLEYFPSQMLRAGNNFQFTYTFEDVPFHSSYAHSQSLDRLMNPLIDQYLYYLSRTQTTGGTANTQTLGFSQGGPNTMANQAKNWLPGPCYRQQRVSTTTGQNNNSNFAWTAGTKYHLNGRNSLANPGIAMATHKDDEERFFPSNGILIFGKQNAARDNADYSDVMLTSEEEIKTTNPVATEEYGIVADNLQQQNTAPQIGTVDSQGALPGMVWQNRDVYLQGPIWAKIPHTDGNFHPSPLMGGFGLKHPPPQILIKNTPVPADPPTTFNQSKLNSFITQYSTGQVSVEVEWELQKENSKRWNPEIQYTSNYYKSTSVDFAVNTEGVYSEPRPIGTRYLTRNL

SEQ ID NO: 867 - protein, 738 aa, Artificial Sequence
  Synthetic Polypeptide
MAADGYLPDWLEDNLSEGIREWWALKPGAPKPKANQQKQDDGRGLVLPGYKYLGPFNGLDKGEPVNAADAAALEHDKAYDQQLQAGDNPYLRYNHADAEFQERLQEDTSFGGSLGRAVFQAKKRVLEPLGLVEEGAKTAPGKKRPVEPSPQRSPDSSTGIGKKGQQPARKRLNFGQTGDSESVPDPQPLGEPPAAPSGVGPNTMAAGGGAPMADNNEGADGVGSSSGNWHCDSTWLGDRVITTSTRTWALPTYNNHLYKQISNGTSGGATNDNTYFGYSTPWGYFDFNRFHCHFSPRDWQRLINNNWGFRPKRLSFKLFNIQVKEVTQNEGTKTIANNLTSTIQVFTDSEYQLPYVLGSAHQGCLPPFPADVFMIPQYGYLTLNNGSQAVGRSSFYCLEYFPSQMLRTGNNFQFTYTFEDVPFHSSYAHSQSLDRLMNPLIDQYLYYLSRTQTTGGTANTQTLGFSQGGPNTMANQAKNWLPGPCYRQQRVSTTTGQNNNSNFAWTAGTKYHLNGRNSLANPGIAMATHKDDEERFFPSNGILIFGKQNAARDNADYSDVMLTSEEEIKTTNPVATEEYGIVADNLQQQNTAPQIGTVNSQGALPGMVWQNRDVYLQGPIWAKIPHTDGNFHPSPLMGGFGLKHPPPQILIKNTPVPADPPTTFNQSKLNSFITQYSTGQVSVEIEWELQKENSKRWNPEIQYTSNYYKSTSVDFAVNTEGVYSEPRPIGTRHLTRNL

SEQ ID NO: 868 - protein, 738 aa, Artificial Sequence
  Synthetic Polypeptide
MAADGYLPDWLEDNLSEGIREWWALKPGAPKPKANQQKQDDGRGLVLPGYKYLGPFNGLDKGEPVNAADAAALEHDKAYDQQLQAGDNPYLRYNHADAEFQERLQEDTSFGGNLGRAVFQAKKRVLEPLGLVEEGAKTAPGKKRPVEPSPQRSPDSSTGIGKKGQQPARKRLNFGQTGDSESVPDPQPLGEPPAAPSGVGPNTMAAGGGAPMADNNEGADGVGSSSGNWHCDSTWLGDRVITTSTRTWALPTYNNHLYKQISNGTSGGATNDNTYFGYSTPWGYFDFNRFHCHFSPRDWQRLINNNWGFRPKRLSFKLFNIQVKEVTQNEGTKTIANNLTSTIQVFTDSEYQLPYVLGSAHQGCLPPFPADVFTIPQYGYLTLNNGSQAVGRSSFYCLEYFPSQMLRTGNNFQFTYTFEDVPFHSSYAHSQSLDRLMNPLIDQYLYYLSRTQTTGGTANTQTLGFSQGGPNTMANQAKNWLPGPCYRQQRVSTTTGQNNNSNFAWTAGTKYHLNGRNSLANPGIAMVTHKDDEERFFPSNGILIFGKQNAARDNADYSDVMLTSEEEIKTTNPVATEEYGIVADNLQQQNTAPQIGTVNSQGALPGMVWQNRDVYLQGPIWAKIPHTDGNFHPSPLMGGFGLKHPPPQILIKNTPVPADPPTTFNQSKLNSFITQYSTGQVSVEIEWELQKENSKRWNPEIQYTSNYYKSTSVDFAVNTEGVYSEPRPIGTRYLTRNL

SEQ ID NO: 869 - protein, 735 aa, Artificial Sequence [sequence omitted]

SEQ ID NO: 870 - protein, 736 aa, Artificial Sequence
  Synthetic Polypeptide
MAADGYLPDWLEDNLSEGIREWWALKPGVPQPKANQQHQDNRRGLVLPGYKYLGPGNGLDKGEPVNEADAAALEHDKAYDQQLKAGDNPYLKYNHADAEFQERLQEDTSFGGNLGRAVFQAKKRILEPLGLVEEAAKTAPGKKGAVDQSPQEPDSSSGVGKSGKQPARKRLNFGQTGDSESVPDPQPLGEPPAAPTSLGSNTMASGGGAPMADNNEGADGVGNSSGNWHCDSQWLGDRVITTSTRTWALPTYNNHLYKQISSQSGASNDNHYFGYSTPWGYFDFNRFHCHFSPRDWQRLINNNWGFRPKKLSFKLFNIQVRGVTQNDGTTTIANNLTSTVQVFTDSEYQLPYVLGSAHQGCLPPFPADVFMVPQYGYLTLNNGSQAVGRSSFYCLEYFPSQMLRTGNNFQFSYTFEDVPFHSSYAHSQSLDRLMNPLIDQYLYYLNRTQGTTSGTTNQSRLLFSQAGPQSMSLQARNWLPGPCYRQQRLSKTANDNNNSNFPWTAASKYHLNGRDSLVNPGPAMASHKDDEEKFFPMHGNLIFGKEGTTASNAELDNVMITDEEEIRTTNPVATEQYGTVANNLQSSNTAPTTGTVNHQGALPGMVWQDRDVYLQGPIWAKIPHTDGHFHPSPLMGGFGLKHPPPQIMIKNTPVPANPPTTFSPAKFASFITQYSTGQVSVEIEWELQKENSKRWNPEIQYTSNYNKSVNVDFTVDTNGVYSEPRPIGTRYLTRNL

SEQ ID NO: 871 - protein, 738 aa, Artificial Sequence; identical to SEQ ID NO: 829
  Synthetic Polypeptide

SEQ ID NO: 872 - DNA, 23 bp, Artificial Sequence
  Synthetic Polynucleotide
gccatgccggggttctacgagat

SEQ ID NO: 873 - DNA, 28 bp, Artificial Sequence
  Synthetic Polynucleotide
acaggagaccaaagttcaactgaaacga

SEQ ID NO: 874 - DNA, 25 bp, Artificial Sequence
  Synthetic Polynucleotide
gactgcatctttgaacaataaatga

SEQ ID NO: 875 - DNA, 28 bp, Artificial Sequence
  Synthetic Polynucleotide
gaaacgaattaaccggtttattgattaa

SEQ ID NO: 876 - DNA, 2208 bp, Artificial Sequence
  Synthetic Polynucleotide
atggctgccgatggttatcttccagattggctcgaggacactctctctgaaggaataagacagtggtggaagctcaaacctggcccaccaccgccaaagcccgcagagcggcataaggacgacagcaggggtcttgtgcttcctgggtacaagtacctcggacccttcaacggactcgacaaaggagagccggtcaacgaggcagacgccgcggccctcgagcacgacaaggcctacgaccggcagctcgacagcggagacaacccgtacctcaagtacaaccacgccgacgcggagtttcaggagcgccttaaagaagatacgtcttttgggggcaacctcgcaagagcagtattccaggcgaaaaagagggttcttgaacctctgggcctggttgaggagcctgttaagacggctccgggaaaaaagaggccggtagagcactctcctgcggagccagattcctcctccggaactggaaagtcgggccaacagcctgcaagaaagagattgaattttggtcagactggagacgcagactccgtacctgacccccagcctctcggacagccaccagcagccccctctggtctgggaactaatacgatggcttcaggcagtggcgcaccaatggcagacaataacgagggcgccgacggagtgggtaattcctcgggaaattggcattgcgattccacatggatgggcgacagagtcatcaccaccagcacccgcacctgggctctgcccacctacaacaaccatctgtacaagcaaatttccagccagtctggagccagcaacgacaaccactactttggctacagcaccccttgggggtattttgacttcaacagattccactgccacttctccccacgtgactggcaaagactcatcaacaacaattggggattccggcccaaaagactcaacttcaagctctttaacattcaagtcaaggaggtcacgcagaatgacggtacgacgacgattgccaataaccttaccagcacggttcaggtgtttactgactcggagtaccagctcccgtacgtcctcggctcggcgcatcaaggatgcctcccgccgttcccagcagacgtcttcatggtgccacagtatggatacctcaccctgaacaacgggagtcaggcggtaggacgctcttcattttactgcctggagtactttccttctcagatgctgcgtaccggaaacaactttaccttcagctacacctttgaggacgttccttttcacagcagctacgctcacagccagagtttggaccgtcttatgaatcctctcatcgaccagtacctgtattacttgagcagaacaaacactccaagcggaaccactacgcagtccaggcttcagttttctcaagccggagcgagtgacattcgggaccagtctaggaactggcttcctagaccctgttaccgccagcagcgagtatcaaagacagctgcggacaacaacaacagtgattactcgtggactggagctaccaagtatcacctcaatggaagagactctctggtgaatccgggcacagccatggccagccacaaggacgatgaagaaaagtattttcctcagagcggggttctcatcttcggaaaacaagactcgggaaaaactaatgtggacattgaaaaggtcatgattacagacgaagaggaaatcaggaccaccaatcccgtggctacggagcagtatggttctgtatctaccaatctccagagcggcaacacacaagcagctacctcagatgtcaacacacaaggcgttcttccaggcatggtccggcaggacagagacgtgtacctgcagggacccatctgggcaaagattccacacacggacggacattttcacccttctcctcttatgggaggatttggactgaagcaccctcccccgcagattctcatcaagaataccccggtacctgcgaatccttctaccaccttcagcgcggcaaagtttgcttccttcatcacacagtactccacggggcaggtcagcgtggagatcgagtgggagccgcagaaagagaacagcaaacgctggaaccccgagatccagtatacctccaactacaacaagtctgttaatgtggactttactgtggacactaatggcgtgtattcagagcctcgccccattggcacaagatacctgactcgtaatctgtaa

SEQ ID NO: 877 - DNA, 2208 bp, Artificial Sequence
  Synthetic Polynucleotide
atggctgccgatggttatcttccagattggctcgaggacactctctctgaaggaataagacagtggtggaagctcaaacctggcccaccaccgccaaagcccgcagagcggcataaggacgacagcaggggtcttgtgcttcctgggtacaagtacctcggacccttcaacggactcgacaaaggagagccggtcaacgaggcagacgccgcggccctcgagcacgacaaggcctacgaccggcagctcgacagcggagacaacccgtacctcaagtacaaccacgccgacgcggagtttcaggagcgccttaaagaagatacgtcttttgggggcaacctcgcaagagcagtattccaggcgaaaaagagggttcttgaacctctgggcctggttgaggagcctgttaagacggctccgggaaaaaagaggccggtagagcactctcctgcggagccagattcctcctccggaactggaaagtcgggccaacagcctgcaagaaagagattgaattttggtcagactggagacgcagactccgtacctgacccccagcctctcggacagccaccagcagccccctctggtctgggaactaatacgatggcttcaggcagtggcgcaccaatggcagacaataacgagggcgccgacggagtgggtaattcctcgggaaattggcattgcgattccacatggatgggcgacagagtcatcaccaccagcacccgcacctgggctctgcccacctacaacaaccatctgtacaagcaaatttccagccagtctggagccagcaacgacaaccactactttggctacagcaccccttgggggtattttgacttcaacggattccactgccacttctccccacgtgactggcaaagactcatcaacaacaattggggattccggcccaaaagactcaacttcaagctctttaacattcaagtcaaggaggtcacgcagaatgacggtacgacgacgattgccaataaccttaccagcacggttcaggtgtttactgactcggagtaccagctcccgtacgtcctcggctcggcgcatcaaggatgcctcccgccgttcccagcagacgtcttcatggtgccacagtatggatacctcaccctgaacaacgggagtcaggcggtaggacgctcttcattttactgcctggagtactttccttctcagatgctgcgtaccggaaacaactttaccttcagctacacctttgaggacgttccttttcacagcagctacgctcacagccagagtttggaccgtcttatgaatcctctcatcgaccagtacctgtattacttgagcagaacaaacactccaagcggaaccactacgcagtccaggcttcagttttctcaagccggagcgagtgacattcgggaccagtctaggaactggcttcctggaccctgttaccgccagcagcgagtatcaaagacagctgcggacaacaacaacagtgattactcgtggactggagctaccaagtatcacctcaatggaagagactctctggtgaatccgggcacagccatggccagccacaaggacgatgaagaaaagtattttcctcagagcggggttctcatcttcggaaaacaagactcgggaaaaactaatgtggacattgaaaaggtcatgattacagacgaagaggaaatcaggaccaccaatcccgtggctacggagcagtatggttctgtatctaccaatctccagagcggcgacacacaagcagctacctcagatgtcaacacacaaggcgttcttccaggcatggcccggcaggacagagacgtgtacctgcagggacccatctgggcaaagattccacacacggacggacattttcacccttctcctcttatgggaggatttggactgaagcaccctcccccgcagattctcatcaagaataccccggtacctgcgaatccttctaccaccttcagcgcggcaaagtttgcttccttcatcacacagtactccacggggcaggtcagcgtggagatcgagtgggagccgcagaaagagaacagcaaacgctggaaccccgagatccagtatacctccaactacaacaagtctgttaatgtggactttactgtggacactaatggcgtgtattcagagcctcgccccattggcacaagatacctgactcgtaatctgtaa

SEQ ID NO: 878 - DNA, 2208 bp, Artificial Sequence
  Synthetic Polynucleotide
atggctgccgatggttatcttccagattggctcgaggacactctctctgaaggaataagacagtggtggaagctcaaacctggcccaccaccgccaaagcccgcagagcggcataaggacgacagcaggggtcttgtgcttcctgggtacaagtacctcggacccttcaacggactcgacaaaggagagccggtcaacgaggcagacgccgcggccctcgagcacgacaaggcctacgaccggcagctcgacagcggagacaacccgtacctcaagtacaaccgcgccgacgcggagtttcaggagcgccttaaagaagatacgtcttttgggggcaacctcgcaagagcagtattccaggcgaaaaagagggttcttgaacctctgggcctggttgaggagcctgttaagacggctccgggaaaaaagaggccggtagagcactctcctgcggagccagattcctcctccggaactggaaagtcgggccaacagcctgcaagaaagagattgaattttggtcagactggagacgcagactccgtacctgacccccagcctctcggacagccaccagcagccccctctggtctgggaactaatacgatggcttcaggcagtggcgcaccaatggcagacaataacgagggcgccgacggagtgggtaattcctcgggaaattggcattgcgattccacatggatgggcgacagagtcatcaccaccagcacccgcacctgggctctgcccacctacaacaaccatctgtacaagcaaatttccagccagtctggagccagcaacgacaaccactactttggctacagcaccccttgggggtattttgacttcaacagattccactgccacttctccccacgtgactggcaaagactcatcaacaacaattggggattccggcccaaaagactcaacttcaagctctttaacattcaagtcaaggaggtcacgcagaatgacggtacgacgacgattgccaataaccttaccagcacggttcaggtgtttactgactcggagtaccagctcccgtacgtcctcggctcggcgcatcaaggatgcctcccgccgttcccagcagacgtcttcatggtgccacagtatggatacctcaccctgaacaacgggagtcaggcggtaggacgctcttcattttactgcctggagtactttccttctcagatgctgcgtaccggaaacaactttaccttcagctacacctttgaggacgttccttttcacagcagctacgctcacagccagagtttggaccgtcttatgaatcctctcatcgaccagtacctgtattacttgagcagaacaaacactccaagcggaaccactacgcagtccaggcttcagttttctcaagccggagcgagtgacattcgggaccagtctaggaactggcttcctggaccctgttaccgccagcagcgagtatcaaagacagctgcggacaacaacaacagtgattactcgtggactggagctaccaagtatcacctcaatggaagagactctctggtgaatccgggcacagccatggccagccacaaggacgatgaagaaaagtattttcctcagagcggggttctcatcttcggaaaacaagactcgggaaaaactaatgtggacattgaaaaggtcatgattacagacgaagaggaaatcaggaccaccaatcccgtggctacggagcagtatggttctgtatctaccaatctccagagcggcaacacacaagcagctacctcagatgtcaacacacaaggcgttcttccaggcatggtccggcaggacagagacgtgtacctgcagggacccatctgggcaaagattccacacacggacggacattttcacccttctcctcttatgggaggatttggactgaagcaccctcccccgcagattctcatcaagaataccccggtacctgcgaatccttctaccaccttcagcgcggcaaagtttgcttccttcatcacacagtactccacggggcaggtcagcgtggagatcgagtgggagccgcagaaagagaacagcaaacgctggaaccccgagatccagtatacctccaactacaacaagtctgttaatgtggactttactgtggacactaatggcgtgtattcagagcctcgccccattggcacaagatacctgactcgtaatctgtaa

SEQ ID NO: 879 - DNA, 2208 bp, Artificial Sequence
  Synthetic Polynucleotide
atggctgccgatggttatcttccagattggctcgaggacactctctctgaaggaataagacagtggtggaagctcaaacctggcccaccaccgccaaagcccgcagagcggcataaggacgacagcaggggtcttgtgcttcctgggtacaagtacctcggacccttcaacggactcgacaaaggagagccggtcaacgaggcagacgccgcggccctcgagcacgacaaggcctacgaccggcagctcgacagcggagacaacccgtacctcaagtacaaccacgccgacgcggagtttcaggagcgccttaaagaagatacgtcttttgggggcaacctcgcaagagcagtattccaggcgaaaaagagggttcttgaacctctgggcctggttgaggagcctgttaagacggctccgggaaaaaagaggccggtagagcactctcctgcggagccagattcctcctccggaactggaaagtcgggccaacagcctgcaagaaagagattgaattttggtcagactggagacgcagactccgtacctgacccccagcctctcggacagccaccagcagccccctctggtctgggaactaatacgatggcttcaggcagtggcgcaccaatggcagacaataacgagggcgccgacggagtgggtaattcctcgggaaattggcattgcgattccacatggatgggcgacagagtcatcaccaccagcacccgcacctgggctctgcccacctacaacaaccatctgtacaagcaaatttccagccagtctggagccagcaacgacaaccactacttcggctacagcaccccttgggggtattttgacttcaacagattccactgccacttctccccacgtgactggcaaagactcatcaacaacaattggggattccggcccaaaagactcaacttcaagctctttaacattcaagtcaaggaggtcacgcagaatgacggtacgacgacgattgccaataaccttaccagcacggttcaggtgtttactgactcggagtaccagctcccgtacgtcctcggctcggcgcatcaaggatgcctcccgccgttcccagcagacgtcttcatggtgccacagtatggatacctcaccctgaacaacgggagtcaggcggtaggacgctcttcattttactgcctggagtactttccttctcagatgctgcgtaccggaaacaactttaccttcagctacacctttgaggacgttccttttcacagcagctacgctcacagccagagtttggaccgtcttatgaatcctctcatcgaccagtacctgtattacttgagcagaacaaacactccaagcggaaccactacgcagtccaggcttcagttttctcaagccggagcgagtgacattcgggaccagtctaggaactggcttcctggaccctgttaccgccagcagcgagtatcaaagacagctgcggacaacaacaacagtgattactcgtggactggagctaccaagtatcacctcaatggaagagactctctggtgaatccgggcacagccatggccagccacaaggacgatgaagaaaagtattttcctcagagcggggttctcatcttcggaaaacaagactcgggaaaaactaatgtggacattgaaaaggtcatgattacagacgaagaggaagtcaggaccaccaatcccgtggctacggagcagtatggttctgtatctaccaatctccagagcggcaacacacaagcagctacctcagatgtcaacacacaaggcgttcttccaggcatggtccggcaggacagagacgtgtacctgcagggacccatctgggcaaagattccacacacggacggacattttcacccttctcctcttatgggaggatttggactgaagcaccctcccccgcagattctcatcaagaataccccggtacctgcgaatccttctaccaccttcagcgcggcaaagtttgcttccttcatcacacagtactccacggggcaggtcagcgtggagatcgagtgggagccgcagaaagagaacagcaaacgctggaaccccgagatccagtatacctccaactacaacaagtctgttaatgtggactttactgtggacactaatggcgtgtattcagagcctcgccccattggcacaagatacctgactcgtaatctgtaa

SEQ ID NO: 880 - DNA, 2208 bp, Artificial Sequence
  Synthetic Polynucleotide
atggctgccgatggttatcttccagattggctcgaggacactctctctgaaggaataagacagtggtggaagctcaaacctggcccaccaccgccaaagcccgcagagcggcataaggacgacagcaggggtcttgtgcttcctgggtacaagtacctcggacccttcaacggactcgacaaaggagagccggtcaacgaggcagacgccgcggccctcgagcacgacaaggcctacgaccggcagctcgacagcggagacaacccgtacctcaagtacaaccacgccgacgcggagtttcaggagcgccttaaagaagatacgtcttttgggggcaacctcgcaagagcagtattccaggcgaaaaagagggttcttgaacctctgggcctggttgaggagcctgttaagacggctccgggaaaaaagaggccggtagagcactctcctgcggggccagattcctcctccggaactggaaagtcgggccaacagcctgcaagaaagagattgaattttggtcagactggagacgcagactccgtacctgacccccagcctctcggacagccaccagcagccccctctggtctgggaactaatacgatggcttcaggcagtggcgcaccaatggcagacaataacgagggcgccgacggagtgggtaattcctcgggaaattggcattgcgattccacatggatgggcgacagagtcatcaccaccagcacccgcacctgggctctgcccacctacaacaaccatctgtacaagcaaatttccagccagtctggagccagcaacgacaaccactactttggctacagcaccccttgggggtattttgacttcaacagattccactgccacttctccccacgtgactggcaaagactcatcaacaacaattggggattccggcccaaaagactcaacttcgagctctttaacattcaagtcaaggaggtcacgcagaatgacggtacgacgacgattgccaataaccttaccagcacggttcaggtgtttactgactcggagtaccagctcccgtacgtcctcggctcggcgcatcaaggatgcctcccgccgttcccagcagacgtcttcatggtgccacagtatggatacctcaccctgaacaacgggagtcaggcggtaggacgctcttcattttactgcctggagtactttccttctcagatgctgcgtaccggaaacaactttaccttcagctacacctttgaggacgttccttttcacagcagctacgctcacagccagagtttggaccgtctcatgaatcctctcatcgaccagtacctgtattacttgagcagaacaaacactccaagcggaaccactacgcagtccaggcttcagttttctcaagccggagcgagtgacattcgggaccagtctaggaactggcttcctggaccctgttaccgccagcagcgagtatcaaagacagctgcggacaacaacaacagtgattactcgtggactggagctaccaagtatcacctcaatggaagagactctctggtgaatccgggcacagccatggccagccacaaggacgatgaagaaaagtattttcctcagagcggggttctcatcttcggaaaacaagactcgggaaaaactaatgtggacattgaaaaggtcatgattacagacgaagaggaaatcaggaccaccaatcccgtggctacggagcagtatggttctgtatctaccaatctccagagcggcaacacacaagcagctacctcagatgtcaacacacaaggcgttcttccaggcatggtctggcaggacagagacgtgtacctgcagggacccatctgggcaaagattccacacacggacggacactttcacccttctcctcttatgggaggatttggactgaagcaccctcccccgcagattctcatcaagagtaccccggtacctgcgaatccttctaccaccttcagcgcggcaaagtttgcttccttcatcacacagtactccacggggcaggtcagcgtggagatcgagtgggagctgcagaaagagaacagcaaacgctggaaccccgagatccagtatacctccaactacaacaagtctgttaatgtggactttactgtggacactaatggcgtgtattcagagcctcgccccattggcacaagatacctgactcgtaatctgtaa

SEQ ID NO: 881 - DNA, 2208 bp, Artificial Sequence
  Synthetic Polynucleotide
atggctgccgatggttatcttccagattggctcgaggacactctctctgaaggaataagacagtggtggaagctcaaacctggcccaccaccgccaaagcccgcagagcggcataaggacgacagcaggggtcttgtgcttcctgggtacaagtacctcggacccttcaacggactcgacaaaggagagccggtcaacgaggcagacgccgcggccctcgagcacgacaaggcctacgaccggcagctcgacagcggagacaacccgtacctcaagtacaaccacgccgacgcggagtttcaggagcgccttaaagaagatacgtcttttgggggcaacctcgcaagagcagtattccaggcgaaaaagagggttcttgaacctctgggcctggttgaggagcctgttaagacggctccgggaaaaaagaggccggtagagcactctcctgcggggccagattcctcctccggaactggaaagtcgggccaacagcctgcaagaaagagattgaattttggtcagactggagacgcagactccgtacctgacccccagcctctcggacagccaccagcagccccctctggtctgggaactaatacgatggcttcaggcagtggcgcaccaatggcagacaataacgagggcgccgacggagtgggtaattcctcgggaaattggcattgcgattccacgtggatgggcgacagagtcatcaccaccagcacccgcacctgggctctgcccacctacaacaaccatctgtacaagcaaatttccagccagtctggagccagcaacgacaaccactactttggctacagcaccccttgggggtattttgacttcaacagattccactgctacttctccccacgtgactggcaaagactcatcaacaacaattggggattccggcccaaaagactcaacttcgagctctttaacattcaagtcaaggaggtcacgcagaatgacggtacgacgacgattgccaataaccttaccagcacggttcaggtgtttactgactcggagtaccagctcccgtacgtcctcggctcggcgcatcaaggatgcctcccgccgttcccagcagacgtcttcatggtgccacagtatggatacctcaccctgaacaacgggagtcaggcggtaggacgctcttcattttactgcctggagtactttccttctcagatgctgcgtaccggaaacaactttaccttcagctacacctttgaggacgttccttttcacagcagctacgctcacagccagagtttggaccgtctcatgaatcctctcatcgaccagtacctgtattacttgagcagaacaaacactccaagcggaaccactacgcagtccaggcttcagttttctcaagccggagcgagtgacattcgggaccagtctaggaactggcttcctggaccctgttaccgccagcagcgagtatcaaagacagctgcggacaacaacaacagtgattactcgtggactggagctaccaagtatcacctcaatggaagagactctctggtgaatccgggcacagccatggccagccacaaggacgatgaagaaaagtattttcctcagagcggggttctcatcttcggaaaacaagactcgggaaaaactaatgtggacattgaaaaggtcatgattacagacgaagaggaaatcaggaccaccaatcccgtggctacggagcagtatggttctgtatctaccaatctccagagcggcaacacacaagcagctacctcagatgtcaacacacaaggcgttcttccaggcatggtctggcaggacagagacgtgtacctgcagggacccatctgggcaaagattccacacacggacggacactttcacccttctccacttatgggaggatttggactgaagcaccctcccccgcagattctcatcaagagtaccccggtacctgcgaatccttctaccaccttcagcgcggcaaagtttgcttccttcatcacacagtactccacggggcaggtcagcgtggagatcgagtgggagctgcagaaagagaacagcaaacgctggaaccccgagatccagtatacctccaactacaacaagtccgttaatgtggactttactgtggacactaatggcgtgtattcagagcctcgccccattggcacaagatacctgactcgtaatctgtaa

SEQ ID NO: 882 - DNA, 2205 bp, Artificial Sequence
  Synthetic Polynucleotide
atggctgccgatggttatcttccagattggctcgaggacactctctctgaaggaataagacagtggtggaagctcaaacctggcccaccaccgccaaagcccgcagagcggcataaggacgacagcaggggtcttgtgcttcctgggtacaagtacctcggacccttcaacggactcgacaaaggagagccggtcaacgaggcagacgccgcggccctcgagcacgacaaggcctacgaccggcagctcgacagcggagacaacccgtacctcaagtacaaccacgccgacgcggagtttcaggagcgccttaaagaagatacgtcttttgggggcaacctcgcaagagcagtattccaggcgaaaaagagggttcttgaacctctgggcctggttgaggagcctgttaagacggctccgggaaaaaagaggccggtagagcactctcctgcggagccagattcctcctccggaactggaaagtcgggccaacagcctgcaagaaagagattgaattttggtcagactggagacgcagactccgtacctgacccccagcctctcggacagccaccagcagccccctctggtctgggaactaatacgatggcttcaggcagtggcgcaccaatggcagacaataacgagggcgccgacggagtgggtaattcctcgggaaattggcattgcgattccacatggatgggcgacagagtcatcaccaccagcacccgcacctgggctctgcccacctacaacaaccatctgtacaagcaaatttccagccagtctggagccagcaacgacaaccactactttggctacagcaccccttgggggtattttgacttcaacagattccactgccacttctccccacgtgactggcaaagactcatcaacaacaattggggattccggcccaaaagactcaacttcaagctctttaacattcaagtcaaggaggtcacgcagaatgacggtacgacgacgattgccaataaccttaccagcacggttcaggtgtttactgactcggagtaccagctcccgtacgtcctcggctcggcgcatcaaggatgcctcccgccgttcccagcagacgtcttcatggtgccacagtatggatacctcaccctgaacaacgggagtcaggcggtaggacgctcttcattttactgcctggagtactttccttctcagatgctgcgtaccggaaacaactttaccttcagctacacctttgaggacgttccttttcacagcagctacgctcacagccagagtttggaccgtcttatgaatcctctcatcgaccagtacctgtattacttgagcagaacaaacactccaagcggaaccactacgcagtccaggcttcagttttctcaagccggagcgagtgacattcgggaccagtctaggaactggcttcctggaccctgttaccgccagcagcgagtatcaaagacagctgcggacaacaacagtgattactcgtggactggagctaccaagtatcacctcaatggaagagactctctggtgaatccgggcacagccatggccagccacaaggacgatgaagaaaagtattttcctcagagcggggttctcatcttcggaaaacaagactcgggaaaaactaatgtggacattgaaaaggtcatgattacagacgaagaggaaatcaggaccaccaatcccgtggctacggagcagtatggttctgtatctaccaatctccagagcggcaacacacaagcagctacctcagatgtcaacacacaaggcgttcttccaggcatggtccggcaggacagagacgtgtacctgcagggacccatctgggcaaagattccacacacggacggacattttcacccttctcctcttatgggaggatttggactgaagcaccctcccccgcagattctcatcaagaataccccggtacctgcgaatccttctaccaccttcagcgcggcaaagtttgcttccttcatcacacagtactccacggggcaggtcagcgtggagatcgagtgggagccgcagaaagagaacagcaaacgctggaaccccgagatccagtatacctccaactacaacaagtctgttaatgtggactttactgtggacactaatggcgtgtattcagagcctcgccccattggcacaagatacctgactcgtaatctgtaa

SEQ ID NO: 883 - DNA, 2208 bp, Artificial Sequence
  Synthetic Polynucleotide
atggctgccgatggttatcttccagattggctcgaggacactctctctgaaggaataagacagtggtggaagctcaaacctggcccaccaccgccaaagcccgcagagcggcataaggacgacagcaggggtcttgtgcttcctgggtacaagtgcctcggacccttcaacggactcgacaaaggagagccggtcaacgaggcagacgccgcggccctcgagcacgacaaggcctacgaccggcagctcgacagcggagacaacccgtacctcaagtacaaccacgccgacgcggagtttcaggagcgccttaaagaagatacgtcttttgggggcaacctcgcaagagcagtattccaggcgaaaaagagggttcttgaacctctgggcctggttgaggagcctgttaagacggctccgggaaaaaagaggccggtagagcactctcctgcggagtcagattcctcctccggaactggaaagtcgggccaacagcctgcaagaaagagattgaattttggtcagactggagacgcagactccgtacctgacccccagcctctcggacagccaccagcagccccctctggtctgggaactaatacgatggcttcaggcagtggcgcaccaatggcagacaataacgagggcgccgacggagtgggtaattcctcgggaaattggcattgcgattccacatggatgggcgacagagtcatcaccaccagcacccgcacctgggctctgcccacctacaacaaccatctgtacaagcaaatttccagccagtctggagccagcaacgacaaccactactttggctacagcaccccttgggggtattttgacttcaacagattccactgccacttctccccacgtgactggcaaagactcatcaacaacaattggggattccggcccaaaagactcaacttcaagctctttaacattcaagtcaaggaggtcacgcagaatgacggtacgacgacgattgccaataaccttaccagcacggttcaggtgtttactgactcggagtaccagctcccgtacgtcctcggctcggcgcatcaaggatgcctcccgccgttcccagcagacgtcttcatggtgccacagtatggatacctcaccctgaacaacgggagtcaggcggtaggacgctcttcattttactgcctggagtactttccttctcagatgctgcgtaccggaaacaactttaccttcagctacacctttgaggacgttccttttcacagcagctacgctcacagccagagtttggaccgtctcatgaatcctctcatcgaccagtacctgtattacttgagcagaacaaacactccaagcggaaccactacgcagtccaggcttcagttttctcaagccggagcgagtgacattcgggaccagtctaggaactggcttcctggaccctgttaccgccagcagcgagtatcaaagacagctgcggacaacaacaacagtgattactcgtggactggagctaccaagtatcacctcaatggaagagactctctggtgaatccgggcacagccatggccagccacaaggacgatgaagaaaagtattttcctcagagcggggttctcatcttcggaaaacaagactcgggaaaaactaatgtggacattgaaaaggtcatgattacagacgaagaggaaatcaggaccaccaatcccgtggctacggagcagtatggttctgtatctaccaatctccagagcggcaacacacaagcagctacctcagatgtcaacacacaaggcgttcttccaggcatggtctggcaggacagagacgtgtacctgcagggacccatctgggcaaagattccacacacggacggacattttcacccttctcctcttatgggaggatttggactgaagcaccctcccccgcagattctcatcaagaataccccggtacctgcgaatccttctaccaccttcagcgcggcaaagtttgcttccttcatcacacagtactccacggggcaggtcagcgtggagatcgagtgggagctgcagaaagagaacagcaaacgctggaaccccgagatccagtatacctccaactacaacaagtctgttaatgtggactttactgtggacactaatggcgtgtattcagagcctcgccccattggcacaagatacctgactcgtaatctgtaa

SEQ ID NO: 884 - DNA, 2208 bp, Artificial Sequence
  Synthetic Polynucleotide
atggctgccgatggttatcttccagattggctcgaggacattctctctgaaggaataagacagtggtggaagctcaaacctggcccaccaccaccaaagcccgcagagcggcataaggacgacagcaggggtcttgtgcttcctgggtacaagtacctcggacccttcaacggactcgacaaaggagagccggtcaacgaggcagacgccgcggccctcgagcacgacaaggcctacgaccggcagctcgacagcggagacaacccgtacctcaagtacaaccacgccgacgcggagtttcaggagcgtcttaaagaagatacgtcttttgggggcaacctcggacgagcagtcttccaggcaaaaaagagggttcttgaacctctgggcctggttgaggaacctgttaagacggctccgggaaaaaagaggccggtagagcaatctcctgcggagccagactcctcctcgggaaccggaaaggcgggcaaccagcctgcaagaaagagattgaattttggtcagactggagacgcagactccgtacctgacccccagcctctcggacagccaccagcagccccctctggtctgggaactaatacgatggcttcaggcagtggcgcaccaatggcagacaataacgagggcgccgacggagtgggtaattcctcgggaaattggcattgcgattccacatggatgggcgacagagtcatcaccaccagcacccgcacctgggctctgcccacctacaacaaccatctgtacaagcaaatttccagccagtctggagccagcaacgacaaccactactttggctacagcaccccttgggggtattttgacttcaacagattccactgccacttctccccacgtgactggcaaagactcatcaacaacaattggggattccggcccaaaagactcaacttcaagctctttaacattcaagtcaaggaggtcacgcagaatgacggtacgacgacgattgccaataaccttaccagcacggttcaggtgtttactgactcggagtaccagctcccgtacgtcctcggctcggcgcatcaaggatgcctcccgccgttcccagcagacgtcttcatggtgccacagtatggatacctcaccctgaacaacgggagtcaggcggtaggacgctcttcattttactgcctggagtactttccttctcagatgctgcgtaccggaaacaactttaccttcagctacacctttgaggacgttccttttcacagcagctacgctcacagccagagtttggaccgtcttatgaatcctctcatcgaccagtacctgtattacttgagcagaacaaacactccaagcggaaccactacgcagtccaggcttcagttttctcaagccggagcgagtgacattcgggaccagtctaggaactggcttcctggaccctgttaccgccagcagcgagtatcaaagacagctgcggacaacaacaacagtgattactcgtggactggagctaccaagtatcacctcaatggaagagactctctggtgaatccgggcacagccatggccagccacaaggacgatgaagaaaagtattttcctcagagcggggttctcatcttcggaaaacaagactcgggaaaaactaatgtggacattgaaaaggtcatgattacagacgaagaggaaatcaggaccaccaatcccgtggctacggagcagtatggttctgtatctaccaatctccagagcggcaacacacaagcagctacctcagatgtcaacacacaaggcgttcttccaggcatggtccggcaggacagagacgtgtacctgcagggacccatctgggcaaagattccacacacggacggacattttcacccttctcctcttatgggaggatttggactgaagcaccctcccccgcagattctcatcaagaataccccggtacctgcgaatccttctaccaccttcagcgcggcaaagtttgcttccttcatcacacagtactccacggggcaggtcagcgtggagatcgagtgggagccgcagaaagagaacagcaaacgctggaaccccgagatccagtatacctccaactacaacaagtctgttaatgtggactttactgtggacactaatggcgtgtattcagagcctcgccccattggcacaagatacctgactcgtaatctgtaa

SEQ ID NO: 885 - DNA, 2208 bp, Artificial Sequence
  Synthetic Polynucleotide
atggctgccgatggttatcttccagattggctcgaggacactctctctgaaggaataagacagtggtggaagctcaaacctggcccaccaccgccaaagcccgcagagcggcataaggacgacagcaggggtcttgtgcttcctgggtacaagtacctcggacccttcaacggactcgacaaaggagagccggtcaacgaggcagacgccgcggccctcgagcacgacaaggcctacgaccggcagctcgacagcggagacaacccgtacctcaagtacaaccacgccgacgcggagtttcaggagcgccttaaagaagatacgtcttttgggggcaacctcgcaagagcagtattccaggcgaaaaagagggttcttgaacctctgggcctggttgaggagcctgttaagacggctccgggaaaaaagaggccggtagagcactctcctgcggagccagattcctcctccggaactggaaagtcgggccaacagcctgcaagaaagagattgaattttggtcagactggagacgcagactccgtacctgacccccagcctctcggacagccaccagcagccccctctggtctgggaactaatacgatggcttcaggcagtggcgcaccaatggcagacaataacgagggcgccgacggagtgggtaattcctcgggaaattggcattgcgattccacatggatgggcgacagagtcatcaccaccagcacccgcacctgggctctgcccacctacaacaaccatctgtacaagcaaatttccagccagtctggagccagcaacgacaaccactacttcggctacagcaccccttgggggtattttgacttcaacagattccactgccacttctccccacgtgactggcaaagactcatcaacaacaattggggattccggcccaaaagactcaacttcaagctctttaacattcaagtcaaggaggtcacgcagaatgacggtacgacgacgattgccaataaccttaccagcacggttcaggtgtttactgactcggagtaccagctcccgtacgtcctcggctcggcgcatcaaggatgcctcccgccgttcccagcagacgtcttcatggtgccacagtatggatacctcaccctgaacaacgggagtcaggcggtaggacgctcttcattttactgcctggagtactttccttctcagatgctgcgtaccggaaacaactttaccttcagctacacctttgaggacgttccttttcacagcagctacgctcacagccagagtttggaccgtcttatgaatcctctcatcgaccagtacctgtattacttgagcagaacaaacactccaagcggaaccactacgcagtccaggcttcagttttctcaagccggagcgagtgacattcgggaccagtctaggaactggcttcctggaccctgttaccgccagcagcgagtatcaaagacagctgcggacaacaacaacagtgattactcgtggactggagctaccaagtatcacctcaatggaagagactctctggtgaatccgggcacagccatggccagccacaaggacgatgaagaaaagtattttcctcagagcggggttctcatcttcggaaaacaagactcgggaaaaactaatgtggacattgaaaaggtcatgattacagacgaagaggaaatcaggaccaccaatcccgtggctacggagcagtatggttctgtatctaccaatctccagagcggcaacacacaagcagctacctcagatgtcaacacacaaggcgttcttccaggcatggtccggcaggacagagacgtgtacctgcagggacccatctgggcaaagattccacacacggacggacattttcacccttctcctcttatgggaggatttggactgaagcaccctcccccgcagattctcatcaagaataccccggtacctgcgaatccttctaccaccttcagcgcggcaaagtttgcttccttcatcacacagtactccacggggcaggtcagcgtggagatcgagtgggagccgcagaaagagaacagcaaacgctggaaccccgagatccagtatacctccaactacaacaagtctgttaatgtggactttactgtggacactaatggcgtgtattcagagcctcgccccattggcacaagatgcctgactcgtaatctgtaa

SEQ ID NO: 886 - DNA, 2208 bp, Artificial Sequence
  Synthetic Polynucleotide
atggctgccgatggttatcttccagattggctcgaggacactctctctgaaggaataagacagtggtggaagctcaaacctggcccaccaccgccaaagcccgcagagcggcataaggacgacagcaggggtcttgtgcttcctgggtacaagtacctcggacccttcaacggactcgacaaaggagagccggtcaacgaggcagacgccgcggccctcgagcacgacaaggcctacgaccggcagctcgacagcggagacaacccgtacctcaagtacaaccacgccgacgcggagtttcaggagcgccttaaagaagatacgtcttttgggggcaacctcgcaagagcagtattccaggcgaaaaagagggttcttgaacctctgggcctggttgaggagcctgttaagacggctccgggaaaaaagaggccggtagagcactctcctgcggagccagattcctcctccggaactggaaagtcgggccaacagcctgcaagaaagagattgaattttggtcagactggagacgcagactccgtacctgacccccagcctctcggacagccaccagcagccccctctggtctgggaactaatacgatggcttcaggcagtggcgcaccaatggcagacaataacgagggcgccgacggagtgggtaattcctcgggaaattggcattgcgattccacatggatgggcgacagagtcatcaccaccagcacccgcacctgggctctgcccacctacaacaaccatctgtacaagcaaatttccagccagtctggagccagcaacgacaaccactacttcggctacagcaccccttgggggtattttgacttcaacagattccactgccacttctccccacgtgactggcaaagactcatcaacaacaattggggattccggcccaaaagactcaacttcaagctctttaacattcaagtcaaggaggtcacgcagaatgacggtacgacgacgattgccaataaccttaccagcacggttcaggtgtttactgactcggagtaccagctcccgtacgtcctcggctcggcgcatcaaggatgcctcccgccgttcccagcagacgtcttcatggtgccacagtatggatacctcaccctgaacaacgggagtcaggcggtaggacgctcttcattttactgcctggagtactttccttctcagatgctgcgtaccggaaacaactttaccttcagctacacctttgaggacgttccttttcacagcagctacgctcacagccagagtttggaccgtcttatgaatcctctcatcgaccagtacctgtattacttgagcagaacaaacactccaagcggaaccactacgcagtccaggcttcagttttctcaagccggagcgagtgacattcgggaccagtctaggaactggcttcctggaccctgttaccgccagcagcgagtatcaaagacagctgcggacaacaacaacagtgattactcgtggactggagctaccaagtatcacctcaatggaagagactctctggtgaatccgggcacagccatggccagccacaaggacgatgaagaaaagtattttcctcagagcggggttctcatcttcggaaaacaagactcgggaaaaactaatgtggacattgaaaaggtcatgattacagacgaagaggaaatcaggaccaccaatcccgtggctacggagcagtatggttctgtatctaccaatctccagagcggcaacacacaagcagctacctcagatgtcaacacacaaggcgttcttccaggcatggtccggcagggcagagacgtgtacctgcagggacccatctgggcaaagattccacacacggacggacattttcacccttctcctcttatgggaggatttggactgaagcaccctcccccgcagattctcatcaagaataccccggtacctgcgaatccttctaccaccttcagcgcggcaaagtttgcttccttcatcacacagtactccacggggcaggtcagcgtggagatcgagtgggagccgcagaaagagaacagcaaacgctggaaccccgagatccagtatacctccaactacaacaagtctgttaatgtggactttactgtggacactaatggcgtgtattcagagcctcgccccattggcacaagatacctgactcgtaatctgtaa

SEQ ID NO: 887 - DNA, 2208 bp, Artificial Sequence
  Synthetic Polynucleotide
atggctgccgatggttatcttccagattggctcgaggacactctctctgaaggaataagacagtggtggaagctcaaacctggcccaccaccgccaaagcccgcagagcggcataaggacgacagcaggggtcttgtgcttcctgggtacaagtacctcggacccttcaacggactcgacaaaggagagccggtcaacgaggcagacgccgcggccctcgagcacgacaaggcctacgaccggcagctcgacagcggagacaacccgtacctcaagtacaaccacgccgacgcggagtttcaggagcgccttaaagaagatacgtcttttgggggcaacctcgcaagagcagtattccaggcgaaaaagagggttcttgaacctctgggcctggttgaggagcctgttaagacggctccgggaaaaaagaggccggtagagcactctcctgcggagccagattcctcctccggaactggaaagtcgggccaacagcctgcaagaaagagattgaattttggtcagactggagacgcagactccgtacctgacccccagcctctcggacagccaccagcagccccctctggtctgggaactaatacgatggcttcaggcagtggcgcaccaatggcagacaataacgagggcgccgacggagtgggtaattcctcgggaaattggcattgcgattccacatggatgggcgacagagtcatcaccaccagcacccgcacctgggctctgcccacctacaacaaccatctgtacaagcaaatttccagccagtctggagccagcaacgacaaccactacttcggctacagcaccccttgggggtattttgacttcaacagattccactgccacttctccccacgtgactggcaaagactcatcaacaacaattggggattccggcccaaaagactcaacttcaagctctttaacattcaagtcaaggaggtcacgcagaatgacggtacgacgacgattgccaataaccttaccagcacggttcaggtgtttactgactcggagtaccagctcccgtacgtcctcggctcggcgcatcaaggatgcctcccgccgttcccagcagacgtcttcatggtgccacagtatggatacctcaccctgaacaacgggagtcaggcggtaggacgctcttcattttactgcctggagtactttccttctcagatgctgcgtaccggaaacaactttaccttcagctacacctttgaggacgttccttttcacagcagctacgctcacagccagagtttggaccgtcttatgaatcctctcatcgaccagtacctgtattacttgagcagaacaaacactccaagcggaaccactacgcagtccaggcttcagttttctcaagccggagcgagtgacattcgggaccagtctaggaactggcttcctggaccctgttaccgccagcagcgagtatcaaagacagctgcggacaacaacaacagtgattactcgtggactggagctaccaagtatcacctcaatggaagagactctctggtgaatccgggcacagccatggccagccacaaggacgatgaagaaaagtattttcctcagagcggggttctcatcttcggaaaacaagactcgggaaaaactaatgtggacattgaaaaggtcatgattacagacgaaggggaaatcaggaccaccaatcccgtggctacggagcagtatggttctgtatctaccaatctccagagcggcaacacacaagcagctacctcagatgtcaacacacaaggcgttcttccaggcatggtccggcaggacagagacgtgtacctgcagggacccatctgggcaaagattccacacacggacggacattttcacccttctcctcttatgggaggatttggactgaagcaccctcccccgcagattctcatcaagaataccccggtacctgcgaatccttctaccaccttcagcgcggcaaagtttgcctccttcatcacacagtactccacggggcaggtcagcgtggagatcgagtgggagccgcagaaagagaacagcaaacgctggaaccccgagatccagtatacctccaactacaacaagtctgttaatgtggactttactgtggacactaatggcgtgtattcagagcctcgccccattggcacaagatacctgactcgtaatctgtaa

SEQ ID NO: 888 - DNA, 2208 bp, Artificial Sequence
  Synthetic Polynucleotide
atggctgccgatggttatcttccagattggctcgaggacactctctctgaaggaataagacagtggtggaagctcaaacctggcccaccaccgccaaagcccgcagagcggcataaggacgacagcaggggtcttgtgcttcctgggtacaagtacctcggacccttcaacggactcgacaaaggagagccggtcaacgaggcagacgccgcggccctcgagcacgacaaggcctacgaccggcagctcgacagcggagacaacccgtacctcaagtacaaccacgccgacgcggagtttcaggagcgccttaaagaagatacgtcttttgggggcaacctcgcaagagcagtattccaggcgaaaaagagggttcttgaacctctgggcctggttgaggagcctgttaagacggctccgggaaaaaagaggccggtagagcactctcctgcggagccagattcctcctccggaactggaaagtcgggccaacagcctgcaagaaagagattgaattttggtcagactggagacgcagactccgtacctgacccccagcctctcggacagccaccagcagccccctctggtctgggaactaatacgatggcttcaggcagtggcgcaccaatggcagacaataacgagggcgccgacggagtgggtaattcctcgggaaattggcattgcgattccacgtggatgggcgacagagtcatcaccaccagcacccgcacctgggctctgcccacctacaacaaccatctgtacaagcaaatttccagccagtctggagccagcaacgacaaccactactttggctacagcaccccttgggggtattttgacttcaacagattccactgccacttctccccacgtgactggcaaagactcatcaacaacaattggggattccggcccaaaagactcaacttcgagctctttaacattcaagtcaaggaggtcacgcagaatgacggtacgacgacgattgccaataaccttaccagcacggttcaggtgtttactgactcggagtaccagctcccgtacgtcctcggctcggcgcatcaaggatgcctcccgccgttcccagcagacgtcttcatggtgccacagtatggatacctcaccctgaacaacgggagtcaggcggtaggacgctcttcattttactgcctggagtactttccttctcagatgctgcgtaccggaaacaactttaccttcagctacacctttgaggacgttccttttcacagcagctacgctcacagccagagtttggaccgtctcatgaatcctctcatcgaccagtacctgtattacttgagcagaacaaacactccaagcggaaccactacgcagtccaggcttcagttttctcaagccggagcgagtgacattcgggaccagtctaggaactggcttcctggaccctgttaccgccagcagcgagtatcaaagacagctgcggacaacaacaacagtgattactcgtggactggagctaccaagtatcacctcaatggaagagactctctggtgaatccgggcacagccatggccagccacaaggacgatgaagaaaagtattttcctcagagcggggttctcatcttcggaaaacaagactcgggaaaaactaatgtggacattgaaaaggtcatgattacagacgaagaggaaatcaggaccaccaatcccgtggctacggagcagtatggttctgtatctaccaatctccagagcggcaacacacaagcagctacctcagatgtcaacacacaaggcgttcttccaggcatggtctggcaggacagagacgtgtacctgcagggacccatctgggcaaagattccacacacggacggacactttcacccttctccacttatgggaggatttggactgaagcaccctcccccgcagattctcatcaagagtaccccggtacctgcgaatccttctaccaccttcagcgcggcaaagtttgcttccttcatcacacagtactccacggggcaggtcagcgtggagatcgagtgggagctgcagaaagagaacagcaaacgctggaaccccgagatccagtatacctccaactacaacaagtctgttaatgtggactttactgtggacactaatggcgtgtattcagagcctcgccccattggcacaagatacctgactcgtaatctgtaa

SEQ ID NO: 889 - DNA, 2208 bp, Artificial Sequence
  Synthetic Polynucleotide
atggctgccgatggttatcttccagattggctcgaggacattctctctgaaggaataagacagtggtggaagctcaaacctggcccaccaccaccaaagcccgcagagcggcataaggacgacagcaggggtcttgtgcttcctgggtacaagtacctcggacccttcaacggactcgacaaaggagagccggtcaacgaggcagacgccgcggccctcgagcacgacaaggcctacgaccggcagctcgacagcggagacaacccgtacctcaagtacaaccacgccgacgcggagtttcaggagcgtcttaaagaagatacgtcttttgggggcaacctcggacgagcagtcttccaggcaaaaaagagggttcttgaacctctgggcctggttgaggaacctgttaagacggctccgggaaaaaagaggccggtagagcaatctcctgcggagccagactcctcctcgggaaccggaaaggcgggcaaccagcctgcaagaaagagattgaattttggtcagactggagacgcagactccgtacctgacccccagcctctcggacagccaccagcagccccctctggtctgggatctactacaatggctacaggcagtggcgcaccaatggcagacaataacgagggtgccgatggagtgggtaattcctcaggaaattggcattgcgattccacatggatgggcgacagagtcatcaccaccagcacccgcacctgggctctgcccacctacaacaaccatctgtacaagcaaatttccagccagtctggagccagcaacgacaaccactactttggctacagcaccccttgggggtattttgacttcaacagattccactgccacttctccccacgtgactggcaaagactcatcaacaacaattggggattccggcccaaaagactcaacttcaagctctttaacattcaagtcaaggaggtcacgcagaatgacggtacgacgacgattgccaataaccttaccagcacggttcaggtgtttactgactcggagtaccagctcccgtacgtcctcggctcggcgcatcaaggatgcctcccgccgttcccagcagacgtcttcatggtgccacagtatggatacctcaccctgaacaacgggagtcaggcggtaggacgctcttcattttactgcctggagtactttccttctcagatgctgcgtaccggaaacaactttaccttcagctacacctttgaggacgttccttttcacagcagctacgctcacagccagagtttggaccgtcttatgaatcctctcatcgaccagtacctgtattacttgagcagaacaaacactccaagcggaaccactacgcagtccaggcttcagttttctcaagccggagcgagtgacattcgggaccagtctaggaactggcttcctggaccctgttaccgccagcagcgagtatcaaagacagctgcggacaacaacaacagtgattactcgtggactggagctaccaagtatcacctcaatggaagagactctctggtgaatccgggcacagccatggccagccacaaggacgatgaagaaaagtattttcctcagagcggggttctcatcttcggaaaacaagactcgggaaaaactaatgtggacattgaaaaggtcatgattacagacgaagaggaaatcaggaccaccaatcccgtggctacggagcagtatggttctgtatctaccaatctccagagcggcaacacacaagcagctacctcagatgtcaacacacaaggcgttcttccaggcatggtccggcaggacagagacgtgtacctgcagggacccatctgggcaaagattccacacacggacggacattttcacccttctcctcttatgggaggatttggactgaagcaccctcccccgcagattctcatcaagaataccccggtacctgcgaatccttctaccaccttcagcgcggcaaagtttgcttccttcatcacacagtactccacggggcaggtcagcgtggagatcgagtgggagccgcagaaagagaacagcaaacgctggaaccccgagatccagtatacctccaactacaacaagtctgttaatgtggactttactgtggacactaatggcgtgtattcagagcctcgccccattggcacaagatacctgactcgtaatctgtaa

SEQ ID NO: 890 - DNA, 2208 bp, Artificial Sequence
  Synthetic Polynucleotide
atggctgccgatggttatcttccagattggctcgaggacactctctctgaaggaataagacagtggtggaagctcaaacctggcccaccaccgccaaagcccgcagagcggcataaggacgacagcaggggtcttgtgcttcctgggtacaagtacctcggacccttcaacggactcgacaaaggagagccggtcaacgaggcagacgccgcggccctcgagcacgacaaggcctacgaccggcagctcgacagcggagacaacccgtacctcaagtacaaccacgccgacgcggagtttcaggagcgccttaaagaagatacgtcttttgggggcaacctcgcaagagcagtattccaggcgaaaaagagggttcttgaacctctgggcctggttgaggagcctgttaagacggctccgggaaaaaagaggccggtagagcactctcctgcggagccagattcctcctccggaactggaaagtcgggccaacagcctgcaagaaagagattgaattttggtcagactggagacgcagactccgtacctgacccccagcctctcggacagccaccagcagccccctctggtctgggaactaatacgatggcttcaggcagtggcgcaccaatggcagacaataacgagggcgccgacggagtgggtaattcctcgggaaattggcattgcgattccacatggatgggcgacagagtcatcaccaccagcacccgcacctgggctctgcccacctacaacaaccatctgtacaagcaaatttccagccagtctggagccagcaacgacaaccactactttggctacagcaccccttgggggtattttgacttcaacagattccactgccacttctccccacgtgactggcaaagactcatcaacaacaattggggattccggcccaaaagactcaacttcaagctctttaacattcaagtcaaggaggtcacgcagaatgacggtacgacgacgattgccaataaccttaccagcacggttcaggtgtttactgactcggagtaccagctcccgtacgtcctcggctcggcgcatcaaggatgcctcccgccgttcccagcagacgtcttcatggtgccacagtatggatacctcaccctgaacaacgggagtcaggcggtaggacgctcttcattttactgcctggagtactttccttctcagatgctgcgtaccggaaacaactttaccttcagctacacctttgaggacgttccttttcacagcagctacgctcacagccagagtttggaccgtcttatgaatcctctcatcgaccagtacctgtattacttgagcagaacaaacactccaagcggaaccactacgcagtccaggcttcagttttctcaagccggagcgagtgacattcgggaccagtctaggaactggcttcctggaccctgttaccgccagcagcgagtatcaaagacagctgcggacaacaacaacagtgattactcgtggactggagctaccaagtatcacctcaatggaagagactctctggtgaatccgggcacagccatggccagccacaaggacgatgaagaaaagtattttcctcagagcggggttctcatcttcggaaaacaagactcgggaaaaactaatgtggacattgaaaaggtcatgattacagacgaagaggaaatcaggaccaccaatcccgtggctacggagcagtatggttctgtatctaccaatctccagagcggcaacacacaagcagctacctcagatgtcaacacacaaggcgttcttccaggcatggtccggcaggacagagacgtgtacctgcagggacccatctgggcaaagattccacacacggacggacattttcacccttctcctcttatgggaggatttggactgaagcaccctcccccgcagattctcatcaagaataccccggtacctgcgaatccttctaccaccttcagcgcggcaaagtttgcttccttcatcacacagtactccacggggcaggtcagcgtggagatcgagtgggagccgcagaaagagaacagcaaacgctggaaccccgagatccagtatacctccaactacaacaagtctgttaatgtggactttactgtggacactaatggcgtgtattcagagcctcgccccattggcacaagatacctgactcgtaatctgtaa

SEQ ID NO: 891 - DNA, 2208 bp, Artificial Sequence
  Synthetic Polynucleotide
atggctgccgatggttatcttccagattggctcgaggacactctctctgaaggaataagacagtggtggaagctcaaacctggcccaccaccgccaaagcccgcagagcggcataaggacgacagcaggggtcttgtgcttcctgggtacaagtacctcggacccttcaacggactcgacaaaggagagccggtcaacgaggcagacgccgcggccctcgagcacgacaaggcctacgaccggcagctcgacagcggagacaacccgtacctcaagtacaaccacgccgacgcggagtttcaggagcgccttaaagaagatacgtcttttgggggcaacctcgcaagagcagtattccaggcgaaaaagagggttcttgaacctctgggcctggttgaggagcctgttaagacggctccgggaaaaaagaggccggtagagcactctcctgcggagccagattcctcctccggaactggaaagtcgggccaacagcctgcaagaaagagattgaattttggtcagactggagacgcagactccgtacctgacccccagcctctcggacagccaccagcagccccctctggtctgggaactaatacgatggcttcaggcagtggcgcaccaatggcagacaataacgagggcgccgacggagtgggtaattcctcgggaaattggcattgcgattccacatggatgggcgacagagtcatcaccaccagcacccgcacctgggctctgcccacctacaacaaccatctgtacaagcaaatttccagccagtctggagccagcaacgacaaccactacttcggctacagcaccccttgggggtattttgacttcaacagattccactgccacttctccccacgtgactggcaaagactcatcaacaacaattggggattccggcccaaaagactcaacttcaagctctttaacattcaagtcaaggaggtcacgcagaatgacggtacgacgacgattgccaataaccttaccagcacggttcaggtgtttactgactcggagtaccagctcccgtacgtcctcggctcggcgcatcaaggatgcctcccgccgttcccagcagacgtcttcatggtgccacagtatggatacctcacccagaacaacgggagtcaggcggtaggacgctcttcattttactgcctggagtactttccttctcagatgctgcgtaccggaaacaactttaccttcagctacacctttgaggacgttccttttcacagcagctacgctcacagccagagtttggaccgtcttatgaatcctctcatcgaccagtacctgtattacttgagcagaacaaacactccaagcggaaccactacgcagtccaggcttcagttttctcaagccggagcgagtgacattcgggaccagtctaggaactggcttcctggaccctgttaccgccagcagcgagtatcaaagacagctgcggacaacaacaacagtgattactcgtggactggagctaccaagtatcacctcaatggaagagactctctggtgaatccgggcacagccatggccagccacaaggacgatgaagaaaagtattttcctcagagcggggttctcatcttcggaaaacaagactcgggaaaaactaatgtggacattgaaaaggtcatgattacagacgaagaggaaatcaggaccaccaatcccgtggctacggagcagtatggttctgtatctaccaatctccagagcggcaacacacaagcagctacctcagatgtcaacacacaaggcgttcttccaggcatggtccggcaggacagagacgtgtacctgcagggacccatctgggcaaagattccacacacggacggacattttcacccttctcctcttatgggaggatttggactgaagcaccctcccccgcagattctcatcaagaataccccggtacctgcgaatccttctaccaccttcagcgcggcaaagtttgcttccttcatcacacagtactccacggggcaggtcagcgtggagatcgagtgggagccgcagaaagagaacagcaaacgctggaaccccgagatccagtatacctccaactacaacaagtctgttaatgtggactttactgtggacactaatggcgtgtattcagagcctcgccccattggcacaagatacctgactcgtaatctgtaa

SEQ ID NO: 892 - DNA, 2208 bp, Artificial Sequence
  Synthetic Polynucleotide
atggctgccgatggttatcttccagattggctcgaggacactctctctgaaggaataagacagtggtggaagctcaaacctggcccaccaccgccaaagcccgcagagcggcataaggacgacagcaggggtcttgtgcttcctgggtacaagtacctcggacccttcaacggactcgacaaaggagagccggtcaacgaggcagacgccgcggccctcgagcacgacaaggcctacgaccggcagctcgacagcggagacaacccgtacctcaagtacaaccgcgccgacgcggagtttcaggagcgccttaaagaagatacgtcttttgggggcaacctcgcaagagcagtattccaggcgaaaaagagggttcttgaacctctgggcctggttgaggagcctgttaagacggctccgggaaaaaagaggccggtagagcactctcctgcggggccagattcctcctccggaactggaaagtcgggccaacagcctgcaagaaagagattgaattttggtcagactggagacgcagactccgtacctgacccccagcctctcggacagccaccagcagccccctctggtctgggaactaatacgatggcttcaggcagtggcgcaccaatggcagacaataacgagggcgccgacggagtgggtaattcctcgggaaattggcattgcgattccacatggatgggcgacagagtcatcaccaccagcacccgcacctgggctctgcccacctacaacaaccatctgtacaagcaaatttccagccagtctggagccagcaacgacaaccactactttggctacagcaccccttgggggtattttgacttcaacagattccactgccacttctccccacgtgactggcaaagactcatcaacaacaattggggattccggcccaaaagactcaacttcgagctctttaacattcaagtcaaggaggtcacgcagaatgacggtacgacgacgattgccaataaccttaccagcacggttcaggtgtttactgactcggagtaccagctcccgtacgtcctcggctcggcgcatcaaggatgcctcccgccgttcccagcagacgtcttcatggtgccacagtatggataccccaccctgaacaacgggagtcaggcggtaggacgctcttcattttactgcctggagtactttccttctcagatgctgcgtaccggaaacaactttaccttcagctacacctttgaggacgttccttttcacagcagctacgctcacagccagagtttggaccgtctcatgaatcctctcatcgaccagtacctgtattacttgagcagaacaaacactccaagcggaaccactacgcagtccaggcttcagttttctcaagccggagcgagtgacattcgggaccagtctaggaactggcttcctggaccctgttaccgccagcagcgagtatcaaagacagctgcggacaacaacaacagtgattactcgtggactggagctaccaagtatcacctcaatggaagagactctctggtgaatccgggcacagccatggccagccacaaggacgatgaagaaaagtattttcctcagagcggggttctcatcttcggaaaacaagactcgggaaaaactaatgtggacattgaaaaggtcatgattacagacgaagaggaaatcaggaccaccaatcccgtggctacggagcagtatggttctgtatctaccaatctccagagcggcaacacacaagcagctacctcagatgtcaacacacaaggcgttcttccaggcatggtctggcaggacagagacgtgtacctgcagggacccatctgggcaaagattccacacacggacggacactttcacccttctcctcttatgggaggatttggactgaagcaccctcccccgcagattctcatcaagagtaccccggtacctgcgaatccttctaccaccttcagcgcggcaaagtttgcttccttcatcacacagtactccacggggcaggtcagcgtggagatcgagtgggagctgcagaaagagaacagcaaacgctggaaccccgagatccagtatacctccaactacaacaagtctgttaatgtggactttactgtggacactaatggcgtgtattcagagcctcgccccattggcacaagatacctgactcgtaatctgtaa

SEQ ID NO: 893 - DNA, 2208 bp, Artificial Sequence
  Synthetic Polynucleotide
atggctgccgatggttatcttccagattggctcgaggacactctctctgaaggaataagacagtggtggaagctcaaacctggcccaccaccgccaaagcccgcagagcggcataaggacgacagcaggggtcttgtgcttcctgggtacaagtacctcggacccttcaacggactcgacaaaggagagccggtcaacgaggcagacgccgcggccctcgagcacgacaaggcctacgaccggcagctcgacagcggagacaacccgtacctcaagtacaaccacgccgacgcggagtttcaggagcgccttaaagaagatacgtcttttgggggcaacctcgcaagagcagtattccaggcgaaaaagagggttcttgaacctctgggcctggttgaggagcctgttaagacggctccgggaaaaaagaggccggtagagcactctcctgcggagccagattcctcctccggaactggaaagtcgggccaacagcctgcaagaaagagattgaattttggtcagactggagacgcagactccgtacctgacccccagcctctcggacagccaccagcagccccctctggtctgggaactaatacgatggcttcaggcagtggcgcaccaatggcagacaataacgagggcgccgacggagtgggtaattcctcgggaaattggcattgcgattccacatggatgggcgacagagtcatcaccaccagcacccgcacctgggctctgcccacctacaacaaccatctgtacaagcaaatttccagccagtctggagccagcaacgacaaccactactttggctacagcaccccttgggggtattttgacttcaacggattccactgccacttctccccacgtgactggcaaagactcatcaacaacaattggggattccggcccaaaagactcaacttcaagctctttaacattcaagtcaaggaggtcacgcagaatgacggtacgacgacgattgccaataaccttaccagcacggttcaggtgtttactgactcggagtaccagctcccgtacgtcctcggctcggcgcatcaaggatgcctcccgccgttcccagcagacgtcttcatggtgccacagtatggatacctcaccctgaacaacgggagtcaggcggtaggacgctcttcattttactgcctggagtactttccttctcagatgctgcgtaccggaaacaactttaccttcagctacacctttgaggacgttccttttcacagcagctacgctcacagccagagtttggaccgtcttatgaatcctctcatcgaccagtacctgtattacttgagcagaacaaacactccaagcggaaccactacgcagtccaggcttcagttttctcaagccggagcgagtgacattcgggaccagtctaggaactggcttcctggaccctgttaccgccagcagcgagtatcaaagacagctgcggacaacaacaacagtgattactcgtggactggagctaccaagtatcacctcaatggaagagactctctggtgaatccgggcacagccatggccagccacaaggacgatgaagaaaagtattttcctcagagcggggttctcatcttcggaaaacaagactcgggaaaaactaatgtggacattgaaaaggtcatgattacagacgaagaggaaatcaggaccaccaatcccgtggctacggagcagtatggttctgtatctaccaatctccagagcggcaacacacaagcagctacctcagatgtcaacacacaaggcgttcttccaggcatggtccggcaggacagagacgtgtacctgcagggacccatctgggcaaagattccacacacggacggacattttcacccttctcctcttatgggaggatttggactgaagcaccctcccccgcagattctcatcaagaataccccggtacctgcgaatccttctaccaccttcagcgcggcaaagtttgcttccttcatcacacagtactccacggggcaggtcagcgtggagatcgagtgggagccgcagaaagagaacagcaaacgctggaaccccgagatccagtatacctccaactacaacaagtctgttaatgtggactttactgtggacactaatggcgtgtattcagagcctcgccccattggcacaagatacctgactcgtaatctgtaa

SEQ ID NO: 894 - DNA, 2208 bp, Artificial Sequence
  Synthetic Polynucleotide
atggctgccgatggttatcttccagattggctcgaggacactctctctgaaggaataagacagtggtggaagctcaaacctggcccaccaccgccaaagcccgcagagcggcataaggacgacagcaggggtcttgtgcttcctgggtacaagtacctcggacccttcaacggactcgacaaaggagagccggtcaacgaggcagacgccgcggccctcgagcacgacaaggcctacgaccggcagctcgacagcggagacaacccgtacctcaagtacaaccacgccgacgcggagtttcaggagcgccttaaagaagatacgtcttttgggggcaacctcgcaagagcagtattccaggcgaaaaagagggttcttgaacctccgggcctggttgaggagcctgttaagacggctccgggaaaaaagaggccggtagagcactctcctgcggagccagattcctcctccggaactggaaagtcgggccaacagcctgcaagaaagagattgaattttggtcagaccggagacgcagactccgtacctgacccccagcctctcggacagccaccagcagccccctctggtctgggaactaatacgatggcttcaggcagtggcgcaccaatggcagacaataacgagggcgccgacggagtgggtaattcctcgggaaattggcattgcgattccacatggatgggcgacagagtcatcaccaccagcacccgcacctgggctctgcccacctacaacaaccatctgtacaagcaaatttccagccagtctggagccagcaacgacaaccactacttcggctacagcaccccttgggggtattttgacttcaacagattccactgccacttctccccacgtgactggcaaagactcatcaacaacaattggggattccggcccaaaagactcaacttcaagctctttaacattcaagtcaaggaggtcacgcagaatgacggtacgacgacgattgccaataaccttaccagcacggttcaggtgtttactgactcggagtaccagctcccgtacgtcctcggctcggcgcatcaaggatgcctcccgccgttcccagcagacgtcttcatggtgccacagtatggatacctcaccctgaacaacgggagtcaggcggtaggacgctcttcattttactgcctggagtactttccttctcagatgctgcgtaccggaaacaactttaccttcagctacacctttgaggacgttccttttcacagcagctacgctcacagccagagtttggaccgtcttatgaatcctctcatcgaccagtacctgtattacttgagcagaacaaacactccaagcggaaccactacgcagtccaggcttcagttttctcaagccggagcgagtgacattcgggaccagtctaggaactggcttcctggaccctgttaccgccagcagcgagtatcaaagacagctgcggacaacaacaacagtgattactcgtggactggagctaccaagtatcacctcaatggaagagactctctggtgaatccgggcacagccatggccagccacaaggacgatgaagaaaagtattttcctcagagcggggttctcatcttcggaaaacaagactcgggaaaaactaatgtggacattgaaaaggtcatgattacagacgaaggggaaatcaggaccaccaatcccgtggctacggagcagtatggctctgtatctaccaatctccagagcggcaacacacaagcagctacctcagatgtcaacacacaaggcgttcttccaggcatggtccggcaggacagagacgtgtacctgcagggacccatctgggcaaagattccacacacggacggacattttcacccttctcctcttatgggaggatttggactgaagcaccctcccccgcagattctcatcaagaataccccggtacctgcgaatccttctaccaccttcagcgcggcaaagtttgcttccttcatcacacagtactccacggggcaggtcagcgtggagatcgagtgggagccgcagaaagagaacagcaaacgctggaaccccgagatccagtatacctccaactacagcaagtctgttaatgtggactttactgtggacactaatggcgtgtattcagagcctcgccccattggcacaagatacctgactcgtaatctgtaa

SEQ ID NO: 895 - DNA, 2208 bp, Artificial Sequence
  Synthetic Polynucleotide
atggctgccgatggttatcttccagattggctcgaggacattctctctgaaggaataagacagtggtggaagctcaaacctggcccaccaccaccaaagcccgcagagcggcataaggacgacagcaggggtcttgtgcttcctgggtacaagtacctcggacccttcaacggactcgacaaaggagagccggtcaacgaggcagacgccgcggccctcgagcacgacaaggcctacgaccggcagctcgacagcggagacaacccgtacctcaagtacaaccacgccgacgcggagtttcaggagcgtcttaaagaagatacgtcttttgggggcaacctcggacgagcagtcttccaggcaaaaaagagggttcttgaacctctgggcctggttgaggaacctgttaagacggctccgggaaaaaagaggccggtagagcaatctcctgcggagccagactcctcctcgggaaccggaaaggcgggcaaccagcctgcaagaaagagattgaattttggtcagactggagacgcagactccgtacctgacccccagcctctcggacagccaccagcagccccctctggtctgggatctactacaatggctacaggcagtggcgcaccaatggcagacaataacgagggtgccgatggagtgggtaattcctcaggaaattggcattgcgattcccaatggttgggcgacagagtcatcaccaccagcacccgaacctgggccctgcccacctacaacaatcacctctacaagcaaatctccagccaatcaggagccagcaacgacaaccactactttggctacagcaccccctgggggtattttgacttcaacagattccactgccacttctccccacgtgactggcaaagactcatcaacaacaattggggattccggcccaaaagactcaacttcaagctctttaacattcaagtcaaggaggtcacgcagaatgacggtacgacgacgattgccaataaccttaccagcacggttcaggtgtttactgactcggagtaccagctcccgtacgtcctcggctcggcgcatcaaggatgcctcccgccgttcccagcagacgtcttcatggtgccacagtatggatacctcaccctgaacaacgggagtcaggcggtaggacgctcttcattttactgcctggagtactttccttctcagatgctgcgtaccggaaacaactttaccttcagctacacctttgaggacgttccttttcacagcagctacgctcacagccagagtttggaccgtcttatgaatcctctcatcgaccagtacctgtattacttgagcagaacaaacactccaagcggaaccactacgcagtccaggcttcagttttctcaagccggagcgagtgacattcgggaccagtctaggaactggcttcctggaccctgttaccgccagcagcgagtatcaaagacagctgcggacaacaacaacagtgattactcgtggactggagctaccaagtatcacctcaatggaagagactctctggtgaatccgggcacagccatggccagccacaaggacgatgaagaaaagtattttcctcagagcggggttctcatcttcggaaaacaagactcgggaaaaactaatgtggacattgaaaaggtcatgattacagacgaagaggaaatcaggaccaccaatcccgtggctacggagcagtatggttctgtatctaccaatctccagagcggcaacacacaagcagctacctcagatgtcaacacacaaggcgttcttccaggcatggtccggcaggacagagacgtgtacctgcagggacccatctgggcaaagattccacacacggacggacattttcacccttctcctcttatgggaggatttggactgaagcaccctcccccgcagattctcatcaagaataccccggtacctgcgaatccttctaccaccttcagcgcggcaaagtttgcttccttcatcacacagtactccacggggcaggtcagcgtggagatcgagtgggagccgcagaaagagaacagcaaacgctggaaccccgagatccagtatacctccaactacaacaagtctgttaatgtggactttactgtggacactaatggcgtgtattcagagcctcgccccattggcacaagatacctgactcgtaatctgtaa

SEQ ID NO: 896 - DNA, 2208 bp, Artificial Sequence
  Synthetic Polynucleotide
atggctgccgatggttatcttccagattggctcgaggacactctctctgaaggaataagacagtggtggaagctcaaacctggcccaccaccgccaaagcccgcagagcggcataaggacgacagcaggggtcttgtgcttcctgggtacaagtacctcggacccttcaacggactcgacaaaggagagccggtcaacgaggcagacgccgcggccctcgagcacgacaaggcctacgaccggcagctcgacagcggagacaacccgtacctcaagtacaaccacgccgacgcggagtttcaggagcgccttaaagaagatacgtcttttgggggcaacctcgcaagagcagtattccaggcgaaaaagagggttcttgaacctctgggcctggttgaggagcctgttaagacggctccgggaaaaaagaggccggtagagcactctcctgcggagccagattcctcctccggaactggaaagtcgggccaacagcctgcaagaaagagattgaattttggtcagactggagacgcagactccgtacctgacccccagcctctcggacagccaccagcagccccctctggtctgggaactaatacgatggcttcaggcagtggcgcaccaatggcagacaataacgagggcgccgacggagtgggtaattcctcgggaaattggcattgcgattccacatggatgggcgacagagtcatcaccaccagcacccgcacctgggctctgcccacctacaacaaccatctgtacaagcaaatttccagccagtctggagccagcaacgacaaccactacttcggctacagcaccccttgggggtattttgacttcaacagattccactgccacttctccccacgtgactggcaaagactcatcaacaacaattggggattccggcccaaaagactcaacttcaagctctttaacattcaagtcaaggaggtcacgcagaatgacggtacgacgacgattgccaataaccttaccagcacggttcaggtgtttactgactcggagtaccagctcccgtacgtcctcggctcggcgcatcaaggatgcctcccgccgttcccagcagacgtcttcatggtgccacagtatggatacctcaccctgaacaacgggagtcaggcggtaggacgctcttcattttactgcctggagtactttccttctcagatgctgcgtaccggaaacaactttaccttcagctacacctttgaggacgttccttttcacagcagctacgctcacagccagagtttggaccgtcttatgaatcctctcatcgaccagtacctgtattacttgagcagaacaaacactccaagcggaaccactacgcagtccaggcttcagttttctcaagccggagcgagtgacattcgggaccagtctaggaactggcttcctggaccctgttaccgccagcagcgagtatcaaagacagctgcggacaacaacaacagtgattactcgtggactggagctaccaagtatcacctcaatggaagagactctctggtgaatccgggcacagccatggccagccacaaggacgatgaagaaaagtattttcctcagagcggggttctcatcttcggaaaacaagactcgggaaaaactaatgtggacattgaaaaggtcatgattacagacgaagaggaaatcaggaccaccaatcccgtggctacggagcagtatggttctgtatctaccaatctccagagcggcaacacacaagcagctacctcagatgtcaacacacaaggcgttcttccaggcacggtccggcaggacagagacgtgtacctgcagggacccatctgggcaaagattccacacacggacggacattttcacccttctcctcttatgggaggatttggactgaagcaccctcccccgcagattctcatcaagaataccccggtacctgcgaatccttctaccaccttcagcgcggcaaagtttgcttccttcatcacacagtactccacggggcaggtcagcgtggagatcgagtgggagccgcagaaagagaacagcaaacgctggaaccccgagatccagtatacctccaactacaacaagtctgttaatgtggactttactgtggacactaatggcgtgtattcagagcctcgccccattggcacaagatacctgactcgtaatctgtaa

SEQ ID NO: 897 - DNA, 2208 bp, Artificial Sequence
  Synthetic Polynucleotide
atggctgccgatggttatcttccagattggctcgaggacattctctctgaaggaataagacagtggtggaagctcaaacctggcccaccaccaccaaagcccgcagagcggcataaggacgacagcaggggtcttgtgcttcctgggtacaagtacctcggacccttcaacggactcgacaaaggagagccggtcaacgaggcagacgccgcggccctcgagcacgacaaggcctacgaccggcagctcgacagcggagacaacccgtacctcaagtacaaccacgccgacgcggagtttcaggagcgtcttaaagaagatacgtcttttgggggcaacctcggacgagcagtcttccaggcaaaaaagagggttcttgaacctctgggcctggttgaggarcctgttaagacggctccgggaaaaaagaggccggtagagcactctcctgcggagccagattcctcctccggaactggaaagtcgggccaacagcctgcaagaaagagattgaattttggtcagactggagacgcagactccgtacctgacccccagcctctcggacagccaccagcagccccctctggtctgggaactaatacgatggcttcaggcagtggcgcaccaatggcagacaataacgagggcgccgacggagtgggtaattcctcgggaaattggcattgcgattccacatggatgggcgacagagtcatcaccaccagcacccgcacctgggctctgcccacctacaacaaccatctgtacaagcaaatttccagccagtctggagccagcaacgacaaccactacttcggctacagcaccccttgggggtattttgacttcaacagattccactgccacttctccccacgtgactggcaaagactcatcaacaacaattggggattccggcccaaaagactcaacttcaagctctttaacattcaagtcaaggaggtcacgcagaatgacggtacgacgacgattgccaataaccttaccagcacggttcaggtgtttactgactcggagtaccagctcccgtacgtcctcggctcggcgcatcaaggatgcctcccgccgttcccagcagacgtcttcatggtgccacagtatggatacctcaccctgaacaacgggagtcaggcggtaggacgctcttcattttactgcctggagtactttccttctcagatgctgcgtaccggaaacaactttaccttcagctacacctttgaggacgttccttttcacagcagctacgctcacagccagagtttggaccgtcttatgaatcctctcatcgaccagtacctgtattacttgagcagaacaaacactccaagcggaaccactacgcagtccaggcttcagttttctcaagccggagcgagtgacattcgggaccagtctaggaactggcttcctggaccctgttaccgccagcagcgagtatcaaagacagctgcggacaacaacaacagtgattactcgtggactggagctaccaagtatcacctcaatggaagagactctctggtgaatccgggcacagccatggccagccacaaggacgatgaagaaaagtattttcctcagagcggggttctcatcttcggaaaacaagactcgggaaaaactaatgtggacattgaaaaggtcatgattacagacgaagaggaaatcaggaccaccaatcccgtggctacggagcagtatggttctgtatctaccaatctccagagcggcaacacacaagcagctacctcagatgtcaacacacaaggcgttcttccaggcatggtccggcaggacagagacgtgtacctgcagggacccatctgggcaaagattccacacacggacggacattttcacccttctcctcttatgggaggatttggactgaagcaccctcccccgcagattctcatcaagaataccccggtacctgcgaatccttctaccaccttcagcgcggcaaagtttgcttccttcatcacacagtactccacggggcaggtcagcgtggagatcgagtgggagccgcagaaagagaacagcaaacgctggaaccccgagatccagtatacctccaactacaacaagtctgttaatgtggactttactgtggacactaatggcgtgtattcagagcctcgccccattggcacaagatacctgactcgtaatctgtaa

SEQ ID NO: 898 - DNA, 2208 bp, Artificial Sequence
  Synthetic Polynucleotide
atggctgccgatggttatcttccagattggctcgaggacactctctctgaaggaataagacagtggtggaagctcaaacctggcccaccaccgccaaagcccgcagagcggcataaggacgacagcaggggtcttgtgcttcctgggtacaagtacctcggacccttcaacggactcgacaaaggagagccggtcaacgaggcagacgccgcggccctcgagcacgacaaggcctacgaccggcagctcgacagcggagacaacccgtacctcaagtacaaccacgccgacgcggagtttcaggagcgccttaaagaagatacgtcttttgggggcaacctcgcaagagcagtattccaggcgaaaaagagggttcttgaacctctgggcctggttgaggagcctgttaagacggctccgggaaaaaagaggccggtagagcactctcctgcggagtcagattcctcctccggaactggaaagtcgggccaacagcctgcaagaaagagattgaattttggtcagactggagacgcagactccgtacctgacccccagcctctcggacagccaccagcagccccctctggtctgggaactaatacgatggcttcaggcagtggcgcaccaatggcagacaataacgagggcgccgacggagtgggtaattcctcgggaaattggcattgcgattccacatggatgggcgacagagtcatcaccaccagcacccgcacctgggctctgcccacctacaacaaccatctgtacaagcaaatttccagccagtctggagccagcaacgacaaccactactttggctacagcaccccttgggggtattttgacttcaacagattccactgccacttctccccacgtgactggcaaagactcatcaacaacaattggggattccggcccaaaagactcaacttcaagctctttaacattcaagtcaaggaggtcacgcagaatgacggtacgacgacgattgccaataaccttaccagcacggttcaggtgtttactgactcggagtaccagctcccgtacgtcctcggctcggcgcatcaaggatgcctcccgccgttcccagcagacgtcttcatggtgccacagtatggatacctcaccctgaacaacgggagtcaggcggtaggacgctcttcattttactgcctggagtactttccttctcagatgctgcgtaccggaaacaactttaccttcagctacacctttgaggacgttccttttcacagcagctacgctcacagccagagtttggaccgtctcatgaatcctctcatcgaccagtacctgtattacttgagcagaacaaacactccaagcggaaccactacgcagtccaggcttcagttttctcaagccggagcgagtgacattcgggaccagtctaggaactggcttcctggaccctgttaccgccagcagcgagtatcaaagacagctgcggacaacaacaacagtgattactcgtggactggagctaccaagtatcacctcaatggaagagactctctggtgaatccgggcacagccatggccagccacaaggacgatgaagaaaagtattttcctcagagcggggttctcatcttcggaaaacaagactcgggaaaaactaatgtggacattgaaaaggtcatgattacagacgaagaggaaatcaggaccaccaatcccgtggctacggagcagtatggttctgtatctaccaatctccagagcggcaacacacaagcagctacctcagatgtcaacacacaaggcgttcttccaggcatggtctggcaggacagagacgtgtacctgcagggacccatctgggcaaagattccacacacggacggacattttcacccttctcctcttatgggaggatttggactgaagcaccctcccccgcagattctcatcaagaataccccggtacctgcgaatccttctaccaccttcagcgcggcaaagtttgcttccttcatcacacagtactccacggggcaggtcagcgtggagatcgagtgggagctgcagaaagagaacagcaaacgctggaaccccgagatccagtatacctccaactacaacaagtctgttaatgtggactttactgtggacactaatggcgtgtattcagagcctcgccccattggcacaagatacctgactcgtaatctgtaa

SEQ ID NO: 899 - DNA, 2208 bp, Artificial Sequence
  Synthetic Polynucleotide
atggctgccgatggttatcttccagattggctcgaggacactctctctgaaggaataagacagtggtggaagctcaaacctggcccaccaccgccaaagcccgcagagcggcataaggacgacagcaggggtcttgtgcttcctgggtacaagtacctcggacccttcaacggactcgacaaaggagagccggtcaacgaggcagacgccgcggccctcgagcacgacaaggcctacgaccggcagctcgacagcggagacaacccgtacctcaagtacaaccacgccgacgcggagtttcaggagcgccttaaagaagatacgtcttttgggggcaacctcgcaagagcagtattccaggcgaaaaagagggttcttgaacctctgggcctggttgaggagcctgttaagacggctccgggaaaaaagaggccggtagagcactctcctgcggagccagattcctcctccggaactggaaagtcgggccaacagcctgcaagaaagagattgaattttggtcagactggagacgcagactccgtacctgacccccagcctctcggacagccaccagcagccccctctggtctgggaactaatacgatggcttcaggcagtggcgcaccaatggcagacaataacgagggcgccgacggagtgggtaattcctcgggaaattggcattgcgattccacatggatgggcgacagagtcatcaccaccagcacccgcacctgggctctgcccacctacaacaaccatctgtacaagcaaatttccagccagtctggagccagcaacgacaaccactactttggctacagcaccccttgggggtattttgacttcaacagattccactgccacttctccccacgtgactggcaaagactcatcaacaacaattggggattccggcccaaaagactcaacttcaagctctttaacattcaagtcaaggaggtcacgcagaatgacggtacgacgacgattgccaataaccttaccagcacggttcaggtgtttactgactcggagtaccagctcccgtacgtcctcggctcggcgcatcaaggatgcctcccgccgttcccagcagacgtcttcatggtgccacagtatggatacctcaccctgaacaacgggagtcaggcggtaggacgctcttcattttactgcctggagtactttccttctcagatgctgcgtaccggaaacaactttaccttcagctacacctttgaggacgttccttttcacagcagctacgctcacagccagagtttggaccgtcttatgaatcctctcatcgaccagtacctgtattacttgagcagaacaaacactccaagcggaaccactacgcagtccaggcttcagttttctcaagccggagcgagtgacattcgggaccagtctaggaactggcttcctggaccctgttaccgccagcagcgagtatcaaagacagctgcggacaacaacaacagtgattactcgtggactggagctaccaagtatcacctcaatggaagagactctctggtgaatccgggcacagccatggccagccacaaggacgatgaagaaaagtattttcctcagagcggggttctcatcttccggaaacaagactcgggaaaaactaatgtggacattgaaaaggtcatgattacagacgaagaggaaatcaggaccaccaatcccgtggctacggagcagtatggttctgtatctaccaatctccagagcggcaacacacaagcagctacctcagatgtcaacacacaaggcgttcttccaggcatggtccggcaggacagagacgtgtacctgcagggacccatctgggcaaagattccacacacggacggacattttcacccttctcctcttatgggaggatttggactgaagcaccctcccccgcagattctcatcaagaataccccggtacctgcgaatccttctaccaccttcagcgcggcaaagtttgcttccttcatcacacagtactccacggggcaggtcagcgtggagatcgagtgggagccgcagaaagagaacagcaaacgctggaaccccgagatccagtatacctccaactacaacaagtctgttaatgtggactttactgtggacactaatggcgtgtattcagagcctcgccccattggcacaagatacctgactcgtaatctgtaa

SEQ ID NO: 900 - DNA, 2208 bp, Artificial Sequence
  Synthetic Polynucleotide
atggctgccgatggttatcttccagattggctcgaggacactctctctgaaggaataagacagtggtggaagctcaaacctggcccaccaccaccaaagcccgcagagcggcatcaggacgacagcaggggtcttgtgcttcctgggtacaagtacctcggacccttcaacggactcgacaagggagagccggtcaacgaggcagacgccgcggccctcgagcacgacaaggcctacgaccggcagctcgacagcggagacaacccgtacctcaagtacaaccacgccgacgcggagtttcaggagcgtcttaaagaagatacgtcttttgggggcaacctcggacgagcagtcttccaggcgaaaaagagggttcttgaacctctgggcctggttgaggaacctgttaagacggctccgggaaaaaagaggccggtagagcattctcctgcggagccagactcctcctcgggaaccggaaaggcgggccagcagcctgcgagaaagagattgaatttcggtcagactggagacgcagactccgtacctgacccccagcctctcggacagccaccagcagccccctccggtctgggaactaatacgacggctacaggcagtggcgcaccaatggcagacaataacgagggcgccgacggagtgggtaattcctcgggaaattggcattgcgattccacatggatgggcgacagagtcatcaccaccagcacccgaacctgggccctgcccacctacaacaaccacctctacaagcaaatctccagccaatctggagcctcaaacgacaaccactactttggctacagcaccccttgggggtattttgacttcaacagattccactgtcacttctccccacgtgactggcaaagactcatcaacaacaactggggattccgacccaagagactcaacttcaagctctttaacattcaagtcaaagaggtcacgcagaatgacggtacgacgacgattgccaataaccttaccagcacggttcaagtctttgctgactcggagtaccagctcccgtacgtcctcggctcggcgcatcaaggatgcctcccgccgtttccagcagacgtcttcatggtgccacagtatggatacctcaccctgaacaacgggagtcaggcggtaggacgctcttccttttactgcctggagtactttccttctcagatgctgcgtaccggaaacaactttaccttcagctacacctttgaggacgttcctttccacagcagctacgctcacagccagagtttggaccggctgatgaatcctctgatcgaccagtatctgtattacttgagcaaaacaaacgctccaagcggaaccaccacgatgtccaggcttcagttttctcaggccggagcgagtgacattcgggaccagtctaggaactggcttcctggaccctgttaccgccagcagcgagtatcaaaaacagctgcggataacaacaacagtgattattcgtggactggagctaccaagtaccacctcaatggaagagactctctggtgaatccgggcccagctatggccagccacaaggacgatgaagaaaaatattttcctcagagcggggttctcatctttggaaaacaagactcgggaaaaactaatgtggacattgaaaaggtcatgattacagacgaagaggaaatcaggaccaccaatcccgtggctacggagcagtatggttctgtatctaccaacctccagagcggcaacacacaggcagccaccacagatgtcaacacacaaggcgttcttccaggcatggtctggcaggacagagacgtgtacctgcaaggacccatctgggcaaagattcctcacacggacggacactttcacccttctcccctcatgggaggatttggactcaaacaccctcctccgcaaatcctcatcaagaatacccccgtacctgcgaatccttcgaccacattcagcgcggcaaagtttgcttctttcatcacacagtactctacggggcaggtcagcgtggagattgagtgggagctgcagaaggagaacagcaaacgctggaaccccgaaatccagtacacttccaactacaacaagtctgttaatgtggactttactgtggacactaatggtgtgtattcagagcctcgccccattggcacaagatacctgactcgtaatctgtaa

SEQ ID NO: 901 - DNA, 2208 bp, Artificial Sequence
  Synthetic Polynucleotide
atggctgccgatggttatcttccagattggctcgaggacactctctctgaaggaataagacagtggtggaagctcaaacctggcccaccaccaccaaagcccgcagagcggcatcaggacgacagcaggggtcttgtgcttcctgggtacaagtacctcggacccttcaacggactcgacaagggagagccggtcaacgaggcagacgccgcggccctcgagcacgacaaggcctacgaccggcagctcgacagcggagacaacccgtacctcaagtacaaccacgccgacgcggagtttcaggagcgtcttaaagaagatacgtcttttgggggcaacctcggacgagcagtcttccaggcgaaaaagagggttcttgaacctctgggcctggttgaggaacctgttaagacggctccgggaaaaaagaggccggtagagcattctcctgcggagccagactcctcctcgggaaccggaaaggcgggccagcagcctgcgagaaagagattgaatttcggtcagactggagacgcagactccgtacctgacccccagcctctcggacagccaccagcagccccctctggtctgggaactaatacgatggctacaggcagtggcgcaccaatggcagacaataacgagggcgccgacggagtgggtaattcctcgggaaattggcattgcgattccacatggatgggcgacagagtcatcaccaccagcacccgaacctgggccctgcccacctacaacaaccacctctacaagcaaatctccagccaatctggagcctcaaacgacaaccactactttggctacagcaccccttgggggtattttgacttcaacagattccactgtcacttctccccacgtgactggcaaagactcatcaacaacaactggggattccgacccaagagactcaacttcaagctctttaacattcaagtcaaagaggtcacgcagaatgacggtacgacgacgattgccaataaccttaccagcacggttcaagtctttactgactcggagtaccagctcccgtacgtcctcggctcggcgcatcaaggatgcctcccgccgtttccagcagacgtcttcatggtgccacagtatggatacctcaccctgaacaacgggagtcaggcggtaggacgctcttccttttactgcctggagtactttccttctcagatgctgcgtaccggaaacaactttaccttcagctacacctttgaggacgttcctttccacagcagctacgctcacagccagagtttggaccggctgatgaatcctctgatcgaccagtatctgtattacttgagcaaaacaaacgctccaagcggaaccaccacgatgtccaggcttcagttttctcaggccggagcgagtgacattcgggaccagtctaggaactggcttcctggaccctgttaccgccagcagcgagtatcaaaaacagctgcggataacaacaacagtgattattcgtggactggagctaccaagtaccaccccaatggaagagactctctggtgaatccgggcccagctatggccagccacaaggacgatgaagaaaaatattttcctcagagcggggttctcatctttggaaaacaagactcgggaaaaactaatgtggacattgaaaaggtcatgattacagacgaagaggaaatcaggaccaccaatcccgtggctacggagcagtatggttctgtatctaccaacctccagagcggcaacacacaggcagccaccacagatgtcaacacacaaggcgttcttccaggcatggtctggcaggacagagacgtgtacctgcacggacccatctgggcaaagattcctcacacggacggacactttcacccttctcccctcatgggaggatttggactcaaacaccctcctccgcaaatcctcatcaagaatacccccgtacctgcgaatccttcgaccacattcagcgcggcaaagtttgcttctttcatcacacagtactctacggggcaggtcagcgtggagattgagtgggagctgcagaaggagaacagcaaacgctggaaccccgaaatccagtacacttccaactacaacaagtctgttaatgtggactttactgtggacactaatggtgtgtattcagagcctcgccccattggcacaagatacctgactcgtaatctgtaa

SEQ ID NO: 902 - DNA, 2208 bp, Artificial Sequence
  Synthetic Polynucleotide
atggctgccgatggttatcttccagattggctcgaggacactctctctgaaggaataagacagtggtggaagctcaaacctggcccaccaccaccaaagcccgcagagcggcatcaggacgacagcaggggtcttgtgcttcctgggtacaagtacctcggacccttcaacggactcgacaagggagagccggtcaacgaggcagacgccgcggccctcgagcacgacaaggcctacgaccggcagctcgacagcggagacaacccgtacctcaagtacaaccacgccgacgcggagtttcaggagcgtcttaaagaagatacgtcttttgggggcaacctcggacgagcagtcttccaggcgaaaaagagggttcttgaacctctgggcctggttgaggaacctgttaagacggctccgggaaaaaagaggccggtagagcattctcctgcggagccagactcctcctcgggaaccggaaaggcgggccagcagcctgcgagaaagagattgaatttcggtcagactggagacgcagactccgtacctgacccccagcctctcggacagccaccagcagccccctctggtctgggaactaatacgatggctacaggcagtggcgcaccaatggcagacaataacgagggcgccgacggagtgggtaattcctcgggaaattggcattgcgattccacatggatgggcgacagagccatcaccaccagcacccgaacctgggccctgcccacctacaacaaccacctctacaagcaaatctccagccaatctggagcctcaaacgacaaccactactttggctacagcaccccttgggggtattttgacttcaacagattccactgtcacttctccccacgtgactggcaaagactcatcaacaacaactggggattccgacccaagagactcaacttcaagctctttaacattcaagtcaaagaggtcacgcagaatgacggtacgacgacgattgccaataaccttaccagcacggttcaagtctttactgactcggagtaccagctcccgtacgtcctcggctcggcgcatcaaggatgcctcccgccgtttccagcagacgtcttcatggtgccacagtatggatacctcaccctgaacaacgggagtcaggcggtaggacgctcttccttttactgcctggagtactttccttctcagatgctgcgtaccggaaacaactttaccttcagctacacctttgaggacgttcctttccacagcagctacgctcacagccagagtttggaccggctgatgaatcctctgatcgaccagtatctgtattacttgagcaaaacaaacgctccaagcggaaccaccacgatgtccaggcttcagttttctcaggccggagcgagtgacattcgggaccagtctaggaactggcttcctggaccctgttaccgccagcagcgagtatcaaaaacagctgcggataacaacaacagtgattattcgtggactggagctaccaagtaccacctcaatggaagagactctctggtgaatccgggcccagctatggccagccacaaggacgatgaagaaaaatattttcctcagagcggggttctcatctttggaaaacaagactcgggaaaaactaatgtggacattgaaaaggtcatgattacggacgaagaggaaatcaggaccaccaatcccgtggctacggagcagtatggttctgtatctaccaacctccagagcggcaacacacaggcagccaccacagatgtcaacacacaaggcgttcttccaggcatggtctggcaggacagagacgtgtacctgcaaggacccatctgggcaaagattcctcacacggacggacactttcacccttctcccctcatgggaggatttggactcaaacaccctcctccgcaaatcctcatcaagaatacccccgtacctgcgaatccttcgaccacattcagcgcggcaaagcttgcttctttcatcacacagtactctacggggcaggtcagcgtggagattgagtgggagctgcagaaggagaacagcaaacgctggaaccccgaaatccagtacacttccaactacaacaagtctgttaatgtggactttactgtggacactaatggtgtgtattcagagcctcgccccattggcacaagatacctgactcgtaatctgtaa

SEQ ID NO: 903 - DNA, 2208 bp, Artificial Sequence
  Synthetic Polynucleotide
atggctgccgatggttatcttccagattggctcgaggacactctctctgaaggaataagacagtggtggaagctcaaacctggcccaccaccaccaaagcccgcagagcggcatcaggacgacagcaggggtcttgtgcttcctgggtacaagtacctcggacccttcaacggactcgacaagggagagccggtcaacgaggcagacgccgcggccctcgagcacgacaaggcctacgaccggcagctcgacagcggagacaacccgtacctcaagtacaaccacgccgacgcggagtttcaggagcgtcttaaagaagatacgtcttttgggggcaacctcggacgagcagtcttccaggcgaaaaagagggttcttgaacctctaggcctggttgaggaacctgttaagacggctccgggaaaaaagaggccggtagagcattctcctgcggagccagactcctcctcgggaaccggaaaggcgggccagcagcctgcgagaaagagattgaatttcggtcagactggagacgcagactccgtacctgacccccagcctcccggacagccaccagcagccccctctggtctgggaactaatacgatggctacaggcagtggcgcaccaatggcagacaataacgagggcgccgacggagtgggtaattcctcgggaaattggcattgcgattccacatggatgggcgacagagtcatcaccaccagcacccgaacctgggccctgcccacctacaacaaccacctctacaagcaaatctccagccaatctggagcctcaaacgacaaccactactttggctacagcaccccttgggggtattttgacttcaacagattccactgtcacttctccccacgtgactggcaaagactcatcaacaacaactggggattccgacccaagagactcaacttcaagctctttaacattcaagtcaaagaggtcacgcagaatgacggtacgacgacgattgccaataaccttaccagcacggttcaagtctttactgactcggagtaccagctcccgtacgtcctcggctcggcgcatcaaggatgcctcccgccgtttccagcagacgtcttcatggtgccacagtatggatacctcaccctgaacaacgggagtcaggcggtaggacgctcttccttttactgcctggagtactttccttctcagatgctgcgtaccggaaacaactttaccttcagctacacctttgaggacgttcctttccacagcagctacgctcacagccagagtttggaccggctgatgaatcctctgatcgaccagtatctgtattacttgagcaaaacaaacgctccaagcggaaccaccacgatgtccaggcttcagttttctcaggccggagcgagtgacattcgggaccagtctaggaactggcttcctggaccctgttaccgccagcagcgagtatcaaaaacagctgcggataacaacaacagtgattattcgtggactggagctaccaagtaccacctcaatggaagagactctctggtgaatccgggcccagctatggccagccacaaggacgatgaagaaaaatattttcctcagagcggggttctcatctttggaaaacaagactcgggaaaaactaatgtggacattgaaaaggtcatgattacagacgaagaggaagtcaggaccaccaatcccgtggctacggagcagtatggttctgtatctaccaacctccagagcggcaacacacaggcagccaccacagatgtcaacacacaaggcgttcttccaggcatggtctggcaggacagagacgtgtacctgcaaggacccatctgggcaaagattcctcacacggacggacactttcacccttctcccctcatgggaggatttggactcaaacaccctcctccgcaaatcctcatcaagaatacccccgtacctgcgaatccttcgaccacattcagcgcggcaaagtttgcttctttcatcacacagtactctacggggcaggtcagcgtggagattgagtgggagctgcagaaggagaacagcaaacgctggaaccccgaaatccagtacacttccaactacaacaagtctgttaatgtggactttactgtggacactaatggtgtgtattcagagcctcgccccattggcacaggatacctgactcgtaatctgtaa

SEQ ID NO: 904 - DNA, 2208 bp, Artificial Sequence
  Synthetic Polynucleotide
atggctgccgatggttatcttccagattggctcgaggacactctctctgaaggaataagacagtggtggaagctcaaacctggcccaccaccaccaaagcccgcagagcggcatcaggacgacagcaggggtcttgtgcttcctgggtacaagtacctcggacccttcaacggactcgacaagggagagccggtcaacgaggcagacgccgcggccctcgagcacgacaaggcctacgaccggcagctcgacagcggagacaacccgtacctcaagtacaaccacgccgacgcggagtttcaggagcgtcttaaagaagatacgtcttttgggggcaacctcggacgagcagtcttccaggcgaaaaagagggttcttgaacctctgggcctggttgaggaacctgttaagacggctccgggaaaaaagaggccggtagagcattctcctgcggagccagactcctcctcgggaaccggaaaggcgggccagcagcctgcgagaaagagattgaatttcggtcagactggagacgcagactccgtacctgacccccagcctctcggacagccaccagcagccccctctggtctgggaactaatacggtggctacaggcagtggcgcaccaatggcagacaataacgagggcgccgacggagtgggtaattcctcgggaaattggcattgcgattccacatggatgggcgacagagtcatcaccaccagcacccgaacctgggccctgcccacctacaacaaccacctctacaagcaaatctccagccaatctggagcctcaaacgacaaccactactttggctacagcaccccttgggggtattttgacttcaacagattccactgtcacttctccccacgtgactggcaaagactcatcaacaacaactggagattccgacccaagagactcaacttcaagctctttaacattcaagtcaaagaggtcacgcagaatgacggtacgacgacgattgccgataaccttaccagcacggttcaagtctttactgactcggagtaccagctcccgtacgtcctcggctcggcgcatcaaggatgcctcccgccgtttccagcagacgtcttcatggtgccacagtatggatacctcaccctgaacaacgggagtcaggcggtaggacgctcttccttttactgcctggagtactttccttctcagatgctgcgtaccggaaacaactttaccttcagctacacctttgaggacgttcctctccacagcagctacgctcacagccagagtttggaccggctgatgaatcctctgatcgaccagtatctgtattacttgagcaaaacaaacgctccaagcggaaccaccacgatgtccaggcttcagttttctcaggccggagcgagtgacattcgggaccagtctaggaactggcttcctggaccctgttaccgccagcagcgagtatcaaaaacagctgcggataacaacaacagtgattattcgtggactggagctaccaagtaccacctcaatggaagagactctctggtgaatccgggcccagctatggccagccacaaggacgatgaagaaaaatattttcctcagagcggggttctcatctttggaaaacaagactcgggaaaaactaatgtggacattgaaaaggtcatgattacagacgaagaggaaatcaggaccaccaatcccgtggctacggagcagtatggttctgtatctaccaacctccagagcggcaacacacaggcagccaccacagatgtcaacacacaaggcgttcttccaggcatggtctggcaggacagagacgtgtacctgcaaggacccatctgggcaaagattcctcacacggacggacactttcacccttctcccctcatgggaggatttggactcaaacaccctcctccgcaaatcctcatcaagaatacccccgtacctgcgaatccttcgaccacattcagcgcggcaaagcttgcttctttcatcacacagtactctacggggcaggtcagcgtggagattgagtgggagctgcagaaggagaacagcaaacgctggaaccccgaaatccagtacacttccaactacaacaagtctgttaatgtggactttactgcggacactaatggtgtgtattcagagcctcgccccattggcacaagatacctgactcgtaatctgtaa

SEQ ID NO: 905 - DNA, 2208 bp, Artificial Sequence
  Synthetic Polynucleotide
atggctgccgatggttatcttccagattggctcgaggacactctctctgaaggaataagacagtggtggaagctcaaacctggcccaccaccaccaaagcccgcagagcggcatcaggacgacagcaggggtcttgtgcttcctgggtacaagtacctcggacccttcaacggactcgacaagggagagccggtcaacgaggcagacgccgcggccctcgagcacgacaaggcctacgaccggcagctcgacagcggagacaacccgtacctcaagtacaaccacgccgacgcggagtttcaggagcgtcttaaagaggatacgtcttttgggggcaacctcggacgagcagtcttccaggcgaaaaagagggttcttgaacctctgggcctggttgaggaacctgttaagacggctccgggaaaaaagaggccggtagagcattctcctgcggagccagactcctcctcgggaaccggaaaggcgggccagcagcctgcgagaaagagatcgaatttcggtcagactggagacgcagactccgtacctgacccccagcctctcggacagccaccagcagccccctctggtctgggaactaatacgatggctacaggcagtggcgcaccaatggcagacaataacgagggcgccgacggagtgggtaattcctcgggaaattggcattgcgattccacatggatgggcgacagagtcatcaccaccagcacccgaacctgggccctgcccacctacaacaaccacctctacaagcaaatctccagccaatctggagcctcaaacgacaaccactactttggctacagcaccccttgggggtattttgacttcaacagattccactgtcacttctccccacgtgactggcaaagactcatcaacaacaactggggattccgacccaagagactcaacttcaagctctttaacattcaagtcaaagaggtcgcgcagaatgacggtacgacgacgattgccaataaccttaccagcacggttcaagtctttactgactcggagtaccagctcccgtacgtcctcggctcggcgcatcaaggatgcctcccgccgtttccagcagacgtcttcatggtgccacagtatggatacctcaccctgaacaacgggagtcaggcggtaggacgctcttccttttactgcctggagtactttccttctcagatgctgcgtaccggaaacaactttaccttcagctacacctttgaggacgttcctttccacagcagctacgctcacagccagagtttggaccggctgatgaatcctctgatcgaccagtatctgtattacttgagcaaaacaaacgctccaagcggaaccaccacgatgtccaggcttcagttttctcaggccggagcgagtgacattcgggaccagtctaggaactggcttcctggaccctgttaccgccagcagcgagtatcaaaaacagctgcggataacaacaacagtgattattcgtggactggagctaccaagtaccacctcaatggaagagactctctggtgaatccgggcccagctatggccagccacaaggacgatgaagaaaaatattttcctcagagcggggttctcatctttggaaaacaagactcgggaaaaactaatgtggacattaaaaaggtcatgattacagacgaagaggaaatcaggaccaccaatcccgtggctacggagcagtatggttctgtatctaccaacctccagagcggcaacacacaggcagccaccacagatgtcaacacacaaggcgttcttccaggcatggtctggcaggacagagacgtgtacctgcaaggacccatctgggcaaagatccctcacacggacggacactttcacccttctcccctcatgggaggatttggactcaaacaccctcctccgcaaatcctcatcaagaatacccccgtacctgcgaatccttcgaccacattcagcgcggcaaagtttgcttctttcatcacacagtactctacggggcaggtcagcgtggagattgagtgggagctgcagaaggagaacagcaaacgctggaaccccgaaatccagtacacttccaactacaacaagtctgttaatgtggactttactgtggacactaatggtgtgtattcagagcctcgccccattggcacaagatacctgactcgtaatctgtaa

SEQ ID NO: 906 - DNA, 2205 bp, Artificial Sequence
  Synthetic Polynucleotide
atggctgccgatggttatcttccagattggctcgaggacactctctctgaaggaataagacagtggtggaagctcaaacctggcccaccaccaccaaagcccgcagagcggcatcaggacgacagcaggggtcttgtgcttcctgggtacaagtacctcggacccttcaacggactcgacaagggagagccggtcaacgaggcagacgccgcggccctcgagcacgacaaggcctacgaccggcagctcgacagcggagacaacccgtacctcaagtacaaccacgccgacgcggagtttcaggagcgtcttaaagaagatacgtcttttgggggcaacctcggacgagcagtcttccaggcgaaaaagagggttcttgaacctctgggcctggttgaggaacctgttaagacggctccgggaaaaaagaggccggtagagcattctcctgcggagccagactcctcctcgggaaccggaaaggcgggccagcagcctgcgagaaagagattgaatttcggtcagactggagacgcagactccgtacctgacccccagcctctcggacagccaccagcagccccctctggtctgggaactaatacgatggctacaggcagtggcgcaccaatggcagacaataacgagggcgccgacggagtgggtaattcctcgggaaattggcattgcgattccacatggatgggcgacagagtcatcaccaccagcacccgaacctgggccctgcccacctacaacaaccacctctacaagcaaatctccagccaatctggagcctcaaacgacaaccactactttggctacagcaccccttgggggtattttgacttcaacagattccactgtcacttctccccacgtgactggcaaagactcatcaacaactggggattccgacccaagagactcaacttcaagctctttaacattcaagtcaaagaggtcacgcagaatgacggtacgacgacgattgccaataaccttaccagcacggttcaagtctttactgactcggagtaccagctcccgtacgtcctcggctcggcgcatcaaggatgcctcccgccgtttccagcagacgtcttcatggtgccacagtatggatacctcaccctgaacaacgggagtcaggcggtaggacgctcttccttttactgcctggagtactttccttctcagatgctgcgtaccggaaacaactttaccttcagctacacctttgaggacgttcctttccacagcagctacgctcacagccagagtttggaccggctgatgaatcctctgatcgaccagtatctgtattacttgagcaaaacaaacgctccaagcggaaccaccacgatgtccaggcttcagttttctcaggccggagcgagtgacattcgggaccagtctaggaactggcttcctggaccctgttaccgccagcagcgagtatcaaaaacagctgcggataacaacaacagtgattattcgtggactggagctaccaagtaccacctcaatggaagagactctctggtgaatccgggcccagctatggccagccacaaggacgatgaagaaaaatattttcctcagagcggggttctcatctttggaaaacaagactcgggaaaaactaatgtggacattgaaaaggtcatgattacagacgaagaggaaatcaggaccaccaatcccgtggctacggagcagtatggttctgtatctaccaacctccagagcggcaacacacaggcagccaccacagatgtcaacacacaaggcgttcttccaggcatggtctggcaggacagagacgtgtacctgcaaggacccatctgggcaaagattcctcacacggacggacactttcacccttctcccctcatgggaggatttggactcaaacaccctcctccgcaaatcctcatcaagaatacccccgtacctgcgaatccttcgaccacattcagcgcggcaaagtttgcttctttcatcacacagtactctacggggcaggtcagcgtggagattgagtgggagctgcagaaggagaacagcaaacgctggaaccccgaaatccagtacacttccaactacaacaagtctgttaatgtggactttactgtggacactaatggtgtgtattcagagcctcgccccattggcacaagatacctgactcgtaatctgtaa

SEQ ID NO: 907 - DNA, 2208 bp, Artificial Sequence
  Synthetic Polynucleotide
atggctgccgatggttatcttccagattggctcgaggacactctctctgaaggaataagacagtggtggaagctcaaacctggcccaccaccaccaaagcccgcagagcggcatcaggacgacagcaggggtcttgtgcttcctgggtacaagtacctcggacccttcaacggactcgacaagggagagccggtcaacgaggcagacgccgcggccctcgagcacgacaaggcctacgaccggcagctcgacagcggagacaacccgtacctcaagtacaaccacgccgacgcggagtttcaggagcgtcttaaagaagatacgtcttttgggggcaacctcggacgagcagtcttccaggcgaaaaagagggttcttgaacctctgggcctggttgaggaacctgttaagacggctccgggaaaaaagaggccggtagagcattctcctgcggagccagactcctcctcgggaaccggaaaggcgggccagcagcctgcgagaaagagattgaatttcggtcagactggagacgcagactccgtacctgacccccagcctctcggacagccaccagcagccccctctggtctgggaactaatacgatggctacaggcagtggcgcaccaatggcagacaataacgagggcgccgacggagtgggtaattcctcgggaaattggcattgcgattccacatggatgggcgacagagtcatcaccaccagcacccgaacctgggccctgcccacctacaacaaccacctctacaagcaaatctccagccaatctggagcctcaaacgacaaccactactttggctacagcaccccttgggggtattttgacttcaacagattccactgtcacttctccccacgtgactggcaaagactcatcaacaacaactggggattccgacccaagagactcaacttcaagctctttaacattcaagtcaaagaggtcacgcagaatgacggtacgacgacgattgccaataaccttaccagcacggttcaagtctttactgactcggagtaccagctcccgtacgtcctcggctcggcgcatcaaggatgcctcccgccgtttccagcagacgtcttcatggtgccacagtatggatacctcaccctgaacaacgggagtcaggcggtaggacgctcttccttttactgcctggagtactttccttctcagatgctgcgtaccggaaacaactttaccttcagctacacctttgaggacgttcctttccacagcagctacgctcacagccagagtttggaccggctgatgaatcctctgatcgaccagtatctgtattacttgagcaaaacaaacgctccaagcggaaccaccacgatgtccaggcttcagttttctcaggccggagcgagtgacattcgggaccagtctaggaactggcttcctggaccctgttaccgccagcagcgagtatcaaaaacagctgcggataacaacaacagtgattattcgtggactggagctaccaagtaccacctcaatggaagagactctctggtgaatccgggcccagctatggccagccacaaggacgatgaagaaaaatattttcctcagagcggggttctcatctttggaaaacaagactcgggaaaaactaatgtggacattgaaaaggtcatgattacagacgaagaggaaatcaggaccaccaatcccgtggctacggagcagtatggttctgtatctaccaacctccagagcggcaacacacaggcagccaccacagatgtcaacacacaaggcgttcttccaggcatggtctggcaggacagagacgtgtacctgcaaggacccatctgggcaaagattcctcacacggacggacactttcacccttctcccctcatgggaggatttggactcaaacaccctcctccgcaaatcctcatcaagaatacccccgtacctgcgaatccttcgaccacattcagcgcggcaaagtttgcttctttcatcacacagtactctacggggcaggtcagcgtggagattgagtgggagctgcagaaggagaacagcaaacgctggaaccccgaaatccagtacacttccaactacaacaagtctgttaatgtggactttactgtggacactaatggtgtgtattcagagcctcgccccattgacacaagatacctgactcgtaatctgtaa

SEQ ID NO: 908 - DNA, 2208 bp, Artificial Sequence
  Synthetic Polynucleotide
atggctgccgatggttatcttccagattggctcgaggacactctctctgaaggaataagacagtggtggaagctcaaacctggcccaccaccaccaaagcccgcagagcggcatcaggacgacagcaggggtcttgtgcttcctgggtacaagtacctcggacccttcaacggactcgacaagggagagccggtcaacgaggcagacgccgcggccctcgagcacgacaaggcctacgaccggcagctcgacagcggagacaacccgtacctcaagtacaaccacgccgacgcggagtttcaggagcgtcttaaagaagatacgtcttttgggggcaacctcggacgagcagtcttccaggcgaaaaagagggttcttgaacctctgggcctggttgaggaacctgttaagacggctccgggaaaaaagaggccggtagagcattctcctgcggagccagactcctcctcgggaaccggaaaggcgggccagcagcctgcgagaaagagattgaatttcggtcagactggagacgcagactccgtacctgacccccagcctctcggacagccaccagcagccccctctggtctgggaactaatacgatggctacaggcagtggcgcaccaatggcagacaataacgagggcgccgacggagtgggtaattcctcgggaaattggcattgcgattccacatggatgggcgacagagtcatcaccaccagcacccgaacctgggccctgcccacctacaacaaccacctctacaagcaaatctccagccaatctggagcctcaaacgacaaccactactttggctacagcaccccttgggggtattttgacttcaacagattccactgtcacttctccccacgtgactggcaaagactcatcaacaacaactggggattccgacccaagagactcaacttcaagctctttaacattcaagtcaaagaggtcacgcagaatgacggtacgacgacgattgccaataaccttaccagcacggttcaagtctttactgactcggagtaccagctcccgtacgtcctcggctcggcgcatcaaggatgcctcccgccgtttccagcagacgtcttcatggtgccacagtatggatacctcaccctgaacaacgggagtcaggcggtaggacgctcttccttttactgcctggagtactttccttctcagatgctgcgtaccggaaacaactttaccttcagctacacctttgaggacgttcctttccacagcagctacgctcacagccagagtttggaccggctgatgaatcctctgatcaaccagtatctgtattacttgagcaaaacaaacgctccaagcggaaccaccacgatgtccaggcttcagttttctcaggccggagcgagtgacattcgggaccagtctaggaactggcttcctggaccctgttaccgccagcagcgagtatcaaaaacagctgcggataacaacaacagtgattattcgtggactggagctaccaagtaccacctcaatggaagagactctctggtgaatccgggcccagctatggccagccacaaggacgatgaagaaaaatattttcctcagagcggggttctcatctttggaaaacaagactcgggaaaaactaatgtggacattgaaaaggtcatgattacagacgaagaggaaatcaggaccaccaatcccgtggctacggagcagtatggttctgtatctaccaacctccagagcggcaacacacaggcagccaccacagatgtcaacacacaaggcgttcttccaggcatggtctggcaggacagagacgtgtacctgcaaggacccatctgggcaaagattcctcacacggacggacactttcacccttctcccctcatgggaggatttggactcaaacaccctcctccgcaaatcctcatcaagaatacccccgtacctgcgaatccttcgaccacattcagcgcggcaaagtttgcttctttcatcacacagtactctacggggcaggtcagcgtggagattgagtgggagctgcagaaggagaacagcaaacgctggaaccccgaaatccagtacacttccaactacaacaagtctgttaatgtggactttactgtggacactaatggtgtgtattcagagcctcgccccattggcacaagatacctgactcgtaatctgtaa

SEQ ID NO: 909 - DNA, 2208 bp, Artificial Sequence
  Synthetic Polynucleotide
atggctgccgatggttatcttccagattggctcgaggacactctctctgaaggaataagacagtggtggaagctcaaacctggcccaccaccaccaaagcccgcagagcggcatcaggacgacagcaggggtcttgtgcttcctgggtacaagtacctcggacccttcaacggactcgacaagggagagccggtcaacgaggcagacgccgcggccctcgagcacgacaaggcctacgaccggcagctcgacagcggagacaacccgtacctcaagtacaaccacgccgacgcggagtttcaggagcgtcttaaagaagatacgtcttttgggggcaacctcggacgagcagtcttccaggcgaaaaagagggttcttgaacctctgggcctggttgaggaacctgttaagatggctccgggaaaaaagaggccggtagagcattctcctgcggagccagactcctcctcgggaaccggaaaggcgggccagcagcctgcgagaaagagattgaatttcggtcagactggagacgcagactccgtacctgacccccagcctctcggacagccaccagcagccccctctggtctgggaactaatacgacggctacaggcagtggcgcaccaatggcagacaataacgagggcgccgacggagtgggtaattcctcgggaaattggcattgcgattccacatggatgggcgacagagtcatcaccaccagcacccgaacctgggccctgcccacctacaacaaccacctctacaagcaaatctccagccaatctggagcctcaaacgacaaccactactttggctacagcaccccttgggggtattttgacttcaacagattccactgtcacttctccccacgtgactggcaaagactcatcaacaacaactggggattccgacccaagagactcaacttcaagctctttaacattcaagtcaaagaggtcacgcagaatgacggtacgacgacgattgccaataaccttaccagcacggttcaagtctttactgactcggagtaccagctcccgtacgtcctcggctcggcgcatcaaggatgcctcccgccgtttccagcagacgtcttcatggtgccacagtatggatacctcaccctgaacaacgggagtcaggcggtaggacgctcttccttttactgcctggagtactttccttctcagatgctgcgtaccggaaacaactttaccttcagctacacctttgaggacgttcctttccacagcagctacgctcacagccagagtttggaccggctgatgaatcctctgatcgaccagtatctgtattacttgagcaaaacaaacgctccaagcggaaccaccacgatgtccaggcttcagttttctcaggccggagcgagtgacattcgggaccagtctaggaactggcttcctggaccctgttaccgccagcagcgagtatcaaaaacagctgcggataacaacaacagtgattattcgtggactggagctaccaagtaccacctcaatggaagagactctctggtgaatccgggcccagctatggccagccacaaggacgatgaagaaaaatattttcctcagagcggggttctcatctttggaaaacaagactcgggaaaaactaatgtggacattgaaaaggtcatgattacagacgaagaggaaatcaggaccaccaatcccgtggctacggagcagtatggttctgtatctaccaacctccagagcggcaacacacaggcagccaccacagatgtcaacacacaaggcgttcttccaggcatggtctggcaggacagagacgtgtacctgcaaggacccatctgggcaaagattcctcacacggacggacactttcacccttctcccctcatgggaggatttggactcaaacaccctcctccgcaaatcctcatcaagaatacccccgtacctgcgaatccttcgaccacattcagcgcggcaaagtttgcttctttcatcacacagtactctacggggcaggtcagcgtggagattgagtgggagctgcagaaggagaacagcaaacgctggaaccccgaaatccagtacacttccaactacaacaagtctgttaatgtggactttactgtggacactaatggtgtgtattcagagcctcgccccattggcacaagatacctgactcgtaatctgtaa

SEQ ID NO: 910 - DNA, 2208 bp, Artificial Sequence
  Synthetic Polynucleotide
atggctgccgatggttatcttccagattggctcgaggacactctctctgaaggaataagacagtggtggaagctcaaacctggcccaccaccaccaaagcccgcagagcggcatcaggacgacagcaggggtcttgtgcttcctgggtacaagtacctcggacccttcaacggactcgacaagggagagccggtcaacgaggcagacgccgcggccctcgagcacgacaaggcctacgaccggcagctcgacagcggagacaacccgtacctcaagtacaaccacgccgacgcggagtttcaggagcgtcttaaagaagatacgtcttttgggggcaacctcggacgagcagtcttccaggcgaaaaagagggttcttgaacctctgggcctggttgaggaacctgttaagacggctccgggaaaaaagaggccggtagagcattctcctgcggagccagactcctcctcgggaaccggaaaggcgggccagcagcctgcgagaaagagattgaatttcggtcagactggagacgcagactccgtacctgacccccagcctctcggacagccaccagcagccccctctggtctgggaactaatacgatggctacaggcagtggcgcaccaatggcagacaataacgagggcgccgacggagtgggtaattcctcgggaaattggcattgcgattccacatggatgggcgacagagtcatcaccaccagcacccgaacctgggccctgcccacctacaacaaccacctctacaagcaaatctccagccaatctggagcctcaaacgacaaccactactttggctacagcaccccttgggggtattttgacttcaacagattccactgtcacttctccccacgtgactggcaaagactcatcaacaacaactggggattccgacccaagagactcaacttcaagctctttaacattcaagtcaaagaggtcacgcagaatgacggtacgacgacgattgccaataaccttaccagcacggttcaagtctttactgactcggagtaccagctcccgtacgtcctcggctcggcgcatcaaggatgcctcccgccgtttccagcagacgtcttcatggtgccacagtatggatacctcaccctgaacaacgggagtcaggcggtaggacgctcttccttttactgcctggagtactttccttctcagatgctgcgtaccggaaacaactttaccttcagctacacctttgaggacgttcctttccacagcagctacgctcacagccagagtttggaccggctgatgaatcctctgatcgaccagtatctgtattacttgagcaaaacaaacgctccaagcggaaccaccacgatgtccaggcttcagttttctcaggccggagcgagtgacattcgggaccagtctaggaactggcttcctggaccctgttaccgccagcagcgagtatcaaaaacagctgcggataacaacaacagtgattattcgtggactggagctaccaagtaccacctcaatggaagagactctctggtgaatccgggcccagctatggccagccacaaggacgatgaagaaaaatattttcctcagagcggggttctcatctttggaaaacaagactcgggaaaaactaatgtggacattgaaaaggtcatgattacagacgaagaggaaatcaggaccaccaatcccatggctacggagcagtatggttctgtatctaccaacctccagagcggcaacacacaggcagccaccacagatgtcaacacacaaggcgttcttccaggcatggtctggcaggacagagacgtgtacctgcaaggacccatctgggcaaagattcctcacacggacggacactttcacccttctcccctcatgggaggatttggactcaaacaccctcctccgcaaatcctcatcaagaatacccccgtacctgcgaatccttcgaccacattcagcgcggcaaagtttgcttctttcatcacacagtactctacggggcaggtcagcgtggagattgagtgggagctgcagaaggagaacagcaaacgctggaaccccgaaatccagtacacttccaactacaacaagtctgttaatgtggactttactgtggacactaatggtgtgtattcagagcctcgccccattggcacaagatacctgactcgtaatctgtaa

SEQ ID NO: 911 - DNA, 2208 bp, Artificial Sequence
  Synthetic Polynucleotide
atggctgccgatggttatcttccagattggctcgaggacactctctctgaaggaataagacagtggtggaagctcaaacctggcccaccaccaccaaagcccgcagagcggcatcaggacgacagcaggggtcttgtgcttcctgggtacaagtacctcggacccttcaacggactcgacaagggagagccggtcaacgaggcagacgccgcggccctcgagcacgacaaggcctacgaccggcagctcgacagcggagacaacccgtacctcaagtacaaccacgccgacgcggagtttcaggagcgtcttaaagaagatacgtcttttgggggcaacctcggacgagcagtcttccaggcgaaaaagagggttcttgaacctctgggcctggttgaggaacctgttaagacggctccgggaaaaaagaggccggtagagcattctcctgcggagccagactcctcctcgggaaccggaaaggcgggccagcagcctgcgagaaagagattgaatttcggtcagactggagacgcagactccgtacctgacccccagcctctcggacagccaccagcagccccctctggtctgggaactaatacgatggctacaggcagtggcgcaccaatggcagacaataacgagggcgccgacggagtgggtaattcctcgggaaattggcattgcgattccacatggatgggcgacagagtcatcaccaccagcacccgaacctgggccctgcccacctacaacaaccacctctacaagcaaatctccagccaatctggagcctcaaacgacaaccactactttggctacagcaccccttgggggtattttgacttcaacagattccactgtcacttctccccacgtgactggcaaagactcatcaacaacaactggggattccgacccaagagactcaacttcaagctctttaacattcaagtcaaagaggtcacgcagaatgacggtacgacgacgattgccaataaccttaccagcacggttcaagtctttactgactcggagtaccagctcccgtacgtcctcggctcggcgcatcaaggatgcctcccgccgtttccagcagacgtctccatggtgccacagtatggatacctcaccctgaacaacgggagtcaggcggtaggacgctcttccttttactgcctggagtactttccttctcagatgctgcgtaccggaaacaactttaccttcagctacacctttgaggacgttcctttccacagcagctacgctcacagccagagtttggaccggctgatgaatcctctgatcgaccagtatctgtattacttgagcaaaacaaacgctccaagcggaaccaccacgatgtccaggcttcagttttctcaggccggagcgagtgacattcgggaccagtctaggaactggcttcctggaccctgttaccgccagcagcgagtatcaaaaacagctgcggataacaacaacagtgattattcgtggactggagctaccaagtaccacctcaatggaagagactctctggtgaatccgggcccagctatggccagccacaaggacgatgaagaaaaatattttcctcagagcggggttctcatctttggaaaacaagactcgggaaaaactaatgtggacattgaaaaggtcatgattacagacgaagaggaaatcaggaccaccaatcccgtggctacggagcagtatggttctgtatctaccaacctccagagcggcaacacacaggcagccaccacagatgtcaacacacaaggcgttcttccaggcatggtctggcaggacagagacgtgtacctgcaaggacccatctgggcaaagattcctcacacggacggacactttcacccttctcccctcatgggaggatttggactcaaacaccctcctccgcaaatcctcatcaagaatacccccgtacctgcgaatccttcgaccacattcagcgcggcaaagcttgcttctttcatcacacagtactctacggggcaggtcagcgtggagattgagtgggagctgcagaaggagaacagcaaacgctggaaccccgaaatccagtacacttccaactacaacaagtctgttaatgtggactttactgtggacactaatggtgtgtattcagagcctcgccccattggcacaagatacctgactcgtaatctgtaa

SEQ ID NO: 912 - DNA, 2208 bp, Artificial Sequence
  Synthetic Polynucleotide
atggctgccgatggttatcttccagattggcccgaggacactctctctgaaggaataagacagtggtggaagctcaaacctggcccaccaccaccaaagcccgcagagcggcatcaggacgacagcaggggtcttgtgcttcctgggtacaagtacctcggacccttcaacggactcgacaagggagagccggtcaacgaggcagacgccgcggccctcgagcacgacaaggcctacgaccggcagctcgacagcggagacaacccgtacctcaagtacaaccacgccgacgcggagtttcaggagcgtcttaaagaagatacgtcttttgggggcaacctcggacgagcagtcttccaggcgaaaaagagggttcttgaacctctgggcctggttgaggaacctgttaagacggctccgggaaaaaagaggccggtagagcattctcctgcggagccagactcctcctcgggaaccggaaaggcgggccagcagcctgcgagaaagagattgaatttcggtcagactggagacgcagactccgtacctgacccccagcctctcggacagccaccagcagccccctctggtctgggaactaatacgatggctacaggcagtggcgcaccaatggcagacaataacgagggcgccgacggagtgggtaattcctcgggaaattggcattgcgattccacatggatgggcgacagagtcatcaccaccagcacccgaacctgggccctgcccacctacaacaaccacctctacaagcaaatctccagccaatctggagcctcaaacgacaaccactactttggctacagcaccccttgggggtattttgacttcaacagattccactgtcacttctccccacgtgactggcaaagactcatcaacaacaactggggattccgacccaagagactcaacttcaagctctttaacattcaagtcaaagaggtcacgcagaatgacggtacgacgacgattgccaataaccttaccagcacggttcaagtctttactgactcggagtaccagctcccgtacgtcctcggctcggcgcatcaaggatgcctcccgccgtttccagcagacgtcttcatggtgccacagtatggatacctcaccctgaacaacgggagtcaggcggtaggacgctcttccttttactgcctggagtactttccttctcagatgctgcgtaccggaaacaactttaccttcagctacacctttgaggacgttcctttccacagcagctacgctcacagccagagtttggaccggctgatgaatcctctgatcgaccagtatctgtattacttgagcaaaacaaacgctccaagcggaaccaccacgatgtccaggcttcagttttctcaggccggagcgagtgacattcgggaccagtctaggaactggcttcctggaccctgttaccgccagcagcgagtatcaaaaacagctgcggataacaacaacagtgattattcgtggactggagctaccaagtaccacctcaatggaagagactctctggtgaatccgggcccagctatggccagccacaaggacgatgaagaaaaatattttcctcagagcggggttctcatctttggaaaacaagactcgggaaaaactaatgtggacattgaaaaggtcatgattacagacgaagaggaaatcaggaccaccaatcccgtggctacggagcagtatggttctgtatctaccaacctccagagcggcaacacacaggcagccaccacagatgtcaacacacaaggcgttcttccaggcatggtctggcaggacagagacgtgtacctgcaaggacccatctgggcaaagattcctcacacggacggacactttcacccttctcccctcatgggaggatttggactcaaacaccctcctccgcaaatcctcatcaagaatacccccgtacctgcgaatccttcgaccacattcagcgcggcaaagtttgcttctttcatcacacagtactctacggggcaggtcagcgtggagattgagtgggagctgcagaaggagaacagcaaacgctggaaccccgaaatccagtacacttccaactacaacaagtctgttaatgtggactttactgtggacactaatggtgtgtattcagagcctcgccccattggcacaagatacctgactcgtaatctgtaa

SEQ ID NO: 913 - DNA, 2208 bp, Artificial Sequence
  Synthetic Polynucleotide
atggctgccgatggttatcttccagattggctcgaggacactctctctgaaggaataagacagtggtggaagctcaaacctggcccaccaccaccaaagcccgcagagcggcatcaggacgacagcaggggtcttgtgcttcctgggtacaagtacctcggacccttcaacggactcgacaagggagagccggtcaacgaggcagacgccgcggccctcgagcacgacaaggcctacgaccggcagctcgacagcggagacaacccgtacctcaagtacaaccacgccgacgcggagtttcaggagcgtcttaaagaagatacgtcttttgggggcaacctcggacgagcagtcttccaggcgaaaaagagggttcttgaacctctgggcctggttgaggaacctgttaagacggctccgggaaaaaagaggccggtagagcattctcctgcggagccagactcctcctcgggaaccggaaaggcgggccagcagcctgcgagaaagagattgaatttcggtcagactggagacgcagactccgtacctgacccccagcctctcggacagccaccagcagccccctctggtctgggaactaatacgatggctacaggcagtggcgcaccaatggcagacaataacgagggcgccgacggagtgggtaattcctcgggaaattggcattgcgattccacatggatgggcgacagagtcatcaccaccagcacccgaacctgggccctgcccacctacaacaaccacctctacaagcaaatctccagccaatctggagcctcaaacgacaaccactactttggctacagcaccccttgggggtattttgacttcaacagattccactgtcacttctccccacgtgactggcaaagactcatcaacaacaactggggattccgacccaagagactcaacttcaagctctttaacattcaagtcaaagaggtcacgcagaatgacggtacgacgacgattgccaataaccttaccagcacggttcaagtctttactgactcggagtaccagctcccgtacgtcctcggctcggcgcatcaaggatgcctcccgccgtttccagcagacgtcttcatggtgccacagtatggatacctcaccctgaacaacgggagtcaggcggtaggacgctcttccttttactgcctggagtactttccttctcagatgctgcgtaccggaaacaactttaccttcagctacacctttgaggacgttcctttccacagcagctacgctcacagccagagtttggaccggctgatgaatcctctgatcgaccagtatctgtattacttgagcaaaacaaacgctccaagcggaaccaccacgatgtccaggcttcagttttctcaggccggagcgagtgacattcgggaccagtctaggaactggcttcctggaccctgttaccgccagcagcgagtatcaaaaacagctgcggataacaacaacagtgattattcgtggactggagctaccaagtaccacctcaatggaagagactctctggtgaatccgggcccagctatggccagccacaaggacgatgaagaaaaattttttcctcagagcggggttctcatctttggaaaacaagactcgggaaaaactaatgtggacattgaaaaggtcatgattacagacgaagaggaaatcaggaccaccaatcccgtggctacggagcagtatggttctgtatctaccaacctccagagcggcaacacacaggcagccaccacagatgtcaacacacaaggcgttcttccaggcatggtctggcaggacagagacgtgtacctgcaaggacccatctgggcaaagattcctcacacggacggacactttcacccttctcccctcatgggaggatttggactcaaacaccctcctccgcaaatcctcatcaagaatacccccgtacctgcgaatccttcgaccacattcagcgcggcaaagtttgcttctttcatcacacagtactctacggggcaggtcagcgtggagattgagtgggagctgcagaaggagaacagcaaacgctggaaccccgaaatccagtacacttccaactacaacaagtctgttaatgtggactttactgtggacactaatggtgtgtattcagagcctcgccccattggcacaagatacctgactcgtaatctgtaa

SEQ ID NO: 914 - DNA, 2208 bp, Artificial Sequence
  Synthetic Polynucleotide
atggctgccgatggttatcttccagattggctcgaggacactctctctgaaggaataagacagtggtggaagctcaaacctggcccaccaccaccaaagcccgcagagcggcatcaggacgacagcaggggtcttgtgcttcctgggtacaagtacctcggacccttcaacggactcgacaagggagagccggtcaacgaggcagacgccgcggccctcgagcacgacaaggcctacgaccggcagctcgacagcggagacaacccgtacctcaagtacaaccacgccgacgcggagtttcaggagcgtcttaaagaagatacgtcttttgggggcaacctcggacgagcagtcttccaggcgaaaaagagggttcttgaacctctgggcctggttgaggaacctgttaagacggctccgggaaaaaagaggccggtagagcattctcctgcggagccagactcctcctcgggaatcggaaaggcgggccagcagcctgcgagaaagagattgaatttcggtcagactggagacgcagactccgtacctgacccccagcctctcggacagccaccagcagccccctctggtctgggaactaatacgatggctacaggcagtggcgcaccaatggcagacaataacgagggcgccgacggagtgggtaattcctcgggaaattggcattgcgattccacatggatgggcgacagagtcatcaccaccagcacccgaacctgggccctgcccacctacaacaaccacctctacaagcaaatctccagccaatctggagcctcaaacgacaaccactactttggctacagcaccccttgggggtattttgacttcaacagattccactgtcacttctccccacgtgactggcaaagactcatcaacaacaactggggattccgacccaagagactcaacttcaagctctttaacattcaagtcaaagaggtcacgcagaatgacggtacgacgacgattgccaataaccttaccagcacggttcaagtctttactgactcggagtaccagctcccgtacgtcctcggctcggcgcatcaaggatgcctcccgccgtttccagcagacgtcttcatggtgccacagtatggatacctcaccctgaacaacgggagtcaggcggtaggacgctcttccttttactgcctggagtactttccttctcagatgctgcgtaccggaaacaactttaccttcagctacacctttgaggacgttcctttccacagcagctacgctcacagccagagtttggaccggctgatgaatcctctgatcgaccagtatctgtattacttgagcaaaacaaacgctccaagcggaaccaccacgatgtccaggcttcagttttctcaggccggagcgagtgacattcgggaccagtctaggaactggcttcctggaccctgttaccgccagcagcgagtatcaaaaacagctgcggataacaacaacagtgattattcgtggactggagctaccaagtaccacctcaatggaagagactctctggtgaatccgggcccagctatggccagccacaaggacgatgaagaaaaatattttcctcagagcggggttctcatctttggaaaacaagactcgggaaaaactaatgtggacattgaaaaggtcatgattacagacgaagaggaaatcaggaccaccaatcccgtggctacggagcagtatggttctgtatctaccaacctccagagcggcaacacacaggcagccaccacagatgtcaacacacaaggcgttcttccaggcatggtctggcaggacagagacgtgtacctgcaaggacccatctgggcaaagattcctcacacggacggacactttcacccttctcccctcatgggaggatttggactcaaacaccctcctccgcaaatcctcatcaagaatacccccgtacctgcgaatccttcgaccacattcagcgcggcaaagtttgcttctttcatcacacagtactctacggggcaggtcagcgtggagattgagtgggagctgcagaaggagaacagcaaacgctggaaccccgaaatccagtacacttccaactacaacaagtctgttaatgtggactttactgtggacactaatggtgtgtattcagagcctcgccccattggcacaagatacctgactcgtaatctgtaa

SEQ ID NO: 915 - DNA, 2208 bp, Artificial Sequence
  Synthetic Polynucleotide
atggctgccgatggttatcttccagattggctcgaggacactctctctgaaggaataagacagtggtggaagctcaaacctggcccaccaccaccaaagcccgcagagcggcatcaggacgacagcaggggtcttgtgcttcctgggtacaagtacctcggacccttcaacggactcgacaagggagagccggtcaacgaggcagacgccgcggccctcgagcacgacaaggcctacgaccggcagctcgacagcggagacaacccgtacctcaagtacaaccacgccgacgcggagtttcaggagcgtcttaaagaagatacgtcttttgggggcaacctcggacgagcagtcttccaggcgaaaaagagggttcttgaacctctgggcctggttgaggaacctgttaagacggctccgggaaaaaagaggccggtagagcattctcctgcggagccagactcctcctcgggaaccggaaaggcgggccagcagcctgcgagaaagagattgaatttcggtcagactggagacgcagactccgtacctgacccccagcctctcggacagccaccagcagccccctctggtctgggaactaatacgatggctacaggcagtggcgcaccaatggcagacaataacgagggcgccgacggagtgggtaattcctcgggaaattggcattgcgattccacatggatgggcgacagagtcatcaccaccagcacccgaacctgggccctgcccacctacaacaaccacctctacaagcaaatctccagccaatctggagcctcaaacgacaaccactactttggctacagcaccccttgggggtattttgacttcaacagattccactgtcacttctccccacgtgactggcaaagactcatcaacaacaactggagattccgacccaagagactcaacttcaagctctttaacattcaagtcaaagaggtcacgcagaatgacggtacgacgacgattgccaataaccttaccagcacggttcaagtctttactgactcggagtaccagctcccgtacgtcctcggctcggcgcatcaaggatgcctcccgccgtttccagcagacgtcttcatggtgccacagtatggatacctcaccctgaacaacgggagtcaggcggtaggacgctcttccttttactgcctggagtactttccttctcagatgctgcgtaccggaaacaactttaccttcagctacacctttgaggacgttcctttccacagcagctacgctcacagccagagtttggaccggctgatgaatcctctgatcgaccagtatctgtattacttgagcaaaacaaacgctccaagcggaaccaccacgatgtccaggcttcagttttctcaggccggagcgagtgacattcgggaccagtctaggaactggcttcctggaccctgttaccgccagcagcgagtatcaaaaacagctgcggataacaacaacagtgattattcgtggactggagctaccaagtaccacctcaatggaagagactctctggtgaatccgggcccagctatggccagccacaaggacgatgaagaaaaatattttcctcagagcggggttctcatctttggaaaacaagactcgggaaaaactaatgtggacattgaaaaggtcatgattacagacgaagaggaaatcaggaccaccaatcccgtggctacggagcagtatggttctgtatctaccaacctccagagcggcaacacacaggcagccaccacagatgtcaacacacaaggcgttcttccaggcatggtctggcaggacagagacgtgtacctgcaaggacccatctgggcaaagattcctcacacggacggacactttcacccttctcccctcatgggaggatttggactcaaacaccctcctccgcaaatcctcatcaagaatacccccgtacctgcgaatccttcgaccacattcagcgcggcaaagcttgcttctttcatcacacagtactctacggggcaggtcagcgtggagattgagtgggagctgcagaaggagaacagcaaacgctggaaccccgaaatccagtacacttccaactacaacaagtctgttaatgtggactttactgtggacactaatggtgtgtattcagagcctcgccccattggcacaagatacctgactcgtaatctgtaa

SEQ ID NO: 916 - DNA, 2208 bp, Artificial Sequence
  Synthetic Polynucleotide
atggctgccgatggttatcttccagattggctcgaggacactctctctgaaggaataagacagtggtggaagctcaaacctggcccaccaccaccaaagcccgcagagcggcatcaggacgacagcaggggtcttgtgcttcctgggtacaagtacctcggacccttcaacggactcgacaagggagagccggtcaacgaggcagacgccgcggccctcgagcacgacaaggcctacgaccggcagctcgacagcggagacaacccgtacctcaagtacaaccacgccgacgcggagtttcaggagcgtcttaaagaagatacgtcttttgggggcaacctcggacgagcagtcttccaggcgaaaaagagggttcttgaacctctgggcctggttgaggaacctgttaagacggctccgggaaaaaagaggccggtagagcattctcctgcggagccagactcctcctcgggaaccggaaaggcgggccagcagcctgcgagaaagagattgaatttcggtcagactggagacgcagactccgtacctgacccccagcctctcggacagccaccagcagccccctctggtctgggaactaatacgatggctacaggcagtggcgcaccaatggcagacaataacgagggcgccgacggagtgggtaattcctcgggaaattggcattgcgattccacatggatgggcgacagagtcatcaccaccagcacccgaacctgggccctgcccacctacaacaaccacctctacaagcaaatctccagccaatctggagcctcaaacgacaaccactactttggctacagcactccttgggggtattttgacttcaacagattccactgtcacttctccccacgtgactggcaaagactcatcaacaacaactggggattccgacccaagagactcaacttcaagctctttaacattcaagtcaaagaggtcacgcagaatgacggtacgacgacgattgccaataaccttaccagcacggttcaagtctttactgactcggagtaccagctcccgtacgtcctcggctcggcgcatcaaggatgcctcccgccgtttccagcagacgtcttcatggtgccacagtatggatacctcaccctgaacaacgggagtcaggcggtaggacgctcttccttttactgcctggagtactttccttctcagatgctgcgtaccggaaacaactttaccttcagctacacctttgaggacgttcctttccacagcagctacgctcacagccagagtttggaccggctgatgaatcctctgatcgaccagtatctgtattacttgagcaaaacaaacgctccaagcggaaccaccacgatgtccaggcttcagttttctcaggccggagcgagtgacattcgggaccagtctaggaactggcttcctggaccctgttaccgccagcagcgagtatcaaaaacagctgcggataacaacaacagtgattattcgtggactggagctaccaagtaccacctcaatggaagagactctctggtgaatccgggcccagctatggccagccacaaggacgatgaagaaaaatattttcctcagagcggggttctcatctttggaaaacaagactcgggaaaaactaatgtggacattgaaaaggtcatgattacagacgaagaggaaatcaggaccaccaatcccgtggctacggagcagtatggttctgtatctaccaacctccagagcggcaacacacaggcagccaccacagatgtcaacacacaaggcgttcttccaggcatggtctggcaggacagagacgtgtacctgcaaggacccatctgggcaaagattcctcacacggacggacactttcacccttctcccctcatgggaggatttggactcaaacaccctcctccgcaaatcctcatcaagaatacccccgtacctgcgaatccttcgaccacattcagcgcggcaaagtttgcttctttcatcacacagtactctacggggcaggtcagcgtggagattgagtgggagctgcagaaggagaacagcaaacgctggaaccccgaaatccagtacacttccaactacaacaagtctgttaatgtggactttactgtggacactaatggtgtgtattcagagcctcgccccattggcacaagatacctggctcgtaatctgtaa

SEQ ID NO: 917 - DNA, 2208 bp, Artificial Sequence
  Synthetic Polynucleotide
atggctgccgatggttatcttccagattggctcgaggacactctctctgaaggaataagacagtggtggaagctcaaacctggcccaccaccaccaaagcccgcagagcggcatcaggacgacagcaggggtcttgtgcttcctgggtacaagtacctcggacccttcaacggactcgacaagggagagccggtcaacgaggcagacgccgcggccctcgagcacgacaaggcctacgaccggcagctcgacagcggagacaacccgtacctcaagtacaaccacgccgacgcggagtttcaggagcgtcttaaagaagatacgtcttttgggggcaacctcggacgagcagtcttccaggcgaaaaagagggttcttgaacctctgggcctggttgaggaacctgttaagacggctccgggaaaaaagaggccggtagagcattctcctgcggagccagactcctcctcgggaaccggaaaggcgggccagcagcctgcgaggaagagattgaatttcggtcagactggagacgcagactccgtacctgacccccagcctctcggacagccaccagcagccccctctggtctgggaactaatacgatggctacaggcagtggcgcaccaatggcagacaataacgagggcgccgacggagtgggtaattcctcgggaaattggcattgcgattccacatggatgggcgacagagtcatcaccaccagcacccgaacctgggccctgcccacctacaacaaccacctctacaagcaaatctccagccaatctggagcctcaaacgacgaccactactttggctacagcaccccttgggggtattttgacttcaacagattccactgtcacttctccccacgtgactggcaaagactcatcaacaacaactggggattccgacccaagagactcaacttcaagctctttaacattcaagtcaaagaggtcacgcagaatgacggtacgacgacgattgccaataaccttaccagcacggttcaagtctttactgactcggagtaccagctcccgtacgtcctcggctcggcgcatcaaggatgcctcccgccgtttccagcagacgtcttcatggtgccacagtatggatacctcaccctgaacaacgggagtcaggcggtaggacgctcttccttttactgcctggagtactttccttctcagatgctgcgtaccggaaacaactttaccttcagctacacctttgaggacgttcctttccacagcagctacgctcacagccagagtttggaccggctgatgaatcctctgatcgaccagtatctgtattacttgagcaaaacaaacgctccaagcggaaccaccacgatgtccaggcttcagttttctcaggccggagcgagtgacattcgggaccagtctaggaactggcttcctggaccctgttaccgccagcagcgagtatcaaaaacagctgcggataacaacaacagtgattattcgtggactggagctaccaagtaccacctcaatggaagagactctctggtgaatccgggcccagctatggccagccacaaggacgatgaagaaaaatattttcctcagagcggggttctcatctttggaaaacaagactcgggaaaaactaatgtggacattgaaaaggtcatgattacagacgaagaggaaatcaggaccaccaatcccgtggctacggagcagtatggttctgtatctaccaacctccagagcggcaacacacaggcagccaccacagatgtcaacacacaaggcgttcttccaggcatggtctggcaggacagagacgtgtacctgcaaggacccatctgggcaaagattcctcacacggacggacactttcacccttctcccctcatgggaggatttggactcaaacaccctcctccgcaaatcctcatcaagaatacccccgtacctgcgaatccttcgaccacattcagcgcggcaaagtttgcttctttcatcacacagtactctacggggcaggtcagcgtggagattgagtgggagctgcagaaggagaacagcaaacgctggaaccccgaaatccagtacacttccaactacaacaagtctgttaatgtggactttactgtggacactaatggtgtgtattcagagcctcgccccattggcacaagatacctgactcgtaatctgtaa

SEQ ID NO: 918 - DNA, 2208 bp, Artificial Sequence
  Synthetic Polynucleotide
atggctgccgatggttatcttccagattggctcgaggacactctctctgaaggaataagacagtggtggaagctcaaacctggcccaccaccaccaaagcccgcagagcggcatcaggacgacagcaggggtcttgtgcttcctgggtacaagtacctcggacccttcaacggactcgacaagggagagccggtcaacgaggcagacgccgcggccctcgagcacgacaaggcctacgaccggcagctcgacagcggagacaacccgtacctcaagtacaaccacgccgacgcggagtttcaggagcgtcttaaagaagatacgtcttttgggggcaacctcggacgagcagtcttccaggcgaaaaagggggttcttgaacctctgggcctggttgaggaacctgttaagacggctccgggaaaaaagaggccggtagagcattctcctgcggagccagactcctcctcgggaaccggaaaggcgggccagcagcctgcgagaaagagattgaatttcggtcagactggagacgcagactccgtacctgacccccagcctctcggacagccaccagcagccccctctggtctgggaactaatacgatggctacaggcagtggcgcaccaatggcagacaataacgagggcgccgacggagtgggtaattcctcgggaaattggcattgcgattccacatggatgggcgacagagtcatcaccaccagcacccgaacctgggccctgcccacctacaacaaccacctctacaagcaaatctccagccaatctggagcctcaaacgacaaccactactttggctacagcaccccttgggggtattttgacttcaacagattccactgtcacttctccccacgtgactggcaaagactcatcaacaacaactggggattccgacccaagagactcaacttcaagctctttaacattcaagtcaaagaggtcacgcagaatgacggtacgacgacgattgccaataaccttaccagcacggttcaagtctttactgactcggagtaccagctcccgtacgtcctcggctcggcgcatcaaggatgcctcccgccgtttccagcagacgtcttcatggtgccacagtatggatacctcaccctgaacaacgggagtcaggcggtaggacgctcttccttttactgcctggagtactttccttctcagatgctgcgtaccggaaacaactttaccttcagctacacctttgaggacgttcctttccacagcagctacgctcacagccagagtttggaccggctgatgaatcctctgatcgaccagtatctgtattacttgagcaaaacaaacgctccaagcggaaccaccacgatgtccaggcttcagttttctcaggccggagcgagtgacattcgggaccagtctaggaactggcttcctggaccctgttaccgccagcagcgagtatcaaaaacagctgcggataacaacaacagtgattattcgtggactggagctaccaagtaccacctcaatggaagagactctctggtgaatccgggcccagctatggccagccacaaggacgatgaagaaaaatattttcctcagagcggggttctcatctttggaaaacaagactcgggaaaaactaatgtggacattgaaaaggtcatgattacagacgaagaggaaatcaggaccaccaatcccgtggctacggagcagtatggttctgtatctaccaacctccagagcggcaacacacaggcagccaccacagatgtcaacacacaaggcgttcttccaggcatggtctggcaggacagagacgtgtacctgcaaggacccatctgggcaaagattcctcacacggacggacactttcacccttctcccctcatgggaggatttggactcaaacaccctcctccgcaaatcctcatcaagaatacccccgtacctgcgaatccttcgaccacattcagcgcggcaaagcttgcttctttcatcacacagtactctacggggcaggtcagcgtggagattgagtgggagctgcagaaggagaacagcaaacgctggaaccccgaaatccagtacacttccaactacaacaagtctgttaatgtggactttactgtggacactaatggtgtgtattcagagcctcgccccattggcacaagatacctgactcgtaatctgtaa

SEQ ID NO: 919 - DNA, 2208 bp, Artificial Sequence
  Synthetic Polynucleotide
atggctgccgatggttatcttccagattggctcgaggacactctctctgaaggaataagacagtggtggaagctcaaacctggcccaccaccaccaaagcccgcagagcggcatcaggacgacagcaggggtcttgtgcttcctgggtacaagtacctcggacccttcaacggactcgacaagggagagccggtcaacgaggcagacgccgcggccctcgagcacgacaaggcctacgaccggcagctcgacagcggagacaacccgtacctcaagtacaaccacgccgacgcggagtttcaggagcgtcttaaagaagatacgtcttttgggggcaacctcggacgagcagtcttccaggcgaaaaagagggttcttgaacctctgggcctggttgaggaacctgttaagacggctccgggaaaaaagaggccggtagagcattctcctgcggagccagactccccctcgggaaccggaaaggcgggccagcagcctgcgagaaagagattgaatttcggtcagactggagacgcagactccgtacctgacccccagcctctcggacagccaccagcagccccctctggtctgggaactaatacgatggctacaggcagtggcgcaccaatggcagacaataacgagggcgccgacggagtgggtaattcctcgggaaattggcattgcgattccacatggatgggcgacagagtcatcaccaccagcacccgaacctgggccctgcccacctacaacaaccacctctacaagcaaatctccagccaatctggagcctcaaacgacaaccactactttggctacagcaccccttgggggtattttgacttcaacagattccactgtcacttctccccacgtgactggcaaagactcatcaacaacaactggggattccgacccaagagactcaacttcaagctctttaacattcaagtcaaagaggtcacgcagaatgacggtacgacgacgattgccaataaccttaccagcacggttcaagtctttactgactcggagtaccagctcccgtacgtcctcggctcggcgcatcaaggatgcctcccgccgtttccagcagacgtcttcatggtgccacagtatggatacctcaccctgaacaacgggagtcaggcggtaggacgctcttccttttactgcctggagtactttccttctcagatgctgcgtaccggaaacaactttaccttcagctacacctttgaggacgttcctttccacagcagctacgctcacagccagagtttggaccggctgatgaatcctctgatcgaccagtatctgtattacttgagcaaaacaaacgctccaagcggaaccaccacgatgtccaggcttcagttttctcaggccggagcgagtgacattcgggaccagtctaggaactggcttcctggaccctgttaccgccagcagcgagtatcaaaaacagctgcggataacaacaacagtgattattcgtggactggagctaccaagtaccacctcaatggaagagactctctggtgaatccgggcccagctatggccagccacaaggacgatgaagaaaaatattttcctcagagcggggttctcatctttggaaaacaagactcgggaaaaactaatgtggacattgaaaaggtcatgattacagacgaagaggaaatcaggaccaccaatcccgtggctacggagcagtatggttctgtatctaccaacctccagagcggcaacacacaggcagccaccacagatgtcaacacacaaggcgttcttccaggcatggtctggcaggacagagacgtgtacctgcaaggacccatctgggcaaagattcctcacacggacggacactttcacccttctcccctcatgggaggatttggactcaaacaccctcctccgcaaatcctcatcaagaatacccccgtacctgcgaatccttcgaccacattcagcgcggcaaagtttgcttctttcatcacacagtactctacggggcaggtcagcgtggagattgagtgggagctgcagaaggagaacagcaaacgctggaaccccgaaatccagtacacttccaactacaacaagtctgttaatgtggactttactgtggacactaatggtgtgtattcagagcctcgccccattggcacaagatacctgactcgtaatctgtaa

SEQ ID NO: 920 - DNA, 2208 bp, Artificial Sequence
  Synthetic Polynucleotide
atggctgccgatggttatcttccagattggctcgaggacactctctctgaaggaataagacagtggtggaagctcaaacctggcccaccaccaccaaagcccgcagagcggcatcaggacgacagcaggggtcttgtgcttcctgggtacaagtacctcggacccttcaacggactcgacaagggagagccggtcaacgaggcagacgccgcggccctcgagcacgacaaggcctacgaccggcagctcgacagcggagacaacccgtacctcaagtacaaccacgccgacgcggagtttcaggagcgtcttaaagaagatacgtcttttgggggcaacctcggacgagcagtcttccaggcgaaaaagagggttcttgaacctctgggcctggttgaggaacctgttaagacggctccgggaaaaaagaggccggtagagcattctcctgcggagccagactcctcctcgggaaccggaaaggcgggccagcagcctgcgagaaagagattgaatttcggtcagactggagacgcagactccgtacctgacccccagcctctcggacagccaccagcagccccctctggtctgggaactaatacgatggctacaggcagtggcgcaccaatggcagacaataacgagggcgccgacggagtgggtaattcctcgggaaattggcattgcgattccacatggatgggcgacagagtcatcaccaccagcacccgaacctgggccctgcccacctacaacaaccacccctacaagcaaatctccagccaatctggagcctcaaacgacaaccactactttggctacagcaccccttgggggtattttgacttcaacagattccactgtcacttctccccacgtgactggcaaagactcatcaacaacaactggggattccgacccaagagactcaacttcaagctctttaacattcaagtcaaagaggtcacgcagaatgacggtacgacgacgattgccaataaccttaccagcacggttcaagtctttactgactcggagtaccagctcccgtacgtcctcggctcggcgcatcaaggatgcctcccgccgtttccagcagacgtcttcatggtgccacagtatggatacctcaccctgaacaacgggagtcaggcggtaggacgctcttccttttactgcctggagtactttccttctcagatgctgcgtaccggaaacaactttaccttcagctacacctttgaggacgttcctttccacagcagctacgctcacagccagagtttggaccggctgatgaatcctctgatcgaccagtatctgtattacttgagcaaaacaaacgctccaagcggaaccaccacgatgtccaggcttcagttttctcaggccggagcgagtgacattcgggaccagtctaggaactggcttcctggaccctgttaccgccagcagcgagtatcaaaaacagctgcggataacaacaacagtgattattcgtggactggagctaccaagtaccacctcaatggaagagactctctggtgaatccgggcccagctatggccagccacaaggacgatgaagaaaaatattttcctcagagcggggttctcatctttggaaaacaagactcgggaaaaactaatgtggacattgaaaaggtcatgattacagacgaagaggaaatcaggaccaccaatcccgtggctacggagcagtatggttctgtatctaccaacctccagagcggcaacacacaggcagccaccacagatgtcaacacacaaggcgttcttccaggcatggtctggcaggacagagacgtgtacctgcaaggacccatctgggcaaagattcctcacacggacggacactttcacccttctcccctcatgggaggatttggactcaaacaccctcctccgcaaatcctcatcaagaatacccccgtacctgcgaatccttcgaccacattcagcgcggcaaagtttgcttctttcatcacacagtactctacggggcaggtcagcgtggagattgagtgggagctgcagaaggagaacagcaaacgctggaaccccgaaatccagtacacttccaactacaacaagtctgttaatgtggactttactgtggacactaatggtgtgtattcagagcctcgccccattggcacaagatacctgactcgtaatctgtaa

SEQ ID NO: 921 - DNA, 2208 bp, Artificial Sequence
  Synthetic Polynucleotide
atggctgccgatggttatcttccagattggctcgaggacactctctctgaaggaataagacagtggtggaagctcaaacctggcccaccaccaccaaagcccgcagagcggcatcaggacgacagcaggggtcttgtgcttcctgggtacaagtacctcggacccttcaacggactcgacaagggagagccggtcagcgaggcagacgtcgcggccctcgagcacgacaaggcctacgaccggcagctcgacagcggagacaacccgtacctcaagtacaaccacgccgacgcggagtttcaggagcgtcttaaagaagatacgtcttttgggggcaacctcggacgagcagtcttccaggcgaaaaagagggttcttgaacctctgggcctggttgaggaacctgttaagacggctccgggaaaaaagaggccggtagagcattctcctgcggagccagactcctcctcgggaaccggaaaggcgggccagcagcctgcgagaaagagattgaatttcggtcagactggagacgcagactccgtacctgacccccagcctctcggacagccaccagcagccccctctggtctgggaactaatacgatggctacaggcagtggcgcaccaatggcagacaataacgagggcgccgacggagtgggtaattcctcgggaaattggcattgcgattccacatggatgggcgacagagtcatcaccaccagcacccgaacctgggccctgcccacctacaacaaccacctctacaagcaaatctccagccaatctggagcctcaaacgacaaccactactttggctacagcaccccttgggggtattttgacttcaacagattccactgtcacttctccccacgtgactggcaaagactcatcaacaacaactggggattccgacccaagagactcaacttcaagctctttaacattcaagtcaaagaggtcacgcagaatgacggtacgacgacgattgccaataaccttaccagcacggttcaagtctttactgactcggagtaccagctcccgtacgtcctcggctcggcgcatcaaggatgcctcccgccgtttccagcagacgtcttcatggtgccacagtatggatacctcaccctgaacaacgggagtcaggcggtaggacgctcttccttttactgcctggagtactttccttctcagatgctgcgtaccggaaacaactttaccttcagctacacctttgaggacgttcctttccacagcagctacgctcacagccagagtttggaccggctgatgaatcctctgatcgaccagtatctgtattacttgagcaaaacaaacgctccaagcggaaccaccacgatgtccaggcttcagttttctcaggccggagcgagtgacattcgggaccagtctaggaactggcttcctggaccctgttaccgccagcagcgagtatcaaaaacagctgcggataacaacaacagtgattattcgtggactggagctaccaagtaccacctcaatggaagagactctctggtgaatccgggcccagctatggccagccacaaggacgatgaagaaaaatattttcctcagagcggggttctcatctttggaaaacaagactcgggaaaaactaatgtggacattgaaaaggtcatgattacagacgaagaggaaatcaggaccaccaatcccgtggctacggagcagtatggttctgtatctaccaacctccagagcggcaacacacaggcagccaccacagatgtcaacacacaaggcgttcttccaggcatggtctggcaggacagagacgtgtacctgcaaggacccatctgggcaaagattcctcacacggacggacactttcacccttctcccctcatgggaggatttggactcaaacaccctcctccgcaaatcctcatcaagaatacccccgtacctgcgaatccttcgaccacattcagcgcggcaaagtttgcttctttcatcacacagtactctacggggcaggtcagcgtggagattgagtgggagctgcagaaggagaacagcaaacgctggaaccccgaaatccagtacacttccaactacaacaagtctgttaatgtggactttactgtggacactaatggtgtgtattcagagcctcgccccattggcacaagatacctgactcgtaatctgtaa

SEQ ID NO: 922 - DNA, 2208 bp, Artificial Sequence
  Synthetic Polynucleotide
atggctgccgatggttatcttccagattggctcgaggacactctctctgaaggaataagacagtggtggaagctcaaacctggcccaccaccaccaaagcccgcagagcggcatcaggacgacagcaggggtcttgtgcttcctgggtacaagtacctcggacccttcaacggactcgacaagggagagccggtcaacgaggcagacgccgcggccctcgagcacgacaaggcctacgaccggcagctcgacagcggagacaacccgtacctcaagtacaaccacgccgacgcggagtttcaggagcgtcttaaagaagatacgtcttttgggggcaacctcggacgagcagtcttccaggcgaaaaagagggttcttgaacctctgggcctggttgaggaacctgttaagacggctccgggaaaaaagaggccggtagagcattctcctgcggagccagactcctcctcgggaaccggaaaggcgggccagcagcctgcgagaaagagattgaatttcggtcagactggagacgcagactccgtacctgacccccagcctctcggacagccaccagcagccccctctggtctgggaactaatacgatggctacaggcagtggcgcaccaatggcagacaataacgagggcgccgacggagtgggtaattcctcgggaaattggcattgcgattccacatggatgggcgacagagtcatcaccaccagcacccgaacctgggccctgcccacctacaacaaccacctctacaagcaaatctccagccaatctggagcctcaaacgacaaccactactttggctacagcaccccttgggggtattttgacttcaacagattccactgtcacttctccccacgtgactggcaaagactcatcaacaacaactggggattccgacccaagagactcaacttcaagctctttaacattcaagtcaaagaggtcacgcagaatgacggtacgacgacgattgccaataaccttaccagcacggttcaagtctttactgactcggagtaccagctcccgtacgtcctcggctcggcgcatcaaggatgcctcccgccgtttccagcagacgtcttcatggtgccacagtatggatacctcaccctgaacaacgggagtcaggcggtaggacgctcttccttttactgcctggagtactttccttctcagatgctgcgtaccggaaacaactttaccttcagctacacctttgaggacgttcctttccacagcagctacgctcacagccagagtttggaccggctgatgaatcctctgatcgaccagtatctgtattacttgagcaaaacaaacgctccaagcggaaccaccacgatgtccaggcttcagttttctcaggccggagcgagtgacattcgggaccagtctaggaactggcttcctggaccctgttaccgccagcagcgagtatcaaaaacagctgcggataacaacaacagtgattattcgtggactggagctaccaagtaccacctcaatggaagagactctctggtgaatccgggcccagctatggccagccacaaggacgatgaagaaaaatattttcctcagagcggggttctcatctttggaaaacaagactcgggaaaaattaatgtggacattgaaaaggtcatgattacagacgaagaggaaatcaggaccaccaatcccgtggctacggagcagtatggttctgtatctaccaacctccagagcggcaacacacaggcagccaccacagatgtcaacacacaaggcgttcttccaggcatggtctggcaggacagagacgtgtacctgcaaggacccatctgggcaaagattcctcacacggacggacactttcacccttctcccctcatgggaggatttggactcaaacaccctcctccgcaaatcctcatcaagaatacccccgtacctgcgaatccttcgaccacattcagcgcggcaaagtttgcttctttcatcacacagtactctacggggcaggtcagcgtggagattgagtgggagctgcagaaggagaacagcaaacgctggaaccccgaaatccagtacacttccaactacaacaagtctgttaatgtggactttactgtggacactaatggtgtgtattcagagcctcgccccattggcacaagatacctgactcgtaatctgtaa

SEQ ID NO: 923 - DNA, 2208 bp, Artificial Sequence
  Synthetic Polynucleotide
atggctgccgatggttatcttccagattggctcgaggacactctctctgaaggaataagacagtggtggaagctcaaacctggcccaccaccactaaagcccgcagagcggcatcaggacgacagcaggggtcttgtgcttcctgggtacaagtacctcggacccttcaacggactcgacaagggagagccggtcaacgaggcagacgccgcggccctcgagcacgacaaggcctacgaccggcagctcgacagcggagacaacccgtacctcaagtacaaccacgccgacgcggagtttcaggagcgtcttaaagaagatacgtcttttgggggcaacctcggacgagcagtcttccaggcgaaaaagagggttcttgaacctctgggcctggttgaggaacctgttaagacggctccgggaaaaaagaggccggtagagcattctcctgcggagccagactcctcctcgggaaccggaaaggcgggccagcagcctgcgagaaagagattgaatttcggtcagactggagacgcagactccgtacctgacccccagcctctcggacagccaccagcagccccctctggtctgggaactaatacgatggctacaggcagtggcgcaccaatggcagacaataacgagggcgccgacggagtgggtaattcctcgggaaattggcattgcgattccacatggatgggcgacagagtcatcaccaccagcacccgaacctgggccctgcccacctacaacaaccacctctacaagcaaatctccagccaatctggagcctcaaacgacaaccactactttggctacagcaccccttgggggtattttgacttcaacagattccactgtcacttctccccacgtgactggcaaagactcatcaacaacaactggggattccgacccaagagactcaacttcaagctctttaacattcaagtcaaagaggtcacgcagaatgacggtacgacgacgattgccaataaccttaccagcacggttcaagtctttactgactcggagtaccagctcccgtacgtcctcggctcggcgcatcaaggatgcctcccgccgtttccagcagacgtcttcatggtgccacagtatggatacctcaccctgaacaacgggagtcaggcggtaggacgctcttccttttactgcctggagtactttccttctcagatgctgcgtaccggaaacaactttaccttcagctacacctttgaggacgttcctttccacagcagctacgctcacagccagagtttggaccggctgatgaatcctctgatcgaccagtatctgtattacttgagcaaaacaaacgctccaagcggaaccaccacgatgtccaggcttcagttttctcaggccggagcgagtgacattcgggaccagtctaggagctggcttcctggaccctgttaccgccagcagcgagtatcaaaaacagctgcggataacaacaacagtgattattcgtggactggagctaccaagtaccacctcaatggaagagactctctggtgaatccgggcccagctatggccagccacaaggacgatgaagaaaaatattttcctcagagcggggttctcatctttggaaaacaagactcgggaaaaactaatgtggacattgaaaaggtcatgattacagacgaagaggaaatcaggaccaccaatcccgtggctacggagcagtatggttctgtatctaccaacctccagagcggcaacacacaggcagccaccacagatgtcaacacacaaggcgttcttccaggcatggtctggcaggacagagacgtgtacctgcaaggacccatctgggcaaagattcctcacacggacggacactttcacccttctcccctcatgggaggatttggactcaaacaccctcctccgcaaatcctcatcaagaatacccccgtacctgcgaatccttcgaccacattcagcgcggcaaagtttgcttctttcatcacacagtactctacggggcaggtcagcgtggagattgagtgggagctgcagaaggagaacagcaaacgctggaaccccgaaatccagtacacttccaactacaacaagtctgttaatgtggactttactgtggacactaatggtgtgtattcagagcctcgccccattggcacaagatacctgactcgtaatctgtaa

SEQ ID NO: 924 - DNA, 2208 bp, Artificial Sequence
  Synthetic Polynucleotide
atggctgccgatggttatcttccagattggctcgaggacactctctctgaaggaataagacagtggtggaagctcaaacctggcccaccaccaccaaagcccgcagagcggcatcaggacgacagcaggggtcttgtgcttcctgggtacaagtacctcggacccttcaacggactcgacaagggagagccggtcaacgaggcagacgccgcggccctcgagcacgacaaggcctacgaccggcagctcgacagcggagacaacccgtacctcaagtacaaccacgccgacgcggagtttcaggagcgtcttaaagaagatacgtcttttgggggcaacctcggacgagcagtcttccaggcgaaaaagagggttcttgaacctctaggcctggttgaggaacctgttaagacggctccgggaaaaaagaggccggtagagcattctcctgcggagccagactcctcctcgggaaccggaaaggcgggccagcagcctgcgagaaagagattgaatttcggtcagactggagacgcagactccgtacctgacccccagcctctcggacagccaccagcagccccctctggtctgggaactaatacgatggctacaggcagtggcgcaccaatggcagacaataacgagggcgccgacggagtgggtaattcctcgggaaattggcattgcgattccacatggatgggcgacagagtcatcaccaccagcacccgaacctgggccctgcccacctacaacaaccacctctacaagcaaatctccagccaatctggagcctcaaacgacaaccactactttggctacagcaccccttgggggtattttgacttcaacagattccactgtcacttctccccacgtgactggcaaagactcatcaacaacaactggggattccgacccaagagactcaacttcaagctctttaacattcaagtcaaagaggtcacgcagaatgacggtacgacgacgattgccaataaccttaccagcacggttcaagtctttactgactcggagtaccagctcccgtacgtcctcggctcggcgcatcaaggatgcctcccgccgtttccagcagacgtcttcatggtgccacagtatggatacctcaccctgaacaacgggagtcaggcggtaggacgctcttccttttactgcctggagtactttccttctcagatgctgcgtaccggaaacaactttaccttcagctacacctttgaggacgttcctttccacagcagctacgctcacagccagagtttggaccggctgatgaatcctctgatcgaccagtatctgtattacttgagcaaaacaaacgctccaagcggaaccaccacgatgtccaggcttcagttttctcaggccggagcgagtgacattcgggaccagtctaggaactggcttcctggaccctgttaccgccagcagcgagtatcaaaaacagctgcggataacaacaacagtgattattcgtggactggagctaccaagtaccacctcaatggaagagactctctggtgaatccgggcccagctatggccagccacaaggacgatgaagaaaaatattttcctcagagcggggttctcatctttggaaaacaagactcgggaaaaactaatgtggacattgaaaaggtcatgattacagacgaagaggaaatcgggaccaccaatcccgtggctacggagcagtatggttctgtatctaccaacctccagagcggcaacacacaggcagccaccacagatgtcaacacacaaggcgttcttccaggcatggtctggcaggacagagacgtgtacctgcaaggacccatctgggcaaagattcctcacacggacggacactttcacccttctcccctcatgggaggatttggactcaaacaccctcctccgcaaatcctcatcaagaatacccccgtacctgcgaatccttcgaccacattcagcgcggcaaagtttgcttctttcatcacacagtactctacggggcaggtcagcgtggagattgagtgggagctgcagaaggagaacagcaaacgctggaaccccgaaatccagtacacttccaactacaacaagtctgttaatgtggactttactgtggacactaatggtgtgtattcagagcctcgccccattggcacaagatacctgactcgtaatctgtaa

SEQ ID NO: 925 - DNA, 2208 bp, Artificial Sequence
  Synthetic Polynucleotide
atggctgccgatggttatcttccagattggctcgaggacactctctctgaaggaataagacagtggtggaagctcaaacctggcccaccaccaccaaagcccgcagagcggcatcaggacgacagcaggggtcttgtgcttcctgggtacaagtacctcggacccttcaacggactcgacaagggagagccggtcaacgaggcagacgccgcggccctcgagcacgacaaggcctacgaccggcagctcgacagcggagacaacccgtacctcaagtacaaccacgccgacgcggagtttcaggagcgtcttaaagaagatacgtcttttgggggcaacctcggacgagcagtcttccaggcgaaaaagagggttcttgaacctctgggcctggttgaggaacctgttaagacggctccgggaaaaaagaggccggtagagcattctcctgcggagccagactcctcctcgggaaccggaaaggcgggccagcagcctgcgagaaagagattgaatttcggtcagactggagacgcagactccgtacctgacccccagcctctcggacagccaccagcagccccctctggtctgggaactaatacgatggctacaggcagtggcgcaccaatggcagacaataacgagggcgccgacggagtgggtaattcctcgggaaattggcattgcgattccacatggatgggcgacagagtcatcaccaccagcacccgaacctgggccctgcccacctacaacaaccacctctacaagcaaatctccagccaatctggagcctcaaacgacaaccactactttggctacagcaccccttgggggtattttgacttcaacagattccactgtcacttctccccacgtgactggcaaagactcatcaacaacaactggggattccgacccaagagactcaacttcaagctctttaacattcaagtcaaagaggtcacgcagaatgacggtacgacgacgattgccaataaccttaccagcacggttcaagtctttactgactcggagtaccggctcccgtacgtcctcggctcggcgcatcaaggatgcctcccgccgtttccagcagacgtcttcatggtgccacagtatggatacctcaccctgaacaacgggagtcaggcggtaggacgctcttccttttactgcctggagtactttccttctcagatgctgcgtaccggaaacaactttaccttcagctacacctttgaggacgttcctttccacagcagctacgctcacagccagagtttggaccggctgatgaatcctctgatcgaccagtatctgtattacttgagcaaaacaaacgctccaagcggaaccaccacgatgtccaggcttcagttttctcaggccggagcgagtgacattcgggaccagtctaggaactggcttcctggaccctgttaccgccagcagcgagtatcaaaaacagctgcggataacaacaacagtgattattcgtggactggagctaccaagtaccacctcaatggaagagactctctggtgaatccgggcccagctatggccagccacaaggacgatgaagaaaaatattttcctcagagcggggttctcatctttggaaaacaagactcgggaaaaactaatgtggacattgaaaaggtcatgattacagacgaagaggaaatcaggaccaccaatcccgtggctacggagcagtatggttctgtatctaccaacctccagagcggcaacacacaggcagccaccacagatgtcaacacacaaggcgttcttccaggcatggtctggcaggacagagacgtgtacctgcaaggacccatctgggcaaagattcctcacacggacggacactttcacccttctcccctcatgggaggatttggactcaaacaccctcctccgcaaatcctcatcaagaatacccccgtacctgcgaatccttcgaccacattcagcgcggcaaagtttgcttctttcatcacacagtactctacggggcaggtcagcgtggagattgagtgggagctgcagaaggagaacagcaaacgctggaaccccgaaatccagtacacttccaactacaacaagtctgttaatgtggactttactgtggacactaatggtgtgtattcagagcctcgccccattggcacaagatacctgactcgtaatctgtaa

SEQ ID NO: 926 - DNA, 2208 bp, Artificial Sequence
  Synthetic Polynucleotide
atggctgccgatggttatcttccagattggctcgaggacactctctctgaaggaataagacagtggtggaagctcaaacctggcccaccaccaccaaagcccgcagagcggcatcaggacgacagcaggggtcttgtgcttcctgggtacaagtacctcggacccttcaacggactcgacaagggagagccggtcaacgaggcagacgccgcggccctcgagcacgacaaggcctacgaccggcagctcgacagcggagacaacccgtacctcaagtacaaccacgccgacgcggagtttcaggagcgtcttaaagaagatacgtcttttgggggcaacctcggacgagcagtcttccaggcgaaaaagagggttcttgaacctctgggcctggttgaggaacctgttaagacggctccgggaaaaaagaggccggtagagcattctcctgcggagccagactcctcctcgggaaccggaaaggcgggccagcagcctgcgagaaagagattgaatttcggtcagactggagacgcagactccgtacctgacccccagcctctcggacagccaccagcagccccctctggtctgggaactaatacgatggctacaggcagtggcgcaccaatggcagacaataacgagggcgccgacggagtgggtaattcctcgggaaattggcattgcgattccacatggatgggcgacagagtcatcaccaccagcacccgaacctgggccctgcccacctacaacaaccacctctacaagcaaatctccagccaatctggagcctcaaacgacaaccactactttggctacagcaccccttgggggtattttgacttcaacagattccactgtcacttctccccacgtgactggcaaagactcatcaacaacaactggggattccgacccaagagactcaacttcaagctctttaacattcaagtcaaagaggtcacgcagaatgacggtacgacgacgattgccaataaccttaccagcacggttcaagtctttactgactcggagtaccagctcccgtacgtcctcggctcggcgcatcaaggatgcctcccgccgtttccagcagacgtcttcatggtgccacagtatggatacctcaccctgaacaacgggagtcaggcggtaggacgctcttccttttactgcctggagtactttccttctcagatgctgcgtaccgggaacaactttaccttcagctacacctttgaggacgttcctttccacagcagctacgctcacagccagagtttggaccggctgatgaatcctctgatcgaccagtatctgtattacttgagcaaaacaaacgctccaagcggaaccaccacgatgtccaggcttcagttttctcaggccggagcgagtgacattcgggaccagtctaggaactggcttcctggaccctgttaccgccagcagcgagtatcaaaaacagctgcggataacaacaacagtgattattcgtggactggagctaccaagtaccacctcaatggaagagactctctggtgaatccgggcccagctatggccagccacaaggacgatgaagaaaaatattttcctcagagcggggttctcatctttggaaaacaggactcgggaaaaaccaatgtggacattgaaaaggtcatgattacagacgaagaggaaatcaggaccaccaatcccgtggctacggagcagtatggttctgtatctaccaacctccagagcggcaacacacaggcagccaccacagatgtcaacacacaaggcgttcttccaggcatggtctggcaggacagagacgtgtacctgcaaggacccatctgggcaaagattcctcacacggacggacactttcacccttctcccctcatgggaggatttggactcaaacaccctcctccgcaaatcctcatcaagaatacccccgtacctgcgaatccttcgaccacattcagcgcggcaaagtttgcttctttcatcacacagtactctacggggcaggtcagcgtggagattgagtgggagctgcagaaggagaacagcaaacgctggaaccccaaaatccagtacacttccaactacaacaagtctgttaatgtggactttactgtggacactaatggtgtgtattcagagcctcgccccattggcacaagatacctgactcgtaatctgtaa

SEQ ID NO: 927 - DNA, 2208 bp, Artificial Sequence
  Synthetic Polynucleotide
atggctgccgatggttatcttccagattggctcgaggacactctctctgaaggaataagacagtggtggaagctcaaacctggcccaccaccaccaaagcccgcagagcggcatcaggacgacagcaggggtcttgtgcttcctgggtacaagtacctcggacccttcaacggactcgacaagggagagccggtcaacgaggcagacgccgcggccctcgagcacgacaaggcctacgaccggcagctcgacagcggagacaacccgtacctcaagtacaaccacgccgacgcggagtctcaggagcgtcttaaagaagatacgtcttttgggggcaacctcggacgagcagtcttccaggcgaaaaagagggttcttgaacctctgggcctggttgaggaacctgttaagacggctccgggaaaaaagaggccggtagagcattctcctgcggagccagactcctcctcgggaaccggaaaggcgggccagcagcctgcgagaaagagattgaatttcggtcagactggagacgcagactccgtacctgacccccagcctctcggacagccaccagcagccccctctggtctgggaactaatacgatggctacaggcagtggcgcaccaatggcagacaataacgagggcgccgacggagtgggtaattcctcgggaaattggcattgcgattccacatggatgggcgacagagtcatcaccaccagcacccgaacctgggccctgcccacctacaacaaccacctctacaagcaaatctccagccaatctggagcctcaaacgacaaccactactttggctacagcaccccttgggggtattttgacttcaacagattccactgtcacttctccccacgtgactggcaaagactcatcaacaacaactggggattccgacccaagagactcaacttcaagctctttaacattcaagtcaaagaggtcacgcagaatgacggtacgacgacgattgccaataaccttaccagcacggttcaagtctttactgactcggagtaccagctcccgtacgtcctcggctcggcgcatcaaggatgcctcccgccgtttccagcagacgtcttcatggtgccacagtatggatacctcaccctgaacaacgggagtcaggcggtaggacgctcttccttttactgcctggagtactttccttctcagatgctgcgtaccggaaacaactttaccttcagctacacctttgaggacgttcctttccacagcagctacgctcacagccagagtttggaccggctgatgaatcctctgatcgaccagtatctgtattacttgagcaaaacaaacgctccaagcggaaccaccacgatgtccaggcttcagttttctcaggccggagcgagtgacattcgggaccagtctaggaactggcttcctggaccctgttaccgccagcagcgagtatcaaaaacagctgcggataacaacaacagtgattattcgtggactggagctaccaagtaccacctcaatggaagagactctctggtgaatccgggcccagctatggccagccacaaggacgatgaagaaaaatattttcctcagagcggggttctcatctttggaaaacaagactcgggaaaaactaatgtggacattgaaaaggtcatgattacagacgaagaggaaatcaggaccaccaatcccgtggctacggagcagtatggttctgtatctaccaacctccagagcggcaacacacaggcagccaccacagatgtcaacacacaaggcgttcttccaggcatggtctggcaggacagagacgtgtacctgcaaggacccatctgggcaaagattcctcacacggacggacactttcacccttctcccctcatgggaggatttggactcaaacaccctcctccgcaaatcctcatcaagaatacccccgtacctgcgaatccttcgaccacattcagcgcggcaaagtttgcttctttcatcacacagtactctacggggcaggtcagcgtggagattgagtgggagctgcagaaggagaacagcaaacgctggaaccccgaaatccagtacacttccaactacaacaagtctgttaatgtggactttactgtggacactaatggtgtgtattcagagcctcgccccattggcacaagatacctgactcgtaatctgtaa

SEQ ID NO: 928 - DNA, 2208 bp, Artificial Sequence
  Synthetic Polynucleotide
atggctgccgatggttatcttccagattggctcgaggacactctctctgaaggaataagacagtggtggaagctcaaacctggcccaccaccaccaaagcccgcagagcggcatcaggacgacagcaggggtcttgtgcttcctgggtacaagtacctcggacccttcaacggactcgacaagggagagccggtcaacgaggcagacgccgcggccctcgagcacgacaaggcctacgaccggcagctcgacagcggagacaacccgtacctcaagtacaaccacgccgacgcggagtttcaggagcgtcttaaagaagatacgtcttttgggggcaacctcggacgagcagtcttccaggcgaaaaagagggttcttgaacctctgggcctggttgaggaacctgttaagacggctccgggaaaaaagaggccggtagagcattctcctgcggagccagactcctcctcgggaaccggaaaggcgggccagcagcctgcgagaaagagattgaatttcggtcagactggagacgcagactccgtacctgacccccagcctctcggacagccaccagcagccccctctggtctgggaactaatacgatggctacaggcagtggcgcaccaacggcagacaataacgagggcgccgacggagtgggtaattcctcgggaaattggcattgcgattccacatggatgggcgacagagtcatcaccaccagcacccgaacctgggccctgcccacctacaacaaccacctctacaagcaaatctccagccaatctggagcctcaaacgacaaccactactttggctacagcaccccttgggggtattttgacttcaacagattccactgtcacttctccccacgtgactggcaaagactcatcaacaacaactggggattccgacccaagagactcaacttcaagctctttaacattcaagtcaaagaggtcacgcagaatgacggtacgacgacgattgccaataaccttaccagcacggttcaagtctttactgactcggagtaccagctcccgtacgtcctcggctcggcgcatcaaggatgcctcccgccgtttccagcagacgtcttcatggtgccacagtatggatacctcaccctgaacaacgggagtcaggcggtaggacgctcttccttttactgcctggagtactttccttctcagatgctgcgtaccggaaacaactttaccttcagctacacctttgaggacgttcctttccacagcagctacgctcacagccagagtttggaccggctgatgaatcctctgatcgaccagtatctgtattacttgagcaaaacaaacgctccaagcggaaccaccacgatgtccaggcttcagttttctcaggccggagcgagtgacattcgggaccagtctaggaactggcttcctggaccctgttaccgccagcagcgagtatcaaaaacagctgcggataacaacaacagtgattattcgtggactggagctaccaagtaccacctcaatggaagagactctctggtgaatccgggcccagctatggccagccacaaggacgatgaagaaaaatattttcctcagagcggggttctcatctttggaaaacaagactcgggaaaaactaatgtggacattgaaaaggtcatgattacagacgaagaggaaatcaggaccaccaatcccgtggctacggagcagtatggttctgtatctaccaacctccagagcggcaacacacaggcagccaccacagatgtcaacacacaaggcgttcttccaggcatggtctggcaggacagagacgtgtacctgcaaggacccatctgggcaaagattcctcacacggacggacactttcacccttctcccctcatgggaggatttggactcaaacaccctcctccgcaaatcctcatcaagaatacccccgtacctgcgaatccttcgaccacattcagcgcggcaaagtttgcttctttcatcacacagtactctacggggcaggtcagcgtggagattgagtgggagctgcagaaggagaacagcaaacgctggaaccccgaaatccagtacacttccaactacaacaagtctgttaatgtggactttactgtggacactaatggtgtgtattcagagcctcgccccattggcacaagatacctgactcgtaatctgtaa

SEQ ID NO: 929 - DNA, 2208 bp, Artificial Sequence
  Synthetic Polynucleotide
atggctgccgatggttatcttccagattggctcgaggacactctctctgaaggaataagacagtggtggaagctcaaacctggcccaccaccaccaaagcccgcagagcggcatcaggacgacagcaggggtcttgtgcttcctgggtacaagtacctcggacccttcaacggactcgacaagggagagccggtcaacgaggcagacgccgcggccctcgagcacgacaaggcctacgaccggcagctcgacagcggagacaacccgtacctcaagtacaaccacgccgacgcggagtttcaggagcgtcttaaagaagatacgtcttttgggggcaacctcggacgagcagtcttccaggcgaaaaagagggttcttgaacctctgggcctggttgaggaacctgttaagacggctccgggaaaaaagaggccggtagagcattctcctgcggagccagacgcctcctcgggaaccggaaaggcgggccagcagcctgcgagaaagagattgaatttcggtcagactggagacgcagactccgtacctgacccccagcctctcggacagccaccagcagccccctctggtctgggaactaatacgatggctacaggcagtggcgcaccaatggcagacaataacgagggcgccgacggagtgggtaattcctcgggaaattggcattgcgattccacatggatgggcgacagagtcatcaccaccagcacccgaacctgggccctgcccacctacaacaaccacctctacaagcaaatctccagccaatctggagcctcaaacgacaaccactactttggctacagcaccccttgggggtattttgacttcaacagattccactgtcacttctccccacgtgactggcaaagactcatcaacaacaactggggattccgacccaagagactcaacttcaagctctttaacattcaagtcaaagaggtcacgcagaatgacggtacgacgacgattgccaataaccttaccagcacggttcaagtctttactgactcggagtaccagctcccgtacgtcctcggctcggcgcatcaaggatgcctcccgccgtttccagcagacgtcttcatggtgccacagtatggatacctcaccctgaacaacgggagtcaggcggtaggacgctcttccttttactgcccggagtactttccttctcagatgctgcgtaccggaaacaactttaccttcagctacacctttgaggacgttcctttccacagcagctacgctcacagccagagtttggaccggctgatgaatcctctgatcgaccagtatctgtattacttgagcaaaacaaacgctccaagcggaaccaccacgatgtccaggcttcagttttctcaggccggagcgagtgacattcgggaccagtctaggaactggcttcctggaccctgttaccgccagcagcgagtatcaaaaacagctgcggataacaacaacagtgattattcgtggactggagctaccaagtaccacctcaatggaagagactctctggtgaatccgggcccagctatggccagccacaaggacgatgaagaaaaatattttcctcagagcggggttctcatctttggaaaacaagactcgggaaaaactaatgtggacattgaaaaggtcatgattacagacgaagaggaaatcaggaccaccaatcccgtggctacggagcagtatggttctgtatctaccaacctccagagcggcaacacacaggcagccaccacagatgtcaacacacaaggcgttcttccaggcatggtctggcaggacagagacgtgtacctgcaaggacccatctgggcaaagattcctcacacggacggacactttcacccttctcccctcatgggaggatttggactcaaacaccctcctccgcaaatcctcatcaagaatacccccgtacctgcgaatccttcgaccacattcagcgcggcaaagtttgcttctttcatcacacagtactctacggggcaggtcagcgtggagattgagtgggagctgcagaaggagaacagcaaacgctggaaccccgaaatccagtacacttccaactacaacaagtctgttaatgtggactttactgtggacactaatggtgtgtattcagagcctcgccccattggcacaagatacctgactcgtaatctgtaa

SEQ ID NO: 930 - DNA, 2208 bp, Artificial Sequence
  Synthetic Polynucleotide
atggctgccgatggttatcttccagattggctcgaggacactctctctgaaggaataagacagtggtggaagctcaaacctggcccaccaccaccaaagcccgcagagcggcatcaggacgacagcaggggtcttgtgcttcctgggtacaagtacctcggacccttcaacggactcgacaagggagagccggtcaacgaggcagacgccgcggccctcgagcacgacaaggcctacgaccggcagctcgacagcggagacaacccgtacctcaagtacaaccacgccgacgcggagtttcaggagcgtcttaaagaagatacgtcttttgggggcaacctcggacgagcagtcttccaggcgaaaaagagggttcttgaacctctgggcctggttgaggaacctgttaagacggctccgggaaaaaagaggccggtagagcattctcctgcggagccagactcctcctcgggaaccggaaaggcgggccagcagcctgcgagaaagagattgaatttcggtcagactggagacgcagactccgtacctgacccccagcctctcggacagccaccagcagccccctctggtctgggaactaatacgatggctacaggcagtggcgcaccaatggcagacaataacgagggcgccgacggagtgggtaattcctcgggaaattggcattgcgattccacatggatgggcgacagagtcatcaccaccagcacccgaacctgggccctgcccacctacaacaaccacctctacaagcaaatctccagccaatctggagcctcaaacgacaaccactactttggctacagcaccccttgggggtattttgacttcaacagattccactgtcacttctccccacgtgactggcaaagactcatcaacaacaactggggactccgacccaagagactcaacttcaagctctttaacattcaagtcaaagaggtcacgcagaatgacggtacgacgacgattgccaataaccttaccagcacggttcaagtctttactgactcggagtaccagctcccgtacgtcctcggctcggcgcatcaaggatgcctcccgccgtttccagcagacgtcttcatggtgccacagtatggatacctcaccctgaacaacgggagtcaggcggtaggacgctcttccttttactgcctggagtactttccttctcagatgctgcgtaccggaaacaactttaccttcagctacacctttgaggacgttcctttccacagcagctacgctcacagccagagtttggaccggctgatgaatcctctgatcgaccagtatctgtattacttgagcaaaacaaacgctccaagcggaaccaccacgatgtccaggcttcagttttctcaggccggagcgagtgacattcgggaccagtctaggaactggcttcctggaccctgttaccgccagcagcgagtatcaaaaacagctgcggataacaacaacagtgattattcgtggactggagctaccaagtaccacctcaatggaagagactctctggtgaatccgggcccagctatggccagccacaaggacgatgaagaaaaatattttcctcagagcggggttctcatctttggaaaacaagactcgggaaaaactaatgtggacattgaaaaggtcatgattacagacgaagaggaaatcaggaccaccaatcccgtggctacggagcagtatggttctgtatctaccaacctccagagcggcaacacacaggcagccaccacagatgtcaacacacaaggcgttcttccaggcatggtctggcaggacagagacgtgtacctgcaaggacccatctgggcaaagattcctcacacggacggacactttcacccttctcccctcatgggaggatttggactcaaacaccctcctccgcaaatcctcatcaagaatacccccgtacctgcgaatccttcgaccacattcagcgcggcaaagtttgcttctttcatcacacagtactctacggggcaggtcagcgtggagattgagtgggagctgcagaaggagaacagcaaacgctggaaccccgaaatccagtacacttccaactacaacaagtctgttaatgtggactttactgtggacactaatggtgtgtattcagagcctcgccccattggcacaagatacctgactcgtaatctgtaa

SEQ ID NO: 931 - DNA, 2208 bp, Artificial Sequence
  Synthetic Polynucleotide
atggctgccgatggttatcttccagattggctcgaggacactctctctgaaggaataagacagtggtggaagctcaaacctggcccaccaccaccaaagcccgcagagcggcatcaggacgacagcaggggtcttgtgcttcctgggtacaagtacctcggacccttcaacggactcgacaagggagagccggtcaacgaggcagacgccgcggccctcgagcacgacaaggcctacgaccggcagctcgacagcggagacaacccgtacctcaagtacaaccacgccgacgcggagtttcaggagcgtcttaaagaagatacgtcttttgggggcaacctcggacgagcagtcttccaggcgaaaaagagggttcttgaacctctgggcctggttgaggaacctgttaagacggctccgggaaaaaagaggccggtagagcattttcctgcggagccagactcctcctcgggaaccggaaaggcgggccagcagcctgcgagaaagagattgaatttcggtcagactggagacgcagactccgtacctgacccccagcctctcggacagccaccagcagccccctctggtctgggaactaatacgatggctacaggcagtggcgcaccaatggcagacaataacgagggcgccgacggagtgggtaattcctcgggaaattggcattgcgattccacatggatgggcgacagagtcatcaccaccagcacccgaacctgggccctgcccacctacaacaaccacctctacaagcaaatctccagccaatctggagcctcaaacgacaaccactactttggctacagcaccccttgggggtattttgacttcaacagattccactgtcacttctccccacgtgactggcaaagactcatcaacaacaactggggattccgacccaagagactcaacttcaagctctttaacattcaagtcaaagaggtcacgcagaatgacggtacgacgacgattgccaataaccttaccagcacggttcaagtctttactgactcggagtaccagctcccgtacgtcctcggctcggcgcatcaaggatgcctcccgccgtttccagcagacgtcttcatggtgccacagtatggatacctcaccctgaacaacgggagtcaggcggtaggacgctcttccttttactgcctggagtactttccttctcagatgctgcgtaccggaaacaactttaccttcagctacacctttgaggacgttcctttccacagcagctacgctcacagccagagtttggaccggctgatgaatcctctgatcgaccagtatctgtattacttgagcaaaacaaacgctccaagcggaaccaccacgatgtccaggcttcagttttctcaggccggagcgagtgacattcgggaccagtctaggaactggcttcctggaccctgttaccgccagcagcgagtatcaaaaacagctgcggataacaacaacagtgattattcgtggactggagctaccaagtaccacctcaatggaagagactctctggtgaatccgggcccagctatggccagccacaaggacgatgaagaaaaatattttcctcagagcggggttctcatcttcggaaaacaagactcgggaaaaactaatgtggacattgaaaaggtcatgattacagacgaagaggaaatcaggaccaccaatcccgtggctacggagcagtatggttctgtatctaccaacctccagagcggcaacacacaggcagccaccacagatgtcaacacacaaggcgttcttccaggcatggtctggcaggacagagacgtgtacctgcaaggacccatctgggcaaagattcctcacacggacggacactttcacccttctcccctcatgggaggatttggactcaaacaccctcctccgcaaatcctcatcaagaatacccccgtacctgcgaatccttcgaccacattcagcgcggcaaagtttgcttctttcatcacacagtactctacggggcaggtcagcgtggagattgagtgggagctgcagaaggagaacagcaaacgctggaaccccgaaatccagtacacttccaactacaacaagtctgttaatgtggactttactgtggacactaatggtgtgtattcagagcctcgccccattggcacaagatacctgactcgtaatctgtaa

SEQ ID NO: 932 - DNA, 2208 bp, Artificial Sequence
  Synthetic Polynucleotide
atggctgccgatggttatcttccagattggctcaaggacactctctctgaaggaataagacagtggtggaagctcaaacctggcccaccaccaccaaagcccgcagagcggcatcaggacgacagcaggggtcttgtgcttcctgggtacaagtacctcggacccttcaacggactcgacaagggagagccggtcaacgaggcagacgccgcggccctcgagcacgacaaggcctacgaccggcagctcgacagcggagacaacccgtacctcaagtacaaccacgccgacgcggagtttcaggagcgtcttaaagaagatacgtcttttgggggcaacctcggacgagcagtcttccaggcgaaaaagagggttcttgaacctctgggcctggttgaggaacctgttaagacggctccgggaaaaaagaggccggtagagcattctcctgcggagccagactcctcctcgggaaccggaaaggcgggccagcagcctgcgagaaagagattgaatttcggtcagactggagacgcagactccgtacctgacccccagcctctcggacagccaccagcagccccctctggtctgggaactaatacgatggctacaggcagtggcgcaccaatggcagacaataacgagggcgccgacggagtgggtaattcctcgggaaattggcattgcgattccacatggatgggcgacagagtcatcaccaccagcacccgaacctgggccctgcccacctacaacaaccacctctacaagcaaatctccagccaatctggagcctcaaacgacaaccactactttggctacagcaccccttgggggtattttgacttcaacagattccactgtcacttctccccacgtgactggcaaagactcatcaacaacaactggggattccgacccaagagactcaacttcaagctctttaacattcaagtcaaagaggtcacgcagaatgacggtacgacgacgattgccaataaccttaccagcacggttcaagtctttactgactcggagtaccagctcccgtacgtcctcggctcggcgcatcaaggatgcctcccgccgtttccagcagacgtcttcatggtgccacagtatggatacctcaccctgaacaacgggagtcaggcggtaggacgctcttccttttactgcctggagtactttccttctcagatgctgcgtaccggaaacaactttaccttcagctacacctttgaggacgttcctttccacagcagctacgctcacagccagagtttggaccggctgatgaatcctctgatcgaccagtatctgtattacttgagcaaaacaaacgctccaagcggaaccaccacgatgtccaggcttcagttttctcaggccggagcgagtgacattcgggaccagtctaggaactggcttcctggaccctgttaccgccagcagcgagtatcaaaaacagctgcggataacaacaacagtgattattcgtggactggagctaccaagtaccacctcaatggaagagactctctggtgaatccgggcccagctatggccagccacaaggacgatgaagaaaaatattttcctcagagcggggttctcatctttggaaaacaagactcgggaaaaaccaatgtggacattgaaaaggtcatgattacagacgaagaggaaatcaggaccaccaatcccgtggctacggagcagtatggttctgtatctaccaacctccagagcggcaacacacaggcagccaccacagatgtcaacacacaaggcgttcttccaggcatggtctggcaggacagagacgtgtacctgcaaggacccatctgggcaaagattcctcacacggacggacactttcacccttctcccctcatgggaggatttggactcaaacaccctcctccgcaaatcctcatcaagaatacccccgtacctgcgaatccttcgaccacattcagcgcggcaaagtttgcttctttcatcacacagtactctacggggcaggtcagcgtggagattgagtgggagctgcagaaggagaacagcaaacgctggaaccccgaaatccagtacacttccaactacaacaagtctgttaatgtggactttactgtggacactaatggtgtgtattcagagcctcgccccattggcacaagatacctgactcgtaatctgtaa

SEQ ID NO: 933 - DNA, 2208 bp, Artificial Sequence
  Synthetic Polynucleotide
atggctgccgatggttatcttccagattggctcgaggacactctctctgaaggaataagacagtggtggaagctcaaacctggcccaccaccaccaaagcccgcagagcggcatcaggacgacagcaggggtcttgtgcttcctgggtacaagtacctcggacccttcaacggactcgacaagggagagccggtcaacgaggcagacgtcgcggccctcgagcacgacaaggcctacgaccggcagctcgacagcggagacaacccgtacctcaagtacaaccacgccgacgcggagtttcaggagcgtcttaaagaagatacgtcttttgggggcaacctcggacgagcagtcttccaggcgaaaaggagggttcttgaacctctgggcctggttgaggaacctgttaagacggctccgggaaaaaagaggccggtagagcattctcctgcggagccagactcctcctcgggaaccggaaaggcgggccagcagcctgcgagaaagagattgaatttcggtcagactggagacgcagactccgtacctgacccccagcctctcggacagccaccagcagccccctctggtctgggaactaatacgatggctacaggcagtggcgcaccaatggcagacaataacgagggcgccgacggagtgggtaattcctcgggaaattggcattgcgattccacatggatgggcgacagagtcatcaccaccagcacccgaacctgggccctgcccacctacaacaaccacctctacaagcaaatctccagccaatctggagcctcaaacgacaaccactactttggctacagcaccccttgggggtattttgacttcaacagattccactgtcacttctccccacgtgactggcaaagactcatcaacaacaactggggattccgacccaagagactcaacttcaagctctttaacattcaagtcaaagaggtcacgcagaatgacggtacgacgacgattgccaataaccttaccagcacggttcaagtctttactgactcggagtaccagctcccgtacgtcctcggctcggcgcatcaaggatgcctcccgccgtttccagcagacgtcttcatggtgccacagtatggatacctcaccctgaacaacgggagtcaggcggtaggacgctcttccttttactgcctggagtactttccttctcagatgctgcgtaccggaaacaactttaccttcagctacacctttgaggacgttcctttccacagcagctacgctcacagccagagtttggaccggctgatgaatcctctgatcgaccagtatctgtattacttgagcaaaacaaacgctccaagcggaaccaccacgatgtccaggcttcagttttctcaggccggagcgagtgacattcgggaccagtctaggaactggcttcctggaccctgttaccgccagcagcgagtatcaaaaacagctgcggataacaacaacagtgattattcgtggactggagctaccaagtaccacctcaatggaagagactctctggtgaatccgggcccagctatggccagccacaaggacgatgaagaaaaatattttcctcagagcggggttctcatctttggaaaacaagactcgggaaaaactaatgtggacattgaaaaggtcatgattacagacgaagaggaaatcaggaccaccaatcccgtggctacggagcagtatggttctgtatctaccaacctccagagcggcaacacacaggcagccaccacagatgtcaacacacaaggcgttcttccaggcatggtctggcaggacagagacgtgtacctgcaaggacccatctgggcaaagattcctcacacggacggacactttcacccttctcccctcatgggaggatttggactcaaacaccctcctccgcaaatcctcatcaagaatacccccgtacctgcgaatccttcgaccacattcagcgcggcaaagtttgcttctttcatcacacagtactctacggggcaggtcagcgtggagattgagtgggagctgcagaaggagaacagcaaacgctggaaccccgaaatccagtacacttccaactacaacaagtctgttaatgtggactttactgtggacactaatggtgtgtattcagagcctcgccccattggcacaagatacctgactcgtaatctgtaa

SEQ ID NO: 934 - DNA, 2208 bp, Artificial Sequence
  Synthetic Polynucleotide
atggctgccgatggttatcttccagattggctcgaggacactctctctgaaggaataagacagtggtggaagctcaaacctggcccaccaccaccaaagcccgcagagcggcatcaggacgacagcaggggtcttgtgcttcctgggtacaagtacctcggacccttcaacggactcgacaagggagagccggtcaacgaggcagacgccgcggccctcgagcacgacaaggcctacgaccggcagctcgacagcggagacaacccgtacctcaagtacaaccacgccgacgcggagtttcaggagcgtcttaaagaagatacgtcttttgggggcaacctcggacgagcagtcttccaggcgaaaaagagggttcttgaacctctgggcctggttgaggaacctgttaagacggctccgggaaaaaagaggccggtagagcattctcctgcggagccagactcctcctcgggaaccggaaaggcgggccagcagcctgcgagaaagagattgaatttcggtcagactggagacgcagactccgtacctgacccccagcctctcggacagccaccagcagccccctctggtctgggaactaatacgatggctacaggcagtggcgcaccaatggcagacaataacgagggcgccgacggagtgggtaattcctcgggaaattggcattgcgattccacatggatgggcgacagagtcatcaccaccagcacccgaacctgggccctgcccacctacaacaaccacctctacaagcaaatctccagccaatctggagcctcaaacgacaaccactactttggctacagcaccccttgggggtattttgacttcaacagattccactgtcacttctccccacgtgactggcaaagactcatcaacaacaactggggattccgacccaagagactcaacttcaagctctttaacattcaagtcaaagaggtcacgcagaatgacggtacgacgacgattgccaataaccttaccagcacggttcaagtctttactgactcggagtaccagctcccgtacgtcctcggctcggcgcatcaaggatgcctcccgccgtttccagcagacgtcttcatggtgccacagtatggatacctcaccctgaacaacgggagtcaggcggtaggacgctcttccttttactgcctggagtactttccttctcagatgctgcgtaccggaaacaactttaccttcagctacacctttgaggacgttcctttccacagcagctacgctcacagccagagtttggaccggctgatgaatcctctgatcgaccagtatctgtattacttgagcaaaacaaacgctctaagcggaaccaccacgatgtccaggcttcagttttctcaggccggagcgagtgacattcgggaccagtctaggaactggcttcctggaccctgttaccgccagcagcgagtatcaaaaacagctgcggataacaacaacagtgattattcgtggactggagctaccaagtaccacctcaatggaagagactctctggtgaatccgggcccagctatggccagccacaaggacgatgaagaaaaatattttcctcagagcgaggttctcatctttggaaaacaagactcgggaaaaactaatgtggacattgaaaaggtcatgattacagacgaagaggaaatcaggaccaccaatcccgtggctacggagcagtatggttctgtatctaccaacctccagagcggcaacacacaggcagccaccacagatgtcaacacacaaggcgttcttccaggcatggtctggcaggacagagacgtgtacctgcaaggacccatctgggcaaagattcctcacacggacggacactttcacccttctcccctcatgggaggatttggactcaaacaccctcctccgcaaatcctcatcaagaatacccccgtacctgcgaatccttcgaccacattcagcgcggcaaagcttgcttctttcatcacacagtactctacggggcaggtcagcgtggagattgagtgggagctgcagaaggagaacagcaaacgctggaaccccgaaatccagtacacttccaactacaacaagtctgttaatgtggactttactgtggacactaatggtgtgtattcagagcctcgccccattggcacaagatacctgactcgtaatctgtaa

SEQ ID NO: 935 - DNA, 2208 bp, Artificial Sequence
  Synthetic Polynucleotide
atggctgccgatggttatcttccagattggctcgaggacactctctctgaaggaataagacagtggtggaagctcaaacctggcccaccaccaccaaagcccgcagagcggcatcaggacgacagcaggggtcttgtgcttcctgggtacaagtacctcggacccttcaacggactcgacaagggagagccggtcaacgaggcagacgccgcggccctcgagcacgacaaggcctacgaccggcagctcgacagcggagacaacccgtacctcaagtacaaccacgccgacgcggagtttcaggagcgtcttaaagaagatacgtcttttgggggcaacctcggacgagcagtcttccaggcgaaaaagagggttcttgaacctctgggcctggttgaggaacctgttaagacggctccgggaaaaaagaggccggtagagcattctcctgcggagccagactcctcctcgggaaccggaaaggcgggccagcagcctgcgagaaagagattgaatttcggtcagactggagacgcagactccgtacctgacccccagcctctcggacagccaccagcagccccctctggtctgggaactaatacgatggctacaggcagtggcgcaccaatggcagacaataacgagggcgccgacggagtgggtaattcctcgggaaattggcattgcgattccacatggatgggcgacagagtcatcaccaccagcacccgaacctgggccctgcccacctacaacaaccacctctacaagcaaatctccagccaatctggagcctcaaacgacaaccactactttggctacagcaccccttgggggtattttgacttcaacagattccactgtcacttctccccacgtgactggcaaagactcatcaacaacaactggggattccgacccaagagactcaacttcaagctctttaacattcaagtcaaagaggtcacgcagaatgacggtacgacgacgattgccaataaccttaccagcacggttcaagtctttactgactcggagtaccagctcccgtacgccctcggctcggcgcatcaaggatgcctcccgccgtttccagcagacgtcttcatggtgccacagtatggatacctcaccctgaacaacgggagtcaggcggtaggacgctcttccttttactgcctggagtactttccttctcagatgctgcgtaccggaaacaactttaccttcagctacacctttgaggacgttcctttccacagcagctacgctcacagccagagtttggaccggctgatgaatcctctgatcgaccagtatctgtattacttgagcaaaacaaacgctccaagcggaaccaccacgatgtccaggcttcagttttctcaggccggagcgagtgacattcgggaccagtctaggaactggcttcctggaccctgttaccgccagcagcgagtatcaaaaacagctgcggataacaacaacagtgattattcgtggactggagctaccaagtaccacctcaatggaagagactctctggtgaatccgggcccagctatggccagccacaaggacgatgaagaaaaatattttcctcagagcggggttctcatctttggaaaacaagactcgggaaaaaccaatgtggacattgaaaaggtcatgattacagacgaagaggaaatcaggaccaccaatcccgtggctacggagcagtatggttctgtatctaccaacctccagagcggcaacacacaggcagccaccacagatgtcaacacacaaggcgttcttccaggcatggtctggcaggacagagacgtgtacctgcaaggacccatctgggcaaagattcctcacacggacggacactttcacccttctcccctcatgggaggatttggactcaaacaccctcctccgcaaatcctcatcaagaatacccccgtacctgcgaatccttcgaccacattcagcgcggcaaagtttgcttctttcatcacacagtactctacggggcaggtcagcgtggagattgagtgggagctgcagaaggagaacagcaaacgctggaaccccgaaatccagtacacttccaactacaacaagtctgttaatgtggactttactgtggacactaatggtgtgtattcagagcctcgccccattggcacaagatacctgactcgtaatctgtaa

SEQ ID NO: 936 - DNA, 2208 bp, Artificial Sequence
  Synthetic Polynucleotide
atggctgccgatggttatcttccagattggctcgaggacactctctctgaaggaataagacagtggtggaagctcaaacctggcccaccaccaccaaagcccgcagagcggcatcaggacgacagcaggggtcttgtgcttcctgggtacaagtacctcggacccttcaacggactcgacaagggagagccggtcaacgaggcagacgccgcggccctcgagcacgacaaggcctacgaccggcagctcgacagcggagacaacccgtacctcaagtacaaccacgccgacgcggagtttcaggagcgtcttaaagaagatacgtcttttgggggcaacctcggacgagcagtcttccaggcgaaaaagagggttcttgaacctctgggcctggttgaggaacctgttaagacggctccgggaaaaaagaggccggtagagcattctcctgcggagccagactcctcctcgggaaccggaaaggcgggccagcagcctgcgagaaagagattgaatttcggtcagactggagacgcagactccgtacctgacccccagcctctcggacagccaccagcagccccctctggtctgggaactaatacgatggctacaggcagtggcgcaccaatggcagacaataacgagggcgccgacggagtgggtaattcctcgggaaattggcattgcgattccacatggatgggcgacagagtcatcaccaccagcacccgaacctgggccctgcccacctacaacaaccacctctacaagcaaatctccagccaatctggagcctcaaacgacaaccactactttggctacagcaccccttgggggtattttgacttcagcagattccactgtcacttctccccacgtgactggcaaagactcatcaacaacaactggggattccgacccaagagactcaacttcaagctctttaacattcaagtcaaagaggtcacgcagaatgacggtacgacgacgattgccaataaccttaccagcacggttcaagtctttactgactcggagtaccagctcccgtacgtcctcggctcggcgcatcaaggatgcctcccgccgtttccagcagacgtcttcatggtgccacagtatggatacctcaccctgaacaacgggagtcaggcggtaggacgctcttccttttactgcctggagtactttccttctcagatgctgcgtaccggaaacaactttaccttcagctacacctttgaggacgttcctttccacagcagctacgctcacagccagagtttggaccggctgatgaatcctctgatcgaccagtatctgtattacttgagcaaaacaaacgctccaagcggaaccaccacgatgtccaggcttcagttttctcaggccggagcgagtgacattcgggaccagtctaggaactggcttcctggaccctgttaccgccagcagcgagtatcaaaaacagctgcggataacaacaacagtgattattcgtggactggagctaccaagtaccacctcaatggaagagactctctggtgaatccgggcccagctatggccagccacaaggacgatgaagaaaaatattttcctcagagcggggttctcatctttggaaaacaagactcgggaaaaaccaatgtggacattgaaaaggtcatgattacagacgaagaggaaatcaggaccaccaatcccgtggctacggagcagtatggttctgtatctaccaacctccagagcggcaacacacaggcagccaccacagatgtcaacacacaaggcgttcttccaggcatggtctggcaggacagagacgtgtacctgcaaggacccatctgggcaaagattcctcacacggacggacactttcacccttctcccctcatgggaggatttggactcaaacaccctcctccgcaaatcctcatcaagaatacccccgtacctgcgaatccttcgaccacattcagcgcggcaaagtttgcttctttcatcacacagtactctacggggcaggtcagcgtggagattgagtgggagctgcagaaggagaacagcaaacgctggaaccccgaaatccagtacacttccaactacaacaagtctgttaatgtggactttactgtggacactaatggtgtgtattcagagcctcgccccattggcacaagatacctgactcgtaatctgtaa

SEQ ID NO: 937 - DNA, 2208 bp, Artificial Sequence
  Synthetic Polynucleotide
atggctgccgatggttatcttccagattggctcgaggacactctctctgaaggaataagacagtggtggaagctcaaacctggcccaccaccaccaaagcccgcagagcggcatcaggacgacagcaggggtcttgtgcttcctgggtacaagtacctcggacccttcaacggactcgacaagggagagccggtcaacgaggcagacgccgcggccctcgagcacgacaaggcctacgaccggcagctcgacagcggagacaacccgtacctcaagtacaaccacgccgacgcggagtttcaggagcgtcttaaagaagatacgtcttttgggggcaacctcggacgagcagtcttccaggcgaaaaagagggttcttgaacccctgggcctggttgaggaacctgttaagacggctccgggaaaaaagaggccggtagagcattctcctgcggagccagactcctcctcgggaaccggaaaggcgggccagcagcctgcgagaaagagattgaatttcggtcagactggagacgcagactccgtacctgacccccagcctctcggacagccaccagcagccccctctggtctgggaactaatacgatggctacaggcagtggcgcaccaatggcagacaataacgagggcgccgacggagtgggtaattcctcgggaaattggcattgcgattccacatggatgggcgacagagtcatcaccaccagcacccgaacctgggccctgcccacctacaacaaccacctctacaagcaaatctccagccaatctggagcctcaaacgacaaccactacgttggctacagcaccccttgggggtattttgacttcaacagattccactgtcacttctccccacgtgactggcaaagactcatcaacaacaactggggattccgacccaagagactcaacttcaagctctttaacattcaagtcaaagaggtcacgcagaatgacggtacgacgacgattgccaataaccttaccagcacggttcaagtctttactgactcggagtaccagctcccgtacgtcctcggctcggcgcatcaaggatgcctcccgccgtttccagcagacgtcttcatggtgccacagtatggatacctcaccctgaacaacgggagtcaggcggtaggacgctcttccttttactgcctggagtactttccttctcagatgctgcgtaccggaaacaactttaccttcagctacacctttgaggacgttcctttccacagcagctacgctcacagccagagtttggaccggctgatgaatcctctgatcgaccagtatctgtattacttgagcaaaacaaacgctccaagcggaaccaccacgatgtccaggcttcagttttctcaggccggagcgagtgacattcgggaccagtctaggaactggcttcctggaccctgttaccgccagcagcgagtatcaaaaacagctgcggataacaacaacagtgattattcgtggactggagctaccaagtaccacctcaatggaagagactctctggtgaatccgggcccagctatggccagccacaaggacgatgaagaaaaatattttcctcagagcggggttctcatctttggaaaacaagactcgggaaaaactaatgtggacattgaaaaggtcatgattacagacgaagaggaaatcaggaccaccaatcccgtggctacggagcagtatggttctgtatctaccaacctccagagcggcaacacacaggcagccaccacagatgtcaacacacaaggcgttcttccaggcatggtctggcaggacagagacgtgtacctgcaaggacccatctgggcaaagattcctcacacggacggacactttcacccttctcccctcatgggaggatttggactcaaacaccctcctccgcaaatcctcatcaagaatacccccgtacctgcgaatccttcgaccacattcagcgcggcaaagtttgcttctttcatcacacagtactctacggggcaggtcagcgtggagattgagtgggagctgcagaaggagaacagcaaacgctggaaccccgaaatccagtacacttccaactacaacaagtctgttaatgtggactttactgtggacactaatggtgtgtattcagagcctcgccccattggcacaagatacctgactcgtaatctgtaa

SEQ ID NO: 938 - DNA, 2208 bp, Artificial Sequence
  Synthetic Polynucleotide
atggctgccgatggttatcttccagattggctcgaggacactctctctgaaggaataagacagtggtggaagctcaaacctggcccaccaccaccaaagcccgcagagcggcatcaggacgacagcaggggtcttgtgcttcctgggtacaagtacctcggacccttcaacggactcgacaagggagagccggtcaacgaggcagacgccgcggccctcgagcacgacaaggcctacgaccggcagctcgacagcggagacaacccgtacctcaagtacaaccacgccgacgcggagtttcaggagcgtcttaaagaagatacgtcttttgggggcaacctcggacgagcagtcttccaggcgaaaaagagggttcttgaacctctgggcctggttgaggaacctgttaagacggctccgggaaaaaagaggccggtagagcattctcctgcggagccagactcctcctcgggaaccggaaaggcgggccagcagcctgcgagaaagagattgaatttcggtcagactggagacgcagactccgtacctgacccccagcctctcggacagccaccagcagccccctctggtctgggaactaatacgatggctacaggcagtggcgcaccaatggcagacaataacgagggcgccgacggagtgggtaattcctcgggaaattggcattgcgattccacatggatgggcgacagagtcatcaccaccagcacccgaacctgggccctgcccacctacaacaaccacctctacaagcaaatctccagccaatctggagcctcaaacgacaaccactactttggctacagcaccccttgggggcattttgacttcaacagattccactgtcacttctccccacgtgactggcaaagactcatcaacaacaactggggattccgacccaagagactcaacttcaagctctttaacattcaagtcaaagaggtcacgcagaatgacggtacgacgacgattgccaataaccttaccagcacggttcaagtctttactgactcggagtaccagctcccgtacgtcctcggctcggcgcatcaaggatgcctcccgccgtttccagcagacgtcttcatggtgccacagtatggatacctcaccctgaacaacgggagtcaggcggtaggacgctcttccttttactgcctggagtactttccttctcagatgctgcgtaccggaaacaactttaccttcagctacacctttgaggacgttcctttccacagcagctacgctcacagccagagtttggaccggctgatgaatcctctgatcgaccagtatctgtattacttgagcaaaacaaacgctccaagcggaaccaccacgatgtccaggcttcagttttctcaggccggagcgagtgacattcgggaccagtctaggaactggcttcctggaccctgttaccgccagcagcgagtatcaaaaacagctgcggataacaacaacagtgattattcgtggactggagctaccaagtaccacctcaatggaagagactctctggtgaatccgggcccagctatggccagccacaaggacgatgaagaaaaatattttcctcagagcggggttctcatctttggaaaacaagactcgggaaaaaccaatgtggacattgaaaaggtcatgattacagacgaagaggaaatcaggaccaccaatcccgtggctacggagcagtatggttctgtatctaccaacctccagagcggcaacacacaggcagccaccacagatgtcaacacacaaggcgttcttccaggcatggtctggcaggacagagacgtgtacctgcaaggacccatctgggcaaagattcctcacacggacggacactttcacccttctcccctcatgggaggatttggactcaaacaccctcctccgcaaatcctcatcaagaatacccccgtacctgcgaatccttcgaccacattcagcgcggcaaagtttgcttctttcatcacacagtactctacggggcaggtcagcgtggagattgagtgggagctgcagaaggagaacagcaaacgctggaaccccgaaatccagtacacttccaactacaacaagtctgttaatgtggactttactgtggacactaatggtgtgtattcagagcctcgccccattggcacaagatacctgactcgtaatctgtaa

SEQ ID NO: 939 - DNA, 2208 bp, Artificial Sequence
  Synthetic Polynucleotide
atggctgccgatggttatcttccagattggctcgaggacactctctctgaaggaataagacagtggtggaagctcaaacctggcccaccaccaccaaagcccgcagagcggcatcaggacgacagcaggggtcttgtgcttcctgggtacaagtacctcggacccttcaacggactcgacaagggagagccggtcaacgaggcagacgtcgcggccctcgagcacgacaaggcctacgaccggcagctcgacagcggagacaacccgtacctcaagtacaaccacgccgacgcggagtttcaggagcgtcttaaagaagatacgtcttttgggggcaacctcggacgagcagtcttccaggcgaaaaagagggttcttgaacctctgggcctggttgaggaacctgttaagacggctccgggaaaaaagaggccggtagagcattctcctgcggagccagactcctcctcgggaaccggaaaggcgggccagcagcctgcgagaaagagattgaatttcggtcagactggagacgcagactccgtacctgacccccagcctctcggacagccaccagcagccccctctggtctgggaactaatacgatggctacaggcagtggcgcaccaatggcagacaataacgagggcgccgacggagtgggtaattcctcgggaaattggcattgcgattccacatggatgggcgacagagtcatcaccaccagcacccgaacctgggccctgcccacctacaacaaccacctctacaagcaaatctccagccaatctggagcctcaaacgacaaccactactttggctacagcaccccttgggggtattttgacttcaacagattccactgtcacttctccccacgtgactggcaaagactcatcaacaacgactggggattccgacccaagagactcaacttcaagctctttaacattcaagtcaaagaggtcacgcagaatgacggtacgacgacgattgccaataaccttaccagcacggttcaagtctttactgactcggagtaccagctcccgtacgtcctcggctcggcgcatcaaggatgcctcccgccgtttccagcagacgtcttcatggtgccacagtatggatacctcaccctgaacaacgggagtcaggcggtaggacgctcttccttttactgcctggagtactttccttctcagatgctgcgtaccggaaacaactttaccttcagctacacctttgaggacgttcctttccacagcagctacgctcacagccagagtttggaccggctgatgaatcctctgatcgaccagtatctgtattacttgagcaaaacaaacgctccaagcggaaccaccacgatgtccaggcttcagttttctcaggccggagcgagtgacattcgggaccagtctaggaactggcttcctggaccctgttaccgccagcagcgagtatcaaaaacagctgcggataacaacaacagtgattattcgtggactggagctaccaagtaccacctcaatggaagagactctctggtgaatccgggcccagctatggccagccacaaggacgatgaagaaaaatattttcctcagagcggggttctcatctttggaaaacaggactcgggaaaaactaatgtggacattgaaaaggtcatgattacagacgaagaggaaatcaggaccaccaatcccgtggctacggagcagtatggttctgtatctaccaacctccagagcggcaacacacaggcagccaccacagatgtcaacacacaaggcgttcttccaggcatggtctggcaggacagagacgtgtacctgcaaggacccatctgggcaaagattcctcacacggacggacactttcacccttctcccctcatgggaggatttggactcaaacaccctcctccgcaaatcctcatcaagaatacccccgtacctgcgaatccttcgaccacattcagcgcggcaaagtttgcttctttcatcacacagtactctacggggcaggtcagcgtggagattgagtgggagctgcagaaggagaacagcaaacgctggaaccccgaaatccagtacacttccaactacaacaagtctgttaatgtggactttactgtggacactaatggtgtgtattcagagcctcgccccattggcacaagatacctgactcgtaatctgtaa

SEQ ID NO: 940 - DNA, 2208 bp, Artificial Sequence
  Synthetic Polynucleotide
atggctgccgatggttatcttccagattggctcgaggacactctctctgaaggaataagacagtggtggaagctcaaacctggcccaccaccaccaaagcccgcagagcggcatcaggacgacagcaggggtcttgtgcttcctgggtacaagtacctcggacccttcaacggactcgacaagggagagccggtcaacgaggcagacgccgcggccctcgagcacgacaaggcctacgaccggcagctcgacagcggagacaacccgtacctcaagtacaaccacgccgacgcggagtttcaggagcgtcttaaagaagatacgtcttttgggggcaacctcggacgagcagtcttccaggcgaaaaagagggttcttgaacctctgggcctggttgaggaacctgttaagacggctccgggaaaaaagaggccggtagagcattctcctgcggagccagactcctcctcgggaaccggaaaggcgggccagcagcctgcgagaaagagattgaatttcggtcagactggagacgcagactccgtacctgacccccagcctctcggacagccaccagcagccccctctggtctgggaactaatacgatggctacaggcagtggcgcaccaatggcagacaataacgagggcgccgacggagtgggtaattcctcgggaaattggcattgcgattccacatggatgggcgacagagtcatcaccaccagcacccgaacctgggccctgcccacctacaacaaccacctctacaagcaaatctccagccaatctggagcctcaaacgacaaccactactttggctacagcaccccttgggggtattttgacttcaacagattccactgtcacttctccccacgtgactggcaaagactcatcaacaacaactggggattccgacccaagagactcaacttcaagctctttaacattcaagtcaaagaggtcacgcagaatgacggtacgacgacgattgccaataaccttaccagcacggttcaagtctttactgactcggagtaccagctcccgtacgtcctcggctcggcgcatcaaggatgcctcccgccgtttccagcagacgtcttcatggtgccacagtatggatacctcaccctgaacaacgggagtcaggcggtaggacgctcttccttttactgcctggagtactttccttctcagatgctgcgtaccggaaacaactttaccttcagctacacctttgaggacgttcctttccacagcagctacgctcacagccagagtttggaccggctgatgaatcctctgatcgaccagtatctgtattacttgagcaaaacaaacgctccaagcggaaccaccacgatgtccaggcttcagttttctcaggccggagcgagtgacattcgggaccagtctaggaactggcttcctggaccctgttaccgccagcagcgagtatcaaaaacagctgcggataacaacaacagtgattattcgtggactggagctaccaagtaccacctcaatggaagagactctctggtgaatccgggcccagctatggccagccacaaggacgatgaagaaaaatattttcctcagagcggggttctcatctttggaaaacaagactcggaaaaaaccaatgtggacattgaaaaggtcatgattacagacgaagaggaaatcaggaccaccaatcccgtggctacggagcagtatggttctgtatctaccaacctccagagcggcaacacacaggcagccaccacagatgtcaacacacaaggcgttcttccaggcatggtctggcaggacagagacgtgtacctgcaaggacccatctgggcaaagattcctcacacggacggacactttcacccttctcccctcatgggaggatttggactcaaacaccctcctccgcaaatcctcatcaagaatacccccgtacctgcgaatccttcgaccacattcagcgcggcaaagtttgcttctttcatcacacagtactctacggggcaggtcagcgtggagattgagtgggagctgcagaaggagaacagcaaacgctggaaccccgaaatccagtacacttccaactacaacaagtctgttaatgtggactttactgtggacactaatggtgtgtattcagagcctcgccccattggcacaagatacctgactcgtaatctgtaa

SEQ ID NO: 941 - DNA, 2208 bp, Artificial Sequence
  Synthetic Polynucleotide
atggctgccgatggttatcttccagattggctcgaggacactctctctgaaggaataagacagtggtggaagctcaaacctggcccaccaccaccaaagcccgcagagcggcatcaggacgacagcaggggtcttgtgcttcctgggtacaagtacctcggacccttcaacggactcgacaagggagagccggtcaacgaggcagacgccgcggccctcgagcacgacaaggcctacgaccggcagctcgacagcggagacaacccgtacctcaagtacaaccacgccgacgcggagtttcaggagcgtcttaaagaagatacgtcttttgggggcaacctcggacgagcagtcttccaggcgaaaaagagggttcttgaacctctgggcctggttgaggaacctgttaagacggctccgggaaaaaagaggccggtagagcattctcctgcggagccagactcctcctcgggaaccggaaaggcgggccagcagcctgcgagaaagagattgaatttcggtcagactggagacgcagactccgtacctgacccccagcctctcggacagccaccagcagccccctctggtctgggaactaatacgatggctacaggcagtggcgcaccaatggcagacaataacgagggcgccgacggagtgggtaattcctcgggaaattggcattgcgattccacatggatgggcgacagagtcatcaccaccagcacccgaacctgggccctgcccacctacaacaaccacctctacaagcaaatctccagccaatctggagcctcaaacgacaaccactactttggctacagcaccccttgggggtattttgacttcaacagattccactgtcacttctccccacgtgactggcaaagactcatcaacaacaactggggattccgacccaagagactcaacttcaagctctttaacattcaagtcaaagaggtcacgcagaatgacggtacgacgacgattgccaataaccttaccagcacggttcaagtctttactgactcggagtaccagctcccgtacgtcctcggctcggcgcatcaaggatgcctcccgccgtttccagcagacgtcttcatggtgccacagtatggatacctcaccctgaacaacgggagtcaggcggtaggacgctcttccttttactgcctggagtactttccttctcagatgctgcgtaccggaaacaactttaccttcagctacacctttgaggacgttcctttccacagcagctacgctcacagccagagtttggaccggctgatgaatcctctgatcgaccagtatctgtattacttgagcaaaacaaacgctccaagcggaaccaccacgatgtccaggcttcagttttctcaggccggagcgagtgacattcgggaccagtctaggaactggcttcctggaccctgttaccgccagcagcgagtatcaaaaacagctgcggataacaacaacagtgattattcgtggactggagctaccaagtaccacctcaatggaagagactctctggtgaatccgggcccagctatggccagccacaaggacgatgaagaaaaatattttcctcagagcggggttctcatctttggaaaacaagactcgggaaaaactaatgtggacattgaaaaggtcatgattacagacgaagaggaaatcaggaccaccaatcccgtggctacggagcagtatggttctgtatctaccaacctccagagcggcaacacacaggcagccaccacagatgtcaacacacaaggcgttcttccaggcatggtctggcaggacagagacgtgtacctgcaaggacccatctgggcaaagattcctcacacggacggacactttcacccttctcccctcatgggaggatttggactcaaacaccctcctccgcaaatcctcatcaagaatacccccgtacctgcgaatccttcgaccacattcagcgcggcaaagtttgcttctttcatcacacagtactctacggggcaggtcagcgtggagattgagtgggagctgcagaaggagaacagcaaacgctggaaccccgaaatccagtacacttccaactacaacaagtctgttaatgtggactttactgtggacactaatggtgtgtattcagagcctcgccccattggcacaagatacctgactcgtaatctgtaa

SEQ ID NO: 942 - DNA, 2208 bp, Artificial Sequence
  Synthetic Polynucleotide
atggctgccgatggttatcttccagattggctcgaggacactctctctgaaggaataagacagtggtggaagctcaaacctggcccaccaccaccaaagcccgcagagcggcatcaggacgacagcaggggtcttgtgcttcctgggtacaagtacctcggacccttcaacggactcgacaagggagagccggtcaacgaggcagacgtcgcggccctcgagcacgacaaggcctacgaccggcagctcgacagcggagacaacccgtacctcaagtacaaccacgccgacgcggagtttcaggagcgtcttaaagaagatacgtcttttgggggcaacctcggacgagcagtcttccaggcgaaaaagagggttcttgaacctctgggcctggttgaggaacctgttaagacggctccgggaaaaaagaggccggtagagcattctcctgcggagccagactcctcctcgggaaccggaaaggcgggccagcagcctgcgagaaagagattgaatttcggtcagactggagacgcagactccgtacctgacccccagcctctcggacagccaccagcagccccctctggtctgggaactaatacgatggctacaggcagtggcgcaccaatggcagacaataacgagggcgccgacggagtgggtaattcctcgggaaattggcattgcgattccacatggatgggcgacagagtcatcaccaccagcacccgaacctgggccctgcccacctacaacaaccacctctacaagcaaatctccagccaatctggagcctcaaacgacaaccactactttggctacagcaccccttgggggtattttgacttcaacagattccactgtcacttctccccacgtgactggcaaagactcatcaacaacaactggggattccgacccaagagactcaacttcaagctctttaacattcaagtcaaagaggtcacgcagaatgacggtacgacgacgattgccaataaccttaccagcacggttcaagtctttactgactcggagtaccagctcccgtacgtcctcggctcggcgcatcaaggatgcctcccgccgtttccagcagacgtcttcatggtgccacagtatggatacctcaccctgaacaacgggagtcaggcggtaggacgctcttccttttactgcctggagtactttccttctcagatgctgcgtaccggaaacaactttaccttcagctacacctttgaggacgttcctttccacagcagctacgctcacagccagagtttggaccggctgatgaatcctctgatcgaccagtatctgtattacttgagcaaaacaaacgctccaagcggaaccaccacgatgtccaggcttcagttttctcaggccggagcgagtgacattcgggaccagtctaggaactggcttcctggaccctgttaccgccagcagcgagtatcaaaaacagctgcggataacaacaacagtgattattcgtggactggagctaccaagtaccacctcaatggaagagactctctggtgaatccgggcccagctatggccagccacaaggacgatgaagaaaaatattttcctcagagcggggttctcatctttggaaaacaagactcgggaaaaactaatgtggacattgaaaaggtcatgattacagacgaagaggaaatcaggaccaccaatcccgtggctacggagcagtatggttctgtatctaccaacctccagagcggcaacacacaggcagccaccacagatgtcaacacacaaggcgttcttccaggcatggtctggcaggacagagacgtgtacctgcaaggacccatctgggcaaagattcctcacacggacggacactttcacccttctcccctcatgggaggatttggactcaaacaccctcctccgcaaatcctcatcaagaatacccccgtacctgcgaatccttcgaccacattcagcgcggcaaagtttgcttctttcatcacacagtactctacggggcaggtcagcgtggagattgagtgggagctgcagaaggagaacagcaaacgctggaaccccgaaatccagtacacttccaactacaacaagtctgttaatgtggactttactgtggacactaatggtgtgtattcagagcctcgccccattggcacaagatacctgactcgtaatctgtaa

SEQ ID NO: 943 - DNA, 2208 bp, Artificial Sequence
  Synthetic Polynucleotide
atggctgccgatggttatcttccagattggctcgaggacactctctctgaaggaataagacagtggtggaagctcaaacctggcccaccaccaccaaagcccgcagagcggcatcaggacgacagcaggggtcttgtgcttcctgggtacaagtacctcggacccttcaacggactcgacaagggagagccggtcaacgaggcagacgccgcggccctcgagcacgacaaggcctacgaccggcagctcgacagcggagacaacccgtacctcaagtacaaccacgccgacgcggagtttcaggagcgtcttaaagaagatacgtcttttgggggcaacctcggacgagcagtcttccaggcgaaaaagagggttcttgaacctctgggcctggttgaggaacctgttaagacggctccgggaaaaaagaggccggtagagcattctcctgcggagccagactcctcctcgggaaccggaaaggcgggccagcagcctgcgagaaagagattgaatttcggtcagactggagacgcagactccgtacctgacccccagcctctcggacagccaccagcagccccctctggtctgggaactaatacgatggctacaggcagtggcgcaccaatggcagacaataacgagggcgccgacggagtgggtaattcctcgggaaattggcattgcgattccacatggatgggcgacagagtcatcaccaccagcacccgaacctgggccctgcccacctacaacaaccacctctacaagcaaatctccagccaatctggagcctcaaacgacaaccactactttggctacagcaccccttgggggtattttgacttcaacagattccactgtcacttctccccacgtgactggcaaagactcatcaacaacaactggggattccgacccaagagactcaacttcaagctctttaacattcaagtcaaagaggtcacgcagaatgacggtacgacgacgattgccaataaccttaccagcacggttcaagtctttactgactcggagtaccagctcccgtacgtcctcggctcggcgcatcaaggatgcctcccgccgtttccagcagacgtcttcatggtgccacagtatggatacctcaccctgaacaacgggagtcaggcggtaggacgctcttccttttactgcctggagtactttccttctcagatgctgcgtaccggaaacaactttaccttcagctacacctttgaggacgttcctttccacagcagctacgctcacagccagagtttggaccggctgatgaatcctctgatcgaccagtatctgtattacttgagcaaaacaaacgctccaagcggaaccaccacgatgtccaggcttcagttttctcaggccggagcgagtgacattcgggaccagtctaggaactggcttcctggaccctgttaccgccagcagcgagtatcaaaaacagctgcggataacaacaacagtgattatccgtggactggagctaccaagtaccacctcaatggaagagactctctggtgaatccgggcccagctatggccagccacaaggacgatgaagaaaaatattttcctcagagcggggttctcatctttggaaaacaagactcgggaaaaaccaatgtggacattgaaaaggtcatgattacagacgaagaggaaatcaggaccaccaatcccgtggctacggagcagtatggttctgtatctaccaacctccagagcggcaacacacaggcagccaccacagatgtcaacacacaaggcgttcttccaggcatggtctggcaggacagagacgtgtacctgcaaggacccatctgggcaaagattcctcacacggacggacactttcacccttctcccctcatgggaggatttggactcaaacaccctcctccgcaaatcctcatcaagaatacccccgtacctgcgaatccttcgaccacattcagcgcggcaaagtttgcttctttcatcacacagtactctacggggcaggtcagcgtggagattgagtgggagctgcagaaggagaacagcaaacgctggaaccccgaaatccagtacacttccaactacaacaagtctgttaatgtggactttactgtggacactaatggtgtgtattcagagcctcgccccattggcacaagatacctgactcgtaatctgtaa

SEQ ID NO: 944 - DNA, 2208 bp, Artificial Sequence
  Synthetic Polynucleotide
atggctgccgatggttatcttccagattggctcgaggacactctctctgaaggaataagacagtggtggaagctcaaacctggcccaccaccaccaaagcccgcagagcggcatcaggacgacagcaggggtcttgtgcttcctgggtacaagtacctcggacccttcaacggactcgacaagggagagccggtcaacgaggcagacgccgcggccctcgagcacgacaaggcctacgaccggcagctcgacagcggagacaacccgtacctcaagtacaaccacgccgacgcggagtttcaggagcgtcttaaagaagatacgtcttttgggggcaacctcggacgagcagtcttccaggcgaaaaagagggttcttgaacctctgggcctggttgaggaacctgttaagacggctccgggaaaaaagaggccggtagagcattctcctgcggagccagactcctcctcgggaaccggaaaggcgggccagcagcctgcgagaaagagattgaatttcggtcagactggagacgcagactccgtacctgacccccagcctctcggacagccaccagcagccccctctggtctgggaactaatacgatggctacaggcagtggcgcaccaatggcagacaataacgagggcgccgacggagtgggtaattcctcgggaaattggcattgcgattccacatggatgggcgacagagtcatcaccaccagcacccgaacctgggccctgcccacctacaacaaccacctctacaagcaaatctccagccaatctggagcctcaaacgacaaccactactttggctacagcaccccttgggggtattttgacttcaacagattccactgtcacttctccccacgtgactggcaaagactcatcaacaacaactggggattccgacccaagagactcaacttcaagctctttaacattcaagtcaaagaggtcacgcagaatgacggtacgacgacgattgccaataaccttaccagcacggttcaagtctttactgactcggagtaccagctcccgtacgtcctcggctcggcgcatcaaggatgcctcccgccgtttccagcagacgtcttcatggtgccacagtatggatacctcaccctgaacaacgggagtcaggcggtaggacgctcttccttttactgcctggagtactttccttctcagatgctgcgtaccggaaacaactttaccttcagctacacctttgaggacgttcctttccacagcagctacgctcacagccagagtttggaccggctgatgaatcctctgatcgaccagtatctgtattacttgagcaaaacaaacgctccaagcggaaccaccacgatgtccaggcttcagttttctcaggccggagcgagtgacattcgggaccagtctaggaactggcttcctggaccctgttaccgccagcagcgagtatcaaaaacagctgcggataacaacaacagtgattattcgtggactggagctaccaagtaccacctcaatggaagagactctctggtgaatccgggcccagctatggccagccacaaggacgatgaagaaaaatattttcctcagagcggggttctcatctttggaaaacaagactcgggaaaaactaatgtggacattgaaaaggtcatgattacagacgaagaggaaatcaggaccaccaatcccgtggctacggagcagtatggttctgtatctaccaacctccagagcggcaacacacaggcagccaccacagatgtcaacacacaaggcgctcttccaggcatggtctggcaggacagagacgtgtacctgcaaggacccatctgggcaaagattcctcacacggacggacactttcacccttctcccctcatgggaggatttggactcaaacaccctcctccgcaaatcctcatcaagaatacccccgtacctgcgaatccttcgaccacattcagcgcggcaaagtttgcttctttcatcacacagtactctacggggcaggtcagcgtggagattgagtgggagctgcagaaggagaacagcaaacgctggaaccccgaaatccagtacacttccaactacaacaagtctgttaatgtggactttactgtggacactaatggtgtgtattcagagcctcgccccattggcacaagatacctgactcgtaatctgtaa

SEQ ID NO: 945 - DNA, 2208 bp, Artificial Sequence
  Synthetic Polynucleotide
atggctgccgatggttatcttccagattggctcgaggacactctctctgaaggaataagacagtggtggaagctcaaacctggcccaccaccaccaaagcccgcagagcggcatcaggacgacagcaggggtcttgtgcttcctgggtacaagtacctcggacccttcaacggactcgacaagggagagccggtcaacgaggcagacgccgcggccctcgagcacgacaaggcctacgaccggcagctcgacagcggagacaacccgtacctcaagtacaaccacgccgacgcggagtttcaggagcgtcttaaagaagatacgtcttttgggggcaacctcggacgagcagtcttccaggcgaaaaagagggttcttgaacctctgggcctggttgaggaacctgttaagacggctccgggaaaaaagaggccggtagagcattctcctgcggagccagactcctcctcgggaaccggaaaggcgggccagcagcctgcgagaaagagattgaatttcggtcagactggagacgcagactccgtacctgacccccagcctctcggacagccaccagcagccccctctggtctgggaactaatacgatggctacaggcagtggcgcaccaatggcagacaataacgagggcgccgacggagtgggtaattcctcgggaaattggcattgcgattccacatggatgggcgacagagtcatcaccaccagcacccgaacctgggccctgcccacctacaacaaccacctctacaagcaaatctccagccaatctggagcctcaaacgacaaccactactttggctacagcaccccttgggggtattttgacttcaacagattccactgtcacttctccccacgtgactggcaaagactcatcaacaacaactggggattccgacccaagagactcaacttcaagctctttaacattcaagtcaaagaggtcacgcagaatgacggtacgacgacgattgccaataaccttaccagcacggttcaagtctttactgactcggagtaccagctcccgtacgtcctcggctcggcgcatcaaggatgcctcccgccgtttccagcagacgtcttcatggtgccacagtatggatacctcaccctgaacaacgggagtcaggcggtaggacgctcttccttttactgcctggagtactttccttctcagatgctgcgtaccggaaacaactttaccttcagctacacctttgaggacgttcctttccacagcagctacgctcacagccagagtttggaccggctgatgaatcctctgatcgaccagtatctgtattacttgagcaaaacaaacgctccaagcggaaccaccacgatgtccaggcttcagttttctcaggccggagcgagtgacattcgggaccagtctaggaactggcttcctggaccctgttaccgccagcagcgagtatcaaaaacagctgcggataacaacaacagtgattattcgtggactggagctaccaagtaccacctcaatggaagagactctctggtgaatccgggcccagctatggccagccacaaggacgatgaagagaaatattttcctcagagcggggttctcatctttggaaaacaagactcgggaaaaactaatgtggacattgaaaaggtcatgattacagacgaagaggaaatcaggaccaccaatcccgtggctacggagcagtatggttctgtatctaccaacctccagagcggcaacacacaggcagccaccacagatgtcaacacacaaggcgttcttccaggcatggtctggcaggacagagacgtgtacctgcaaggacccatctgggcaaagattcctcacacggacggacactttcacccttctcccctcatgggaggatttggactcaaacaccctcctccgcaaatcctcatcaagaatacccccgtacctgcgaatccttcgaccacattcagcgcggcaaagcttgcttctttcatcacacagtactctacggggcaggtcagcgtggaggttgagtgggagctgcagaaggagaacagcaaacgctggaaccccgaaatccagtacacttccaactacaacaagtctgttaatgtggactttactgtggacactaatggtgtgtattcagagcctcgccccattggcacaagatacctgactcgtaatctgtaa

SEQ ID NO: 946 - DNA, 2208 bp, Artificial Sequence
  Synthetic Polynucleotide
atggctgccgatggttatcttccagattggctcgaggacactctctctgaaggaataagacagtggtggaagctcaaacctggcccaccaccaccaaagcccgcagagcggcatcaggacgacagcaggggtcttgtgcttcctgggtacaagtacctcggacccttcaacggactcgacaagggagagccggtcaacgaggcagacgtcgcggccctcgagcacgacaaggcctacgaccggcagctcgacagcggagacaacccgtacctcaagtacaaccacgccgacgcggagtttcaggagcgtcttaaagaagatacgtcttttgggggcaacctcggacgagcagtcttccaggcgaaaaagagggttcttgaacctctgggcctggttgaggaacctgttaagacggctccgggaaaaaagaggccggtagagcattctcctgcggagccagactcctcctcgggaaccggaaaggcgggccagcagcctgcgagaaagagattgaatttcggtcagactggagacgcagactccgtacctgacccccagcctctcggacagccaccagcagccccctctggtctgggaactaatacgatggctacaggcagtggcgcaccaatggcagacaataacgagggcgccgacggagtgggtaattcctcgggaaattggcattgcgattccacatggatgggcgacagagtcatcaccaccagcacccgaacctgggccctgcccacctacaacaaccacctctacaagcaaatctccagccaatctggagcctcaaacgacaaccactactttggctacagcaccccttgggggtattttgacttcaacagattccactgtcacttctccccacgtgactggcaaagactcatcaacaacaactggggattccgacccaagagactcaacttcaagctctttaacattcaagtcaaagaggtcacgcagaatgacggtacgacgacgattgccaataaccttaccagcacggttcaagtctttactgactcggagtaccagctcccgtacgtcctcggctcggcgcatcaaggatgcctcccgccgtttccagcagacgtcttcatggtgccacagtatggatacctcaccctgaacagcgggagtcaggcggtaggacgctcttccttttactgcctggagtactttccttctcagatgctgcgtaccggaaacaactttaccttcagctacacctttgaggacgttcctttccacagcagctacgctcacagccagagtttggaccggctgatgaatcctctgatcgaccagtatctgtattacttgagcaaaacaaacgctccaagcggaaccaccacgatgtccaggcttcagttttctcaggccggagcgagtgacattcgggaccagtctaggaactggcttcctggaccctgttaccgccagcagcgagtatcaaaaacagctgcggataacaacaacagtgattattcgtggactggagctaccaagtaccacctcaatggaagagactctctggtgaatccgggcccagctatggccagccacaaggacgatgaagaaaaatattttcctcagagcggggttctcatctttggaaaacaagactcgggaaaaactaatgtggacattgaaaaggtcatgattacagacgaagaggaaatcaggaccaccaatcccgtggctacggagcagtatggttctgtatctaccaacctccagagcggcaacacacaggcagccaccacagatgtcaacacacaaggcgttcttccaggcatggtctggcaggacagagacgtgtacctgcaaggacccatctgggcaaagattcctcacacggacggacactttcacccttctcccctcatgggaggatttggactcaaacaccctcctccgcaaatcctcatcaagaatacccccgtacctgcgaatccttcgaccacattcagcgcggcaaagtttgcttctttcatcacacagtactctacggggcaggtcagcgtggagattgagtgggagctgcagaaggagaacagcaaacgctggaaccccgaaatccagtacacttccaactacaacaagtctgttaatgtggactttactgtggacactaatggtgtgtattcagagcctcgccccattggcacaagatacctgactcgtaatctgtaa

SEQ ID NO: 947 - DNA, 2208 bp, Artificial Sequence
  Synthetic Polynucleotide
atggctgccgatggttatcttccagattggctcgaggacactctctctgaaggaataagacagtggtggaagctcaaacctggcccaccaccaccaaagcccgcagagcggcatcaggacgacagcaggggtcttgtgcttcctgggtacaagtacctcggacccttcaacggactcgacaagggagagccggtcaacgaggcagacgtcgcggccctcgagcacgacaaggcctacgaccggcagctcgacagcggagacaacccgtacctcaagtacaaccacgccgacgcggagtttcaggagcgtcttaaagaagatacgtcttttgggggcaacctcggacgagcagtcttccaggcgaaaaagagggttcttgaacctctgggcctggttgaggaacctgttaagacggctccgggaaaaaagaggccggtagagcattctcctgcggagccagactcctcctcgggaaccggaaaggcgggccagcagcctgcgagaaagagattgaatttcggtcagactggaggcgcagactccgtacctgacccccagcctctcggacagccaccagcagccccctctggtctgggaactaatacgatggctacaggcagtggcgcaccaatggcagacaataacgagggcgccgacggagtgggtaattcctcgggaaattggcattgcgattccacatggatgggcgacagagtcatcaccaccagcacccgaacctgggccctgcccacctacaacaaccacctctacaagcaaatctccagccaatctggagcctcaaacgacaaccactactttggctacagcaccccttgggggtattttgacttcaacagattccactgtcacttctccccacgtgactggcaaagactcatcaacaacaactggggattccgacccaagagactcaacttcaagctctttaacattcaagtcaaagaggtcacgcagaatgacggtacgacgacgattgccaataaccttaccagcacggttcaagtctttactgactcggagtaccagctcccgtacgtcctcggctcggcgcatcaaggatgcctcccgccgtttccagcagacgtcttcatggtgccacagtatggatacctcaccctgaacaacgggagtcaggcggtaggacgctcttccttttactgcctggagtactttccttctcagatgctgcgtaccggaaacaactttaccttcagctacacctttgaggacgttcctttccacagcagctacgctcacagccagagtttggaccggctgatgaatcctctgatcgaccagtatctgtattacttgagcaaaacaaacgctccaagcggaaccaccacgatgtccaggcttcagttttctcaggccggagcgagtgacattcgggaccagtctaggaactggcttcctggaccctgttaccgccagcagcgagtatcaaaaacagctgcggataacaacaacagtgattattcgtggactggagctaccaagtaccacctcaatggaagagactctctggtgaatccgggcccagctatggccagccacaaggacgatgaagaaaaatattttcctcagagcggggttctcatctttggaaaacaagactcgggaaaaactaatgtggacattgaaaaggtcatgattacagacgaagaggaaatcaggaccaccaatcccgtggctacggagcagtatggttctgtatctaccaacctccagagcggcaacacacaggcagccaccacagatgtcaacacacaaggcgttcttccaggcatggtctggcaggacagagacgtgtacctgcaaggacccatctgggcaaagattcctcacacggacggacactttcacccttctcccctcatgggaggatttggactcaaacaccctcctccgcaaatcctcatcaagaatacccccgtacctgcgaatccttcgaccacattcagcgcggcaaagtttgcttctttcatcacacagtactctacggggcaggtcagcgtggagattgagtgggagctgcagaaggagaacagcaaacgctggaaccccgaaatccagtacacttccaactacaacaagtctgttaatgtggactttactgtggacactaatggtgtgtattcagagcctcgccccattggcacaagatacctgactcgtaatctgtaa

SEQ ID NO: 948 - DNA, 2208 bp, Artificial Sequence
  Synthetic Polynucleotide
atggctgccgatggttatcttccagattggctcgaggacactctctctgaaggaataagacagtggtggaagctcaaacctggcccaccaccaccaaagcccgcagagcggcatcaggacgacagcaggggtcttgtgcttcctgggtacaagtacctcggacccttcaacggactcgacaagggagagccggtcaacgaggcagacgccgcggccctcgagcacgacaaggcctacgaccggcagctcgacagcggagacaacccgtacctcaagtacaaccacgccgacgcggagtttcaggagcgtcttaaagaagatacgtcttttgggggcaacctcggacgagcagtcttccaggcgaaaaagagggttcttgaacctctgggcctggttgaggaacctgttaagacggctccgggaaaaaagaggccggtagagcattctcctgcggagccagactcctcctcgggaaccggaaaggcgggccagcagcctgcgagaaagagattgaatttcggtcagactggagacgcagactccgtacctgacccccagcctctcggacagccaccagcagccccctctggtctgggaactaatacgatggctacaggcagtggcgcaccaatggcagacaataacgagggcgccgacggagtgggtaattcctcgggaaattggcattgcgattccacatggatgggcgacagagtcatcaccaccagcacccgaacctgggccctgcccacctacaacaaccacctctacaagcaaatctccagccaatctggagcctcaaacgacaaccactactttggctacagcaccccttgggggtattttgacttcaacagattccactgtcacttctccccacgtgactggcaaagactcatcaacaacaactggggattccgacccaagagactcaacttcaagctctttaacattcaagtcaaagaggtcacgcagaatgacggtacgacgacgattgccaataaccttaccagcacggttcaagtctttactgactcggagtaccagctcccgtacgccctcggctcggcgcatcaaggatgcctcccgccgtttccagcagacgtcttcatggtgccacagtatggatacctcaccctgaacaacgggagtcaggcggtaggacgctcttccttttactgcctggagtactttccttctcagatgctgcgtaccggaaacaactttaccttcagctacacctttgaggacgttcctttccacagcagctacgctcacagccagagtttggaccggctgatgaatcctctgatcgaccagtatctgtattacttgagcaaaacaaacgctccaagcggaaccaccacgatgtccaggcttcagttttctcaggccggagcgagtgacattcgggaccagtctaggaactggcttcctggaccctgttaccgccagcagcgagtatcaaaaacagctgcggataacaacaacagtgattattcgtggactggagctaccaagtaccacctcaatggaagagactctctggtgaatccgggcccagctatggccagccacaaggacgatgaagaaaaatattttcctcagagcggggttctcatctttggaaaacaagactcgggaaaaaccaatgtggacattgaaaaggtcatgattacagacgaagaggaaatcaggaccaccaatcccgtggctacggagcagtatggttctgtatctaccaacctccagagcggcaacacacaggcagccaccacagatgtcaacacacaaggcgttcttccaggcatggtctggcaggacagagacgtgtacctgcaaggacccatctgggcaaagattcctcacacggacggacactttcacccttctcccctcatgggaggatttggactcaaacaccctcctccgcaaatcctcatcaagaatacccccgtacctgcgaatccttcgaccacattcagcgcggcaaagtttgcttctttcatcacacagtactctacggggcaggtcagcgtggagattgagtgggagctgcagaaggaggacagcaaacgctggaaccccgaaatccagtacacttccaactacaacaagtctgttaatgtggactttactgtggacactaatggtgtgtattcagagcctcgccccattggcacaagatacctgactcgtaatctgtaa

SEQ ID NO: 949 - DNA, 2208 bp, Artificial Sequence
  Synthetic Polynucleotide
atggctgccgatggttatcttccagattggctcgaggacactctctctgaaggaataagacagtggtggaagctcaaacctggcccaccaccaccaaagcccgcagagcggcatcaggacgacagcaggggtcttgtgcttcctgggtacaagtacctcggacccttcaacggactcgacaagggagagccggtcaacgaggcagacgccgcggccctcgagcacgacaaggcctacgaccggcagctcgacagcggagacaacccgtacctcaagtacaaccacgccgacgcggagtttcaggagcgtcttaaagaagatacgtcttttgggggcaacctcggacgagcagtcttccaggcgaaaaagagggttcttgaacctctgggcctggttgaggaacctgttaagacggctccgggaaaaaagaggccggtagagcattctcctgcggagccagactcctcctcgggaaccggaaaggcgggccagcagcctgcgagaaagagattgaatttcggtcagactggagacgcagactccgtacctgacccccagcctctcggacagccaccagcagccccctctggtctgggaactaatacgatggctacaggcagtggcgcaccaatggcagacaataacgagggcgccgacggagtgggtaattcctcgggaaattggcattgcgattccacatggatgggcgacagagtcatcaccaccagcacccgaacctgggccctgcccacctacaacaaccacctctacaagcaaatctccagccaatctggagcctcaaacgacaaccactactttggctacagcaccccttgggggtattttgacttcaacagattccactgtcacttctccccacgtgactggcaaagactcatcaacaacaactggggattccgacccaagagactcaacttcaagctctttaacattcaagtcaaagaggtcacgcagaatgacggtacgacgacgattgccaataaccttaccagcacggttcaagtctttactgactcggagtaccagctcccgtacgtcctcggctcggcgcatcaaggatgcctcccgccgtttccagcagacgtcttcatggtgccacagtatggatacctcaccctgaacaacgggagtcaggcggtaggacgctcttccttttactgcctggagtactttccttctcagatgctgcgtaccggaaacaactttaccttcagctacacctttgaggacgttcctttccacagcagctacgctcacagccagagtttggaccggctgatgaatcctctgatcgaccagtatctgtattacttgagcaaaacaaacgctccaagcggaaccaccacgatgtccaggcttcagttttctcaggccggagcgagtgacattcgggaccagtctaggaactggcttcctggaccctgttaccgccagcagcgagtatcaaaaacagctgcggataacaacaacagtgattattcgtggactggagctaccaagtaccacctcaatggaagagactctctggtgaatccgggcccagctatggccagccacaaggacgatgaagaaaaatattttcctcagagcggggttctcatctttggaaaacaagactcgggaaaaactaatgtggacattgaaaaggtcatgattacagacgaagaggaaatcaggaccaccaatcccgtggctacggagcagtatggttctgtatctaccaacctccagagcggcaacacacaggcagccaccacagatgtcaacacacaaggcgttcttccaggcatggtctggcaggacagagacgtgtacctgcaaggacccatctgggcaaagattcctcacacggacggacactttcacccttctcccctcatgggaggatttggactcaaacaccctcctccgcaaatcctcatcaagaatacccccgtacctgcgaatccttcgaccacatccagcgcggcaaagtttgcttctttcatcacacagtactctacggggcaggtcagcgtggagattgagtgggagctgcagaaggagaacagcaaacgctggaaccccgaaatccagtacacttccaactacaacaagtctgttaatgtggactttactgtggacactaatggtgtgtattcagagcctcgccccattggcacaagatacctgactcgtaatctgtaa

SEQ ID NO: 950 - DNA, 2208 bp, Artificial Sequence
  Synthetic Polynucleotide
atggctgccgatggttatcttccagattggctcgaggacactctctctgaaggaataagacagtggtggaagctcaaacctggcccaccaccactaaagcccgcagagcggcatcaggacgacagcaggggtcttgtgcttcctgggtacaagtacctcggacccttcaacggactcgacaagggagagccggtcaacgaggcagacgccgcggccctcgagcacgacaaggcctacgaccggcagctcgacagcggagacaacccgtacctcaagtacaaccacgccgacgcggagtttcaggagcgtcttaaagaagatacgtcttttgggggcaacctcggacgagcagtcttccaggcgaaaaagagggttcttgaacctctgggcctggttgaggaacctgttaagacggctccgggaaaaaagaggccggtagagcattctcctgcggagccagactcctcctcgggaaccggaaaggcgggccagcagcctgcgagaaagagattgaatttcggtcagactggagacgcagactccgtacctgacccccagcctctcggacagccaccagcagccccctctggtctgggaactaatacgatggctacaggcagtggcgcaccaatggcagacaataacgagggcgccgacggagtgggtaattcctcgggaaattggcattgcgattccacatggatgggcgacagagtcatcaccaccagcacccgaacctgggccctgcccacctacaacaaccacctctacaagcaaatctccagccaatctggagcctcaaacgacaaccactactttggctacagcaccccttgggggtattttgacttcaacagattccactgtcacttctccccacgtgactggcaaagactcatcaacaacaactggggattccgacccaagagactcaacttcaagctctttaacattcaagtcaaagaggtcacgcagaatgacggtacgacgacgattgccaataaccttaccagcacggttcaagtctttactgactcggagtaccagctcccgtacgtcctcggctcggcgcatcaaggatgcctcccgccgtttccagcagacgtcttcatggtgccacagtatggatacctcaccctgaacaacgggagtcaggcggtaggacgctcttccttttactgcctggagtactttccttctcagatgctgcgtaccggaaacaactttaccttcagctacacctttgaggacgttcctttccacagcagctacgctcacagccagagtttggaccggctgatgaatcctctgatcgaccagtatctgtattacttgagcaaaacaaacgctccaagcggaaccaccacgatgtccaggcttcagttttctcaggccggagcgagtgacattcgggaccagtctaggaactggcttcctggaccctgttaccgccagcagcgagtatcaaaaacagctgcggataacaacaacagtgattattcgtggactggagctaccaagtaccacctcaatggaagagactctctggtgaatccgggcccagctatggccagccacaaggacgatgaagaaaaatattttcctcagagcggggttctcatctttggaaaacaagactcgggaaaaactaatgtggacattgaaaaggtcatgattacagacgaagaggaaatcaggaccaccaatcccgtggctacggagcagtatggttctgtatctaccaacctccagagcggcaacacacaggcagccaccacagatgtcaacacacaaggcgttcttccaggcatggtctggcaggacagagacgtgtacctgcaaggacccatctgggcaaagattcctcacacggacggacactttcacccttctcccctcatgggaggatttggactcaaacaccctcctccgccaatcctcatcaagaatacccccgtacctgcgaatccttcgaccacattcagcgcggcaaagtttgcttctttcatcacacagtactctacggggcaggtcagcgtggagattgagtgggagctgcagaaggagaacagcaaacgctggaaccccgaaatccagtacacttccaactacaacaagtctgttaatgtggactttactgtggacactaatggtgtgtattcagagcctcgccccattggcacaagatacctgactcgtaatctgtaa

SEQ ID NO: 951 - DNA, 2208 bp, Artificial Sequence
  Synthetic Polynucleotide
atggctgccgatggttatcttccagattggctcgaggacactctctctgaaggaataagacagtggtggaagctcaaacctggcccaccaccaccaaagcccgcagagcggcatcaggacgacagcaggggtcttgtgcttcctgggtacaagtacctcggacccttcaacggactcgacaagggagagccggtcaacgaggcagacgccgcggccctcgagcacgacaaggcctacgaccggcagctcgacagcggagacaacccgtacctcaagtacaaccacgccgacgcggagtttcaggagcgtcttaaagaagatacgtcttttgggggcaacctcggacgagcagtcttccaggcgaaaaagagggttcttgaacctctgggcctggttgaggaacctgttaagacggctccgggaaaaaagaggccggtagagcattctcctgcggagccagactcctcctcgggaaccggaaaggcgggccagcagcctgcgagaaagagattgaatttcggtcagactggagacgcagactccgtacctgacccccagcctctcggacagccaccagcagccccctctggtctgggaactaatacgatggctacaggcagtggcgcaccaatggcagacaataacgagggcgccgacggagtgggtaattcctcgggaaattggcattgcgattccacatggatgggcgacagagtcatcaccaccagcacccgaacctgggccctgcccacctacaacaaccacctctacaagcaaatctccagccaatctggagcctcaaacgacaaccactactttggctacagcaccccttgggggtattttgacttcaacagattccactgtcacttctccccacgtgactggcaaagactcatcaacaacaactggggattccgacccaagagactcaacttcaagctctttaacattcaagtcaaagaggtcacgcagaatgacggtacgacgacgattgccaataaccttaccagcacggttcaagtctttactgactcggagtaccagctcccgtacgtcctcggctcggcgcatcaaggatgcctcccgccgtttccagcagacgtcttcatggtgccacagtatggatacctcaccctgaacaacgggagtcaggcggtaggacgctcttccttttactgcctggagtactttccttctcagatgctgcgtaccggaaacaactttaccttcagctacacctttgaggacgttcctttccacagcagctacgctcacagccagagtttggaccggctgatgaatcctctgatcgaccagtatctgtattacttgagcaaaacaaacgctccaagcggaaccaccacgatgtccaggcttcagttttctcaggccggagcgagtgacattcgggaccagtctaggaactggcttcctggaccctgttaccgccagcagcgagtatcaaaaacagctgcggataacaacaacagtgattattcgtggactggagctaccaagtaccacctcaatggaagagactctctggtgaatccgggcccagctatggccagccacaaggacgatgaagaaaaatattttcctcagagcggggttctcatctttggaaaacaagactcgggaaaaactaatgtggacattgaaaaggtcatgattacagacgaagaggaaatcagggccaccaatcccgtggctacggagcagtatggttctgtatctaccaacctccagagcggcaacacacaggcagccaccacagatgtcaacacacaaggcgttcttccaggcatggtctggcaggacagagacgtgtacctgcaaggacccatctgggcaaagattcctcacacggacggacactttcacccttctcccctcatgggaggatttggactcaaacaccctcctccgcaaatcctcatcaagaatacccccgtacctgcgaatccttcgaccacattcagcgcggcaaagtttgcttctttcatcacacagtactctacggggcaggtcagcgtggagattgagtgggagctgcagaaggagaacagcaaacgctggaaccccgaaatccagtacacttccaactacaacaagtctgttaatgtggactttactgtggacactaatggtgtgtattcagagcctcgccccattggcacaagatacctgactcgtaatctgtaa

SEQ ID NO: 952 - DNA, 2208 bp, Artificial Sequence
  Synthetic Polynucleotide
atggctgccgatggttatcttccagattggctcgaggacactctctctgaaggaataagacagtggtggaagctcaaacctggcccaccaccaccaaagcccgcagagcggcatcaggacgacagcaggggtcttgtgcttcctgggtacaagtacctcggacccttcaacggactcgacaagggagagccggtcaacgaggcagacgccgcggccctcgagcacgacaaggcctacgaccggcagctcgacagcggagacaacccgtacctcaagtacaaccacgccgacgcggagtttcaggagcgtcttaaagaagatacgtcttttgggggcaacctcggacgagcagtcttccaggcgaaaaagagggttcttgaacctctgggcctggttgaggaacctgttaagacggctccgggaaaaaagaggccggtagagcattctcctgcggagccagactcctcctcgggaaccggaaaggcgggccagcagcctgcgagaaagagattgaatttcggtcagactggagacgcagactccgtacctgacccccagcctctcggacagccaccagcagccccctctggtctgggaactaatacgatggctacaggcagtggcgcaccaatggcagacaataacgagggcgccgacggagtgggtaattcctcgggaaattggcattgcgattccacatggatgggcgacagagtcatcaccaccagcacccgaacctgggccctgcccacctacaacaaccacctctacaagcaaatctccagccaatctggagcctcaaacgacaaccactactttggctacagcaccccttgggggtattttgacttcaacagattccactgtcacttctccccacgtgactggcaaagactcatcagcaacaactggggattccgacccaagagactcaacttcaagctctttaacattcaagtcaaagaggtcacgcagaatgacggtacgacgacgattgccaataaccttaccagcacggttcaagtctttactgactcggagtaccagctcccgtacgtcctcggctcggcgcatcaaggatgcctcccgccgtttccagcagacgtcttcatggtgccacagtatggatacctcaccctgaacaacgggagtcaggcggtaggacgctcttccttttactgcctggagtactttccttctcagatgctgcgtaccggaaacaactttaccttcagctacacctttgaggacgttcctttccacagcagctacgctcacagccagagtttggaccggctgatgaatcctctgatcgaccagtatctgtattacttgagcaaaacaaacgctccaagcggaaccaccacgatgtccaggcttcagttttctcaggccggagcgagtgacattcgggaccagtctaggaactggcttcctggaccctgttaccgccagcagcgagtatcaaaaacagctgcggataacaacaacagtgattattcgtggactggagctaccaagtaccacctcaatggaagagactctctggtgaatccgggcccagctatggccagccacaaggacgatgaagaaaaatattttcctcagagcggggttctcatctttggaaaacaagactcgggaaaaactaatgtggacattgaaaaggtcatgattacagacgaagaggaaatcaggaccaccaatcccgtggctacggagcagtatggttctgtatctaccaacctccagagcggcaacacacaggcagccaccacagatgtcaacacacaaggcgttcttccaggcatggtctggcaggacagagacgtgtacctgcaaggacccatctgggcaaagattcctcacacggacggacactttcacccttctcccctcatgggaggatttggactcaaacaccctcctccgcaaatcctcatcaagaatacccccgtacctgcgaatccttcgaccacattcagcgcggcaaagtttgcttctttcatcacacagtactctacggggcaggtcagcgtggagattgagtgggagccgcagaaggagaacagcaaacgctggaaccccgaaatccagtacacttccaactacaacaagtctgttaatgtggactttactgtggacactaatggtgtgtattcagagcctcgccccattggcacaagatacctgactcgtaatctgtaa

SEQ ID NO: 953 - DNA, 2208 bp, Artificial Sequence
  Synthetic Polynucleotide
atggctgccgatggttatcttccagattggctcgaggacactctctctgaaggaataagacagtggtggaagctcaaacctggcccaccaccaccaaagcccgcagagcggcatcaggacgacagcaggggtcttgtgcttcctgggtacaagtacctcggacccttcaacggactcgacaagggagagccggtcaacgaggcagacgccgcggccctcgagcacgacaaggcctacgaccggcagctcgacagcggagacaacccgtacctcaagtacaaccacgccgacgcggagtttcaggagcgtcttaaagaagatacgtcttttgggggcaacctcggacgagcagtcttccaggcgaaaaagggggttcttgaacctctgggcctggttgaggaacctgttaagacggctccgggaaaaaagaggccggtagagcattctcctgcggagccagactcctcctcgggaaccggaaaggcgggccagcagcctgcgagaaagagattgaatttcggtcagactggagacgcagactccgtacctgacccccagcctctcggacagccaccagcagccccctctggtctgggaactaatacgatggctacaggcagtggcgcaccaatggcagacaataacgagggcgccgacggagtgggtaattcctcgggaaattggcattgcgattccacatggatgggcgacagagtcatcaccaccagcacccgaacctgggccctgcccacctacaacaaccacctctacaagcaaatctccagccaatctggagcctcaaacgacaaccactactttggctacagcaccccttgggggtattttgacttcaacagattccactgtcacttctccccacgtgactggcaaagactcatcaacaacaactggggattccgacccaagagactcaacttcaagctctttaacattcaagtcaaagaggtcacgcagaatgacggtacgacgacgattgccaataaccttaccagcacggttcaagtctttactgactcggagtaccagctcccgtacgtcctcggctcggcgcatcaaggatgcctcccgccgtttccagcagacgtcttcatggtgccacagtatggatacctcaccctgaacaacgggagtcaggcggtaggacgctcttccttttactgcctggagtactttccttctcagatgctgcgtaccggaaacaactttaccttcagctacacctttgaggacgttcctttccacagcagctacgctcacagccagagtttggaccggctgatgaatcctctgatcgaccagtatctgtattacttgagcaaaacaaacgctccaagcggaaccaccacgatgtccaggcttcagttttctcaggccggagcgagtgacattcgggaccagtctaggaactggcttcctggaccctgttaccgccagcagcgagtatcaaaaacagctgcggataacaacaacagtgattattcgtggactggagctaccaagtaccacctcaatggaagagactctctggtgaatccgggcccagctatggccagccacaaggacgatgaagaaaaatattttcctcagagcggggttctcatctttggaaaacaagactcgggaaaaactaatgtggacattgaaaaggtcatgattacagacgaagaggaaatcaggaccaccaatcccgtggctacggagcagtatggttctgtatctaccaacctccagagcggcaacacacaggcagccaccacagatgtcaacacacaaggcgttcttccaggcatggtctggcaggacagagacgtgtacctgcaaggacccatctgggcaaagattcctcacacggacggacactttcacccttctcccctcatgggaggatttggactcaaacaccctcctccgcaaatcctcatcaagaatacccccgtacctgcgaatccttcgaccacattcagcgcggcaaagtttgcttctttcatcacacagtactctacggggcaggtcagcgtggagattgagtgggagctgcagaaggagaacagcaaacgctggaaccccgaaatccagtacacttccaactacaacaagtctgttaatgtggactttactgtggacactaatggtgtgtattcagagcctcgccccattggcacaagatacctgactcgtaatctgtaa

SEQ ID NO: 954 - DNA, 2208 bp, Artificial Sequence
  Synthetic Polynucleotide
atggctgccgatggttatcttccagattggctcgaggacactctctctgaaggaataagacagtggtggaagctcaaacctggcccaccaccaccaaagcccgcagagcggcatcaggacgacagcaggggtcttgtgcttcctgggtacaagtacctcggacccttcaacggactcgacaagggagagccggtcaacgaggcagacgccgcggccctcgagcacgacaaggcctacgaccggcagctcgacagcggagacaacccgtacctcaagtacaaccacgccgacgcggagtttcaggagcgtcttaaagaagatacgtcttttgggggcaacctcggacgagcagtcttccaggcgaaaaagagggttcttgaacctctgggcctggttgaggaacctgttaagacggctccgggaaaaaagaggccggtagagcattctcctgcggagccagactcctcctcgggaaccggaaaggcgggccagcagcctgcgagaaagagattgaatttcggtcagactggagacgcggactccgtacctgacccccagcctctcggacagccaccagcagccccctctggtctgggaactaatacgatggctacaggcagtggcgcaccaatggcagacaataacgagggcgccgacggagtgggtaattcctcgggaaattggcattgcgattccacatggatgggcgacagagtcatcaccaccagcacccgaacctgggccctgcccacctacaacaaccacctctacaagcaaatctccagccaatctggagcctcaaacgacaaccactactttggctacagcaccccttgggggtattttgacttcaacagattccactgtcacttctccccacgtgactggcaaagactcatcaacaacaactggggattccgacccaagagactcaacttcaagctctttaacattcaagtcaaagaggtcacgcagaatgacggtacgacgacgattgccaataaccttaccagcacggttcaagtctttactgactcggagtaccagctcccgtacgtcctcggctcggcgcatcaaggatgcctcccgccgtttccagcagacgtcttcatggtgccacagtatggatacctcaccctgaacaacgggagtcaggcggtaggacgctcttccttttactgcctggagtactttccttctcagatgctgcgtaccggaaacaactttaccttcagctacacctttgaggacgttcctttccacagcagctacgctcacagccagagtttggaccggctgatgaatcctctgatcgaccagtatctgtattacttgagcagaacaaacgctccaagcggaaccaccacgatgtccaggcttcagttttctcaggccggagcgagtgacattcgggaccagtctaggaactggcttcctggaccctgttaccgccagcagcgagtatcaaaaacagctgcggataacaacaacagtgattattcgtggactggagctaccaagtaccacctcaatggaagagactctctggtgaatccgggcccagctatggccagccacaaggacgatgaagaaaaatattttcctcagagcggggttctcatctttggaaaacaagactcgggaaaaactaatgtggacattgaaaaggtcatgattacagacgaagaggaaatcaggaccaccaatcccgtggctacggagcagtatggttctgtatctaccaacctccagagcggcaacacacaggcagccaccacagatgtcaacacacaaggcgttcttccaggcatggtctggcaggacagagacgtgtacctgcaaggacccatctgggcaaagattcctcacacggacggacactttcacccttctcccctcatgggaggatttggactcaaacaccctcctccgcaaatcctcatcaagaatacccccgtacctgcgaatccttcgaccacattcagcgcggcaaagtttgcttctttcatcacacagtactctacggggcaggtcagcgtggagattgagtgggagctgcagaaggagaacagcaaacgctggaaccccgaaatccagtacacttccaactacaacaagtctgttaatgtggactttactgtggacactaatggtgtgtattcagagcctcgccccattggcacaagatacctgactcgtaatctgtaa

SEQ ID NO: 955 - DNA, 2208 bp, Artificial Sequence
  Synthetic Polynucleotide
atggctgccgatggttatcttccagattggctcgaggacactctctctgaaggaataagacagtggtggaagctcaaacctggcccaccaccaccaaagcccgcagagcggcatcaggacgacagcaggggtcttgtgcttcctgggtacaagtacctcggacccttcaacggactcgacaagggagagccggtcaacgaggcagacgccgcggccctcgagcacgacaaggcctacgaccggcagctcgacagcggagacaacccgtacctcaagtacaaccacgccgacgcggagtttcaggagcgtcttaaagaagatacgtcttttgggggcaacctcggacgagcagtcttccaggcgaaaaagagggttcttgaacctctgggcctggttgaggaacctgttaagacggctccgggaaaaaagaggccggtagagcattctcctgcggagccagactcctcctcgggaaccggaaaggcgggccagcagcctgcgagaaagagattgaatttcggtcagactggagacgcagactccgtacctgacccccagcctctcggacagccaccagcagccccctctggtctgggaactaatacgatggctacaggcagtggcgcaccaatggcagacaataacgagggcgccgacggagtgggtaattcctcgggaaattggcattgcgattccacatggatgggcgacagagtcatcaccaccagcacccgaacctgggccctgcccacctacaacaaccacctctacaagcaaatctccagccaatctggagcctcaaacgacaaccactactttggctacagcaccccttgggggtattttgacttcaacagattccactgtcacttctccccacgtgactggcaaagactcatcaacaacaactggggattccgacccaagagactcaacttcaagctctttaacattcaagtcaaagaggtcacgcagaatgacggtacgacgacgattgccaataaccttaccagcacggttcaagtctttactgactcggagtaccagctcccgtacgtcctcggctcggcgcatcaaggatgcctcccgccgtttccagcagacgtcttcatggtgccacagtatggatacctcaccctgaacaacgggagtcaggcggtaggacgctcttccttttactgcctggagtactttccttctcagatgctgcgtaccggaaacaactttaccttcagctacacctttgaggacgttcctttccacagcagctacgctcacagccagagtttggaccggctgatgaatcctctgatcgaccagtatctgtattacttgagcaaaacaaacgctccaagcggaaccaccacgatgtccaggcttcagttttctcaggccggagcgagtgacattcgggaccagtctaggaactggcttcctggaccctgttaccgccagcagcgagtatcaaaaacagctgcggataacaacaacagtgattattcgtggactggagctaccaagtaccacctcaatggaagagactctctggtgaatccgggcccagctatggccagccacaaggacgatgaagaaaaatattttcctcagagcggggttctcatctttggaaaacaagactcgggaaaaactaatgtggacattgaaaaggtcatgattacagacgaagaggaaatcaggaccaccaatcccgtggctacggagcagtatggttctgtatctaccaacctccagagcggcaacacacaggcagccaccacagatgtcaacacacaaggcgttcttccaggcatggtctggcaggacagagacgtgtacctgcaaggacccatctgggcaaagattcctcacacggacggacactttcacccttctcccctcatgggaggatttggactcaaacaccctcctccgcaaatcctcatcaagaatacccccgtacctgcgaatccttcgaccacattcagcgcggcaaagtttgcttctttcatcacacagtactctacggggcaggtcagcgtggagattgagtgggagctgcagaaggagaacagcaaacgctggaaccccgaaatccagtacacttccaactacaacaagtctgttaatgtggaccttactgtggacactaatggtgtgtattcagagcctcgccccattggcacaagatacctgactcgtaatctgtaa

SEQ ID NO: 956 - DNA, 2208 bp, Artificial Sequence
  Synthetic Polynucleotide
atggctgccgatggttatcttccagattggctcgaggacactctctctgaaggaataagacagtggtggaagctcaaacctggcccaccaccactaaagcccgcagagcggcatcaggacgacagcaggggtcttgtgcttcctgggtacaagtacctcggacccttcaacggactcgacaagggagagccggtcaacgaggcagacgccgcggccctcgagcacgacaaggcctacgaccggcagctcgacagcggagacaacccgtacctcaagtacaaccacgccgacgcggagtttcaggagcgtcttaaagaagatacgtcttttgggggcaacctcggacgagcagtcttccaggcgaaaaagagggttcttgaacctctgggcctggttgaggaacctgttaagacggctccgggaaaaaagaggccggtagagcattctcctgcggagccagactcctcctcgggaaccggaaaggcgggccagcagcctgcgagaaagagattgaatttcggtcagactggagacgcagactccgtacctgacccccagcctctcggacagccaccagcagccccctctggtctgggaactaatacgatggctgcaggcagtggcgcaccaatggcagacaataacgagggcgccgacggagtgggtaattcctcgggaaattggcattgcgattccacatggatgggcgacagagtcatcaccaccagcacccgaacctgggccctgcccacctacaacaaccacctctacaagcaaatctccagccaatctggagcctcaaacgacaaccactactttggctacagcaccccttgggggtattttgacttcaacagattccactgtcacttctccccacgtgactggcaaagactcatcaacaacaactggggattccgacccaagagactcaacttcaagctctttaacattcaagtcaaagaggtcacgcagaatgacggtacgacgacgattgccaataaccttaccagcacggttcaagtctttactgactcggagtaccagctcccgtacgtcctcggctcggcgcatcaaggatgcctcccgccgtttccagcagacgtcttcatggtgccacagtatggatacctcaccctgaacaacgggagtcaggcggtaggacgctcttccttttactgcctggagtactttccttctcagatgctgcgtaccggaaacaactttaccttcagctacacctttgaggacgttcctttccacagcagctacgctcacagccagagtttggaccggctgatgaatcctctgatcgaccagtatctgtattacttgagcaaaacaaacgctccaagcggaaccaccacgatgtccaggcttcagttttctcaggccggagcgagtgacattcgggaccagtctaggaactggcttcctggaccctgttaccgccagcagcgagtatcaaaaacagctgcggataacaacaacagtgattattcgtggactggagctaccaagtaccacctcaatggaagagactctctggtgaatccgggcccagctatggccagccacaaggacgatgaagaaaaatattttcctcagagcggggttctcatctttggaaaacaagactcgggaaaaactaatgtggacattgaaaaggtcatgattacagacgaagaggaaatcaggaccaccaatcccgtggctacggagcagtatggttctgtatctaccaacctccagagcggcaacacacaggcagccaccacagatgtcaacacacaaggcgttcttccaggcatggtctggcaggacagagacgtgtacctgcaaggacccatctgggcaaagattcctcacacggacggacactttcacccttctcccctcatgggaggatttggactcaaacaccctcctccgcaaatcctcatcaagaatacccccgtacctgcgaatccttcgaccacattcagcgcggcaaagtttgcttctttcatcacacagtactctacggggcaggtcagcgtggagattgagtgggagctgcagaaggagaacagcaaacgctggaaccccgaaatccagtacacttccaactacaacaagtctgttaatgtggactttactgtggacactaatggtgtgtattcagagcctcgccccattggcacaagatacctgactcgtaatctgtaa

SEQ ID NO: 957 - DNA, 2208 bp, Artificial Sequence
  Synthetic Polynucleotide
atggctgccgatggttatcttccagattggctcgaggacactctctctgaaggaataagacagtggtggaagctcaaacctggcccaccaccaccaaagcccgcagagcggcatcaggacgacagcaggggtcttgtgcttcctgggtacaagtacctcggacccttcaacggactcgacaagggagagccggtcaacgaggcagacgccgcggccctcgagcacgacaaggcctacgaccggcagctcgacagcggagacaacccgtacctcaagtacaaccacgccgacgcggagtttcaggagcgtcttaaagaagatacgtcttttgggggcaacctcggacgagcagtcttccaggcgaaaaagagggttcttgaacctctgggcctggttgaggaacctgttaagacggctccgggaaaaaagaggccggtagagcattctcctgcggagccagactcctcctcgggaaccggaaaggcgggccagcagcctgcgagaaagagattgaatttcggtcagactggagacgcagactccgtacctgacccccagcctctcggacagccaccagcagccccctctggtctgggaactaatacgatggctacaggcagtggcgcaccaatggcagacaataacgagggcgccgacggagtgggtaattcctcgggaaattggcattgcgattccacatggatgggcgacagagtcatcaccaccagcacccgaacctgggccctgcccacctacaacaaccacctctacaagcaaatctccagccaatctggagcctcaaacgacaaccactactttggctacagcaccccttgggggtattttgacttcaacagattccactgtcacttctccccacgtgactggcaaagactcatcaacaacaactggggattccgacccaagagactcaacttcaagctctttaacattcaagtcaaagaggtcacgcagaatgacggtacgacgacgattgccaataaccttaccagcacggttcaagtctttactgactcggagtaccagctcccgtacgtcctcggctcggcgcatcaaggatgcctcccgccgtttccagcagacgtcttcatggtgccacagtatggatacctcaccctgaacaacgggagtcaggcggtaggacgctcttccttttactgcctggagtactttccttctcagatgctgcgtaccggaaacaactttaccttcagctacacctttgaggacgttcctttccacagcagctacgctcacagccagagtttggaccggctgatgaatcctctgatcgaccagtatctgtattacttgagcaaaacaaacgctccaagcggaaccaccacgatgtccaggcttcagttttctcaggccggagcgagtgacattcgggaccagtctaggaactggcttcctggaccctgttaccgccagcagcgagtatcaaaaacagctgcggataacaacaacagtgattattcgtggactggagctaccaagtaccacctcaatggaagagactctctggtgaatccgggcccagctatggccagccacaaggacgatgaagaaaaatattttcctcagagcggggttctcatctttggaaaacaagactcgggaaaaactaatgtggacattgaaaaggtcatgattacagacgaagaggaaatcaggaccaccaatcccgtggctacggagcagtatggttctgtatctaccaacctccagagcggcgacacacaggcagccaccacagatgtcaacacacaaggcgttcttccaggcatggtctggcaggacagagacgtgtacctgcaaggacccatctgggcaaagattcctcacacggacggacactttcacccttctcccctcatgggaggatttggactcaaacaccctcctccgcaaatcctcatcaagaatacccccgtacctgcgaatccttcgaccacattcagcgcggcaaagtttgcttctttcatcacacagtactctacggggcaggtcagcgtggagattgagtgggagctgcagaaggagaacagcaaacgctggaaccccgaaatccagtacacttccaactacaacaagtctgttaatgtggactttactgtggacactaatggtgtgtattcagagcctcgccccattggcacaagatacctgactcgtaatctgtaa

SEQ ID NO: 958 - DNA, 2208 bp, Artificial Sequence
  Synthetic Polynucleotide
atggctgccgatggttatcttccagattggctcgaggacactctctctgaaggaataagacagtggtggaagctcaaacctggcccaccaccaccaaagcccgcagagcggcatcaggacgacagcaggggtcttgtgcttcctgggtacaagtacctcggacccttcaacggactcgacaagggagagccggtcaacgaggcagacgccgcggccctcgagcacgacaaggcctacgaccggcagctcgacagcggaggcaacccgtacctcaagtacaaccacgccgacgcggagtttcaggagcgtcttaaagaagatacgtcttttgggggcaacctcggacgagcagtcttccaggcgaaaaagagggttcttgaacctctgggcctggttgaggaacctgttaagacggctccgggaaaaaagaggccggtagagcattctcctgcggagccagactcctcctcgggaaccggaaaggcgggccagcagcctgcgagaaagagattgaatttcggtcagactggagacgcagactccgtacctgacccccagcctctcggacagccaccagcagccccctctggtctgggaactaatacgatggctacaggcagtggcgcaccaatggcagacaataacgagggcgccgacggagtgggtaattcctcgggaaattggcattgcgattccacatggatgggcgacagagtcatcaccaccagcacccgaacctgggccctgcccacctacaacaaccacctctacaagcaaatctccagccaatctggagcctcaaacgacaaccactactttggctacagcaccccttgggggtattttgacttcaacagattccactgtcacttctccccacgtgactggcaaagactcatcaacaacaactggggattccgacccaagagactcaacttcaagctctttaacattcaagtcaaagaggtcacgcagaatgacggtacgacgacgattgccaataaccttaccagcacggttcaagtctttactgactcggagtaccagctcccgtacgtcctcggctcggcgcatcaaggatgcctcccgccgtttccagcagacgtcttcatggtgccacagtatggatacctcaccctgaacaacgggagtcaggcggtaggacgctcttccttttactgcctggagtactttccttctcagatgctgcgtaccggaaacaactttaccttcagctacacctttgaggacgttcctttccacagcagctacgctcacagccagagtttggaccggctgatgaatcctctgatcgaccagtatctgtattacttgagcaaaacaaacgctccaagcggaaccaccacgatgtccaggcttcagttttctcaggccggagcgagtgacattcgggaccagtctaggaactggcttcctggaccctgttaccgccagcagcgagtatcaaaaacagctgcggataacaacaacagtgattattcgtggactggagctaccaagtaccacctcaatggaagagactctctggtgaatccgggcccagctatggccagccacaaggacgatgaagaaaaatattttcctcagagcggggttctcatctttggaaaacaagactcgggaaaaactaatgtggacattgaaaaggtcatgattacagacgaagaggaaatcaggaccaccaatcccgtggctacggagcagtatggttctgtatctaccaacctccagagcggcaacacacaggcagccaccacagatgtcaacacacaaggcgttcttccaggcatggtctggcaggacagagacgtgtacctgcaaggacccatctgggcaaagattcctcacacggacggacactttcacccttctcccctcatgggaggatttggactcaaacaccctcctccgcaaatcctcatcaagaatacccccgtacctgcgaatccttcgaccacattcagcgcggcaaagtttgcttctttcatcacacagtactctacggggcaggtcagcgtggagattgagtgggagctgcagaaggagaacagcaaacgctggaaccccgaaatccagtacacttccaactacaacaagtctgttaatgtggactttactgtggacactaatggtgtgtattcagagcctcgccccattggcacaagatacctgactcgtaatctgtaa

SEQ ID NO: 959 - DNA, 2208 bp, Artificial Sequence
  Synthetic Polynucleotide
atggctgccgatggttatcttccagattggctcgaggacactctctctgaaggaataagacagtggtggaagctcaaacctggcccaccaccaccaaagcccgcagagcggcatcaggacgacagcaggggtcttgtgcttcctgggtacaagtacctcggacccttcaacggactcgacaagggagagccggtcaacgaggcagacgccgcggccctcgagcacgacaaggcctacgaccggcagctcgacagcggagacaacccgtacctcaagtacaaccacgccgacgcggagtttcaggagcgtcttaaagaagatacgtcttttgggggcaacctcggacgagcagtcttccaggcgaaaaagagggttcttgaacctctgggcctggttgaggaacctgttaagacggctccgggaaaaaagaggccggtagagcattctcctgcggagccagactcctcctcgggaaccggaaaggcgggccagcagcctgcgagaaagagattgaatttcggtcagactggagacgcagactccgtacctgacccccagcctctcggacagccaccagcagccccctctggtctgggaactaatacgatggctacaggcagtggcgcaccaatggcagacaataacgagggcgccgacggagtgggtaattcctcgggaaattggcattgcgattccacatggatgggcgacagagtcatcaccaccagcacccgaacctgggccctgcccacctacaacaaccacctctacaagcaaatctccagccaatctggagcctcaaacgacaaccactactttggctacagcaccccttgggggtattttgacttcaacagattccactgtcacttctccccacgtgactggcaaagactcatcaacaacaactggggattccgacccaagagactcaacttcaagctctttaacattcaagtcaaagaggtcacgcagaatgacggtacgacgacgattgccaataaccttaccagcacggttcaagtctttactgactcggagtaccagctcccgtacgtcctcggctcggcgcatcaaggatgcctcccgccgtttccagcagacgtcttcatggtgccacagtatggatacctcaccctgaacaacgggagtcaggcggtaggacgctcttccttttactgcctggagtactttccttctcagatgctgcgtaccggaaacaactttaccttcagctacacctttgaggacgttcctttccacagcagctacgctcacagccagagtttggaccggctgatgaatcctctgatcgaccagtatctgtattacttgagcaaaacaaacgctccaagcggaaccaccacgatgtccaggcttcagttttctcaggccggagcgagtgacattcgggaccagtctaggaactggcttcctggaccctgttaccgccagcagcgagtatcaaaaacagctgcggataacaacaacagtgattattcgtggactggagctaccaagtaccacctcaatggaagagactctctggtgaatccgggcccagctatggccagccacaaggacgatgaagaaaaatattttcctcagagcggggttctcatctttggaaaacaagactcgggaaaaactaatgtggacattgaaaaggtcatgattacagacgaagaggaaatcaggaccaccaatcccgtggctacggagcagtatggttctgtatctaccaacctccagagcggcaacacacaggcagccaccacagatgtcaacacacaaggcgttcttccaggcatggtctggcaggacagagacgtgtacctgcaaggacccatctgggcaaagattcctcacacggacggacactttcacccttctcccctcatgggaggatttggactcaaacaccctcctccgcaaatcctcatcaagaatacccccgtacctgcgaatccttcgaccacattcagcgcggcaaagcttgcttctttcatcacacagtactctacggggcaggtcagcgtggagattgagtgggagctgcagaaggagaacagcaaacgctggaaccccgaaatccagtacacttccaactacaacaagtctgttaatgtggactttactgtggacactaatggtgtgtattcagagcctcgccccattggcacaagatacctgactcgtaatctgtaa

SEQ ID NO: 960 - DNA, 2208 bp, Artificial Sequence
  Synthetic Polynucleotide
atggctgccgatggttatcttccagattggctcgaggacactctctctgaaggaataagacagtggtggaagctcaaacctggcccaccaccaccaaagcccgcagagcggcatcaggacgacagcaggggtcttgtgcttcctgggtacaagtacctcggacccttcaacggactcgacaagggagagccggtcaacgaggcagacgccgcggccctcgagcacgacaaggcctacgaccggcagctcgacagcggagacaacccgtacctcaagtacaaccacgccgacgcggagtttcaggagcgtcttaaagaagatacgtcttttgggggcaacctcggacgagcagtcttccaggcgaaaaagagggttcttgaacctctaggcctggttgaggaacctgttaagacggctccgggaaaaaagaggccggtagagcattctcctgcggagccagactcctcctcgggaaccggaaaggcgggccagcagcctgcgagaaagagattgaatttcggtcagactggagacgcagactccgtacctgacccccagcctctcggacagccaccagcagccccctctggtctgggaactaatacgatggctacaggcagtggcgcaccaatggcagacaataacgagggcgccgacggagtgggtaattcctcgggaaattggcattgcgattccacatggatgggcgacagagtcatcaccaccagcacccgaacttgggccctgcccacctacaacaaccacctctacaagcaaatctccagccaatctggagcctcaaacgacaaccactactttggctacagcaccccttgggggtattttgacttcaacagattccactgtcacttctccccacgtgactggcaaagactcatcaacaacaactggggattccgacccaagagactcaacttcaagctctttaacattcaagtcaaagaggtcacgcagagtgacggtacgacgacgattgccaataaccttaccagcacggttcaagtctttactgactcggagtaccagctcccgtacgtcctcggctcggcgcatcaaggatgcctcccgccgtttccagcagacgtcttcatggtgccacagtatggatacctcaccctgaacaacgggagtcaggcggtaggacgctcttccttttactgcctggagtactttccttctcagatgctgcgtaccggaaacaactttaccttcagctacacctttgaggacgttcctttccacagcagctacgctcacagccagagtttggaccggctgatgaatcctctgatcgaccagtatctgtattacttgagcaaaacaaacgctccaagcggaaccaccacgatgtccaggcttcagttttctcaggccggagcgagtgacattcgggaccagtctaggaactggcttcctggaccctgttaccgccagcagcgagtatcaaaaacagctgcggataacaacaacagtgattattcgtggactggagctaccaagtaccacctcaatggaagagactctctggtgaatccgggcccagctatggccagccacaaggacgatgaagaaaaatattttcctcagagcgggattctcatctttggaaaacaagactcgggaaaaactaatgtggacattgaaaaggtcatgattacagacgaagaggaaatcaggaccaccaatcccgtggctacggagcagtatggttctgtatctaccaacctccagagcggcaacacacaggcagccaccacagatgtcaacacacaaggcgttcttccaggcatggtctggcaggacagagacgtgtacctgcaaggacccatctgggcaaagattcctcacacggacggacactttcacccttctcccctcatgggaggatttggactcaaacaccctcctccgcaaatcctcatcaagaatacccccgtacctgcgaatccttcgaccacattcagcgcggcaaagtttgcttctttcatcacacagtaccctacggggcaggtcagcgtggagattgagtgggagctgcagaaggagaacagcaaacgctggaaccccgaaatccagtacacttccaactacaacaagtctgttaatgtggactttactgtggacactaatggtgtgtattcagagcctcgccccattggcacaagatacctgactcgtaatctgtaa

SEQ ID NO: 961 - DNA, 2208 bp, Artificial Sequence
  Synthetic Polynucleotide
atggctgccgatggttatcttccagattggctcgaggacactctctctgaaggaataagacagtggtggaagctcaaacctggcccaccaccaccaaagcccgcagagcggcatcaggacgacagcaggggtcttgtgcttcctgggtacaagtacctcggacccttcaacggactcgacaagggagagccggtcaacgaggcagacgccgcggccctcgagcacgacaaggcctacgaccggcagctcgacagcggagacaacccgtacctcaagtacaaccacgccgacgcggagtttcaggagcgtcttaaagaagatacgtcttttgggggcaacctcggacgagcagtcttccaggcgaaaaagagggttcttgaacctctgggcctggttgaggaacctgttaagacggctccgggaaaaaagaggccggtagagcattctcctgcggagccagacgcctcctcgggaaccggaaaggcgggccagcagcctgcgagaaagagattgaatttcggtcagactggagacgcagactccgtacctgacccccagcctctcggacagccaccagcagccccctctggtctgggaactaatacgatggctacaggcagtggcgcaccaatggcagacaataacgagggcgccgacggagtgggtaattcctcgggaaattggcattgcgattccacatggatgggcgacagagtcatcaccaccagcacccgaacctgggccctgcccacctacaacaaccacctctacaagcaaatctccagccaatctggagcctcaaacgacaaccactactttggctacagcaccccttgggggtattttgacttcaacagattccactgtcacttctccccacgtgactggcaaagactcatcaacaacaactggggattccgacccaagagactcaacttcaagctctttaacattcaagtcaaagaggtcacgcagaatgacggtacgacgacgattgccaataaccttaccagcacggttcaagtctttactgactcggagtaccagctcccgtacgtcctcggctcggcgcatcaaggatgcctcccgccgtttccagcagacgtcttcatggtgccacagtatggatacctcaccctgaacaacgggagtcaggcggtaggacgctcttccttttactgcctggagtactttccttctcagatgctgcgtaccggaaacaactttaccttcagctacacctttgaggacgttcctttccacagcagctacgctcacagccagagtttggaccggctgatgaatcctctgatcgaccagtatctgtattacttgagcaaaacaaacgctccaagcggaaccaccacgatgtccaggcttcagttttctcaggccggagcgagtgacattcgggaccagtctaggaactggcttcctggaccctgttaccgccagcagcgagtatcaaaaacagctgcggataacaacaacagtgattattcgtggactggagctaccaagtaccacctcaatggaagagactctctggtgaatccgggcccagctatggccagccacaaggacgatgaagaaaaatattttcctcagagcggggttctcatctttggaaaacaagactcgggaaaaactaatgtggacattgaaaaggtcatgattacagacgaagaggaaatcaggaccaccaatcccgtggctacggagcagtatggttctgtatctaccaacctccagagcggcaacacacaggcagccaccacagatgtcaacacacaaggcgttcttccaggcatggtctggcaggacagagacgtgtacctgcaaggacccatctgggcaaagattcctcacacggacggacactttcacccttctcccctcatgggaggatttggactcaaacaccctcctccgcaaatcctcatcaagaatacccccgtacctgcgaatccttcgaccacattcagcgcggcaaagtttgcttctttcatcacacagtactctacggggcaggtcagcgtggagattgagtgggagctgcagaaggagaacagcaaacgctggaaccccgaaatccagtacacttccaactacaacaagtctgttaatgtggactttactgtggacactaatggtgtgtattcagagcctcgccccattggcacaagatacctgactcgtaatctgtaa

SEQ ID NO: 962 - DNA, 2208 bp, Artificial Sequence
  Synthetic Polynucleotide
atggctgccgatggttatcttccagattggctcgaggacactctctctgaaggaataagacagtggtggaagctcaaacctggcccaccaccaccaaagcccgcagagcggcatcaggacgacagcaggggtctcgtgcttcctgggtacaagtacctcggacccttcaacggactcgacaagggagggccggtcaacgaggcagacgccgcggccctcgagcacgacaaggcctacgaccggcagctcgacagcggagacaacccgtacctcaagtacaaccacgccgacgcggagtttcaggagcgtcttaaagaagatacgtcttttgggggcaacctcggacgagcagtcttccaggcgaaaaagagggttcttgaacctctgggcctggttgaggaacctgttaagacggctccgggaaaaaagaggccggtagagcattctcctgcggagccagactcctcctcgggaaccggaaaggcgggccagcagcctgcgagaaagagattgaatttcggtcagactggagacgcagactccgtacctgacccccagcctctcggacagccaccagcagccccctctggtctgggaactaatacgatggctacaggcagtggcgcaccaatggcagacaataacgagggcgccgacggagtgggtaattcctcgggaaattggcattgcgattccacatggatgggcgacagagtcatcaccaccagcacccgaacctgggccctgcccacctacaacaaccacctctacaagcaaatctccagccaatctggagcctcaaacgacaaccactactttggctacagcaccccttgggggtattttgacttcaacagattccactgtcacttctccccacgtgactggcaaagactcatcaacaacaactggggattccgacccaagagactcaacttcaagctctttaacattcaagtcaaagaggtcacgcagaatgacggtacgacgacgattgccaataaccttaccagcacggttcaagtctttactgactcggagtaccagctcccgtacgtcctcggctcggcgcatcaaggatgcctcccgccgtttccagcagacgtcttcatggtgccacagtatggatacctcaccctgaacaacgggagtcaggcggtaggacgctcttccttttactgcctggagtactttccttctcagatgctgcgtaccggaaacaactttaccttcagctacacctttgaggacgttcctttccacagcagctacgctcacagccagagtttggaccggctgatgaatcctctgatcgaccagtatctgtattacttgagcaaaacaaacgctccaagcggaaccaccacgatgtccaggcttcagttttctcaggccggagcgagtgacattcgggaccagtctaggaactggcttcctggaccctgttaccgccagcagcgagtatcaaaaacagctgcggataacaacaacagtgattattcgtggactggagctaccaagtaccacctcaatggaagagactctctggtgaatccgggcccagctatggccagccacaaggacgatgaagaaaaatattttcctcagagcggggttctcatctttggaaaacaagactcgggaaaaactaatgtggacattgaaaaggtcatgattacagacgaagaggaaatcaggaccaccaatcccgtggctacggagcagtatggttctgtatctaccaacctccagagcggcaacacacaggcagccaccacagatgtcaacacacaaggcgttcttccaggcatggtctggcaggacagagacgtgtacctgcaaggacccatctgggcaaagattcctcacacggacggacactttcacccttctcccctcatgggaggatttggactcaaacaccctcctccgcaaatcctcatcaagaatacccccgtacctgcgaatccttcgaccacattcagcgcggcaaagtttgcttctttcatcacacagtactctacggggcaggtcagcgtggagattgagtgggagctgcagaaggagaacagcaaacgctggaaccccgaaatccagtacacttccaactacaacaagtctgttaatgtggactttactgtggacactaatggtgtgtattcagagcctcgccccattggcacaagatacctgactcgtaatctgtaa

SEQ ID NO: 963 - DNA, 2208 bp, Artificial Sequence
  Synthetic Polynucleotide
atggctgccgatggttatcttccagattggctcgaggacactctctctgaaggaataagacagtggtggaagctcaaacctggcccaccaccaccaaagcccgcagagcggcatcaggacgacagcaggggtcttgtgcttcctgggtacaagtacctcggacccttcaacggactcgacaagggagagccggtcaacgaggcagacgccgcggccctcgagcacgacaaggcctacgaccggcagctcgacagcggagacaacccgtacctcaagcacaaccacgccgacgcggagtttcaggagcgtcttaaagaagatacgtcttttgggggcaacctcggacgagcagtcttccaggcgaaaaagagggttcttgaacctctgggcctggttgaggaacctgttaagacggctccgggaaaaaagaggccggtagagcattctcctgcggagccagactcctcctcgggaaccggaaaggcgggccagcagcctgcgagaaagagattgaatttcggtcagactggagacgcagactccgtacctgacccccagcctctcggacagccaccagcagccccctctggtctgggaactaatacgatggctacaggcagtggcgcaccaatggcagacaataacgagggcgccgacggagtgggtaattcctcgggaaattggcattgcgattccacatggatgggcgacagagtcatcaccaccagcacccgaacctgggccctgcccacctacaacaaccacctctacaagcaaatctccagccaatctggagcctcaaacgacaaccactactttggctacagcaccccttgggggtattttgacttcaacagattccactgtcacttctccccacgtgactggcaaagactcatcaacaacaactggggattccgacccaagagactcaacttcaagctctttaacattcaagtcaaagaggtcacgcagaatgacggtacgacgacgattgccaataaccttaccagcacggttcaagtctttactgactcggagtaccagctcccgtacgtcctcggctcggcgcatcaaggatgcctcccgccgtttccagcagacgtcttcatggtgccacagtatggatacctcaccctgaacaacgggagtcaggcggtaggacgctcttccttttactgcctggagtactttccttctcagatgctgcgtaccggaaacaactttaccttcagctacacctttgaggacgttcctttccacagcagctacgctcacagccagagtttggaccggctgatgaatcctctgatcgaccagtatctgtattacttgagcaaaacaaacgctccaagcggaaccaccacgatgtccaggcttcagttttctcaggccggagcgagtgacattcgggaccagtctaggaactggcttcctggaccctgttaccgccagcagcgagtatcaaaaacagctgcggataacaacaacagtgattattcgtggactggagctaccaagtaccacctcaatggaagagactctctggtgaatccgggcccagctatggccagccacaaggacgatgaagaaaaatattttcctcagagcggggttctcatctttggaaaacaagactcgggaaaaactaatgtggacattgaaaaggtcatgattacagacgaagaggaaatcaggaccaccaatcccgtggctacggagcagtatggttctgtatctaccaacctccagagcggcaacacacaggcagccaccacagatgtcaacacacaaggcgttcttccaggcatggtctggcaggacagagacgtgtacctgcaaggacccatctgggcaaagattcctcacacggacggacactttcacccttctcccctcatgggaggatttggactcaaacaccctcctccgcaaatcctcatcaagaatacccccgtacctgcgaatccttcgaccacattcagcgcggcaaagtttgcttctttcatcacacagtactctacggggcaggtcagcgtggagattgagtgggagctgcagaaggagaacagcaaacgctggaaccccgaaatccagtacacttccaactacaacaagtctgttaatgtggactttactgtggacactaatggtgtgtattcagagcctcgccccattggcacaagatacctgactcgtaatctgtaa

SEQ ID NO: 964 - DNA, 2208 bp, Artificial Sequence
  Synthetic Polynucleotide
atggctgccgatggttatcttccagattggctcgaggacactctctctgaaggaataagacagtggtggaagctcaaacctggcccaccaccaccaaagcccgcagagcggcatcaggacgacagcaggggtcttgtgcttcctgggtacaagtacctcggacccttcaacggactcgacaagggagagccggtcaacgaggcagacgccgcggccctcgagcacgacaaggcctacgaccggcagctcgacagcggagacaacccgtacctcaagtacaaccacgccgacgcggagtttcaggagcgtcttaaagaagatacgtcttttgggggcaacctcggacgagcagtcttccaggcgaaaaagagggttcttgaacctctgggcctggttgaggaacctgttaagacggctccgggaaaaaagaggccggtagagcattctcctgcggagccagactcctcctcgggaaccggaaaggcgggccagcagcctgcgagaaagagattgaatttcggtcagactggagacgcagactccgtacctgacccccagcctctcggacagccaccagcagccccctctggtctgggaactaatacgatggctacaggcagtggcgcaccaatggcagacaataacgagggcgccgacggagtgggtaattcctcgggaaattggcattgcgattccacatggatgggcgacagagtcatcaccaccagcacccgaacctgggccctgcccacctacaacaaccacctctacaagcaaatctccagccaatctggagcctcaaacgacaaccactactttggctacagcaccccttgggggtattttgacttcaacagattccactgtcacttctccccacgtgactggcaaagactcatcaacaacaactggggattccgacccaagagactcaacttcaagctctttaacattcaagtcaaagaggtcacgcagaatgacggtacgacgacgattgccaataaccttaccagcacggttcaagtctttactgactcggagtaccagctcccgtacgtcctcggctcggcgcatcaaggatgcctcccgccgtttccagcaggcgtcttcatggtgccacagtatggatacctcaccctgaacaacgggagtcaggcggtaggacgctcttccttttactgcctggagtactttccttctcagatgctgcgtaccggaaacaactttaccttcagctacacctttgaggacgttcctttccacagcagctacgctcacagccagagtttggaccggctgatgaatcctctgatcgaccagtatctgtattacttgagcaaaacaaacgctccaagcggaaccaccacgatgtccaggcttcagttttctcaggccggagcgagtgacattcgggaccagtctaggaactggcttcctggaccctgttaccgccagcagcgagtatcaaaaacagctgcggataacaacaacagtgattattcgtggactggagctaccaagtaccacctcaatggaagagactctctggtgaatccgggcccagctatggccagccacaaggacgatgaagaaaaatattttcctcagagcggggttctcatctttggaaaacaagactcgggaaaaactaatgtggacattgaaaaggtcatgattacagacgaagaggaaatcaggaccaccaatcccgtggctacggagcagtatggttctgtatctaccaacctccagagcggcaacacacaggcagccaccacagatgtcaacacacaaggcgttcttccaggcatggtctggcaggacagagacgtgtacctgcaaggacccatctgggcaaagattcctcacacggacggacactttcacccttctcccctcatgggaggatttggactcaaacaccctcctccgcaaatcctcatcaagaatacccccgtacctgcgaatccttcgaccacattcagcgcggcaaagtttgcttctttcatcacacagtactctacggggcaggtcagcgtggagattgagtgggagctgcagaaggagaacagcaaacgctggaaccccgaaatccagtacacttccaactacaacaagtctgttaatgtggactttactgtggacactaatggtgtgtattcagagcctcgccccattggcacaagatacctgactcgtaatctgtaa

SEQ ID NO: 965 - DNA, 2208 bp, Artificial Sequence
  Synthetic Polynucleotide
atggctgccgatggttatcttccagattggctcgaggacactctctctgaaggaataagacagtggtggaagctcaaacctggcccaccaccaccaaagcccgcagagcggcatcaggacgacagcaggggtcttgtgcttcctgggtacaagtacctcggacccttcaacggactcgacaagggagagccggtcaacgaggcagacgccgcggccctcgagcacgacaaggcctacgaccggcagctcgacagcggagacaacccgtacctcaagtacaaccacgccgacgcggagtttcaggagcgtcttaaagaagatacgtcttttgggggcaacctcggacgagcagtcttccaggcgaaaaagagggttcttgaacctctgggcctggttgaggaacctgttaagacggctccgggaaaaaagaggccggtagagcattctcctgcggagccagactcctcctcgggaaccggaaaggcgggccagcagcctgcgagaaagagattgaatttcggtcagactggagacgcagactccgtacctgacccccagcctctcggacagccaccagcagccccctctggtctgggaactaatacgacagctacaggcagtggcgcaccaatggcagacaataacgagggcgccgacggagtgggtaattcctcgggaaattggcattgcgattccacatggatgggcgacagagtcatcaccaccagcacccgaacctgggccctgcccacctacaacaaccacctctacaagcaaatctccagccaatctggagcctcaaacgacaaccactactttggctacagcaccccttgggggtattttgacttcaacagattccactgtcacttctccccacgtgactggcaaagactcatcaacaacaactggggattccgacccaagagactcaacttcaagctctttaacattcaagtcaaagaggtcacgcagaatgacggtacgacgacgattgccaataaccttaccagcacggttcaagtctttactgactcggagtaccagctcccgtacgtcctcggctcggcgcatcaaggatgcctcccgccgtttccagcagacgtcttcatggtgccacagtatggatacctcaccctgaacaacgggagtcaggcggtaggacgctcttccttttactgcctggagtactttccttctcagatgctgcgtaccggaaacaactttaccttcagctacacctttgaggacgttcctttccacagcagctacgctcacagccagagtttggaccggctgatgaatcctctgatcgaccagtatctgtattacttgagcaaaacaaacgctccaagcggaaccaccacgatgtccaggcttcagttttctcaggccggggcgagtgacattcgggaccagtctaggaactggcttcctggaccctgttaccgccagcagcgagtatcaaaaacagctgcggataacaacaacagtgattattcgtggactggagctaccaagtaccacctcaatggaagagactctctggtgaatccgggcccagctatggccagccacaaggacgatgaagaaaaatattttcctcagagcggggttctcatctttggaaaacaagactcgggaaaaactaatgtggacattgaaaaggtcatgattacagacgaagaggaaatcaggaccaccaatcccgtggctacggagcagtatggttctgtatctaccaacctccagagcggcaacacacaggcagccaccacagatgtcaacacacaaggcgttcttccaggcatggtctggcaggacagagacgtgtacctgcaaggacccatctgggcaaagattcctcacacggacggacactttcacccttctcccctcatgggaggatttggactcaaacaccctcctccgcaaatcctcatcaagaatacccccgtacctgcgaatccttcgaccacattcagcgcggcaaagtttgcttctttcatcacacagtactctacggggcaggtcagcgtggagattgagtgggagctgcagaaggagaacagcaaacgctggaaccccgaaatccagtacacttccaactacaacaagtctgttaatgtggactttactgtggacactaatggtgtgtattcagagcctcgccccattggcacaagatacctgactcgtaatctgtaa

SEQ ID NO: 966 - DNA, 2208 bp, Artificial Sequence
  Synthetic Polynucleotide
atggctgccgatggttatcttccagattggctcgaggacactctctctgaaggaataagacagtggtggaagctcaaacctggcccaccaccaccaaagcccgcagagcggcatcaggacgacagcaggggtcttgtgcttcctgggtacaagtacctcggacccttcaacggactcgacaagggagagccggtcaacgaggcagacgccgcggccctcgagcacgacaaggcctacgaccggcagctcgacagcggagacaacccgtacctcaagtacaaccacgccgacgcggagtttcaggagcgtcttaaagaagatacgtcttttgggggcaacctcggacgagcagtcttccaggcgaaaaagagggttcttgaacctctgggcctggttgaggaacctgttaagacggctccgggaaaaaagaggccggtagagcattctcctgcggagccagactcctcctcgggaaccggaaaggcgggccagcagcctgcgagaaagagattgaatttcggtcagaccggagacgcagactccgtacctgacccccagcctctcggacagccaccagcagccccctctggtctgggaactaatacgatggctacaggcagtggcgcaccaatggcagacaataacgagggcgccgacggagtgggtaattcctcgggaaattggcattgcgattccacatggatgggcgacagagtcatcaccaccagcacccgaacctgggccctgcccacctacaacaaccacctctacaagcaaatctccagccaatctggagcctcaaacgacaaccactactttggctacagcaccccttgggggtattttgacttcaacagattccactgtcacttctccccacgtgactggcaaagactcatcatcaacaactggggattccgacccaagagactcaacttcaagctctttaacattcaagtcaaagaggtcacgcagaatgacggtacgacgacgattgccaataaccttaccagcacggttcaagtctttactgactcggagtaccagctcccgtacgtcctcggctcggcgcatcaaggatgcctcccgccgtttccagcagacgtcttcatggtgccacagtatggatacctcaccctgaacaacgggagtcaggcggtaggacgctcttccttttactgcctggagtactttccttctcagatgctgcgtaccggaaacaactttaccttcagctacacctttgaggacgttcctttccacagcagctacgctcacagccagagtttggaccggctgatgaatcctctgatcgaccagtatctgtattacttgagcaaaacaaacgctccaagcggaaccaccacgatgtccaggcttcagttttctcaggccggagcgagtgacattcgggaccagtctaggaactggcttcctggaccctgttaccgccagcagcgagtatcaaaaacagctgcggataacaacaacagtgattattcgtggactggagctaccaagtaccacctcaatggaagagactctctggtgaatccgggcccagctatggccagccacaaggacgatgaagaaaaatattttcctcagagcggggttctcatctttggaaaacaagactcgggaaaaactaatgtggacattgaaaaggtcatgattacagacgaagaggaaatcaggaccaccaatcccgtggctacggagcagtatggttctgtatctaccaacctccagagcggcaacacacaggcagccaccacagatgtcaacacacaaggcgttcttccaggcatggtctggcaggacagagacgtgtacctgcaaggacccatctgggcaaagattcctcacacggacggacactttcacccttctcccctcatgggaggatttggactcaaacaccctcctccgcaaatcctcatcaagaatacccccgtacctgcgaatccttcgaccacattcagcgcggcaaagtttgcttctttcatcacacagtactctacggggcaggtcagcgtggagattgagtgggagctgcagaaggagaacagcaaacgctggaaccccgaaatccagtacacttccaactacaacaagtctgttaatgtggactttactgtggacactaatggtgtgtattcagagcctcgccccattggcacaagatacctgactcgtaatctgtaa

SEQ ID NO: 967 - DNA, 2208 bp, Artificial Sequence
  Synthetic Polynucleotide
atggctgccgatggttatcttccagattggctcgaggacactctctctgaaggaataagacagtggtggaagctcaaacctggcccaccaccaccaaagcccgcagagcggcatcaggacgacagcaggggtcttgtgcttcctgggtacaagtacctcggacccttcaacggactcgacaagggagagccggtcaacgaggcagacgccgcggccctcgagcacgacaaggcctacgaccggcagctcgacagcggagacaacccgtacctcaagtacaaccacgccgacgcggagtttcaggagcgtcttaaagaagatacgtcttttgggggcaacctcggacgagcagtcttccaggcgaaaaagagggttcttgaacctctgggcctggttgaggaacctgttaagacggctccgggaaaaaagaggccggtagagcattctcctgcggagccagactcctcctcgggaaccggaaaggcgggccagcagcctgcgagaaagagattgaatttcggtcagactggagacgcagactccgtacctgacccccagcctctcggacagccaccagcagccccctctggtctgggaactaatacgatggctacaggcagtggcgcaccaatggcagacaataacgagggcgccgacggagtgggtaattcctcgggaaattggcattgcgattccacatggatgggcgacagagtcatcaccaccagcacccgaacctgggccctgcccacctacaacaaccacctctacaagcaaatctccagccaatctggagcctcaaacgacaaccactactttggctacagcaccccttgggggtattttgacttcaacagattccactgtcacttctccccacgtgactggcaaagactcatcaacaacaactggggattccgacccaagagactcaacttcaagctctttaacattcaagtcaaagaggtcacgcagaatgacggtacgacgacgattgccaataaccttaccagcacggttcaagtctttactgactcggagtaccagctcccgtacgtcctcggctcggcgcatcaaggatgcctcccgccgtttccagcagacgtcttcatggtgccacagtatggatacctcaccctgaacaacgggagtcaggcggtaggacgctcttccttttactgcctggagtactttccttctcagatgctgcgtaccggaaacaactttaccttcagctacacctttgaggacgttcctttccacagcagctacgctcacagccagagtttggaccggctgatgaatcctctgatcgaccagtatctgtattacttgagcaaaacaaacgctccaagcggaaccaccacgatgtccaggcttcagttttctcaggccggagcgagtgacattcgggaccagtctaggaactggcttcctggaccctgttaccgccagcagcgagtatcaaaaacagctgcggataacaacaacagtgattattcgtggactggagctaccaagtaccacctcaatggaagagactctctggtgaatccgggcccagctatggccagccacaaggacgatgaagagaaatattttcctcagagcggggttctcatctttggaaaacaagactcgggaaaaactaatgtggacattgaaaaggtcatgattacagacgaagaggaaatcaggaccaccaatcccgtggctacggagcagtatggttctgtatctaccaacctccagagcggcaacacacaggcagccaccacagatgtcaacacacaaggcgttcttccaggcatggtctggcaggacagagacgtgtaccagcaaggacccatctgggcaaagattcctcacacggacggacactttcacccttctcccctcatgggaggatttggactcaaacaccctcctccgcaaatcctcatcaagaatacccccgtacctgcgaatccttcgaccacattcagcgcggcaaagcttgcttctttcatcacacagtactctacggggcaggtcagcgtggaggttgagtgggagctgcagaaggagaacagcaaacgctggaaccccgaaatccagtacacttccaactacaacaagtctgttaatgtggactttactgtggacactaatggtgtgtattcagagcctcgccccattggcacaagatacctgactcgtaatctgtaa

SEQ ID NO: 968 - DNA, 2208 bp, Artificial Sequence
  Synthetic Polynucleotide
atggctgccgatggttatcttccagattggctcgaggacactctctctgaaggaataagacagtggtggaagctcaaacctggcccaccaccaccaaagcccgcagagcggcatcaggacgacagcaggggtcttgtgcttcctgggtacaagtacctcggacccttcaacggactcgacaagggagagccggtcaacgaggcagacgccgcggccctcgagcacgacaaggcctacgaccggcagctcgacagcggagacaacccgtacctcaagtacaaccacgccgacgcggagtttcaggagcgtcttaaagaagatacgtcttttgggggcaacctcggacgagcagtcttccaggcgaaaaagagggttcttgaacctctgggcctggttgaggaacctgttaagacggctccgggaaaaaagaggccggtagagcattctcctgcggagccagactcctcctcgggaaccggaaaggcgggccagcagcctgcgagaaagagattgaatttcggtcagactggagacgcagactccgtacctgacccccagcctctcggacagccaccagcagccccctctggtctgggaactaatacgatggctacaggcagtggcgcaccaatggcagacagtaacgagggcgccgacggagtgggtaattcctcgggaaattggcattgcgattccacatggatgggcgacagagtcatcaccaccagcacccgaacctgggccctgcccacctacaacaaccacctctacaagcaaatctccagccaatctggagcctcaaacgacaaccactactttggctacagcaccccttgggggtattttgacttcaacagattccactgtcacttctccccacgtgactggcaaagactcatcaacaacaactggggattccgacccaagagactcaacttcaagctctttaacattcaagtcaaagaggtcacgcagaatgacggtacgacgacgattgccaataaccttaccagcacggttcaagtctttactgactcggagtaccagctcccgtacgtcctcggctcggcgcatcaaggatgcctcccgccgtttccagcagacgtcttcatggtgccacagtatggatacctcaccctgaacaacgggagtcaggcggtaggacgctcttccttttactgcctggagtactttccttctcagatgctgcgtaccggaaacaactttaccttcagctacacctttgaggacgttcctttccacagcagctacgctcacagccagagtttggaccggctgatgaatcctctgatcgaccagtatctgtattacttgagcaaaacaaacgctccaagcggaaccaccacgatgtccaggcttcagttttctcaggccggagcgagtgacattcgggaccagtctaggaactggcttcctggaccctgttaccgccagcagcgagtatcaaaaacagctgcggataacaacaacagtgattattcgtggactggagctaccaagtaccacctcaatggaagagactctctggtgaatccgggcccagctatggccagccacaaggacgatgaagaaaaatattttcctcagagcggggttctcatctttggaaaacaagactcgggaaaaactaatgtggacattgaaaaggtcatgattacagacgaagaggaaatcaggaccaccaatcccgtggctacggagcagtatggttctgtatctaccaacctccagagcggcaacacacaggcagccaccacagatgtcaacacacaaggcgttcttccaggcatggtctggcaggacagagacgtgtacctgcaaggacccatctgggcaaagattcctcacacggacggacactttcacccttctcccctcatgggaggatttggactcaaacaccctcctccgcaaatcctcatcaagaatacccccgtacctgcgaatccttcgaccacattcagcgcggcaaagtttgcttctttcatcacacagtactctacggggcaggtcagcgtggagattgagtgggagctgcagaaggagaacagcaaacgctggaaccccgaaatccagtacacttccaactacaacaagtctgttaatgtggactttactgtggacactaatggtgtgtattcagagcctcgccccattggcacaagatacctgactcgtaatctgtaa

SEQ ID NO: 969 - DNA, 2208 bp, Artificial Sequence
  Synthetic Polynucleotide
atggctgccgatggttatcttccagattggctcgaggacactctctctgaaggaataagacagtggtggaagctcaaacctggcccaccaccaccaaagcccgcagagcggcatcaggacgacagcaggggtcttgtgcttcctgggtacaagtacctcggacccttcaacggactcgacaagggagagccggtcaacgaggcagacgccgcggccctcgagcacgacaaggcctacgaccggcagctcgacagcggagacaacccgtacctcaagtacaaccacgccgacgcggagtttcaggagcgtcttaaagaagatacgtcttttgggggcaacctcggacgagcagtcttccaggcgaaaaagagggttcttgaacctctgggcctggttgaggaacctgttaagacggctccgggaaaaaagaggccggtagagcattctcctgcggagccagactcctcctcgggaaccggaaaggcgggccagcagcctgcgagaaagagattgaatttcggtcagactggagacgcagactccgtacctgacccccagcctctcggacagccaccagcagccccctctggtctgggaactaatacgatggctacaggcagtggcgcaccaatggcagacaataacgagggcgccgacggagtgggtaattcctcgggaaattggcattgcgattccacatggatgggcgacagagtcatcaccaccagcacccgaacctgggccctgcccacctacaacaaccacctctacaagcaaatctccagccaatctggagcctcaaacgacaaccactactttggctacagcaccccttgggggtattttgacttcaacagattccactgtcacttctccccacgtgactggcaaagactcatcaacaacaactggggattccgacccaagagactcaacttcaagctctttaacattcaagtcaaagaggtcacgcagaatgacggtacgacgacgattgccaataaccttaccagcacggttcaagtctttactgactcggagtaccagctcccgtacgtcctcggctcggcgcatcaaggatgcctcccgccgtttccagcagacgtctccatggtgccacagtatggatacctcaccctgaacaacgggagtcaggcggtaggacgctcttccttttactgcctggagtactttccttctcagatgctgcgtaccggaaacaactttaccttcagctacacctttgaggacgttcctttccacagcagctacgctcacagccagagtttggaccggctgatgaatcctctgatcgaccagtatctgtattacttgagcaaaacaaacgctccaagcggaaccaccacgatgtccaggcttcagttttctcaggccggagcgagtgacattcgggaccagtctaggaactggcttcctggaccctgttaccgccagcagcgagtatcaaaaacagctgcggataacaacaacagtgattattcgtggactggagctaccaagtaccacctcaatggaagagactctctggtgaatccgggcccagctatggccagccacaaggacgatgaagaaaaatattttcctcagagcggggttctcatctttggaaaacaagactcgggaaaaactaatgtggacattgaaaaggtcatgattacagacgaagaggaaatcaggaccaccaatcccgtggctacggagcagtatggttctgtatctaccaacctccagagcggcaacacacaggcagccaccacagatgtcaacacacaaggcgttcttccaggcatggtctggcaggacagagacgtgtacctgcaaggacccatctgggcaaagattcctcacacggacggacactttcacccttctcccctcatgggaggatttggactcaaacaccctcctccgcaaatcctcatcaagaatacccccgtacctgcgaatccttcgaccacattcagcgcggcaaagtttgcttctttcatcacacagtactctacggggcaggtcagcgtggagattgagtgggagctgcagaaggagaacagcaaacgctggaaccccgaaatccagtacacttccaactacaacaagtctgttaatgtggactttactgtggacactaatggtgtgtattcagagcctcgccccattggcacaagatacctgactcgtaatctgtaa

SEQ ID NO: 970 - DNA, 2208 bp, Artificial Sequence
  Synthetic Polynucleotide
atggctgccgatggttatcttccagattggctcgaggacactctctctgaaggaataagacagtggtggaagctcaaacctggcccaccaccaccaaagcccgcagagcggcatcaggacgacagcaggggtcttgtgcttcctgggtacaagtacctcggacccttcaacggactcgacaagggagagccggtcaacgaggcagacgtcgcggccctcgagcacgacaaggcctacgaccggcagctcgacagcggagacaacccgtacctcaagtacaaccacgccgacgcggagtttcaggagcgtcttaaagaagatacgtcttttgggggcaacctcggacgagcagtcttccaggcgaaaaagagggttcttgaacctctgggcctggttgaggaacctgttaagacggctccgggaaaaaagaggccggtagagcattctcctgcggagccagactcctcctcgggaaccggaaaggcgggccagcagcctgcgagaaagagattgaatttcggtcagactggagacgcagactccgtacctgacccccagcctctcggacagccaccagcagccccctctggtctgggaactaatacgatggctacaggcagtggcgcaccaatggcagacaataacgagggcgccgacggagtgggtaattcctcgggaaattggcattgcgattccacatggatgggcgacagagtcatcaccaccagcacccgaacctgggccctgcccacctacaacaaccacctctacaagcaaatctccagccaatctggagcctcaaacgacaaccactactttggctacagcaccccttgggggtattttgacttcaacagattccactgtcacttctccccacgtgactggcaaagactcatcaacaacaactggggattccgacccaagagactcaacttcaagctctttaacattcaagtcaaagaggtcacgcagaatgacggtacgacgacgattgccaataaccttaccagcacggttcaagtctttactgactcggagtaccagctcccgtacgtcctcggctcggcgcatcaaggatgcctcccgccgtttccagcagacgtcttcatggtgccacagtatggatacctcaccctgaacaacgggagtcaggcggtaggacgctcttccttttactgcctggagtactttccttctcagatgctgcgtaccggaaacaactttaccttcagctacacctttgaggacgttcctttccacagcagctacgctcacagccagagtttggaccggctgatgaatcctctgatcgaccagtatctgtattacttgagcaaaacaaacgctccaagcggaaccaccacgatgtccaggcttcagttttctcaggccggagcgagtgacattcgggaccagtctaggaactggcttcctggaccctgttaccgccagcagcgagtatcaaaaacagctgcggataacaacaacagtgattattcgtggactggagctaccaagtaccacctcaatggaagagactctctggtgaatccgggcccagctatggccagccacaaggacgatgaagaaaaatattttcctcagagcggggttctcatctttggaaaacaagactcgggaaaaactaatgtggacattgaaaaggtcatgattacagacgaagaggaaatcaggaccaccaatcccgtggctacggagcagtatggtcctgtatctaccaacctccagagcggcaacacacaggcagccaccacagatgtcaacacacaaggcgttcttccaggcatggtctggcagggcagagacgtgtacctgcaaggacccatctgggcaaagattcctcacacggacggacactttcacccttctcccctcatgggaggatttggactcaaacaccctcctccgcaaatcctcatcaagaatacccccgtacctgcgaatccttcgaccacattcagcgcggcaaagtttgcttctttcatcacacagtactctacggggcaggtcagcgtggagattgagtgggagctgcagaaggagaacagcaaacgctggaaccccgaaatccagtacacttccaactacaacaagtctgttaatgtggactttactgtggacactaatggtgtgtattcagagcctcgccccattggcacaagatacctgactcgtaatctgtaa

SEQ ID NO: 971 - DNA, 2208 bp, Artificial Sequence
  Synthetic Polynucleotide
atggctgccgatggttatcttccagattggctcgagggcactctctctgaaggaataagacagtggtggaagctcaaacctggcccaccaccaccaaagcccgcagagcggcatcaggacgacagcaggggtcttgtgcttcctgggtacaagtacctcggacccttcaacggactcgacaagggagagccggtcaacgaggcagacgccgcggccctcgagcacgacaaggcctacgaccggcagctcgacagcggagacaacccgtacctcaagtacaaccacgccgacgcggagtttcaggagcgtcttaaagaagatacgtcttttgggggcaacctcggacgagcagtcttccaggcgaaaaagagggttcttgaacctctgggcctggttgaggaacctgttaagacggctccgggaaaaaagaggccggtagagcattctcctgcggagccagactcctcctcgggaaccggaaaggcgggccagcagcctgcgagaaagagattgaatttcggtcagactggagacgcagactccgtacctgacccccagcctctcggacagccaccagcagccccctctggtctgggaactaatacgatggctacaggcagtggcgcaccaatggcagacaataacgagggcgccgacggagtgggtaattcctcgggaaattggcattgcgattccacatggatgggcgacagagtcatcaccaccagcacccgaacctgggccctgcccacctacaacaaccacctctacaagcaaatctccagccaatctggagcctcaagcgacaaccactactttggctacagcaccccttgggggtattttgacttcaacagattccactgtcacttctccccacgtgactggcaaagactcatcaacaacaactggggattccgacccaagagactcaacttcaagctctttaacattcaagtcaaagaggtcacgcagaatgacggtacgacgacgattgccaataaccttaccagcacggttcaagtctttactgactcggagtaccagctcccgtacgtcctcggctcggcgcatcaaggatgcctcccgccgtttccagcagacgtcttcatggtgccacagtatggatacctcaccctgaacaacgggagtcaggcggtaggacgctcttccttttactgcctggagtactttccttctcagatgctgcgtaccggaaacaactttaccttcagctacacctttgaggacgttcctttccacagcagctacgctcacagccagagtttggaccggctgatgaatcctctgatcgaccagtatctgtattacttgagcaaaacaaacgctccaagcggaaccaccacgatgtccaggcttcagttttctcaggccggagcgagtgacattcgggaccagtctaggaactggcttcctggaccctgttaccgccagcagcgagtatcaaaaacagctgcggataacaacaacagtgattattcgtggactggagctaccaagtaccacctcaatggaagagactctctggtgaatccgggcccagctatggccagccacaaggacgatgaagaaaaatattttcctcagagcggggttctcatctttggaaaacaagactcgggaaaaactaatgtggacattgaaaaggtcatgattacagacgaagaggaaatcaggaccaccaatcccgtggctacggagcagtatggttctgtatctaccaacctccagagcggcaacacacaggcagccaccacagatgtcaacacacaaggcgttcttccaggcatggtctggcaggacagagacgtgtacctgcaaggacccatctgggcaaagattcctcacacggacggacactttcacccttctcccctcatgggaggatttggactcaaacaccctcctccgcaaatcctcatcaagaatacccccgtacctgcgaatccttcgaccacattcagcgcggcaaagcttgcttctttcatcacacagtactctacggggcaggtcagcgtggagattgagtgggagctgcagaaggagaacagcaaacgctggaaccccgaaatccagtacacttccaactacaacaagtctgttaatgtggactttactgtggacactaatggtgtgtattcagagcctcgccccattggcacaagatacctgactcgtaatctgtaa

SEQ ID NO: 972 - DNA, 2208 bp, Artificial Sequence
  Synthetic Polynucleotide
atggctgccgatggttatcttccagattggctcgaggacactctctctgaaggaataagacagtggtggaagctcaaacctggcccaccaccaccaaagcccgcagagcggcatcaggacgacagcaggggtcttgtgcttcctgggtacaagtacctcggacccttcaacggactcgacaagggagagccggtcaacgaggcagacgtcgcggccctcgagcacgacaaggcctacgaccggcagctcgacagcggagacaacccgtacctcaagtacaaccacgccgacgcggagtttcaggagcgtcttaaagaagatacgtcttttgggggcaacctcggacgagcagtcttccaggcgaaaaagagggttcttgaacctctgggcctggttgaggaacctgttaagacggctccgggaaaaaagaggccggtagagcattctcctgcggagccagactcctcctcgggaaccggaaaggcgggccagcagcctgcgagaaagagattgaatttcggtcagactggagacgcagactccgtacctgacccccagcctctcggacagccaccagcagccccctctggtctgggaactaatacgatggctacaggcagtggcgcaccaatggcagacaataacgagggcgccgacggagtgggtaattcctcgggaaattggcattgcgattccacatggatgggcgacagagtcatcaccaccagcacccgaacctgggccctgcccacctacaacaaccacctctacaagcaaatctccagccaatctggagcctcaaacgacaaccactactttggctacagcaccccttgggggtattttgacttcaacagattccactgtcacttctccccacgtgactggcaaagactcatcaacaacaactggggattccgacccaagagacccaacttcaagctctttaacattcaagtcaaagaggtcacgcagaatgacggtacgacgacgattgccaataaccttaccagcacggttcaagtctttactgactcggagtaccagctcccgtacgtcctcggctcggcgcatcaaggatgcctcccgccgtttccagcagacgtcttcatggtgccacagtatggatacctcaccctgaacaacgggagtcaggcggtaggacgctcttccttttactgcctggagtactttccttctcagatgctgcgtaccggaaacaactttaccttcagctacacctttgaggacgttcctttccacagcagctacgctcacagccagagtttggaccggctgatgaatcctctgatcgaccagtatctgtattacttgagcaaaacaaacgctccaagcggaaccaccacgatgtccaggcttcagttttctcaggccggagcgagtgacattcgggaccagtctaggaactggcttcctggaccctgttaccgccagcagcgagtatcaaaaacagctgcggataacaacaacagtgattattcgtggactggagctaccaagtaccacctcaatggaagagactctctggtgaatccgggcccagctatggccagccacaaggacgatgaagaaaaatattttcctcagagcggggttctcatctttggaaaacaagactcgggaaaaactaatgtggacattgaaaaggtcatgattacagacgaagaggaaatcaggaccaccaatcccgtggctacggagcagtatggttctgtatctaccaacctccagagcggcaacacacaggcagccaccacagatgtcaacacacaaggcgttcttccaggcatggtctggcaggacagagacgtgtacctgcaaggacccatctgggcaaagattcctcacacggacggacactttcacccttctcccctcatgggaggatttggactcaaacaccctcctccgcaaatcctcatcaagaatacccccgtacctgcgaatccttcgaccacattcagcgcggcaaagtttgcttctttcatcacacagtactctacggggcaggtcagcgtggagattgagtgggagctgcagaaggagaacagcaaacgctggaaccccgaaatccagtacacttccaactacaacaagtctgttaatgtggactttactgtggacactaatggtgtgtattcagagcctcgccccattggcacaagatacctgactcgtaatctgtaa

SEQ ID NO: 973 - DNA, 2208 bp, Artificial Sequence
  Synthetic Polynucleotide
atggctgccgatggttatcttccagattggctcgaggacactctctctgaaggaataagacagtggtggaagctcaaacctggcccaccaccaccaaagcccgcagagcggcatcaggacgacagcaggggtcttgagcttcctgggtacaagtacctcggacccttcaacggactcgacaagggagagccggtcaacgaggcagacgccgcggccctcgagcacgacaaggcctacgaccggcagctcgacagcggagacaacccgtacctcaagtacaaccacgccgacgcggagtttcaggagcgtcttaaagaagatacgtcttttgggggcaacctcggacgagcagtcttccaggcgaaaaagagggttcttgaacctctgggcctggttgaggaacctgttaagacggctccgggaaaaaagaggccggtagagcattctcctgcggagccagactcctcctcgggaaccggaaaggcgggccagcagcctgcgagaaagagattgaatttcggtcagactggagacgcagactccgtacctgacccccagcctctcggacagccaccagcagccccctctggtctgggaactaatacgatggctacaggcagtggcgcaccaatggcagacaataacgagggcgccgacggagtgggtaattcctcgggaaattggcattgcgattccacatggatgggcgacagagtcatcaccaccagcacccgaacctgggccctgcccacctacaacaaccacctctacaagcaaatctccagccaatctggagcctcaaacgacaaccactactttggctacagcaccccttgggggtattttgacttcaacagattccactgtcacttctccccacgtgactggcaaagactcatcaacaacaactggggattccgacccaagagactcaacttcaagctctttaacattcaagtcaaagaggtcacgcagaatgacggtacgacgacgattgccaataaccttaccagcacggttcaagtctttactgactcggagtaccagctcccgtacgtcctcggctcggcgcatcaaggatgcctcccgccgtttccagcagacgtcttcatggtgccacagtatggatacctcaccctgaacaacgggagtcaggcggtaggacgctcttccttttactgcctggagtactttccttctcagatgctgcgtaccggaaacaactttaccttcagctacacctttgaggacgttcctttccacagcagctacgctcacagccagagtttggaccggctgatgaatcctctgatcgaccagtatctgtattacttgagcaaaacaaacgctccaagcggaaccaccacgatgtccaggcttcagttttctcaggccggagcgagtgacattcgggaccagtctaggaactggcttcctggaccctgttaccgccagcagcgagtatcaaaaacagctgcggataacaacaacagtgattattcgtggactggagctaccaagtaccacctcaatggaagagactctctggtgaatccgggcccagctatggccagccacaaggacgatgaagaaaaatattttcctcagagcggggttctcatctttggaaaacaagactcgggaaaaactaatgtggacattgaaaaggtcatgattacagacgaagaggaaatcaggaccaccaatcccgtggctacggagcagtatggttctgtatctaccaacctccagagcggcaacacacaggcagccaccacagatgtcaacacacaaggcgttcttccaggcatggtctggcaggacagagacgtgtacctgcaaggacccatctgggcaaagattcctcacacggacggacactttcacccttctcccctcatgggaggatttggactcaaacaccctcctccgcaaatcctcatcaagaatacccccgtacctgcgaatccttcgaccacattcagcgcggcaaagtttgcttctttcatcacacagtactctacggggcaggtcagcgtggagattgagtgggagctgcagaaggagaacagcaaacgctggaaccccgaaatccagtacacttccaactacaacaagtctgttaatgtggactttactgtggacactaatggtgtgtattcagagcctcgccccattggcacaagatacctgactcgtaatctgtaa

SEQ ID NO: 974 - DNA, 2208 bp, Artificial Sequence
  Synthetic Polynucleotide
atggctgccgatggttatcttccagattggctcgaggacaccctctctgagggaataagacagtggtggaagctcaaacctggcccaccaccaccaaagcccgcagagcggcatcaggacgacagcaggggtcttgtgcttcctgggtacaagtacctcggacccttcaacggactcgacaagggagagccggtcaacgaggcagacgccgcggccctcgagcacgacaaggcctacgaccggcagctcgacagcggagacaacccgtacctcaagtacaaccacgccgacgcggagtttcaggagcgtcttaaagaagatacgtcttttgggggcaacctcggacgagcagtcttccaggcgaaaaagagggttcttgaacctctgggcctggttgaggaacctgttaagacggctccgggaaaaaagaggccggtagagcattctcctgcggagccagactcctcctcgggaaccggaaaggcgggccagcagcctgcgagaaagagattgaatttcggtcagactggagacgcagactccgtacctgacccccagcctctcggacagccaccagcagccccctctggtctgggaactaatacgatggctacaggcagtggcgcaccaatggcagacaataacgagggcgccgacggagtgggtaattcctcgggaaattggcattgcgattccacatggatgggcgacagagtcatcaccaccagcacccgaacctgggccctgcccacctacaacaaccacctctacaagcaaatctccagccaatctggagcctcaaacgacaaccactactttggctacagcaccccttgggggtattttgacttcaacagattccactgtcacttctccccacgtgactggcaaagactcatcaacaacaactggggattccgacccaagagactcaacttcaagctctttaacattcaagtcaaagaggtcacgcagaatgacggtatgacgacgattgccaataaccttaccagcacggttcaagtctttactgactcggagtaccagctcccgtacgtcctcggctcggcgcatcaaggatgcctcccgccgtttccagcagacgtcttcatggtgccacagtatggatacctcaccctgaacaacgggagtcaggcggtaggacgctcttccttttactgcctggagtactttccttctcagatgctgcgtaccggaaacaactttaccttcagctacacctttgaggacgttcctttccacagcagctacgctcacagccagagtttggaccggctgatgaatcctctgatcgaccagtatctgtattacttgagcaaaacaaacgctccaagcggaaccaccacgatgtccaggcttcagttttctcaggccggagcgagtgacattcgggaccagtctaggaactggcttcctggaccctgttaccgccagcagcgagtatcaaaaacagctgcggataacaacaacagtgattattcgtggactggagctaccaagtaccacctcaatggaagagactctctggtgaatccgggcccagctatggccagccacaaggacgatgaagaaaaatattttcctcagagcggggttctcatctttggaaaacaagactcgggaaaaactaatgtggacattgaaaaggtcatgattacagacgaagaggaaatcaggaccaccaatcccgtggctacggagcagtatggttctgtatctaccaacctccagagcggcaacacacaggcagccaccacagatgtcaacacacaaggcgttcttccaggcatggtctggcaggacagagacgtgtacctgcaaggacccatctgggcaaagattcctcacacggacggacactttcacccttctcccctcatgggaggatttggactcaaacaccctcctccgcaaatcctcatcaagaatacccccgtacctgcgaatccttcgaccacattcagcgcggcaaagtttgcttctttcatcacacagtactctacggggcaggtcagcgtggagattgagtgggagctgcagaaggagaacagcaaacgctggaaccccgaaatccagtacacttccaactacaacaagtctgttaatgtggactttactgtggacactaatggtgtgtattcagagcctcgccccattggcacaagatacctgactcgtaatctgtaa

SEQ ID NO: 975 - DNA, 2208 bp, Artificial Sequence
  Synthetic Polynucleotide
atggctgccgatggttatcttccagattggctcgaggacactctctctgaaggaataagacagtggtggaagctcaaacctggcccaccaccactaaagcccgcagagcggcatcaggacgacagcaggggtcttgtgcttcctgggtacaagtacctcggacccttcaacggactcgacaagggagagccggtcaacgaggcagacgccgcggccctcgagcacgacaaggcctacgaccggcagctcgacagcggagacaacccgtacctcaagtacaaccacgccgacgcggagtttcaggagcgtcttaaagaagatacgtcttttgggggcaacctcggacgagcagtcttccaggcgaaaaagagggttcttgaacctctgggcctggttgaggaacctgttaagacggctccgggaaaaaagaggccggtagagcattctcctgcggagccagactcctcctcgggaaccggaaaggcgggccagcagcctgcgagaaagagattgaatttcggtcagactggagacgcagactccgtacctgacccccagcctctcggacagccaccagcagccccctctggtctgggaactaatacgatggctacaggcagtggcgcaccaatggcagacaataacgagggcgccgacggagtgggtaattcctcgggaaattggcattgcgattccacatggatgggcgacagagtcatcaccaccagcacccgaacctgggccctgcccacctacaacaaccacctctacaagcaaatctccagccaatctggagcctcaaacgacaaccactactttggctacagcaccccttgggggtattttgacttcaacagattccactgtcacttctccccacgtgactggcaaagactcatcaacaacaactggggattccgacccaagagactcaacttcaagctctttaacattcaagtcaaagaggtcacgcagaatgacggtacgacgacgattgccaataaccttaccagcacggttcaagtctttactgactcggagtaccagctcccgtacgtcctcggctcggcgcatcaaggatgcctcccgccgtttccagcagacgtcttcatggtgccacagtatggatacctcaccctgaacaacgggagtcaggcggtaggacgctcttccttttactgcctggagtactttccttctcagatgctgcgtaccggaaacaactttaccttcagctacacctttgaggacgttcctttccacagcagctacgctcacagccagagtttggaccggctgatgaatcctctgatcgaccagtatctgtattacttgagcaaaacaaacgctccaagcggaaccaccacgatgtccaggcttcagttttctcaggccggagcgagtgacattcgggaccagtctaggaactggcttcctggaccctgttaccgccagcagcgagtatcaaaaacagctgcggataacaacaacagtgattattcgtggactggagctaccaagtaccacctcaatggaagagactctctggtgaatccgggcccagctatggccagccacaaggacgatgaagaaaaatattttcctcagagcggggttctcatctttggaaaacaagactcgggaaaaactaatgtggacattgaaaaggtcatgattacagacgaagaggaaatcaggaccaccaatcccgtggctacggagcagtatggttctgtatctaccaacctccagagcggcaacacacaggcagccaccacagatgtcaacacacaaggcgttcctccaggcatggtctggcaggacagagacgtgtacctgcaaggacccatctgggcaaagattcctcacacggacggacactttcacccttctcccctcatgggaggatttggactcaaacaccctcctccgcaaatcctcatcaagaatacccccgtacctgcgaatccttcgaccacattcagcgcggcaaagtttgcttctttcatcacacagtactctacggggcaggtcagcgtggagattgagtgggagctgcagaaggagaacagcaaacgctggaaccccgaaatccagtacacttccaactacaacaagtctgttaatgtggactttactgtggacactaatggtgtgtattcagagcctcgccccattggcacaagatacctgactcgtaatctgtaa

SEQ ID NO: 976 - DNA, 2208 bp, Artificial Sequence
  Synthetic Polynucleotide
atggctgccgatggttatcttccagattggctcgaggacactctctctgaaggaataagacagtggtggaagctcaaacctggcccaccaccaccaaagcccgcagagcggcatcaggacgacagcaggggtcttgtgcttcctgggtacaagtacctcggacccttcaacggactcgacaagggagagccggtcaacgaggcagacgccgcggccctcgagcacgacaaggcctacgaccggcagctcgacagcggagacaacccgtacctcaagtacaaccacgccgacgcggagtttcaggagcgtcttaaagaagatacgtcttttgggggcaacctcggacgagcagtcttccaggcgaaaaagagggttcttgaacctctgggcctggttgaggaacctgttaagacggctccgggaaaaaagaggccggtagagcattctcctgcggagccagactcctcctcgggaaccggaaaggcgggccagcagcctgcgagaaagagattgaatttcggtcagactggagacgcagactccgtacctgacccccagcctctcggacagccaccagcagccccctctggtctgggaactaatacgatggctacaggcagtggcgcaccaatggcagacaataacgagggcgccgacggagtgggtaattcctcgggaaattggcattgcgattccacatggatgggcgacagagtcatcaccaccagcacccgaacctgggccctgcccacctacaacaaccacctctacaagcaaatctccagccaatctggagcctcaaacgacaaccactactttggctacagcaccccttgggggtattttgacttcaacagattccactgtcacttctccccacgtgactggcaaagactcatcaacaacaactggggattccgacccaagagactcaacttcaagctctttaacattcaagtcaaagaggtcacgcagaatgacggtacgacgacgattgccaataaccttaccagcacggttcaagtctttactgactcggagtaccagctcccgtacgtcctcggctcggcgcatcaaggatgcctcccgccgtttccagcagacgtcttcatggtgccacagtatggatacctcaccctgaacaacgggagtcaggcggtaggacgctcttccttttactgcctggagtactttccttctcagatgctgcgtaccggaaacaactttaccttcagctacacctttgaggacgttcctttccacagcagctacgctcacagccagagtttggaccggctgatgaatcctctgatcgaccagtatctgtattacttgagcaaaacaaacgctccaagcggaaccaccacgatgtccaggcttcagttttctcaggccggagcgagtgacattcgggaccagtctaggaactggcttcctggaccctgttaccgccagcagcgagtatcaaaaacagctgcggataacaacaacagtgattattcgtggactggagctaccaagtaccacctcaatggaagagactctctggtgaatccgggcccagctatggccagccacaaggacgatgaagaaaaatattttcctcagagcggggttctcatctttggaaaacaagactcgggaaaaaccaatgtggacattgaaaaggtcatgattacagacgaagaggaaatcaggaccaccaatcccgtggctacggagcagtatggttctgtatctaccaacctccagagcggcaacacacaggcagccaccacagatgtcaacacacaaggcgttcttccaggcatggcctggcaggacagagacgtgtacctgcaaggacccatctgggcaaagattcctcacacggacggacactttcacccttctcccctcatgggaggatttggactcaaacaccctcctccgcaaatcctcatcaagaatacccccgtacctgcgaatccttcgaccacactcagcgcggcaaagtttgcttctttcatcacacagtactctacggggcaggtcagcgtggagattgagtgggagctgcagaaggagaacagcaaacgctggaaccccgaaatccagtacacttccaactacaacaagtctgttaatgtggactttactgtggacactaatggtgtgtattcagagcctcgccccattggcacaagatacctgactcgtaatctgtaa

SEQ ID NO: 977 - DNA, 2208 bp, Artificial Sequence
  Synthetic Polynucleotide
atggctgccgatggttatcttccagattggctcgaggacactctctctgaaggaataagacagtggtggaagctcaaacctggcccaccaccaccaaagcccgcagagcggcatcaggacgacagcaggggtcttgtgcttcctgggtacaagtacctcggacccttcaacggactcgacaagggagagccggtcaacgaggcagacgccgcggccctcgagcacgacaaggcccacgaccggcagctcgacagcggagacaacccgtacctcaagtacaaccacgccgacgcggagtttcaggagcgtcttaaagaagatacgtcttttgggggcaacctcggacgagcagtcttccaggcgaaaaagagggttcttgaacctctgggcctggttgaggaacctgttaagacggctccgggaaaaaagaggccggtagagcattctcctgcggagccagactcctcctcgggaaccggaaaggcgggccagcagcctgcgagaaagagattgaatttcggtcagactggagacgcagactccgtacctgacccccagcctctcggacagccaccagcagccccctctggtctgggaactaatacgatggctacaggcagtggcgcaccaatggcagacaataacgagggcgccgacggagtgggtaattcctcgggaaattggcattgcgattccacatggatgggcgacagagtcatcaccaccagcacccgaacctgggccctgcccacctacaacaaccacctctacaagcaaatctccagccaatctggagcctcaaacgacaaccactactttggctacagcaccccttgggggtattttgacttcaacagattccactgtcacttctccccacgtgactggcaaagactcatcaacaacaactggggattccgacccaagagactcaacttcaagctctttaacattcaagtcaaagaggtcacgcagaatgacggtacgacgacgattgccaataaccttaccagcacggttcaagtctttactgactcggagtaccagctcccgtacgtcctcggctcggcgcatcaaggatgcctcccgccgtttccagcagacgtcttcatggtgccacagtatggatacctcaccctgaacaacgggagtcaggcggtaggacgctcttccttttactgcctggagtactttccttctcagatgctgcgtaccggaaacaactttaccttcagctacacctttgaggacgttcctttccacagcagctacgctcacagccagagtttggaccggctgatgaatcctctgatcgaccagtatctgtattacttgagcaaaacaaacgctccaagcggaaccaccacgatgtccaggcttcagttttctcaggccggagcgagtgacattcgggaccagtctaggaactggcttcctggaccctgttaccgccagcagcgagtatcaaaaacagctgcggataacaacaacagtgattattcgtggactggagctaccaagtaccacctcaatggaagagactctctggtgagtccgggcccagctatggccagccacaaggacgatgaagaaaaatattttcctcagagcggggttctcatctttggaaaacaagactcgggaaaaactaatgtggacattgaaaaggtcatgattacagacgaagaggaaatcaggaccaccaatcccgtggctacggagcagtatggttctgtatctaccaacctccagagcggcaacacacaggcagccaccacagatgtcaacacacaaggcgttcttccaggcatggtctggcaggacagagacgtgtacctgcaaggacccatctgggcaaagattcctcacacggacggacactttcacccttctcccctcatgggaggatttggactcaaacaccctcctccgcaaatcctcatcaagaatacccccgtacctgcgaatccttcgaccacattcagcgcggcaaagtttgcttctttcatcacacagtactctacggggcaggtcagcgtggagattgagtgggagctgcagaaggagaacagcaaacgctggaaccccgaaatccagtacacttccaactacaacaagtctgttaatgtggactttactgtggacactaatggtgtgtattcagagcctcgccccattggcacaagatacctgactcgtaatctgtaa

SEQ ID NO: 978 - DNA, 2208 bp, Artificial Sequence
  Synthetic Polynucleotide
atggctgccgatggttatcttccagattggctcgaggacactctctctgaaggaataagacagtggtggaagctcaaacctggcccaccaccactaaagcccgcagagcggcatcaggacgacagcaggggtcttgtgcttcctgggtacaagtacctcggacccttcaacggactcgacaagggagagccggtcaacgaggcagacgccgcggccctcgagcacgacaaggcctacgaccggcagctcgacagcggagacaacccgtacctcaagtacaaccacgccgacgcggagtttcaggagcgtcttaaagaagatacgtcttttgggggcaacctcggacgagcagtcttccaggcgaaaaagagggttcttgaacctctgggcctggttgaggaacctgttaagacggctccgggaaaaaagaggccggtagagcattctcctgcggagccagactcctcctcgggaaccggaaaggcgggccagcagcctgcgagaaagagattgaatttcggtcagactggagacgcagactccgtacctgacccccagcctctcggacagccaccagcagccccctctggtctgggaactaatacgatggctacaggcagtggcgcaccaatggcagacaataacgagggcgccgacggagtgggtaattcctcgggaaattggcattgcgattccacatggatgggcgacagagtcatcaccaccagcacccgaacctgggccctgcccacctacaacaaccacctctacaagcaaatctccagccaatctggagcctcaaacgacaaccactactttggctacagcaccccttgggggtattttgacttcaacagattccactgtcacttctccccacgtgactggcaaagactcatcaacaacaactggggattccgacccaagagactcaacttcaagctctttaacattcaagtcaaagaggtcacgcagaatgacggtacgacgacgattgccaataaccttaccagcacggttcaagtctttactgactcggagtaccagctcccgtacgtcctcggctcggcgcatcaaggatgcctcccgccgtttccagcagacgtcttcatggtgccacagtatggatacctcaccctgaacaacgggagtcaggcggtaggacgctcttccttttactgcctggagtactttccttctcagatgctgcgtaccggaaacaactttaccttcagctacacctttgaggacgttcctttccacagcagctacgctcacagccagagtttggaccggctgatgaatcctctgatcgaccagtatctgtattacttgagcaaaacaaacgctccaagcggaaccaccacgatgtccaggcttcagttttctcaggccggagcgagtgacattcgggaccagtctaggaactggcttcctggaccctgttaccgccagcagcgagtatcaaaaacagctgcggataacaacaacagtgattattcgtggactggagctaccaagtaccacctcaatggaagagactctctggtgaatccgggcccagctatggccagccacaaggacgatgaagaaaaatattttcctcagagcggggttctcatctttggaaaacaagactcgggaaaaactaatgtggacattgaaaaggtcatgattacagacgaagaggaaatcaggaccaccaatcccgtggctacggagcagtatggttctgtatctaccaacctccagagcggcaacacacaggcagccaccacagatgtcaacacacaaggcgttcttccaggcatggtctggcaggacagagacgtgtacctgcaaggacccatctgggcaaagattcctcacacggacggacactttcacccttctcccctcatgggaggatttggactcaaacaccctcctccgcaaatcctcatcaagaatacccccgtacctgcgaatccttcgaccacattcagcgcggcaaagtttgcttctttcatcacacagtactctacggggcaggtcagcgtggggattgagtgggagctgcagaaggagaacagcaaacgctggaaccccgaaatccagtacacttccaactacaacaagtctgttaatgtggactttactgtggacactaatggtgtgtattcagagcctcgccccattggcacaagatacctgactcgtaatctgtaa

SEQ ID NO: 979 - DNA, 2208 bp, Artificial Sequence
  Synthetic Polynucleotide
atggctgccgatggttatcttccagattggctcgaggacactctctctgaaggaataagacagtggtggaagctcaaacctggcccaccaccaccaaagcccgcagagcggcatcaggacgacagcaggggtcttgtgcttcctgggtacaagtacctcggacccttcaacggactcgacaagggagagccggtcaacgaggcagacgccgcggccctcgagcacgacaaggcctacgaccggcagctcgacagcggagacaacccgtacctcaagtacaaccacgccgacgcggagtttcaggagcgtcttaaagaagatacgtcttttgggggcaacctcggacgagcagtcttccaggcgaaaaagagggttcttgaacctctgggcctggttgaggaacctgttaagacggctccgggaaaaaagaggccggtagagcattctcctgcggagccagactcctcctcgggaaccggaaaggcgggccagcagcctgcgagaaagagattgaatttcggtcagactggagacgcagactccgtacctgacccccagcctctcggacagccaccagcagccccctctggtctgggaactaatacgatggctacaggcagtggcgcaccaatggcagacaataacgagggcgccgacggagtgggtaattcctcgggaaattggcattgcgactccacatggatgggcgacagagtcatcaccaccagcacccgaacctgggccctgcccacctacaacaaccacctctacaagcaaatctccagccaatctggagcctcaaacgacaaccactactttggctacagcaccccttgggggtattttgacttcaacagattccactgtcacttctccccacgtgactggcaaagactcatcaacaacaactggggattccgacccaagagactcaacttcaagctctttaacattcaagtcaaagaggtcacgcagaatgacggtacgacgacgattgccaataaccttaccagcacggttcaagtctttactgactcggagtaccagctcccgtacgtcctcggctcggcgcatcaaggatgcctcccgccgtttccagcagacgtcttcatggtgccacagtatggatacctcaccctgaacaacgggagtcaggcggtaggacgctcttccttttactgcctggagtactttccttctcagatgctgcgtaccggaaacaactttaccttcagctacacctttgaggacgttcctttccacagcagctacgctcacagccagagtttggaccggctgatgaatcctctgatcgaccagtatctgtattacttgagcaaaacaaacgctccaagcggaaccaccacgatgtccaggcttcagttttctcaggccggagcgagtgacattcgggaccagtctaggaactggcttcctggaccctgttaccgccagcagcgagtatcaaaaacagctgcggataacaacaacagtgattattcgtggactggagctaccaagtaccacctcaatggaagagactctctggtgaatccgggcccagctatggccagccacaaggacgatgaagaaaaatattttcctcagagcggggttctcatctttggaaaacaagactcgggaaaaactaatgtggacattgaaaaggtcatgattacagacgaagaggaaatcaggaccaccaatcccgtggctacggagcagtatggttctgtatctaccaacctccagagcggcaacacacaggcagccaccacagatgtcaacacacaaggcgttcttccaggcatggtctggcaggacagagacgtgtgcctgcaaggacccatttgggcaaagattcctcacacggacggacactttcacccttctcccctcatgggaggatttggactcaaacaccctcctccgcaaatcctcatcaagaatacccccgtacctgcgaatccttcgaccacattcagcgcggcaaagtttgcttctttcatcacacagtactctacggggcaggtcagcgtggagattgagtgggagctgcagaaggagaacagcaaacgttggaaccccgaaatccagtacacttccaactacaacaagtctgttaatgtggactttactgtggacactaatggtgtgtattcagagcctcgccccattggcacaagatacctgactcgtaatctgtaa

SEQ ID NO: 980 - DNA, 2208 bp, Artificial Sequence
  Synthetic Polynucleotide
atggctgccgatggttatcttccagattggctcgaggacactctctctgaaggaataagacagtggtggaagctcaaacctggcccaccaccaccaaagcccgcagagcggcatcaggacgacagcaggggtcttgtgcttcctgggtacaagtacctcggacccttcaacggactcgacaagggagagccggtcaacgaggcagacgccgcggccctcgagcacgacaaggcctacgaccggcagctcgacagcggagacaacccgtacctcaagtacaaccacgccgacgcggagtttcaggagcgtcttaaagaagatacgtcttttgggggcaacctcggacgagcagtcttccaggcgaaaaagagggttcttgaacctctgggcctggttgaggaacctgttaagacggctccgggaaaaaagaggccggtagagcattctcctgcggagccagactcctcctcgggaaccggaaaggcgggccagcagcctgcgagaaagagattgaatttcggtcagactggagacgcagactccgtacctgacccccagcctctcggacagccaccagcagccccctctggtctgggaactaatacgatggctacaggcagtggcgcaccaatggcagacaataacgagggcgccgacggagtgggtaattcctcgggaaattggcattgcgattccacatggatgggcgacagagtcatcaccaccagcacccgaacctgggccctgcccacctacaacaaccacctctacaagcaaatctccagccaatctggagcctcaaacgacaaccactactttggctacagcaccccttgggggtattttgacttcaacagattccactgtcacttctccccacgtgactggcaaagactcatcaacaacaactggggattccgacccaagagactcaacttcaagctctttaacattcaagtcaaagaggtcgcgcagaatgacggtacgacgacgattgccaataaccttaccagcacggttcaagtctttactgactcggagtaccagctcccgtacgtcctcggctcggcgcatcaaggatgcctcccgccgtttccagcagacgtcttcatggtgccacagtatggatacctcaccctgaacaacgggagtcaggcggtaggacgctcttccttttactgcctggagtactttccttctcagatgctgcgtaccggaaacaactttaccttcagctacacctttgaggacgttcctttccacagcagctacgctcacagccagagtttggaccggctgatgaatcctctgatcgaccagtatctgtattacttgagcaaaacaaacgctccaagcggaaccaccacgatgtccaggcttcagttttctcaggccggagcgagtgacattcgggaccagtctaggaactggcttcctggaccctgttaccgccagcagcgagtatcaaaaacagctgcggataacaacaacagtgattattcgtggactggagctaccaagtaccacctcaatggaagagactctctggtgaatccgggcccagctatggccagccacaaggacgatgaagaaaaatattttcctcagagcggggttctcatctttggaaaacaagactcgggaaaaactaatgtggacattgaaaaggtcatgattacagacgaagaggaaatcaggaccaccaatcccgtggctacggagcagtatggttctgtatctaccaacctccagagcggcaacacacaggcagccaccacagatgtcaacacacaaggcgttcttccaggcatggtctggcaggacagagacgtgtacctgcaaggacccatctgggcaaagattcctcacacggacggacactttcacccttctcccctcatgggaggatttggactcaaacaccctcctccgcaaatcctcatcaagaatacccccgtacctgcgaatccttcgaccacattcagcgcggcaaagtttgcttctttcatcacacagtactctacggggcaggtcagcgtggagattgagtgggagctgcagaaggagaacagcaaacgctggaaccccgaaatccagtacacttccaactacaacaagtctgttaatgtggactttactgtggacactaatggtgtgtattcagagcctcgccccattggcacaagatacctgactcgtaatctgtaa

SEQ ID NO: 981 - DNA, 2208 bp, Artificial Sequence
  Synthetic Polynucleotide
atggctgccgatggttatcttccagattggctcgaggacactctctctgaaggaataagacagtggtggaagctcaaacctggcccaccaccgccaaagcccgcagagcggcataaggacgacagcaggggtcttgtgcttcctgggtacaagtacctcggacccttcaacggactcgacaaaggagagccggtcaacgaggcagacgccgcggccctcgagcacgacaaggcctacgaccggcagctcgacagcggagacaacccgtacctcaagtacaaccacgccgacgcggagtttcaggagcgccttaaagaagatacgtcttttgggggcaacctcgcaagagcagtattccaggcgaaaaagagggttcttgaacctctgggcctggttgaggagcctgttaagacggctccgggaaaaaagaggccggtagagcactctcctgcggagccagattcctcctccggaactggaaagtcgggccaacagcctgcaagaaagagattgaattttggtcagactggagacgcagactccgtacctgacccccagcctctcggacagccaccagcagccccctctggtctgggaactaatacgatggcttcaggcagtggcgcaccaatggcagacaataacgagggcgccgacggagtgggtaattcctcgggaaattggcattgcgattccacatggatgggcgacagagtcatcaccaccagcacccgcacctgggctctgcccacctacaacaaccatctgtacaagcaaatttccagccagtctggagccagcaacgacaaccactactttggctacagcaccccttgggggtattttgacttcaacagattccactgccacttctccccacgtgactggcaaagactcatcaacaacaattggggattccggcccaaaagactcaacttcaagctctttaacattcaagtcaaggaggtcacgcagaatgacggtacgacgacgattgccaataaccttaccagcacggttcaggtgtttactgactcggagtaccagctcccgtacgtcctcggctcggcgcatcaaggatgcctcccgccgttcccagcagacgtcttcatggtgccacagtatggatacctcaccctgaacaacgggagtcaggcggtaggacgctcttcattttactgcccggagtaccttccttctcagatgctgcgtaccggaaacaactttaccttcagctacacctttgaggacgttccttttcacagcagctacgctcacagccagagtttggaccgtctcatgaatcctctcatcgaccagtacctgtattacttgagcagaacaaacactccaagcggaaccactacgcagtccaggcttcagttttctcaagccggagcgagtgacattcgggaccagtctaggaactggcttcctggaccctgttaccgccagcagcgagtatcaaagacagctgcggacaacaacaacagtgattactcgtggactggagctaccaagtatcacctcaatggaagagactctctggtgaatccgggcacagccatggccagccacaaggacgatgaagaaaagtattttcctcagagcggggttctcatcttcggaaaacaagactcgggaaaaactaatgtggacattgaaaaggtcatgattacagacgaagaggaaaccaggaccaccaatcccgtggctacggagcagtatggttctgtatctaccaatctccagagcggcaacacacaagcagctacctcagatgtcaacacacaaggcgttcttccaggcatggtctggcaggacagagacgtgtacctgcagggacccatctgggcaaagattccacacacggacggacattttcacccttctcctcttatgggaggatttggactgaagcaccctcccccgcagattctcatcaagaataccccggtacctgcgaatccttctaccgccttcagcgcggcaaagtttgcttccttcatcacacagtactccacggggcaggtcagcgtggagatcgagtgggagctgcagaaagagaacagcgaacgctggaaccccgagatccagtatacctccaactacaacaagtctgttaatgtggactttactgtggacactaatggcgtgtattcagagcctcgccccattggcacaaggtacctgactcgtaatctgtaa

SEQ ID NO: 982 - DNA, 2208 bp, Artificial Sequence
  Synthetic Polynucleotide
atggctgccgatggttatcttccagattggctcgaggacactctctctgaaggaataagacagtggtggaagctcaaacctggcccaccaccgccaaagcccgcagagcggcataaggacgacagcaggggtcttgtgcttcctgggtacaagtacctcggacccttcaacggactcgacaaaggagagccggtcaacgaggcagacgccgcggccctcgagcacgacaaggcctacgaccggcagctcgacagcggagacaacccgtacctcaagtacaaccacgccgacgcggagtttcaggagcgccttaaagaagatacgtcttttgggggcaacctcgcaagagcagtattccaggcgaaaaagagggttcttgaacctctgggcctggttgaggagcctgttaagacggctccgggaaaaaagaggccggtagagcactctcctgcggagccagattcctcctccggaactggaaagtcgggccaacagcctgcaagaaagagattgaattttggtcagactggagacgcagactccgtacctgacccccagcctctcggacagccaccagcagccccctctggtctgggaactaatacgatggcttcaggcagtggcgcaccaatggcagacaataacgagggcgccgacggagtgggtaattcctcgggaaattggcattgcgattccacatggatgggcgacagagtcatcaccaccagcacccgcacctgggctctgcccacctacaacaaccatctgtacaagcaaatttccagccagtctggagccagcaacgacaaccactactttggctacagcaccccttgggggtattttgacttcaacagattccactgccacttctccccacgtgactggcaaagactcatcaacaacaattggggattccggcccaaaagactcaacttcaagctctttaacattcaagtcaaggaggtcacgcagaatgacggtacgacgacgattgccaataaccttaccagcacggttcaggtgtttactgactcggagtaccagctcccgtacgtcctcggctcggcgcatcaaggatgcctcccgccgttcccagcagacgtcctcatggtgccacagtatggatacctcaccctgaacaacgggagtcaggcggtaggacgctcttcattttactgcccggagtaccttccttctcagatgctgcgtaccggaaacaactttaccttcagctacacctttgaggacgttccttttcacagcagctacgctcacagccagagtttggaccgtctcatgaatcctctcatcgaccagtacctgtattacttgagcagaacaaacactccaagcggaaccactacgcagtccaggcttcagttttctcaagccggagcgagtgacattcgggaccagtctaggaactggcttcctggaccctgttaccgccagcagcgagtatcaaagacagctgcggacaacaacaacagtgattactcgtggactggagctaccaagtatcacctcaatggaagagactctctggtgaatccgggcacagccatggccagccacaaggacgatgaagaaaagtattttcctcagagcggggttctcatcttcggaaaacaagactcgggaaaaactaatgtggacattgaaaaggtcatgattacagacgaagaggaaatcaggaccaccaatcccgtggctacggagcagtatggttctgtatctaccaatctccagagcggcaacacacaagcagctacctcagatgtcaacacacaaggcgttcttccaggcatggtctggcaggacagagacgtgtacctgcagggacccatctgggcaaagattccacacacggacggacattttcacccttctcctcttatgggaggatttggactgaagcaccctcccccgcagattctcatcaagaataccccggtacctgcgaatccttctaccgccttcagcgcggcaaagtttgcttccttcatcacacagtactccacggggcaggtcagcgtggagatcgagtgggagctgcagaaagagaacagcgaacgctggaaccccgagatccagtatacctccaactacaacaagtctgttaatgtggactttactgcggacactaatggcgtgtattcagagcctcgccccattggcacaaggtacctgactcgtaatctgtaa

SEQ ID NO: 983 - DNA, 2208 bp, Artificial Sequence
  Synthetic Polynucleotide
atggctgccgatggttatcttccagattggctcgaggacactctctctgaaggaataagacagtggtggaagctcaaacctggcccaccaccgccaaagcccgcagagcggcataaggacgacagcaggggtcttgtgcttcctgggtacaagtacctcggacccttcaacggactcgacaaaggagagccggtcaacgaggcagacgccgcggccctcgagcacgacaaggcctacgaccggcagctcgacagcggagacaacccgtacctcaagtacaaccacgccgacgcggagtttcaggagcgccttaaagaagatacgtcttttgggggcaacctcgcaagagcagtattccaggcgaaaaagagggttcttgaacctctgggcctggttgaggagcctgttaagacggctccgggaaaaaagaggccggtagagcactctcctgcggagccagattcctcctccggaactggaaagtcgggccaacagcctgcaagaaagagattgaattttggtcagactggagacgcagactccgtacctgacccccagcctctcggacagccaccagcagccccctctggtctgggaactaatacgatggcttcaggcagtggcgcaccaatggcagacaataacgagggcgccgacggagtgggtaattcctcgggaaattggcattgcgattccacatggatgggcgacagagtcatcaccaccagcacccgcgcctgggctctgcccacctacaacaaccatctgtacaagcaaatttccagccagtctggagccagcaacgacaaccactactttggctacagcaccccttgggggtattttgacttcaacagattccactgccacttctccccacgtgactggcaaagactcatcaacaacaattggggattccggcccaaaagactcaacttcaagctctttaacattcaagtcaaggaggtcacgcagaatgacggtacgacgacgattgccaataaccttaccagcacggttcaggtgtttactgactcggagtaccagctcccgtacgtcctcggctcggcgcatcaaggatgcctcccgccgttcccagcagacgtcctcatggtgccacagtatggatacctcaccctgaacaacgggagtcaggcggtaggacgctcttcattttactgcccggagtaccttccttctcagatgctgcgtaccggaaacaactttaccttcagctacacctttgaggacgttccttttcacagcagctacgctcacagccagagtttggaccgtctcatgaatcctctcatcgaccagtacctgtattacttgagcagaacaaacactccaagcggaaccactacgcagtccaggcttcagttttctcaagccggagcgagtgacattcgggaccagtctaggaactggcttcctggaccctgttaccgccagcagcgagtatcaaagacagctgcggacaacaacaacagtgattactcgtggactggagctaccaagtatcacctcaatggaagagactctctggtgaatccgggcacagccatggccagccacaaggacgatgaagaaaagtattttcctcagagcggggttctcatcttcggaaaacaagactcgggaaaaactaatgtggacattgaaaaggtcatgattacagacgaagaggaaatcaggaccaccaatcccgtggctacggagcagtatggttctgtatctaccaatctccagagcggcaacacacaagcagctacctcagatgtcaacacacaaggcgttcttccaggcatggtctggcaggacagagacgtgtacctgcagggacccatctgggcaaagattccacacacggacggacattttcacccttctcctcttatgggaggatttggactgaagcaccctcccccgcagattctcatcaagaataccccggtacctgcgaatccttctaccgccttcagcgcggcaaagtttgcttccttcatcacacagtactccacggggcaggtcagcgtggagatcgagtgggagctgcagaaagagaacagcgaacgctggaaccccgagatccagtatacctccaactacaacaagtctgttaatgtggactttactgtggacactaatggcgtgtattcagagcctcgccccattggcacaaggtacctgactcgtaatctgtaa

SEQ ID NO: 984 - DNA, 2208 bp, Artificial Sequence
  Synthetic Polynucleotide
atggctgccgatggttatcttccagattggctcgaggacactctctctgaaggaataagacagtggtggaagctcaaacctggcccaccaccgccaaagcccgcagagcggcataaggacgacagcaggggtcttgtgcttcctgggtacaagtacctcggacccttcaacggactcgacaaaggagagccggtcaacgaggcagacgccgcggccctcgagcacgacaaggcctacgaccggcagctcgacagcggagacaacccgtacctcaagtacaaccacgccgacgcggagtttcaggagcgccttaaagaagatacgtcttttgggggcaacctcgcaagagcagtattccaggcgaaaaagagggttcttgaacctctgggcctggttgaggagcctgttaagacggctccgggaaaaaagaggccggtagagcactctcctgcggagccagattcctcctccggaactggaaagtcgggccaacagcctgcaagaaagagattgaattttggtcagactggagacgcagactccgtacctgacccccagcctctcggacagccaccagcagccccctctggtctgggaactaatacgatggcttcaggcagtggcgcaccaatggcagacaataacgagggcgccgacggagtgggtaattcctcgggaaattggcattgcgattccacatggatgggcgacagagtcatcaccaccagcacccgcacctgggctctgcccacctacaacaaccatctgtacaagcaaatttccagccagtctggagccagcaacgacaaccactactttggctacagcaccccttgggggtattttgacttcaacagattccactgccacttctccccacgtgactggcaaagactcatcaacaacaattggggattccggcccaaaagactcaacttcaagctctttaacattcaagtcaaggaggtcacgcagaatgacggtacgacgacgattgccaataaccttaccagcacggttcaggtgtttactgactcggagtaccagctcccgtacgtcctcggctcggcgcatcaaggatgcctcccgccgttcccagcagacgtcttcatggtgccacagtatggatacctcaccctgaacaacgggagtcaggcggtaggacgctcttcattttactgcccggagtaccttccttctcagatgctgcgtaccggaaacaactttaccttcagctacacctttgaggacgttccttttcacagcagctacgctcacagccagagtttggaccgtctcatgaatcctctcatcgaccagtacctgtattacttgagcagaacaaacactccaagcggaaccactacgcagtccaggcttcagttttctcaagccggagcgagtgacattcgggaccagtctaggaactggcttcctggaccctgttaccgccagcagcgagtatcaaagacagctgcggacaacaacaacagtgattactcgtggactggagctaccaagtatcacctcaatggaagagactctctggtgaatccgggcacagccacggccagccacaaggacgatgaagaaaagtattttcctcagagcggggttctcatcttcggaaaacaagactcgggaaaaactaatgtggacattgaaaaggtcatgattacagacgaagaggaaatcaggaccaccaatcccgtggctacggagcagtatggttctgtatctaccaatctccagagcggcaacacacaagcagctacctcagatgtcaacacacaaggcgttcttccaggcatggtctggcaggacagagacgtgtacctgcagggacccatctgggcaaagattccacacacggacggacattttcacccttctcctcttatgggaggatttggactgaagcaccctcccccgcagattctcatcaagaataccccggtacctgcgaatccttctaccgccttcagcgcggcaaagtttgcttccttcatcacacagtactccacggggcaggtcagcgtggagatcgagtgggagctgcagaaagagaacagcgaacgctggaaccccgagatccagtatacctccaactacaacaagtctgttaatgtggactttactgtggacactaatggcgtgtattcagagcctcgccccattggcacaaggtacctgactcgtaatctgtaa

SEQ ID NO: 985 - DNA, 2205 bp, Artificial Sequence
  Synthetic Polynucleotide
atggctgccgatggttatcttccagattggctcgaggacactctctctgaaggaataagacagtggtggaagctcaaacctggcccaccaccgccaaagcccgcagagcggcataaggacgacagcaggggtcttgtgcttcctgggtacaagtacctcggacccttcaacggactcgacaaaggagagccggtcaacgaggcagacgccgcggccctcgagcacgacaaggcctacgaccggcagctcgacagcggagacaacccgtacctcaagtacaaccacgccgacgcggagtttcaggagcgccttaaagaagatacgtcttttgggggcaacctcgcaagagcagtattccaggcgaaaaagagggttcttgaacctctgggcctggttgaggagcctgttaagacggctccgggaaaaaagaggccggtagagcactctcctgcggagccagattcctcctccggaactggaaagtcgggccaacagcctgcaagaaagagattgaattttggtcagactggagacgcagactccgtacctgacccccagcctctcggacagccaccagcagccccctctggtctgggaactaatacgatggcttcaggcagtggcgcaccaatggcagacaataacgagggcgccgacggagtgggtaattcctcgggaaattggcattgcgattccacatggatgggcgacagagtcatcaccaccagcacccgcacctgggctctgcccacctacaacaaccatctgtacaagcaaatttccagccagtctggagccagcaacgacaaccactactttggctacagcaccccttgggggtattttgacttcaacagattccactgccacttctccccacgtgactggcaaagactcatcaacaacaattggggattccggcccaaaagactcaacttcaagctctttaacattcaagtcaaggaggtcacgcagaatgacggtacgacgacgattgccaataaccttaccagcacggttcaggtgtttactgactcggagtaccagctcccgtacgtcctcggctcggcgcatcaaggatgcctcccgccgttcccagcagacgtcttcatggtgccacagtatggatacctcaccctgaacaacgggagtcaggcggtaggacgctcttcattttactgcccggagtaccttccttctcagatgctgcgtaccggaaacaactttaccttcagctacacctttgaggacgttccttttcacagcagctacgctcacagccagagtttggaccgtctcatgaatcctctcatcgaccagtacctgtattacttgagcagaacaaacactccaagcggaaccactacgcagtccaggcttcagttttctcaagccggagcgagtgacattcgggaccagtctaggaactggcttcctggaccctgttaccgccagcagcgagtatcaaagacagctgcggacaacaacagtgattactcgtggactggagctaccaagtatcacctcaatggaagagactctctggtgaatccgggcacagccatggccagccacaaggacgatgaagaaaagtattttcctcagagcggggttctcatcttcggaaaacaagactcgggaaaaactaatgtggacattgaaaaggtcatgattacagacgaagaggaaatcaggaccaccaatcccgtggctacggagcagtatggttctgtatctaccaatctccagagcggcaacacacaagcagctacctcagatgtcaacacacaaggcgttcttccaggcatggtctggcaggacagagacgtgtacctgcagggacccatctgggcaaagattccacacacggacggacattttcacccttctcctcttatgggaggatttggactgaagcaccctcccccgcagattctcatcaagaataccccggtacctgcgaatccttctaccgccttcagcgcggcaaagtttgcttccttcatcacacagtactccacggggcaggtcagcgtggagatcgagtgggagctgcagaaagagaacagcgaacgctggaaccccgagatccagtatacctccaactacaacaagtctgttaatgtggactttactgtggacactaatggcgtgtattcagagcctcgccccattggcacaaggtacctgactcgtaatctgtaa

SEQ ID NO: 986 - DNA, 2208 bp, Artificial Sequence
  Synthetic Polynucleotide
atggctgccgatggttatcttccagattggctcgaggacactctctctgaaggaataagacagtggtggaagctcaaacctggcccaccaccgccaaagcccgcagagcggcataaggacgacagcaggggtcttgtgcttcctgggtacaagtacctcggacccttcaacggactcgacaaaggagagccggtcaacgaggcagacgccgcggccctcgagcacgacaaggcctacgaccggcagctcgacagcggagacaacccgtacctcaagtacaaccacgccgacgcggagtttcaggagcgccttaaagaagatacgtcttttgggggcaacctcgcaagagcagtattccaggcgaaaaagagggttcttgaccctctgggcctggttgaggagcctgttaagacggctccgggaaaaaagaggccggtagagcactctcctgcggagccagattcctcctccggaactggaaagtcgggccaacagcctgcaagaaagagattgaattttggtcagactggagacgcagactccgtacctgacccccagcctctcggacagccaccagcagccccctctggtctgggaactaatacgatggcttcaggcagtggcgcaccaatggcagacaataacgagggcgccgacggagtgggtaattcctcgggaaattggcattgcgattccacatggatgggcgacagagtcatcaccaccagcacccgcacctgggctctgcccacctacaacaaccatctgtacaagcaaatttccagccagtctggagccagcaacgacaaccactactttggctacagcaccccttgggggtattttgacttcaacagattccactgccacttctccccacgtgactggcaaagactcatcaacaacaattggggattccggcccaaaagactcaacttcaagctctttaacattcaagtcaaggaggtcacgcagaatgacggtacgacgacgattgccaataaccttaccagcacggttcaggtgtttactgactcggagtaccagctcccgtacgtcctcggctcggcgcatcaaggatgcctcccgccgttcccagcagacgtcttcatggtgccacagtatggatacctcaccctgaacaacgggagtcaggcggtaggacgctcttcattttactgcccggagtaccttccttctcagatgctgcgtaccggaaacaactttaccttcagctacacctttgaggacgttccttttcacagcagctacgctcacagccagagtttggaccgtctcatgaatcctctcatcgaccagtacctgtattacttgagcagaacaaacactccaagcggaaccactacgcagtccaggcttcagttttctcaagccggagcgagtgacattcgggaccagtctaggaactggcttcctggaccctgttaccgccagcagcgagtatcaaagacagctgcggacaacaacaacagtgattactcgtggactggagctaccaagtatcacctcaatggaagagactctctggtgaatccgggcacagccatggccagccacaaggacgatgaagaaaagtattttcctcagagcggggttctcatcttcggaaaacaagactcgggaaaaactaatgtggacattgaaaaggtcatgattacagacgaagaggaaatcaggaccaccaatcccgtggctacggagcagtatggttctgtatctaccaatctccagagcggcaacacacaagcagctacctcagatgtcaacacacaaggcgttcttccaggcatggtctggcaggacagagacgtgtacctgcagggacccatctgggcaaagattccacacacggacggacattttcacccttctcctcttatgggaggatttggactgaagcaccctcccccgcagattctcatcaagaataccccggtacctgcgaatccttctaccgccttcagcgcggcaaagtttgcttccttcatcacacagtactccacggggcaggtcagcgtggagatcgagtgggagctgcagaaagagaacagcgaacgctggaaccccgagatccagtatacctccaactacaacaagtctgttaatgtggactttactgtggacactaatggcgtgtattcagagcctcgccccattggcacaaggtacctgactcgtaatctgtaa

SEQ ID NO: 987 - DNA, 2208 bp, Artificial Sequence
  Synthetic Polynucleotide
atggctgccgatggttatcttccagattggctcgaggacactctctctgaaggaataagacagtggtggaagctcaaacctggcccaccaccgccaaagcccgcagagcggcataaggacgacagcaggggtcttgtgcttcctgggtacaagtacctcggacccttcaacggactcgacaaaggagagccggtcaacgaggcagacgccgcggccctcgagcacgacaaggcctacgaccggcagctcgacagcggagacaacccgtacctcaagtacaaccacgccgacgcggagtttcaggagcgccttaaagaagatacgtcttttgggggcaacctcgcaagagcagtattccaggcgaaaaagagggttcttgaacctctgggcctggttgaggagcctgttaagacggctccgggaaaaaagaggccggtagagcactctcctgcggagccagattcctcctccggaactggaaagtcgggccaacagcctgcaagaaagagattgaattttggtcagactggagacgcagactccgtacctgacccccagcctctcggacagccaccagcagccccctctggtctgggaactaatacgatggcttcaggcagtggcgcaccaatggcagacaataacgagggcgccgacggagtgggtaattcctcgggaaattggcattgcgattccacatggatgggcgacagagtcatcaccaccagcacccgcacctgggctctgcccacctacaacaaccatctgtacaagcaaatttccagccagtctggagccagcaacgacaaccactactttggctacagcaccccttgggggtattttgacttcaacagattccactgccacttctccccacgtgactggcaaagactcatcaacaacaattggggattccggcccaaaagactcaacttcaagctctttaacattcaagtcaaggaggtcacgcagaatgacggtacgacgacgattgccaataaccttaccagcacggttcaggtgtttactgactcggagtaccagctcccgtacgtcctcggctcggcgcatcaaggatgcctcccgccgttcccagcagacgtcttcatggtgccacagtatggatacctcaccctgaacaacgggagtcaggcggtaggacgctcttcattttactgcccggagtaccttccttctcagatgctgcgtaccggaaacaactttaccttcagctacacctttgaggacgttccttttcacagcagctacgctcacagccagagtttggaccgtctcatgaatcctctcatcgaccagtacctgtattacttgagcagaacaaacactccaagcggaaccactacgcagtccaggcttcagttttctcaagccggagcgagtgacattcgggaccagtctaggaactggcttcctggaccctgttaccgccagcagcgagtatcaaagacagctgcggacaacaacaacagtgattactcgtggactggagctaccaagtatcacctcaatggaagagactctctggtgaatccgggcacagccatggccagccacaaggacgatgaagaaaagtattttcctcagagcggggttctcatctttcggaaacaagactcgggaaaaactaatgtggacattgaaaaggtcatgattacagacgaagaggaaatcaggaccaccaatcccgtggctacggagcagtatggttctgtatctaccaatctccagagcggcaacacacaagcagctacctcagatgtcaacacacaaggcgttcttccaggcatggtctggcaggacagagacgtgtacctgcagggacccatctgggcaaagattccacacacggacggacattttcacccttctcctcttatgggaggatttggactgaagcaccctcccccgcagattctcatcaagaataccccggtacctgcgaatccttctaccgccttcagcgcggcaaagtttgcttccttcatcacacagtactccacggggcaggtcagcgtggagatcgagtgggagctgcagaaagagaacagcgaacgctggaaccccgagatccagtatacctccaactacaacaagtctgttaatgtggactttactgtggacactaatggcgtgtattcagagcctcgccccattggcacaaggtacctgactcgtaatctgtaa

SEQ ID NO: 988 - DNA, 2208 bp, Artificial Sequence
  Synthetic Polynucleotide
atggctgccgatggttatcttccagattggctcgaggacactctctctgaaggaataagacagtggtggaagctcaaacctggcccaccaccgccaaagcccgcagagcggcataaggacgacagcaggggtcttgtgcttcctgggtacaagtacctcggacccttcaacggactcgacaaaggagagccggtcaacgaggcagacgccgcggccctcgagcacgacaaggcctacgaccggcagctcgacagcggagacaacccgtacctcaagtacaaccacgccgacgcggagtttcaggagcgccttaaagaagatacgtcttttgggggcaacctcgcaagagcagtattccaggcgaaaaagagggttcttgaacctctgggcctggttgaggagcctgttaagacggctccgggaaaaaagaggccggtagagcactctcctgcggagccagattcctcctccggaactggaaagtcgggccaacagcctgcaagaaagagattgaattttggtcagactggagacgcagactccgtacctgacccccagcctctcggacagccaccagcagccccctctggtctgggaactaatacgatggcttcaggcagtggcgcaccaatggcagacaataacgagggcgccgacggagtgggtaattcctcgggaaattggcattgcgattccacatggatgggcgacagagtcatcaccaccagcacccgcacctgggctctgcccacctacaacaaccatctgtacaagcaaatttccagccagtctggagccagcaacgacaaccactactttggctacagcaccccttgggggtattttgacttcaacagattccactgccacttctccccacgtgactggcaaagactcatcaacaacaattggggattccggcccaaaagactcaacttcaagctctttaacattcaagtcaaggaggtcacgcagaatgacggtacgacgacgattgccaataaccttaccagcacggttcaggtgtttactgactcggagtaccagctcccgtacgtcctcggctcggcgcatcaaggatgcctcccgccgttcccagcagacgtcctcatggtgccacagtatggatacctcaccctgaacaacgggagtcaggcggtaggacgctcttcattttactgcccggagtaccttccttctcagatgctgcgtaccggaaacaactttaccttcagctacacctttgaggacgttccttttcacagcagctacgctcacagccagagtttggaccgtctcatgaatcctctcatcgaccagtacctgtattacttgagcagaacaaacactccaagcggaaccactacgcagtccaggcttcagttttctcaagccggagcgagtgacattcgggaccagtctaggaactggcttcctggaccctgttaccgccagcagcgagtatcaaagacagctgcggacaacaacaacagtgattactcgtggactggagctaccaagtatcacctcaatggaagagactctctggtgaatccgggcacagccatggccagccacaaggacgatgaagaaaagtattttcctcagagcggggttctcatcttccggaaacaagactcgggaaaaactaatgtggacattgaaaaggtcatgattacagacgaagaggaaatcaggaccaccaatcccgtggctacggagcagtatggttctgtatctaccaatctccagagcggcaacacacaagcagctacctcagatgtcaacacacaaggcgttcttccaggcatggtctggcaggacagagacgtgtacctgcagggacccatctgggcaaagattccacacacggacggacattttcacccttctcctcttatgggaggatttggactgaagcaccctcccccgcagattctcatcaagaataccccggtacctgcgaatccttctaccgccttcagcgcggcaaagtttgcttccttcatcacacagtactccacggggcaggtcagcgtggagatcgagtgggagctgcagaaagagaacagcgaacgctggaaccccgagatccagtatacctccaactacaacaagtctgttaatgtggactttactgtggacactaatggcgtgtattcagagcctcgccccattggcacaaggtacctgactcgtaatctgtaa

SEQ ID NO: 989 - DNA, 2208 bp, Artificial Sequence
  Synthetic Polynucleotide
atggctgccgatggttatcttccagattggctcgaggacactctctctgaaggaataagacagtggtggaagctcaaacctggcccaccaccgccaaagcccgcagagcggcataaggacgacagcaggggtcttgtgcttcctgggtacaagtacctcggacccttcaacggactcgacaaaggagagccggtcaacgaggcagacgccgcggccctcgagcacgacaaggcctacgaccggcagctcgacagcggagacaacccgtacctcaagtacaaccacgccgacgcggagtttcaggagcgccttaaagaagatacgtcttttgggggcaacctcgcaagagcagtattccaggcgaaaaagagggttcttgaacctctgggcctggttgaggagcctgttaagacggctccgggaaaaaagaggccggtagagcactctcctgcggagccagattcctcctccggaactggaaagtcgggccaacagcctgcaagaaagagattgaattttggtcagactggagacgcagactccgtacctgacccccagcctctcggacagccaccagcagccccctctggtctgggaactaatacgatggcttcaggcagtggcgcaccaatggcagacaataacgagggcgccgacggagtgggtaattcctcgggaaattggcattgcgattccacatggatgggcgacagagtcatcaccaccagcacccgcacctgggctctgcccacctacaacaaccatctgtacaagcaaatttccagccagtctggagccagcaacgacaaccactactttggctacagcaccccttgggggtattttgacttcaacagattccactgccacttctccccacgtgactggcaaagactcatcaacaacaattggggattccggcccaaaagactcaacttcaagctctttaacattcaagtcaaggaggtcacgcagaatgacggtacgacgacgattgccaataaccttaccagcacggttcaggtgtttactgactcggagtaccagctcccgtacgtcctcggctcggcgcatcaaggatgcctcccgccgttcccagcagacgtcctcatggtgccacagtatggatacctcaccctgaacaacgggagtcaggcggtaggacgctcttcattttactgcccggagtaccttccttctcagatgctgcgtaccggaaacaactttaccttcagctacacctttgaggacgttccttttcacagcagctacgctcacagccagagtttggaccgtctcatgaatcctctcatcgaccagtacctgtattacttgagcagaacaaacactccaagcggaaccactacgcagtccaggcttcagttttctcaagccggagcgagtgacattcgggaccagtctaggaactggcttcctggaccctgttaccgccagcagcgagtatcaaagacagctgcggacaacaacaacagtgattactcgtggactggagctaccaagtatcacctcaatggaagagactctctggtgaatccgggcacagccatggccagccacaaggacgatgaagaaaagtattttcctcagagcggggttctcatcttcggaaaacaagactcgggaaaaactaatgtggacattgaaaaggtcatgattacagacgaagaggaaatcaggaccaccaatcccgtggctacggagcagtatggttctgtatctaccaatctccagagcggcaacacacaagcagctacctcagatgtcaacacacaaggcgttcttccaggcatggtctggcaggacagagacgtgtacctgcagggacccatctgggcaaagattccacacacggacggacattttcacccttctcctcttatgggaggatttggactgaagcaccctcccccgcagattctcatcaagaataccccggtacctgcgaatccttctaccgccttcagcgcggcaaagtttgcttccttcatcacacagtactccacggggcaggtcagcgtggagatcgagtgggagctgcagaaagagaacagcgaacgctggaaccccgagatccagtatacctccaactacaacaagtctgttaatgtggactttactgtggacactaatggcgtgtattcagagcctcgccccattggcacaaggtacctgactcgtaatctgtaa

SEQ ID NO: 990 - DNA, 2208 bp, Artificial Sequence
  Synthetic Polynucleotide
atggctgccgatggttatcttccagattggctcgaggacactctctctgaaggaataagacagtggtggaagctcaaacctggcccaccaccgccaaagcccgcagagcggcataaggacgacagcaggggtcttgtgcttcctgggtacaagtacctcggacccttcaacggactcgacaaaggagagccggtcaacgaggcagacgccgcggccctcgagcacgacaaggcctacgaccggcagctcgacagcggagacaacccgtacctcaagtacaaccacgccgacgcggagtttcaggagcgccttaaagaagatacgtcttttgggggcaacctcgcaagagcagtattccaggcgaaaaagagggttcttgaacctctgggcctggttgaggagcctgttaagacggctccgggaaaaaagaggccggtagagcactctcctgcggagccagattcctcctccggaactggaaagtcgggccaacagcctgcaagaaagagattgaattttggtcagactggagacgcagactccgtacctgacccccagcctctcggacagccaccagcagccccctctggtctgggaactaatacgatggcttcaggcagtggcgcaccaatggcagacaataacgagggcgccgacggagtgggtaattcctcgggaaattggcattgcgattccacatggatgggcgacagagtcatcaccaccagcacccgcacctgggctctgcccacctacaacaaccatctgtacaagcaaatttccagccagtctggagccagcaacgacaaccactactttggctacagcaccccttgggggtattttgacttcaacagattccactgccacttctccccacgtgactggcaaagactcatcaacaacaattggggattccggcccaaaagactcaacttcaagctctttaacattcaagtcaaggaggtcacgcagaatgacggtacgacgacgattgccaataaccttaccagcacggttcaggtgtttactgactcggagtaccagctcccgtacgtcctcggctcggcgcatcaaggatgcctcccgccgttcccagcagacgtcttcatggtgccacagtatggatacctcaccctgaacaacgggagtcaggcggtaggacgctcttcattttactgcccggagtaccttccttctcagatgctgcgtaccggaaacaactttaccttcagctacacctttgaggacgttccttttcacagcagctacgctcacagccagagtttggaccgtctcatgaatcctctcatcgaccagtacctgtattacttgagcagaacaaacactccaagcggaaccactacgcagtccaggcttcagttttctcaagccggagcgagtgacattcgggaccagtctaggaactggcttcctggaccctgttaccgccagcagcgagtatcaaagacagctgcggacaacaacaacagtgattactcgtggactggagctaccaagtatcacctcaatggaagagactctctggtgaatccgggcacagccatggccagccacaaggacgatgaagaaaagtattttcctcagagcggggttctcatcttcggaaaacaagactcgggaaaaactaatgtggacattgaaaaggtcatgattacagacgaagaggaaatcaggaccaccaatcccgtggctacggagcagtatggttctgtatctaccaatctccagagcggcaacacacaagcagctacctcagatgtcaacacacaaggcgttcttccaggcatggtctggcaggacagagacgtgtacctgcagggacccatctgggcaaagattccacacacggacggacattttcacccttctcctcttatgggaggatttggactgaagcaccctcccccgcagattctcatcaagaataccccggtacctgcgaatccttctaccgccttcagcgcggcaaagtttgcttccttcatcacacagtactccacggggcaggtcagcgtggagatcgagtgggagctgcagaaagagaacagcgaacgctggaaccccgagatccagtatacctccaactacaacaagtctgttaatgtggactttactgtggacactaatggcgtgtattcagagcctcgccccattggcacaaggtacctgactcgtaatctgtaa

SEQ ID NO: 991 - DNA, 2208 bp, Artificial Sequence
  Synthetic Polynucleotide
atggctgccgatggttatcttccagattggctcgaggacactctctctgaaggaataagacagtggtggaagctcaaacctggcccaccaccgccaaagcccgcagagcggcataaggacgacagcaggggtcttgtgcttcctgggtacaagtacctcggacccttcaacggactcgacaaaggagagccggtcaacgaggcagacgccgcggccctcgagcacgacaaggcctacgaccggcagctcgacagcggagacaacccgtacctcaagtacaaccacgccgacgcggagtttcaggagcgccttaaagaagatacgtcttttgggggcaacctcgcaagagcagtattccaggcgaaaaagagggttcttgaacctctgggcctggttgaggagcctgttaagacggctccgggaaaaaagaggccggtagagcactctcctgcggagccagattcctcctccggaactggaaagtcgggccaacagcctgcaagaaagagattgaattttggtcagactggagacgcagactccgtacctgacccccagcctctcggacagccaccagcagccccctctggtctgggaactaatacgatggcttcaggcagtggcgcaccaatggcagacaataacgagggcgccgacggagtgggtaattcctcgggaaattggcattgcgattccacatggatgggcgacagagtcatcaccaccagcacccgcacctgggctctgcccacctacaacaaccatctgtacaagcaaatttccagccagtctggagccagcaacgacaaccactactttggctacagcaccccttgggggtattttgacttcaacagattccactgccacttctccccacgtgactggcaaagactcatcaacaacaattggggattccggcccaaaagactcaacttcaagctctttaacattcaagtcaaggaggtcacgcagaatgacggtacgacgacgattgccaataaccttaccagcacggttcaggtgtttactgactcggagtaccagctcccgtacgtcctcggctcggcgcatcaaggatgcctcccgccgttcccagcagacgtcctcatggtgccacagtatggatacctcaccctgaacaacgggagtcaggcggtaggacgctcttcattttactgcccggagtaccttccttctcagatgctgcgtaccggaaacaactttaccttcagctacacctttgaggacgttccttttcacagcagctacgctcacagccagagtttggaccgtctcatgaatcctctcatcgaccagtacctgtattacttgagcagaacaaacactccaagcggaaccactacgcagtccaggcttcagttttctcaagccggagcgagtgacattcgggaccagtctaggaactggcttcctggaccctgttaccgccagcagcgagtatcaaagacagctgcggacaacaacaacagtgattactcgtggactggagctaccaagtatcacctcaatggaagagactctctggtgaatccgggcacagccacggccagccacaaggacgatgaagaaaagtattttcctcagagcggggttctcatcttcggaaaacaagactcgggaaaaactaatgtggacattgaaaaggtcatgattacagacgaagaggaaatcaggaccaccaatcccgtggctacggagcagtatggttctgtatctaccaatctccagagcggcaacacacaagcagctacctcagatgtcaacacacaaggcgttcttccaggcatggtctggcaggacagagacgtgtacctgcagggacccatctgggcaaagattccacacacggacggacattttcacccttctcctcttatgggaggatttggactgaagcaccctcccccgcagattctcatcaagaataccccggtacctgcgaatccttctaccgccttcagcgcggcaaagtttgcttccttcatcacacagtactccacggggcaggtcagcgtggagatcgagtgggagctgcagaaagagaacagcgaacgctggaaccccgagatccagtatacctccaactacaacaagtctgttaatgtggactttactgtggacactaatggcgtgtattcagagcctcgccccattggcacaaggtacctgactcgtaatctgtaa

SEQ ID NO: 992 - DNA, 2208 bp, Artificial Sequence
  Synthetic Polynucleotide
atggctgccgatggttatcttccagattggctcgaggacactctctctgaaggaataagacagtggtggaagctcaaacctggcccaccaccgccaaagcccgcagagcggcataaggacgacagcaggggtcttgtgcttcctgggtacaagtacctcggacccttcaacggactcgacaaaggagagccggtcaacgaggcagacgccgcggccctcgagcacgacaaggcctacgaccggcagctcgacagcggagacaacccgtacctcaagtacaaccacgccgacgcggagtttcaggagcgccttaaagaagatacgtcttttgggggcaacctcgcaagagcagtattccaggcgaaaaagagggttcttgaacctctgggcctggttgaggagcctgttaagacggctccgggaaaaaagaggccggtagagcactctcctgcggagccagattcctcctccggaactggaaagtcgggccaacagcctgcaagaaagagattgaattttggtcagactggagacgcagactccgtacctgacccccagcctctcggacagccaccagcagccccctctggtctgggaactaatacgatggcttcaggcagtggcgcaccaatggcagacaataacgagggcgccgacggagtgggtaattcctcgggaaattggcattgcgattccacatggatgggcgacagagtcatcaccaccagcacccgcacctgggctctgcccacctacaacaaccatctgtacaagcaaatttccagccagtctggagccagcaacgacaaccactactttggctacagcaccccttgggggtattttgacttcaacagattccactgccacttctccccacgtgactggcaaagactcatcaacaacaattggggattccggcccaaaagactcaacttcaagctctttaacattcaagtcaaggaggtcacgcagaatgacggtacgacgacgattgccaataaccttaccagcacggttcaggtgtttactgactcggagtaccagctcccgtacgtcctcggctcggcgcatcaaggatgcctcccgccgttcccagcagacgtcttcatggtgccacagtatggatacctcaccctgaacaacgggagtcaggcggtaggacgctcttcattttactgcccggagtaccttccttctcagatgctgcgtaccggaaacaactttaccttcagctacacctttgaggacgttccttttcacagcagctacgctcacagccagagtttggaccgtctcatgaatcctctcatcgaccagtacctgtattacttgagcagaacaaacactccaagcggaaccactacgcagtccaggcttcagttttctcaagccggagcgagtgacattcgggaccagtctaggaactggcttcctggaccctgttaccgccagcagcgagtatcaaagacagctgcggacaacaacaacagtgattactcgtggactggagctaccaagtatcacctcaatggaagagactctctggtgaatccgggcacagccatggccagccacaaggacgatggagaaaagtattttcctcagagcggggttctcatcttcggaaaacaagactcgggaaaaactaatgtggacattgaaaaggtcatgattacagacgaagaggaaatcaggaccaccaatcccgtggctacggagcagtatggttctgtatctaccaatctccagagcggcaacacacaagcagctacctcagatgtcaacacacaaggcgttcttccaggcatggtctggcaggacagagacgtgtacctgcagggacccatctgggcaaagattccacacacggacggacattttcacccttctcctcttatgggaggatttggactgaagcaccctcccccgcagattctcatcaagaataccccggtacctgcgaatccttctaccgccttcagcgcggcaaagtttgcttccttcatcacacagtactccacggggcaggtcagcgtggagatcgagtgggagctgcagaaagagaacagcgaacgctggaaccccgagatccagtatacctccaactacaacaagtctgttaatgtggaccttactgtggacactaatggcgtgtattcagagcctcgccccattggcacaaggtacctgactcgtaatctgtaa

SEQ ID NO: 993 - DNA, 2208 bp, Artificial Sequence
  Synthetic Polynucleotide
atggctgccgatggttatcttccagattggctcgaggacactctctctgaaggaataagacagtggtggaagctcaaacctggcccaccaccgccaaagcccgcagagcggcataaggacgacagcaggggtcttgtgcttcctgggtacaagtacctcggacccttcaacggactcgacaaaggagagccggtcaacgaggcagacgccgcggccctcgagcacgacaaggcctacgaccggcagctcgacagcggagacaacccgtacctcaagtacaaccacgccgacgcggagtttcaggagcgccttaaagaagatacgtcttttgggggcaacctcgcaagagcagtattccaggcgaaaaagagggttcttgaacctctgggcctggttgaggagcctgttaagacggctccgggaaaaaaggggccggtagagcactctcctgcggagccagattcctcctccggaactggaaagtcgggccaacagcctgcaagaaagagattgaattttggtcagactggagacgcagactccgtacctgacccccagcctctcggacagccaccagcagccccctctggtctgggaactaatacgatggcttcaggcagtggcgcaccaatggcagacaataacgagggcgccgacggagtgggtaattcctcgggaaattggcattgcgattccacatggatgggcgacagagtcatcaccaccagcacccgcacctgggctctgcccacctacaacaaccatctgtacaagcaaatttccagccagtctggagccagcaacgacaaccactactttggctacagcaccccttgggggtattttgacttcaacagattccactgccacttctccccacgtgactggcaaagactcatcaacaacaattggggattccggcccaaaagactcaacttcaagctctttaacattcaagtcaaggaggtcacgcagaatgacggtacgacgacgattgccaataaccttaccagcacggttcaggtgtttactgactcggagtaccagctcccgtacgtcctcggctcggcgcatcaaggatgcctcccgccgttcccagcagacgtcttcatggtgccacagtatggatacctcaccctgaacaacgggagtcaggcggtaggacgctcttcattttactgcctggagtactttccttctcagatgctgcgtaccggaaacaactttaccttcagctacacctttgaggacgttccttttcacagcagctacgctcacagccagagtttggaccgtctcatgaatcctctcatcgaccagtacctgtattacttgagcagaacaaacactccaagcggaaccactacgcagtccaggcttcggttttctcaagccggagcgagtgacattcgggaccagtctaggaactggcttcctggaccctgttaccgccagcagcgagtatcaaagacagctgcggacaacaacaacagtgattactcgtggactggagctaccaagtatcacctcaatggaagagactctctggtgaatccgggcacagccatggccagccacaaggacgatgaagaaaagtattttcctcagagcggggttctcatcttcggaaaacaagactcgggaaaaactaatgtggacattgaaagggtcatgattacagacgaagaggaaatcaggaccaccaatcccgtggctacggagcagtatggttctgtatctaccaatctccagagcggcaacacacaagcagctacctcagatgtcaacacacaaggcgttcttccaggcatggtctggcaggacagagacgtgtacctgcagggacccatctgggcaaagattccacacacggacggacattttcacccttctcctcttatgggaggatttggactgaagcaccctcccccgcagattctcatcaagaataccccggtacctgcgaatccttctaccaccttcagcgcggcaaagtttgcttccttcatcacacagtactccacggggcaggtcagcgtggagatcgagtgggagctgcagaaagagaacagcaaacgctggaaccccgagatccagtatacctccaactacaacaagtctgttaatgtggactttactgtggacactaatggcgtgtattcagagcctcgccccattggcacaagatacctgactcgtaatctgtaa

SEQ ID NO: 994 - DNA, 2208 bp, Artificial Sequence
  Synthetic Polynucleotide
atggctgccgatggttatcttccagattggctcgaggacactctctctgaaggaataagacagtggtggaagctcaaacctggcccaccaccgccaaagcccgcagagcggcataaggacgacagcaggggtcttgtgcttcctgggtacaagtacctcggacccttcaacggactcgacaaaggagagccggtcaacgaggcagacgccgcggccctcgagcacgacaaggcctacgaccggcagctcgacagcggagacaacccgtacctcaagtacaaccacgccgacgcggagtttcaggagcgccttaaagaagatacgtcttttgggggcaacctcgcaagagcagtattccaggcgaaaaagagggttcttgaacctctgggcctggttgaggagcctgttaagacggctccgggaaaaaagaggccggtagagcactctcctgcggggccagattcctcctccggaactggaaagtcgggccaacagcctgcaagaaagagattgaattttggtcagactggagacgcagactccgtacctgacccccagcctctcggacagccaccagcagccccctctggtctgggaactaatacgatggcttcaggcagtggcgcaccaatggcagacaataacgagggcgccgacggagtgggtaattcctcgggaaattggcattgcgattccacatggatgggcgacagagtcatcaccaccagcacccgcacctgggctctgcccacctacaacaaccatctgtacaagcaaatttccagccagtctggagccagcaacgacaaccactactttggctacagcaccccttgggggtattttgacttcaacagattccactgccacttctccccacgtgactggcaaagactcatcaacaacaattggggattccggcccaaaagactcaacttcgagctctttaacattcaagtcaaggaggtcacgcagaatgacggtacgacgacgattgccaataaccttaccagcacggttcaggtgtttactgactcggagtaccagctcccgtacgtcctcggctcggcgcatcaaggatgcctcccgccgttcccagcagacgtcttcatggtgccacagtatggatacctcaccctgaacaacgggagtcaggcggtaggacgctcttcattttactgcctggagtactttccttctcagatgctgcgtaccggaaacaactttaccttcagctacacctttgaggacgttccttttcacagcagctacgctcacagccagagtttggaccgtctcatgaatcctctcatcgaccagtacctgtattacttgagcagaacaaacactccaagcggaaccactacgcagtccaggcttcagttttctcaagccggagcgagtgacattcgggaccagtctaggaactggcttcctggaccctgttaccgccagcagcgagtatcaaagacagctgcggacaacaacaacagtgattactcgtggactggagctaccaagtatcacctcaatggaagagactctctggtgaatccgggcacagccatggccagccacaaggacgatgaagaaaagtattttcctcagagcggggttctcatcttcggaaaacaagactcgggaaaaactaatgtggacattgaaaaggtcatgattacagacgaagaggaaatcaggaccaccaatcccgtggctacggagcagtatggttctgtatctaccaatctccagagcggcaacacacaagcagctacctcagatgtcaacacacaaggcgttcttccaggcatggtctggcaggacagagacgtgtacctgcagggacccatctgggcaaagattccacacacggacggacactttcacccttctcctcttatgggaggatttggactgaagcaccctcccccgcagattctcatcaagagtaccccggtacctgcgaatccttctaccaccttcagcgcggcaaagtttgcttccttcatcacacagtactccacggggcaggtcagcgtggagatcgagtgggagctgcagaaagagaacagcaaacgctggaaccccgagatccagtatacctccaactacaacaagtctgttaatgtggactttactgtggacactaatggcgtgtattcagatcctcgccccattggcacaagatacctgactcgtaatctgtaa

SEQ ID NO: 995 - DNA, 2208 bp, Artificial Sequence
  Synthetic Polynucleotide
atggctgccgatggttatcttccagattggctcgaggacactctctctgaaggaataagacagtggtggaagctcaaacctggcccaccaccaccaaggcccgcagagcggcatcaggacgacagcaggggtcttgtgcttcctgggtacaagtacctcggacccttcaacggactcgacaaaggagagccggtcaacgaggcagacgctgcggccctcgagcacgacaaggcctacgaccggcagctcgacagcggagacaacccgtacctcaagtacaaccacgccgacgcggagtttcaggagcgtcttaaagaagatacgtcttttgggggcaacctcggacgagcagtcttccaggcgaaaaagagggttcttgaacctctgggcctggttgaggaacctgttaagacggctccgggaaaaaagaggccggtagagcactctcctgcggagccagactcctcctcgggaaccggaaaagcgggccagcagcctgcaagaaagagattgaatttcggtcagactggagacgcagactccgtacctgacccccagcctctcggacagccaccagcagcccccacaagtttgggatctactacaatggctacaggcagtggcgcaccaatggcagacaataacgagggtgccgatggagtgggtaattcctcaggaaattggcattgcgattcccaatggctgggcgacagagtcatcaccaccagcacccgaacctgggccctgcccacctacaacaaccacctctacaagcaaatctccagccaatcaggagcatcgaacgacaaccactactttggctacagcaccccttgggggtattttgacttcaacagattccactgtcacttctccccacgtgactggcaaagactcatcaacaacaactggggattccgacccaagagactcaacttcaagctctttaacattcaagtcaaagaggtcacgcagaatgacggtacgacgacgattgccaataaccttaccagcacggttcaggtgtttactgactcggagtaccagctcccgtacgtcctcggctcggcgcatcaaggatgcctcccgccgtttccagcggacgtcttcatggtcccacagtatggatacctcaccctgaacaacgggagtcaggcggtaggacgctcttcattttactgcctggagtactttccttctcagatgctgcgtaccggaaacaactttaccttcagctacacctttgaggacgttccttttcacagcagctacgctcacagccagagtttggaccgtctcatgaatcctctcatcgaccagtacctgtattacttgagcagaacaaacactccaagcggaaccactacgcagtccaggcttcggttttctcaagccggagcgagtgacattcgggaccagtctaggaactggcttcctggaccctgttaccgccagcagcgagtatcaaagacagctgcggacaacaacaacagtgattactcgtggactggagctaccaagtatcacctcaatggaagagactctctggtgaatccgggcacagccatggccagccacaaggacgatgaagaaaagtattttcctcagagcggggttctcatcttcggaaaacaagactcgggaaaaactaatgtggacattgaaagggtcatgattacagacgaagaggaaatcaggaccaccaatcccgtggctacggagcagtatggttctgtatctaccaatctccagagcggcaacacacaagcagctacctcagatgtcaacacacaaggcgttcttccaggcatggtctggcaggacagagacgtgtacctgcagggacccatctgggcaaagattccacacacggacggacattttcacccttctcctcttatgggaggatttggactgaagcaccctcccccgcagattctcatcaagaataccccggtacctgcgaatccttctaccaccttcagcgcggcaaagtttgcttccttcatcacacagtactccacggggcaggtcagcgtggagatcgagtgggagctgcagaaagagaacagcaaacgctggaaccccgagatccagtatacctccaactacaacaagtctgttaatgtggactttactgtggacactaatggcgtgtattcagagcctcgccccattggcacaagatacctgactcgtaatctgtaa

SEQ ID NO: 996 - DNA, 2208 bp, Artificial Sequence
  Synthetic Polynucleotide
atggctgccgatggttatcttccagattggctcgaggacactctctctgaaggaataagacagtggtggaagctcaaacctggcccaccaccaccaaggcccgcagagcggcatcaggacgacagcaggggtcttgtgcttcctgggtacaagtacctcggacccttcaacggactcgacaaaggagagccggtcaacgaggcagacgctgcggccctcgagcacgacaaggcctacgaccggcagctcgacagcggagacaacccgtacctcaagtacaaccacgccgacgcggagtttcaggagcgtcttaaagaagatacgtcttttgggggcaacctcggacgagcagtcttccaggcgaaaaagagggttcttgaacctctgggcctggttgaggaacctgttaagacggctccgggaaaaaagaggccggtagagcactctcctgcggagccagactcctcctcgggaaccggaaaagcgggccagcagcctgcaagaaagagattgaatttcggtcagactggagacgcagactccgtacctgacccccagcctctcggacagccaccagcagccccctctggtctgggaactaatacgatggcttcaggcagtggcgcaccaatggcagacaataacgagggcgccgacggagtgggtaattcctcgggaaattggcattgcgattccacatggatgggcgacagagtcatcaccaccagcacccgcacctgggctctgcccacctacaacaaccatctgtacaagcaaatttccagccagtctggagccagcaacgacaaccactactttggctacagcaccccttgggggtattttgacttcaacagattccactgccacttctccccacgtgactggcaaagactcatcaacaacaattggggattccggcccaaaagactcaacttcaagctctttaacattcaagtcaaggaggtcacgcagaatgacggtacgacgacgattgccaataaccttaccagcacggttcaggtgtttactgactcggagtaccagctcccgtacgtcctcggctcggcgcatcaaggatgcctcccgccgttcccagcagacgtcttcatggtgccacagtatggatacctcaccctgaacaacgggagtcaggcggtaggacgctcttcattttactgcctggagtactttccttctcagatgctgcgtaccggaaacaactttaccttcagctacacctttgaggacgttccttttcacagcagctacgctcacagccagagtttggaccgtctcatgaatcctctcatcgaccagtacctgtattacttgagcagaacaaacactccaagcggaaccactacgcagtccaggcttcggttttctcaagccggagcgagtgacattcgggaccagtctaggaactggcttcctggaccctgttaccgccagcagcgagtatcaaagacagctgcggacaacaacaacagtgattactcgtggactggagctaccaagtatcacctcaatggaagagactctctggtgaatccgggcacagccatggccagccacaaggacgatgaagaaaagtattttcctcagagcggggttctcatcttcggaaaacaagactcgggaaaaactaatgtggacattgaaagggtcatgattacagacgaagaggaaatcaggaccaccaatcccgtggctacggagcagtatggttctgtatctaccaatctccagagcggcaacacacaagcagctacctcagatgtcaacacacaaggcgttcttccaggcatggtctggcaggacagagacgtgtacctgcagggacccatctgggcaaagattccacacacggacggacattttcacccttctcctcttatgggaggatttggactgaagcaccctcccccgcagattctcatcaagaataccccggtacctgcgaatccttctaccaccttcagcgcggcaaagtttgcttccttcatcacacagtactccacggggcaggtcagcgtggagatcgagtgggagctgcagaaagagaacagcaaacgctggaaccccgagatccagtatacctccaactacaacaagtctgttaatgtggactttactgtggacactaatggcgtgtattcagagcctcgccccattggcacaagatacctgactcgtaatctgtaa

SEQ ID NO: 997 - DNA, 2208 bp, Artificial Sequence
  Synthetic Polynucleotide
atggctgccgatggttatcttccagattggctcgaggacactctctctgaaggaataagacagtggtggaagctcaaacctggcccaccaccgccaaagcccgcagagcggcataaggacgacagcaggggtcttgtgcttcctgggtacaagtacctcggacccttcaacggactcgacaaaggagagccggtcaacgaggcagacgccgcggccctcgagcacgacaaggcctacgaccggcagctcgacagcggagacaacccgtacctcaagtacaaccacgccgacgcggagtttcaggagcgccttaaagaagatacgtcttttgggggcaacctcgcaagagcagtattccaggcgaaaaagagggttcttgaacctctgggcctggttgaggagcctgttaagacggctccgggaaaaaagaggccggtagagcactctcctgcggggccagattcctcctccggaactggaaagtcgggccaacagcctgcaagaaagagattgaattttggtcagactggagacgcagactccgtacctgacccccagcctctcggacagccaccagcagccccctctggtctgggaactaatacgatggcttcaggcagtggcgcaccaatggcagacaataacgagggcgccgacggagtgggtaattcctcgggaaattggcattgcgattccacatggatgggcgacagagtcatcaccaccagcacccgcacctgggctctgcccacctacaacaaccatctgtacaagcaaatttccagccagtctggagccagcaacgacaaccactactttggctacagcaccccttgggggtattttgacttcaacagattccactgccacttctccccacgtgactggcaaagactcatcaacaacaattggggattccggcccaaaagactcaacttcgagctctttaacattcaagtcaaggaggtcacgcagaatgacggtacgacgacgattgccaataaccttaccagcacggttcaggtgtttactgactcggagtaccagctcccgtacgtcctcggctcggcgcatcaaggatgcctcccgccgttcccagcagacgtcttcatggtgccacagtatggatacctcaccctgaacaacgggagtcaggcggtaggacgctcttcattttactgcctggagtactttccttctcagatgctgcgtaccggaaacaactttaccttcagctacacctttgaggacgttccttttcacagcagctacgctcacagccagagtttggaccgtctcatgaatcctctcatcgaccagtacctgtattacttgagcagaacaaacactccaagcggaaccactacgcagtccaggcttcagtttcctcaagccggagcgagtgacattcgggaccagtctaggaactggcttcctggaccctgttaccgccagcagcgagtatcaaagacagctgcggacaacaacaacagtgattactcgtggactggagctaccaagtatcacctcaatggaagagactctctggtgaatccgggcacagccatggccagccacaaggacgatgaagaaaagtattttcctcagagcggggttctcatcttcggaaaacaagactcgggaaaaactaatgtggacattgaaaaggtcatgattacagacgaagaggaaatcaggaccaccaatcccgtggctacggagcagtatggttctgtatctaccaatctccagagcggcaacacacaagcagctacctcagatgtcaacacacaaggcgttcttccaggcatggtctggcaggacagagacgtgtacctgcagggacccatctgggcaaagattccacacacggacggacactttcacccttctcctcttatgggaggatttggactgaagcaccctcccccgcagattctcatcaagagtaccccggtacctgcgaatccttctaccaccttcagcgcggcaaagtttgcttccttcatcacacagtactccacggggcaggtcagcgtggagatcgagtgggagctgcagaaagagaacagcaaacgctggaaccccgagatccagtatacctccaactacaacaagtctgttaatgtggactttactgtggacactaatggcgtgtattcagagcctcgccccattggcacaagatacctgactcgtaatctgtaa

SEQ ID NO: 998 - DNA, 2208 bp, Artificial Sequence
  Synthetic Polynucleotide
atggctgccgatggttatcttccagattggctcgaggacactctctctgaaggaataagacagtggtggaagctcaaacctggcccaccaccaccaaggcccgcagagcggcatcaggacgacagcaggggtcttgtgcttcctgggtacaagtacctcggacccttcaacggactcgacaaaggagagccggtcaacgaggcagacgctgcggccctcgagcacgacaaggcctacgaccggcagctcgacagcggagacaacccgtacctcaagtacaaccacgccgacgcggagtttcaggagcgtcttaaagaagatacgtcttttgggggcaacctcggacgagcagtcttccaggcgaaaaagagggttcttgaacctctgggcctggttgaggaacctgttaagacggctccgggaaaaaagaggccggtagagcactctcctgcggagccagattcctcctccggaactggaaagtcgggccaacagcctgcaagaaagagattgaattttggtcagactggagacgcagactccgtacctgacccccagcctctcggacagccaccagcagccccctctggtctgggaactaatacgatggcttcaggcagtggcgcaccaatggcagacaataacgagggcgccgacggagtgggtaattcctcgggaaattggcattgcgattccacatggatgggcgacagagtcatcaccaccagcacccgcacctgggctctgcccacctacaacaaccatctgtacaagcaaatttccagccagtctggagccagcaacgacaaccactactttggctacagcaccccttgggggtattttgacttcaacagattccactgccacttctccccacgtgactggcaaagactcatcaacaacaattggggattccggcccaaaagactcaacttcaagctctttaacattcaagtcaaggaggtcacgcagaatgacggtacgacgacgattgccaataaccttaccagcacggttcaggtgtttactgactcggagtaccagctcccgtacgtcctcggctcggcgcatcaaggatgcctcccgccgttcccagcagacgtcttcatggtgccacagtatggatacctcaccctgaacaacgggagtcaggcggtaggacgctcttcattttactgcctggagtactttccttctcagatgctgcgtaccggaaacaactttaccttcagctacacctttgaggacgttccttttcacagcagctacgctcacagccagagtttggaccgtctcatgaatcctctcatcgaccagtacctgtattacttgagcagaacaaacactccaagcggaaccactacgcagtccaggcttcggttttctcaagccggagcgagtgacattcgggaccagtctaggaactggcttcctggaccctgttaccgccagcagcgagtatcaaagacagctgcggacaacaacaacagtgattactcgtggactggagctaccaagtatcacctcaatggaagagactctctggtgaatccgggcacagccatggccagccacaaggacgatgaagaaaagtattttcctcagagcggggttctcatcttcggaaaacaagactcgggaaaaactaatgtggacattgaaagggtcatgattacagacgaagaggaaatcaggaccaccaatcccgtggctacggagcagtatggttctgtatctaccaatctccagagcggcaacacacaagcagctacctcagatgtcaacacacaaggcgttcttccaggcatggtctggcaggacagagacgtgtacctgcagggacccatctgggcaaagattccacacacggacggacattttcacccttctcctcttatgggaggatttggactgaagcaccctcccccgcagattctcatcaagaataccccggtacctgcgaatccttctaccaccttcagcgcggcaaagtttgcttccttcatcacacagtactccacggggcaggtcagcgtggagatcgagtgggagctgcagaaagagaacagcaaacgctggaaccccgagatccagtatacctccaactacaacaagtctgttaatgtggactttactgtggacactaatggcgtgtattcagagcctcgccccattggcacaagatacctgactcgtaatctgtaa

SEQ ID NO: 999 - DNA, 2208 bp, Artificial Sequence
  Synthetic Polynucleotide
atggctgccgatggttatcttccagattggctcgaggacactctctctgaaggaataagacagtggtggaagctcaaacctggcccaccaccgccaaagcccgcagagcggcataaggacgacagcaggggtcttgtgcttcctgggtacaagtacctcggacccttcaacggactcgacaaaggagagccggtcaacgaggcagacgccgcggccctcgagcacgacaaggcctacgaccggcagctcgacagcggagacaacccgtacctcaagtacaaccacgccgacgcggagtttcaggagcgccttaaagaagatacgtcttttgggggcaacctcgcaagagcagtattccaggcgaaaaagagggttcttgaacctctgggcctggttgaggagcctgttaagacggctccgggaaaaaagaggccggtagagcactctcctgcggagccagattcctcctccggaactggaaagtcgggccaacagcctgcaagaaagagattgaattttggtcagactggagacgcagactccgtacctgacccccagcctctcggacagccaccagcagccccctctggtctgggaactaatacgatggcttcaggcagtggcgcaccaatggcagacaataacgagggcgccgacggagtgggtaattcctcgggaaattggcattgcgattccacatggatgggcgacagagtcatcaccaccagcacccgcacctgggctctgcccacctacaacaaccatctgtacaagcaaatttccagccagtctggagccagcaacgacaaccactactttggctacagcaccccttgggggtattttgacttcaacagattccactgccacttctccccacgtgactggcaaagactcatcaacaacaattggggattccggcccaaaagactcaacttcaagctctttaacattcaagtcaaggaggtcacgcagaatgacggtacgacgacgattgccaataaccttaccagcacggttcaggtgtttactgactcggagtaccagctcccgtacgtcctcggctcggcgcatcaaggatgcctcccgccgttcccagcagacgtcttcatggtgccacagtatggatacctcaccctgaacaacgggagtcaggcggtaggacgctcttcattttactgcctggagtactttccttctcagatgctgcgtaccggaaacaactttaccttcagctacacctttgaggacgttccttttcacagcagctacgctcacagccagagtttggaccgtctcatgaatcctctcatcgaccagtacctgtattacttgagcagaacaaacactccaagcggaaccactacgcagtccaggcttcggttttctcaagccggagcgagtgacattcgggaccagtctaggaactggcttcctggaccctgttaccgccagcagcgagtatcaaagacagctgcggacaacaacaacagtgattactcgtggactggagctaccaagtatcacctcaatggaagagactctctggtgaatccgggcacagccatggccagccacaaggacgatgaagaaaagtattttcctcagagcggggttctcatcttcggaaaacaagactcgggaaaaactaatgtggacattgaaagggtcatgattacagacgaagaggaaatcaggaccaccaatcccgtggctacggagcagtatggttctgtatctaccaatctccagagcggcaacacacaagcagctacctcagatgtcaacacacaaggcgttcttccaggcatggtctggcaggacagagacgtgtacctgcagggacccatctgggcaaagattccacacacggacggacattttcacccttctcctcttatgggaggatttggactgaagcaccctcccccgcagattctcatcaagaataccccggtacctgcgaatccttctaccaccttcagcgcggcaaagtttgcttccttcatcacacagtactccacggggcaggtcagcgtggagatcgagtgggagctgcagaaagagaacagcaaacgctggaaccccgagatccagtatacctccaactacaacaagtctgttaatgtggactttactgtggacactaatggcgtgtattcagagcctcgccccattggcacaagatacctgactcgtaatctgtaa

SEQ ID NO: 1000 - DNA, 2208 bp, Artificial Sequence
  Synthetic Polynucleotide
atggctgccgatggttatcttccagattggctcgaggacactctctctgaaggaataagacagtggtggaagctcaaacctggcccaccaccgccaaagcccgcagagcggcataaggacgacagcaggggtcttgtgcttcctgggtacaagtacctcggacccttcaacggactcgacaaaggagagccggtcaacgaggcagacgccgcggccctcgagcacgacaaggcctacgaccggcagctcgacagcggagacaacccgtacctcaagtacaaccacgccgacgcggagtttcaggagcgccttaaagaagatacgtcttttgggggcaacctcgcaagagcagtattccaggcgaaaaagagggttcttgaacctctgggcctggttgaggagcctgttaagacggctccgggaaaaaagaggccggtagagcactctcctgcggagccagattcctcctccggaactggaaagtcgggccaacagcctgcaagaaagagattgaattttggtcagactggagacgcagactccgtacctgacccccagcctctcggacagccaccagcagccccctctggtctgggaactaatacgatggcttcaggcagtggcgcaccaatggcagacaataacgagggcgccgacggagtgggtaattcctcgggaaattggcattgcgattccacatggatgggcgacagagtcatcaccaccagcacccgcacctgggctctgcccacctacaacaaccatctgtacaagcaaatttccagccagtctggagccagcaacgacaaccactactttggctacagcaccccttgggggtattttgacttcaacagattccactgccacttctccccacgtgactggcaaagactcatcaacaacaattggggattccggcccaaaagactcaacttcaagctctttaacattcaagtcaaggaggtcacgcagaatgacggtacgacgacgattgccaataaccttaccagcacggttcaggtgtttactgactcggagtaccagctcccgtacgtcctcggctcggcgcatcaaggatgcctcccgccgttcccagcagacgtcttcatggtgccacagtatggatacctcaccctgaacaacgggagtcagacggtaggacgctcttcattttactgcctggagtactttccttctcagatgctgcgtaccggaaacaactttaccttcagctacacctttgaggacgttccttttcacagcagctacgctcacagccagagtttggaccgtctcatgaatcctctcatcgaccagtacctgtattacttgagcagaacaaacactccaagcggaaccactacgcagtccaggcttcggttttctcaagccggagcgagtgacattcgggaccagtctaggaactggcttcctggaccctgttaccgccagcagcgagtatcaaagacagctgcggacaacaacaacagtgattactcgtggactggagctaccaagtatcacctcaatggaagagactctctggtgaatccgggcacagccatggccagccacaaggacgatgaagaaaagtattttcctcagagcggggttctcatcttcggaaaacaagactcgggaaaaactaatgtggacattgaaagggtcatgattacagacgaagaggaaatcaggaccaccaatcccgtggctacggagcagtatggttctgtatctaccaatctccagagcggcaacacacaagcagctacctcagatgtcaacacacaaggcgttcttccaggcatggtctggcaggacagagacgtgtacctgcagggacccatctgggcaaagattccacacacggacggacattttcacccttctcctcttatgggaggatttggactgaagcaccctcccccgcagattctcatcaagaataccccggtacctgcgaatccttctaccaccttcagcgcggcaaagtttgcttccttcatcacacagtactccacggggcaggtcagcgtggagatcgagtgggagctgcagaaagagaacagcaaacgctggaaccccgagatccagtatacctccaactacaacaagtctgttaatgtggactttactgtggacactaatggcgtgtattcagagcctcgccccattggcacaagatacctgactcgtaatctgtaa

SEQ ID NO: 1001 - DNA, 2208 bp, Artificial Sequence
  Synthetic Polynucleotide
atggctgccgatggttatcttccagattggctcgaggacactctctctgaaggaataagacagtggtggaagctcaaacctggcccaccaccgccaaagcccgcagagcggcataaggacgacagcaggggtcttgtgcttcctgggtacaagtacctcggacccttcaacggactcgacaaaggagagccggtcaacgaggcagacgccgcggccctcgagcacgacaaggcctacgaccggcagctcgacagcggagacaacccgtacctcaagtacaaccacgccgacgcggagtttcaggagcgccttaaagaagatacgtcttttgggggcaacctcgcaagagcagtattccaggcgaaaaagagggttcttgaacctctgggcctggttgaggagcctgttaagacggctccgggaaaaaagaggccggtagagcactctcctgcggagccagattcctcctccggaactggaaagtcgggccaacagcctgcaagaaagagattgaattttggtcagactggagacgcagactccgtacctgacccccagcctctcggacagccaccagcagccccctctggtctgggaactaatacgatggcttcaggcagtggcgcaccaatggcagacaataacgagggcgccgacggagtgggtaattcctcgggaaattggcattgcgattccacatggatgggcgacagagtcatccccaccagcacccgcacctgggctctgcccacctacaacaaccatctgtacaagcaaatttccagccagtctggagccagcaacgacaaccactactttggctacagcaccccttgggggtattttgacttcaacagattccactgccacttctccccacgtgactggcaaagactcatcaacaacaattggggattccggcccaaaagactcaacttcaagctctttaacattcaagtcaaggaggtcacgcagaatgacggtacgacgacgattgccaataaccttaccagcacggttcaggtgtttactgactcggggtaccagctcccgtacgtcctcggctcggcgcatcaaggatgcctcccgccgttcccagcagacgtcttcatggtgccacagtatggatacctcaccctgaacaacgggagtcaggcggtaggacgctcttcattttactgcctggagtactttccttctcagatgctgcgtaccggaaacaactttaccttcagctacacctttgaggacgttccttttcacagcagctacgctcacagccagagtttggaccgtctcatgaatcctctcatcgaccagtacctgtattacttgagcagaacaaacactccaagcggaaccactacgcagtccaggcttcggttttctcaagccggagcgagtgacattcgggaccagtctaggaactggcttcctggaccctgttaccgccagcagcgagtatcaaagacagctgcggacaacaacaacagtgattactcgtggactggagctaccaagtatcacctcaatggaagagactctctggtgaatccgggcacagccatggccagccacaaggacgatgaagaaaagtattttcctcagagcggggttctcatcttcggaaaacaagactcgggaaaaactaatgtggacattgaaagggtcatgattacagacgaagaggaaatcaggaccaccaatcccgtggctacggagcagtatggttctgtatctaccaatctccagagcggcaacacacaagcagctacctcagatgtcaacacacaaggcgttcttccaggcatggtctggcaggacagagacgtgtacctgcagggacccatctgggcaaagattccacacacggacggacattttcacccttctcctcttatgggaggatttggactgaagcaccctcccccgcagattctcatcaagaataccccggtacctgcgaatccttctaccaccttcagcgcggcaaagtttgcttccttcatcacacagtactccacggggcaggtcagcgtggagatcgagtgggagctgcagaaagagaacagcaaacgctggaaccccgagatccagtatacctccaactacaacaagtctgttaatgtggactttactgtggacactaatggcgtgtattcagagcctcgccccattggcacaagatacctgactcgtaatctgtaa

SEQ ID NO: 1002 - DNA, 2208 bp, Artificial Sequence
  Synthetic Polynucleotide
atggctgccgatggttatcttccagattggctcgaggacactctctctgaaggaataagacagtggtggaagctcaaacctggcccaccaccgccaaagcccgcagagcggcataaggacgacagcaggggtcttgtgcttcctgggtacaagtacctcggacccttcaacggactcgacaaaggagagccggtcaacgaggcagacgccgcggccctcgagcacgacaaggcctacgaccggcagctcgacagcggagacaacccgtacctcaagtacaaccacgccgacgcggagtttcaggagcgccttaaagaagatacgtcttttgggggcaacctcgcaagagcagtattccaggcgaaaaagagggttcttgaacctctgggcctggttgaggagcctgttaagacggctccgggaaaaaagaggccggtagagcactctcctgcggagccagattcctcctccggaactggaaagtcgggccaacagcctgcaagaaagagattgaattttggtcagactggagacgcagactccgtacctgacccccagcctctcggacagccaccagcagccccctctggtctgggaactaatacgatggcttcaggcagtggcgcaccaatggcagacaataacgagggcgccgacggagtgggtaattcctcgggaaattggcattgcgattccacatggatgggcgacagagtcatcaccaccagcacccgcacctgggctctgcccacctacaacaaccatctgtacaagcaaatttccagccagtctggagccagcaacgacaaccactactttggctacagcaccccttgggggtattttgacttcaacagattccactgccacttctccccacgtgactggcaaagactcatcaacaacaattggggattccggcccaaaagactcaacttcaagctctttaacattcaagtcaaggaggtcacgcagaatgacggtacgacgacgattgccaataaccttaccagcacggttcaggtgtttactgactcggagtaccagctcccgtacgtcctcggctcggcgcatcaaggatgcctcccgccgttcccagcagacgtcttcatggtgccacagtatggatacctcaccctgaacaacgggagtcaggcggtaggacgctcttcattttactgcctggagtactttccttctcagatgctgcgtaccggaaacaactttaccttcagctacacctttgaggacgttccttttcacagcagctacgctcacagccagagtttggaccgtctcatgaatcctctcatcgaccagtacctgtattacttgagcagaacaaacactccaagcggaaccactacgcagtccaggcttcggttttctcaagccggagcgagtgacattcgggaccagtctaggaactggcttcctggaccctgttaccgccagcagcgagtatcaaagacagctgcggacaacaacaacagtgattactcgtggactggagctaccaagtatcacctcaatggaagagactctctggtgaatccgggcacagccatggccagccacaaggacgatgaagaaaagtattttcctcagagcggggttctcatcttcggaaaacaagactcgggaaaaactaatgtggacattgaaagggtcatgattacagacgaagaggaaatcaggaccaccaatcccgtggctacggagcagtatggttctgtatctaccaatctccagagcggcgacacacaagcagctacctcagatgtcaacacacaaggcgttcttccaggcatggtctggcaggacagagacgtgtacctgcagggacccatctgggcaaagattccacacacggacggacattttcacccttctcctcttatgggaggatttggactgaagcaccctcccccgcagattctcatcaagaataccccggtacctgcgaatccttctaccaccttcagcgcggcaaagtttgcttccttcatcacacagtactccacggggcaggtcagcgtggagatcgagtgggagctgcagaaagagaacagcaaacgctggaaccccgagatccagtatacctccaactacaacaagtctgttaatgtggactttactgtggacactaatggcgtgtattcagagcctcgccccattggcacaagatacctgactcgtaatctgtaa

SEQ ID NO: 1003 - DNA, 2205 bp, Artificial Sequence
  Synthetic Polynucleotide
atggctgccgatggttatcttccagattggctcgaggacactctctctgaaggaataagacagtggtggaagctcaaacctggcccaccaccgccaaagcccgcagagcggcataaggacgacagcaggggtcttgtgcttcctgggtacaagtacctcggacccttcaacggactcgacaaaggagagccggtcaacgaggcagacgccgcggccctcgagcacgacaaggcctacgaccggcagctcgacagcggagacaacccgtacctcaagtacaaccacgccgacgcggagtttcaggagcgccttaaagaagatacgtcttttgggggcaacctcgcaagagcagtattccaggcgaaaaagagggttcttgaacctctgggcctggttgaggagcctgttaagacggctccgggaaaaaagaggccggtagagcactctcctgcggagccagattcctcctccggaactggaaagtcgggccaacagcctgcaagaaagagattgaattttggtcagactggagacgcagactccgtacctgacccccagcctctcggacagccaccagcagccccctctggtctgggaactaatacgatggcttcaggcagtggcgcaccaatggcagacaataacgagggcgccgacggagtgggtaattcctcgggaaattggcattgcgattccacatggatgggcgacagagtcatcaccaccagcacccgcacctgggctctgcccacctacaacaaccatctgtacaagcaaatttccagccagtctggagccagcaacgacaaccactactttggctacagcaccccttgggggtattttgacttcaacagattccactgccacttctccccacgtgactggcaaagactcatcaacaacaattggggattccggcccaaaagactcaacttcaagctctttaacattcaagtcaaggaggtcacgcagaatgacggtacgacgacgattgccaataaccttaccagcacggttcaggtgtttactgactcggagtaccagctcccgtacgtcctcggctcggcgcatcaaggatgcctcccgccgttcccagcagacgtcttcatggtgccacagtatggatacctcaccctgaacaacgggagtcaggcggtaggacgctcttcattttactgcctggagtactttccttctcagatgctgcgtaccggaaacaactttaccttcagctacacctttgaggacgttccttttcacagcagctacgctcacagccagagtttggaccgtctcatgaatcctctcatcgaccagtacctgtattacttgagcagaacaaacactccaagcggaaccactacgcagtccaggcttcggttttctcaagccggagcgagtgacattcgggaccagtctaggaactggcttcctggaccctgttaccgccagcagcgagtatcaaagacagctgcggacaacaacagtgattactcgtggactggagctaccaagtatcacctcaatggaagagactctctggtgaatccgggcacagccatggccagccacaaggacgatgaagaaaagtattttcctcagagcggggttctcatcttcggaaaacaagactcgggaaaaactaatgtggacattgaaagggtcatgattacagacgaagaggaaatcaggaccaccaatcccgtggctacggagcagtatggttctgtatctaccaatctccagagcggcaacacacaagcagctacctcagatgtcaacacacaaggcgttcttccaggcatggtctggcaggacagagacgtgtacctgcagggacccatctgggcaaagattccacacacggacggacattttcacccttctcctcttatgggaggatttggactgaagcaccctcccccgcagattctcatcaagaataccccggtacctgcgaatccttctaccaccttcagcgcggcaaagtttgcttccttcatcacacagtactccacggggcaggtcagcgtggagatcgagtgggagctgcagaaagagaacagcaaacgctggaaccccgagatccagtatacctccaactacaacaagtctgttaatgtggactttactgtggacactaatggcgtgtattcagagcctcgccccattggcacaagatacctgactcgtaatctgtaa

SEQ ID NO: 1004 - DNA, 2208 bp, Artificial Sequence
  Synthetic Polynucleotide
atggctgccgatggttatcttccagattggctcgaggacactctctctgaaggaataagacagtggtggaagctcaaacctggcccaccaccgccaaagcccgcagagcggcataaggacgacagcaggggtcttgtgcttcctgggtacaagtacctcggacccttcaacggactcgacaaaggagagccggtcaacgaggcagacgccgcggccctcgagcacgacaaggcctacgaccggcagctcgacagcggagacaacccgtacctcaagtacaaccacgccgacgcggagtttcaggagcgccttaaagaagatacgtcttttgggggcaacctcgcaagagcagtattccaggcgaaaaagagggttcttgaacctctgggcctggttgaggagcctgttaagacggctccgggaaaaaagaggccggtagagcactctcctgcggagccagattcctcctccggaactggaaagtcgggccaacagcctgcaagaaagagattgaattttggtcagactggagacgcagactccgtacctgacccccagcctctcggacagccaccagcagccccctctggtctgggaactaatacgatggcttcaggcagtggcgcaccaatggcagacaataacgagggcgccgacggagtgggtaattcctcgggaaattggcattgcgattccacatggatgggcgacagagtcatcaccaccagcacccgcacctgggctctgcccacctacaacaaccatctgtacaagcaaatttccagccagtctggagccagcaacgacaaccactactttggctacagcaccccttgggggtattttgacttcaacagattccactgccacttctccccacgtgactggcaaagactcatcaacaacaattggggattccggcccaaaagactcaacttcaagctctttaacattcaagtcaaggaggtcacgcagaatgacggtacgacgacgattgccaataaccttaccagcacggttcaggtgtttactgactcggagtaccagctcccgtacgtcctcggctcggcgcatcaaggatgcctcccgccgttcccagcagacgtcttcatggtgccacagtatggatacctcaccctgaacaacgggagtcaggcggtaggacgctcttcattttactgcctggagtactttccttctcagatgctgcgtaccggaaacaactttaccttcagctacacctttgaggacgttccttttcacagtagctacgctcacagccagagttcggaccgtctcatgaatcctctcatcgaccagtacctgtattacttgagcagaacaaacactccaagcggaaccactacgcagtccaggcttcggttttctcaagccggagcgagtgacattcgggaccagtctaggaactggcttcctgggccctgttaccgccagcagcgagtatcaaagacagctgcggacaacaacaacagtgattactcgtggactggagctaccaagtatcacctcaatggaagagactctctggtgaatccgggcacagccatggccagccacaaggacgatgaagaaaagtattttcctcagagcggggttctcatcttcggaaaacaagactcgggaaaaactaatgtggacattgaaagggtcatgattacagacgaagaggaaatcaggaccaccaatcccgtggctacggagcagtatggttctgtatctaccaatctccagagcggcaacacacaagcagctacctcagatgtcaacacacaaggcgttcttccaggcatggtctggcaggacagagacgtgtacctgcagggacccatctgggcaaagattccacacacggacggacattttcgcccttctcctcttatgggaggatttggactgaagcaccctcccccgcagattctcatcaagaataccccggtacctgcgaatccttctaccaccttcagcgcggcaaagtttgcttccttcatcacacagtactccacggggcaggtcagcgtggagatcgagtgggagctgcagaaagagaacagcaaacgctggaaccccgagatccagtatacctccaactacaacaagtctgttaatgtggactttactgtggacactaatggcgtgtattcagagcctcgccccattggcacaagatacctgactcgtaatctgtaa

SEQ ID NO: 1005 - DNA, 2208 bp, Artificial Sequence
  Synthetic Polynucleotide
atggctgccgatggttatcttccagattggctcgaggacactctctctgaaggaataagacagtggtggaagctcaaacctggcccaccaccgccaaagcccgcagagcggcataaggacgacagcaggggtcttgtgcttcctgggtacaagtacctcggacccttcaacggactcgacaaaggagagccggtcaacgaggcagacgccgcggccctcgagcacgacaaggcctacgaccggcagctcgacagcggagacaacccgtacctcaagtacaaccacgccgacgcggagtttcaggagcgccttaaagaagatacgtcttttgggggcaacctcgcaagagcagtattccaggcgaaaaagagggttcttgaacctctgggcctggttgaggagcctgttaagacggctccgggaaaaaagaggccggtagagcactctcctgcggggccagattcctcctccggaactggaaagtcgggccaacagcctgcaagaaagagattgaattttggtcagactggagacgcagactccgtacctgacccccagcctctcggacagccaccagcagccccctctggtctgggaactaatacgatggcttcaggcagtggcgcaccaatggcagacaataacgagggcgccgacggagtgggtaattcctcgggaaattggcattgcgattccacatggatgggcgacagagtcatcaccaccagcacccgcacctgggctctgcccacctacaacaaccatctgtacaagcaaatttccagccagtctggagccagcaacgacaaccactactttggctacagcaccccttgggggtattttgacttcaacagattccactgccacttctccccacgtgactggcaaagactcatcaacaacaattggggtttccggcccaaaagactcaacttcgagctctttaacattcaagtcaaggaggtcacgcagaatgacggtacgacgacgattgccaataaccttaccagcacggttcaggtgtttactgactcggagtaccagctcccgtacgtcctcggctcggcgcatcaaggatgcctcccgccgttcccagcagacgtcttcatggtgccacagtatggatacctcaccctgaacaacgggagtcaggcggtaggacgctcttcattttactgcctggagtactttccttctcagatgctgcgtaccggaaacaactttaccttcagctacacctttgaggacgttccttttcacagcagctacgctcacagccagagtttggaccgtctcatgaatcctctcatcgaccagtacctgtattacttgagcagaacaaacactccaagcggaaccactacgcagtccaggcttcagttttctcaagccggagcgagtgacattcgggaccagtctaggaactggcttcctggaccctgttaccgccagcagcgagtatcaaagacagctgcggacaacaacaacagtgattactcgtggactggagctaccaagtatcacctcaatggaagagactctctggtgaatccgggcacagccatggccagccacaaggacgatgaagaaaagtattttcctcagagcggggttctcatcttcggaaaacaagactcgggaaaaactaatgtggacattgaaaaggtcatgattacagacgaagaggaaatcaggaccaccaatcccgtggctacggagcagtatggttctgtatctaccaatctccagagcggcaacacacaagcagctacctcagatgtcaacacacaaggcgttcttccaggcatggtctggcaggacagaggcgtgtacctgcagggacccatctgggcaaagattccacacacggacggacactttcacccttctcctcttatgggaggatttggactgaagcaccctcccccgcagattctcatcaagagtaccccggtacctgcgaatccttctaccaccttcagcgcggcaaagtttgcttccttcatcacacagtactccacggggcaggtcagcgtggagatcgagtgggagctgcagaaagagaacagcaaacgctggaaccccgagatccagtatacctccaactacaacaagtctgttaatgtggactttactgtggacactaatggcgtgtattcagatcctcgccccattggcacaagatacctgactcgtaatctgtaa

SEQ ID NO: 1006 - DNA, 2208 bp, Artificial Sequence
  Synthetic Polynucleotide
atggctgccgatggttatcttccagattggctcgaggacactctctctgaaggaataagacagtggtggaagctcaaacctggcccaccaccgccaaagcccgcagagcggcataaggacgacagcaggggtcttgtgcttcctgggtacaagtacctcggacccttcaacggactcgacaaaggagagccggtcaacgaggcagacgccgcggccctcgagcacgacaaggcctacgaccggcagctcgacagcggagacaacccgtacctcaagtacaaccacgccgacgcggagtttcaggagcgccttaaagaagatacgtcttttgggggcaacctcgcaagagcagtattccaggcgaaaaagagggttcttgaacctctgggcctggttgaggagcctgttaagacggctccgggaaaaaagaggccggtagagcactctcctgcggagccagattcctcctccggaactggaaagtcgggccaacagcctgcaagaaagagattgaattttggtcagactggagacgcagactccgtacctgacccccagcctctcggacagccaccagcagccccctctggtctgggaactaatacgatggcttcaggcagtggcgcaccaatggcagacaataacgagggcgccgacggagtgggtaattcctcgggaaattggcattgcgattccacatggatgggcgacagagtcatcaccaccagcacccgcacctgggctctgcccacctacaacaaccatctgtacaagcaaatttccagccagtctggagccagcaacgacaaccactactttggctacagcaccccttgggggtattttgacttcaacagattccactgccacttctccccacgtggctggcaaagactcatcaacaacaattggggattccggcccaaaagactcaacttcaagctctttaacattcaagtcaaggaggtcacgcagaatgacggtacgacgacgattgccaataaccttaccagcacggttcaggtgtttactgactcggagtaccagctcccgtacgtcctcggctcggcgcatcaaggatgcctcccgccgttcccagcagacgtcttcatggtgccacagtatggatacctcaccctgaacaacgggagtcaggcggtaggacgctcttcattttactgcctggagtactttccttctcagatgctgcgtaccggaagcaactttaccttcagctacacctttgaggacgttccttttcacagcagctacgctcacagccagagtttggaccgtctcatgaatcctctcatcgaccagtacctgtattacttgagcagaacaaacactccaagcggaaccactacgcagtccaggcttcggttttctcaagccggagcgagtgacattcgggaccagtctaggaactggcttcctgggccctgttaccgccagcagcgagtatcaaagacagctgcggacaacaacaacagtgattactcgtggactggagctaccaagtatcacctcaatggaagagactctctggtgaatccgggcacagccatggccagccacaaggacgatgaagaaaagtattttcctcagagcggggttctcatcttcggaaaacaagactcgggaaaaactaatgtggacattgaaagggtcatgattacagacgaagaggaaatcaggaccaccaatcccgtggctacggagcagtatggttctgtatctaccaatctccagagcggcaacacacaagcagctacctcagatgtcaacacacaaggcgttcttccaggcatggtctggcaggacagagacgtgtacctgcagggacccatctgggcaaagattccacacacggacggacattttcacccttctcctcttatgggaggatttggactgaagcaccctcccccgcagattctcatcaagaataccccggtacctgcgaatccttctaccaccttcagcgcggcaaagtttgcttccttcatcacacagtactccacggggcaggtcagcgtggagatcgagtgggagctgcagaaagagaacagcaaacgctggaaccccgagatccagtatacctccaactacaacaagtctgttaatgtggactttactgtggacactaatggcgtgtattcagagcctcgccccattggcacaagatacctgactcgtaatctgtaa

SEQ ID NO: 1007 - DNA, 2208 bp, Artificial Sequence
  Synthetic Polynucleotide
atggctgccgatggttatcttccagattggctcgaggacactctctctgaaggaataagacagtggtggaagctcaaacctggcccaccaccaccaaggcccgcagagcggcatcaggacgacagcaggggtcttgtgcttcctgggtacaagtacctcggacccttcaacggactcgacaaaggagagccggtcaacgaggcagacgctgcggccctcgagcacgacaaggcctacgaccggcagctcgacagcggagacaacccgtacctcaagtacaaccacgccgacgcggagtttcaggagcgtcttaaagaagatacgtcttttgggggcaacctcgcaagagcagtattccaggcgaaaaagagggttcttgaacctctgggcctggttgaggagcctgttaagacggctccgggaaaaaagaggccggtagagcactctcctgcggagccagattcctcctccggaactggaaagtcgggccaacagcctgcaagaaagagattgaattttggtcagactggagacgcagactccgtacctgacccccagcctctcggacagccaccagcagccccctctggtctgggaactaatacgatggcttcaggcagtggcgcaccaatggcagacaataacgagggcgccgacggagtgggtaattcctcgggaaattggcattgcgattccacatggatgggcgacagagtcatcaccaccagcacccgcacctgggctctgcccacctacaacaaccatctgtacaagcaaatttccagccagtctggagccagcaacgacaaccactactttggctacagcaccccttgggggtattttgacttcaacagattccactgccacttctccccacgtgactggcaaagactcatcaacaacaattggggattccggcccaaaagactcaacttcaagctctttaacattcaagtcaaggaggtcacgcagaatgacggtacgacgacgattgccaataaccttaccagcacggttcaggtgtttactgactcggagtaccagctcccgtacgtcctcggctcggcgcatcaaggatgcctcccgccgttcccagcagacgtcttcatggtgccacagtatggatacctcaccctgaacaacgggagtcaggcggtaggacgctcttcattttactgcctggagtactttccttctcagatgctgcgtaccggaaacaactttaccttcagctacacctttgaggacgttccttttcacagcagctacgctcacagccagagtttggaccgtctcatgaatcctctcatcgaccagtacctgtattacttgagcagaacaaacactccaagcggaaccactacgcagtccaggcttcggttttctcaagccggagcgagtgacattcgggaccagtctaggaactggcttcctggaccctgttaccgccagcagcgagtatcaaagacagctgcggacaacaacaacagtgattactcgtggactggagctaccaagtatcacctcaatggaagagactctctggtgaatccgggcacagccatggccagccacaaggacgatgaagaaaagtattttcctcagagcggggttctcatcttcggaaaacaagactcgggaaaaactaatgtggacattgaaagggtcatgattacagacgaagaggaaatcaggaccaccaatcccgtggctacggagcagtatggttctgtatctaccaatctccagagcggcaacacacaagcagctacctcagatgtcaacacacaaggcgttcttccaggcatggtctggcaggacagagacgtgtacctgcagggacccatctgggcaaagattccacacacggacggacattttcacccttctcctcttatgggaggatttggactgaagcaccctcccccgcagattctcatcaagaataccccggtacctgcgaatccttctaccaccttcagcgcggcaaagtttgcttccttcatcacacagtactccacggggcaggtcagcgtggagatcgagtgggagctgcagaaagagaacagcaaacgctggaaccccgagatccagtatacctccaactacaacaagtctgttaatgtggactttactgtggacactaatggcgtgtattcagagcctcgccccattggcacaagatacctgactcgtaatctgtaa

SEQ ID NO: 1008 - DNA, 2208 bp, Artificial Sequence
  Synthetic Polynucleotide
atggctgccgatggttatcttccagattggctcgaggacactctctctgaaggaataagacagtggtggaagctcaaacctggcccaccaccgccaaagcccgcagagcggcataaggacgacagcaggggtcttgtgcttcctgggtacaagtacctcggacccttcaacggactcgacaaaggagagccggtcaacgaggcagacgccgcggccctcgagcacgacaaggcctacgaccggcagctcgacagcggagacaacccgtacctcaagtacaaccacgccgacgcggagtttcaggagcgccttaaagaagatacgtcttttgggggcaacctcgcaagagcagtattccaggcgaaaaagagggttcttgaacctctgggcctggttgaggagcctgttaagacggctccgggaaaaaagaggccggtagagcactctcctgcggagccagattcctcctccggaactggaaagtcgggccaacagcctgcaagaaagagattgaattttggtcagactggagacgcagactccgtacctgacccccagcctctcggacagccaccagcagccccctctggtctgggaactaatacgatggcttcaggcagtggcgcaccaatggcagacaataacgagggcgccgacggagtgggtaattcctcgggaaattggcattgcgattccacatggatgggcgacagagtcatcaccaccagcacccgcacctgggctctgcccacctacaacaaccatctgtacaagcaaatttccagccagtctggagccagcaacgacaaccactactttggctacagcaccccttgggggtattttgacttcaacagattccactgccacttctccccacgtgactggcaaagactcatcaacaacaattggggattccggcccaaaagactcaacttcaagctctttaacattcaagtcaaggaggtcacgcagaatgacggtacgacgacgattgccaataaccttaccagcacggttcaggtgtttactgactcggagtaccagctcccgtacgtccccggctcggcgcatcaaggatgcctcccgccgttcccagcagacgtcttcatggtgccacagtatggatacctcaccctgaacaacgggagtcaggcggtaggacgctcttcattttactgcctggagtactttccttctcagatgctgcgtaccggaaacaactttaccttcagctacacctttgaggacgttccttttcacagcagctacgctcacagccagagtttggaccgtctcatgaatcctctcatcgaccagtacctgtattacttgagcagaacaaacactccaagcggaaccactacgcagtccaggcttcggttttctcaagccggagcgagtgacattcgggaccagtctaggaactggcttcctggaccctgttaccgccagcagcgagtatcaaagacggctgcggacaacaacaacagtgattactcgtggactggagctaccaagtatcacctcaatggaagagactctctggtgaatccgggcacagccatggccagccacaaggacgatgaagaaaagtattttcctcagagcggggttctcatcttcggaaaacaagactcgggaaaaactaatgtggacattgaaagggtcatgattacagacgaagaggaaatcaggaccaccaatcccgtggctacggagcagtatggttctgtatctaccaatctccagagcggcaacacacaagcagctacctcagatgtcaacacacaaggcgttcttccaggcatggtctggcaggacagagacgtgtacctgcagggacccatctgggcaaagattccacacacggacggacattttcacccttctcctcttatgggaggatttggactgaagcaccctcccccgcagattctcatcaagaataccccggtacctgcgaatccttctaccaccttcagcgcggcaaagtttgcttccttcatcacacagtactccacggggcaggtcagcgtggagatcgagtgggagctgcagaaagagaacagcaaacgctggaaccccgagatccagtatacctccaactacaacaagtctgttaatgtggactttactgtggacactaatggcgtgtattcagagcctcgccccattggcacaagatacctgactcgtaatctgtaa

SEQ ID NO: 1009 - DNA, 2208 bp, Artificial Sequence
  Synthetic Polynucleotide
atggctgccgatggttatcttccagattggctcgaggacactctctctgaaggaataagacagtggtggaagctcaaacctggcccaccaccgccaaagcccgcagagcggcataaggacgacagcaggggtcttgtgcttcctgggtacaagtacctcggacccttcaacggactcgacaaaggagagccggtcaacgaggcagacgccgcggccctcgagcacgacaaggcctacgaccggcagctcgacagcggagacaacccgtacctcaagtacaaccacgccgacgcggagtttcaggagcgccttaaagaagatacgtcttttgggggcaacctcgcaagagcagtattccaggcgaaaaagagggttcttgaacctctgggcctggttgaggagcctgttaagacggctccgggaaaaaagaggccggtagagcactctcctgcggagccagattcctcctccggaactggaaagtcgggccaacagcctgcaagaaagagattgaattttggtcagactggagacgcagactccgtacctgacccccagcctctcggacagccaccagcagccccctctggtctgggaactaatacgatggcttcaggcagtggcgcaccaatggcagacaataacgagggcgccgacggagtgggtaattcctcgggaaattggcattgcgattccacatggatgggcgacagagtcatcaccaccagcacccgcacctgggctctgcccacctacgacaaccatctgtacaagcaaatttccagccagtctggagccagcaacgacaaccactactttggctacagcaccccttgggggtattttgacttcaacagattccactgccacttctccccacgtgactggcaaagactcatcaacaacaattggggattccggcccaaaagactcaacttcaagctctttaacattcaagtcaaggaggtcacgcagaatgacggtacgacgacgattgccaataaccttaccagcacggttcaggtgtttactgactcggagtaccagctcccgtacgtcctcggctcggcgcatcaaggatgcctcccgccgttcccagcagacgtcttcatggtgccacagtatggatacctcaccctgaacaacgggagtcaggcggtaggacgctcttcattttactgcctggagtactttccttctcagatgctgcgtaccggaaacaactttaccttcagctacacctttgaggacgttccttttcacagcagctacgctcacagccagagtttggaccgtctcatgaatcctctcatcgaccagtacctgtattacttgagcagaacaaacacttcaagcggaaccactacgcagtccaggcttcggttttctcaagccggagcgagtgacattcgggaccagtctaggaactggcttcctggaccctgttaccgccagcagcgagtatcaaagacagctgcggacaacaacaacagtgattactcgtggactggagctaccaagtatcacctcaatggaagagactctctggtgaatccgggcacagccatggccagccacaaggacgatgaagaaaagtattttcctcagagcggggttctcatcttcggaaaacaagactcgggaaaaactaatgtggacattgaaagggtcatgattacagacgaagaggaaatcaggaccaccaatcccgtggctacggagcagtatggttctgtatctaccaatctccagagcggcaacacacaagcagctacctcagatgtcaacacacaaggcgttcttccaggcatggtctggcaggacagagacgtgtacctgcagggacccatctgggcaaagattccacacacggacggacattttcacccttctcctcttatgggaggatttggactgaagcaccctcccccgcagattctcatcaagaataccccggtacctgcgaatccttctaccaccttcagcgcggcaaagtttgcttccttcatcacacagtactccacggggcaggtcagcgtggagatcgagtgggagctgcagaaagagaacagcaaacgctggaaccccgagatccagtatacctccaactacaacaagtctgttaatgtggactttactgtggacactaatggcgtgtattcagagcctcgccccattggcacaagatacctgactcgtaatctgtaa

SEQ ID NO: 1010 - DNA, 2208 bp, Artificial Sequence
  Synthetic Polynucleotide
atggctgccgatggttatcttccagattggctcgaggacactctctctgaaggaataagacagtggtggaagctcaaacctggcccaccaccaccaaggcccgcagagcggcatcaggacgacagcaggggtcttgtgcttcctgggtacaagtacctcggacccttcaacggactcgacaaaggagagccggtcaacgaggcagacgctgcggccctcgagcacgacaaggcctacgaccggcagctcgacagcggagacaacccgtacctcaagtacaaccacgccgacgcggagtttcaggagcgtcttaaagaagatacgtcttttgggggcaacctcggacgagcagtcttccaggcgaaaaagagggttcttgaacctctgggcctggttgaggaacctgttaagacggctccgggaaaaaagaggccggtagagcactctcctgcggagccagactcctcctcgggaaccggaaaagcgggccagcagcctgcaagaaagagattgaatttcggtcagactggagacgcagactccgtacctgacccccagcctctcggacagccaccagcagcccccacaagtttgggatctactacaatggctacaggcagtggcgcaccaatggcagacaataacgagggtgccgatggagtgggtaattcctcaggaaattggcattgcgattcccaatggctgggcgacagagtcatcaccaccagcacccgaacctgggccctgcccacctacaacaaccacctctacaagcaaatctccagccaatcaggagcatcgaacgacaaccactactttggctacagcaccccttgggggtattttgacttcaacagattccactgtcacttctccccacgtgactggcaaagactcatcaacaacaactggggattccgacccaagagactcaacttcaagctctttaacattcaagtcaaagaggtcacgcagaatgacggtacgacgacgattgccaataaccttaccagcacggttcaggtgtttactgactcggagtaccagctcccgtacgtcctcggctcggcgcatcaaggatgcctcccgccgtttccagcggacgtcttcatggtcccacagtatggatacctcaccctgaacaacgggagtcaggcggtaggacgctcttccttttactgcctggagtactttccttctcagatgctgcgtaccggaaacaactttaccttcagctacacctttgaggacgttccttttcacagcagctacgctcacagccagagtttggaccgtctcatgaatcctctcatcgaccagtacctgtattacttgagcagaacaaacactccaagcggaaccactacgcagtccaggcttcagttttctcaagccggagcgagtgacattcgggaccagtctaggaactggcttcctggaccctgttaccgccagcagcgagtatcaaagacagctgcggacaacaacaacagtgattactcgtggactggagctaccaagtatcacctcaatggaagagactctctggtgaatccgggcacagccatggccagccacaaggacgatgaagaaaagtattttcctcagagcggggttctcatcttcggaaaacaagactcgggaaaaactaatgtggacattgaaaaggtcatgattacagacgaagaggaaatcaggaccaccaatcccgtggctacggagcagtatggttctgtatctaccaatctccagagcggcaacacacaagcagctacctcagatgtcaacacacaaggcgttcttccaggcatggtctggcaggacagagacgtgtacctgcagggacccatctgggcaaagattccacacacggacggacactttcacccttctcctcttatgggaggatttggactgaagcaccctcccccgcagattctcatcaagagtaccccggtacctgcgaatccttctaccaccttcagcgcggcaaagtttgcttccttcatcacacagtactccacggggcaggtcagcgtggagatcgagtgggagctgcagaaagagaacagcaaacgctggaaccccgagatccagtatacctccaactacaacaagtctgttaatgtggactttactgtggacactaatggcgtgtattcagagcctcgccccattggcacaagatacctgactcgtaatctgtaa

SEQ ID NO: 1011 - DNA, 2208 bp, Artificial Sequence
  Synthetic Polynucleotide
atggctgccgatggttatcttccagattggctcgaggacactctctctgaaggaataagacagtggtggaagctcaaacctggcccaccaccgccaaagcccgcagagcggcataaggacgacagcaggggtcttgtgcttcctgggtacaagtacctcggacccttcaacggactcgacaaaggagagccggtcaacgaggcagacgccgcggccctcgagcacgacaaggcctacgaccggcagctcgacagcggagacaacccgtacctcaagtacaaccacgccgacgcggagtttcaggagcgccttaaagaagatacgtcttttgggggcaacctcgcaagagcagtattccaggcgaaaaagagggttcttgaacctctgggcctggttgaggagcctgttaagacggctccgggaaaaaagaggccggtagagcactctcctgcggagccagattcctcctccggaactggaaagtcgggccaacagcctgcaagaaagagattgaattttggtcagactggagacgcagactccgtacctgacccccagcctctcggacagccaccagcagccccctctggtctgggaactaatacgatggcttcaggcagtggcgcaccaatggcagacaataacgagggcgccgacggagtgggtaattcctcgggaaattggcattgcgattccacatggatgggcgacagagtcatcaccaccagcacccgcacctgggctctgcccacctacaacaaccatctgtacaagcaaatttccagccagtctggagccagcaacgacaaccactactttggctacagcaccccttgggggtattttgacttcaacagattccactgccacttctccccacgtgactggcaaagactcatcaacaacaattggggattccggcccaaaagactcaacttcaagctctttaacattcaagtcaaggaggtcacgcagaatgacggtacgacgacgattgccaataaccttaccagcacggttcaggtgtttactgactcggagtaccagctcccgtacgtcctcggctcggcgcatcaaggatgcctcccgccgttcccagcagacgtcttcatggtgccacagtatggatacctcaccctgaacaacgggagtcaggcggtaggacgctcttcattttactgcctggagtactttccttctcagatgctgcgtaccggaaacaactttaccttcagctacacctttgaggacgttccttttcacagcagctacgctcacagccagagttcggaccgtctcatgaatcctctcatcgaccagtacctgtattacttgagcagaacaaacactccaagcggaaccactacgcagtccaggcttcggttttctcaagccggagcgagtgacattcgggaccagtctaggaactggcttcctggaccctgttaccgccagcagcgagtatcaaagacagctgcggacaacaacaacagtgattactcgtggactggagctaccaagtatcacctcaatggaagagactctctggtgaatccgggcacagccatggccagccacaaggacgatgaagaaaagtattttcctcagagcggggttctcatcttcggaaaacaagactcgggaaaaactaatgtggacattgaaagggtcatgattacagacgaagaggaaatcaggaccaccaatcccgtggctacggagcagtatggttctgtatctaccaatctccagagcggcaacacacaagcagctacctcagatgtcaacacacaaggcgttcttccaggcatggtctggcaggacagagacgtgtacctgcagggacccatctgggcaaagattccacacacggacggacattttcacccttctcctcttatgggaggatttggactgaagcaccctcccccgcagattctcatcaagaataccccggtacctgcgaatccttctaccaccttcagcgcggcaaagcttgcttccttcatcacacagtactccacggggcaggtcagcgtggagatcgagtgggagctgcagaaagagaacagcaaacgctggaaccccgagatccagtatacctccaactacaacaagtctgttaatgtggactttactgtggacactaatggcgtgtattcagagcctcgccccattggcacaagatacctgactcgtaatctgtaa

SEQ ID NO: 1012 - DNA, 2208 bp, Artificial Sequence
  Synthetic Polynucleotide
atggctgccgatggttatcttccagattggctcgaggacactctctctgaaggaataagacagtggtggaagctcaaacctggcccaccaccgccaaagcccgcagagcggcataaggacgacagcaggggtcttgtgcttcctgggtacaagtacctcggacccttcaacggactcgacaaaggagagccggtcaacgaggcagacgccgcggccctcgagcacgacaaggcctacgaccggcagctcgacagcggagacaacccgtacctcaagtacaaccacgccgacgcggagtttcaggagcgccttaaagaagatacgtcttttgggggcaacctcgcaagagcagtattccaggcgaaaaagagggttcttgaacctctgggcctggttgaggagcctgttaagacggctccgggaaaaaagaggccggtagagcactctcctgcggagccagattcctcctccggaactggaaagtcgggccaacagcctgcaagaaagagattgaattttggtcagactggagacgcagactccgtacctgacccccagcctctcggacagccaccagcagccccctctggtctgggaactaatacgatggcttcaggcagtggcgcaccaatggcagacaataacgagggcgccgacggagtgggtaattcctcgggaaattggcattgcgattccacatggatgggcgacagagtcatcaccaccagcacccgcacctgggctctgcccacctacaacaaccatctgtacaagcaaatttccagccagtctggagccagcaacgacaaccactactttggctacagcaccccttgggggtattttgacttcaacagattccactgccacttctccccacgtgactggcaaagactcatcaacaacaattggggattccggcccaaaagactcaacttcaagctctttaacattcaagtcaaggaggtcacgcagaatgacggtacgacgacgattgccaataaccttaccagcacggttcaggtgtttactgactcggagtaccagctcccgtacgtcctcggctcggcgcatcaaggatgcctcccgccgttcccagcagacgtcttcatggtgccacagtatggatacctcaccctgaacaacgggagtcaggcggtaggacgctcttcattttactgcctggagtactttccttctcagatgctgcgtaccggaaacaactttaccttcagctacacctttgaggacgttccttttcacagcagctacgctcacagccagagtttggaccgtctcatgaatcctctcatcgaccagtacctgtattacttgagcagaacaaacactccaagcggaaccactacgcagtccaggcttcggttttctcaagccggagcgagtgacattcgggaccagtctaggaactggcttcctggaccctgttaccgccagcagcgagtatcaaagacagctgcggacaacaacaacagtgattactcgtggactggagctaccaagtatcacctcaatggaagagactctctggtgaatccgggcacagccatggccagccacaaggacgatgaagaaaagtattttcctcagagcggggttctcatcttcggaaaacaagactcgggaaaaactaatgtggacattgaaagggtcatgattacagacgaagaggaaatcaggaccaccaatcccgtggctacggagcagtatggttctgtatctaccaatctccagagcggcaacacacaagcagctacctcagatgtcaacacacaaggcgttcttccaggcatggtctggcaggacagagacgtgtacctgcagggacccatctgggcaaagattccacacacggacggacattttcacccttctcctcttatgggaggatttggactgaagcaccctcccccgcagattctcatcaagaataccccggtacctgcgaatccttctaccaccttcagcgcggcaaagtttgcttccttcatcacacagtactccacggggcaggtcagcgtggagatcgagtgggagctgcagaaggagaacagcaaacgctggaaccccgagatccagtacacttccaactacaacaaatctgttaatgtggactttactgtggacgctaatggtgtgtattcagagcctcgccccattggcaccagatacctgactcgtaatctgtaa

SEQ ID NO: 1013 - DNA, 2208 bp, Artificial Sequence
  Synthetic Polynucleotide
atggctgccgatggttatcttccagattggctcgaggacactctctctgaaggaataagacagtggtggaagctcaaacctggcccaccaccgccaaagcccgcagagcggcataaggacgacagcaggggtcttgtgcttcctgggtacaagtacctcggacccttcaacggactcgacaaaggagagccggtcaacgaggcagacgccgcggccctcgagcacgacaaggcctacgaccggcagctcgacagcggagacaacccgtacctcaagtacaaccacgccgacgcggagtttcaggagcgccttaaagaagatacgtcttttgggggcaacctcgcaagagcagtattccaggcgaaaaagagggttcttgaacctctgggcctggttgaggagcctgttaagacggctccgggaaaaaagaggccggtagagcactctcctgcggggccagattcctcctccggaactggaaagtcgggccaacagcctgcaagaaagagattgaattttggtcagactggagacgcagactccgtacctgacccccagcctctcggacagccaccagcagccccctctggtctgggaactaatacgatggcttcaggcagtggcgcaccaatggcagacaataacgagggcgccgacggagtgggtaattcctcgggaaattggcattgcgattccacatggatgggcgacagagtcatcaccaccagcacccgcacctgggctctgcccacctacaacaaccatctgtacaagcaaatttccagccagtctggagccagcaacgacaaccactactttggctacagcaccccttgggggtattttgacttcaacagattccactgccacttctccccacgtgactggcaaagactcatcaacaacaattggggattccggcccaaaagactcaacttcgagctctttaacattcaagtcaaggaggtcacgcagaatgacggtacgacgacgattgccaataaccttaccagcacggttcaggtgtttactgactcggagtaccagctcccgtacgtcctcggctcggcgcatcaaggatgcctcccgccgttcccagcagacgtcttcatggtgccacagtatggatacctcaccctgaacaacgggagtcaggcggtaggacgctcttcattttactgcctggagtactttccttctcagatgctgcgtaccggaaacaactttaccttcagctacacctttgaggacgttccttttcacagcagctacgctcacagccagagtttggaccgtctcatgaatcctctcatcgaccagtacctgtattacttgagcagaacaaacactccaagcggaaccactacgcagtccaggcttcagttttctcaagccggagcgagtgacattcgggaccagtctaggaactggcttcctggaccctgttaccgccagcagcgagtatcaaagacagctgcggacaacaacaacagtgattactcgtggactggagctaccaagtatcacctcaatggaagagactctctggtgaatccgggcacagccatggccagccacaaggacgatgaagaaaagtattttcctcagagcggggttctcatcttcggaaaacaagactcgggaaaaactaatgtggacattgaaaaggtcatgattacagacgaagaggaaatcaggaccaccaatcccgtggctacggagcagtatggttctgtatctaccaatctccagagcggcaacacacaagcagctacctcagatgtcaacacacaaggcgttcttccaggcatggtctggcaggacagagacgtgtacctgcagggacccatctgggcaaagattccacacacggacggacactttcacccttctcctcttatgggaggatttggactgaagcaccctcccccgcagattctcatcaagagtaccccggtacctgcgaatccttctaccaccttcagcgcggcaaagtttgcttccttcatcacacagtactccacggggcaggtcagcgtggagatcgagtgggagctgcagaaagagaacagcaaacgctggaaccccgagatccagtatacctccaactgcaacaagtctgttaatgtggactttactgtggacactaatggcgtgtattcagatcctcgccccattggcacaagatacctgactcgtaatctgtaa

SEQ ID NO: 1014 - DNA, 2208 bp, Artificial Sequence
  Synthetic Polynucleotide
atggctgccgatggttatcttccagattggctcgaggacactctctctgaaggaataagacagtggtggaagctcaaacctggcccaccaccgccaaagcccgcagagcggcataaggacgacagcaggggtcttgtgcttcctgggtacaagtacctcggacccttcaacggactcgacaaaggagagccggtcaacgaggcagacgccgcggccctcgagcacgacaaggcctacgaccggcagctcgacagcggagacaacccgtacctcaagtacaaccacgccgacgcggagcttcaggagcgccttaaagaagatacgtcttttgggggcaacctcgcaagagcagtattccaggcgaaaaagagggttcttgaacctctgggcctggttgaggagcctgttaagacggctccgggaaaaaagaggccggtagagcactctcctgcggagccagattcctcctccggaactggaaagtcgggccaacagcctgcaagaaagagattgaattttggtcagactggagacgcagactccgtacctgacccccagcctctcggacagccaccagcagccccctctggtctgggaactaatacgatggcttcaggcagtggcgcaccaatggcagacaataacgagggcgccgacggagtgggtaattcctcgggaaattggcattgcgattccacatggatgggcgacagagtcatcaccaccagcacccgcacctgggctctgcccacctacaacaaccatctgtacaagcaaatttccagccagtctggagccagcaacgacaaccactactttggctacagcaccccttgggggtattttgacttcaacagattccactgccacttctccccacgtgactggcaaagactcatcaacaacaattggggattccggcccaaaagactcaacttcaagctctttaacattcaagtcaaggaggtcacgcagaatgacggtacgacgacgattgccaataaccttaccagcacggttcaggtgtatactgactcggagtaccagctcccgtacgtcctcggctcggcgcatcaaggatgcctcccgccgttcccagcagacgtcttcatggtgccacagtatggatacctcaccctgaacaacgggagtcaggcggtaggacgctcttcattttactgcctggagtactttccttctcagatgctgcgtaccggaaacaactttaccttcagctacacctttgaggacgttccttttcacagcagctacgctcacagccagagtttggaccgtctcatgaatcctctcatcgaccagtacctgtattacttgagcagaacaaacactccaagcggaaccactacgcagtccaggcttcggttttctcaagccggagcgagtgacattcgggaccagtctaggaactggcttcctggaccctgttaccgccagcagcgagtatcaaagacagctgcggacaacaacaacagtgattactcgtggactggagctaccaagtatcacctcaatggaagagactctctggtgaatccgggcacagccatggccagccacaaggacgatgaagaaaagtattttcctcagagcggggttctcatcttcggaaaacaagactcgggaaaaactaatgtggacattgaaagggtcatgattacagacgaagaggaaatcaggaccaccaatcccgtggctacggagcagtatggttctgtatctaccaatctccagagcggcaacacacaagcagctacctcagatgtcaacacacaaggcgttcttccaggcatggtctggcaggacagagacgtgtacctgcagggacccatctgggcaaagattccacacacggacggacattttcacccttctcctcttatgggaggatttggactgaagcaccctcccccgcagattctcatcaagaataccccggtacctgcgaatccttctaccaccttcagcgcggcaaagtttgcttccttcatcacacagtactccacggggcaggtcagcgtggagatcgagtgggagctgcagaaagagaacagcaaacgctggaaccccgagatccagtatacctccaactacaacaagtctgttaatgtggactttactgtggacactaatggcgtgtattcagagcctcgccccattggcacaagatacctgactcgtaatctgtaa

SEQ ID NO: 1015 - DNA, 2208 bp, Artificial Sequence
  Synthetic Polynucleotide
atggctgccgatggttatcttccagattggctcgaggacactctctctgaaggaataagacagtggtggaagctcaaacctggcccaccaccgccaaagcccgcagagcggcataaggacgacagcaggggtcttgtgcttcctgggtacaagtacctcggacccttcaacggactcgacaaaggagagccggtcaacgaggcagacgccgcggccctcgagcacgacaaggcctacgaccggcagctcgacagcggagacaacccgtacctcaagtacaaccacgccgacgcggagtttcaggagcgccttaaagaagatacgtcttttgggggcaacctcgcaagagcagtattccaggcgaaaaagagggttcttgaacctctgggcctggttgaggagcctgttaagacggctccgggaaaaaagaggccggtagagcactctcctgcggagccagattcctcctccggaactggaaagtcgggccaacagcctgtaagaaagagattgaattttggtcagactggagacgcagactccgtacctgacccccagcctctcggacagccaccagcagccccctctggtctgggaactaatacgatggcttcaggcagtggcgcaccaatggcagacaataacgagggcgccgacggagtgggtaattcctcgggaaattggcattgcgattccacatggatgggcgacagagtcatcaccaccagcacccgcacctgggctctgcccacctacaacaaccatctgtacaagcaaatttccagccagtctggagccagcaacgacaaccactactttggctacagcaccccttgggggtattttgacttcaacagattccactgccacttctccccacgtgactggcaaagactcatcaacaacaattggggattccggcccaaaagactcaacttcaagctctttaacattcaagtcaaggaggtcacgcagaatgacggtacgacgacgattgccaataaccttaccagcacggttcaggtgtttactgactcggagtaccagctcccgtacgtcctcggctcggcgcatcaaggatgcctcccgccgttcccagcagacgtcttcatggtgccacagtatggatacctcaccctgaacaacgggagtcaggcggtaggacgctcttcattttactgcctggagtactttccttctcagatgctgcgtaccggaagcaactttaccttcagctacacctttgaggacgttccttttcacagcagctacgctcacagccagagtttggaccgtctcatgaatcctctcatcgaccagtacctgtattacttgagcagaacaaacactccaagcggaaccactacgcagtccaggcttcggttttctcaagccggagcgagtgacattcgggaccagtctaggaactggcttcctgggccctgttaccgccagcagcgagtatcaaagacagctgcggacaacaacaacagtgattactcgtggactggagctaccaagtatcacctcaatggaagagactctctggtgaatccgggcacagccatggccagccacaaggacgatgaagaaaagtattttcctcagagcggggttctcatcttcggaaaacaagactcgggaaaaactaatgtggacattgaaagggtcatgattacagacgaagaggaaatcaggaccaccaatcccgtggctacggagcagtatggttctgtatctaccaatctccagagcggcaacacacaagcagctacctcagatgtcaacacacaaggcgttcttccaggcatggtctggcaggacagagacgtgtacctgcagggacccatctgggcaaagattccacacacggacggacattttcacccttctcctcttatgggaggatttggactgaagcaccctcccccgcagattctcatcaagaataccccggtacctgcgaatccttctaccaccttcagcgcggcaaagtttgcttccttcatcacacagtactccacggggcaggtcagcgtggagatcgagtgggagctgcagaaagagaacagcaaacgctggaaccccgagatccagtatacctccaactacaacaagtctgttaatgtggactttactgtggacactaatggcgtgtattcagagcctcgccccattggcacaagatacctgactcgtaatctgtaa

SEQ ID NO: 1016 - DNA, 2208 bp, Artificial Sequence
  Synthetic Polynucleotide
atggctgccgatggttatcttccagattggctcgaggacactctctctgaaggaataagacagtggtggaagctcaaacccggcccaccaccaccaaggcccgcagagcggcatcaggacgacagcaggggtcttgtgcttcctgggtacaagtacctcggacccttcaacggactcgacaaaggagagccggtcaacgaggcagacgctgcggccctcgagcacgacaaggcctacgaccggcagctcgacagcggagacaacccgtacctcaagtacaaccacgccgacgcggagtttcaggagcgtcttaaagaagatacgtcttttgggggcaacctcggacgagcagtcttccaggcgaaaaagagggttcttgaacctctgggcctggttgaggagcctgttaagacggctccgggaaaaaagaggccggtagagcactctcctgcggggccagattcctcctccggaactggaaagtcgggccaacagcctgcaagaaagagattgaattttggtcagactggagacgcagactccgtacctgacccccagcctctcggacagccaccagcagccccctctggtctgggaactaatacgatggcttcaggcagtggcgcaccaatggcagacaataacgagggcgccgacggagtgggtaattcctcgggaaattggcattgcgattccacatggatgggcgacagagtcatcaccaccagcacccgcacctgggctctgcccacctacaacaaccatctgtacaagcaaatttccagccagtctggagccagcaacgacaaccactactttggctacagcaccccttgggggtattttgacttcaacagattccactgccacttctccccacgtgactggcaaagactcatcaacaacaattggggattccggcccaaaagactcaacttcgagctctttaacattcaagtcaaggaggtcacgcagaatgacggtacgacgacgattgccaataaccttaccagcacggttcaggtgtttactgactcggagtaccagctcccgtacgtcctcggctcggcgcatcaaggatgcctcccgccgttcccagcagacgtcttcatggtgccacagtatggatacctcaccctgaacaacgggagtcaggcggtaggacgctcttcattttactgcctggagtactttccttctcagatgctgcgtaccggaaacaactttaccttcagctacacctttgaggacgttccttttcacagcagctacgctcacagccagagtttggaccgtctcatgaatcctctcatcgaccagtacctgtattacttgagcagaacaaacactccaagcggaaccactacgcagtccaggcttcagttttctcaagccggagcgagtgacattcgggaccagtctaggaactggcttcctggaccctgttaccgccagcagcgagtatcaaagacagctgcggacaacaacaacagtgattactcgtggactggagctaccaagtatcacctcaatggaagagactctctggtgaatccgggcacagccatggccagccacaaggacgatgaagaaaagtattttcctcagagcggggttctcatcttcggaaaacaagactcgggaaaaactaatgtggacattgaaaaggtcatgattacagacgaagaggaaatcaggaccaccaatcccgtggctacggagcagtatggttctgtatctaccaatctccagagcggcaacacacaagcagctacctcagatgtcaacacacaaggcgttcttccaggcatggtctggcaggacagagacgtgtacctgcagggacccatctgggcaaagattccacacacggacggacactttcacccttctcctcttatgggaggatttggactgaagcaccctcccccgcagattctcatcaagagtaccccggtacctgcgaatccttctaccaccttcagcgcggcaaagtttgcttccttcatcacacagtactccacggggcaggtcagcgtggagatcgagtgggagctgcagaaagagaacagcaaacgctggaaccccgagatccagtatacctccaactacaacaagtctgttaatgtggactttactgtggacactaatggcgtgtattcagagcctcgccccattggcacaagatacctgactcgtaatctgtaa

SEQ ID NO: 1017 - DNA, 2208 bp, Artificial Sequence
  Synthetic Polynucleotide
atggctgccgatggttatcttccagattggctcgaggacactctctctgaaggaataagacagtggtggaagctcaaacctggcccaccaccgccaaagcccgcagagcggcataaggacgacagcaggggtcttgtgcttcctgggtacaagtacctcggacccttcaacggactcgacaaaggagagccggtcaacgaggcagacgccgcggccctcgagcacgacaaggcctacgaccggcagctcgacagcggagacaacccgtacctcaagtacaaccacgccgacgcggagtttcaggagcgccttaaagaagatacgtcttttgggggcaacctcgcaagagcagtattccaggcgaaaaagagggttcttgaacctctgggcctggttgaggagcctgttaagacggctccgggaaaaaagaggccggtagagcactctcctgcggagccagattcctcctccggaactggaaagtcgggccaacagcctgcaagaaagagattgaattttggtcagactggagacgcagactccgtacctgacccccagcctctcggacagccaccagcagccccctctggtctgggaactaatacgatggcttcaggcagtggcgcaccaatggcagacaataacgagggcgccgacggagtgggtaattcctcgggaaattggcattgcgattccacatggatgggcgacagagtcatcaccaccagcacccgcacctgggctctgcccacctacaacaaccatctgtacaagcaaatttccagccagtctggagccagcaacgacaaccactactttggctacagcaccccttgggggtattttgacttcaacagattccacggccacttctccccacgtgactggcaaagactcatcaacaacaattggggattccggcccaaaagactcaacttcaagctctttaacattcaagtcaaggaggtcacgcagaatgacggtacgacgacgattgccaataaccttaccagcacggttcaggtgtttactgactcggagtaccagctcccgtacgtcctcggctcggcgcatcaaggatgcctcccgccgttcccagcagacgtcttcatggtgccacagtatggatacctcaccctgaacaacgggagtcaggcggtaggacgctcttcattttactgcctggagtactttccttctcagatgctgcgtaccggaaacaactttaccttcagctacacctttgaggacgttccttttcacagcagctacgctcacagccagagtttggaccgtctcatgaatcctctcatcgaccagtacctgtattacttgagcagaacaaacactccaagcggaaccactacgcagtccaggcttcggttttctcaagccggagcgagtgacattcgggaccagtctaggaactggcttcctggaccctgttaccgccagcagcgagtatcaaagacagctgcggacaacaacaacagtgattactcgtggactggagctaccaagtatcacctcaatggaagagactctctggtgaatccgggcacagccatggccagccacaaggacgatgaagaaaagtattttcctcagagcggggttctcatcttcggaaaacaagactcgggaaaaactaatgtggacattgaaagggtcatgattacagacgaagaggaaatcaggaccaccaatcccgtggctacggagcagtatggttctgtatctaccaatctccagagcggcaacacacaagcagctacctcagatgtcaacacacaaggcgttcttccaggcatggtctggcaggacagagacgtgtacctgcagggacccatctgggcaaagattccacacacggacggacattttcacccttctcctcttatgggaggatttggactgaagcaccctcccccgcagattctcatcaagaataccccggtacctgcgaatccttctaccaccttcagcgcggcaaagtttgcttccttcatcacacagtactccacggggcaggtcagcgtggagatcgagtgggagctgcagaaagagaacagcaaacgctggaaccccgagatccagtatacctccaactacaacaagtctgttaatgtggactttactgtggacactaatggcgtgtattcagagcctcgccccattggcacaagatacctgactcgtaatctgtaa

SEQ ID NO: 1018 - DNA, 2208 bp, Artificial Sequence
  Synthetic Polynucleotide
atggctgccgatggttatcttccagattggctcgaggacactctctctgaaggaataagacagtggtggaagctcaaacctggcccaccaccgccaaagcccgcagagcggcataaggacgacagcaggggtcttgtgcttcctgggtacaagtacctcggacccttcaacggactcgacaaaggagagccggtcaacgaggcagacgccgcggccctcgagcacgacaaggcctacgaccggcagctcgacagcggagacaacccgtacctcaagtacaaccacgccgacgcggagtttcaggagcgccttaaagaagatacgtcttttgggggcaacctcgcaagagcagtattccaggcgaaaaagagggttcttgaacctctgggcctggttgaggagcctgttaagacggctccgggaaaaaagaggccggtagagcactctcctgcggagccagattcctcctccggaactggaaagtcgggccaacagcctgcaagaaagagattgaattttggtcagactggagacgcagactccgtacctgacccccagcctctcggacagccaccagcagccccctctggtctgggaactaatacgatggcttcaggcagtggcgcaccaatggcagacaataacgagggcgccgacggagtgggtaattcctcgggaaattggcattgcgattccacatggatgggcgacagagtcatcaccaccagcacccgcacctgggctctgcccacctacaacaaccatctgtacaagcaaatttccagccagtctggagccagcaacgacaaccactactttggctacagcaccccttgggggtattttgacttcaacagattccactgccacttctccccacgtgactggcaaagactcatcaacaacaattggggattccggcccaaaagactcaacttcaagctctttaacattcaagtcaaggaggtcacgcagaatgacggtacgacgacgattgccaataaccttaccagcacggttcaggtgtttactgactcggagtaccagctcccgtacgtcctcggctcggcgcatcaaggatgcctcccgccgttcccagcagacgtcttcatggtgccacagtatggatacctcaccctgaacaacgggagtcaggcggtaggacgctcttcattttactgcctggagtactttccttctcagatgctgcgtaccggaaacaactttaccttcagctacacctttgaggacgttccttttcacagtagctacgctcacagccagagtttggaccgtctcatgaatcctctcatcgaccagtacctgtattacttgagcagaacaaacactccaagcggaaccactacgcagtccaggcttcggttttctcaagccggagcgagtgacattcgggaccagtctaggaactggcttcctgggccctgttaccgccagcagcgagtatcaaagacagctgcggacaacaacaacagtgattactcgtggactggagctaccaagtatcacctcaatggaagagactctctggtgaatccgggcacagccatggccagccacaaggacgatgaagaaaagtattttcctcagagcggggttctcatcttcggaaaacaagactcgggaaaaactaatgtggacattgaaagggtcatgattacagacgaagaggaaatcaggaccaccaatcccgtggctacggagcagtatggttctgtatctaccaatctccagagcggcaacacacaagcagctacctcagatgtcaacacacaaggcgttcttccaggcatggtctggcaggacagagacgtgtacctgcagggacccatctgggcaaagattccacacacggacggacattttcgcccttctcctcttatgggaggatttggactgaagcaccctcccccgcagattctcatcaagaataccccggtacctgcgaatccttctaccaccttcagcgcggcaaagtttgcttccttcatcacacagtactccacggggcaggtcagcgtggagatcgagtgggagctgcagaaagagaacagcaaacgctggaaccccgagatccagtatacctccaactacaacaagtctgttaatgtggactttactgtggacactaatggcgtgtattcagagcctcgccccattggcacaagatacctgactcgtaatctgtaa

SEQ ID NO: 1019 - DNA, 2208 bp, Artificial Sequence
  Synthetic Polynucleotide
atggctgccgatggttatcttccagattggctcgaggacactctctctgaaggaataagacagtggtggaagctcaaacctggcccaccaccaccaaagcccgcagagcggcataaggacgacagcaggggtcttgtgcttcctgggtacaagtacctcggacccttcaacggactcgacaagggagagccggtcaacgaggcagacgccgcggccctcgagcacgacaaagcctacgaccggcagctcgacagcggagacaacccgtacctcaagtacaaccacgccgacgcggagtttcaggagcgccttaaagaagatacgtcttttgggggcaacctcggacgagcagtcttccaggcgaaaaagagggctcttgaacctctgggcctggttgaggaacctgttaagacggctccgggaaaaaagaggccggtagagcactctcctgtggagccagactcctcctcgggaaccggaaaggcgggccagcagcctgcaagaaaaagattgaattttggtcagactggagacgcagactcggtacctgacccccagcctctcggacagccaccagcagccccctctggtctgggaactaatacgatggctacaggcagtggcgcaccaatggcagacaataacgagggcgccgacggagtgggtaattcctcgggaaattggcattgcgattccacatggatgggcgacagagtcatcaccaccagcacccgaacctgggccctgcccacctacaacaaccacctctacaaacaaatttccagccaatcaggagcctcgaacgacaatcactactttggctacagcaccccttgggggtattttgacttcaacagattccactgccacttttcaccacgtgactggcaaagactcatcaacaacaactggggattccgacccaagagactcaacttcaagctctttaacattcaagtcaaagaggtcacgcagaatgacggtacgacgacgattgccaataaccttaccagcacggttcaggtgtttactgactcggagtaccagctcccgtacgtcctcggctcggcgcatcaaggatgcctcccgccgttcccagcagacgtcttcatggtgccacagtatggatacctcaccctgaacaacgggagtcaggcagtaggacgctcttcattttactgcctggagtactttccttctcagatgctgcgtaccggaaacaactttaccttcagctacacttttgaggacgttcctttccacagcagctacgctcacagccagagtctggaccgtctcatgaatcctctcatcgaccagtacctgtattacttgagcagaacaaacactccaagtggaaccaccacgcagtcaaggcttcagttttctcaggccggagcgagtgacattcgggaccagtctaggaactggcttcctggaccctgttaccgccagcagcgagtatcaaagacatctgcggataacaacaacagtgaatactcgtggactggagctaccaagtaccacctcaatggcagagactctctggtgaatccgggcccggccatggcaagccacaaggacgatgaagaaaagttttttcctcagagcggggttctcatctttgggaagcaaggctcagagaaaacaaatgtggacattgaaaaggtcatgattacagacgaagaggaaatcaggacaaccaatcccgtggctacggagcagtatggttctgtatctaccaacctccagagaggcaacagacaagcagctaccgcagatgtcaacacacaaggcgttcttccaggcatggtctggcaggacagagatgtgtaccttcaggggcccatctgggcaaagattccacacacggacggacattttcacccctctcccctcatgggtggattcggacttaaacaccctcctccacagattctcatcaagaacaccccggtacctgcgaatccttcgaccaccttcagtgcggcaaagtttgcttccttcatcacacagtactccacgggacaggtcagcgtggagatcgagtgggagctgcagaaggaaaacagcaaacgctggaatcccgaaattcagtacacttccaactacaacaagtctgttaatgtggactttactgtggacactaatggcgtgtattcagagcctcgccccattggcaccagatacctgactcgtaatctgtaa

SEQ ID NO: 1020 - DNA, 2208 bp, Artificial Sequence
  Synthetic Polynucleotide
atggctgccgatggttatcttccagattggctcgaggacactctctctgaaggaataagacagtggtggaagctcaaacctggcccaccaccaccaaagcccgcagagcggcataaggacgacagcaggggtcttgtgcttcctgggtacaagtacctcggacccttcaacggactcgacaagggagagccggtcaacgaggcagacgccgcggccctcgagcacgacaaagcctacgaccggcagctcgacagcggagacaacccgtacctcaagtacaaccacgccgacgcggagtttcaggagcgccttaaagaagatacgtcttttgggggcaacctcggacgagcagtcttccaggcgaaaaagagggtccttgaacctctgggcctggttgaggaacctgttaagacggctccgggaaaaaagaggccggtagagcactctcctgtggagccagactcctcctcgggaaccggaaaggcgggccagcagcctgcaagaaaaagattgaattttggtcagactggagacgcagactcagtacctgacccccagcctctcggacagccaccagcagccccctctggtctgggaactaatacgatggctacaggcagtggcgcaccaatggcagacaataacgagggcgccgacggagtgggtaattcctcgggaaattggcattgcgattccacatggatgggcgacagagtcatcaccaccagcacccgaacctgggccctgcccacctacaacaaccacctctacaaacaaatttccagccaatcaggagcctcgaacgacaatcactactttggctacagcaccccttgggggtattttgacttcaacagattccactgccacttttcaccacgtgactggcaaagactcatcaacaacaactggggattccgacccaagagactcaacttcaagctctttaacattcaagtcaaagaggtcacgcagaatgacggtacgacgacgattgccaataaccttaccagcacggttcaggtgtttactgactcggagtaccagctcccgtacgtcctcggctcggcgcatcaaggatgcctcccgccgttcccagcagacgtcttcatggtgccacagtatggatacctcaccctgaacaacgggagtcaggcagtaggacgctcttcattttactgcctggagtactttccttctcagatgctgcgtaccggaaacaactttaccttcagctacacttttgaggacgttcctttccacagcagctacgctcacagccagagtctggaccgtctcatgaatcctctcatcgaccagtacctgtattacttgagcagaacaaacactccaagtggaaccaccacgcagtcaaggcttcagttttctcaggccggagcgagtgacattcgggaccagtctaggaactggcttcctggaccctgttaccgccagcagcgagtatcaaagacatctgcggataacaacaacagtgaatactcgtggactggagctaccaagtaccacctcaatggcagagactctctggtgaatccgggcccggccatggcaagccacaaggacgatgaagaaaagttttttcctcagagcggggttctcatctttgggaagcaaggctcagagaaaacaaatgtggacattgaaaaggtcatgattacagacgaagaggaaatcaggacaaccaatcccgtggctacggagcagtatggttctgtatctaccaacctccagagaggcaacagacaagcagctaccgcagatgtcaacacgcaaggcgttcttccaggcacggtctggcaggacagagatgtgtaccttcaggggcccatctgggcaaagattccacacacggacggacattttcacccctctcccctcatgggtggattcggacttaaacaccctcctccacagattctcatcaagaacaccccggtacctgcgaatccttcgaccaccttcagtgcggcaaagtttgcttccttcatcacacagtactccacgggacaggtcagcgtggagatcgagtgggagctgcagaaggaaaacagcaaacgctggaatcccgaaattcagtacacttccaactacaacaagtctgttaatgtggactttactgtggacactaatggcgtgtattcagagcctcgccccattggcaccagatacctgactcgtaatctgtaa

SEQ ID NO: 1021 - DNA, 2208 bp, Artificial Sequence
  Synthetic Polynucleotide
atggctgccgatggttatcttccagattggctcgaggacactctctctgaaggaataagacagtggtggaagctcaaacctggcccaccaccaccaaagcccgcagagcggcataaggacgacagcaggggtcttgtgcttcctgggtacaagtacctcggacccttcaacggactcgacaagggagagccggtcaacgaggcagacgccgcggccctcgagcacgacaaagcctacaaccggcagctcgacagcggagacaacccgtacctcaagtacaaccacgccgacgcggagtttcaggagcgccttaaagaagatacgtcttttgggggcaacctcggacgagcagtcttccaggcgaaaaagagggttcttgaacctctgggcctggttgaggaacctgttaagacggctccgggaaaaaagaggccggtagagcactctcctgtggagccagactcctcctcgggaaccggaaaggcgggccagcagcctgcaagaaaaagattgaattttggtcagactggagacgcagactcagtacctgacccccagcctctcggacagccaccagcagccccctctggtctgggaactaatacgatggctacaggcagtggcgcaccaatggcagacaataacgagggcgccgacggagtgggtaattcctcgggaaattggcattgcgattccacatggatgggcgacagagtcatcaccaccagcacccgaacctgggccctgcccacctacaacaaccacctctacaaacaaatttccagccaatcaggagcctcgaacgacaatcactactttggctacagcaccccttgggggtattttgacttcaacagattccactgccacttttcaccacgtgactggcaaagactcatcaacaacaactggggattccgacccaagagactcaacttcaagctctttaacattcaagtcaaagaggtcacgcagaatgacggtacgacgacgattgccaataaccttaccagcacggttcaggtgtttactgactcggagtaccagctcccgtacgtcctcggctcggcgcatcaaggatgcctcccgccgttcccagcagacgtcttcatggtgccacagtatggatacctcaccctgaacaacgggagtcaggcagtaggacgctcttcattttactgcctggagtactttccttctcagatgctgcgtaccggaaacaactttaccttcagctacacttttgaggacgttcctttccacagcagctacgctcacagccagagtctggaccgtctcatgaatcctctcatcgaccagtacctgtattacttgagcagaacaaacactccaagtggaaccaccacgcagtcaaggcttcagttttctcaggccggagcgagtgacattcgggaccagtctaggaactggcttcctggaccctgttaccgccagcagcgagtatcaaagacatctgcggataacaacaacagtgaatactcgtggactggagctaccaagtaccacctcaatggcagggactctctggtgaatccgggcccggccatggcaagccacaaggacgatgaagaaaagttttttcctcagagcggggttctcatctttgggaagcaaggctcagagaaaacaaatgtggacattgaaaaggtcatgattacagacgaagaggaaatcaggacaaccaatcccgtggctacggagcagtatggttctgtatctaccaacctccagagaggcaacagacaagcagctaccgcagatgtcaacacacaaggcgttcttccaggcatggtctggcaggacagagatgtgtaccttcaggggcccatctgggcaaagattccacacacggacggacattttcacccctctcccctcatgggtggattcggacttaaacaccctcctccacagattctcatcaagaacaccccggtacctgcgaatccttcgaccaccttcagtgcggcaaagtttgcttccttcatcacacagtactccacgggacaggtcagcgtggagatcgagtgggagctgcagaaggaaaacagcaaacgcgggaatcccgaaattcagtacacttccaactacaacaagtctgttaatgtggactttactgtggacactaatggcgtgtattcagagcctcgccccattggcaccagatacctgactcgtaatctgtaa

SEQ ID NO: 1022 - DNA, 2208 bp, Artificial Sequence
  Synthetic Polynucleotide
atggctgccgatggttatcttccagattggctcgaggacactctctctgaaggaataagacagtggtggaagctcaaacctggcccaccaccaccaaagcccgcagagcggcataaggacgacagcaggggtcttgtgcttcctgggtacaagtacctcggacccttcaacggactcgacaagggagagccggtcaacgaggcagacgccgcggccctcgagcacgacaaagcctacgaccggcagctcgacagcggagacaacccgtacctcaagtacaaccacgccgacgcggagtttcaggagcgccttaaagaagatacgtcttttgggggcaacctcggacgagcagtcttccaggcgaaaaagagggttcttgaacctctgggcctggttgaggaacctgttaagacggctccgggaaaaaagaggccggtagagcactctcctgtggagccagactcctcctcgggaaccggaaaggcgggccagcagcctgcaagaaaaagattgaattttggtcagactggagacgcagactcagtacctgacccccagcctctcggacagccaccagcagccccctctggtctgggaactaatacgatggctacaggcagtggcgcaccaatggcagacaataacgagggcgccgacggagtgggtaattcctcgggaaattggcattgcgattccacatggatgggcgacagagtcatcaccaccagcacccgaacctgggccctgcccacctacaacaaccacctctacaaacaaatttccagccaatcaggagcctcgaacgacaatcactactttggctacagcaccccttgggggtattttgacttcaacagattccactgccacttttcaccacgtgactggcaaagactcatcaacaacaactggggattccgacccaagagactcaacttcaagctctttaacattcaagtcaaagaggtcacgcagaatgacggtacgacgacgattgccaataaccttaccagcacggttcaggtgtttactgactcggagtaccagctcccgtacgtcctcggctcggcgcatcaaggatgcctcccgccgttcccagcagacgtcttcatggtgccacagtatggatacctcaccctgaacaacgggagtcaggcagtaggacgctcttcattttactgcctggagtactttccttctcagatgctgcgtaccggaaacaactttaccttcagctacacttttgaggacgttcctttccacagcagctacgctcacagccagagtctggaccgtctcatgaatcctctcatcgaccagtacctgtattacttgagcagaacaaacactccaagtggaaccaccacgcagtcaaggcttcagttttctcaggccggagcgagtgacattcgggaccagtctaggaactggcttcctggaccctgttaccgccagcagcgagtatcaaagacatctgcggataacaacaacagtgaatacccgtggactggagctaccaagtaccacctcaatggcagagactctctggtgaatccgggcccggccatggcaagccacaaggacgatgaagaaaagttttttcctcagagcggggttctcatctttgggaagcaaggctcagagaaaacaaatgtggacattgaaaaggtcatgattacagacgaagaggaaatcaggacaaccaatcccgtggctacggagcagtatggttctgtatctaccaacctccagagaggcaacagacaagcagctaccgcagatgtcaacacacaaggcgttcttccaggcacggtctggcaggacagagatgtgtaccttcaggggcccatctgggcaaagattccacacacggacggacattttcacccctctcccctcatgggtggattcggacttaaacaccctcctccacagattctcatcaagaacaccccggtacctgcgaatccttcgaccaccttcagtgcggcaaagtttgcttccttcatcacacagtactccacgggacaggtcagcgtggagatcgagtgggagctgcagaaggaaaacagcaaacgctggaatcccgaaattcagtacacttccaactacaacaagtctgttaatgtggactttactgtggacactaatggcgtgtattcagagcctcgccccattggcaccagatacctgactcgtaatctgtaa

SEQ ID NO: 1023 - DNA, 2208 bp, Artificial Sequence
  Synthetic Polynucleotide
atggctgccgatggttatcttccagattggctcgaggacactctctctgaaggaataagacagtggtggaagctcaaacctggcccaccaccaccaaagcccgcagagcggcataaggacgacagcaggggtcttgtgcttcctgggtacaagtacctcggacccttcaacggactcgacaagggagagccggtcaacgaggcagacgccgcggccctcgagcacgacaaagcctacgaccggcagctcgacagcggagacaacccgtacctcaagtacaaccacgccgacgcggagtttcaggagcgccttaaagaagatacgtcttttgggggcaacctcggacgagcagtcttccaggcgaaaaagagggttcttgaacctctgggcctggttgaggaacctgttaagacggctccgggaaaaaagaggccggtagagcactctcctgtggagccagactcctcctcgggaaccggaaaggcgggccagcagcctgcaagaaaaagattgaattttggtcagactggagacgcagactcagtacctgacccccagcctctcggacagccaccagcagccccctctggtctgggaactaatacgatggctacaggcagtggcgcaccaatggcagacaataacgagggcgccgacggagtgggtaattcctcgggaaattggcattgcgattccacatggatgggcgacagagtcatcaccaccagcacccgaacctgggccctgcccacctacaacaaccacctctacaaacaaatttccagccaatcaggagcctcgaacgacaatcactactttggctacagcaccccttgggggtattttgacttcaacagattccactgccacttttcaccacgtgactggcaaagactcatcaacaacaactggggattccgacccaagagactcaacttcaagctctttaacattcaagtcaaagaggtcacgcagaatgacggtacgacgacgattgccaataaccttaccagcacggttcaggtgtttactgactcggagtaccagctcccgtacgtcctcggctcggcgcatcaaggatgcctcccgccgttcccagcagacgtcttcatggtgccacagtatggatacctcaccctgaacaacgggagtcaggcagtaggacgctcttcattttactgcctggagtactttccttctcagatgctgcgtaccggaaacaactttaccttcagctacacttttgaggacgttcctttccacagcagctacgctcacagccagagtctggaccgtctcatgaatcctctcatcgaccagtacctgtattacttgagcagaacaaacactccaagtggaaccaccacgcagtcaaggcttcagttttctcaggccggagcgagtgacattcgggaccagtctaggaactggcttcctggaccctgttaccgccagcagcgagtatcaaagacatctgcggataacaacaacagtgaatactcgtggactggagctaccaagtaccacctcaatggcagagactctctggtgaatccgggcccggccatggcaagccacaaggacgatgaagaaaagttttttcctcagagcggggttctcatctttgggaagcaaggctcagagaaaacaaatgtgggcattgaaaaggtcatgattacagacgaagaggaaatcaggacaaccaatcccgtggctacggagcagtatggttctgtatctaccaacctccagagaggcaacagacaagcagctaccgcagatgtcaacacacaaggcgttcttccaggcacggtctggcaggacagagatgtgtaccttcaggggcccatctgggcaaagattccacacacggacggacattttcacccctctcccctcatgggtggattcggacttaaacaccctcctccacagattctcatcaagaacaccccggtacctgcgaatccttcgaccaccttcagtgcggcaaagtttgcttccttcatcacacagtactccacgggacaggtcagcgtggagatcgagtgggagctgcagaaggaaaacagcaaacgctggaatcccgaaattcagtacacttccaactacaacaagtctgttaatgtggactttactgtggacactaatggcgtgtattcagagcctcgccccattggcaccagatacctgactcgtaatctgtaa

SEQ ID NO: 1024 - DNA, 2208 bp, Artificial Sequence
  Synthetic Polynucleotide
atggctgccgatggttatcttccagattggctcgaggacactctctctgaaggaataagacagtggtggaagctcaaacctggcccaccaccaccaaagcccgcagggcggcataaggacgacagcaggggtcttgtgcttcctgggtacaagtacctcggacccttcaacggactcgacaagggagagccggtcaacgaggcagacgccgcggccctcgagcacgacaaagcctacgaccggcagctcgacagcggagacaacccgtacctcaagtacaaccacgccgacgcggagtttcaggagcgccttaaagaagatacgtcttttgggggcaacctcggacgagcagtcttccaggcgaaaaagagggctcttgaacctctgggcctggttgaggaacctgttaagacggctccgggaaaaaagaggccggtagagcactctcctgtggagccagactcctcctcgggaaccggaaaggcgggccagcagcctgcaagaaaaagattgaattttggtcagactggagacgcagactcagtacctgacccccagcctctcggacagccaccagcagccccctctggtctgggaactaatacgatggctacaggcagtggcgcaccaatggcagacaataacgagggcgccgacggagtgggtaattcctcgggaaattggcattgcgattccacatggatgggcgacagagtcatcaccaccagcacccgaacctgggccctgcccacctacaacaaccacctctacaaacaaatttccagccaatcaggagcctcgaacgacaatcactactttggctacagcaccccttgggggtattttgacttcaacagattccactgccacttttcaccacgtgactggcaaagactcatcaacaacaactggggattccgacccaagagactcaacttcaagctctttaacattcaagtcaaagaggtcacgcagaatgacggtacgacgacgattgccaataaccttaccagcacggttcaggtgtttactgactcggagtaccagctcccgtacgtcctcggctcggcgcatcaaggatgcctcccgccgttcccagcagacgtcttcatggtgccacagtatggatacctcaccctgaacaacgggagtcaggcagtaggacgctcttcattttactgcctggagtactttccttctcagatgctgcgtaccggaaacaactttaccttcagctacacttttgaggacgttcctttccacagcagctacgctcacagccagagtctggaccgtctcatgaatcctctcatcgaccagtacctgtattacttgagcagaacaaacactccaagtggaaccaccacgcagtcaaggcttcagttttctcaggccggagcgagtgacattcgggaccagtctaggaactggcttcctggaccctgttaccgccagcagcgagtatcaaagacatctgcggataacaacaacagtgaatactcgtggactggagctaccaagtaccacctcaatggcagagactctctggtgaatccgggcccggccatggcaagccacaaggacgatgaagaaaagttttttcctcagagcggggttctcatctttgggaagcaaggctcagagaaaacaaatgtggacattgaaaaggtcatgattacagacgaagaggaaatcaggacaaccaatcccgtggctacggagcagtatggttctgtatctaccaacctccagagaggcaacagacaagcagctaccgcagatgtcaacacacaaggcgttcttccaggcatggtctggcaggacagagatgtgtaccttcaggggcccatctgggcaaagattccacacacggacggacattttcacccctctcccctcatgggtggattcggacttaaacaccctcctccacagattctcatcaagaacaccccggtacctgcgaatccttcgaccaccttcagtgcggcaaagtttgcttccttcatcacacagtactccacgggacaggtcagcgtggagatcgagtgggagctgcagaaggaaaacagcaaacgctggaatcccgaaattcagtacacttccaactacaacaagtctgttaatgtggactttactgtggacactaatggcgtgtattcagagcctcgccccattggcaccagatacctgactcgtaatctgtaa

SEQ ID NO: 1025 - DNA, 2208 bp, Artificial Sequence
  Synthetic Polynucleotide
atggctgccgatggttatcttccagattggctcgaggacactctctctgaaggaataagacagtggtggaagctcaaacctggcccaccaccaccaaagcccgcagagcggcataaggacgacagcaggggtcttgtgcttcctgggtacaagtacctcggacccttcaacggactcgacaagggagagccggtcaacgaggcagacgccgcggccctcgagcacgacaaagcctacgaccggcagctcgacagcggagacaacccgtacctcaagtacaaccacgccgacgcggagtttcaggagcgccttaaagaagatacgtcttttgggggcaacctcggacgagcagtcttccaggcgaaaaagagggttcttgaacctctgggcctggttgaggaacctgttaagacggctccgggaaaaaagaggccggtagagcactctcctgtggagccagactcctcctcgggaaccggaaaggcgggccagcagcctgcaagaaaaagattgaattttggtcagactggagacgcagactcagtacctgacccccagcctctcggacagccaccagcagccccctctggtctgggaactaatacgatggctacaggcagtggcgcaccaatggcagacaataacgagggcgccgacggagtgggtaattcctcgggaaattggcattgcgattccacatggatgggcgacagagtcatcaccaccagcacccgaacctgggccctgcccacctacaacaaccacctctacaaacaaatttccagccaatcaggagcctcgaacgacaatcactactttggctacagcaccccttgggggtattttgacttcaacagattccactgccacttttcaccacgtgactggcaaagactcatcaacaacaactggggattccgacccaagagactcaacttcaagctctttaacattcaagtcaaagaggtcacgcagaatgacggtacgacgacgattgccaataaccttaccagcacggttcaggtgtttactgactcggagtaccagctcccgtacgtcctcggctcggcgcatcaaggatgcctcccgccgttcccagcagacgtcttcatggtgccacagtatggatacctcaccctgaacaacgggagtcaggcagtaggacgctcttcattttactgcctggagtactttccttctcagatgctgcgtaccggaaacaactttaccttcagctacacttttgaggacgttcctttccacagcagctacgctcacagccagagtctggaccgtctcatgaatcctctcatcgaccagtacctgtattacttgagcagaacaaacactccaagtggaaccaccacgcagtcaaggcctcagttttctcaggccggagcgagtgacattcgggaccagtctaggaactggcttcctggaccctgttaccgccagcagcgagtatcaaagacatctgcggataacaacaacagtgaatactcgtggactggagctaccaagtaccacctcaatggcagagactctctggtgaatccgggcccggccatggcaagccacaaggacgatgaagaaaagttttttcctcagagcggggttctcatctttgggaagcaaggctcagagaaaacaaatgtggacattgaaaaggtcatgattacagacgaagaggaaatcaggacaaccaatcccgtggctacggagcagtatggttctgtatctaccaacctccagagaggcaacagacaagcagctaccgcagatgtcaacacacaaggcgttcttccaggcacggtctggcaggacagagatgtgtaccttcaggggcccatctgggcaaagattccacacacggacggacattttcacccctctcccctcatgggtggattcggacttaaacaccctcctccacagattctcatcaagaacaccccggtacctgcgaatccttcgaccaccttcagtgcggcaaagtttgcttccttcatcacacagtactccacgggacaggtcagcgtggagatcgagtgggagctgcagaaggaaaacagcaaacgctggaatcccgaaattcagtacacttccaactacaacaagtctgttaatgtggactttactgtggacactaatggcgtgtattcagagcctcgccccattggcaccagatacctgactcgtaatctgtaa

SEQ ID NO: 1026 - DNA, 2208 bp, Artificial Sequence
  Synthetic Polynucleotide
atggctgccgatggttatcttccagattggctcgaggacactctctctgaaggaataagacagtggtggaagctcaaacctggcccaccaccaccaaagcccgcagagcggcataaggacgacagcaggggtcttgtgcttcctgggtacaagtacctcggacccttcaacggactcgacaagggagagccggtcaacgaggcagacgccgcggccctcgagcacgacaaagcctacgaccggcagctcgacagcggagacaacccgtacctcaagtacaaccacgccgacgcggagtttcaggagcgccttaaagaagatacgtcttttgggggcaacctcggacgagcagtcttccaggcgaaaaagagggttcttgaacctctgggcctggttgaggaacctgttaagacggctccgggaaaaaagaggccggtagagcactctcctgtggagccagactcctcctcgggaaccggaaaggcgggccagcagcctgcaagaaaaagattgaattttggtcagactggagacgcagactcagtacctgacccccagcctctcggacagccaccagcagccccctctggtctgggaactaatacgatggctacaggcagtggcgcaccaatggcagacaataacgagggcgccgacggagtgggtaattcctcgggaaattggcattgcgattccacatggatgggcgacagagtcatcaccaccagcacccgaacctgggccctgcccacctacaacaaccacctctacaaacaaatttccagccaatcaggagcctcgaacgacaatcactactttggctacagcaccccttgggggtattttgacttcaacagattccactgccacttttcaccacgtgactggcaaagactcatcaacaacaactggggattccgacccaagagactcaacttcaagctctttaacattcaagtcaaagaggtcacgcagaatgacggtacgacgacgattgccaataaccttaccagcacggttcaggtgtttactgactcggagtaccagctcccgtacgtcctcggctcggcgcatcaaggatgcctcccgccgttcccagcagacgtcttcatggtgccacagtatggatacctcaccctgaacaacgggagtcaggcagtaggacgctcttcattttactgcctggagtactttccttctcagatgctgcgtaccggaaacaactttaccttcagctacacttttgaggacgttcctttccacagcagctacgctcacagccagagtctggaccgtctcatgaatcctctcatcgaccagtacctgtattacttgagcagaacaaacactccaagtggaaccaccacgcagtcaaggcttcagttttctcaggccggagcgagtgacattcgggaccagtctaggaactggcttcctggaccctgttaccgccagcagcgagtatcaaagacatctgcggataacaacaacagtgaatactcgtggactggagctaccaagtaccacctcaatggcagagactctctggtgaatccgggcccggccatggcaagccacaaggacgatgaagaaaagttttttcctcagagcggggttctcatctttgggaagcaaggctcagagaaaacaaatgtggacattgaaaaggtcatgattacagacgaagaggaaatcaggacaaccaatcccgtggctacggagcagtatggttctgtatctaccaacctccagagaggcaacagacaagcagctaccgcagatgtcaacacacaaggcgttcttccaggcatggtctggcaggacagagatgtgtaccttcaggggcccatctgggcaaagattccacacacggacggacattttcacccctctcccctcatgggtggattcggacttaaacaccctcctccacagattctcatcaagaacaccccggtacctgcgaatccttcgaccaccttcagtgcggcaaagtttgcttccttcatcacacagtactccacgggacaggtcagcgtggagatcgagtgggagctgcagaaggaaaacagcaaacgctggaatcccgaaattcagtacacttccaactacaacaagtctgttaatgtggactttactgtggacactaatggcgtgtattcagagcctcgccccattggcaccagatacctgactcgtaatctgtaa

SEQ ID NO: 1027 - DNA, 2208 bp, Artificial Sequence
  Synthetic Polynucleotide
atggctgccgatggttatcttccagattggctcgaggacactctctctgaaggaataagacagtggtggaagctcaaacctggcccaccaccaccaaagcccgcagagcggcataaggacgacagcaggggtcttgtgcttcctgggtacaagtacctcggacccttcaacggactcgacaagggagagccggtcaacgaggcagacgccgcggccctcgagcacgacaaagcctacaaccggcaactcgacagcggagacaacccgtacctcaagtacaaccacgccgacgcggagtttcaggagcgccttaaagaagatacgtcttttgggggcaacctcggacgagcagtcttccaggcgaaaaagagggttcttgaacctctgggcctggttgaggaacctgttaagacggctccgggaaaaaagaggccggtagagcactctcctgtggagccagactcctcctcgggaaccggaaaggcgggccagcagcctgcaagaaaaagattgaattttggtcagactggagacgcagactcagtacctgacccccagcctctcggacagccaccagcagccccctctggtctgggaactaatacgatggctacaggcagtggcgcaccaatggcagacaataacgagggcgccgacggagtgggtaattcctcgggaaattggcattgcgattccacatggatgggcgacagagtcatcaccaccagcacccgaacctgggccctgcccacctacaacaaccacctctacaaacaaatttccagccaatcaggagcctcgaacgacaatcactactttggctacagcaccccttgggggtattttgacttcaacagattccactgccacttttcaccacgtgactggcaaagactcatcaacaacaactggggattccgacccaagagactcaacttcaagctctttaacattcaagtcaaagaggtcacgcagaatgacggtacgacgacgattgccaataaccttaccagcacggttcaggtgtttactgactcggagtaccagctcccgtacgtcctcggctcggcgcatcaaggatgcctcccgccgttcccagcagacgtcttcatggtgccacagtatggatacctcaccctgaacaacgggagtcaggcagtaggacgctcttcattttactgcctggagtactttccttctcagatgctgcgtaccggaaacaactttaccttcagctacacttttgaggacgttcctttccacagcagctacgctcacagccagagtctggaccgtctcatgaatcctctcatcgaccagtacctgtattacttgagcagaacaaacactccaagtggaaccaccacgcagtcaaggcttcagttttctcaggccggagcgagtgacattcgggaccagtctaggaactggcttcctggaccctgttaccgccagcagcgagtatcaaagacatctgcggataacaacaacagtgaatactcgtggactggagctaccaagtaccacctcaatggcagggactctctggtgaatccgggcccggccatggcaagccacaaggacgatgaagaaaagttttttcctcagagcggggttctcatctttgggaagcaaggctcagagaaaacaaatgtggacattgaaaaggtcatgattacagacgaagaggaaatcaggacaaccaatcccgtggctacggagcagtatggttctgtatctaccaacctccagagaggcaacagacaagcagctaccgcagatgtcaacacacaaggcgttcttccaggcatggtctggcaggacagagatgtgtaccttcaggggcccatctgggcaaagattccacacacggacggacattttcacccctctcccctcatgggtggattcggacttaaacaccctcctccacagattctcatcaagaacaccccggtacctgcgaatccttcgaccaccttcagtgcggcaaagtttgcttccttcatcacacagtactccacgggacaggtcagcgtggagatcgagtgggagctgcagaaggaaaacagcaaacgctggaatcccgaaattcagtacacttccaactacaacaagtctgttaatgtggactttactgtggacactaatggcgtgtattcagagcctcgccccattggcaccagatacctgactcgtaatctgtaa

SEQ ID NO: 1028 - DNA, 2208 bp, Artificial Sequence
  Synthetic Polynucleotide
atggctgccgatggttatcttccagattggctcgaggacactctctctgaaggaataagacagtggtggaagctcaaacctggcccaccaccaccaaagcccgcagagcggcataaggacgacagcaggggtcttgtgcttcctgggtacaagtacctcggacccttcaacggactcgacaagggagagccggtcaacgaggcagacgccgcggccctcgagcacgacaaagcctacgaccggcagctcgacagcggagacaacccgtacctcaagtacaaccacgccgacgcggagtttcaggagcgccttaaagaagatacgtcttttgggggcaacctcggacgagcagtcttccaggcgaaaaagagggttcttgaacctctgggcctggttgaggaacctgttaagacggctccgggaaaaaagaggccggtagagcactctcctgtggagccagactcctcctcgggaaccggaaaggcgggccagcagcctgcaagaaaaagattgaattttggtcagactggagacgcagactcagtacctgacccccagcctctcggacagccaccagcagccccctctggtctgggaactaatacgatggctacaggcagtggcgcaccaatggcagacaataacgagggcgccgacggagtgggtaattcctcgggaaattggcattgcgattccacatggatgggcgacagagtcatcaccaccagcacccgaacctgggccctgcccacctacaacaaccacctctacaaacaaatttccagccaatcaggagcctcgaacgacaatcactactttggctacagcaccccttgggggtattttgacttcaacagattccactgccacttttcaccacgtgactggcaaagactcatcaacaacaactggggattccgacccaagagactcaacttcaagctctttaacattcaagtcaaagaggtcacgcagaatgacggtacgacgacgattgccaataaccttaccagcacggttcgggtgtttactgactcggagtaccagctcccgtacgtcctcggctcggcgcatcaaggatgcctcccgccgttcccagcagacgtcttcatggtgccacagtatggatacctcaccctgaacaacgggagtcaggcagtaggacgctcttcattttactgcctggagtactttccttctcagatgctgcgtaccggaaacaactttaccttcagctacacttttgaggacgttcctttccacagcagctacgctcacagccagagtctggaccgtctcatgaatcctctcatcgaccagtacctgtattacttgagcagaacaaacactccaagtggaaccaccacgcagtcaaggcttcagttttctcaggccggagcgagtgacattcgggaccagtctaggaactggcttcctggaccctgttaccgccagcagcgagtatcaaagacatctgcggataacaacaacagtgaatactcgtggactggagctaccaagtaccacctcaatggcagagactctctggtgaatccgggcccggccatggcaagccacaaggacgatgaagaaaagttttttcctcagagcggggttctcatctttgggaagcaaggctcagagaaaacaaatgtggacattgaaaaggtcatgattacagacgaagaggaaatcaggacaaccaatcccgtggctacggagcagtatggttctgtatctaccaacctccagagaggcaacagacaagcagctaccgcagatgtcaacacacaaggcgttcttccaggcacggtctggcaggacagagatgtgtaccttcaggggcccatctgggcaaagattccacacacggacggacattttcacccctctcccctcatgggtggattcggacttaaacaccctcctccacagattctcatcaagaacaccccggtacctgcgaatccttcgaccaccttcagtgcggcaaagtttgcttccttcatcacacagtactccacgggacaggtcagcgtggagatcgagtgggagctgcagaaggaaaacagcaaacgctggaatcccgaaattcagtacacttccaactacaacaagtctgttaatgtggactttactgtggacactaatggcgtgtattcagagcctcgccccattggcaccagatacctgactcgtaatctgtaa

SEQ ID NO: 1029 - DNA, 2208 bp, Artificial Sequence
  Synthetic Polynucleotide
atggctgccgatggttatcttccagattggctcgaggacactctctctgaaggaataagacagtggtggaagctcaaacctggcccaccaccaccaaagcccgcagagcggcataaggacgacagcaggggtcttgtgcttcctgggtacaagtacctcggacccttcaacggactcgacaagggagagccggtcaacgaggcagacgccgcggccctcgagcacgacaaagcctacgaccggcagctcgacagcggagacaacccgtacctcaagtacaaccacgccgacgcggagtttcaggagcgccttaaagaagatacgtcttttgggggcaacctcggacgagcagtcttccaggcgaaaaagagggttcttgaacctctgggcctggttgaggaacctgttaagacggctccgggaaaaaagaggccggtagagcactctcctgtggagccagactcctcctcgggaaccggaaaggcgggccagcagcctgcaagaaaaagattgaattttggtcagactggagacgcagactcagtacctgacccccagcctctcggacagccaccagcagccccctctggtctgggaactaatacgatggctacaggcagtggcgcaccaatggcagacaataacgagggcgccgacggagtgggtaattcctcgggaaattggcattgcgattccacatggatgggcgacagagtcatcaccaccagcacccgaacctgggccctgcccacctacaacaaccacctctacaaacaaatttccagccaatcaggagcctcgaacgacaatcactactttggctacagcaccccttgggggtattttgacttcaacagattccactgccacttttcaccacgtgactggcaaagactcatcaacaacaactggggattccgacccaagagactcaacttcaagctctttaacattcaagtcaaagaggtcacgcagaatgacggtacgacgacgattgccaataaccttaccagcacggttcaggtgtttactgactcggagtaccagctcccgtacgtcctcggctcggcgcatcaaggatgcctcccgccgttcccagcagacgtcttcatggtgccacagtatggatacctcaccctgaacaacgggagtcaggcagtaggacgctcttcattttactgcctggagtactttccttctcagatgctgcgtaccggaaacaactttaccttcagctacacttttgaggacgctcctttccacagcagctacgctcacagccagagtctggaccgtctcatgaatcctctcatcgaccagtacctgtattacttgagcagaacaaacactccaagtggaaccaccacgcagtcaaggcttcagttttctcaggccggagcgagtgacattcgggaccagtctaggaactggcttcctggaccctgttaccgccagcagcgagtatcaaagacatctgcggataacaacaacagtgaatactcgtggactggagctaccaagtaccacctcaatggcagagactctctggtgaatccgggcccggccatggcaagccacaaggacgatgaagaaaagttttttcctcagagcggggttctcatctttgggaagcaaggctcagagaaaacaaatgtggacattgaaaaggtcatgattacagacgaagaggaaatcaggacaaccaatcccgtggctacggagcagtatggttctgtatctaccaacctccagagaggcaacagacaagcagctaccgcagatgtcaacacacaaggcgttcttccaggcacggtctggcaggacagagatgtgtaccttcaggggcccatctgggcaaagattccacacacggacggacattttcacccctctcccctcatgggtggattcggacttaaacaccctcctccacagattctcatcaagaacaccccggtacctgcgaatccttcgaccaccttcagtgcggcaaagtttgcttccttcatcacacagtactccacgggacaggtcagcgtggagatcgagtgggagctgcagaaggaaaacagcaaacgctggaatcccgaaattcagtacacttccaactacaacaagtctgttaatgtggactttactgtggacactaatggcgtgtattcagagcctcgccccattggcaccagatacctgactcgtaatctgtaa

SEQ ID NO: 1030 - DNA, 2205 bp, Artificial Sequence
  Synthetic Polynucleotide
atggctgccgatggttatcttccagattggctcgaggacactctctctgaaggaataagacagtggtggaagctcaaacctggcccaccaccaaagcccgcagagcggcataaggacgacagcaggggtcttgtgcttcctgggtacaagtacctcggacccttcaacggactcgacaagggagagccggtcaacgaggcagacgccgcggccctcgagcacgacaaagcctacgaccggcagctcgacagcggagacaacccgtacctcaagtacaaccacgccgacgcggagtttcaggagcgccttaaagaagatacgtcttttgggggcaacctcggacgagcagtcttccaggcgaaaaagagggttcttgaacctctgggcctggttgaggaacctgttaagacggctccgggaaaaaagaggccggtagagcactctcctgtggagccagactcctcctcgggaaccggaaaggcgggccagcagcctgcaagaaaaagattgaattttggtcagactggagacgcagactcagtacctgacccccagcctctcggacagccaccagcagccccctctggtctgggaactaatacgatggctacaggcagtggcgcaccaatggcagacaataacgagggcgccgacggagtgggtaattcctcgggaaattggcattgcgattccacatggatgggcgacagagtcatcaccaccagcacccgaacctgggccctgcccacctacaacaaccacctctacaaacaaatttccagccaatcaggagcctcgaacgacaatcactactttggctacagcaccccttgggggtattttgacttcaacagattccactgccacttttcaccacgtgactggcaaagactcatcaacaacaactggggattccgacccaagagactcaacttcaagctctttaacattcaagtcaaagaggtcacgcagaatgacggtacgacgacgattgccaataaccttaccagcacggttcaggtgtttactgactcggagtaccagctcccgtacgtcctcggctcggcgcatcaaggatgcctcccgccgttcccagcagacgtcttcatggtgccacagtatggatacctcaccctgaacaacgggagtcaggcagtaggacgctcttcattttactgcctggagtactttccttctcagatgctgcgtaccggaaacaactttaccttcagctacacttttgaggacgttcctttccacagcagctacgctcacagccagagtctggaccgtctcatgaatcctctcatcgaccagtacctgtattacttgagcagaacaaacactccaagtggaaccaccacgcagtcaaggcttcagttttctcaggccggagcgagtgacattcgggaccagtctaggaactggcttcctggaccctgttaccgccagcagcgagtatcaaagacatctgcggataacaacaacagtgaatactcgtggactggagctaccaagtaccacctcaatggcagagactctctggtgaatccgggcccggccatggcaagccacaaggacgatgaagaaaagttttttcctcagagcggggttctcatctttgggaagcaaggctcagagaaaacaaatgtggacattgaaaaggtcatgattacagacgaagaggaaatcaggacaaccaatcccgtggctacggagcagtatggttctgtatctaccaacctccagagaggcaacagacaagcagctaccgcagatgtcaacacacaaggcgttcttccaggcacggtctggcaggacagagatgtgtaccttcaggggcccatctgggcaaagattccacacacggacggacattttcacccctctcccctcatgggtggattcggacttaaacaccctcctccacagattctcatcaagaacaccccggtacctgcgaatccttcgaccaccttcagtgcggcaaagtttgcttccttcatcacacagtactccacgggacaggtcagcgtggagatcgagtgggagctgcagaaggaaaacagcaaacgctggaatcccgaaattcagtacacttccaactacaacaagtctgttaatgtggactttactgtggacactaatggcgtgtattcagagcctcgccccattggcaccagatacctgactcgtaatctgtaa

SEQ ID NO: 1031 - DNA, 2208 bp, Artificial Sequence
  Synthetic Polynucleotide
atggctgccgatggttatcttccagattggctcgaggacactctctctgaaggaataagacagtggtggaagctcaaacctggcccaccaccaccaaagcccgcagagcggcataaggacgacagcaggggtcttgtgcttcctgggtacaagtacctcggacccttcaacggactcgacaagggagagccggtcaacgaggcagacgccgcggccctcgagcacgacaaagcctacgaccggcagctcgacagcggagacaacccgtacctcaagtacaaccacgccgacgcggagtttcaggagcgccttaaagaagatacgtcttttgggggcaacctcggacgagcagtcttccaggcgaaaaagagggctcttgaacctctgggcctggttgaggaacctgttaagacggctccgggaaaaaagaggccggtagagcactctcctgtggagccagactcctcctcgggaaccggaaaggcgggccagcagcctgcaagaaaaagattgaattttggtcagactggagacgcagactcagtacctgacccccagcctctcggacagccaccagcagccccctctggtctgggaactaatacgatggctacaggcagtggcgcaccaatggcagacaataacgagggcgccgacggagtgggtaattcctcgggaaattggcattgcgattccacatggatgggcgacagagtcatcaccaccagcacccgaacctgggccctgcccacctacaacaaccacctctacaaacaaatttccagccaatcaggagcctcgaacgacaatcactactttggctacagcaccccttgggggtattttgacttcaacagattccactgccacttttcaccacgtgactggcaaagactcatcaacaacaactggggattccgacccaagagactcaacttcaagctctttaacattcaagtcaaagaggtcacgcagaatgacggtacgacgacgattgccaataaccttaccagcacggttcaggtgtttactgactcggagtaccagctcccgtacgtcctcggctcggcgcatcaaggatgcctcccgccgttcccagcagacgtcttcatggtgccacagtatggatacctcaccctgaacaacgggagtcaggcagtaggacgctcttcattttactgcctggagtactttccttctcagatgctgcgtaccggaaacaactttaccttcagctacacttttgaggacgttcctttccacagcagctacgctcacagccagagtctggaccgtctcatgaatcctctcatcgaccagtacctgtattacttgagcagaacaaacactccaagtggaaccaccacgcagtcaaggcttcggttttctcaggccggagcgagtgacattcgggaccagtctaggaactggcttcctggaccctgttaccgccagcagcgagtatcaaagacatctgcggataacaacaacagtgaatactcgtggactggagctaccaagtaccacctcaatggcagagactctctggtgaatccgggcccggccatggcaagccacaaggacgatgaagaaaagttttttcctcagagcggggttctcatctttgggaagcaaggctcagagaaaacaaatgtggacattgaaaaggtcatgattacagacgaagaggaaatcaggacaaccaatcccgtggctacggagcagtatggttctgtatctaccaacctccagagaggcaacagacaagcagctaccgcagatgtcaacacacaaggcgttcttccaggcatggtctggcaggacagagatgtgtaccttcaggggcccatctgggcaaagattccacacacggacggacattttcacccctctcccctcatgggtggattcggacttaaacaccctcctccacagattctcatcaagaacaccccggtacctgcgaatccttcgaccaccttcagtgcggcaaagtttgcttccttcatcacacagtactccacgggacaggtcagcgtggagatcgagtgggagctgcagaaggaaaacagcaaacgctggaatcccgaaattcagtacacttccaactacaacaagtctgttaatgtggactttactgtggacactaatggcgtgtattcagagcctcgccccattggcaccagatacctgactcgtaatctgtaa

SEQ ID NO: 1032 - DNA, 2208 bp, Artificial Sequence
  Synthetic Polynucleotide
atggctgccgatggttatcttccagattggctcgaggacactctctctgaaggaataagacagtggtggaagctcaaacctggcccaccaccaccaaagcccgcagagcggcataaggacgacagcaggggtcttgtgcttcctgggtacaagtacctcggacccttcaacggactcgacaagggagagccggtcaacgaggcagacgccgcggccctcgagcacgacaaagcctacgaccggcagctcgacagcggagacaacccgtacctcaagtacaaccacgccgacgcggagtttcaggagcgccttaaagaagatacgtcttttgggggcaacctcggacgagcagtcttccaggcgaaaaagagggttcttgaacctctgggcctggttgaggaacctgttaagacggctccgggaaaaaagaggccggtagagcactctcctgtggagccagactcctcctcgggaaccggaaaggcgggccagcggcctgcaagaaaaagattgaattttggtcagactggagacgcagactcagtacctgacccccagcctctcggacagccaccagcagccccctctggtctgggaactaatacgatggctacaggcagtggcgcaccaatggcagacaataacgagggcgccgacggagtgggtaattcctcgggaaattggcattgcgattccacatggatgggcgacagagtcatcaccaccagcacccgaacctgggccctgcccacctacaacaaccacctctacaaacaaatttccagccaatcaggagcctcgaacgacaatcactactttggctacagcaccccttgggggtattttgacttcaacagattccactgccacttttcaccacgtgactggcaaagactcatcaacaacaactggggattccgacccaagagactcaacttcaagctctttaacattcaagtcaaagaggtcacgcagaatgacggtacgacgacgattgccaataaccttaccagcacggttcaggtgtttactgactcggagtaccagctcccgtacgtcctcggctcggcgcatcaaggatgcctcccgccgttcccagcagacgtcttcatggtgccacagtatggatacctcaccctgaacaacgggagtcaggcagtaggacgctcttcattttactgcctggagtactttccttctcagatgctgcgtaccggaaacaactttaccttcagctacacttttgaggacgttcctttccacagcagctacgctcacagccagagtctggaccgtctcatgaatcctctcatcgaccagtacctgtattacttgagcagaacaaacactccaagtggaaccaccacgcagtcaaggcttcagttttctcaggccggagcgagtgacattcgggaccagtctaggaactggcttcctggaccctgttaccgccagcagcgagtatcaaagacatctgcggataacaacaacagtgaatactcgtggactggagctaccaagtaccacctcaatggcagagactctctggtgaatccgggcccggccatggcaagccacaaggacgatgaagaaaagttttttcctcagagcggggttctcatctttgggaagcaaggctcagagaaaacaaatgtggacattgaaaaggtcatgattacagacgaagaggaaatcaggacaaccaatcccgtggctacggagcagtatggttctgtatctaccaacctccagagaggcaacagacaagcagctaccgcagatgtcaacacacaaggcgttcttccaggcacggtctggcaggacagagatgtgtaccttcaggggcccatctgggcaaagattccacacacggacggacattttcacccctctcccctcatgggtggattcggacttaaacaccctcctccacagattctcatcaagaacaccccggtacctgcgaatccttcgaccaccttcagtgcggcaaagtttgcttccttcatcacacagtactccacgggacaggtcagcgtggagatcgagtgggagctgcagaaggaaaacagcaaacgctggaatcccgaaattcagtacacttccaactacaacaagtctgttaatgtggactttactgtggacactaatggcgtgtattcagagcctcgccccattggcaccagatacctgactcgtaatctgtaa

SEQ ID NO: 1033 - DNA, 2208 bp, Artificial Sequence
  Synthetic Polynucleotide
atggctgccgatggttatcttccagattggctcgaggacactctctctgaaggaataagacagtggtggaagctcaaacctggcccaccaccaccaaagcccgcagagcggcataaggacgacagcaggggtcttgtgcttcctgggtacaagtacctcggacccttcaacggactcgacaagggagagccggtcaacgaggcagacgccgcggccctcgagcacgacaaagcctacgaccggcagctcgacagcggagacaacccgtacctcaagtacaaccacgccgacgcggagtttcaggagcgccttaaagaagatacgtcttttgggggcaacctcggacgagcagtcttccaggcgaaaaagagggttcttgaacctctgggcctggttgaggaacctgttaagacggctccgggaaaaaagaggccggtagagcactctcctgtggagccagactcctcctcgggaaccggaaaggcgggccagcagcctgcaagaaaaagattgaattttggtcagactggagacgcagactcagtacctgacccccagcctctcggacagccaccagcagccccctctggtctgggaactaatacgatggctacaggcagtggcgcaccaatggcagacaataacgagggcgccgacggagtgggtaattcctcgggaaattggcattgcgattccacatggatgggcgacagagtcatcaccaccagcacccgaacctgggccctgcccacctacaacaaccacctctacaaacaaatttccagccaatcaggagcctcgaacgacaatcactactttggctacagcaccccttgggggtattttgacttcaacagattccactgccacttttcaccacgtgactggcaaagactcatcaacaacaactggggattccgacccaagagactcaacttcaagctctttaacattcaagtcaaagaggtcacgcagaatgacggtacgacgacgattgccaataaccttaccagcacggttcaggtgtttactgactcggagtaccagctcccgtacgtcctcggctcggcgcatcaaggatgcctcccgccgttcccagcagacgtcttcatggtgccacagtatggatacctcaccctgaacaacgggagtcaggcagtaggacgctcttcattttactgcctggagtactttccttctcagatgctgcgtaccggaaacaactttaccttcagctacacttttgaggacgttcctttccacagcagctacgctcacagccagagtctggaccgtctcatgaatcctctcatcgaccagtacctgtattacttgagcagaacaaacactccaagtggaaccaccacgcagtcaaggcttcagttttctcaggccggagcgagtgacattcgggaccagtctaggaactggcttcctggaccctgttaccgccagcagcgagtatcaaagacatctgcggataacaacaacagtgaatactcgtggactggagctaccaagtaccacctcaatggcagagactctctggtgaatccgggcccggccatggcaagccacaaggacgatgaagaaaagttttttcctcagagcggggttctcatctttgggaagcaaggctcagagaaaacaaatgtggacattgaaaaggtcatgattacagacgaagaggaaatcaggacaaccaatcccgtggctacggagcagtatggttctgtatctaccaacctccagagaggcaacagacaagcagctaccgcagatgtcaacacacaaggcgttcttccaggcatggtctggcaggacagagatgtgtaccttcaggggcccatctgggcaaagattccacacacggacggacattttcacccctctcccctcatgggtggattcggacttaaacaccctcctccacagattctcatcaagaacaccccggtacctgcgaatccttcgaccaccttcagtgcggcaaagtttgcttccttcatcacacagtactccacgggacaggtcagcgtggagatcgagtgggagctgcagaaggaaaacagcaaccgctggaatcccgaaattcagtacacttccaactacaacaagtctgttaatgtggactttactgtggacactaatggcgtgtattcagagcctcgccccattggcaccagatacctgactcgtaatctgtaa

SEQ ID NO: 1034 - DNA, 2208 bp, Artificial Sequence
  Synthetic Polynucleotide
atggctgccgatggttatcttccagattggctcgaggacactctctctgaaggaataagacagtggtggaagctcaaacctggcccaccaccaccaaagcccgcagagcggcataaggacgacagcaggggtcttgtgcttcctgggtacaagtacctcggacccttcaacggactcgacaagggagagccggtcaacgaggcagacgccgcggccctcgagcacgacaaagcctacgaccggcagctcgacagcggagacaacccgtacctcaagtacaaccacgccgacgcggagtttcaggagcgccttaaagaagatacgtcttttgggggcaacctcggacgagcagtcttccaggcgaaaaagagggttcttgaacctctgggcctggttgaggaacctgttaagacggctccgggaaaaaagaggccggtagagcactctcctgtggagccagactcctcctcgggaaccggaaaggcgggccagcagcctgcaagaaaaagattgaattttggtcagactggagacgcagactcagtacctgacccccagcctctcggacagccaccagcagccccctctggtctgggaactaatacgatggctacaggcagtggcgcaccaatggcagacaataacgagggcgccgacggagtgggtaattcctcgggaaattggcattgcgattccacatggatgggcgacagagtcatcaccaccagcacccgaacctgggccctgcccacctacaacaaccacctctacaaacaaatttccagccaatcaggagcctcgaacgacaatcactactttggctacagcaccccttgggggtattttgacttcaacagattccactgccacttttcaccacgtgactggcaaagactcatcaacaacaactggggattccgacccaagagactcaacttcaagctctttaacattcaagtcaaagaggtcacgcagaatgacggtacgacgacgattgccaataaccttaccagcacggttcaggtgtttactgactcggagtaccagctcccgtacgtcctcggctcggcgcatcaaggatgcctcccgccgttcccagcagacgtcttcatggtgccacagtatggatacctcaccctgaacaacgggagtcaggcagtaggacgctcttcattttactgcctggagtactttccttctcagatgctgcgtaccggaaacaactttaccttcagctacacttttgaggacgttcctttccacagcagctacgctcacagccagagtctggaccgtctcatgaatcctctcatcgaccagtacctgtattacttgagcagaacaaacactccaagtggaaccaccacgcagtcaaggcttcagttttctcaggccggagcgagtgacattcgggaccagtctaggaactggcttcctggaccctgttaccgccagcagcgagtatcaaagacatctgcggataacaacaacagtgaatactcgtggactggagctaccaagtaccacctcaatggcagagactctctggtgaatccgggcccggccatggcaagccacaaggacgatgaagaaaagttttttcctcagagcggggttctcatctttgggaagcaaggctcagagaaaacaaatgtggacattgaaaaggtcatgattacagacgaagaggaaatcaggacaaccaatcccgtggctacggagcagtatggttctgtatctaccaacctccagagaggcaacagacaagcagctaccgcagatgtcaacacacaaggcgttcttccaggcacggtctggcaggacagagatgtgtaccttcaggggcccatctgggcaaagattccacacacggacggacattttcacccctctcccctcatgggtggattcggacttaaacaccctcctccacagattctcatcaagaacaccccggtacctgcgaatccttcgaccaccttcagtgcggcaaagtttgcttccttcatcacacagtactccacgggacaggtcggcgtggagatcgagtgggagctgcagaaggaaaacagcaaacgctggaatcccgaaattcagtacacttccaactacaacaagtctgttaatgtggactttactgtggacactaatggcgtgtattcagagcctcgccccattggcaccagatacctgactcgtaatctgtaa

SEQ ID NO: 1035 - DNA, 2208 bp, Artificial Sequence
  Synthetic Polynucleotide
atggctgccgatggttatcttccagattggctcgaggacactctctctgaaggaataagacagtggtggaagctcaaacctggcccaccaccaccaaagcccgcagagcggcataaggacgacagcaggggtcttgtgcttcctgggtacaagtacctcggacccttcaacggactcgacaagggagagccggtcaacgaggcagacgccgcggccctcgagcacgacaaagcctacgaccggcagctcgacagcggagacaacccgtacctcaagtacaaccacgccgacgcggagtttcaggagcgccttaaagaagatacgtcttttgggggcaacctcggacgagcagtcttccaggcgaaaaagagggttcttgaacctctgggcctggttgaggaacctgttaagacggctccgggaaaaaagaggccggtagagcactctcctgtggagccagactcctcctcgggaaccggaaaggcgggccagcagcctgcaagaaaaagattgaattttggtcagactggagacgcagactcagtacctgacccccagcctctcggacagccaccagcagccccctctggtctgggaactaatacgatggctacaggcagtggcgcaccaatggcagacaataacgagggcgccgacggagtgggtaattcctcgggaaattggcattgcgattccacatggatgggcgacagagtcatcaccaccagcacccgaacctgggccctgcccacctacaacaaccacctctacaaacaaatttccagccaatcaggagcctcgaacgacaatcactactttggctacagcaccccttgggggtattttgacttcaacagattccactgccacttttcaccacgtgactggcaaagactcatcaacaacaactggggattccgacccaagagactcaacttcaagctctttaacattcaagtcaaagaggtcacgcagaatgacggtacgacgacgattgccaataaccttaccagcacggttcaggtgtttactgactcggagtaccagctcccgtacgtcctcggctcggcgcatcaaggatgcctcccgccgttcccagcagacgtcttcatggtgccacagtatggatacctcaccctgaacaacgggagtcaggcagtaggacgctcttcattttactgcctggagtactttccttctcagatgctgcgtaccggaaacaactttaccttcagctacacttttgaggacgttcctttccacagcagctacgctcacagccagagtctggaccgtctcatgaatcctctcatcgaccagtacctgtattacttgagcagaacaaacactccaagtggaaccaccacgcagtcaaggcttcagttttctcaggccggagcgagtgacattcgggaccagtctaggaactggcttcctggaccctgttaccgccagcagcgagtatcaaagacatctgcggataacaacaacagtgaatactcgtggactggagctaccaagtaccacctcaatggcagagactctctggtgaatccgggcccggccatggcaagccacaaggacgatgaagaaaagttttttcctcagagcggggttctcatctttgggaagcaaggctcagagaaaacaaatgtggacattgaaaaggtcatgattacagacgaagaggaaatcagggcaaccaatcccgtggctacggagcagtgtggttctgtatctaccaacctccagagaggcaacagacaagcagctaccgcagatgtcaacacacaaggcgttcttccaggcacggtctggcaggacagagatgtgtaccttcaggggcccatctgggcaaagattccacacacggacggacattttcacccctctcccctcatgggtggattcggacttaaacaccctcctccacagattctcatcaagaacaccccggtacctgcgaatccttcgaccaccttcagtgcggcaaagtttgcttccttcatcacacagtactccacgggacaggtcagcgtggagatcgagtgggagctgcagaaggaaaacagcaaacgctggaatcccgaaattcagtacacttccaactacaacaagtctgttaatgtggactttactgtggacactaatggcgtgtattcagagcctcgccccattggcaccagatacctgactcgtaatctgtaa

SEQ ID NO: 1036 - DNA, 2208 bp, Artificial Sequence
  Synthetic Polynucleotide
atggctgccgatggttatcttccagattggctcgaggacactctctctgaaggaataagacagtggtggaagctcaaacctggcccaccaccaccaaagcccgcagagcggcataaggacgacagcaggggtcttgtgcttcctgggtacaagtacctcggacccttcaacggactcgacaagggagagccggtcaacgaggcagacgccgcggccctcgagcacgacaaagcctacgaccggcagctcgacagcggagacaacccgtacctcaagtacaaccacgccgacgcggagtttcaggagcgccttaaagaagatacgtcttttgggggcaacctcggacgagcagtcttccaggcgaaaaagagggctcttgaacctctgggcctggttgaggaacctgttaagacggctccgggaaaaaagaggccggtagagcactctcctgtggagccagactcctcctcgggaaccggaaaggcgggccagcagcctgcaagaaaaagattgaattttggtcagactggagacgcagactcagtacctgacccccagcctctcggacagccaccagcagccccctctggtctgggaactaatacgatggctacaggcagtggcgcaccaatggcagacaataacgagggcgccgacggagtgggtaattcctcgggaaattggcattgcgattccacatggatgggcgacagagtcatcaccaccagcacccgaacctgggccctgcccacctacaacaaccacctctacaaacaaatttccagccaatcaggagcctcgaacgacaatcactactttggctacagcaccccttgggggtattttgacttcaacagattccactgccacttttcaccacgtgactggcaaagactcatcaacaacaactggggattccgacccaagagactcaacttcaagctctttaacattcaagtcaaagaggtcacgcagaatgacggtacgacgacgattgccaataaccttaccagcacggttcaggtgtttactgactcggagtaccagctcccgtacgtcctcggctcggcgcatcaaggatgcctcccgccgttcccagcagacgtcttcgtggtgccacagtatggatacctcaccctgaacaacgggagtcaggcagtaggacgctcttcattttactgcctggagtactttccttctcagatgctgcgtaccggaaacaactttaccttcagctacacttttgaggacgttcctttccacagcagctacgctcacagccagagtctggaccgtctcatgaatcctctcatcgaccagtacctgtattacttgagcagaacaaacactccaagtggaaccaccacgcagtcaaggcttcagttttctcaggccggagcgagtgacattcgggaccagtctaggaactggcttcctggaccctgttaccgccagcagcgagtatcaaagacatctgcggataacaacaacagtgaatactcgtggactggagctaccaagtaccacctcaatggcagagactctctggtgaatccgggcccggccatggcaagccacaaggacgatgaagaaaagttttttcctcagagcggggttctcatctttgggaagcaaggctcagagaaaacaaatgtggacattgaaaaggtcatgattacagacgaagaggaaatcaggacaaccaatcccgtggctacggagcagtatggttctgtatctaccaacctccagagaggcaacagacaagcagctaccgcagatgtcaacacacaaggcgttcttccaggcatggtctggcaggacagagatgtgtaccttcaggggcccatctgggcaaagattccacacacggacggacattttcacccctctcccctcatgggtggattcggacttaaacaccctcctccacagattctcatcaagaacaccccggtacctgcgaatccttcgaccaccttcagtgcggcaaagtttgcttccttcatcacacagtactccacgggacaggtcagcgtggagatcgagtgggagctgcagaaggaaaacagcaaacgctggaatcccgaaattcagtacacttccaactacaacaagtctgttaatgtggactttactgtggacactaatggcgtgtattcagagcctcgccccattggcaccagatacctgactcgtaatctgtaa

SEQ ID NO: 1037 - DNA, 2208 bp, Artificial Sequence
  Synthetic Polynucleotide
atggctgccgatggttatcttccagattggctcgaggacactctctctgaaggaataagacagtggtggaagctcaaacctggcccaccaccaccaaagcccgcagagcggcataaggacgacagcaggggtcttgtgcttcctgggtacaagtacctcggacccttcaacggactcgacaagggagagccggtcaacgaggcagacgccgcggccctcgagcacgacaaagcctacgaccggcagctcgacagcggagacaacccgtacctcaagtacaaccacgccgacgcggagtttcaggagcgccttaaagaagatacgtcttttgggggcaacctcggacgagcagtcttccaggcgaaaaagagggttcttgaacctctgggcctggttgaggaacctgttaagacggctccgggaaaaaagaggccggtagagcactctcctgtggagccagactcctcctcgggaaccggaaaggcgggccagcagcctgcaagaaaaagattgaattttggtcagactggagacgcagactcagtacctgacccccagcctctcggacagccaccagcagccccctctggtctgggaactaatacgatggctacaggcagtggcgcaccaatggcagacaataacgagggcgccgacggagtgggtaattcctcgggaaattggcattgcgattccacatggatgggcgacagagtcatcaccaccagcacccgaacctgggccctgcccacctacaacaaccacctctacaaacaaatttccagccaatcaggagcctcgaacgacaatcactactttggctacagcaccccttgggggtattttgacttcaacagattccactgccacttttcaccacgtgactggcaaagactcatcaacaacaactggggattccgacccaagagactcaacttcaagctctttaacattcaagtcaaagaggtcacgcagaatgacggtacgacgacgattgccaataaccttaccagcacggttcaggtgtttactgactcggagtaccagctcccgtacgtcctcggctcggcgcatcaaggatgcctcccgccgttcccagcagacgtcttcatggtgccacagtatggatacctcaccctgaacaacgggagtcaggcagtaggacgctcttcattttactgcctggagtactttccttctcagatgctgcgtaccggaaacaactttaccttcagctacacttttgaggacgttcctttccacagcagctacgctcacagccagagtctggaccgtctcatgaatcctctcatcgaccagtacctgtattacttgagcagaacaaacactccaagtggaaccaccacgcagtcaaggcttcagttttctcaggccggagcgagtgacattcgggaccagtctaggaactggcttcctggaccctgttaccgccagcagcgagtatcaaagacatctgcggataacaacaacagtgaatactcgtggactggagctaccaagtaccacctcaatggcagagactctctggtgaatccgggcccggccatggcaagccacaaggacgatgaagaaaagttttttcctcagagcggggttctcatctttgggaagcaaggctcagagaaaacaaatgtggacattgaaaaggtcatgattacagacgaagaggaaatcaggacaaccaatcccgtggctacggagcagtatggttctgtatctaccaacctccagagaggcaacagacaagcagctaccgcagatgtcaacacacaaggcgttcttccaggcacggtctggcaggacagagatgtgtaccttcaggggcccatctgggcaaagattccacacacggacggacattttcacccctctcccctcgtgggtggattcggacttaaacaccctcctccacagattctcatcaagaacaccccggtacctgcgaatccttcgaccaccttcagtgcggcaaagtttgcttccttcatcacacagtactccacgggacaggtcagcgtggagatcgagtgggagctgcagaaggaaaacagcaaacgctggaatcccgaaattcagtacacttccaactacaacaagtctgttaatgtggactttactgtggacactaatggcgtgtattcagagcctcgccccattggcaccagatacctgactcgtaatctgtaa

SEQ ID NO: 1038 - DNA, 2208 bp, Artificial Sequence
  Synthetic Polynucleotide
atggctgccgatggttatcttccagattggctcgaggacactctctctgaaggaataagacagtggtggaagctcaaacctggcccaccaccaccaaagcccgcagagcggcataaggacgacagcaggggtcttgtgcttcctgggtacaagtacctcggacccttcaacggactcgacaagggagagccggtcaacgaggcagacgccgcggccctcgagcacgacaaagcctacgaccggcagctcgacagcggagacaacccgtacctcaagtacaaccacgccgacgcggagtttcaggagcgccttaaagaagatacgtcttttgggggcaacctcggacgagcagtcttccaggcgaaaaagagggttcttgaacctctgggcctggttgaggaacctgttaagacggctccgggaaaaaagaggccggtagagcactctcctgtggagccagactcctcctcgggaaccggaaaggcgggccagcagcctgcaagaaaaagattgaattttggtcagactggagacgcagactcagtacctgacccccagcctctcggacagccaccagcagccccctctggtctgggaactaatacgatggctacaggcagtggcgcaccaatggcagacaataacgagggcgccgacggagtgggtaattcctcgggaaattggcattgcgattccacatggatgggcgacagagtcatcaccaccagcacccgaacctgggccctgcccacctacaacaaccacctctacaaacaaatttccagccaatcaggagcctcgaacgacaatcactactttggctacagcaccccttgggggtattttgacttcaacagattccactgccacttttcaccacgtgactggcaaagactcatcaacaacaactggggattccgacccaagagactcaacttcaagctctttaacattcaagtcaaagaggtcacgcagaatgacggtacgacgacgattgccaataaccttaccagcacggttcaggtgtttactgactcggagtaccagctcccgtacgtcctcggctcggcgcatcaaggatgcctcccgccgttcccagcagacgtcttcatggtgccacagtatggatacctcaccctgaacaacgggagtcaggcagtaggacgctcttcattttactgcctggagtactttccttctcagatgctgcgtaccggaaacaactttaccttcagctacacttttgaggacgttcctttccacagcagctacgctcacagccagagtctggaccgtctcatgaatcctctcatcgaccagtacctgtattacttgagcagaacaaacactccaagtggaaccaccacgcagtcaaggcttcagttttctcaggccggagcgagtgacattcgggaccagtctaggaactggcttcctggaccctgttaccgccagcagcgagtatcaaagacatctgcggataacaacaacagtgaatactcgtggactggagctaccaagtaccacctcaatggcagagactctctggtgaatccgggcccggccatggcaagccacaaggacgatgaagaaaagttttttcctcagagcggggttctcatctttgggaagcaaggctcagagaaaacaaatgtggacattgaaaaggtcatgattacagacgaagaggaaatcaggacaaccaatcccgtggctacggagcagtatggttctgtatctaccaacctccagagaggcaacagacaagcagctaccgcagatgtcaacacacaaggcgttcttccaggcacggtctggcaggacagagatgtgtaccttcaggggcccatctgggcaaagattccacacacggacggacattttcacccctctcccctcatgggtggattcggacttaaacaccctcctccacagattctcatcaagaacaccccggtacctgcgaatccttcgaccaccctcagtgcggcaaagtttgcttccttcatcacacagtactccacgggacaggtcagcgtggagatcgagtgggagctgcagaaggaaaacagcaaacgctggaatcccgaaattcagtacacttccaactacaacaagtctgttaatgtggactttactgtggacactaatggcgtgtattcagagcctcgccccattggcaccagatacctgactcgtaatctgtaa

SEQ ID NO: 1039 - DNA, 2208 bp, Artificial Sequence
  Synthetic Polynucleotide
atggctgccgatggttatcttccagattggctcgaggacactctctctgaaggaataagacagtggtggaagctcaaacctggcccaccaccaccaaagcccgcagagcggcataaggacgacagcaggggtcttgtgcttcctgggtacaagtacctcggacccttcaacggactcgacaagggagagccggtcaacgaggcagacgccgcggccctcgagcacgacaaagcctacgaccggcagctcgacagcggagacaacccgtacctcaagtacaaccacgccgacgcggagtttcaggagcgccttaaagaagatacgtcttttgggggcaacctcggacgagcagtcttccaggcgaaaaagagggttcttgaacctctgggcctggttgaggaacctgttaagacggctccgggaaaaaagaggccggtagagcactctcctgtggagccagactcctcctcgggaaccggaaaggcgggccagcagcctgcaagaaaaagattgaattttggtcagactggagacgcagactcagtacctgacccccagcctctcggacagccaccagcagccccctctggtctgggaactaatacgatggctacaggcagtggcgcaccaatggcagacaataacgagggcgccgacggagtgggtaattcctcgggaaattggcattgcgattccacatggatgggcgacagagtcatcaccaccagcacccgaacctgggccctgcccacctacaacaaccacctctacaaacaaatttccagccaatcaggagcctcgaacgacaatcactactttggctacagcaccccttgggggtattttgacttcaacagattccactgccacttttcaccacgtgactggcaaagactcatcaacaacaactggggattccgacccaagagactcaacttcaagctctttaacattcaagtcaaagaggtcacgcagaatgacggtacgacgacgattgccaataaccttaccagcacggttcaggtgtttactgactcggagtaccagctcccgtacgtcctcggctcggcgcatcaaggatgcctcccgccgttcccagcagacgtcttcatggtgccacagtatggatacctcaccctgaacaacgggagtcaggcagtagggcgctcttcattttactgcctggagtactttccttctcagatgctgcgtaccggaaacaactttaccttcagctacacttttgaggacgttcctttccacagcagctacgctcacagccagagtctggaccgtctcatgaatcctctcatcgaccagtacctgtattacttgagcagaacaaacactccaagtggaaccaccacgcagtcaaggcttcagttttctcaggccggagcgagtgacattcgggaccagtctaggaactggcttcctggaccctgttaccgccagcagcgagtatcaaagacatctgcggataacaacaacagtgaatactcgtggactggagctaccaagtaccacctcaatggcagagactctctggtgaatccgggcccggccatggcaagccacaaggacgatgaagaaaagttttttcctcagagcggggttctcatctttgggaagcaaggctcagagaaaacaaatgtggacattgaaaaggtcatgattacagacgaaggggaaatcaggacaaccaatcccgtggctacggagcagtatggttctgtatctaccaacctccagagaggcaacagacaagcagctaccgcagatgtcaacacacaaggcgttcttccaggcacggtctggcaggacagagatgtgtaccttcaggggcccatctgggcaaagattccacacacggacggacattttcacccctctcccctcatgggtggattcggacttaaacaccctcctccacagattctcatcaagaacaccccggtacctgcgaatccttcgaccaccttcagtgcggcaaagtttgcttccttcatcacacagtactccacgggacaggtcagcgtggagatcgagtgggagctgcagaaggaaaacagcaaacgctggaatcccgaaattcagtacacttccaactacaacaagtctgttaatgtggactttactgtggacactaatggcgtgtattcagagcctcgccccattggcaccagatacctgactcgtaatctgtaa

SEQ ID NO: 1040 - DNA, 2208 bp, Artificial Sequence
  Synthetic Polynucleotide
atggctgccgatggttatcttccagattggctcgaggacactctctctgaaggaataagacagtggtggaagctcaaacctggcccaccaccaccaaagcccgcagagcggcataaggacgacagcaggggtcttgtgcttcctgggtacaagtacctcggacccttcaacggactcgacaagggagagccggtcaacgaggcagacgccgcggccctcgagcacgacaaagcctacgaccggcagctcgacagcggagacaacccgtacctcaagtacaaccacgccgacgcggagtttcaggagcgccttaaagaagatacgtcttttgggggcaacctcggacgagcagtcttccaggcgaaaaagagggctcttgaacctctgggcctggttgaggaacctgttaagacggctccgggaaaaaagaggccggtagagcactctcctgtggagccagactcctcctcgggaaccggaaaggcgggccagcagcctgcaagaaaaagattgaattttggtcagactggagacgcagactcagtacctgacccccagcctctcggacagccaccagcagccccctctggtctgggaactaatacgatggctacaggcagtggcgcaccaatggcagacaataacgagggcgccgacggagtgggtaattcctcgggaaattggcattgcgattccacatggatgggcgacagagtcatcaccaccagcacccgaacctgggccctgcccacctacaacaaccacctctacaaacaaatttccagccaatcaggagcctcgaacgacaatcactactttggctacagcaccccttgggggtattttgacttcaacagattccactgccacttttcaccacgtgactggcaaagactcatcaacaacaactggggattccgacccaagagactcaacttcaagctctttaacattcaagtcaaagaggtcacgcagaatgacggtacgacgacgattgccaataaccttaccagcacggttcaggtgtttactgactcggagtaccagctcccgtacgtcctcggctcggcgcatcaaggatgcctcccgccgttcccagcagacgtcttcatggtgccacagtatggatacctcaccctgaacaacgggagtcaggcagtaggacgctcttcattttactgcctggagtactttccttctcagatgctgcgtaccggaaacaactttaccttcagctacacttttgaggacgttcctttccacagcagctacgctcacagccagagtctggaccgtctcatgaatcctctcatcgaccagtacctgtattacttgagcagaacaaacactccaagtggaaccaccacgcagtcaaggcttcagttttctcaggccggagcgagtgacattcgggaccagtctaggaactggcttcctggaccctgttaccgccagcagcgagtatcaaagacatctgcggataacaacaacagtgaatactcgtggactggagctaccaagtaccacctcaatggcagagactctctggtgaatccgggcccggccatggcaagccacaaggacgatgaagaaaagttttttcctcagagcggggttctcatctttgggaagcaaggctcagagaaaacaaatgtggacattgaaaaggtcatgattacagacgaagaggaaatcaggacaaccaatcccgtggctacggagcagtatggttctgtatctaccaacctccagagaggcaacagacaagcagctaccgcagatgtcaacacacaaggcgttcttccaggcatggtctggcaggacagagatgtgtaccttcaggggcccatctgggcaaagattccacacacggacggacattttcacccctctcccctcatgggtggattcggacttaaacaccctcctccacagattctcatcaaaaacaccccggtacctgcgaatccttcgaccaccttcagtgcggcaaagtttgcttccttcatcacacagtactccgcgggacaggtcagcgtggagatcgagtgggagctgcagaaggaaaacagcaaacgctggaatcccgaaattcagtacacttccaactacaacaagtctgttaatgtggactttactgtggacactaatggcgtgtattcagagcctcgccccattggcaccagatacctgactcgtaatctgtaa

SEQ ID NO: 1041 - DNA, 2208 bp, Artificial Sequence
  Synthetic Polynucleotide
atggctgccgatggttatcttccagattggctcgaggacactctctctgaaggaataagacagtggtggaagctcaaacctggcccaccaccaccaaagcccgcagagcggcataaggacgacagcaggggtcttgtgcttcctgggtacaagtacctcggacccttcaacggactcgacaagggagagccggtcaacgaggcagacgccgcggccctcgagcacgacaaagcctacgaccggcagctcgacagcggagacaacccgtacctcaagtacaaccacgccgacgcggagtttcaggagcgccttaaagaagatacgtcttttgggggcaacctcggacgagcagtcttccaggcgaaaaagagggttcttgaacctctgggcctggttgaggaacctgttaagacggctccgggaaaaaagaggccggtagagcactctcctgtggagccagactcctcctcgggaaccggaaaggcgggccagcagcctgcaagaaaaagattgaattttggtcagactggagacgcagactcagtacctgacccccagcctctcggacagccaccagcagccccctctggtctgggaactaatacgatggctacaggcagtggcgcaccaatggcagacaataacgagggcgccgacggagtgggtaattcctcgggaaattggcattgcgattccacatggatgggcgacagagtcatcaccaccagcacccgaacctgggccctgcccacctacaacaaccacctctacaaacaaatttccagccaatcaggagcctcgaacgacaatcactactttggctacagcaccccttgggggtattttgacttcaacagattccactgccacttttcaccacgtgactggcaaagactcatcaacaacaactggggattccgacccaagagactcaacttcaagctctttaacattcaagtcaaagaggtcacgcagaatgacggtacgacgacgattgccaataaccttaccagcacggttcaggtgtttactgactcggagtaccagctcccgtacgtcctcggctcggcgcatcaaggatgcctcccgccgttcccagcagacgtcttcatggtgccacagtatggatacctcaccctgaacaacgggagtcaggcagtaggacgctcttcattttactgcctggagtactttccttctcagatgctgcgtaccggaaacaactttaccttcagctacacttttgaggacgttcctttccacagcagctacgctcacagccagagtctggaccgtctcatgaatcctctcatcgaccagtacctgtattacttgagcagaacaaacactccaagtggaaccaccacgcagtcaaggcttcagttttctcaggccggagcgagtgacattcgggaccagtctaggaactggcttcctggaccctgttaccgccagcagcgagtatcaaagacatctgcggataacaacaacagtgaatactcgtggactggagctaccgagtaccacctcaatggcagagactctctggtgaatccgggcccggccatggcaagccacaaggacgatgaagaaaagttttttcctcagagcggggttctcatctttgggaagcaaggctcagagaaaacaaatgtggacattgaaaaggtcatgattacagacgaagaggaaatcaggacaaccaatcccgtggctacggagcagtatggttctgtatctaccaacctccagagaggcaacagacaagcagctaccgcagatgtcaacacacaaggcgttcttccaggcacggtctggcaggacagagatgtgtaccttcaggggcccatctgggcaaagattccacacacggacggacattttcacccctctcccctcatgggtggattcggacttaaacaccctcccccacagattctcatcaagaacaccccggtacctgcgaatccttcgaccaccttcagtgcggcaaagtttgcttccttcatcacacagtactccacgggacaggtcagcgtggagatcgagtgggagctgcagaaggaaaacagcaaacgctggaatcccgaaattcagtacacttccaactacaacaagtctgttaatgtggactttactgtggacactaatggcgtgtattcagagcctcgccccattggcaccagatacctgactcgtaatctgtaa

SEQ ID NO: 1042 - DNA, 2208 bp, Artificial Sequence
  Synthetic Polynucleotide
atggctgccgatggttatcttccagattggctcgaggacactctctctgaaggaataagacagtggtggaagctcaaacctggcccaccaccaccaaagcccgcagagcggcataaggacgacagcaggggtcttgtgcttcctgggtacaagtacctcggacccttcaacggactcgacaagggagagccggtcaacgaggcagacgccgcggccctcgagcacggcaaagcctacgaccggcagctcgacagcggagacaacccgtacctcaagtacaaccacgccgacgcggagtttcaggagcgccttaaagaagatacgtcttttgggggcaacctcggacgagcagtcttccaggcgaaaaagagggttcttgaacctctgggcctggttgaggaacctgttaagacggctccgggaaaaaagaggccggtagagcactctcctgtggagccagactcctcctcgggaaccggaaaggcgggccagcagcctgcaagaaaaagattgaattttggtcagactggagacgcagactcagtacctgacccccagcctctcggacagccaccagcagccccctctggtctgggaactaatacgatggctacaggcagtggcgcaccaatggcagacaataacgagggcgccgacggagtgggtaattcctcgggaaattggcattgcgattccacatggatgggcgacagagtcatcaccaccagcacccgaacctgggccctgcccacctacaacaaccacctctacaaacaaatttccagccaatcaggagcctcgaacgacaatcactactttggctacagcaccccttgggggtattttgacttcaacagattccactgccacttttcaccacgtgactggcaaagactcatcaacaacaactggggattccgacccaagagactcaacttcaagctctttaacattcaagtcaaagaggtcacgcagaatgacggtacgacgacgattgccaataaccttaccagcacggttcaggtgtttactgactcggagtaccagctcccgtacgtcctcggctcggcgcatcaaggatgcctcccgccgttcccagcagacgtcttcatggtgccacagtatggatacctcaccctgaacaacgggagtcaggcagtaggacgctcttcattttactgcctggagtactttccttctcagatgctgcgtaccggaaacaactttaccttcagctacacttttgaggacgttcctttccacagcagctacgctcacagccagagtctggaccgtctcatgaatcctctcatcgaccagtacctgtattacttgagcagaacaaacactccaagtggaaccaccacgcagtcaaggcttcagttttctcaggccggagcgagtgacattcgggaccagtctaggaactggcttcctggaccctgttaccgccagcagcgagtatcaaagacatctgcggataacaacaacagtgaatactcgtggactggagctaccaagtaccacctcaatggcagagactctctggtgaatccgggcccggccatggcaagccacaaggacgatgaagaaaagttttttcctcagagcggggttctcatctttgggaagcaaggctcagagaaaacaaatgtggacattgaaaaggtcatgattacagacgaagaggaaatcaggacaaccaatcccgtggctacggagcagtatggttctgtatctaccaacctccagagaggcaacagacaagcagctaccgcagatgtcaacacacaaggcgttcttccaggcacggtctggcaggacagagatgtgtaccttcaggggcccatctgggcaaagattccacacacggacggacattttcacccctctcccctcatgggtggattcggacttaaacaccctcctccacagattctcatcaagaacaccccggtacctgcgaatccttcgaccaccttcagtgcggcaaagtttgcttccttcatcacacagtactccacgggacaggtcagcgtggagatcgagtgggagctgcagaaggaaaacagcaaacgctggaatcccgaaattcagtacacttccaactacaacaagtctgttaatgtggactttactgtggacactaatggcgtgtattcagagcctcgccccattggcaccagatacctgactcgtaatctgtaa

SEQ ID NO: 1043 - DNA, 2208 bp, Artificial Sequence
  Synthetic Polynucleotide
atggctgccgatggttatcttccagattggctcgaggacactctctctgaaggaataagacagtggtggaagctcaaacctggcccaccaccaccaaagcccgcagagcggcataaggacgacagcaggggtcttgtgcttcctgggtacaagtacctcggacccttcaacggactcgacaagggagagccggtcaacgaggcagacgccgcggccctcgagcacgacaaagcctacgaccggcagctcgacagcggagacaacccgtacctcaagtacaaccacgccgacgcggagtttcaggagcgccttaaagaagatacgtcttttgggggcaacctcggacgagcagtcttccaggcgaaaaagagggctcttgaacctctgggcctggttgaggaacctgttaagacggctccgggaaaaaagaggccggtagagcactctcctgtggagccagactcctcctcgggaaccggaaaggcgggccagcagcctgcaagaaaaagattgaattttggtcagactggagacgcagactcagtacctgacccccagcctctcggacagccaccagcagccccctctggtctgggaactaatacgatggctacaggcagtggcgcaccaatggcagacaataacgagggcgccgacggagtgggtaattcctcgggaaattggcattgcgattccacatggatgggcgacagagtcatcaccaccagcacccgaacctgggccctgcccacctacaacaaccacctctacaaacaaatttccagccaatcaggagcctcgaacgacaatcactactttggctacagcaccccttgggggtattttgacttcaacagattccactgccacttttcaccacgtgactggcaaagactcatcaacaacaactggggattccgacccaagagactcaacttcaagctctttaacattcaagtcaaagaggtcacgcagaatgacggtacgacgacgattgccaataaccttaccagcacggttcaggtgtttactgactcggagtaccagctcccgtacgtcctcggctcggcgcatcaaggatgcctcccgccgttcccagcagacgtcttcatggtgccacagtatggatacctcaccctgaacaacgggagtcaggcagtaggacgctcttcattttactgcctggagtactttccttctcagatgctgcgtaccggaaacaactttaccttcagctacacttttgaggacgttcctttccacagcagctacgctcacagccagagtctggaccgtctcatgaatcctctcgtcgaccagtacctgtattacttgagcagaacaaacactccaagtggaaccaccacgcagtcaaggcttcagttttctcaggccggagcgagtgacattcgggaccagtctaggaactggcttcctggaccctgttaccgccagcagcgagtatcaaagacatctgcggataacaacaacagtgaatactcgtggaccggagctaccaagtaccacctcaatggcagagactctctggtgaatccgggcccggccatggcaagccacaaggacgatgaagaaaagttttttcctcagagcggggttctcatctttgggaagcaaggctcagagaaaacaaatgtggacattgaaaaggtcatgattacagacgaagaggaaatcaggacaaccaatcccgtggctacggagcagtatggttctgtatctaccaacctccagagaggcaacagacaagcagctaccgcagatgtcaacacacaaggcgttcttccaggcatggtctggcaggacagagatgtgtaccttcaggggcccatctgggcaaagattccacacacggacggacattttcacccctctcccctcatgggtggattcggacttaaacgccctcctccacagattctcatcaagaacaccccggtacctgcgaatccttcgaccaccttcagtgcggcaaagtttgcttccttcatcacacagtactccacgggacaggtcagcgtggagatcgagtgggagctgcagaaggaaaacagcaaacgctggaatcccgaaattcagtacacttccaactacaacaagtctgttaatgtggactttactgtggacactaatggcgtgtattcagagcctcgccccattggcaccagatacctgactcgtaatctgtaa

SEQ ID NO: 1044 - DNA, 2208 bp, Artificial Sequence
  Synthetic Polynucleotide
atggctgccgatggttatcttccagattggctcgaggacactctctctgaaggaataagacagtggtggaagctcaaacctggcccaccaccaccaaagcccgcagagcggcataaggacgacagcaggggtcttgtgcttcctgggtacaagtacctcggacccttcaacggactcgacaagggagagccggtcaacgaggcagacgccgcggccctcgagcacgacaaagcctacgaccggcagctcgacagcggagacaacccgtacctcaagtacaaccacgccgacgcggagtttcaggagcgccttaaagaagatacgtcttttgggggcaacctcggacgagcagtcttccaggcgaaaaagagggttcttgaacctctgggcctggttgaggaacctgttaagacggctccgggaaaaaagaggccggtagagcactctcctgtggagccagactcctcctcgggaaccggaaaggcgggccagcagcctgcaagaaaaagattgaattttggtcagactggagacgcagactcagtacctgacccccagcctctcggacagccaccagcagccccctctggtctgggaactaatacgatggctacaggcagtggcgcaccaatggcagacaataacgagggcgccgacggagtgggtaattcctcgggaaattggcattgcgattccacatggatgggcgacagagtcatcaccaccagcacccgaacctgggccctgcccacctacaacaaccacctctacaaacaaatttccagccaatcaggagcctcgaacgacaatcactactttggctacagcaccccttgggggtattttgacttcaacagattccactgccacttttcaccacgtgactggcaaagactcatcaacaacaactggggattccgacccaagagactcaacttcaagctctttaacattcaagtcaaagaggtcacgcagaatgacggtacgacgacgattgccaataaccttaccagcacggttcaggtgtttactgactcggagtaccagctcccgtacgtcctcggctcggcgcatcaaggatgcctcccgccgttcccagcagacgtcttcatggtgccacagtatggatacctcaccctgaacaacgggagtcaggcagtaggacgctcttcattttactgcctggagtactttccttctcagatgctgcgtaccggaaacaactttaccttcagctacacttttgaggacgttcctttccacagcagctacgctcacagccagagtctggaccgtctcatgaatcctctcatcgaccagtacctgtattacttgagcagaacaaacactccaagtggaaccaccacgcagtcaaggcttcagttttctcaggccggagcgagtgacattcgggaccagtctaggaactggcttcctggaccctgttaccgccagcagcgagtatcaaagacatctgcggataacaacaacagtgaatactcgtggactggagctaccaagtaccacctcaatggcagagactctctggtgaatccgggcccggccatggcaagccacaaggacgatgaagaaaagttttttcctcagagcggggttctcatctttgggaagcaaggctcagagaaaacaaatgtggacattgaaaaggtcatgattacagacgaagaggaaatcaggacaaccaatcccgtggctacggagcagtatggttctgtatctaccaacctccagagaggcaacagacaagcagctaccgcagatgtcaacacacaaggcgttcttccaggcacggtctggcaggacagagatgtgtaccttcaggggcccatctgggcaaagattccacacacggacggacattttcacccctctcccctcatgggtggattcggacttaaacaccctcctccacagattctcatcaagaacaccccggtacctgcgaatccttcgaccaccttcagtgcggcaaagtttgcttccttcatcacacagcactccacgggacaggtcagcgtggagatcgagtgggagctgcagaaggaaaacagcaaacgctggaatcccgaaattcagtacacttccaactacaacaagtctgttaatgtggactttactgtggacactaatggcgtgtattcagagcctcgccccattggcaccagatacctgactcgtaatctgtaa

SEQ ID NO: 1045 - DNA, 2208 bp, Artificial Sequence
  Synthetic Polynucleotide
atggctgccgatggttatcttccagattggctcgaggacactctctctgaaggaataagacagtggtggaagctcaaacctggcccaccaccgccaaagcccgcagagcggcataaggacgacagcaggggtcttgtgcttcctgggtacaagtacctcggacccttcaacggactcgacaagggagagccggtcaacgaggcagacgccgcggccctcgagcacgacaaggcctacgaccggcagctcgacagcggagacgacccgtacctcaagtacaaccacgccgacgcggagtttcaggagcgccttaaagaagatacgtcttttgggggcaacctcgcaagagcagtattccaggcgaaaaagagggttcttgaacctctgggcctggttgaggagcctgttaagacggctccgggaaaaaagaggccggtagagcattctcctgcggagccagactcctcctcgggaaccggaaaagcgggccagcagcctgcgagaaagagattgaatttcggtcagactggagacgcagactccgtacctgacccccagcctctcggacagccaccagcagccccctctggtctgggaactaatacgatggctacaggcagtggcgcaccaatggcagacaataacgagggtgccgacggagtgggtaattcctcaggaaattggcattgcgattccacatggatgggcgacagagtcatcaccaccagcacccgcacctgggctctgcccacctacaacaaccatctgtacaagcagatctccagccaatctggagccagcaacgacaaccactactttggctacagcaccccttgggggtattttgacttcaacagattccactgccacttctccccacgtgactggcaaagactcatcaacaacaactggggattccggcccaagagactcagcttcaagctctttaacattcaagtcaaggaggtcacgcagaatgacggtacgacgacgattgccaataaccttaccagcacggttcaggtctttactgactcggagtaccagctcccgtacgtcctcggctcggcgcatcaaggatgcctcccgccgttcccagcagacgtcttcatggtgccacagtatggatacctcaccctgaacaacgggagtcaggcggtaggacgctcttcattttactgcctggagtacttcccttctcagatgcttcgcacgggaaacaactttaccttcagctacacctttgaggacgtgccttttcacagcagctacgctcacagccaaagtctggaccgtctcatgaatcctctcatcgaccagtacctgtattacttgagcaaaacaaacgctccaagcggaaccaccacgatgtccaggcttcagttttctcaggccggagcaagtgacattcgggaccagtctagaaactggcttcctggaccctgttaccgccagcagcgagtatcaaagacagctgcggacaacaacaacagtgattactcgtggactggagctaccaagtaccacctcaatggaagagactctctggtgaacccgggcccagctatggccagccacaaggacgatgaagaaaaatattttcctcagagcggggttctcatcttcgggaaacaaggctcaaataaaactaatgtggacattgaaaaggttatgattacagacgaagaggaaatcaggaccaccaatcccgtggctacggagcagtatggttctgtatctaccaaccttcaaagcggcaacacacaagcagctacctcagatgtcaacacacaaggcgttcttcctggcatggtctggcaggacagagatgtgtacctgcaggggcccatctgggcaaagattccacacacggatggacactttcacccttctcctcttatgggaggatttggactgaagcaccctcccccgcagattctcatcaagaataccccggtacctgcgaatccttcgaccaccttcagtgcggcaaagtttgcttctttcatcacacagtactccacggggcaggtcagcgtggagatcgagtgggagctgcagaaggagaacagcaaacgctggaaccccgagatccagtatacttccaactacaacaaatctgttaatgtggactttactgtggacactaatggtgtgtattcagagcctcgccccattggcaccagatacctgactcgtaatctgtaa

SEQ ID NO: 1046 - DNA, 2208 bp, Artificial Sequence
  Synthetic Polynucleotide
atggctgccgatggttatcttccagattggctcgaggacactctctctgaaggaataagacagtggtggaagctcaaacctggcccaccaccaccaaagcccgcagagcggcataaggacgacagcaggggtcttgtgcttcctgggtacaagtacctcggacccttcaacggactcgacaagggagagccggtcaacgaggcagacgccgcggccctcgagcacgacaaagcctacgaccggcagctcgacagcggagacaacccgtacctcaagtacaaccacgccgacgcggagtttcaggagcgccttaaagaagatacgtcttttgggggcaacctcggacgagcagtcttccaggcgaaaaagagggttcttgaacctctgggcctggttgaggaacctgttaagacggctccgggaaaaaagaggccggtagagcactctcctgtggagccagactcctcctcgggaaccggaaaggcgggccagcagcctgcaagaaaaagattgaattttggtcagactggagacgcagactcagtacctgacccccagcctctcggacagccaccagcagccccctctggtctgggaactaatacgatggctacaggcagtggcgcaccaatggcagacaataacgagggcgccgacggagtgggtaattcctcgggaaattggcattgcgattccacatggatgggcgacagagtcatcaccaccagcacccgaacctgggccctgcccacctacaacaaccacctctacaaacaaatttccagccaatcaggagcctcgaacgacaatcactactttggctacagcaccccttgggggtattttgacttcaacagattccactgccacttttcaccacgtgactggcaaagactcatcaacaacaactggggattccgacccaagagactcaacttcaagctctttaacattcaagtcaaagaggtcacgcagaatgacggtacgacgacgattgccaataaccttaccagcacggttcaggtgtttactgactcggagtaccagctcccgtacgtcctcggctcggcgcatcaaggatgcctcccgccgttcccagcagacgtcttcatggtgccacagtatggatacctcaccctgaacaacgggagtcaggcagtaggacgctcttcattttactgcctggagtactttccttctcagatgctgcgtaccggaaacaactttaccttcagctacacttttgaggacgttcctttccacagcagctacgctcacagccagagtctggaccgtctcatgaatcctctcatcgaccagtacctgtattacttgagcagaacaaacactccaagtggaaccaccacgcagccaaggcttcagttttctcaggccggagcgagtgacattcgggaccagtctaggaactggcttcctggaccctgttaccgccagcagcgagtatcaaagacatctgcggataacaacaacagtgaatactcgtggactggagctaccaagtaccacctcaatggcagagactctctggtgaatccgggcccggccatggcaagccacaaggacgatgaagaaaagttttttcctcagagcggggttctcatctttgggaagcaaggctcagagaaaacaaatgtggacattgaaaaggtcatgattacagacgaagaggaaatcaggacaaccaatcccgtggctacggagcagtatggttctgtatctaccaacctccagagaggcaacagacaagcagctaccgcagatgtcaacacacaaggcgttcttccaggcacggtctggcaggacagagatgtgtaccttcaggggcccatctgggcaaagattccacacacggacggacattttcacccctctcccctcatgggtggattcggacttaaacaccctcctccacagattctcatcaagaacaccccggtacctgcgaatccttcgaccaccttcagtgcggcaaagtttgcttccttcatcacacagtactccacgggacaggtcagcgtggagatcgagtgggagctgcagaaggaaaacagcaaacgctggaatcccgaaattcagtacacttccaactacaacaagtctgttaatgtggactttactgtggacactaatggcgtgtattcagagcctcgccccattggcaccagatacctgactcgtaatctgtaa

SEQ ID NO: 1047 - DNA, 2208 bp, Artificial Sequence
  Synthetic Polynucleotide
atggctgccgatggttatcttccagattggctcgaggacactctctctgaaggaataagacagtggtggaagctcaaacctggcccaccaccaccaaagcccgcagagcggcataaggacgacagcaggggtcttgtgcttcctgggtacaagtacctcggacccttcaacggactcgacaagggagagccggtcaacgaggcagacgccgcggccctcgagcacgacaaagcctacgaccggcagctcgacagcggagacaacccgtacctcaagtacaaccacgccgacgcggagtttcaggagcgccttaaagaagatacgtcttttgggggcaacctcggacgagcagtcttccaggcgaaaaagagggttcttgaacctctgggcctggttgaggaacctgttaagacggctccgggaaaaaagaggccggtagagcactctcctgtggagccagactcctcctcgggaaccggaaaggcgggccagcagcctgcaagaaaaagattgaattttggtcagactggagacgcagactcagtacctgacccccagcctctcggacagccaccagcagccccctctggtctgggaactaatacgatggctacaggcagtggcgcaccaatggcagacaataacgagggcgccgacggagtgggtaattcctcgggaaattggcattgcgattccacatggatgggcgacagagtcatcaccaccagcacccgaacctgggccctgcccacctacaacaaccacctctacaaacaaatttccagccaatcaggagcctcgaacgacaatcactactttggctacagcaccccttgggggtattttgacttcaacagattccactgccacttttcaccacgtgactggcaaagactcatcaacaacaactggggattccgacccaagagactcaacttcaagctctttaacattcaagtcaaagaggtcacgcagaatgacggtacgacgacgattgccaataaccttaccagcacggttcaggtgtttactgactcggagtaccagctcccgtacgtcctcggctcggcgcatcaaggatgcctcccgccgttcccagcagacgtcttcatggtgccacagtatggatacctcaccctgaacaacgggagtcaggcagtaggacgctcttcattttactgcctggagtactttccttctcagatgctgcgtaccggaaacaactttaccttcagctacacttttgaggacgttcctttccacagcagctacgctcacagccagagtctggaccgtctcatgaatcctctcatcgaccagtacctgtattacttgagcagaacaaacactccaagtggaaccaccacgcagtcaaggcttcagttttctcaggccggagcgagtgacattcgggaccagtctaggaactggcttcctggaccctgttaccgccagcagcgagtatcaaagacatctgcggataacaacaacagtgaatacttgtggactggagctaccaagtaccacctcaatggcagagactctctggtgaatccgggcccggccatggcaagccacaaggacgatgaagaaaagttttttcctcagagcggggttctcatctttgggaagcaaggctcagagaaaacaaatgtggacattgaaaaggtcatgattacagacgaagaggaaatcaggacaaccaatcccgtggctacggagcagtatggttctgtatctaccaacctccagagaggcaacaggcaagcagctaccgcagatgtcaacacacaaggcgttcttccaggcacggtctggcaggacagagatgtgtaccttcaggggcccatctgggcaaagattccacacacggacggacattttcacccctctcccctcatgggtggattcggacttaaacaccctcctccacagattctcatcaagaacaccccggtacctgcgaatccttcgaccaccttcagtgcggcaaagtttgcttccttcatcacacagtactccacgggacaggtcagcgtggagatcgagtgggagctgcagaaggaaaacagcaaacgctggaatcccgaaattcagtacacttccaactacaacaagtctgttaatgtggactttactgtggacactaatggcgtgtattcagagcctcgccccattggcaccagatacctgactcgtaatctgtaa

SEQ ID NO: 1048 - DNA, 2208 bp, Artificial Sequence
  Synthetic Polynucleotide
atggctgccgatggttatcttccagattggctcgaggacactctctctgaaggaataagacagtggtggaagctcaaacctggcccaccaccaccaaagcccgcagagcggcataaggacgacagcaggggtcttgtgcttcctgggtacaagtacctcggacccttcaacggactcgacaagggagagccggtcaacgaggcagacgccgcggccctcgagcacgacaaagcctacgaccggcagctcgacagcggagacaacccgtacctcaagtacaaccacgccgacgcggagtttcaggagcgccttaaagaagatacgtcttttgggggcaacctcggacgagcagtcttccaggcgaaaaagagggttcttgaacctctgggcctggttgaggaacctgttaagacggctccgggaaaaaagaggccggtagagcactctcctgtggagccagactcctcctcgggaaccggaaaggcgggccagcagcctgcaagaaaaagattgaattttggtcagactggagacgcagactcagtacctgacccccagcctctcggacagccaccagcagccccctctggtctgggaactaatacgatggctacaggcagtggcgcaccaatggcagacaataacgagggcgccgacggagtgggtaattcctcgggaaattggcattgcgattccacatggatgggcgacagagtcatcaccaccagcacccgaacctgggccctgcccacctacaacaaccacctctacaaacaaatttccagccaatcaggagcctcgaacgacaatcactactttggctacagcaccccttgggggtattttgacttcaacagattccactgccacttttcaccacgtgactggcaaagactcatcaacaacaactggggattccgacccaagagactcaacttcaagccctttaacattcaagtcaaagaggtcacgcagaatgacggtacgacgacgattgccaataaccttaccagcacggttcaggtgtttactgactcggagtaccagctcccgtacgtcctcggctcggcgcatcaaggatgcctcccgccgttcccagcagacgtcttcatggtgccacagtatggatacctcaccctgaacaacgggagtcaggcagtaggacgctcttcattttactgcctggagtactttccttctcagatgctgcgtaccggaaacaactttaccttcagctacacttttgaggacgttcctttccacagcagctacgctcacagccagagtctggaccgtctcatgaatcctctcatcgaccagtacctgtattacttgagcagaacaaacactccaagtggaaccaccacgcagtcaaggcttcagttttctcaggccggagcgagtgacattcgggaccagtctaggaactggcttcctggaccctgttaccgccagcagcgagtatcaaagacatctgcggataacaacaacagtgaatactcgtggactggagctaccaagtaccacctcaatggcagagactctctggtgaatccgggcccggccatggcaagccacaaggacgatgaagaaaagttttttcctcagagcggggttctcatctttgggaagcaaggctcagagaaaacaaatgtggacattgaaaaggtcatgattacagacgaagaggaaatcaggacaaccaatcccgtggctacggagcagtatggttctgtatctaccaacctccagagaggcaacagacaagcagctaccgcagatgtcaacacacaaggcgttcttccaggcacggtctggcaggacagagatgtgtaccttcaggggcccatctgggcaaagattccacacacggacggacattttcacccctctcccctcatgggtggattcggacttaaacaccctcctccacagattctcatcaagaacaccccggtacctgcgaatccttcgaccaccttcagtgcggcaaagtttgcttccttcatcacacagtactccacgggacaggtcagcgtggagatcgagtgggagctgcagaaggaaaacagcaaacgctggaatcccgaaattcagtacacttccaactacaacaagtctgttaatgtggactttactgtggacactaatggcgtgtattcagagcctcgccccattggcaccagatacctgactcgtaatctgtaa

SEQ ID NO: 1049 - DNA, 2208 bp, Artificial Sequence
  Synthetic Polynucleotide
atggctgccgatggttatcttccagattggctcgaggacactctctctgaaggaataagacagtggtggaagctcaaacctggcccaccaccaccaaagcccgcagagcggcataaggacgacagcaggggtcttgtgcttcctgggtacaagtacctcggacccttcaacggactcgacaagggagagccggtcaacgaggcagacgccgcggccctcgagcacgacaaagcctacgaccggcagctcgacagcggagacaacccgtacctcaagtacaaccacgccgacgcggagtttcaggagcgccttaaagaagatacgtcttttgggggcaacctcggacgagcagtcttccaggcgaaaaagagggttcttgaacctctgggcctggttgaggaacctgttaagacggctccgggaaaaaagaggccggtagagcactctcctgtggagccagactcctcctcgggaaccggaaaggcgggccagcagcctgcaagaaaaagattgaattttggtcagactggagacgcagactcagtacctgacccccagcctctcggacagccaccagcagccccctctggtctgggaactaatacgatggctacaggcagtggcgcaccaatggcagacaataacgagggcgccgacggagtgggtaattcctcgggaaattggcattgcgattccacatggatgggcgacagagtcatcaccaccagcacccgaacctgggccctgcccacctacaacaaccacctctacaaacaaatttccagccaatcaggagcctcgaacgacaatcactactttggctacagcaccccttgggggtattttgacttcaacagattccactgccacttttcaccacgtgactggcaaagactcatcaacaacaactggggattccgacccaagagactcaacttcaagctctttaacattcaagtcaaagaggtcacgcagaatgacggtacgacgacgattgccaataaccttaccagcacggttcaggtgtttactgactcggagtaccagctcccgtacgtcctcggctcggcgcatcaaggatgcctcccgccgttcccagcagacgtcttcatggtgccacagtatggatacctcaccctgaacaacgggagtcaggcagtaggacgctcttcattttactgcctggagtactttccttctcagatgctgcgtaccggaaacaactttaccttcagctacacttttgaggacgttcctttccacagcagctacgctcacagccagagtctggaccgtctcatgaatcctctcatcgaccagtacccgtattacttgagcagaacaaacactccaagtggaaccaccacgcagtcaaggcttcagttttctcaggccggagcgagtgacattcgggaccagtctaggaactggcttcctggaccctgttaccgccagcagcgagtatcaaagacatctgcggataacaacaacagtgaatactcgtggactggagctaccaagtaccacctcaatggcagagactctctggtgaatccgggcccggccatggcaagccacaaggacgatgaagaaaagttttttcctcagagcggggttctcatctttgggaagcaaggctcagagaaaacaaatgtggacattgaaaaggtcatgattacagacgaagaggaaatcaggacaaccaatcccgtggctacggagcagtatggttctgtatctaccaacctccagagaggcaacagacaagcagctaccgcagatgtcaacacacaaggcgttcttccaggcacggtctggcaggacagagatgtgtaccttcaggggcccatctgggcaaagattccacacacggacggacattttcacccctctcccctcatgggtggattcggacttaaacaccctcctccacagattctcatcaagaacaccccggtacctgcgaatccttcgaccaccttcagtgcggcaaagtttgcttccttcatcacacagtactccacgggacaggtcagcgtggagatcgagtgggagctgcagaaggaaaacagcaaacgctggaatcccgaaattcagtacacttccaactacaacaagtctgttaatgtggactttactgtggacactaatggcgtgtattcagagcctcgccccattggcaccagatacctgactcgtaatctgtaa

SEQ ID NO: 1050 - DNA, 2208 bp, Artificial Sequence
  Synthetic Polynucleotide
atggctgccgatggttatcttccagattggctcgaggacactctctctgaaggaataagacagtggtggaagctcaaacctggcccaccaccaccaaagcccgcagagcggcataaggacgacagcaggggtcttgtgcttcctgggtacaagtacctcggacccttcaacggactcgacaagggagagccggtcaacgaggcagacgccgcggccctcgagcacgacaaagcctacgaccggcagctcgacagcggagacaacccgtacctcaagtacaaccacgccgacgcggagtttcaggagcgccttaaagaagatacgtcttttgggggcaacctcggacgagcagtcttccaggcgaaaaagagggctcttgaacctctgggcctggttgaggaacctgttaagacggctccgggaaaaaagaggccggtagagcactctcctgtggagccagactcctcctcgggaaccggaaaggcgggccagcagcctgcaagaaaaagattgaattttggtcagactggagacgcagactcagtacctgacccccagcctctcggacagccaccagcagccccctctggtctgggaactaatacgatggctacaggcagtggcgcaccaatggcagacaataacgagggcgccgacggagtgggtaattcctcgggaaattggcattgcgattccacatggatgggcgacagagtcatcaccaccagcacccgaacctgggccctgcccacctacaacaaccacctctacaaacaaatttccagccaatcaggagcctcgaacgacaatcactactttggctacagcaccccttgggggtattttgacttcaacagattccactgccacttttcaccacgtgactggcaaagactcatcaacaacaactggggattccgacccaagagactcaacttcaagctctttaacattcaagtcaaagaggtcacgcagaatgacggtacgacgacgattgccaataaccttaccagcacggttcaggtgtttactgactcggagtaccagctcccgtacgtcctcggctcggcgcatcaaggatgcctcccgccgttcccagcagacgtcttcatggtgccacagtatggatacctcaccctgaacaacgggagtcaggcagtaggacgctcttcattttactgcctggagtactttccttctcagatgctgcgtaccggaaacaactttaccttcagctacacttttgaggacgttcctttccacagcagctacgctcacagccagagtctggaccgtctcatgaatcctctcatcgaccagtacctgtattacttgagcagaacaaacactccaagtggaaccaccacgcagtcaaggcttcagttttctcaggccggagcgagtgacattcgggaccagtctaggaactggcttcctggaccctgttaccgccagcagcgagtatcaaagacatctgcggataacaacaacagtgaatactcgtggactggagctaccaagtaccacctcaatggcagagactctctggtgaatccgggcccggccatggcaagccacaaggacgatgaagaaaagttttttcctcagagcggggttctcatctttgggaagcaaggctcagagaaaacaaatgtggacattgaaaaggtcatgattacagacgaagaggaaatcaggacaaccaatcccgtggctacggagcagtatggttctgtatctaccaacctccagagaggcaacagacaagcagctaccgcagatgtcaacacacaaggcgttcttccaggcacggtctggcaggacagagatgtgtaccttcaggggcccatctgggcaaagattccacacacggacggacattttcacccctctcccctcatgggtggattcggacttaaacaccctcctccacagattctcatcaagaacaccccggtacctgcgaatccttcgaccaccttcagtgcggcaaagtttgcttccttcatcacacagtactccacgggacaggtcagcgtggagatcgagtgggagctgcagaaggaaaacagcaaacgctggaatcccgaaattcagtacacttccaactacaacaagtctgttaatgtggactttactgtggacactaatggcgtgtattcagagcctcgccccattggcaccagatacctgactcgtaatctgtaa

SEQ ID NO: 1051 - DNA, 2208 bp, Artificial Sequence
  Synthetic Polynucleotide
atggctgccgatggttatcttccagattggctcgaggacactctctctgaaggaataagacagtggtggaagctcaaacctggcccaccaccaccaaagcccgcagagcggcataaggacgacagcaggggtcttgtgcttcctgggtacaagtacctcggacccttcaacggactcgacaagggagagccggtcaacgaggcagacgccgcggccctcgagcacgacaaagcctacgaccggcagctcgacagcggagacaacccgtacctcaagtacaaccacgccgacgcggagtttcaggagcgccttaaagaagatacgtcttttgggggcaacctcggacgagcagtcttccaggcgaaaaagagggttcttgaacctctgggcctggttggggaacctgttaagacggctccgggaaaaaagaggccggtagagcactctcctgtggagccagactcctcctcgggaaccggaaaggcgggccagcagcctgcaagaaaaagattgaattttggtcagactggagacgcagactcagtacctgacccccagcctctcggacagccaccagcagccccctctggtctgggaactaatacgatggctacaggcagtggcgcaccaatggcagacaataacgagggcgccgacggagtgggtaattcctcgggaaattggcattgcgattccacatggatgggcgacagagtcatcaccaccagcacccgaacctgggccctgcccacctacaacaaccacctctacaaacaaatttccagccaatcaggagcctcgaacgacaatcactactttggctacagcaccccttgggggtattttgacttcaacagattccactgccacttttcaccacgtgactggcaaagactcatcaacaacaactggggattccgacccaagagactcaacttcaagctctttaacattcaagtcaaagaggtcacgcagaatgacggtacgacgacgattgccaataaccttaccagcacggttcaggtgtttactgactcggagtaccagctcccgtacgtcctcggctcggcgcatcaaggatgcctcccgccgttcccagcagacgtcttcatggtgccacagtatggatacctcaccctgaacaacgggagtcaggcagtaggacgctcttcattttactgcctggagtactttccttctcagatgctgcgtaccggaaacaactttaccttcagctacacttttgaggacgttcctttccacagcagctacgctcacagccagagtctggaccgtctcatgaatcctctcatcgaccagtacctgtattacttgagcagaacaaacactccaagtggaaccaccacgcagtcaaggcttcagttttctcaggccggagcgagtgacattcgggaccagtctaggaactggcttcctggaccctgttaccgccagcagcgagtatcaaagacatctgcggataacaacaacagtgaatactcgtggactggagctaccaagtaccacctcaatggcagagactctctggtgaatccgggcccggccatggcaagccacaaggacgatgaagaaaagttttttcctcagagcggggttctcatctttgggaagcaaggctcagagaaaacaaatgtggacattgaaaaggtcatgattacagacgaagaggaaatcaggacaaccaatcccgtggctacggagcagtatggttctgtatctaccaacctccagagaggcaacagacaagcagctaccgcagatgtcaacacacaaggcgttcttccaggcatggtctggcaggacagagatgtgtaccttcaggggcccatctgggcaaagattccacacacggacggacattttcacccctctcccctcatgggtggattcggacttaaacaccctcctccacagattctcatcaagaacaccccggtacctgcgaatccttcgaccaccttcagtgcggcaaagtttgcttccttcatcacacagtactccacgggacaggtcagcgtggagatcgagtgggagctgcagaaggaaaacagcaaacgctggaatcccgaaattcagtacacttccaactacaacaagtctgttaatgtggactttactgtggacactaatggcgtgtattcagagcctcgccccattggcaccagatacctgactcgtaatctgtaa

SEQ ID NO: 1052 - DNA, 2208 bp, Artificial Sequence
  Synthetic Polynucleotide
atggctgccgatggttatcttccagattggctcgaggacactctctctgaaggaataagacagtggtggaagctcaaacctggcccaccaccaccaaagcccgcagagcggcataaggacgacagcaggggtcttgtgcttcctgggtacaagtacctcggacccttcaacggactcgacaagggagagccggtcaacgaggcagacgccgcggccctcgagcacgacaaagcctacgaccggcagcccgacagcggagacaacccgtacctcaagtacaaccacgccgacgcggagtttcaggagcgccttaaagaagatacgtcttttgggggcaacctcggacgagcagtcttccaggcgaaaaagagggttcttgaacctctgggcctggttgaggaacctgttaagacggctccgggaaaaaagaggccggtagagcactctcctgtggagccagactcctcctcgggaaccggaaaggcgggccagcagcctgcaagaaaaagattgaattttggtcagactggagacgcagactcagtacctgacccccagcctctcggacagccaccagcagccccctctggtctgggaactaatacgatggctacaggcagtggcgcaccaatggcagacaataacgagggcgccgacggagtgggtaattcctcgggaaattggcattgcgattccacatggatgggcgacagagtcatcaccaccagcacccgaacctgggccctgcccacctacaacaaccacctctacaaacaaatttccagccaatcaggagcctcgaacgacaatcactactttggctacagcaccccttgggggtattttgacttcaacagattccactgccacttttcaccacgtgactggcaaagactcatcaacaacaactggggattccgacccaagagactcaacttcaagctctttaacattcaagtcaaagaggtcacgcagaatgacggtacgacgacgattgccaataaccttaccagcacggttcaggtgtttactgactcggagtaccagctcccgtacgtcctcggctcggcgcatcaaggatgcctcccgccgttcccagcagacgtcttcatggtgccacagtatggatacctcaccctgaacaacgggagtcaggcagtaggacgctcttcattttactgcctggagtactttccttctcagatgctgcgtaccggaaacaactttaccttcagctacacttttgaggacgttcctttccacagcagctacgctcacagccagagtctggaccgtctcatgaatcctctcatcgaccagtacctgtattacttgagcagaacaaacactccaagtggaaccaccacgcagtcaaggcttcagttttctcaggccggagcgagtgacattcgggaccagtctaggaactggcttcctggaccctgttaccgccagcagcgagtatcaaagacatctgcggataacaacaacagtgaatactcgtggactggagctaccaagtaccacctcaatggcagagactctctggtgaatccgggcccggccatggcaagccacaaggacgatgaagaaaagttttttcctcagagcggggttctcatctttgggaagcaaggctcagagaaaacaaatgtggacattgaaaaggtcatgattacagacgaagaggaaatcaggacaaccaatcccgtggctacggagcagtatggttctgtatctaccaacctccagagaggcaacagacaagcagctaccgcagatgtcaacacacaaggcgttcttccaggcacggtctggcaggacagagatgtgtaccttcaggggcccatctgggcaaagattccacacacggacggacattttcacccctctcccctcatgggtggattcggacttaaacaccctcctccacagattctcatcaagaacaccccggtacctgcgaatccttcgaccaccttcagtgcggcaaagtttgcttccttcatcacacagtactccacgggacaggtcagcgtggagatcgagtgggagctgcagaaggaaaacagcaaacgctggaatcccgaaattcagtacacttccaactacaacaagtctgttaatgtggactttactgtggacactaatggcgtgtattcagagcctcgccccattggcaccagatacctgactcgtaatctgtaa

SEQ ID NO: 1053 - DNA, 2208 bp, Artificial Sequence
  Synthetic Polynucleotide
atggctgccgatggttatcttccagattggctcgaggacactctctctgaaggaataagacagtggtggaagctcaaacctggcccaccaccaccaaagcccgcagagcggcataaggacgacagcaggggtcttgtgcttcctgggtacaagtacctcggacccttcaacggactcgacaagggagagccggtcaacgaggcagacgccgcggccctcgagcacgacaaagcctacgaccggcagctcgacagcggagacaacccgtacctcaagtacaaccacgccgacgcggagtttcaggagcgccttaaagaagatacgtcttttgggggcaacctcggacgagcagtcttccaggcgaaaaagagggttcttgaacctctgggcctggttgaggaacctgttaagacggctccgggaaaaaagaggccggtagagcactctcctgtggagccagactcctcctcgggaaccggaaaggcgggccagcagcctgcaagaaaaagattgaattttggtcagactggagacgcagactcagtacctgacccccagcctctcggacagccaccagcagccccctctggtctgggaactaatacgatggctacaggcagtggcgcaccaatggcagacaataacgagggcgccgacggagtgggtaattcctcgggaaattggcattgcgattccacatggatgggcgacagagtcatcaccaccagcacccgaacctgggccctgcccacctacaacaaccacctctacaaacaaatttccagccaatcaggagcctcgaacgacaatcactactttggctacagcaccccttgggggtattttgacttcaacagattccactgccacttttcaccacgtgactggcaaagactcatcaacaacaactggggattccgacccaagagactcaacttcaagctctttaacattcaagtcaaagaggtcacgcagaatgacggtacgacgacgattgccaataaccttaccagcacggttcaggtgtttactgactcggagtaccagctcccgtacgtcctcggctcggcgcatcaaggatgcctcccgccgttcccagcagacgtcttcatggtgccacagtatggatacctcaccctgaacaacgggagtcaggcagtaggacgctcttcattttactgcctggagtactttccttctcagatgctgcgtaccggaaacaactttaccttcagctacacttttgaggacgttcctttccacagcagctacgctcacagccagagtctggaccgtctcatgaatcctctcatcgaccagtacctgtattacttgagcagaacaaacaccccaagtggaaccaccacgcagtcaaggcttcagttttctcaggccggagcgagtgacattcgggaccagtctaggaactggcttcctggaccctgttaccgccagcagcgagtatcaaagacatctgcggataacaacaacagtgaatactcgtggactggagctaccaagtaccacctcaatggcagagactctctggtgaatccgggcccggccatggcaagccacaaggacgatgaagaaaagttttttcctcagagcggggttctcatctttgggaagcaaggctcagagaaaacaaatgtggacattgaaaaggtcatgattacagacgaagaggaaatcaggacaaccaatcccgtggctacggagcagtatggttctgtatctaccaacctccagagaggcaacagacaagcagctaccgcagatgtcaacacacaaggcgttcttccaggcatggtctggcaggacagagatgtgtaccttcaggggcccatctgggcaaagattccacacacggacggacattttcacccctctcccctcatgggtggattcggacttaaacaccctcctccacagattctcatcaagaacaccccggtacctgcgaatccttcgaccaccttcagtgcggcaaagtttgcttcctccatcacacagtactccacgggacaggtcagcgtggagatcgagtgggagctgcagaaggaaaacagcaaacgctggaatcccgaaattcagtacacttccaactacaacaagtctgttaatgtggactttactgtggacactaatggcgtgtattcagagcctcgccccattggcaccagatacctgactcgtaatctgtaa

SEQ ID NO: 1054 - DNA, 2208 bp, Artificial Sequence
  Synthetic Polynucleotide
atggctgccgatggttatcttccagattggctcgaggacactctctctgaaggaataagacagtggtggaagctcaaacctggcccaccaccaccaaagcccgcagagcggcataaggacgacagcaggggtcttgtgcttcctgggtacaagtacctcggacccttcaacggactcgacaagggagagccggtcaacgaggcagacgccgcggccctcgagcacgacaaagcctacgaccggcagctcgacagcggagacaacccgtacctcaagtacaaccacgccgacgcggagtttcaggagcgccttaaagaagatacgtcttttgggggcaacctcggacgagcagtcttccaggcgaaaaagagggttcttgaacctctgggcctggttgaggaacctgttaagacggctccgggaaaaaagaggccggtagagcactctcctgtggagccagactcctcctcgggaaccggaaaggcgggccagcagcctgcaagaaaaagattgaattttggtcagactggagacgcagactcagtacctgacccccagcctctcggacagccaccagcagccccctctggtctgggaactaatacgatggctacaggcagtggcgcaccaatggcagacaataacgagggcgccgacggagtgggtaattcctcgggaaattggcattgcgattccacatggatgggcgacagagtcatcaccaccagcacccgaacctgggccctgcccacctacaacaaccacctctacaaacaaatttccagccaatcaggagcctcgaacgacaatcactactttggctacagcaccccttgggggtattttgacctcaacagattccactgccacttttcaccacgtgactggcaaagactcatcaacaacaactggggattccgacccaagagactcaacttcaagctctttaacattcaagtcaaagaggtcacgcagaatgacggtacgacgacgattgccaataaccttaccagcacggttcaggtgtttactgactcggagtaccagctcccgtacgtcctcggctcggcgcatcaaggatgcctcccgccgttcccagcagacgtcttcatggtgccacagtatggatacctcaccctgaacaacgggagtcaggcagtaggacgctcttcattttactgcctggagtactttccttctcagatgctgcgtaccggaaacaactttaccttcagctacacttttgaggacgttcctttccacagcagctacgctcacagccagagtctggaccgtctcatgaatcctctcatcgaccagtacctgtattacttgagcagaacaaacactccaagtggaaccaccacgcagtcaaggcttcagttttctcaggccggagcgagtgacattcgggaccagtctaggaactggcttcctggaccctgttaccgccagcagcgagtatcaaagacatctgcggataacaacaacagtgaatactcgtggactggagctaccaagtaccacctcaatggcagagactctctggtgaatccgggcccggccatggcaagccacaaggacgatgaagaaaagttttttcctcagagcggggttctcatctttgggaagcaaggctcagagaaaacaaatgtggacattgaaaaggtcatgattacagacgaagaggaaatcaggacaaccaatcccgtggctacggagcagtatggttctgtatctaccaacctccagagaggcaacagacaagcagctaccgcagatgtcaacacacaaggcgttcttccaggcacggtctggcaggacagagatgtgtaccttcaggggcccatctgggcaaagattccacacacggacggacattttcacccctctcccctcatgggtggattcggacttaaacaccctcctccacagattctcatcaagaacaccccggtacctgcgaatccttcgaccaccttcagtgcggcaaagtttgcttccttcatcacacagtactccacgggacaggtcagcgtggagatcgagtgggagctgcagaaggaaaacagcaaacgctggaatcccgaaattcagtacacttccaactacaacaagtctgttaatgtggactttactgtggacactaatggcgtgtattcagagcctcgccccattggcaccagatacctgactcgtaatctgtaa

SEQ ID NO: 1055 - DNA, 2208 bp, Artificial Sequence
  Synthetic Polynucleotide
atggctgccgatggttatcttccagattggctcgaggacactctctctgaaggaataagacagtggtggaagctcaaacctggcccaccaccaccaaagcccgcagagcggcataaggacgacagcaggggtcttgtgcttcctgggtacaagtacctcggacccttcaacggactcgacaagggagagccggtcaacgaggcagacgccgcggccctcgagcacgacaaagcctacgaccggcagctcgacagcggagacaacccgtacctcaagtacaaccacgccgacgcggagtttcaggagcgccttaaagaagatacgtcttttgggggcaacctcggacgagcagtcttccaggcgaaaaagagggttcttgaacctctgggcctggttgaggaacctgttaagacggctccgggaaaaaagaggccggtagagcactctcctgtggagccagactcctcctcgggaaccggaaaggcgggccagcagcctgcaagaaaaagattgaattttggtcagactggagacgcagactcagtacctgacccccagcctctcggacagccaccagcagccccctctggtctgggaactaatacgatggctacaggcagtggcgcaccaatggcagacaataacgagggcgccgacggagtgggtaattcctcgggaaattggcattgcgattccacatggatgggcgacagagtcatcaccaccagcacccgaacctgggccctgcccacctacaacaaccacctctacaaacaaatttccagccaatcaggagcctcgaacgacaatcgctactttggctacagcaccccttgggggtattttgacttcaacagattccactgccacttttcaccacgtgactggcaaagactcatcaacaacaactggggattccgacccaagagactcaacttcaagctctttaacattcaagtcaaagaggtcacgcagaatgacggtacgacgacgattgccaataaccttaccagcacggttcaggtgtttactgactcggagtaccagctcccgtacgtcctcggctcggcgcatcaaggatgcctcccgccgttcccagcagacgtcttcatggtgccacagtatggatacctcaccctgaacaacgggagtcaggcagtaggacgctcttcattttactgcctggagtactttccttctcagatgctgcgtaccggaaacaactttaccttcagctacacttttgaggacgttcctttccacagcagctacgctcacagccagagtctggaccgtctcatgaatcctctcatcgaccagtacctgtattacttgagcagaacaaacactccaagtggaaccaccacgcagtcaaggcttcagttttctcaggccggagcgagtgacattcgggaccagtctaggaactggcttcctggaccctgttaccgccagcagcgagtatcaaagacatctgcggataacaacaacagtgaatactcgtggactggagctaccaagtaccacctcaatggcagagactctctggtgaatccgggcccggccatggcaagccacaaggacgatgaagaaaagttttttcctcagagcggggttctcatctttgggaagcaaggctcagagaaaacaaatgtggacattgaaaaggtcatgattacagacgaagaggaaatcaggacaaccaatcccgtggctacggagcagtatggttctgtatctaccaacctccagagaggcaacagacaagcagctaccgcagatgtcaacacacaaggcgttcttccaggcacggtctggcaggacagagatgtgtaccttcaggggcccatctgggcaaagattccacacacggacggacattttcacccctctcccctcatgggtggattcggacttaaacaccctcctccacagattctcatcaagaacaccccggtacctgcgaatccttcgaccaccttcagtgcggcaaagtttgcttccttcatcacacagtactccacgggacaggtcagcgtggagatcgagtgggagctgcagaaggaaaacagcaaacgctggaatcccgaaattcagtacacttccaactacaacaagtctgttaatgtggactttactgtggacactaatggcgtgtattcagagcctcgccccattggcaccagatacctgactcgtaatctgtaa

SEQ ID NO: 1056 - DNA, 2208 bp, Artificial Sequence
  Synthetic Polynucleotide
atggctgccgatggttatcttccagattggctcgaggacactctctctgaaggaataagacagtggtggaagctcaaacctggcccaccaccaccaaagcccgcagagcggcataaggacgacagcaggggtcttgtgcttcctgggtacaagtacctcggacccttcaacggactcgacaagggagagccggtcaacgaggcagacgccgcggccctcgagcacgacaaagcctacgaccggcagctcgacagcggagacaacccgtacctcaagtacaaccacgccgacgcggagtttcaggagcgccttaaagaagatacgtcttttgggggcaacctcggacgagcagtcttccaggcgaaaaagagggttcttgaacctctgggcctggttgaggaacctgttaagacggctccgggaaaaaagaggccggtagagcactctcctgtggagccagactcctcctcgggaaccggaaaggcgggccagcagcctgcaagaaaaagattgaattttggtcagactggagacgcagactcagtacctgacccccagcctctcggacagccaccagcagccccctctggtctgggaactaatacgatggctacaggcagtggcgcaccaatggcagacaataacgagggcgccgacggagtgggtaattcctcgggaaattggcattgcgattccacatggatgggcgacagagtcatcaccaccagcacccgaacctgggccctgcccacctacaacaaccacctctacaaacaaatttccagccaatcaggagcctcgaacgacaatcactactttggctacagcaccccttgggggtattttgacttcaacagattccactgccacttttcaccacgtgactggcaaagactcatcaacaacaactggggattccgacccaagagactcaacttcaagctctttaacattcaagtcaaagaggtcacgcagaatgacggtacgacgacgattgccaataaccttaccagcacggttcaggtgtttactgactcggagtaccagctcccgtacgtcctcggctcggcgcatcaaggatgcctcccgccgttcccagcagacgtcttcatggtgccacagtatggatacctcaccctgaacaacgggagtcaggcagtaggacgctcttcattttactgcctggagtactttccttctcagatgctgcgtaccggaaacaactttaccttcagctacacttttgaggacgttcctttccacagcagctacgctcacagccagagtctggaccgtctcatgaatcctctcatcgaccagtacctgtattacttgagcagaacaaacactccaagtggaaccaccacgcagtcaaggcttcagttttctcaggccggagcgagtgacattcgggaccagtctaggaactggcttcctggaccctgttaccgccagcagcgagtatcaaagacatctgcggataacaacaacagtgaatactcgtggactggagctaccaagtaccacctcaatggcagagactctctggtgaatccgggcccggccatggcaagccacaaggacgatgaagaaaagttttttcctcagagcggggttctcatctttgggaagcaaggctcagagaaaacaaatgtggacattgaaaaggtcatgattacagacgaagaggaaatcaggacaaccaatcccgtggctacggagcagtatggttctgtatctaccaacctccagagaggcaacagacaagcagctaccgcagatgtcaacacacaaggcgttcttccaggcacggtctggcaggacagagatgtgtaccttcaggggcccatctgggcaaagattccacacacggacggacattttcacccctctcccctcatgggtggattcggacttaaacaccctcctccacagattctcatcaagaacaccccggtacctgcgaatccttcgaccaccttcagtgcggcaaagtttgcttccttcatcacacagtactccacgggacaggtcagcgtggagatcgagtgggagctgcagaaggaaaacagcaaacgctggaatcccgaaattcagtacacttccaactacaacaagtctgctaatgtggactttactgtggacactaatggcgtgtattcagagcctcgccccattggcaccagatacctgactcgtaatctgtaa

SEQ ID NO: 1057 - DNA, 2208 bp, Artificial Sequence
  Synthetic Polynucleotide
atggctgccgatggttatcttccagattggctcgaggacactctctctgaaggaataagacagtggtggaagctcaaacctggcccaccaccaccaaagcccgcagagcggcataaggacgacagcaggggtcttgtgcttcctgggtacaagtacctcggacccttcaacggactcgacaagggagagccggtcaacgaggcagacgccgcggccctcgagcacgacaaagcctacgaccggcagctcgacagcggagacaacccgtacctcaagtacaaccacgccgacgcggagtttcaggagcgccttaaagaagatacgtcttttgggggcaacctcggacgagcagtcttccaggcgaaaaagagggttcttgaacctctgggcctggttgaggaacctgttaagacggctccgggaaaaaagaggccggtagagcactctcctgtggagccagactcctcctcgggaaccggaaaggcgggccagcagcctgcaagaaaaagattgaattttggtcagactggagacgcagactcagtacctgacccccagcctctcggacagccaccagcagccccctctggtctgggaactaatacgatggctacaggcagtggcgcaccaatggcaggcaataacgagggcgccgacggagtgggtaattcctcgggaaattggcattgcgattccacatggatgggcgacagagtcatcaccaccagcacccgaacctgggccctgcccacctacaacaaccacctctacaaacaaatttccagccaatcaggagcctcgaacgacaatcactactttggctacagcaccccttgggggtattttgacttcaacagattccactgccacttttcaccacgtgactggcaaagactcatcaacaacaactggggattccgacccaagagactcaacttcaagctctttaacattcaagtcaaagaggtcacgcagaatgacggtacgacgacgattgccaataaccttaccagcacggttcaggtgtttactgactcggagtaccagctcccgtacgtcctcggctcggcgcatcaaggatgcctcccgccgttcccagcagacgtcttcatggtgccacagtatggatacctcaccctgaacaacgggagtcaggcagtaggacgctcttcattttactgcctggagtactttccttctcagatgctgcgtaccggaaacaactttaccttcagctacacttttgaggacgttcctttccacagcagctacgctcacagccagagtctggaccgtctcatgaatcctctcatcgaccagtacctgtattacttgagcagaacaaacactccaagtggaaccaccacgcagtcaaggcttcagttttctcaggccggagcgagtgacattcgggaccagtctaggaactggcttcctggaccctgttaccgccagcagcgagtatcaaagacatctgcggataacaacaacagtgaatactcgtggactggagctaccaagtaccacctcaatggcagagactctctggtgaatccgggcccggccatggcaagccacaaggacgatgaagaaaagttttttcctcagagcggggttctcatctttgggaagcaaggctcagagaaaacaaatgtggacattgaaaaggtcatgattacagacgaagaggaaatcaggacaaccaatcccgtggctacggagcagtatggttctgtatctaccaacctccagagaggcaacagacaagcagctaccgcagatgtcaacacacaaggcgttcttccaggcacggtctggcaggacagagatgtgtaccttcaggggcccatctgggcaaagattccacacacggacggacattttcacccctctcccctcatgggtggattcggacttaaacaccctcctccacagattctcatcaagaacaccccggtacctgcgaatccttcgaccaccttcagtgcggcaaagtttgcttccttcatcacacagtactccacgggacaggtcagcgtggagatcgagtgggagctgcagaaggaaaacagcaaacgctggaatcccgaaattcagtacacttccaactacaacaagtctgttaatgtggactttactgtggacactaatggcgtgtattcagagcctcgccccattggcaccagatacctgactcgtaatctgtaa

SEQ ID NO: 1058 - DNA, 2208 bp, Artificial Sequence
  Synthetic Polynucleotide
atggctgccgatggttatcttccagattggctcgaggacactctctctgaaggaataagacagtggtggaagctcaaacctggcccaccaccaccaaagcccgcagagcggcataaggacgacagcaggggtcttgtgcttcctgggtacaagtacctcggacccttcaacggactcgacaagggagagccggtcaacgaggcagacgccgcggccctcgagcacgacaaagcctacaaccggcagctcgacagcggagacaacccgtacctcaagtacaaccacgccgacgcggagtttcaggagcgccttaaagaagatacgtcttttgggggcaacctcggacgagcagtcttccaggcgaaaaagagggttcttgaacctctgggcctggttgaggaacctgttaagacggctccgggaaaaaagaggccggtagagcactctcctgtggagccagactcctcctcgggaaccggaaaggcgggccagcagcctgcaagaaaaagattgaattttggtcagactggagacgcagactcagtacctgacccccagcctctcggacagccaccagcagccccctctggtctgggaactaatacgatggctacaggcagtggcgcaccaatggcagacaataacgagggcgccgacggagtgggtaattcctcgggaaattggcattgcgattccacatggatgggcgacagagtcatcaccaccagcacccgaacctgggccctgcccacctacaacaaccacctctacaaacaaatttccagccaatcaggagcctcgaacgacaatcactactttggctacagcaccccttgggggtattttgacttcaacagattccactgccacttttcaccacgtgactggcaaagactcatcaacaacaactggggattccgacccaagagactcaacttcaagctctttaacattcaagtcaaagaggtcacgcagaatgacggtacgacgacgattgccaataaccttaccagcacggttcaggtgtttactgactcggagtaccagctcccgtacgtcctcggctcggcgcatcaaggatgcctcccgccgctcccagcagacgtcttcatggtgccacagtatggatacctcaccctgaacaacgggagtcaggcagtaggacgctcttcattttactgcctggagtactttccttctcagatgctgcgtaccggaaacaactttaccttcagctacacttttgaggacgttcctttccacagcagctacgctcacagccagagtctggaccgtctcatgaatcctctcatcgaccagtacctgtattacttgagcagaacaaacactccaagtggaaccaccacgcagtcaaggcttcagttttctcaggccggagcgagtgacattcgggaccagtctaggaactggcttcctggaccctgttaccgccagcagcgagtatcaaagacatctgcggataacaacaacagtgaatactcgtggactggagctaccaagtaccacctcaatggcagggactctctggtgaatccgggcccggccatggcaagccacaaggacgatgaagaaaagttttttcctcagagcggggttctcatctttgggaagcaaggctcagagaaaacaaatgtggacattgaaaaggtcatgattacagacgaagaggaaatcaggacaaccaatcccgtggctacggagcagtatggttctgtatctaccaacctccagagaggcaacagacaagcagctaccgcagatgtcaacacacaaggcgttcttccaggcatggtctggcaggacagagatgtgtaccttcaggggcccatctgggcaaagattccacacacggacggacattttcacccctctcccctcatgggtggattcggacttaaacaccctcctccacagattctcatcaagaacaccccggtacctgcgaatccttcgaccaccttcagtgcggcaaagtttgcttccttcatcacacagtactccacgggacaggtcagcgtggagatcgagtgggagctgcagaaggaaaacagcaaacgctggaatcccgaaattcagtacacttccaactacaacaagtctgttaatgtggactttactgtggacactaatggcgtgtattcagagcctcgccccattggcaccagatacctgactcgtaatctgtaa

SEQ ID NO: 1059 - DNA, 2208 bp, Artificial Sequence
  Synthetic Polynucleotide
atggctgccgatggttatcttccagattggctcgaggacactctctctgaaggaataagacagtggtggaagctcaaacctggcccaccaccgccaaagcccgcagagcggcataaggacgacagcaggggtcttgtgcttcctgggtacaagtacctcggacccttcaacggactcgacaagggagagccggtcaacgaggcagacgccgcggccctcgagcacgacaaggcctacgaccggcagctcgacagcggagacaacccgtacctcaagtacaaccacgccgacgcggagtttcaggagcgccttaaagaagatacgtcttttgggggcaacctcgcaagagcagtattccaggcgaaaaagagggttcttgaacctctgggcctggttgaggagcctgttaagacggctccgggaaaaaagaggccggtagagcattctcctgcggagccagactcctcctcgggaaccggaaaagcgggccagcagcctgcgagaaagagattgaatttcggtcagactggagacgcagactccgtacctgacccccagcctctcggacagccaccagcagccccctctggtctgggaactaatacgatggctacaggcagtggcgcaccaatggcagacaataacgagggtgccgacggagtgggtaattcctcaggaaattggcattgcgattccacatggatgggcgacagagtcatcaccaccagcacccgcacctgggctctgcccacctacaacaaccatctgtacaagcagatctccagccaatctggagccagcaacgacaaccactactttggctacagcaccccttgggggtattttgacttcaacagattccactgccacttctccccacgtgactggcaaagactcatcaacaacaactggggattccggcccaagagactcagcttcaagctctttaacattcaagtcaaggaggtcacgcagaatgacggtgcgacgacgattgccaataaccttaccagcacggttcaggtctttactgactcggagtaccagctcccgtacgtcctcggctcggcgcatcaaggatgcctcccgccgttcccagcagacgtcttcatggtgccacagtatggatacctcaccctgaacaacgggagtcaggcggtaggacgctcttcattttactgcctggagtacttcccttctcagatgcttcgcacgggaaacaactttaccttcagctacacctttgaggacgtgccttttcacagcagctacgctcacagccaaagtctggaccgtctcatgaatcctctcatcgaccagtacctgtattacttgagcaaaacaaacgctccaagcggaaccaccacgatgtccaggcttcagttttctcaggccggagcaagtgacattcgggaccagtctagaaactggcttcctggaccctgttaccgccagcagcgagtatcaaagacagctgcggacaacaacaacagtgattactcgtggactggagctaccaagtaccacctcaatggaagagactctctggtgaacccgggcccagctatggccagccacaaggacgatgaagaaaaatattttcctcagagcggggttctcatcttcgggaaacaaggctcaaataaaactaatgtggacattgaaaaggttatgattacagacgaagaggaaatcaggaccaccaatcccgtggctacggagcagtatggttctgtatctaccaaccttcaaagcggcaacacacaagcagctacctcagatgtcaacacacaaggcgttcttcctggcatggtctggcaggacagagatgtgtacctgcaggggcccatctgggcaaagattccacacacggatggacactttcacccttctcctcttatgggaggatttggactgaagcaccctcccccgcagattctcatcaagaataccccggtacctgcgaatccttcgaccaccttcagtgcggcaaagtttgcttctttcatcacacagtactccacggggcaggtcagcgtggagatcgagtgggagctgcagaaggagaacagcaaacgctggaaccccgagatccagtatacttccaactacaacaaatctgttaatgtggactttactgtggacactaatggtgtgtattcagagcctcgccccattggcaccagatacctgactcgtaatctgtaa

SEQ ID NO: 1060 - DNA, 2205 bp, Artificial Sequence
  Synthetic Polynucleotide
atggctgccgatggttatcttccagattggctcgaggacactctctctgaaggaataagacagtggtggaagctcaaacctggcccaccaccaaagcccgcagagcggcataaggacgacagcaggggtcttgtgcttcctgggtacaagtacctcggacccttcaacggactcgacaagggagagccggtcaacgaggcagacgccgcggccctcgagcacgacaaagcctacgaccggcagctcgacagcggagacaacccgtacctcaagtacaaccacgccgacgcggagtttcaggagcgccttaaagaagatacgtcttttgggggcaacctcggacgagcagtcttccaggcgaaaaagagggctcttgaacctctgggcctggttgaggaacctgttaagacggctccgggaaaaaagaggccggtagagcactctcctgtggagccagactcctcctcgggaaccggaaaggcgggccagcagcctgcaagaaaaagattgaattttggtcagactggagacgcagactcagtacctgacccccagcctctcggacagccaccagcagccccctctggtctgggaactaatacgatggctacaggcagtggcgcaccaatggcagacaataacgagggcgccgacggagtgggtaattcctcgggaaattggcattgcgattccacatggatgggcgacagagtcatcaccaccagcacccgaacctgggccctgcccacctacaacaaccacctctacaaacaaatttccagccaatcaggagcctcgaacgacaatcactactttggctacagcaccccttgggggtattttgacttcaacagattccactgccacttttcaccacgtgactggcaaagactcatcaacaacaactggggattccgacccaagagactcaacttcaagctctttaacattcaagtcaaagaggtcacgcagaatgacggtacgacgacgattgccaataaccttaccagcacggttcaggtgtttactgactcggagtaccagctcccgtacgtcctcggctcggcgcatcaaggatgcctcccgccgttcccagcagacgtcttcatggtgccacagtatggatacctcaccctgaacaacgggagtcaggcagtaggacgctcttcattttactgcctggagtactttccttctcagatgctgcgtaccggaaacaactttaccttcagctacacttttgaggacgttcctttccacagcagctacgctcacagccagagtctggaccgtctcatgaatcctctcatcgaccagtacctgtattacttgagcagaacaaacactccaagtggaaccaccacgcagtcaaggcttcagttttctcaggccggagcgagtgacattcgggaccagtctaggaactggcttcctggaccctgttaccgccagcagcgagtatcaaagacatctgcggataacaacaacagtgaatactcgtggactggagctaccaagtaccacctcaatggcagagactctctggtgaatccgggcccggccatggcaagccacaaggacgatgaagaaaagttttttcctcagagcggggttctcatctttgggaagcaaggctcagagaaaacaaatgtggacattgaaaaggtcatgattacagacgaagaggaaatcaggacaaccaatcccgtggctacggagcagtatggttctgtatctaccaacctccagagaggcaacagacaagcagctaccgcagatgtcaacacacaaggcgttcttccaggcatggtctggcaggacagagatgtgtaccttcaggggcccatctgggcaaagattccacacacggacggacattttcacccctctcccctcatgggtggattcggacttaaacaccctcctccacagattctcatcaagaacaccccggtacctgcgaatccttcgaccaccttcagtgcggcaaagtttgcttccttcatcacacagtactccacgggacaggtcagcgtggagatcgagtgggagctgcagaaggaaaacagcaaacgctggaatcccgaaattcagtacacttccaactacaacaagtctgttaatgtggactttactgtggacactaatggcgtgtattcagagcctcgccccattggcaccagatacctgactcgtaatctgtaa

SEQ ID NO: 1061 - DNA, 2208 bp, Artificial Sequence
  Synthetic Polynucleotide
atggctgccgatggttatcttccagattggctcgaggacactctctctgaaggaataagacagtggtggaagctcaaacctggcccaccaccgccaaagcccgcagagcggcataaggacgacagcaggggtcttgtgcttcctgggtacaagtacctcggacccttcaacggactcgacaagggagagccggtcaacgaggcagacgccgcggccctcgagcacgacaaggcctacgaccggcagctcgacagcggagacaacccgtacctcaagtacaaccacgccgacgcggagtttcaggagcgccttaaagaagatacgtcttttgggggcaacctcgcaagagcagtattccaggcgaaaaagagggttcttgaacctctgggcctggttgaggagcctgttaagacggctccgggaaaaaagaggccggtagagcattctcctgcggagccagactcctcctcgggaaccggaaaagcgggccagcagcctgcgagaaagagattgaatttcggtcagactggagacgcagactccgtacctgacccccagcctctcggacagccaccagcagccccctctggtctgggaactaatacgatggctacaggcagtggcgcaccaatggcagacaataacgagggtgccgacggagtgggtaattcctcaggaaattggcattgcgattccacatggatgggcgacagagtcatcaccaccagcacccgcacctgggctctgcccacctacaacaaccatctgtacaagcagatctccagccaatctggagccagcaacgacaaccactactttggctacagcaccccttgggggtattttgacttcaacagattccactgccacttctccccacgtgactggcaaagactcatcaacaacaactggggattccggcccaagagactcagcttcaagctctttaacattcaagtcaaggaggtcacgcagaatgacggtacgacgacgattgccaataaccttaccagcacggttcaggtctttactgactcggagtaccagctcccgtacgtcctcggctcggcgcatcaaggatgcctcccgccgttcccagcagacgtcttcatggtgccacagtatggatacctcaccctgaacaacgggagtcaggcggtaggacgctcttcattttactgcctggagtacttcccttctcagatgcttcgcacgggaaacaactttaccttcagctacacctttgaggacgtgccttttcacagcagctacgctcacagccaaagtctggaccgtctcatgaatcctctcatcgaccagtacctgtattacttgagcaaaacaaacgctccaagcggaaccaccacgatgtccaggcttcagttttctcaggccggagcaagtgacattcgggaccagtctagaaactggcttcctggaccctgttaccgccagcagcgagtatcaaagacagctgcggacaacaacaacagtgattactcgtggactggagctaccaagtaccacctcaatggaagagactctctggtgaacccgggcccagctatggccagccacaaggacgatgaagaaaaatattttcctcagagcggggttctcatcttcgggaaacaaggctcaaataaaactaatgtggacattgaaaaggttatgattacagacgaagaggaaatcaggaccaccaatcccgtggctacggagcagtatggttctgtatctaccaaccttcaaagcggcaacacacaagcagctacctcagatgtcaacacacaaggcgttcttcctggcatggtctggcaggacagagatgtgtacctgcaggggcccatctgggcaaagattccacacacggatggacactttcacccttctcctcttatgggaggatttggactgaagcaccctcccccgcagattctcatcaagaataccccggtacctgcgaatccttcgaccaccttcagtgcggcaaagtttgcttctttcatcacacagtactccacggggcaggtcagcgtggagatcgagtgggagctgcagaaggagaacggcaaacgctggaaccccgagatccagtatacttccaactacaacaaatctgttaatgtggactttactgtggacactaatggtgtgtattcagagcctcgccccattggcaccagatacctgactcgtaatctgtaa

SEQ ID NO: 1062 - DNA, 2208 bp, Artificial Sequence
  Synthetic Polynucleotide
atggctgccgatggttatcttccagattggctcgaggacactctctctgaaggaataagacagtggtggaagctcaaacctggcccaccaccaccaaagcccgcagagcggcataaggacgacagcaggggtcttgtgcttcctgggtacaagtacctcggacccttcaacggactcgacaagggagagccggtcaacgaggcagacgccgcggccctcgagcacgacaaagcctacgaccggcagctcgacagcggagacaacccgtacctcaagtacaaccacgccgacgcggagtttcaggagcgccttaaagaagatacgtcttttgggggcaacctcggacgagcagtcttccaggcgaaaaagagggttcttgaacctctgggcctggttgaggaacctgttaagacggctccgggaaaaaagaggccggtagagcactctcctgtggagccagactcctcctcgggaaccggaaaggcgggccagcagcctgcaagaaaaagattgaattttggtcagactggagacgcagactcagtacctgacccccagcctctcggacagccaccagcagccccctctggtctgggaactaatacgatggctacaggcagtggcgcaccaatggcagacaataacgagggcgccgacggagtgggtaattcctcgggaaattggcattgcgattccacatggatgggcgacagagtcatcaccaccagcacccgaacctgggccctgcccacctacaacaaccacctctacaaacaaatttccagccaatcaggggcctcgaacgacaatcactactttggctacagcaccccttgggggtattttgacttcaacagattccactgccacttttcaccacgtgactggcaaagactcatcaacaacaactggggattccgacccaagagactcaacttcaagctctttaacattcaagtcaaagaggtcacgcagaatgacggtacgacgacgattgccaataaccttaccagcacggttcaggtgtttactgactcggagtaccagctcccgtacgtcctcggctcggcgcatcaaggatgcctcccgccgttcccagcagacgtcttcatggtgccacagtatggatacctcaccctgaacaacgggagtcaggcagtaggacgctcttcattttactgcctggagtactttccttctcagatgctgcgtaccggaaacaactttaccttcagctacacttttgaggacgttcctttccacagcagctacgctcacagccagagtctggaccgtctcatgaatcctctcattgaccagtacctgtattacttgagcagaacaaacactccaagtggaaccaccacgcagtcaaggcttcagttttctcaggccggagcgagtgacattcgggaccagtctaggaactggcttcctagaccctgttaccgccagcagcgagtatcaaagacatctgcggataacaacaacagtgaatactcgtggactggagctaccaagtaccacctcaatggcagagactctctggtgaatccgggcccggccatggcaagccacaaggacgatgaagaaaagttttttcctcagagcggggttctcatctttgggaagcaaggctcagagaaaacaaatgtggacattgaaaaggtcatgattacagacgaagaggaaatcaggacaaccaatcccgtggctacggagcagtatggttctgtatctaccaacctccagagaggcaacagacaagcagctaccgcagatgtcaacacacaaggcgttcttccaggcacggtctggcaggacagagatgtgtaccttcaggggcccatctgggcaaagattccacacacggacggacattttcacccctctcccctcatgggtggattcggacttaaacaccctcctccacagattctcatcaagaacaccccggtacctgcgaatccttcgaccaccttcagtgcggcaaagtttgcttccttcatcacacagtactccacgggacaggtcagcgtggagatcgagtgggagctgcagaaggaaaacagcaaacgctggaatcccgaaattcagtacacttccaactacaacaagtctgttaatgtggactttactgtggacactaatggcgtgtattcagagcctcgccccattggcaccagatacctgactcgtaatctgtaa

SEQ ID NO: 1063 - DNA, 2208 bp, Artificial Sequence
  Synthetic Polynucleotide
atggctgccgatggttatcttccagattggctcgaggacactctctctgaaggaataagacagtggtggaagctcaaacctggcccaccaccaccaaagcccgcagagcggcataaggacgacagcaggggtcttgtgcttcctgggtacaagtacctcggacccttcaacggactcgacaagggagagccggtcaacgaggcagacgccgcggccctcgagcacgacaaagcctacgaccggcagctcgacagcggagacaacccgtacctcaagtacaaccacgccgacgcggagtttcaggagcgccttaaagaagatacgtcttttgggggcaacctcggacgagcagtcttccaggcgaaaaagagggctcttgaacctctgggcctggttgaggaacctgttaagacggctccgggaaaaaagaggccggtagagcactctcctgtggagccagactcctcctcgggaaccggaaaggcgggccagcagcctgcaagaaaaagattgaattttggtcagactggagacgcagactcagtacctgacccccagcctctcggacagccaccagcagccccctctggtctgggaactaatacgatggctacaggcagtggcgcaccaatggcagacaataacgagggcgccgacggagtgggtaattcctcgggaaattggcattgcgattccacatggatgggcgacagagtcatcaccaccagcacccgaacctgggccctgcccacctacaacaaccacctctacaaacaaatttccagccaatcaggagcctcgaacgacaatcactactttggctacagcaccccttgggggtattttgacttcaacagattccactgccacttttcaccacgtgactggcaaagactcatcaacaacaactggggattccgacccaagagactcaacttcaagctctttaacattcaagtcaaagaggtcacgcagaatgacggtacgacgacgattgccaataaccttaccagcacggttcaggtgtttactgactcggagtaccagctcccgtacgtcctcggctcggcgcatcaaggatgcctcccgccgttcccagcagacgtcttcatggtgccacagtatggatacctcaccctgaacaacgggagtcaggcagtaggacgctcttcattttactgcctggagtactttccttctcagatgctgcgtaccggaaacaactttaccttcagctacacttttgaggacgttcctttccacagcagctacgctcacagccagagtctggaccgtctcatgaatcctctcatcgaccagtacctgtattacttgagcagaacaaacactccaagtggaaccaccacgcagtcaaggcttcagttttctcaggccggagcgagtgacattcgggaccagtctaggaactggcttcctggaccctgttaccgccagcagcgagtatcaaagacatctgcggataacaacaacagtgaatactcgtggactggagctaccaagtaccacctcaatggcagagactctctggtgaatccgggcccggccatggcaagccacaaggacgatgaagaaaagttttttcctcagagcggggttctcatctttgggaagcaaggctcagaggaaacaaatgtggacattgaaaaggtcatgattacagacgaagaggaaatcaggacaaccaatcccgtggctacggagcagtatggttctgtatctaccaacctccagagaggcaacagacaagcagctaccgcagatgtcaacacacaaggcgttcttccaggcatggtctggcaggacagagatgtgtaccttcaggggcccatctgggcaaagattccacacacggacggacattttcacccctctcccctcatgggtggattcggacttaaacaccctcctccacagattctcatcaagaacaccccggtacctgcgaatccttcgaccaccttcagtgcggcaaagtttgcttccttcatcacacagtactccacgggacaggtcagcgtggagatcgagtgggagctgcagaaggaaaacagcaaacgctggaatcccgaaattcagtacacttccaactacaacaagtctgttaatgtggactttactgtggacactaatggcgtgtattcagagcctcgccccattggcaccagatacctgactcgtaatctgtaa

SEQ ID NO: 1064 - DNA, 2208 bp, Artificial Sequence
  Synthetic Polynucleotide
atggctgccgatggttatcttccagattggctcgaggacaccctctctgaaggaataagacagtggtggaagctcaaacctggcccaccaccaccgaagcccgcagagcggcataaggacgacagcaggggtcttgtgcttcctgggtacaagtacctcggacccttcaacggactcgacaagggagagccggccaacgaggcagacgccgcggccctcgagcacgacaaagcctacgaccggcagctcgacagcggagacaacccgtacctcaagtacaaccacgccgacgcggagtttcaggagcgccttaaagaagatacgtcttttgggggcaacctcggacgagcagtcttccaggcgaaaaagagggttcttgaacctctgggcctggttgaggaacctgttaagacggctccgggaaaaaagaggccggtagagcactctcctgtggagccagactcctcctcgggaaccggaaaggcgggccagcagcctgcaagaaaaagattgaattttggtcagactggagacgcagactcagtacctgacccccagcctctcggacagccaccagcagccccctctggtctgggaactaatacgatggctacaggcagtggcgcaccaatggcagacaataacgagggcgccgacggagtgggtaattcctcgggaaattggcattgcgattccacatggatgggcgacagagtcatcaccaccagcacccgaacctgggccctgcccacctacaacaaccacctctacaaacaaatttccagccaatcaggagcctcgaacgacaatcactactttggctacagcaccccttgggggtattttgacttcaacagattccactgccacttttcaccacgtgactggcaaagactcatcaacaacaactggggattccgacccaagagactcaacttcaagctctttaacattcaagtcaaagaggtcacgcagaatgacggtacgacgacgattgccaataaccttaccagcacggttcaggtgtttactgactcggagtaccagctcccgtacgtcctcggctcggcgcatcaaggatgcctcccgccgttcccagcagacgtcttcatggtgccacagtatggatacctcaccctgaacaacgggagtcaggcagtaggacgctcttcattttactgcctggagtactttccttctcagatgctgcgtaccggaaacaactttaccttcagctacacttttgaggacgttcctttccacagcagctacgctcacagccagagtctggaccgtctcatgaatcctctcatcgaccagtacctgtattacttgagcagaacaaacactccaagtggaaccaccacgcagtcaaggcttcagttttctcaggccggagcgagtgacattcgggaccagtctaggaactggcttcctggaccctgttaccgccagcagcgagtatcaaagacatctgcggataacaacaacagtgaatactcgtggactggagctaccaagtaccacctcaatggcagagactctctggtgaatccgggcccggccatggcaagccacaaggacgatgaagaaaagttttttcctcagagcggggttctcatctttgggaagcaaggctcagagaaaacaaatgtggacattgaaaaggtcatgattacagacgaagaggaaatcaggacaaccaatcccgtggctacggagcagtatggttctgtatctaccaacctccagagaggcaacagacaagcagctaccgcagatgtcaacacacaaggcgttcttccaggcacggtctggcaggacagagatgtgtaccttcaggggcccatctgggcaaagattccacacacggacggacattttcacccctctcccctcatgggtggattcggacttaaacaccctcctccacagattctcatcaagaacaccccggtacctgcgaatccttcgaccaccttcagtgcggcaaagtttgcttccttcatcacacagtactccacgggacaggtcagcgtggagatcgagtgggagctgcagaaggaaaacagcaaacgctggaatcccgaaattcagtacacttccaactacaacaagtctgttaatgtggactttactgtggacactaatggcgtgtattcagagcctcgccccattggcaccagatacctgactcgtaatctgtaa

SEQ ID NO: 1065 - DNA, 2208 bp, Artificial Sequence
  Synthetic Polynucleotide
atggctgccgatggttatcttccagattggctcgaggacactctctctgaaggaataagacagtggtggaagctcaaacctggcccaccaccaccaaagcccgcagagcggcataaggacgacagcaggggtcttgtgcttcctgggtacaagtacctcggacccttcaacggactcgacaagggagagccggtcaacgaggcagacgccgcggccctcgagcacgacaaagcctacgaccggcagctcgacagcggagacaacccgtacctcaagtacaaccacgccgacgcggagtttcaggagcgccttaaagaagatacgtcttttgggggcaacctcggacgagcagtcttccaggcgaaaaagagggttcttgaacctctgggcctggttgaggaacctgttaagacggctccgggaaaaaagaggccggtagagcactctcctgtggagccagactcctcctcgggaaccggaaaggcgggccagcagcctgcaagaaaaagattgaattttggtcagactggagacgcagactcagtacctgacccccagcctctcggacagccaccagcagccccctctggtctgggaactaatacgatggctacaggcagtggcgcaccaatggcagacaataacgagggcgccgacggagtgggtaattcctcgggaaattggcattgcgattccacatggatgggcgacagagtcatcaccaccagcacccgaacctgggccctgcccacctacaacaaccacctctacaaacaaatttccagccaatcaggagcctcgaacgacaatcactactttggctacagcaccccttgggggtattttgacttcaacagattccactgccacttttcaccacgtgactggcaaagactcatcaacaacaactggggattccgacccaagagactcaacttcaagctctttaacattcaagtcaaagaggtcacgcagaatgacggtacgacgacgattgccaataaccttaccagcacggttcaggtgtttactgactcggagtaccagctcccgtacgtcctcggctcggcgcatcaaggatgcctcccgccgttcccagcagacgtcttcatggtgccacagtatggatacctcaccctgaacaacgggagtcaggcagtaggacgctcttcattttactgcctggagtactttccttctcagatgctgcgtaccggaaacaactttaccttcagctacacttttgaggacgttcctttccacagcagctacgctcacagccagagtctggaccgtctcatgaatcctctcatcgaccagtacctgtattacttgagcagaacaaacactccaagtggaaccaccacgcagtcaaggcttcagttttctcaggccggagcgagtgacattcgggaccagtctaggaactggcttcctggaccctgttaccgccagcagcgagtatcaaagacatctgcggataacaacaacagtgaatactcgtggactggagctaccaagtaccacctcaatggcagagactctctggtgaatccgggcccggccatggcaagccacaaggacgatgaagaaaagttttttcctcagagcggggttctcatctttgggaagcaaggctcagagaaaacaaatgtggacattgaaaaggtcatggttacagacgaagaggaaatcaggacaaccaatcccgtggctacggagcagtatggttctgtatctaccaacctccagagaggcaacagacaagcagctaccgcagatgtcaacacacaaggcgttcttccaggcacggtctggcaggacagagatgtgtaccttcaggggcccatctgggcaaagattccacacacggacggacattttcacccctctcccctcatgggtggattcggacttaaacaccctcctccacagattctcatcaagaacaccccggtacctgcgaatccttcgaccaccttcagtgcggcaaagtttgcttccttcatcacacagtactccacgggacaggtcagcgtggagatcgagtgggagctgcagaaggaaaacagcaaacgctggaatcccgaaattcagtacacttccaactacaacaagtctgttaatgtggactttactgtggacactaatggcgtgtattcagagcctcgccccattggcaccagatacctgactcgtaatctgtaa

SEQ ID NO: 1066 - DNA, 2208 bp, Artificial Sequence
  Synthetic Polynucleotide
atggctgccgatggttatcttccagattggctcgaggacactctctctgaaggaataagacagtggtggaagctcaaacctggcccaccaccaccaaagcccgcagagcggcataaggacgacagcaggggtcttgtgcttcctgggtacaagtacctcggacccttcaacggactcgacaagggagagccggtcaacgaggcagacgccgcggccctcgagcacgacaaagcctacgaccggcagctcgacagcggagacaacccgtacctcaagtacaaccacgccgacgcggagtttcaggagcgccttaaagaagatacgtcttttgggggcaacctcggacgagcagtcttccaggcgaaaaagagggttcttgaacctctgggcctggttgaggaacctgttaagacggctccgggaaaaaagaggccggtagagcactctcctgtggagccagactcctcctcgggaaccggaaaggcgggccagcagcctgcaagaaaaagattgaattttggtcagactggagacgcagactcagtacctgacccccagcctctcggacagccaccagcagccccctctggtctgggaactaatacgatggctacaggcagtggcgcaccaatggcagacaataacgagggcgccgacggagtgggtaattcctcgggaaattggcattgcgattccacatggatgggcgacagagtcatcaccaccagcacccgaacctgggccctgcccacctacaacaaccacctctacaaacaaatttccagccaatcaggagcctcgaacgacaatcactactttggctacagcaccccttgggggtattttgacttcaacagattccactgccacttttcaccacgtgactggcaaagactcatcaacaacaactggggattccgacccaagagactcaacttcaagctctttaacattcaagtcaaagaggtcacgcagaatgacggtacgacgacgattgccaataaccttaccagcacggttcaggtgtttactgactcggagtaccagctcccgtacgtcctcggctcggcgcatcaaggatgcctcccgccgttcccagcagacgtcttcatggcgccacagtatggatacctcaccctgaacaacgggagtcaggcagtaggacgctcttcattttactgcctggagtactttccttctcagatgctgcgtaccggaaacaactttaccttcagctacacttttgaggacgttcctttccacagcagctacgctcacagccagagtctggaccgtctcatgaatcctctcatcgaccagtacctgtattacttgagcagaacaaacactccaagtggaaccaccacgcagtcaaggcttcagttttctcaggccggagcgagtgacattcgggaccagtctaggaactggcttcctggaccctgttaccgccagcagcgagtatcaaagacatctgcggataacaacaacagtgaatactcgtggactggagctaccaagtaccacctcaatggcagagactctctggtgaatccgggcccggccatggcaagccacaaggacgatgaagaaaagttttttcctcagagcggggttctcatctttgggaagcaaggctcagagaaaacaaatgtggacattgaaaaggtcatgattacagacgaagaggaaatcaggacaaccaatcccgtggctacggagcagtatggttctgtatctaccaacctccagagaggcaacagacaagcagctaccgcagatgtcaacacacaaggcgttcttccaggcacggtctggcaggacagagatgtgtaccttcaggggcccatctgggcaaagattccacacacggacggacattttcacccctctcccctcatgggtggattcggacttaaacaccctcctccacagattctcatcaagaacaccccggtacctgcgaatccttcgaccaccttcagtgcggcaaagtttgcttccttcatcacacagtactccacgggacaggtcagcgtggagatcgagtgggagctgcagaaggaaaacagcaaacgctggaatcccgaaattcagtacacttccaactacaacaagtctgttaatgtggactttactgtggacactaatggcgtgtattcagagcctcgccccattggcaccagatacctgactcgtaatctgtaa

SEQ ID NO: 1067 - DNA, 2208 bp, Artificial Sequence
  Synthetic Polynucleotide
atggctgccgatggttatcttccagattggctcgaggacactctctctgaaggaataagacagtggtggaagctcaaacctggcccaccaccaccaaagcccgcagagcggcataaggacgacagcaggggtcttgtgcttcctgggtacaagtacctcggacccttcaacggactcgacaagggagagccggtcaacgaggcagacgccgcggccctcgagcacgacaaagcctacgaccggcagctcgacagcggagacaacccgtacctcaagtacaaccacgccgacgcggagtttcaggagcgccttaaagaagatacgtcttttgggggcaacctcggacgagcagtcttccaggcgaaaaagagggttcttgaacctctgggcctggttgaggaacctgttaagacggctccgggaaaaaagaggccggtagagcactctcctgtggagccagactcctcctcgggaaccggaaagacgggccagcagcctgcaagaaaaagattgaattttggtcagactggagacgcagactcagtacctgacccccagcctctcggacagccaccagcagccccctctggtctgggaactaatacgatggctacaggcagtggcgcaccaatggcagacaataacgagggcgccgacggagtgggtaattcctcgggaaattggcattgcgattccacatggatgggcgacagagtcatcaccaccagcacccgaacctgggccctgcccacctacaacaaccacctctacaaacaaatttccagccaatcaggagcctcgaacgacaatcactactttggctacagcaccccttgggggtattttgacttcaacagattccactgccacttttcaccacgtgactggcaaagactcatcaacaacaactggggattccgacccaagagactcaacttcaagctctttaacattcaagtcaaagaggtcacgcagaatgacggtacgacgacgattgccaataaccttaccagcacggttcaggtgtttactgactcggagtaccagctcccgtacgtcctcggctcggcgcatcaaggatgcctcccgccgttcccagcagacgtcttcatggtgccacagtatggatacctcaccctgaacaacgggagtcaggcagtaggacgctcttcattttactgcctggagtactttccttctcagatgctgcgtaccggaaacaactttaccttcagctacacttttgaggacgttcctttccacagcagctacgctcacagccagagtctggaccgtctcatgaatcctctcatcgaccagtacctgtattacttgagcagaacaaacactccaagtggaaccaccacgcagtcaaggcttcagttttctcaggccggagcgagtgacattcgggaccagtctaggaactggcttcctggaccctgttaccgccagcagcgagtatcaaagacatctgcggataacaacaacagtgaatactcgtggactggagctaccaagtaccacctcaatggcagagactctctggtgaatccgggcccggccatggcaagccacaaggacgatgaagaaaagttttttcctcagagcggggttctcatctttgggaagcaaggctcagagaaaacaaatgtggacattgaaaaggtcatgattacagacgaagaggaaatcaggacaaccaatcccgtggctacggagcagtatggttctgtatctaccaacctccagagaggcaacagacaagcagctaccgcagatgtcaacacacaaggcgttcttccaggcatggtctggcaggacagagatgtgtaccttcaggggcccatctgggcaaagattccacacacggacggacattttcacccctctcccctcatgggtggattcggacttaaacaccctcctccacagattctcatcaagaacaccccggtatctgcgaatccttcgaccaccttcagtgcggcaaagtttgcttccttcatcacacagtactccacgggacaggtcagcgtggagatcgagtgggagctgcagaaggaaaacagcaaacgctgggatcccgaaattcagtacacttccaactacaacaagtctgttaatgtggactttactgtggacactaatggcgtgtattcagagcctcgccccattggcaccagatacctgactcgtaatctgtaa

SEQ ID NO: 1068 - DNA, 2205 bp, Artificial Sequence
  Synthetic Polynucleotide
atggctgccgatggttatcttccagattggctcgaggacactctctctgaaggaataagacagtggtggaagctcaaacctggcccaccaccaccaaagcccgcagagcggcataaggacgacagcaggggtcttgtgcttcctgggtacaagtacctcggacccttcaacggactcgacaagggagagccggtcaacgaggcagacgccgcggccctcgagcacgacaaagcctacgaccggcagctcgacagcggagacaacccgtacctcaagtacaaccacgccgacgcggagtttcaggagcgccttaaagaagatacgtcttttgggggcaacctcggacgagcagtcttccaggcgaaaaagagggttcttgaacctctgggcctggttgaggaacctgttaagacggctccgggaaaaaagaggccggtagagcactctcctgtggagccagactcctcctcgggaaccggaaaggcgggccagcagcctgcaagaaaaagattgaattttggtcagactggagacgcagactcagtacctgacccccagcctctcggacagccaccagcagccccctctggtctgggaactaatacgatggctacaggcagtggcgcaccaatggcagacaataacgagggcgccgacggagtgggtaattcctcgggaaattggcattgcgattccacatggatgggcgacagagtcatcaccaccagcacccgaacctgggccctgcccacctacaacaaccacctctacaaacaaatttccagccaatcaggagcctcgaacgacaatcactactttggctacagcaccccttgggggtattttgacttcaacagattccactgccacttttcaccacgtgactggcaaagactcatcaacaactggggattccgacccaagagactcaacttcaagctctttaacattcaagtcaaagaggtcacgcagaatgacggtacgacgacgattgccaataaccttaccagcacggttcaggtgtttactgactcggagtaccagctcccgtacgtcctcggctcggcgcatcaaggatgcctcccgccgttcccagcagacgtcttcatggtgccacagtatggatacctcaccctgaacaacgggagtcaggcagtaggacgctcttcattttactgcctggagtactttccttctcagatgctgcgtaccggaaacaactttaccttcagctacacttttgaggacgttcctttccacagcagctacgctcacagccagagtctggaccgtctcatgaatcctctcatcgaccagtacctgtattacttgagcagaacaaacactccaagtggaaccaccacgcagtcaaggcttcagttttctcaggccggagcgagtgacattcgggaccagtctaggaactggcttcctggaccctgttaccgccagcagcgagtatcaaagacatctgcggataacaacaacagtgaatactcgtggactggagctaccaagtaccacctcaatggcagagactctctggtgaatccgggcccggccatggcaagccacaaggacgatgaagaaaagttttttcctcagagcggggttctcatctttgggaagcaaggctcagagaaaacaaatgtggacattgaaaaggtcatgattacagacgaagaggaaatcaggacaaccaatcccgtggctacggagcagtatggttctgtatctaccaacctccagagaggcaacagacaagcagctaccgcagatgtcaacacacaaggcgttcttccaggcacggtctggcaggacagagatgtgtaccttcaggggcccatctgggcaaagattccacacacggacggacattttcacccctctcccctcatgggtggattcggacttaaacaccctcctccacagattctcatcaagaacaccccggtacctgcgaatccttcgaccaccttcagtgcggcaaagtttgcttccttcatcacacagtactccacgggacaggtcagcgtggagatcgagtgggagctgcagaaggaaaacagcaaacgctggaatcccgaaattcagtacacttccaactacaacaagtctgttaatgtggactttactgtggacactaatggcgtgtattcagagcctcgccccattggcaccagatacctgactcgtaatctgtaa

SEQ ID NO: 1069 - DNA, 2208 bp, Artificial Sequence
  Synthetic Polynucleotide
atggctgccgatggttatcttccagattggctcgaggacactctctctgaaggaataagacagtggtggaagctcaaacctggcccaccaccaccaaagcccgcagagcggcataaggacgacagcaggggtcttgtgcttcctgggtacaagtacctcggacccttcaacggactcgacaagggagagccggtcaacgaggcagacgccgcggccctcgagcacgacaaagcctacgaccggcagctcgacagcggagacaacccgtacctcaagtacaaccacgccgacgcggagtttcaggagcgccttaaagaagatacgtcttttgggggcaacctcggacgagcagtcttccaggcgaaaaagagggttcttgaacctctgggcctggttgaggaacctgttaagacggctccgggaaaaaagaggccggtagagcactctcctgtggagccagactcctcctcgggaaccggaaaggcgggccagcagcctgcaagaaaaagattgaattttggtcagactggagacgcagactcagtacctgacccccagcctctcggacagccaccagcagccccctctggtctgggaactaatacgatggctacaggcagtggcgcaccaatggcagacaataacgagggcgccgacggagtgggtaattcctcgggaaattggcattgcgattccacatggatgggcgacagagtcatcaccaccagcacccgaacctgggccctgcccacctacaacaaccacctctacaaacaaatttccagccaatcaggagcctcgaacgacaatcactactttggctacagcaccccttgggggtattttgacttcaacagattccactgccacttttcaccacgtgactggcaaagactcatcaacaacaactggggattccgacccaagagactcaacttcaagctctttaacattcaagtcaaagaggtcacgcagaatgacggtacgacgacgattgccaataaccttaccagcacggttcaggtgtttactgactcggagtaccagctcccgtacgtcctcggctcggcgcatcaaggatgcctcccgccgttcccagcagacgtcttcatggtgccacagtatggatacctcaccctgaacaacgggagtcaggcagtaggacgctcttcattttactgcctggagtactttccttctcagatgctgcgtaccggaaacaactttaccttcagctacacttttgaggacgttcctttccacagcagctacgctcacagccagagtctggaccgtctcatgaatcctctcatcgaccagtacctgtattacttgagcagaacaaacactccaagtggaaccaccacgcagtcaaggcttcagttttctcaggccggagcgagtgacattcgggaccagtctaggaactggcttcctggaccctgttaccgccagcagcgagtatcaaagacatctgcggataacaacaacagtgaatactcgtggactggagctaccaagtaccacctcaatggcagagactctctggtgaatccgggcccggccatggcaagccacaaggacgatgaagaaaagttttttcctcagagcggggttctcatctttgggaagcaaggctcagagaaaacaaatgtggacattgaaaaggtcatgattacagacgaagaggaaatcaggacaaccaatcccgtggctacggagcagtatggttctgtatctaccaacctccagagaggcaacagacaagcagctaccgcagatgtcaacacacaaggcgttcttccaggcacggtctggcaggacagagatgtgtaccttcaggggcccatctgggcaaagattccacacacggacggacattttcacccctctcccctcatgggtggattcggacttaaacaccctcctccacagattctcatcaagaacaccccggtacctgcgaatccttcgaccaccttcagtgcggcaaagtttgcttccttcatcacacagtactccacgggacaggtcagcgtggagatcgagtgggagctgcagaaggaaaacggcaaacgctggaatcccgaaattcagtacacttccaactacaacaagtctgttaatgtggactttactgtggacactaatggcgtgtattcagagcctcgccccattggcaccagatacctgactcgtaatctgtaa

SEQ ID NO: 1070 - DNA, 2208 bp, Artificial Sequence
  Synthetic Polynucleotide
atggctgccgatggttatcttccagattggctcgaggacactctctctgaaggaataagacagtggtggaagctcaaacctggcccaccaccaccaaagcccgcagagcggcataaggacgacagcaggggtcttgtgcttcctgggtacaagtacctcggacccttcaacggactcgacaagggagagccggtcaacgaggcagacgccgcggccctcgagcacgacaaagcctacgaccggcagctcgacagcggagacaacccgtacctcaagtacaaccacgccgacgcggagtttcaggagcgccctaaagaagatacgtcttttgggggcaacctcggacgagcagtcttccaggcgaaaaagagggttcttgaacctctgggcctggttgaggaacctgttaagacggctccgggaaaaaagaggccggtagagcactctcctgtggagccagactcctcctcgggaaccggaaaggcgggccagcagcctgcaagaaaaagattgaattttggtcagactggagacgcagactcagtacctgacccccagcctctcggacagccaccagcagccccctctggtctgggaactaatacgatggctacaggcagtggcgcaccaatggcagacaataacgagggcgccgacggagtgggtaattcctcgggaaattggcattgcgattccacatggatgggcgacagagtcatcaccaccagcacccgaacctgggccctgcccacctacaacaaccacctctacaaacaaatttccagccaatcaggagcctcgaacgacaatcactactttggctacagcaccccttgggggtattttgacttcaacagattccactgccacttttcaccacgtgactggcaaagactcatcaacaacaactggggattccgacccaagagactcaacttcaagctctttaacattcaagtcaaagaggtcacgcagaatgacggtacgacgacgattgccaataaccttaccagcacggttcaggtgtttactgactcggagtaccagctcccgtacgtcctcggctcggcgcatcaaggatgcctcccgccgttcccagcagacgtcttcatggtgccacagtatggatacctcaccctgaacaacgggagtcaggcagtaggacgctcttcattttactgcctggagtactttccttctcagatgctgcgtaccggaaacaactttaccttcagctacacttttgaggacgttcctttccacagcagctacgctcacagccagagtctggaccgtctcatgaatcctctcatcgaccagtacctgtattacttgagcagaacaaacactccaagtggaaccaccacgcagtcaaggcttcagttttctcaggccggagcgagtgacattcgggaccagtctaggaactggcttcctggaccctgttaccgccagcagcgagtatcaaagacatctgcggataacaacaacagtgaatacttgtggactggagctaccaagtaccacctcaatggcagagactctctggtgaatccgggcccggccatggcaagccacaaggacgatgaagaaaagttttttcctcagagcggggttctcatctttgggaagcaaggctcagagaaaacaaatgtggacattgaaaaggtcatgattacagacgaagaggaaatcaggacaaccaatcccgtggctacggagcagtatggttctgtatctaccaacctccagagaggcaacaggcaagcagctaccgcagatgtcaacacacaaggcgttcttccaggcacggtctggcaggacagagatgtgtaccttcaggggcccatctgggcaaagattccacacacggacggacattttcacccctctcccctcatgggtggattcggacttaaacaccctcctccacagattctcatcaagaacaccccggtacctgcgaatccttcgaccaccttcagtgcggcaaagtttgcttccttcatcacacagtactccacgggacaggtcagcgtggagatcgagtgggagctgcagaaggaaaacagcaaacgctggaatcccgaaattcagtacacttccaactacaacaagtctgttaatgtggactttactgtggacactaatggcgtgtattcagagcctcgccccattggcaccagatacctgactcgtaatctgtaa

SEQ ID NO: 1071 - DNA, 2208 bp, Artificial Sequence
  Synthetic Polynucleotide
atggctgccgatggttatcttccagattggctcgaggacactctctctgaaggaataagacagtggtggaagctcaaacctggcccaccaccaccaaagcccgcagagcggcataaggacgacagcaggggtcttgtgcttcctgggtacaagtacctcggacccttcaacggactcgacaagggagagccggtcaacgaggcagacgccgcggccctcgagcacgacaaagcctacgaccggcagctcgacagcggagacaacccgtacctcaagtacaaccacgccgacgcggagtttcaggagcgccttaaagaagatacgtcttttgggggcaacctcggacgagcagtcttccaggcgaaaaagagggctcttgaacctctgggcctggttgaggaacctgttaagacggctccgggaaaaaagaggccggtagagcactctcctgtggagccagactcctcctcgggaaccggaaaggcgggccagcagcctgcaagaaaaagattggattttggtcagactggagacgcagactcagtacctgacccccagcctctcggacagccaccagcagccccctctggtctgggaactaatacgatggctacaggcagtggcgcaccaatggcagacaataacgagggcgccgacggagtgggtaattcctcgggaaattggcattgcgattccacatggatgggcgacagagtcatcaccaccagcacccggacctgggccctgcccacctacaacaaccacctctacaaacaaatttccagccaatcaggagcctcgaacgacaatcactactttggctacagcaccccttgggggtattttgacttcaacagattccactgccacttttcaccacgtgactggcaaagactcatcaacaacaactggggattccgacccaagagactcaacttcaagctctttaacattcaagtcaaagaggtcacgcagaatgacggtacgacgacgattgccaataaccttaccagcacggttcaggtgtttactgactcggagtaccagctcccgtacgtcctcggctcggcgcatcaaggatgcctcccgccgttcccagcagacgtcttcatggtgccacagtatggatacctcaccctgaacaacgggagtcaggcagtaggacgctcttcattttactgcctggagtactttccttctcagatgctgcgtaccggaaacaactttaccttcagctacacttttgaggacgttcctttccacagcagctacgctcacagccagagtctggaccgtctcatgaatcctctcatcgaccagtacctgtattacttgagcagaacaaacactccaagtggaaccaccacgcagtcaaggcttcagttttctcaggccggagcgagtgacattcgggaccagtctaggaactggcttcctggaccctgttaccgccagcagcgagtatcaaagacatctgcggataacaacaacagtgaatactcgtggactggagctaccaagtaccacctcaatggcagagactctctggtgaatccgggcccggccatggcaagccacaaggacgatgaagaaaagttttttcctcagagcggggttctcatctttgggaagcaaggctcagagaaaacaaatgtggacattgaaaaggtcatgattacagacgaagaggaaatcaggacaaccaatcccgtggctacggagcagtatggttctgtatctaccaacctccagagaggcaacagacaagcagctaccgcagatgtcaacacacaaggcgttcttccaggcatggtctggcaggacagagatgtgtaccttcaggggcccatctgggcaaagattccacacacggacggacattttcacccctctcccctcatgggtggattcggacttaaacaccctcctccacagattctcatcaagaacaccccggtacctgcgaatccttcgaccaccttcagtgcggcaaagtttgcttccttcatcacacagtactccacgggacaggtcagcgtggagatcgagtgggagctgcagaaggaaaacagcaaacgctggaatcccgaaattcagtacacttccaactacaacaagtctgttaatgtggactttactgtggacactaatggcgtgtattcagagcctcgccccattggcaccagatacctgactcgtaatctgtaa

SEQ ID NO: 1072 - DNA, 2208 bp, Artificial Sequence
  Synthetic Polynucleotide
atggctgccgatggttatcttccagattggctcgaggacactctctctgaaggaataagacagtggtggaagctcaaacctggcccaccaccgccaaagcccgcagagcggcataaggacgacagcaggggtcttgtgcttcctgggtacaagtacctcggacccttcaacggactcgacaagggagagccggtcaacgaggcagacgccgcggccctcgagcacgacaaggcctacgaccggcagctcgacagcggagacaacccgtacctcaagtacaaccacgccgacgcggagtttcaggagcgccttaaagaagatacgtcttttgggggcaacctcgcaagagcagtattccaggcgaaaaagagggttcttgaacctctgggcctggttgaggagcctgttaagacggctccgggaaaaaagaggccggtagagcattctcctgcggagccagactcctcctcgggaaccggaaaagcgggccagcagcctgcgagaaagagattgaatttcggtcagactggagacgcagactccgtacctgacccccagcctctcggacagccaccagcagccccctctggtctgggaactaatacgatggctacaggcagtggcgcaccaatggcagacaataacgagggtgccgacggagtgggtaattcctcaggaaattggcattgcgattccacatggatgggcgacagagtcatcaccaccagcacccgcacctgggctctgcccacctacaacaaccatctgtacaagcagatctccagccaatctggagccagcaacgacaaccactactttggctacagcaccccttgggggtattttgacttcaacagattccactgccacttctccccacgtgactggcaaagactcatcaacaacaactggggattccggcccaagagactcagcttcaagctctttaacattcaagtcaaggaggtcacgcagaatgacggtacgacgacgattgccaataaccttaccagcacggttcaggtctttactgactcggagtaccagctcccgtacgtcctcggctcggcgcatcaaggatgcctcccgccgttcccagcagacgtcttcatggtgccacagtatggatacctcaccctgaacaacgggagtcaggcggtaggacgctcttcattttactgcctggagtacttcccttctcagatgcttcgcacgggaaacaactttaccttcagctacacctttgaggacgtgccttttcacagcagctacgctcacagccaaagtctggaccgtctcatgaatcctctcatcgaccagtacctgtattacttgagcaaaacaaacgctccaagcggaaccaccacgatgtccaggcttcagttttctcaggccggagcaagtgacattcgggaccagtctagaaactggcttcctggaccctgttaccgccagcagcgagtatcaaagacagctgcggacaacaacaacagtgattactcgtggactggagctaccaagtaccacctcaatggaagagactctctggtgaacccgggcccagctatggccagccacaaggacgatgaagaaaaatattttcctcagagcggggttctcatcttcgggaaacaaggctcaaataaaactaatgtggacattgaaaaggttatgattacagacgaagaggaaatcaggaccaccaatcccgtggctacggagcagtatggttctgtatctaccaaccttcaaagcggcaacacacaagcagctacctcagatgtcaacacacaaggcgttcttcctggcatggtctggcaggacagagatgtgtacctgcaggggcccatctgggcaaagattccacacacggatggacactttcacccttctcctcttatgggaggatttggactgaagcaccctcctccgcagattctcatcaagaataccccggtacctgcgaatccttcgaccaccttcagtgcggcaaagtttgcttctttcatcacacagtactccacggggcaggtcagcgtggagatcgagtgggagctgcagaaggagaacagcaaacgctggaaccccgagatccagtatacttccaactacaacaaatctgttaatgtggactttactgtggacactaatggtgtgtattcagagcctcgccccattggcaccagatacctgactcgtaatctgtaa

SEQ ID NO: 1073 - DNA, 2208 bp, Artificial Sequence
  Synthetic Polynucleotide
atggctgccgatggttatcttccagattggctcgaggacactctctctgaaggaataagacagtggtggaagctcaaacctggcccaccaccaccaaagcccgcagagcggcataaggacgacagcaggggtcttgtgcttcctgggtacaagtacctcggacccttcaacggactcgacaagggagagccggtcaacgaggcagacgccgcggccctcgagcacgacaaagcctacgaccggcagctcgacagcggagacaacccgtacctcaagtacaaccacgccgacgcggagtttcaggagcgccttaaagaagatacgtcttttgggggcaacctcggacgagcagtcttccaggcgaaaaagagggttcttgaacctctgggcctggttgaggaacctgttaagacggctccgggaaaaaagaggccggtagagcactctcctgtggagccagactcctcctcgggaaccggaaaggcgggccagcagcctgcaagaaaaagattgaattttggtcagactggagacgcagactcagtacctgacccccagcctctcggacagccaccagcagccccctctggtctgggaactaatacgatggctacaggcagtggcgcaccaatggcagacaataacgagggcgccgacggagtgggtaattcctcgggaaattggcattgcgattccacatggatgggcgacagagtcatcaccaccagcacccgaacctgggccctgcccacctacaacaaccacctctacaaacaaatttccagccaatcaggagcctcgaacgacaatcactactttggctacagcaccccttgggggtattttgacttcaacagattccactgccacttttcaccacgtgactggcaaagactcatcaacaacaactggggattccgacccaagagactcaacttcaagctctttaacattcaagtcaaagaggtcacgcagaatgacggtacgacgacgattgccaataaccttaccagcacggttcaggtgtttactgactcggagtaccagctcccgtacgtcctcggctcggcgcatcaaggatgcctcccgccgttcccagcagacgtctccatggtgccacagtatggatacctcaccctgaacaacgggagtcaggcagtaggacgctcttcattttactgcctggagtactttccttctcagatgctgcgtaccggaaacaactttaccttcagctacacttttgaggacgttcctttccacagcagctacgctcacagccagagtctggaccgtctcatgaatcctctcatcgaccagtacctgtattacttgagcagaacaaacactccaagtggaaccaccacgcagtcaaggcttcagttttctcaggccggagcgagtgacattcgggaccagtctaggaactggcttcctggaccctgttaccgccagcagcgagtatcaaagacatctgcggataacaacaacagtgaatactcgtggactggagctaccaagtaccacctcaatggcagagactctctggtgaatccgggcccggccatggcaagccacaaggacgatgaagaaaagttttttcctcagagcggggttctcatctttgggaagcaaggctcagagaaaacaaatgtggacattgaaaaggtcatgattacagacgaagaggaaatcaggacaaccaatcccgtggctacggagcagtatggttctgtatctaccaacctccagagaggcaacagacaagcagctaccgcagatgtcaacacacaaggcgttcttccaggcacggtctggcaggacagagatgtgtaccttcaggggcccatctgggcaaagattccacacacggacggacattttcacccctctcccctcatgggtggattcggacttaaacaccctcctccacagattctcatcaagaacaccccggtacctgcgaatccttcgaccaccttcagtgcggcaaagtttgcttccttcatcacacagtactccacgggacaggtcagcgtggagatcgagtgggagctgcagaaggaaaacagcaaacgctggaatcccgaaattcagtacacttccaactacaacaagtctgttaatgtggactttactgtggacactaatggcgtgtattcagagcctcgccccattggcaccagatacctgactcgtaatctgtaa

SEQ ID NO: 1074 - DNA, 2208 bp, Artificial Sequence
  Synthetic Polynucleotide
atggctgccgatggttatcttccagattggctcgaggacactctctctgaaggaataagacagtggtggaagctcaaacctggcccaccaccgccaaagcccgcagagcggcataaggacgacagcaggggtcttacgcttcctgggtacaagtacctcggacccttcaacggactcgacaaaggagagccggtcaacgaggcagacgccgcggccctcgagcacgacaaggcctacgaccggcagctcgacagcggagacaacccgtacctcaagtacaaccacgccgacgcggagtttcaggagcgccttaaagaagatacgtcttttgggggcaacctcgcaagagcagtattccaggcgaaaaagagggttcttgaacctctgggcctggttgaggagcctgttaagacggctccgggaaaaaagaggccggtagagcactctcctgcggagctagattcctcctccggaactggaaagtcgggccaacagcctgcaagaaagagattgaattttggtcagactggagacgcagactccgtacctgacccccagcctctcggacagccaccagcagccccctctggtctgggaactaatacgatggcttcaggcagtggcgcaccaatggcagacaataacgagggcgccgacggagtgggtaattcctcgggaaattggcattgcgattccacatggatgggcgacagagtcatcaccaccagcacccgcacctgggctctgcccacctacaacaaccatctgtacaagcaaatttccagccagtctggggccagcaacgacaaccactactttggctacagcaccccttgggggtattttgacttcaacagattccactgccacttctccccacgtgactggcaaagactcatcaacaacaattggggattccggcccaaaagactcaacttcaagctctttaacattcaagtcaaggaggtcacgcagaatgacggtacgacgacgattgccaataaccttaccagcacggttcaggtgtttactgactcggagtaccagctcccgtacgtcctcggctcggcgcatcaaggatgcctcccgccgttcccagcagacgtcttcatggtgccacagtatggatacctcaccctgaacaacgggagtcaggcggtaggacgctcttcattttactgcctggagtactttccttctcagatgctgcgtaccggaaacaactttaccttcagctacacctttgaggacgttccttttcacagcagctacgctcatagccagagtttggaccgtctcatgaatcctctcatcgaccagtacctgtattacttgagcagaacaaacactccaagcggaaccactacgcagtccaggcttcagttttctcaagccggagcgagtgacattcgggaccagtctaggaactggcttcctggaccctgttaccgccagcagcgagtatcaaagacagctgcggacaacaacaacagtgattactcgtggactggagctaccaagtatcacctcaatggaagagactctctggtgaatccgggcacagccatggccagccacaaggacgatgaagaaaagtattttcctcagagcggggttctcatcttcggaaaacaagactcgggaaaaactaatgtggacattgaaaaggtcatgattacagacgaagaggaaatcaggaccaccaatcccgtggctacggagcagtatggttctgtatctaccaatctccagagcggcaacacacaagcagctacctcagatgtcaacacacaaggcgttcttccaggcatggtctggcaggacagagacgtgtacctgcagggacccatctgggcaaagattccacacacggacggacattttcacccttctcctcttatgggaggatttggaccgaagcaccctcccccgcagattctcatcaagaataccccggtacctgcgaatccttctaccaccttcagcgcggcaaagtttgcttccttcatcacacagtactccacggggcaggtcagcgtggagatcgagtgggagctgcagaaagagaacagcaaacgctggaaccccgagatccagtatacctccaactacaacaagtctgttaatgtggactttactgtggacactaatggcgtgtattcagagcctcgccccattggcacaagatacctgactcgtaatctgtaa

SEQ ID NO: 1075 - DNA, 2208 bp, Artificial Sequence
  Synthetic Polynucleotide
atggctgccgatggttatcttccagattggctcgaggacactctctctgaaggaataagacagtggtggaagctcaaacctggcccaccaccgccaaagcccgcagagcggcataaggacgacagcaggggtcttgtgcttcctgggtacaagtacctcggacccttcaacggactcgacaaaggagagccggtcaacgaggcagacgccgcggccctcgagcacgacaaggcctacgaccggcagctcgacagcggagacaacccgtacctcaagtacaaccacgccgacgcggagtttcaggagcgccttaaagaagatacgtcttttgggggcaacctcgcaagagcagtattccaggcgaaaaagagggttcttgaacctctgggcctggttgaggagcctgttaagacggctccgggaaaaaagaggccggtagagcactctcctgcggagccagattcctcctccggaactggagagtcgggccaacagcctgcaagaaagagattgaattttggtcagactggagacgcagactccgtacctgacccccagcctctcggacagccaccagcagccccctctggtctgggaactaatacgatggcttcaggcagtggcgcaccaatggcagacaataacgagggcgccgacggagtgggtaattcctcgggaaattggcattgcgattccacatggatgggcgacagagtcatcaccaccagcacccgcacctgggctctgcccacctacaacaaccatctgtacaagcaaatttccagccagtctggagccagcaacgacaaccactactttggctacagcaccccttgggggtattttgacttcaacagattccactgccacttctccccacgtgactggcaaagactcatcaacaacaattggggattccggcccaaaagactcaacttcaagctctttaacattcaagtcaaggaggtcacgcagaatgacggtacgacgacgattgccaataaccttaccagcacggttcaggtgtttactgactcggagtaccagctcccgtacgtcctcggctcggcgcatcaaggatgcctcccgccgttcccagcagacgtcttcatggtgccacagtatggatacctcaccctgaacaacgggagtcaggcggtaggacgctcttcattttactgcctggagtactttccttctcagatgctgcgtaccggaaacaactttaccttcagctacacctttgaggacgttccttttcacagcagctacgctcacagccagagtttggaccgtcttatgaatcctctcatcgaccagtacctgtattacttgagcagaacaaacactccaagcggaaccactacgcagtccaggcttcagttttctcaagccggagcgagtgacattcgggaccagtctaggaactggcttcctggaccctgttaccgccagcagcgagtatcaaagacagctgcggacaacaacaacagtgattactcgtggactggagctaccaagtatcacctcaatggaagagactctctggtgaatccgggcacagccatggccagccacaaggacgatgaagaaaagtattttcctcagagcggggttctcatcttcggaaaacaagactcgggaaaaactaatgtggacattgaaaaggtcatgattacagacgaagaggaaatcaggaccaccaatcccgtggctacggagcagtatggttctgtatctaccaatctccagagcggcaacacacaagcagctacctcagatgtcaacacacaaggcgttcttccaggcatggtccggcaggacagagacgtgtacctgcagggacccatctgggcaaagattccacacacggacggacattttcacccttctcctcttatgggaggatttggactgaagcaccctcccccgcagattctcatcaagaataccccggtacctgcgaatccttctaccaccttcagcgcggcaaagtttgcttccttcatcacacagtactccacggggcaggtcagcgtggagatcgagtgggagccgcagaaagagaacagcaaacgctggaaccccgagatccagtatacctccaactacaacaagtctgttaatgtggactttactgtggacactaatggcgtgtattcagagcctcgccccattggcacaagatacctgactcgtaatctgtaa

SEQ ID NO: 1076 - DNA, 2208 bp, Artificial Sequence
  Synthetic Polynucleotide
atggctgccgatggttatcttccagattggctcgaggacactctctctgaaggaataagacagtggtggaagctcaaacctggcccaccaccgccaaagcccgcagagcggcataaggacgacagcaggggtcttgcgcttcctgggtacaagtacctcggacccttcaacggactcgacaaaggagagccggtcaacgaggcagacgccgcggccctcgagcacgacaaggcctacgaccggcagctcgacagcggagacaacccgtacctcaagtacaaccacgccgacgcggagtttcaggagcgccttaaagaagatacgtcttttgggggcaacctcgcaagagcagtattccaggcgaaaaagagggttcttgaacctctgggcctggttgaggagcctgttaagacggctccgggaaaaaagaggccggtagagcactctcctgcggagctagattcctcctccggaactggaaagtcgggccaacagcctgcaagaaagagattgaattttggtcagactggagacgcagactccgtacctgacccccagcctctcggacagccaccagcagccccctctggtctgggaactaatacgatggcttcaggcagtggcgcaccaatggcagacaataacgagggcgccgacggagtgggtaattcctcgggaaattggcattgcgattccacatggatgggcgacagagtcatcaccaccagcacccgcacctgggctctgcccacctacaacaaccatctgtacaagcaaatttccagccagtctggggccagcaacgacaaccactactttggctacagcaccccttgggggtattttgacttcaacagattccactgccacttctccccacgtgactggcaaagactcatcaacaacaattggggattccggcccaaaagactcaacttcaagctctttaacattcaagtcaaggaggtcacgcagaatgacggtacgacgacgattgccaataaccttaccagcacggttcaggtgtttactgactcggagtaccagctcccgtacgtcctcggctcggcgcatcaaggatgcctcccgccgttcccagcagacgtcttcatggtgccacagtatggatacctcaccctgaacaacgggagtcaggcggtaggacgctcttcattttactgcctggagtactttccttctcagatgctgcgtaccggaaacaactttaccttcagctacacctttgaggacgttccttttcacagcagctacgctcacagccagagtttggaccgtctcatgaatcctctcatcgaccagtacctgtattacttgagcagaacaaacactccaagcggaaccactacgcagtccgggcttcagttttctcaagccggagcgagtgacattcgggaccagtctaggaactggcttcctggaccctgttaccgccagcagcgagtatcaaagacagctgcggacaacaacaacagtgattactcgtggactggagctaccaagtatcacctcaatggaagagactctctggtgaatccgggcacagccatggccagccacaaggacgatgaagaaaagtattttcctcagagcggggttctcatcttcggaaaacaagactcgggaaaaactaatgtggacattgaaaaggtcatgattacagacgaagaggaaatcaggaccaccaatcccgtggctacggagcagtatggttctgtatctaccaatctccagagcggcaacacacaagcagctacctcagatgtcaacacacaaggcgttcttccaggcatggtctggcaggacagagacgtgtacctgcagggacccatctgggcaaagattccacacacggacggacattttcacccttctcctcttatgggagggtttggaccgaagcaccctcccccgcagattctcatcaagaataccccggtacctgcgaatccttctaccaccttcagcgcggcaaagtttgcttccttcatcacacagtactccacggggcaggtcagcgtggagatcgagtgggagctgcagaaagagaacagcaaacgctggaaccccgagatccagtatacctccaactacaacaagtctgttaatgtggactttactgtggacactaatggcgtgtattcagagcctcgccccattggcacaagatacctgactcgtaatctgtaa

SEQ ID NO: 1077 - DNA, 2208 bp, Artificial Sequence
  Synthetic Polynucleotide
atggctgccgatggttatcttccagattggctcgaggacactctctctgaaggaataagacagtggtggaagctcaaacctggcccaccaccgccaaagcccgcagagcggcataaggacgacagcaggggtcttgtgcttcctgggtacaagtacctcggacccttcaacggactcgacaaaggagagccggtcaacgaggcagacgccgcggccctcgagcacgacaaggcctacgaccggcagctcgacagcggagacaacccgtacctcaagtacaaccacgccgacgcggagtttcaggagcgccttaaagaagatacgtcttttgggggcaacctcgcaagagcagtattccaggcgaaaaagagggttcttgaacctctgggcctggttgaggagcctgttaagacggctccgggaaaaaagaggccggtagagcactctcctgcggagccagattcctcctccggaactggaaagtcgggccaacagcctgcaagaaagagattgaattttggtcagactggagacgcagactccgtacctgacccccagcctctcggacagccaccagcagccccctctggtctgggaactaatacgatggcttcaggcagtggcgcaccaatggcagacaataacgagggcgccgacggagtgggtaattcctcgggaaattggcattgcgattccacatggatgggcgacagagtcatcaccaccagcacccgcacctgggctctgcccacctacaacaaccatctgtacaagcaaatttccagccagtctggagccagcaacgacaaccactactttggctacagcaccccttgggggtattttgacttcaacagattccactgccacttctccccacgtgactggcaaagactcatcaacaacaattggggattccggcccaaaagactcaacttcaagctctttaacattcaagtcaaggaggtcacgcagaatgacggtacgacgacggttgccaataaccttaccagcacggttcaggtgtttactgactcggagtaccagctcccgtacgtcctcggctcggcgcatcaaggatgcctcccgccgttcccagcagacgtcttcatggtgccacagtatggatacctcaccctgaacaacgggagtcaggcggtaggacgctcttcattttactgcctggagtacttcccttctcagatgctgcgtaccggaaacaactttaccttcagctacacctttgaggacgttccttttcacagcagctacgctcacagccagagtttggaccgtcttatgaatcctctcatcgaccagtacctgtattacttgagcagaacaaacactccaagcggaaccactacgcagtccaggcttcagttttctcaagccggagcgagtgacattcgggaccagtctaggaactggcttcctggaccctgttaccgccagcagcgagtatcaaagacagctgcggacaacaacaacagtgattactcgtggactggagctaccaagtatcacctcaatggaagagactctctggtgaatccgggcacagccatggccagccacaaggacgatgaagaaaagtattttcctcagagcggggttctcatcttcggaaaacaagactcgggaaaaactaatgtggacattgaaaaggtcatgattacagacgaagaggaaatcaggaccaccaatcccgtggctacggagcagtatggttctgtatctaccaatctccagagcggcaacacacaagcagctacctcagatgtcaacacacaaggcgttcttccaggcatggtccggcaggacagagacgtgtacctgcagggacccatctgggcaaagattccacacacggacggacattttcacccttctcctcttatgggaggatttggactgaagcaccctcccccgcagattctcatcaagaataccccggtacctgcgaatccttctaccaccttcagcgcggcaaagtttgcttccttcatcacacagtactccacggggcaggtcagcgtggagatcgagtgggagccgcagaaagagaacagcaaacgctggaaccccgagatccagtatacctccaactacaacaagtctgttaatgtggactttactgtggacactaatggcgtgtattcagagcctcgccccattggcacaagatacctgactcgtaatctgtaa

SEQ ID NO: 1078 - DNA, 2208 bp, Artificial Sequence
  Synthetic Polynucleotide
atggctgccgatggttatcttccagattggctcgaggacactctctctgaaggaataagacagtggtggaagctcaaacctggcccaccaccgccaaagcccgcagagcggcataaggacgacagcaggggtcttgtgcttcctgggtacaagtacctcggacccttcaacggactcgacaaaggagagccggtcaacgaggcagacgccgcggccctcgagcacgacaaggcctacgaccggcagctcgacagcggagacaacccgtacctcaagtacaaccacgccgacgcggagtttcaggagcgccttaaagaagatacgtcttttgggggcaacctcgcaagagcagtattccaggcgaaaaagagggttcttgaacctctgggcctggttgaggagcctgttaagacggctccgggaaaaaagaggccggtagagcactctcctgcggagccagattcctcctccggaactggaaagtcgggccaacagcctgcaagaaagagattgaattttggtcagactggagacgcagactccgtacctgacccccagcctctcggacagccaccagcagccccctctggtctgggaactaatacgatggcttcaggcagtggcgcaccaatggcagacaataacgagggcgccgacggagtgggtaattcctcgggaaattggcattgcgattccacatggatgggcgacagagtcatcaccaccagcacccgcacctgggctctgcccacctacaacaaccatctgtacaagcaaatttccagccagtctggagccagcaacgacaaccactactttggctacagcaccccttgggggtattttgacttcaacagattccactgccacttctccccacgtgactggcaaagactcatcaacaacaattggggattccggcccaaaagactcaacttcaagctctttaacattcaagtcaaggaggtcacgcagaatgacggtacgacgacgattgccaataaccttaccagcacggttcaggtgtttactgactcggagtaccagctcccgtacgtcctcggctcggcgcatcaaggatgcctcccgccgttcccagcagacgtcttcatggtgccacagtatggatacctcaccctgaacaacgggagtcaggcggtaggacgctcttcattttactgcctggagtactttccttctcagatgctgcgtaccggaaacaactttaccttcagctacacctttgaggacgttccttttcacagcagctacgctcacagccagagtttggaccgtcttatgaatcctctcatcgaccagtacctgtattacttgagcagaacaaacactccaagcggaactactacgcagtccaggcttcagttttctcaagccggagcgagtgacattcgggaccagtctaggaactggcttcctggaccctgttaccgccagcagcgagtatcaaagacagctgcggacaacaacaacagtgattactcgtggactggagctaccaagtatcacctcaatggaagagactctctggtgaatccgggcacagccatggccagccacaaggacgatgaagaaaagtattttcctcagggcggggttctcatcttcggaaaacaagactcgggaaaaactaatgtggacattgaaaaggtcatgattacagacgaagaggaaatcaggaccaccaatcccgtggctacggagcagtatggttctgtatctaccaatctccagagcggcaacacacaagcagctacctcagatgtcaacacacaaggcgttcttccaggcatggtccggcaggacagagacgtgtacctgcagggacccatctgggcaaagattccacacacggacggacattttcacccttctcctcttatgggaggatttggactgaagcaccctcccccgcagattctcatcaagaataccccggtacctgcgaatccttctaccaccttcagcgcggcaaagtttgcttccttcatcacacagtactccacggggcaggtcagcgtggagatcgagtgggagccgcagaaagagaacagcaaacgctggaaccccgagatccagtatacctccaactacaacaagtctgttaatgtggactttactgtggacactaatggcgtgtattcagagcctcgccccattggcacaagatacctgactcgtaatctgtaa

SEQ ID NO: 1079 - DNA, 2208 bp, Artificial Sequence
  Synthetic Polynucleotide
atggctgccgatggttatcttccagattggctcgaggacactctctctgaaggaataagacagtggtggaagctcaaacctggcccaccaccgccaaagcccgcagagcggcataaggacgacagcaggggtcttgcgcttcctgggtacaagtacctcggacccttcaacggactcgacaaaggagagccggtcaacgaggcagacgccgcggccctcgagcacgacaaggcctacgaccggcagctcgacagcggagacaacccgtacctcaagtacaaccacgccgacgcggagtttcaggagcgccttaaagaagatacgtcttttgggggcaacctcgcaagagcagtattccaggcgaaaaagagggttcttgaacctctgggcctggttgaggagcctgttaagacggctccgggaaaaaagaggccggtagagcactctcctgcggagctagattcctcctccggaactggaaagtcgggccaacagcctgcaagaaagagattgaattttggtcagactggagacgcagactccgtacctgacccccagcctctcggacagccaccagcagccccctctggtctgggaactaatacgatggcttcaggcagtggcgcaccaatggcagacaataacgagggcgccgacggagtgggtaattcctcgggaaattggcattgcgattccacatggatgggcgacagagtcatcaccaccagcacccgcacctgggctctgcccacctacaacaaccatctgtacaagcaaatttccagccagtctggggccagcaacgacaaccactactttggctacagcaccccttgggggtattttgacttcaacagattccactgccacttctccccacgtgactggcaaagactcatcaacaacaattggggattccggcccaaaagactcaacttcaagctctttaacattcaagtcaaggaggtcacgcagaatgacggtacgacgacgattgccaataaccttaccagcacggttcaggtgtttactgactcggagtaccagctcccgtacgtcctcggctcggcgcatcaaggatgcctcccgccgttcccagcagacgtcttcatggtgccacagtatggatacctcaccctgaacaacgggagtcaggcggtaggacgctcttcattttactgcctggagtactttccttctcagatgctgcgtaccggaaacaactttaccttcagctacacctttgaggacgttccttttcacagcagctacgctcacagccagagtttggaccgtctcatgaatcctctcatcgaccagtacctgtattacttgagcagaacaaacactccaagcggaaccactacgcagtccaggcttcagttttctcaagccggagcgagtgacattcgggaccagtctaggaactggcttcctggaccctgttaccgccagcagcgagtatcaaagacagctgcggacaacaacaacagtgattactcgtggactggagctaccaagtatcacctcaatggaagagactctctggtgaatccgggcacagccatggccggccacaaggacgatgaagaaaagtattttcctcagagcggggttctcatcttcggaaaacaagactcgggaaaaactaatgtggacattgaaaaggtcatgattacagacgaagaggaaatcaggaccaccaatcccgtggctacggagcagtatggttctgtatctaccaatctccagagcggcaacacacaagcagctacctcagatgtcaacacacaaggcgttcttccaggcatggtctggcaggacagagacgtgtacctgcagggacccatctgggcaaagattccacacacggacggacattttcacccttctcctcttatgggagggtttggaccgaagcaccctcccccgcagattctcatcaagaataccccggtacctgcgaatccttctaccaccttcagcgcggcaaagtttgcttccttcatcacacagtactccacggggcaggtcagcgtggagatcgagtgggagctgcagaaagagaacagcaaacgctggaaccccgagatccagtatacctccaactacaacaagtctgttaatgtggactttactgtggacactaatggcgtgtattcagagcctcgccccattggcacaagatacctgactcgtaatctgtaa

SEQ ID NO: 1080 - DNA, 2208 bp, Artificial Sequence
  Synthetic Polynucleotide
atggctgccgatggttatcttccagattggctcgaggacactctctctgaaggaataagacagtggtggaagctcaaacctggcccaccaccgccaaagcccgcagagcggcataaggacgacagcaggggtcttgcgcttcctgggtacaagtacctcggacccttcaacggactcgacaaaggagagccggtcaacgaggcagacgccgcggccctcgagcacgacaaggcctacgaccggcagctcgacagcggagacaacccgtacctcaagtacaaccacgccgacgcggagtttcaggagcgccttaaagaagatacgtcttttgggggcaacctcgcaagagcagtattccaggcgaaaaagagggttcttgaacctctgggcctggttgaggagcctgttaagacggctccgggaaaaaagaggccggtagagcactctcctgcggagctagattcctcctccggaactggaaagtcgggccaacagcctgcaagaaagagattgaattttggtcagactggagacgcagactccgtacctgacccccagcctctcggacagccaccagcagccccctctggtctgggaactaatacgatggcttcaggcagtggcgcaccaatggcagacaataacgagggcgccgacggagtgggtaattcctcgggaaattggcattgcgattccacatggatgggcgacagagtcatcaccaccagcacccgcacctgggctctgcccacctacaacaaccatctgtacaagcaaatttccagccagtctggggccagcaacgacaaccactactttggctacagcaccccttgggggtattttgacttcaacagattccactgccacttctccccacgtgactggcaaagactcatcaacaacaattggggattccggcccaaaagactcaacttcaagctctttaacattcaagtcaaggaggtcacgcagaatgacggtacgacgacgattgccaataaccttaccagcacggttcaggtgtttactgactcggagtaccagctcccgtacgtcctcggctcggcgcatcaaggatgcctcccgccgttcccagcagacgtcttcatggtgccacagtatggatacctcaccctgaacaacgggagtcaggcggtaggacgctcttcattttactgcctggagtactttccttctcagatgctgcgtaccggaaacaactttaccttcagctacacctttgaggacgttccttttcacagcagctacgctcacagccagagtttggaccgtctcatgaatcctctcatcgaccagtacctgtattacttgagcagaacaaacactccaagcggaaccactacgcagtccaggcttcagttttctcaagccggagcgagtgacattcgggaccagtctaggaactggcttcctggaccctgttaccgccagcagcgagtatcaaagacagctgcggacaacaacaacagtgattactcgtggactggagctaccaagtatcacctcaatggaagagactctctggtgaatccgggcacagccatggccagccacaaggacgatgaagaaaagtattttcctcagagcggggttctcatcttcggaaaacaagactcgggaaaaactaatgtggacattgaaaaggtcatgattacagacgaagaggaaatcaggaccaccaatcccgtggctacggagcagtatggttctgtatctaccaatctccagagcggcaacacacaagcagctacctcagatgtcaacacacaaggcgttcttccaggcatggtctggcaggacagagacgtgtacctgcagggacccatctgggcaaagattccacacacggacggacattttcacccttctcctcttatgggaggatttggaccgaagcaccctcccccgcagattctcatcaagaataccccggtacctgcgaatccttctaccaccttcagcgcggcaaagtttgcttccttcatcacacagtactccacggggcaggtcagcgtggagatcgagtgggagctgcagaaagagaacagcaaacgctggaaccccgagatccagtatacctccaactacaacaagtctgttaatgtggactttactgtggacactaatggcgtgtattcagagcctcgccccattggcacaagatacctgactcgtaatctgtaa

SEQ ID NO: 1081 - DNA, 2208 bp, Artificial Sequence
  Synthetic Polynucleotide
atggctgccgatggttatcttccagattggctcgaggacactctctctgaaggaataagacagtggtggaagctcaaacctggcccaccaccgccaaagcccgcagagcggcataaggacgacagcaggggtcttgtgcttcctgggtacaagtacctcggacccttcaacggactcgacaaaggagagccggtcaacgaggcagacgccgcggccctcgagcacgacaaggcctacgaccggcagctcgacagcggagacaacccgtacctcaagtacaaccacgccgacgcggagtttcaggagcgccttaaagaagatacgtcttttgggggcaacctcgcaagagcagtattccaggcgaaaaagagggttcttgaacctctgggcctggttgaggagcctgttaagacggctccgggaaaaaagaggccggtagagcactctcctgcggagccagattcctcctccggaactggaaagtcgggccaacagcctgcaagaaagagattgaattttggtcagactggagacgcagactccgtacctggcccccagcctctcggacagccaccagcagccccctctggtctgggaactaatacgatggcttcaggcagtggcgcaccaatggcagacaataacgagggcgccgacggagtgggtaattcctcgggaaattggcattgcgattccacatggatgggcgacagagtcatcaccaccagcacccgcacctgggctctgcccacctacaacaaccatctgtacaagcaaatttccagccagtctggagccagcaacgacaaccactactttggctacagcaccccttgggggtattttgacttcaacagattccactgccacttctccccacgtgactggcaaagactcatcaacaacaattggggattccggcccaaaagactcaacttcaagctctttaacattcaagtcaaggaggtcacgcagaatgacggtacgacgacggttgccaataaccttaccagcacggttcaggtgtttactgactcggagtaccagctcccgtacgtcctcggctcggcgcatcaaggatgcctcccgccgttcccagcagacgtcttcatggtgccacagtatggatacctcaccctgaacaacgggagtcaggcggtaggacgctcttcattttactgcctggagtactttccttctcagatgctgcgtaccggaaacaactttaccttcagctacacctttgaggacgttccttttcacagcagctacgctcacagccagagtttggaccgtcttatgaatcctctcatcgaccagtacctgtattacttgagcagaacaaacactccaagcggaaccactacgcagtccaggcttcagttttctcaagccggagcgagtgacattcgggaccagtctaggaactggcttcctggaccctgttaccgccagcagcgagtatcaaagacagctgcggacaacaacaacagtgattactcgtggactggagctaccaagtatcacctcaatggaagagactctctggtgaatccgggcacagccatggccagccacaaggacgatgaagaaaagtattttcctcagagcggggttctcatcttcggaaaacaagactcgggaaaaactaatgtggacattgaaaaggtcatgattacagacgaagaggaaatcaggaccaccaatcccgtggctacggagcagtatggttctgtatctaccaatctccagagcggcaacacacaagcagctacctcagatgtcaacacacaaggcgttcttccaggcatggtccggcaggacagagacgtgtacctgcagggacccatctgggcaaagattccacacacggacggacattttcacccttctcctcttatgggaggatttggactgaagcaccctcccccgcagattctcatcaagaataccccggtacctgcgaatccttctaccaccttcagcgcggcaaagtttgcttccttcatcacacagtactccacggggcaggtcagcgtggagatcgagtgggagccgcagaaagagaacagcaaacgctggaaccccgagatccagtatacctccaactacaacaagtctgttaatgtggactttactgtggacactaatggcgtgtattcagagcctcgccccattggcacaagatacctgactcgtaatctgtaa

SEQ ID NO: 1082 - DNA, 2208 bp, Artificial Sequence
  Synthetic Polynucleotide
atggctgccgatggttatcttccagattggctcgaggacactctctctgaaggaataagacagtggtggaagctcaaacctggcccaccaccgccaaagcccgcagagcggcataaggacgacagcaggggtcttgtgcttcctgggtacaagtacctcggacccttcaacggactcgacaaaggagagccggtcaacgaggcagacgccgcggccctcgagcacgacaaggcctacgaccggcagctcgacagcggagacaacccgtacctcaagtacaaccacgccgacgcggagtttcaggagcgccttaaagaagatacgtcttttgggggcaacctcgcaagagcagtattccaggcgaaaaagagggttcttgaacctctgggcctggttgaggagcctgttaagacggctccgggaaaaaagaggccggtagagcactctcctgcggagccagattcctcctccggaactggaaagtcgggccaacagcctgcaagaaagagattgaattttggtcagactggagacgcagactccgtacctgacccccagcctctcggacagccaccagcagccccctctggtctgggaactaatacgatggcttcaggcagtggcgcaccaatggcagacaataacgagggcgccgacggagtgggtaattcctcgggaaattggcattgcgattccacatggatgggcgacagagtcatcaccaccagcacccgcacctgggctctgcccacctacaacaaccatctgtacaagcaaatttccagccagtctggagccagcaacgacaaccactactttggctacagcaccccttgggggtattttgacttcaacagattccactgccacttctccccacgtgactggcaaagactcatcaacaacaattggggattccggcccaaaagactcaacttcaagctctttaacattcaagtcaaggaggtcacgcagaatgacggtacgacgacgattgccaataaccttaccagcacggttcaggtgtttactgactcggagtaccagctcccgtacgtcctcggctcggcgcatcaaggatgcctcccgccgttcccagcagacgtcttcatggtgccacagtatggatacctcaccctgaacaacgggagtcaggcggtaggacgctcttcattttactgcctagagtactttccttctcagatgctgcgtaccggaaacaactttaccttcagctacacctttgaggacgctccttttcacagcagctacgctcacagccagagtttggaccgtcttatgaatcctctcatcgaccagtacctgtactacttgagcagaacaaacactccaagcggaaccactacgcagtccaggcttcagttttctcaagccggagcgagtgacattcgggaccagtctaggaactggcttcctggaccctgttaccgccagcagcgagtatcaaagacagctgcggacaacaacaacagtgattactcgtggactggagctaccaagtatcacctcaatggaagagactctctggtgaatccgggcacagccatggccagccacaaggacgatgaagaaaagtattttcctcagagcggggttctcatcttcggaaaacaagactcgggaaaaactaacgtggacattgaaaaggtcatgattacagacgaagaggaaatcaggaccaccaatcccgtggctacggagcagtatggttctgtatctaccaatctccagagcggcaacacacaagcagctacctcagatgtcaacacacaaggcgttcttccaggcatggtccggcaggacagagacgtgtacctgcagggacccatctgggcaaagattccacacacggacggacattttcacccttctcctcttatgggaggatttggactgaagcaccctcccccgcagattctcatcaagaataccccggtacctgcgaatccttctaccaccttcagcgcggcaaagtttgcttccttcatcacacagtactccacggggcaggtcagcgtggagatcgagtgggagccgcagaaagagaacagcaaacgctggaaccccgagatccagtatacctccaactacaacaagtctgttaatgtggactttactgtggacactaatggcgtgtattcagagcctcgccccattggcacaagatacctgactcgtaatctgtaa

SEQ ID NO: 1083 - DNA, 2208 bp, Artificial Sequence
  Synthetic Polynucleotide
atggctgccgatggttatcttccagattggctcgaggacactctctctgaaggaataagacagtggtggaagctcaaacctggcccaccaccgccaaagcccgcagagcggcataaggacgacagcaggggtcttgtgcttcctgggtacaagtacctcggacccttcaacggactcgacaaaggagagccggtcaacgaggcagacgccgcggccctcgagcacgacaaggcctacgaccggcagctcgacagcggagacaacccgtacctcaagtacaaccacgccgacgcggagtttcaggagcgccttaaagaagatacgtcttttgggggcaacctcgcaagagcagtattccaggcgaaaaagagggttcttgaacctctgggcctggttgaggagcctgttaagacggctccgggaaaaaagaggccggtagagcactctcctgcggagccagattcctcctccggaactggaaagtcgggccaacagcctgcaagaaagagattgaattttggtcagactggagacgcagactccgtacctgacccccagcctctcggacagccaccagcagccccctctggtctgggaactaatacgatggcttcaggcagtggcgcaccaatggcagacaataacgagggcgccgacggagtgggtaattcctcgggaaattggcattgcgattccacatggatgggcgacagagtcatccccaccagcacccgcacctgggctctgcccacctacaacaaccatctgtacaagcaaatttccagccagtctggagccagcaacgacaaccactactttggctacagcaccccttgggggtattttgacttcaacagattccactgccacttctccccacgtgactggcaaagactcatcaacaacaattggggattccggcccaaaagactcaacttcaagctctttaacattcaagtcaaggaggtcacgcagaatgacggtacgacgacgattgccaataaccttaccagcacggttcaggtgtttactgactcggagtaccagctcccgtacgtcctcggctcggcgcatcaaggatgcctcccgccgttcccagcagacgtcttcatggtgccacagtatggatacctcaccctgaacaacgggagtcaggcggtaggacgctcttcattttactgcctggagtactttccttctcagatgctgcgtaccggaaacaactttaccttcagctacacctttgaggacgttccttttcacagcagctacgctcacagccagagtttggaccgtcttatgaatcctctcatcgaccagtacctgtattacttgagcagaacaaacactccaagcggaaccactacgcagtccaggcttcagttttctcaagccggagcgagtgacattcgggaccagtctaggaactggcttcctggaccctgttaccgccagcagcgagtatcaaagacagctgcggacaacaacaacagtgattactcgtggactggagctaccaagtatcacctcaatggaagagactctctggtgaatccgggcacagccatggccagccacaaggacgatgaagaaaagtattttcctcagagcggggttctcatcttcggaaaacaagactcgggaaaaactaatgtggacattgaaaaggtcatgattacagacgaagaggaaatcaggaccaccaatcccgtggctacggagcagtatggttctgtatctaccaatctccagagcggcaacacacaagcagctacctcagatgtcaacacacaaggcgttcttccaggcatggtccggcaggacagagacgtgtacctgcagggacccatctgggcaaagattccacacacggacggacattttcacccttctcctcttatgggaggatttggactgaagcaccctcccccgcagattctcatcaagaataccccggtacctgcgaatccttctaccaccttcagcgcggcaaagtttgcttccttcatcacacagtactccacggggcaggtcagcgtggagatcgagtgggagccgcagaaagagaacagcaaacgctggaaccccgagatccagtatacctccaactacaacaagtctgttaatgtggactttactgtggacactaatggcgtgtattcagagcctcgccccattggcacaagatacctgactcgtaatctgtaa

SEQ ID NO: 1084 - DNA, 2208 bp, Artificial Sequence
  Synthetic Polynucleotide
atggctgccgatggttatcttccagattggctcgaggacactctctctgaaggaataagacagtggtggaagctcaaacctggcccaccaccgccaaagcccgcagagcggcataaggacgacagcaggggtcttgtgcttcctgggtacaagtacctcggacccttcaacggactcgacaaaggagagccggtcaacgaggcagacgccgcggccctcgagcacgacaaggcctacgaccggcagctcgacagcggagacaacccgtacctcaagtacaaccacgccgacgcggagtttcaggagcgccttaaagaagatacgtcttttgggggcaacctcgcaagagcagtattccaggcgaaaaagagggttcttgaacctctgggcctggttgaggagcctgttaagacggctccgggaaaaaagaggccggcagagcactctcctgcggagccagattcctcctccggaactggaaagtcgggccaacagcctgcaagaaagagattgaattttggtcagactggagacgcagactccgtacctgacccccagcctctcggacagccaccagcagccccctctggtctgggaactaatacgatggcttcaggcagtggcgcaccaatggcagacaataacgagggcgccgacggagtgggtaattcctcgggaaattggcattgcgattccacatggatgggcgacagagtcatcaccaccagcacccgcacctgggctctgcccacctacaacaaccatctgtacaagcaaatttccagccagtctggagccagcaacgacaaccactactttggctacagcaccccttgggggtattttgacttcaacagattccactgccacttctccccacgtgactggcaaagactcatcaacaacaattggggattccggcccaaaagactcaacttcaagctctttaacattcaagtcaaggaggtcacgcagaatgacggtacgacgacgattgccaataaccttaccagcacggttcaggtgtttactgactcggagtaccagctcccgtacgtcctcggctcggcgcatcaaggatgcctcccgccgttcccagcagacgtcttcatggtgccacagtatggatacctcaccctgaacaacgggagtcaggcggtaggacgctcttcattttactgcctagagtactttccttctcagatgctgcgtaccggaaacaactttaccttcagctacacctttgaggacgttccttttcacagcagctacgctcacagccagagtttggaccgtcttatgaatcctctcatcgaccagtacctgtattacttgagcagaacaaacactccaagcggaaccactacgcagtccaggcttcagttttctcaagccggagcgagtgacattcgggaccagtctaggaactggcttcctggaccctgttaccgccagcagcgagtatcaaagacagctgcggacaacaacaacagtgattactcgtggactggagctaccaagtatcacctcaatggaagagactctctggtgaatccgggcacagccatggccagccacaaggacgatgaagaaaagtattttcctcagagcggggttctcatcttcggaaaacaagactcgggaaaaactaatgtggacattgaaaaggtcatgattacagacgaagaggaaatcaggaccaccaatcccgtggctacggagcagtatggttctgtatctaccaatctccagagcggcaacacacaagcagctacctcagatgtcaacacacaaggcgttcttccaggcatggtccggcaggacagagacgtgtacctgcagggacccatctgggcaaagattccacacacggacggacattttcacccttctcctcttatgggaggatttggactgaagcaccctcccccgcagattctcatcaagaataccccggtacctgcgaatccttctaccaccttcagcgcggcaaagtttgcttccttcatcacacagtactccacggggcaggtcagcgtggagatcgagtgggagccgcagaaagagaacagcaaacgctggaaccccgagatccagtatacctccaactacaacaagtctgttaatgtggactttactgtggacactaatggcgtgtattcagagcctcgccccattggcacaagatacctgactcgtaatctgtaa

SEQ ID NO: 1085 - DNA, 2208 bp, Artificial Sequence
  Synthetic Polynucleotide
atggctgccgatggttatcttccagattggctcgaggacactctctctgaaggaataagacagtggtggaagctcaaacctggcccaccaccgccaaagcccgcagagcggcataaggacgacagcaggggtcttgtgcttcctgggtacaagtacctcggacccttcaacggactcgacaaaggagagccggtcaacgaggcagacgccgcggccctcgagcacgacaaggcctacgaccggcagctcgacagcggagacaacccgtacctcaagtacaaccacgccgacgcggagtttcaggagcgccttaaagaagatacgtcttttgggggcaacctcgcaagagcagtattccaggcgaaaaagagggttcttgaacctctgggcctggttgaggagcctgttaagacggctccgggaaaaaagaggccggtagagcactctcctgcggagccagattcctcctccggaactggaaagtcgggccaacagcctgcaagaaagagattgaattttggtcagactggagacgcagactccgtacctgacccccagcctctcggacagccaccagcagccccctctggtctgggaactaatacgatggcttcaggcagtggcgcaccaatggcagacaataacgagggcgccgacggagtgggtaattcctcgggaaattggcattgcgattccacatggatgggcgacagagtcatcaccaccagcacccgcacctgggctctgcccacctacaacaaccatctgtacaagcaaatttccagccagtctggagccagcaacgacaaccactactttggctacagcaccccttgggggtattttgacttcaacagattccactgccacttctccccacgtgactggcaaagactcatcaacaacaattggggattccggcccaaaagactcaacttcaagctctttaacattcaagtcaaggaggtcacgcagaatgacggtacgacgacgattgccaataaccttaccagcacggttcaggtgtttactgactcggagtaccagctcccgtacgtcctcggctcggcgcatcaaggatgcctcccgccgttcccagcagacgtcttcatggtgccacagtatggatacctcaccctgaacaacgggagtcaggcggtaggacgctcttcattttactgcctggagtactttccttctcagatgctgcgtaccggaaacaactttaccttcagctacacctttgaggacgttccttttcacagcagctacgctcacagccagagtttggaccgtcttatgaatcctctcatcgaccagtacctgtattacttgagcagaacaaacactccaagcggaaccactacgcagtccaggcttcagttttctcaagccggagcgagtgacattcgggaccagtctaggaactggcttcctggaccctgttaccgccagcagcgagtatcaaggacagctgcggacaacaacaacagtgattactcgtggactggagctaccaagtatcacctcaatggaagagactctctggtgaatccgggcacagccatggccagccacaaggacgatgaagaaaagtattttcctcagagcggggttctcatcttcggaaaacaagactcgggaaaaactaatgtggacattgaaaaggtcatgattacagacgaagaggaaatcaggaccaccaatcccgtggctacggagcagtatggttctgtatctaccaatctccagagcggcaacacacaagcagctacctcagatgtcaacacacaaggcgttcttccaggcatggtccggcaggacagagacgtgtatctgcagggacccatctgggcaaagattccacacacggacggacattttcacccttctcctcttatgggaggatttggactgaagcaccctcccccgcagattctcatcaagaataccccggtacctgcgaatccttctaccaccttcagcgcggcaaagtttgcttccttcatcacacagtactccacggggcaggtcagcgtggagatcgagtgggagccgcagaaagagaacagcaaacgctggaaccccgagatccagtatacctccaactacaacaagtctgttaatgtggactttactgtggacactaatggcgtgtattcagagcctcgccccattggcacaagatacctgactcgtaatctgtaa

SEQ ID NO: 1086 - DNA, 2208 bp, Artificial Sequence
  Synthetic Polynucleotide
atggctgccgatggttatcttccagattggctcgaggacactctctctgaaggaataagacagtggtggaagctcaaacctggcccaccaccgccaaagcccgcagagcggcataaggacgacagcaggggtcttgtgcttcctgggtacaagtacctcggacccttcaacggactcgacaaaggagagccggtcaacgaggcagacgccgcggccctcgagcacgacaaggcctacgaccggcagctcgacagcggagacaacccgtacctcaagtacaaccacgccgacgcggagtttcaggagcgccttaaagaagatacgtcttttgggggcaacctcgcaagagcagtattccaggcgaaaaagagggttcttgaacctctgggcctggttgaggagcctgttaagacggctccgggaaaaaagaggccggtagagcactctcctgcggggccagattcctcctccggaactggaaagtcgggccaacagcctgcaagaaagagattgaattttggtcagactggagacgcagactccgtacctgacccccagcctctcggacagccaccagcagccccctctggtctgggaactaatacgatggcttcaggcagtggcgcaccaatggcagacaataacgagggcgccgacggagtgggtaattcctcgggaaattggcattgcgattccacatggatgggcgacagagtcatcaccaccagcacccgcacctgggctctgcccacctacaacaaccatctgtacaagcaaatttccagccagtctggagccagcaacgacaaccactactttggctacagcaccccttgggggtattttgacttcaacagattccactgccacttctccccacgtgactggcaaagactcatcaacaacaattggggattccgggccaaaagactcaacttcgagctctttaacattcaagtcaaggaggtcacgcagaatgacggtacgacgacgattgccaataaccttaccagcacggttcaggtgtttactgactcggagtaccagctcccgtacgtcctcggctcggcgcatcaaggatgcctcccgccgttcccagcagacgtcttcatggtgccacagtatggatacctcaccctgaacaacgggagtcaggcggtaggacgctcttcattttactgcctggagtactttccttctcagatgctgcgtaccggaaacaactttaccttcagctacacctttgaggacgttccttttcacagcagctacgctcacagccagagtttggaccgtctcatgaatcctctcatcgaccagtacctgtattacttgagcagaacaaacactccaagcggaaccactacgcagtccaggcttcagttttctcaagccggagcgagtgacattcgggaccagtctaggaactggcttcctggaccctgttaccgccagcagcgagtatcaaagacagctgcggacaacaacaacagtgattactcgtggactggagctaccaagtatcacctcaatggaagagactctctggtgaatccgggcacagccatggccagccacaaggacgatgaagaaaagtattttcctcagagcggggttctcatcttcggaaaacaagactcgggaaaaactaatgtggacattgaaaaggtcatgattacagacgaagaggaaatcaggaccaccaatcccgtggctacggagcagtatggttctgtatctaccaatctccagagcggcaacacacaagcagctacctcagatgtcaacacacaaggcgttcttccaggcatggtctggcaggacagagacgtgtacctgcagggacccatctgggcaaagattccacacacggacggacactttcacccttctcctcttatgggaggatttggactgaagcaccctcccccgcagattctcatcaagagtaccccggtacctgcgaatccttctaccaccttcagcgcggcaaagtttgcttccttcatcacacagtactccacggggcaggtcagcgtggagatcgagtgggagctgcagaaagagaacagcaaacgctggaaccccgagatccagtatacctccaactacaacaagtctgttaatgtggactttactgtggacactaatggcgtgtattcagagcctcgccccattggcacaagatacctgactcgtaatctgtaa

SEQ ID NO: 1087 - DNA, 2208 bp, Artificial Sequence
  Synthetic Polynucleotide
atggctgccgatggttatcttccagattggctcgaggacactctctctgaaggaataagacagtggtggaagctcaaacctggcccaccaccgccaaagcccgcagagcggcataaggacgacagcaggggtcttgtgcttcctgggtacaagtacctcggacccttcaacggactcgacaaaggagagccggtcaacgaggcagacgccgcggccctcgagcacgacaaggcctacgaccggcagctcgacagcggagacaacccgtacctcaagtacaaccacgccgacgcggagtttcaggagcgccttaaagaagatacgtcttttgggggcaacctcgcaagagcagtattccaggcgaaaaagagggttcttgaacctctgggcctggttgaggagcctgttaagacggctccgggaaaaaagaggccggtagagcactctcctgcggagccagattcctcctccggaactggaaagtcgggccaacagcctgcaagaaagagattgaattttggtcagactggagacgcagactccgtacctgacccccagcctctcggacagccaccagcagccccctctggtctgggaactaatacgatggcttcaggcagtggcgcaccaatggcagacaataacgagggcgccgacggagtgggtaattcctcgggaaattggcattgcgattccacatggatgggcgacagagtcatcaccaccagcacccgcacctgggctctgcccacctacaacaaccatctgtacaagcaaatttccagccagtctggagccagcaacgacaaccactactttggctacagcaccccttgggggtattttgacttcaacagattccactgccacttctccccacgtgactggcaaagactcatcaacaacaattggggattccggcccaaaagactcaacttcaagctctttaacattcaagtcaaggaggtcacgcagaatgacggtacgacgacgattgccaataaccttaccagcacggttcaggtgtttactgactcggagtaccagctcccgtacgtcctcggctcggcgcatcaaggatgcctcccgccgttcccagcagacgtcttcatggtgccacagtatggatacctcaccctgaacaacgggagtcaggcggtaggacgctcttcattttactgcctggagtactttccttctcagatgctgcgtaccggaaacaactttaccttcagctacacctttgaggacgttccttttcacagcagctacgctcacagccagagtttggaccgtctcatgaatcctctcatcgaccagtacctgtattacttgagcagaacaaacactccaagcggaaccactacgcagtccaggcttcggttttctcaagccggagcgagtgacattcgggaccagtctaggaactggcttcctggaccctgttaccgccagcagcgagtatcaaagacagctgcggacaacaacaacagtgattactcgtggactggagctaccaagtatcacctcaatggaagagactctctggtgaatccgggcacagccatggccagccacaaggacgatgaagaaaagtattttcctcagagcggggttctcatcttccggaaacaagactcgggaaaaactaatgtggacattgaaagggtcatgattacagacgaagaggaaatcaggaccaccaatcccgtggctacggagcagtatggttctgtatctaccaatctccagagcggcaacacacaagcagctacctcagatgtcaacacacaaggcgttcttccaggcatggtctggcaggacagagacgtgtacctgcagggacccatctgggcaaagattccacacacggacggacattttcacccttctcctcttatgggaggatttggactgaagcaccctcccccgcagattctcatcaagaataccccggtacctgcgaatccttctaccaccttcagcgcggcaaagtttgcttccttcatcacacagtactccacggggcaggtcagcgtggagatcgagtgggagctgcagaaagagaacagcaaacgctggaaccccgagatccagtatacctccaactacaacaagtctgttaatgtggactttactgtggacactaatggcgtgtattcagagcctcgccccattggcacaagatacctgactcgtaatctgtaa

SEQ ID NO: 1088 - DNA, 2208 bp, Artificial Sequence
  Synthetic Polynucleotide
atggctgccgatggttatcttccagattggctcgaggacactctctctgaaggaataagacagtggtggaagctcaaacctggcccaccaccgccaaagcccgcagagcggcataaggacgacagcaggggtcttgtgcttcctgggtacaagtacctcggacccttcaacggactcgacaaaggagagccggtcaacgaggcagacgccgcggccctcgagcacgacaaggcctacgaccggcagctcgacagcggagacaacccgtacctcaagtacaaccacgccgacgcggagtttcaggagcgccttaaagaagatacgtcttttgggggcaacctcgcaagagcagtattccaggcgaaaaagagggttcttgaacctctgggcctggttgaggagcctgttaagacggctccgggaaaaaagaggccggtagagcactctcctgcggagccagattcctcctccggaactggaaagtcgggccaacagcctgcaagaaagagattgaattttggtcagactggagacgcagactccgtacctgacccccagcctctcggacagccaccagcagccccctctggtctgggaactaatacgatggcttcaggcagtggcgcaccaatggcagacaataacgagggcgccgacggagtgggtaattcctcgggaaattggcattgcgattccacatggatgggcgacagagtcatcaccaccagcacccgcacctgggctctgcccacctacaacaaccatctgtacaagcaaatttccagccagtctggagccagcaacgacaaccactactttggctacagcaccccttgggggtattttgacttcaacagattccactgccacttctccccacgtgactggcaaagactcatcaacaacaattggggattccgggccaaaagactcaacttcaagctctttaacattcaagtcaaggaggtcacgcagaatgacggtacgacgacgattgccaataaccttaccagcacggttcaggtgtttactgactcggagtaccagctcccgtacgtcctcggctcggcgcatcaaggatgcctcccgccgttcccagcagacgtcttcatggtgccacagtatggatacctcaccctgaacaacgggagtcaggcggtaggacgctcttcattttactgcctggagtactttccttctcagatgctgcgtaccggaaacaactttaccttcagctacacctttgaggacgttccttttcacagcagctacgctcacagccagagtttggaccgtctcatgaatcctctcatcgaccagtacctgtattacttgagcagaacaaacactccaagcggaaccactacgcagtccaggcttcggttttctcaagccggagcgagtgacattcgggaccagtctaggaactggcttcctggaccctgttaccgccagcagcgagtatcaaagacagctgcggacaacaacaacagtgattactcgtggactggagctaccaagtatcacctcaatggaagagactctctggtgaatccgggcacagccatggccagccacaaggacgatgaagaaaagtattttcctcagagcggggttctcatcttcggaaaacaagactcgggaaaaactaatgtggacattgaaagggtcatgattacagacgaagaggaaatcaggaccaccaatcccgtggctacggagcagtatggttctgtatctaccaatctccagagcggcaacacacaagcagctacctcagatgtcaacacacaaggcgttcttccaggcatggtctggcaggacagagacgtgtacctgcagggacccatctgggcaaagattccacacacggacggacattttcacccttctcctcttatgggaggatttggactgaagcaccctcccccgcagattctcatcaagaataccccggtacctgcgaatccttctaccaccttcagcgcggcaaagtttgcttccttcatcacacagtactccacggggcaggtcagcgtggagatcgagtgggagctgcagaaagagaacagcaaacgctggaaccccgagatccagtatacctccaactacaacaagtctgttaatgtggactttactgtggacactaatggcgtgtattcagagcctcgccccattggcacaagatacctgactcgtaatctgtaa

SEQ ID NO: 1089 - DNA, 2208 bp, Artificial Sequence
  Synthetic Polynucleotide
atggctgccgatggttatcttccagattggctcgaggacactctctctgaaggaataagacagtggtggaagctcaaacctggcccaccaccaccaaggcccgcagagcggcatcaggacgacagcaggggtcttgtgcttcctgggtacaagtacctcggacccttcaacggactcgacaaaggagagccggtcaacgaggcagacgctgcggccctcgagcacgacaaggcctacgaccggcagctcgacagcggagacaacccgtacctcaagtacaaccacgccgacgcggagtttcaggagcgtcttaaagaagatacgtcttttgggggcaacctcggacgagcagtcttccaggcgaaaaagagggttcttgaacctctgggcctggttgaggaacctgttaagacggctccgggaaaaaagaggccggtagagcactctcctgcggagccagactcctcctcgggaaccggaaaagcgggccagcagcctgcaagaaagagattgaatttcggtcagactggagacgcagactccgtacctgacccccagcctctcggacagccaccagcagcccccacaagtttgggatctactacaatggctacaggcagtggcgcaccaatggcagacaataacgagggtgccgatggagtgggtaattcctcaggaaattggcattgcgattcccaatggctgggcgacagagtcatcaccaccagcacccgaacctgggccctgcccacctacaacaaccacctctacaagcaaatctccagccaatcaggagcatcgaacgacaaccactactttggctacagcaccccttgggggtattttgacttcaacagattccactgccacttctccccacgtgactggcaaagactcatcaacaacaattggggattccggcccaaaagactcaacttcgagctctttaacattcaagtcaaggaggtcacgcagaatgacggtacgacgacgattgccaataaccttaccagcacggttcaggtgtttactgactcggagtaccagctcccgtacgtcctcggctcggcgcatcaaggatgcctcccgccgttcccagcagacgtcttcatggtgccacagtatggatacctcaccctgaacaacgggagtcaggcggtaggacgctcttcattttactgcctggagtactttccttctcagatgctgcgtaccggaaacaactttaccttcagctacacctttgaggacgttccttttcacagcagctacgctcacagccagagtttggaccgtctcatgaatcctctcatcgaccagtacctgtattacttgagcagaacaaacactccaagcggaaccactacgcagtccaggcttcagttttctcaagccggagcgagtgacattcgggaccagtctaggaactggcttcctggaccctgttaccgccagcagcgagtatcaaagacagctgcggacaacaacaacagtgattactcgtggactggagctaccaagtatcacctcaatggaagagactctctggtgaatccgggcacagccatggccagccacaaggacgatgaagaaaagtattttcctcagagcggggttctcatcttcggaaaacaagactcgggaaaaactaatgtggacattgaaaaggtcatgattacagacgaagaggaaatcaggaccaccaatcccgtggctacggagcagtatggttctgtatctaccaatctccagagcggcaacacacaagcagctacctcagatgtcaacacacaaggcgttcttccaggcatggtctggcaggacagagacgtgtacctgcagggacccatctgggcaaagattccacacacggacggacactttcacccttctcctcttatgggaggatttggactgaagcaccctcccccgcagattctcatcaagagtaccccggtacctgcgaatccttctaccaccttcagcgcggcaaagtttgcttccttcatcacacagtactccacggggcaggtcagcgtggagatcgagtgggagctgcagaaagagaacagcaaacgctggaaccccgagatccagtatacctccaactacaacaagtctgttaatgtggactttactgtggacactaatggcgtgtattcagagcctcgccccattggcacaagatacctgactcgtaatctgtaa

SEQ ID NO: 1090 - DNA, 2208 bp, Artificial Sequence
  Synthetic Polynucleotide
atggctgccgatggttatcttccagattggctcgaggacactctctctgaaggaataagacagtggtggaagctcaaacctggcccaccaccgccaaagcccgcagagcggcataaggacgacagcaggggtcttgtgcttcctgggtacaagtacctcggacccttcaacggactcgacaaaggagagccggtcaacgaggcagacgccgcggccctcgagcacgacaaggcctacgaccggcagctcgacagcggagacaacccgtacctcaagtacaaccacgccgacgcggagtttcaggagcgccttaaagaagatacgtcttttgggggcaacctcgcaagagcagtattccaggcgaaaaagagggttcttgaacctctgggcctggttgaggagcctgttaagacggctccgggaaaaaagaggccggtagagcactctcctgcggggccagattcctcctccggaactggaaagtcgggccaacagcctgcaagaaagagattgaattttggtcagactggagacgcagactccgtacctgacccccagcctctcggacagccaccagcagccccctctggtctgggaactaatacgatggcttcaggcagtggcgcaccaatggcagacaataacgagggcgccgacggagtgggtaattcctcgggaaattggcattgcgattccacatggatgggcgacagagtcatcaccaccagcacccgcacctgggctctgcccacctacaacaaccatctgtacaagcaaatttccagccagtctggagccagcaacgacaaccactactttggctacagcaccccttgggggtattttgacttcaacagattccactgccacttctccccacgtgactggcatagactcatcaacaacaattggggattccggcccaaaagactcaacttcgagctctttaacattcaagtcaaggaggtcacgcagaatgacggtacgacgacgattgccaataaccttaccagcacggttcaggtgtttactgactcggagtaccagctcccgtacgtcctcggctcggcgcatcaaggatgcctcccgccgttcccagcagacgtcttcatggtgccacagtatggatacctcaccctgaacaacgggagtcaggcggtaggacgctcttcattttactgcctggagtactttccttctcagatgctgcgtaccggaaacaactttaccttcagctacacctttgaggacgttccttttcacagcagctacgctcgcagccagagtttggaccgtctcatgaatcctctcatcgaccagtacctgtattacttgagcagaacaaacactccaagcggaaccactacgcagtccaggcttcagttttctcaagccggagcgagtgacattcgggaccagtctaggaactggcttcctggaccctgttaccgccagcagcgagtatcaaagacagctgcggacaacaacaacagtgattactcgtggactggagctaccaagtatcacctcaatggaagagactctctggtgaatccgggcacagccatggccagccacaaggacgatgaagaaaagtattttcctcagagcggggttctcatcttcggaaaacaagactcgggaaaaactaatgtggacattgaaaaggtcatgattacagacgaagaggaaatcaggaccaccaatcccgtggctacggagcagtatggttctgtatctaccaatctccagagcggcaacacacaagcagctacctcagatgtcaacacacaaggcgttcttccaggcatggtctggcaggacagagacgtgtacctgcagggacccatctgggcaaagattccacacacggacggacactttcacccttctcctcttatgggaggatttggactgaagcaccctcccccgcagattctcatcaagagtaccccggtacctgcgaatccttctaccaccttcagcgcggcaaagtttgcttccttcatcacacagtactccacggggcaggtcagcgtggagatcgagtgggagctgcagaaagagaacagcaaacgctggaaccccgagatccagtatacctccaactacaacaagtctgttaatgtggactttactgtggacactaatggcgtgtattcagagcctcgccccattggcacaagatacctgactcgtaatctgtaa

SEQ ID NO: 1091 - DNA, 2208 bp, Artificial Sequence
  Synthetic Polynucleotide
atggctgccgatggttatcttccagattggctcgaggacactctctctgaaggaataagacagtggtggaagctcaaacctggcccaccaccgccaaagcccgcagagcggcataaggacgacagcaggggtcttgtgcttcctgggtacaagtacctcggacccttcaacggactcgacaaaggagagccggtcaacgaggcagacgccgcggccctcgagcacgacaaggcctacgaccggcagctcgacagcggagacaacccgtacctcaagtacaaccacgccgacgcggagtttcaggagcgccttaaagaagatacgtcttttgggggcaacctcgcaagagcagtattccaggcgaaaaagagggttcttgaacctctgggcctggttgaggagcctgttaagacggctccgggaaaaaagaggccggtagagcactctcctgcggggccagattcctcctccggaactggaaagtcgggccaacagcctgcaagaaagagattgaattttggtcagactggagacgcagactccgtacctgacccccagcctctcggacagccaccagcagccccctctggtctgggaactaatacgatggcttcaggcagtggcgcaccaatggcagacaataacgagggcgccgacggagtgggtaattcctcgggaaattggcattgcgattccacatggatgggcgacagagtcatcaccaccagcacccgcacctgggctctgcccacctacaacaaccatctgtacaagcaaatttccagccagtctggagccagcaacgacaaccactactttggctacagcaccccttgggggtattttgacttcaacagattccactgccacttctccccacgtgactggcaaagactcatcaacaacaattggggattccggcccaaaagactcaacttcgagctctttaacattcaagtcaaggaggtcacgcagaatgacggtacgacgacgattgccaataaccttaccagcacggttcaggtgtttactgactcggagtaccagctcccgtacgtcctcggctcggcgcatcaaggatgcctcccgccgttcccagcagacgtcttcatggtgccacagtatggatacctcaccctgaacaacgggagtcaggcggtaggacgctcttcattttactgcctggagtactttccttctcagatgctgcgtaccggaaacaactttaccttcagctacacctttgaggacgttccttttcacagcagctacgctcacagccagagtttggaccgtctcatgaatcctctcatcgaccagtacctgtattacttgagcagaacaaacactccaagcggaaccactacgcagtccaggcttcagttttctcaagccggagcgagtgacattcgggaccagtctaggaactggcttcctggaccctgttaccgccagcagcgagtatcaaagacagctgcggacaacaacaacagtgattactcgtggactggagctaccaagtatcacctcaatggaagagactctctggtgaatccgggcacagccatggccagccacaaggacgatgaagaaaagtattttcctcagagcggggttctcatcttcggaaaacaagactcgggaaaaactaatgtggacattgaaaaggtcatgattacagacgaagaggaaatcaggaccaccaatcccgtggctacggagcagtatggttctgtatctaccaatctccagagcggcaacacacaagcagctacctcagatgtcaacacacaaggcgttcttccaggcatggtctggcaggacagagacgtgtacctgcagggacccatctgggcaaagattccacacacggacggacactttcacccttctcctcttatgggaggatttggactgaagcaccctcccccgcagattctcatcaagagtaccccggtacctgcgaatccttctaccaccttcagcgcggcaaagtttgcttccttcatcacacagtactccacggggcaggtcagcgtggagatcgagtgggagctgcagaaggagaacagcaaacgctggaaccccgagatccagtacacttccaactacaacaaatctgttaatgtggactttactgtggacgctaatggtgtgtattcagagcctcgccccattggcaccagatacctgactcgtaatctgtaa

SEQ ID NO: 1092 - DNA, 2208 bp, Artificial Sequence
  Synthetic Polynucleotide
atggctgccgatggttatcttccagattggctcgaggacactctctctgaaggaataagacagtggtggaagctcaaacctggcccaccaccgccaaagcccgcagagcggcataaggacgacagcaggggtcttgtgcttcctgggtacaagtacctcggacccttcaacggactcgacaaaggagagccggtcaacgaggcagacgccgcggccctcgagcacgacaaggcctacgaccggcagctcgacagcggagacaacccgtacctcaagtacaaccacgccgacgcggagtttcaggagcgccttaaagaagatacgtcttttgggggcaacctcgcaagagcagtattccaggcgaaaaagagggttcttgaacctctgggcctggttgaggagcctgttaagacggctccgggaaaaaagaggccggtagagcactctcctgcggggccagattcctcctccggaactggaaagtcgggccaacagcctgcaagaaagagattgaattttggtcagactggagacgcagactccgtacctgacccccagcctctcggacagccaccagcagccccctctggtctgggaactaatacgatggcttcaggcagtggcgcaccaatggcagacaataacgagggcgccgacggagtgggtaattcctcgggaaattggcattgcgattccacatggatgggcgacagagtcatcaccaccagcacccgcacctgggctctgcccacctacaacaaccatctgtacaagcaaatttccagccagtctggagccagcaacgacaaccactactttggctacagcaccccttgggggtattttgacttcaacagattccactgccacttctccccacgtgactggcaaagactcatcaacaacaatttgggattccgggccaaaagactcaacttcgagctctttaacattcaagtcaaggaggtcacgcagaatgacggtacgacgacgattgccaataaccttaccagcacggttcaggtgtttactgactcggagtaccagctcccgtacgtcctcggctcggcgcatcaaggatgcctcccgccgttcccagcagacgtcttcatggtgccacagtatggatacctcaccctgaacaacgggagtcaggcggtaggacgctcttcattttactgcctggagtactttccttctcagatgctgcgtaccggaaacaactttaccttcagctacacctttgaggacgttccttttcacagcagctacgctcacagccagagtttggaccgtctcatgaatcctctcatcgaccagtacctgtattacttgagcagaacaaacactccaagcggaaccactacgcagtccaggcttcagttttctcaagccggagcgagtgacattcgggaccagtctaggaactggcttcctggaccctgttaccgccagcagcgagtatcaaagacagctgcggacaacaacaacagtgattactcgtggactggagctaccaagtatcacctcaatggaagagactctctggtgaatccgggcacagccatggccagccacaaggacgatgaagaaaagtattttcctcagagcggggttctcatcttcggaaaacaagactcgggaaaaactaatgtggacattgaaaaggtcatgattacagacgaagaggaaatcaggaccaccaatcccgtggctacggagcagtatggttctgtatctaccaatctccagagcggcaacacacaagcagctacctcagatgtcaacacacaaggcgttcttccaggcatggtctggcaggacagagacgtgtacctgcagggacccatctgggcaaagattccacacacggacggacactttcacccttctcctcttatgggaggatttggactgaagcaccctcccccgcagattctcatcaagagtaccccggtacctgcgaatccttctaccaccttcagcgcggcaaagtttgcttccttcatcacacagtactccacggggcaggtcagcgtggagatcgagtgggagctgcagaaagagaacagcaaacgctggaaccccgagatccagtatacctccaactacaacaagtctgttaatgtggactttactgtggacactaatggcgtgtattcagagcctcgccccattggcacaagatacctgactcgtaatctgtaa

SEQ ID NO: 1093 - DNA, 2208 bp, Artificial Sequence
  Synthetic Polynucleotide
atggctgccgatggttatcttccagattggctcgaggacactctctctgaaggaataagacagtggtggaagctcaaacctggcccaccaccgccaaagcccgcagagcggcataaggacgacagcaggggtcttgtgcttcctgggtacaagtacctcggacccttcaacggactcgacaaaggagagccggtcaacgaggcagacgccgcggccctcgagcacgacaaggcctacgaccggcagctcgacagcggagacaacccgtacctcaagtacaaccacgccgacgcggagtttcaggagcgccttaaagaagatacgtcttttgggggcaacctcgcaagagcagtattccaggcgaaaaagagggttcttgaacctctgggcctggttgaggagcctgttaagacggctccgggaaaaaagaggccggtagagcactctcctgcggagccagattcctcctccggaactggaaagtcgggccaacagcctgcaagaaagagattgaattttggtcagactggagacgcagactccgtacctgacccccagcctctcggacagccaccagcagccccctctggtctgggaactaatacgatggcttcaggcagtggcgcaccaatggcagacaataacgagggcgccgacggagtgggtaattcctcgggaaattggcattgcgattccacatggatgggcgacagagtcatcaccaccagcacccgcacctgggctctgcccacctacaacaaccatctgtacaagcaaatttccagccagtctggagccagcaacgacaaccactactttggctacagcaccccttgggggtattttgacttcaacagattccactgccacttctccccacgtgactggcaaagactcatcaacaacaattggggattccggcccaaaagactcaacttcgagctctttaacattcaagtcaaggaggtcacgcagaatgacggtacgacgacgattgccaataaccttaccagcacggttcaggtgtttactgactcggagtaccagctcccgtacgtcctcggctcggcgcatcaaggatgcctcccgccgttcccagcagacgtcttcatggtgccacagtatggatacctcaccctgaacaacgggagtcaggcggtaggacgctcttcattttactgcctggagtactttccttctcagatgctgcgtaccggaaacaactttaccttcagctacacctttgaggacgttccttttcacagcagctacgctcacagccagagtttggaccgtctcatgaatcctctcatcgaccagtacctgtattacttgagcagaacaaacactccaagcggaaccactacgcagtccaggcttcagttttctcaagccggagcgagtgacattcgggaccagtctaggaactggcttcctggaccctgttaccgccagcagcgagtatcaaagacagctgcggacaacaacaacagtgattactcgtggactggagctaccaagtatcacctcaatggaagagactctctggtgaatccgggcacagccatggccagccacaaggacgatgaagaaaagtattttcctcagagcggggttctcatcttccggaaacaagactcgggaaaaactaatgtggacattgaaaaggtcatgattacagacgaagaggaaatcaggaccaccaatcccgtggctacggagcagtatggttctgtatctaccaatctccagagcggcaacacacaagcagctacctcagatgtcaacacacaaggcgttcttccaggcatggtctggcaggacagagacgtgtacctgcagggacccatctgggcaaagattccacacacggacggacactttcacccttctcctcttatgggaggatttggactgaagcaccctcccccgcagattctcatcaagagtaccccggtacctgcgaatccttctaccaccttcagcgcggcaaagtttgcttccttcatcacacagtactccacggggcaggtcagcgtggagatcgagtgggagctgcagaaagagaacagcaaacgctggaaccccgagatccagtatacctccaactacaacaagtctgttaatgtggactttactgtggacactaatggcgtgtattcagagcctcgccccattggcacaagatacctgactcgtaatctgtaa

SEQ ID NO: 1094 - DNA, 2208 bp, Artificial Sequence
  Synthetic Polynucleotide
atggctgccgatggttatcttccagattggctcgaggacactctctctgaaggaataagacagtggtggaagctcaaacctggcccaccaccaccaaagcccgcagagcggcatcaggacgacagcaggggtcttgtgcttcccgggcacaagtacctcggacccttcaacggactcgacaaaggagagccggtcaacgaggcagacgctgcggccctcgagcacgacaaggcctacgaccggcagctcgacagcggagacaacccgtacctcaagtacaaccacgccgacgcggagtttcaggagcgtcttaaagaagatacgtcttttgggggcaacctcggacgagcagtcttccaggcgaaaaagagggttcttgaacctctgggcctggttgaggagcctgttaagacggctccgggaaaaaagaggccggtagagcactctcctgcggggccagattcctcctccggaactggaaagtcgggccaacagcctgcaagaaagagattgaattttggtcagactggagacgcagactccgtacctgacccccagcctctcggacagccaccagcagccccctctggtctgggaactaatacgatggcttcaggcagtggcgcaccaatggcagacaataacgagggcgccgacggagtgggtaattcctcgggaaattggcattgcgattccacatggatgggcgacagagtcatcaccaccagcacccgcacctgggctctgcccacctacaacaaccatctgtacaagcaaatttccagccagtctggagccagcaacgacaaccactactttggctacagcaccccttgggggtattttgacttcaacagattccactgccacttctccccacgtgactggcaaagactcatcaacaacaattggggattccggcccaaaagactcaacttcgagctctttaacattcaagtcaaggaggtcacgcagaatgacggtacgacgacgattgccaataaccttaccagcacggttcaggtgtttactgactcggagtaccagctcccgtacgtcctcggctcggcgcatcaaggatgcctcccgccgttcccagcagacgtcttcatggtgccacagtatggatacctcaccctgaacaacgggagtcaggcggtaggacgctcttcattttactgcctggagtactttccttctcagatgctgcgtaccggaaacaactttaccttcagctacacctttgaggacgttccttttcacagcagctacgctcacagccagagtttggaccgtctcatgaatcctctcatcgaccagtacctgtattacttgagcagaacaaacactccaagcggaaccactacgcagtccaggcttcagttttctcaagccggagcgagtgacattcgggaccagtctaggaactggcttcctggaccctgttaccgccagcagcgagtatcaaagacagctgcggacaacaacaacagtgattactcgtggactggagctaccaagtatcacctcaatggaagagactctctggtgaatccgggcacagccatggccagccacaaggacgatgaagaaaagtattttcctcagagcggggttctcatcttcggaaaacaagactcgggaaaaactaatgtggacattgaaaaggtcatgattacagacgaagaggaaatcaggaccaccaatcccgtggctacggagcagtatggttctgtatctaccaatctccagagcggcaacacacaagcagctacctcagatgtcaacacacaaggcgttcttccaggcatggtctggcaggacagagacgtgtacctgcagggacccatctgggcaaagattccacacacggacggacactttcacccttctcctcttatgggaggatttggactgaagcaccctcccccgcagattctcatcaagagtaccccggtacctgcgaatccttctaccaccttcagcgcggcaaagtttgcttccttcatcacacagtactccacggggcaggtcagcgtggagatcgagtgggagctgcagaaagagaacagcaaacgctggaaccccgagatccagtatacctccaactacaacaagtctgttaatgtggactttactgtggacactaatggcgtgtattcagagcctcgccccattggcacaagatacctgactcgtaatctgtaa

SEQ ID NO: 1095 - DNA, 2208 bp, Artificial Sequence
  Synthetic Polynucleotide
atggctgccgatggttatcttccagattggctcgaggacactctctctgaaggaataagacagtggtggaagctcaaacctggcccaccaccgccaaagcccgcagagcggcataaggacgacagcaggggtcttgtgcttcctgggtacaagtacctcggacccttcaacggactcgacaaaggagagccggtcaacgaggcagacgccgcggccctcgagcacgacaaggcctacgaccggcagctcgacagcggagacaacccgtacctcaagtacaaccacgccgacgcggagtttcaggagcgccttaaagaagatacgtcttttgggggcaacctcgcaagagcagtattccaggcgaaaaagagggttcttgaacctctgggcctggttgaggagcctgttaagacggctccgggaaaaaagaggccggtagagcactctcctgcggggccagattcctcctccggaactggaaagtcgggccaacagcctgcaagaaagagattgaattttggtcagactggagacgcagactccgtacctgacccccagcctctcggacagccaccagcagccccctctggtctgggaactaatacgatggcttcaggcagtggcgcaccaatggcagacaataacgagggcgccgacggagtgggtaattcctcgggaaattggcattgcgattccacatggatgggcgacagagtcatcaccaccagcacccgcacctgggctctgcccacctacaacaaccatctgtacaagcaaatttccagccagtctggagccagcaacgacaaccactactttggctacagcaccccttgggggtattttgacttcaacagattccactgccacttctccccacgtgactggcatagactcatcaacaacaattggggattccggcccaaaagactcaacttcgagctctttaacattcaagtcaaggaggtcacgcagaatgacggtacgacgacgattgccaataaccttaccagcacggttcaggtgtttactgactcggagtaccagctcccgtacgtcctcggctcggcgcatcaaggatgcctcccgccgttcccagcagacgtcttcatggtgccacagtatggatacctcaccctgaacaacgggagtcaggcggtaggacgctcttcattttactgcctggagtactttccttctcagatgctgcgtaccggaaacaactttaccttcagctacacctttgaggacgttccttttcacagcagctacgctcacagccagagtttggaccgtctcatgaatcctctcatcgaccagtacctgtattacttgagcagaacaaacactccaagcggaaccactacgcagtccaggcttcagttttctcaagccggagcgagtgacattcgggaccagtctaggaactggcttcctggaccctgttaccgccagcagcgagtatcaaagacagctgcggacaacaacaacagtgattactcgtggactggagctaccaagtatcacctcaatggaagagactctctggtgaatccgggcacagccatggccagccacaaggacgatgaagaaaagtattttcctcagagcggggttctcatcttcggaaaacaagactcgggaaaaactaatgtggacattgaaaaggtcatgattacagacgaagaggaaatcaggaccaccaatcccgtggctacggagcagtatggttctgtatctaccaatctccagagcggcaacacacaagcagctacctcagatgtcaacacacaaggcgttcttccaggcatggtctggcaggacagagacgtgtacctgcagggacccatctgggcaaagattccacacacggacggacactttcacccttctcctcttatgggaggatttggactgaagcaccctcccccgcagattctcatcaagagtaccccggtacctgcgaatccttctaccaccttcagcgcggcaaagtttgcttccttcatcacacagtactccacggggcaggtcagcgtggagatcgagtgggagctgcagaaagagaacagcaaacgctggaaccccgagatccagtatacctccaactacaacaagtctgttaatgtggactttactgtggacactaatggcgtgtattcagagcctcgccccattggcacaagatacctgactcgtaatctgtaa

SEQ ID NO: 1096 - DNA, 2208 bp, Artificial Sequence
  Synthetic Polynucleotide
atggctgccgatggttatcttccagattggctcgaggacactctctctgaaggaataagacagtggtggaagctcaaacctggcccaccaccgccaaagcccgcagagcggcataaggacgacagcaggggtcttgtgcttcctgggtacaagtacctcggacccttcaacggactcgacaagggggagccggtcaacgaggcagacgccgcggccctcgagcacgacaaggcctacgaccggcagctcgacagcggagacaacccgtacctcaagtacaaccacgccgacgcggagtttcaggagcgtcttaaagaagatacgtcttttgggggcaacctcggacgagcagtcttccaggcgaaaaagagggttcttgaacctctgggcctggttgaggaacctgttaagacggctccgggaaaaaagaggccggtagagcactctcctgtggagccagactcctcctcgggaaccggaaaggcgggccagcagcctgcaagaaaaagattgaatttcggtcagactggagacgcagactccgtacctgacccccagcctctcggacagccaccagcagccccctctggtctgggaactaatacgatggctacaggcagtggcgcaccaatggcagacaataacgagggcgccgacggagtgggtaattcctcgggaaattggcattgcgattccacatggatgggcgacagagtcatcaccaccagcacccgcacctgggctctgcccacctacaacaaccatctgtacaagcaaatttccagccaatcaggagcatcgaacgacaaccactactttggctacagcaccccctgggggtattttgacttcaacagattccactgccacttttcgccacgtgactggcaaagactcatcaacaacaactggggattccggcccaagagactcagcttcaagctctttaacattcaagtcaaggaggtcacgcagaatgacggtacgacgacgattgccaataaccttaccagcacggttcaggtctttactgactcggagtaccagctcccgtacgtcctcggctcggcgcatcaaggatgcctcccgccgttcccagcagacgtcttcatggtgccacagtatggatacctcaccctgaacaacgggagtcaggcggtaggacgctcttcattttactgcctggagtacttcccttctcagatgcttcgcacgggaaacaactttaccttcagctacacctttgaggacgtgccttttcacagcggctacgctcacagccaaagtctggaccgtctcatgaatcctctcatcgaccaatacctgtattacttgagcaaaacaaacgctccaagcggaaccaccacgatgtccaggcttcagttttctcaggccggagcgagtgacattcgggaccagtctagaaactggcttcctggaccctgttaccgccagcagcgagtatcaaagacagctgcggacaacaacaacagtgattactcgtggactggagctaccaagtaccacctcaatggaagagactctctggtgaacccgggcccagctatggccagccacaaggatgatgaagaaaaatattttcctcagagcggggttctcatcttcgggaaacaaggctcaaataaaactaatgtggacattgaaaaggttatgattacagacgaagaggaaatcaggaccaccaatcccgtggctacggagcagtatggttctgtatctaccaaccttcaaagcggcaacacacaagcagctacctcagatgtcaacacacaaggcgttcttcctggcatggtctggcaggacagagatgtgtacctgcaggggcccatctgggcaaagattcctcacacggacggacactttcacccttctcccctcatgggcggatttggattgaagcaccctcccccacagattctcatcaagaataccccggtacctgcgaatccttcgaccaccttcagtgcggcaaagtttgcttccttcatcacacagtattccacgggacaggtcagcgtggagatagagtgggagctgcagaaggagaacagcaaacgctggaaccccgagatccagtatacttccaactacaacaaatctgttaatgtggactttactgtggacactaatggtgtgtattcagagcctcgccccattggcaccagatacctgactcgtaatctgtaa

SEQ ID NO: 1097 - DNA, 2208 bp, Artificial Sequence
  Synthetic Polynucleotide
atggctgccgatggttatcttccagattggctcgaggacactctctctgaaggaataagacagtggtggaagctcaaacctggcccaccaccaccaaggcccgcagagcggcatcaggacgacagcaggggtcttgtgcttcctgggtacaagtacctcggacccttcaacggactcgacaaaggagagccggtcaacgaggcagacgctgcggccctcgagcacgacaaggcctacgaccggcagctcgacagcggagacaacccgtacctcaagtacaaccacgccgacgcggagtttcaggagcgtcttaaagaagatacgtcttttgggggcaacctcggacgagcagtcttccaggcgaaaaagagggttcttgaacctctgggcctggttgaggaacctgttaagacggctccgggaaaaaagaggccggtagagcactctcctgcggagccagactcctcctcgggaaccggaaaagcgggccagcagcctgcaagaaagagattgaatttcggtcagactggagacgcagactccgtacctgacccccagcctctcggacagccaccagcagcccccacaagtttgggatctactacaatggctacaggcagtggcgcaccaatggcagacaataacgagggcgccgacggagtgggtaattcctcgggaaattggcattgcgattccacatggatgggcgacagagtcatcaccaccagcacccgcacctgggctctgcccacctacaacaaccatctgtacaagcaaatttccagccagtctggagccagcaacgacaaccactactttggctacagcaccccttgggggtattttgacttcaacagattccactgccacttctccccacgtgactggcaaagactcatcaacaacaattggggattccggcccaaaagactcaacttcgagctctttaacattcaagtcaaggaggtcacgcagaatgacggtacgacgacgattgccaataaccttaccagcacggttcaggtgtttactgactcggagtaccagctcccgtacgtcctcggctcggcgcatcaaggatgcctcccgccgttcccagcagacgtcttcatggtgccacagtatggatacctcaccctgaacaacgggagtcaggcggtaggacgctcttcattttactgcctggagtactttccttctcagatgctgcgtaccggaaacaactttaccttcagctacacctttgaggacgttccttttcacagcagctacgctcacagccagagtttggaccgtctcatgaatcctctcatcgaccagtacctgtattacttgagcagaacaaacactccaagcggaaccactacgcagtccaggcttcagttttctcaagccggagcgagtgacattcgggaccagtctaggaactggcttcctggaccctgttaccgccagcagcgagtatcaaagacagctgcggacaacaacaacagtgattactcgtggactggagctaccaagtatcacctcaatggaagagactctctggtgaatccgggcacagccatggccagccacaaggacgatgaagaaaagtattttcctcagagcggggttctcatcttcggaaaacaagactcgggaaaaactaatgtggacattgaaaaggtcatgattacagacgaagaggaaatcaggaccaccaatcccgtggctacggagcagtatggttctgtatctaccaatctccagagcggcaacacacaagcagctacctcagatgtcaacacacaaggcgttcttccaggcatggtctggcaggacagagacgtgtacctgcagggacccatctgggcaaagattccacacacggacggacactttcacccttctcctcttatgggaggatttggactgaagcaccctcccccgcagattctcatcaagagtaccccggtacctgcgaatccttctaccaccttcagcgcggcaaagtttgcttccttcatcacacagtactccacggggcaggtcagcgtggagatcgagtgggagctgcagaaagagaacagcaaacgctggaaccccgagatccagtatacctccaactacaacaagtctgttaatgtggactttactgtggacactaatggcgtgtattcagagcctcgccccattggcacaagatacctgactcgtaatctgtaa

SEQ ID NO: 1098 - DNA, 2208 bp, Artificial Sequence
  Synthetic Polynucleotide
atggctgccgatggttatcttccagattggctcgaggacactctctctgaaggaataagacagtggtggaagctcaaacctggcccaccaccaccaaagcccgcagagcggcatcaggacgacagcaggggtcttgtgcttcccgggcacaagtacctcggacccttcaacggactcgacaaaggagagccggtcaacgaggcagacgctgcggccctcgagcacgacaaggcctacgaccggcagctcgacagcggagacaacccgtacctcaagtacaaccacgccgacgcggagtttcaggagcgtcttaaagaagatacgtcttttgggggcaacctcggacgagcagtcttccaggcgaaaaagagggttcttgaacctctgggcctggttgaggaacctgttaagacggctccgggaaaaaagaggccggtagagcactctcctgcggagccagactcctcctcgggaaccggaaaagcgggccagcagcctgcaagaaagagattgaatttcggtcagactggagacgcagactccgtacctgacccccagcctctcggacagccaccagcagccccctctggtctgggaactaatacgatggcttcaggcagtggcgcaccaatggcagacaataacgagggcgccgacggagtgggtaattcctcgggaaattggcattgcgattccacatggatgggcgacagagtcatcaccaccagcacccgcacctgggctctgcccacctacaacaaccatctgtacaagcaaatttccagccagtctggagccagcaacgacaaccactactttggctacagcaccccttgggggtattttgacttcaacagattccactgccacttctccccacgtgactggcaaagactcatcaacaacaattggggattccggcccaaaagactcaacttcgagctctttaacattcaagtcaaggaggtcacgcagaatgacggtacgacgacgattgccaataaccttaccagcacggttcaggtgtttactgactcggagtaccagctcccgtacgtcctcggctcggcgcatcaaggatgcctcccgccgttcccagcagacgtcttcatggtgccacagtatggatacctcaccctgaacaacgggagtcaggcggtaggacgctcttcattttactgcctggagtactttccttctcagatgctgcgtaccggaaacaactttaccttcagctacacctttgaggacgttccttttcacagcagctacgctcacagccagagtttggaccgtctcatgaatcctctcatcgaccagtacctgtattacttgagcagaacaaacactccaagcggaaccactacgcagtccaggcttcagttttctcaagccggagcgagtgacattcgggaccagtctaggaactggcttcctggaccctgttaccgccagcagcgagtatcaaagacagctgcggacaacaacaacagtgattactcgtggactggagctaccaagtatcacctcaatggaagagactctctggtgaatccgggcacagccatggccagccacaaggacgatgaagaaaagtattttcctcagagcggggttctcatcttcggaaaacaagactcgggaaaaactaatgtggacattgaaaaggtcatgattacagacgaagaggaaatcaggaccaccaatcccgtggctacggagcagtatggttctgtatctaccaatctccagagcggcaacacacaagcagctacctcagatgtcaacacacaaggcgttcttccaggcatggtctggcaggacagagacgtgtacctgcagggacccatctgggcaaagattccacacacggacggacactttcacccttctcctcttatgggaggatttggactgaagcaccctcccccgcagattctcatcaagagtaccccggtacctgcgaatccttctaccaccttcagcgcggcaaagtttgcttccttcatcacacagtactccacggggcaggtcagcgtggagatcgagtgggagctgcagaaagagaacagcaaacgctggaaccccgagatccagtatacctccaactacaacaagtctgttaatgtggactttactgtggacactaatggcgtgtattcagagcctcgccccattggcacaagatacctgactcgtaatctgtaa

SEQ ID NO: 1099 - DNA, 2208 bp, Artificial Sequence
  Synthetic Polynucleotide
atggctgccgatggttatcttccagattggctcgaggacactctctctgaaggaataagacagtggtggaagctcaaacctggcccaccaccgccaaagcccgcagagcggcataaggacgacagcaggggtcttgtgcttcctgggtacaagtacctcggacccttcaacggactcgacaaaggagagccggtcaacgaggcagacgccgcggccctcgagcacgacaaggcctacgaccggcagctcgacagcggagacaacccgtacctcaagtacaaccacgccgacgcggagtttcaggagcgccttaaagaagatacgtcttttgggggcaacctcgcaagagcagtattccaggcgaaaaagagggttcttgaacctctgggcctggttgaggagcctgttaagacggctccgggaaaaaagaggccggtagagcactctcctgcggagccagattcctcctccggaactggaaagtcgggccaacagcctgcaagaaagagattgaattttggtcagactggagacgcagactccgtacctgacccccagcctctcggacagccaccagcagccccctctggtctgggaactaatacgatggcttcaggcagtggcgcaccaatggcagacaataacgagggcgccgacggagtgggtaattcctcgggaaattggcattgcgattccacatggatgggcgacagagtcatcaccaccagcacccgcacctgggctctgcccacctacaacaaccatctgtacaagcaaatttccagccagtctggagccagcaacgacaaccactactttggctacagcaccccttgggggtattttgacttcaacagattccactgccacttctccccacgtgactggcaaagactcatcaacaacaattggggattccggcccaaaagactcaacttcaagctctttaacattcaagtcaaggaggtcacgcagaatgacggtacgacgacgattgccaataaccttaccagcacggttcaggtgtttactgactcggagtaccagctcccgtacgtcctcggctcggcgcatcaaggatgcctcccgccgttcccagcagacgtcttcatggtgccacagtatggatacctcaccctgaacaacgggagtcaggcggtaggacgctcttcattttactgcctggagtactttccttctcagatgctgcgtaccggaaacaactttaccttcagctacacctttgaggacgttccttttcacagcagctacgctcacagccagagtttggaccgtctcatgaatcctctcatcgaccagtacctgtattacttgagcagaacaaacactccaagcggaaccactacgcagtccaggcttcggttttctcaagccggagcgagtgacattcgggaccagtctaggaactggcttcctggaccctgttaccgccagcagcgagtatcaaagacagctgcggacaacaacaacagtgattactcgtggactggagctaccaagtatcacctcaatggaagagactctctggtgaatccgggcacagccatggccagccacaaggacgatgaagaaaagtattttcctcagagcggggttctcatcttcggaaaacaagactcggaaaaaactaatgtggacattgaaagggtcatgattacagacgaagaggaaatcaggaccaccaatcccgtggctacggagcagtatggttctgtatctaccaatctccagagcggcaacacacaagcagctacctcagatgtcaacacacaaggcgttcttccaggcatggtctggcaggacagagacgtgtacctgcagggacccatctgggcaaagattccacacacggacggacattttcacccttctcctcttatgggaggatttggactgaagcaccctcccccgcagattctcatcaagaataccccggtacctgcgaatccttctaccaccttcagcgcggcaaagtttgcttccttcatcacacagtactccacggggcaggtcagcgtggagatcgagtgggagctgcagaaagagaacagcaaacgctggaaccccgagatccagtatacctccaactacaacaagtctgttaatgtggactttactgtggacactaatggcgtgtattcagagcctcgccccattggcacaagatacctgactcgtaatctgtaa

SEQ ID NO: 1100 - DNA, 2208 bp, Artificial Sequence
  Synthetic Polynucleotide
atggctgccgatggttatcttccagattggctcgaggacactctctctgaaggaataagacagtggtggaagctcaaacctggcccaccaccaccaaagcccgcagagcggcatcaggacgacagcaggggtcttgtgcttcctgggtacaagtacctcggacccttcaacggactcgacaaaggagagccggtcaacgaggcagacgccgcggccctcgagcacgacaaggcctacgaccggcagctcgacagcggagacaacccgtacctcaagtacaaccacgccgacgcggagtttcaggagcgtcttaaagaagatacgtcttttgggggcaacctcggacgagcagtcttccaggcgaaaaagagggttcttgaacctctgggcctggttgaggaacctgttaagacggctccgggaaaaaagaggccggtagagcactctcctgtggagccagactcctcctcgggaaccggaaaggcgggccagcagcctgcaagaaaaagattgaatttcggtcagactggagacgcagactccgtacctgacccccagcctctcggacagccaccagcagccccctctggtctgggaactaatacgatggctacaggcagtggcgcaccaatggcagacaataacgagggcgccgacggagtgggtaattcctcgggaaattggcattgcgattccacatggatgggcgacagagtcatcaccaccagcacccgcacctgggctctgcccacctacaacaaccatctgtacaagcaaatttccagccaatcaggagcatcgaacgacaaccactactttggctacagcaccccctgggggtattttgacttcaacagattccactgccacttttcgccacgtgactggcaaagactcatcaacaacaactggggattccggcccaagagactcagcttcaagctctttaacattcaagtcaaggaggtcacgcagaatgacggtacgacgacgattgccaataaccttaccagcacggttcaggtctttactgactcggagtaccagctcccgtacgtcctcggctcggcgcatcaaggatgcctcccgccgttcccagcagacgtcttcatggtgccacagtatggatacctcaccctgaacaacgggagtcaggcggtaggacgctcttcattttactgcctggagtacttcccttctcagatgcttcgcacgggaaacaactttaccttcagctacacctttgaggacgtgccttttcacagcagctacgctcacagccaaagtctggaccgtctcatgaatcctctcatcgaccaatacctgtattacttgagcaaaacaaacgctccaagcggaaccaccacgatgtccaggcttcagttttctcaggccggagcgagtgacattcgggaccagtctagaaactggcttcctggaccctgttaccgccagcagcgagtatcaaagacagctgcggacaacaacaacagtgattactcgtggactggagctaccaagtaccacctcaatggaagagactctctggtgaacccgggcccagctatggccagccacaaggatgatgaagaaaaatattttcctcagagcggggttctcatcttcgggaaacaaggctcaaataaaactaatgtggacattgaaaaggttatgattacagacgaagaggaaatcaggaccaccaatcccgtggctacggagcagtatggttctgtatctaccaaccttcaaagcggcaacacacaagcagctacctcagatgtcaacacacaaggcgttcttcctggcatggtctggcaggacagagatgtgtacctgcaggggcccatctgggcaaagattcctcacacggacggacactttcacccttctcccctcatgggcggatttggattgaagcaccctcccccacagattctcatcaagaataccccggtacctgcgaatccttcgaccaccttcagtgcggcaaagtttgcttccttcatcacacagtattccacgggacaggtcagcgtggagatagagtgggagctgcagaaggagaacagcaaacgctggaaccccgagatccagtatacttccaactacaacaaatctgttaatgtggactttactgtggacactaatggtgtgtattcagagcctcgccccattggcaccagatacctgactcgtaatctgtaa

SEQ ID NO: 1101 - DNA, 2208 bp, Artificial Sequence
  Synthetic Polynucleotide
atggctgccgatggttatcttccagattggctcgaggacactctctctgaaggaataagacagtggtggaagctcaaacctggcccaccaccaccaaggcccgcagagcggcatcaggacgacagcaggggtcttgtgcttcctgggtacaagtacctcggacccttcaacggactcgacaaaggagagccggtcaacgaggcagacgctgcggccctcgagcacgacaaggcctacgaccggcagctcgacagcggagacaacccgtacctcaagtacaaccacgccgacgcggagtttcaggagcgtcttaaagaagatacgtcttttgggggcaacctcggacgagcagtcttccaggcgaaaaagagggttcttgaacctctgggcctggttgaggaacctgttaagacggctccgggaaaaaagaggccggtagagcactctcctgcggggccagattcctcctccggaactggaaagtcgggccaacagcctgcaagaaagagattgaattttggtcagactggagacgcagactccgtacctgacccccagcctctcggacagccaccagcagccccctctggtctgggaactaatacgatggcttcaggcagtggcgcaccaatggcagacaataacgagggcgccgacggagtgggtaattcctcgggaaattggcattgcgattccacatggatgggcgacagagtcatcaccaccagcacccgcacctgggctctgcccacctacaacaaccatctgtacaagcaaatttccagccagtctggagccagcaacgacaaccactactttggctacagcaccccttgggggtattttgacttcaacagattccactgccacttctccccacgtgactggcaaagactcatcaacaacaattggggattccgggccaaaagactcaacttcgagctctttaacattcaagtcaaggaggtcacgcagaatgacggtacgacgacgattgccaataaccttaccagcacggttcaggtgtttactgactcggagtaccagctcccgtacgtcctcggctcggcgcatcaaggatgcctcccgccgttcccagcagacgtcttcatggtgccacagtatggatacctcaccctgaacaacgggagtcaggcggtaggacgctcttcattttactgcctggagtactttccttctcagatgctgcgtaccggaaacaactttaccttcagctacacctttgaggacgttccttttcacagcagctacgctcacagccagagtttggaccgtctcatgaatcctctcatcgaccagtacctgtattacttgagcagaacaaacactccaagcggaaccactacgcagtccaggcttcagttttctcaagccggagcgagtgacattcgggaccagtctaggaactggcttcctggaccctgttaccgccagcagcgagtatcaaagacagctgcggacaacaacaacagtgattactcgtggactggagctaccaagtatcacctcaatggaagagactctctggtgaatccgggcacagccatggccagccacaaggacgatgaagaaaagtattttcctcagagcggggttctcatcttcggaaaacaagactcgggaaaaactaatgtggacattgaaaaggtcatgattacagacgaagaggaaatcaggaccaccaatcccgtggctacggagcagtatggttctgtatctaccaatctccagagcggcaacacacaagcagctacctcagatgtcaacacacaaggcgttcttccaggcatggtctggcaggacagagacgtgtacctgcagggacccatctgggcaaagattccacacacggacggacactttcacccttctcctcttatgggaggatttggactgaagcaccctcccccgcagattctcatcaagagtaccccggtacctgcgaatccttctaccaccttcagcgcggcaaagtttgcttccttcatcacacagtactccacggggcaggtcagcgtggagatcgagtgggagctgcagaaagagaacagcaaacgctggaaccccgagatccagtatacctccaactacaacaagtctgttaatgtggactttactgtggacactaatggcgtgtattcagagcctcgccccattggcacaagatacctgactcgtaatctgtaa

SEQ ID NO: 1102 - DNA, 2208 bp, Artificial Sequence
  Synthetic Polynucleotide
atggctgccgatggttatcttccagattggctcgaggacactctctctgaaggaataagacagtggtggaagctcaaacctggcccaccaccgccaaagcccgcagagcggcataaggacgacagcaggggtcttgtgcttcctgggtacaagtacctcggacccttcaacggactcgacaaaggagagccggtcaacgaggcagacgccgcggccctcgagcacgacaaggcctacgaccggcagctcgacagcggagacaacccgtacctcaagtacaaccacgccgacgcggagtttcaggagcgccttaaagaagatacgtcttttgggggcaacctcgcaagagcagtattccaggcgaaaaagagggttcttgaacctctgggcctggttgaggagcctgttaagacggctccgggaaaaaagaggccggtagagcactctcctgcggggccagattcctcctccggaactggaaagtcgggccaacagcctgcaagaaagagattgaattttggtcagactggagacgcagactccgtacctgacccccagcctctcggacagccaccagcagccccctctggtctgggaactaatacgatggcttcaggcagtggcgcaccaacggcagacaataacgagggcgccgacggagtgggtaattcctcgggaaattggcattgcgattccacatggatgggcgacagagtcatcaccaccagcacccgcacctgggctctgcccacctacaacaaccatctgtacaagcaaatttccagccagtctggagccagcaacgacaaccactactttggctacagcaccccttgggggtattttgacttcaacagattccactgccacttctccccacgtgactggcaaagactcatcaacaacaattggggattccggcccaaaagactcaacttcgagctctttaacattcaagtcaaggaggtcacgcagaatgacggtacgacgacgattgccaataaccttaccagcacggttcaggtgtttaccgactcggagtaccagctcccgtacgtcctcggctcggcgcatcaaggatgcctcccgccgttcccagcagacgtcttcatggtgccacagtatggatacctcaccctgaacaacgggagtcaggcggtaggacgctcttcattttactgcctggagtactttccttctcagatgctgcgtaccggaaacaactttaccttcagctacacctttgaggacgttccttttcacagcagctacgctcacagccagagtttggaccgtctcatgaatcctctcatcgaccagtacctgtattacttgagcagaacaaacactccaagcggaaccactacgcagtccaggcttcagttttctcaagccggagcgagtgacattcgggaccagtctaggaactggcttcctggaccctgttaccgccagcagcgagtatcaaagacagctgcggacaacaacaacagtgattactcgtggactggagctaccaagtatcacctcaatggaagagactctctggtgaatccgggcacagccatggccagccacaaggacgatgaagaaaagtattttcctcagagcggggttctcatcttcggaaaacaagactcgggaaaaactaatgtggacattgaaaaggtcatgattacagacgaagaggaaatcaggaccaccaatcccgtggctacggagcagtatggttctgtatctaccaatctccagagcggcaacacacaagcagctacctcagatgtcaacacacaaggcgttcttccaggcatggtctggcaggacagagacgtgtacctgcagggacccatctgggcaaagattccacacacggacggacactttcacccttctcctcttatgggaggatttggactgaagcaccctcccccgcagattctcatcaagagtaccccggtacctgcgaatccttctaccaccttcagcgcggcaaagtttgcttccttcatcacacagtactccacggggcaggtcagcgtggagatcgagtgggagctgcagaaagagaacagcaaacgctggaaccccgagatccagtatacctccaactacaacaagtctgttaatgtggactttactgtggacactaatggcgtgtattcagagcctcgccccattggcacaagatacctgactcgtaatctgtaa

SEQ ID NO: 1103 - DNA, 2208 bp, Artificial Sequence
  Synthetic Polynucleotide
atggctgccgatggttatcttccagattggctcgaggacactctctctgaaggaataagacagtggtggaagctcaaacctggcccaccaccgccaaagcccgcagagcggcataaggacgacagcaggggtcttgtgcttcctgggtacaagtacctcggacccttcaacggactcgacaaaggagagccggtcaacgaggcagacgccgcggccctcgagcacgacaaggcctacgaccggcagctcgacagcggagacaacccgtacctcaagtacaaccacgccgacgcggagtttcaggagcgccttaaagaagatacgtcttttgggggcaacctcgcaagagcagtattccaggcgaaaaagagggttcttgaacctctgggcctggttgaggagcctgttaagacggctccgggaaaaaagaggccggtagagcactctcctgcggggccagattcctcctccggaactggaaagtcgggccaacagcctgcaagaaagagattgaattttggtcagactggagacgcagactccgtacctgacccccagcctctcggacagccaccagcagccccctctggtctgggaactaatacgatggcttcaggcagtggcgcaccaatggcagacaataacgagggcgccgacggagtgggtaattcctcgggaaattggcattgcgattccacatggatgggcgacagagtcatcaccaccagcacccgcacctgggctctgcccacctacaacaaccatctgtacaagcaaatttccagccagtctggagccagcaacgacaaccactactttggctacagcaccccttgggggtattttgacttcaacagattccactgccacttctccccacgtgactggcaaagactcatcaacaacaattggggattccggcccaaaagactcaacttcgagctctttaacattcaagtcaaggaggtcacgcagaatgacggtacgacgacgattgccaataaccttaccagcacggttcaggtgtttactgactcggagtaccagctcccgtacgtcctcggctcggcgcatcaaggatgcctcccgccgttcccagcagacgtcttcatggtgccacagtatggatacctcaccctgaacaacgggagtcaggcggtaggacgctcttcattttactgcctggagtactttccttctcagatgctgcgtaccggaaacaactttaccttcagctacacctttgaggacgttccttttcacagcagctacgctcacagccagagtttggaccgtctcatgaatcctctcatcgaccagtacctgtattacttgagcagaacaaacactccaagcggaaccactacgcagtccaggcttcagttttctcaagccggagcgagtgacattcgggaccagtctaggaactggcttcctggaccctgttaccgccagcagcgagtatcaaagacagctgcggacaacaacaacagtgattactcgtggactggagctaccaagtatcacctcaatggaagagactctctggtgaatccgggcacagccatggccagccacaaggacgatgaagaaaagtattttcctcagagcggggttctcatcttccggaaacaagactcgggaaaaactaatgtggacattgaaaaggtcatgattacagacgaagaggaaatcaggaccaccaatcccgtggctacggagcagtatggttctgtatctaccaatctccagagcggcaacacacaagcagctacctcagatgtcaacacacaaggcgttcttccaggcatggtctggcaggacagagacgtgtacctgcagggacccatctgggcaaagattccacacacggacggacactttcacccttctcctcttatgggaggatttggactgaagcaccctcccccgcagattctcatcaagagtaccccggtacctgcgaatccttctaccaccttcagcgcggcaaagtttgcttccttcatcacacagtactccacggggcaggtcagcgtggagatcgagtgggagctgcagaaagagaacagcaaacgctggaaccccgagatccagtatacctccaactacaacaagtctgttaatgtggactttactgtggacactaatggcgtgtattcagagcctcgccccattggcacaagatacctgactcgtaatctgtaa

SEQ ID NO: 1104 - DNA, 2208 bp, Artificial Sequence
  Synthetic Polynucleotide
atggctgccgatggttatcttccagattggctcgaggacactctctctgaaggaataagacagtggtggaagctcaaacctggcccaccaccgccaaagcccgcagagcggcataaggacgacagcaggggtcttgtgcttcctgggtacaagtacctcggacccttcaacggactcgacaaaggagagccggtcaacgaggcagacgccgcggccctcgagcacgacaaggcctacgaccggcagctcgacagcggagacaacccgtacctcaagtacaaccacgccgacgcggagtttcaggagcgccttaaagaagatacgtcttttgggggcaacctcgcaagagcagtattccaggcgaaaaagagggttcttgaacctctgggcctggttgaggagcctgttaagacggctccgggaaaaaagaggccggtagagcactctcctgcggagccagattcctcctccggaactggaaagtcgggccaacagcctgcaagaaagagattgaattttggtcagactggagacgcagactccgtacctgaccctcagcctctcggacagccaccagcagccccctctggtctgggaactaatacgatggcttcaggcagtggcgcaccaatggcagacaataacgagggcgccgacggagtgggtaattcctcgggaaattggcattgcgattccacatggatgggcgacagagtcatcaccaccagcacccgcacctgggctctgcccacctacaacaaccatctgtacaagcaaatttccagccagtctggagccagcaacgacaaccactactttggctacagcaccccttgggggtattttgacttcaacagattccactgccacttctccccacgtgactggcaaagactcatcaacaacaattggggattccggcccaaaagactcaacttcaagctctttaacattcaagtcaaggaggtcacgcagaatgacggtacgacgacgattgccaataaccttaccagcacggttcaggtgtttactgactcggagtaccagctcccgtacgtcctcggctcggcgcatcaaggatgcctcccgccgttcccagcagacgtcttcatggtgccacagtatggatacctcaccctgaacaacgggagtcaggcggtaggacgctcttcattttactgcctggagtactttccttctcagatgctgcgtaccggaaacaactttaccttcagctacacctttgaggacgttccttttcacagcagctacgctcacagccagagtttggaccgtctcatgaatcctctcatcgaccagtacctgtattacttgagcagaacaaacactccaagcggaaccactacgcagtccaggcttcagttttctcaagccggagcgagtgacattcgggaccagtctaggaactggcttcctggaccctgttaccgccagcagcgagtatcaaagacagctgcggacaacaacaacagtgattactcgtggactggagctaccaagtatcacctcaatggaagagactctctggtgaatccgggcacagccatggccagccacaaggacgatgaagaaaagtattttcctcagagcggggctctcatcttcggaaaacaagactcgggaaaaactaatgtggacattgaaaaggtcatgattacagacgaagaggaaatcaggaccaccaatcccgtggctacggagcagtatggttctgtatctaccaatctccagagcggcaacacacaagcagctacctcagatgtcaacacacaaggcgttcttccaggcatggtctggcaggacagagacgtgtacctgcagggacccatctgggcaaagattccacacacggacggacattttcacccttctcctcttatgggaggatttggactgaagcaccctcccccgcagattctcatcaagaataccccggtacctgcgaatccttctaccaccttcagcgcggcaaagtttgcttccttcatcacacagtactccacggggcaggtcagcgtggagatcgagtgggagctgcagaaagagaacagcaaacgctggaaccccgagatccagtatacctccaactacaacaagtctgttaatgtggactttactgtggacactaatggcgtgtattcagagcctcgccccattggcacaagatacctgactcgtaatctgtaa

SEQ ID NO: 1105 - DNA, 2208 bp, Artificial Sequence
  Synthetic Polynucleotide
atggctgccgatggttatcttccagattggctcgaggacactctctctgaaggaataagacagtggtggaagctcaaacctggcccaccaccgccaaagcccgcagagcggcataaggacgacagcaggggtcttgtgcttcctgggtacaagtacctcggacccttcaacggactcgacaaaggagagccggtcaacgaggcagacgccgcggccctcgagcacgacaaggcctacgaccggcagctcgacagcggagacaacccgtacctcaagtacaaccacgccgacgcggagtttcaggagcgccttaaagaagatacgtcttttgggggcaacctcgcaagagcagtattccaggcgaaaaagagggttcttgaacctctgggcctggttgaggagcctgttaagacggctccgggaaaaaagaggccggtagagcactctcctgcggagccaggttcctcctccggaactggaaagtcgggccaacagcctgcaagaaagagattgaattttggtcagactggagacgcagactccgtacctgacccccagcctctcggacagccaccagcagccccctctggtctgggaactaatacgatggcttcaggcagtggcgcaccaatggcagacaataacgagggcgccgacggagtgggtaattcctcgggaaattggcattgcgattccacatggatgggcgacagagtcatcaccaccagcacccgcacctgggctctgcccacctacaacaaccatctgtacaagcaaatttccagccagtctggagccagcaacgacaaccactactttggctacagcaccccttgggggtattttgacttcaacagattccactgccacttctccccacgtgactggcaaagactcatcaacaacaattggggattccggcccaaaagactcaacttcaagctctttaacattcaagtcaaggaggtcacgcagaatgacggtacgacgacgattgccaataaccttaccagcacggttcaggtgtttactgactcggagtaccagctcccgtacgtcctcggctcggcgcatcaaggatgcctcccgccgttcccagcagacgtcttcatggtgccacagtatggatacctcaccctgaacaacgggagtcaggcggtaggacgctcttcattttactgcctggagtactttccttctcagatgctgcgtaccggaaacaactttaccttcagctacacctttgaggacgttccttttcacagcagctacgctcgcagccagagtttggaccgtctcatgaatcctctcatcgaccagtacctgtattacttgagcagaacaaacactccaagcggaaccactacgcagtccaggcttcggttttctcaagccggagcgagtgacattcgggaccagtctaggaactggcttcctggaccctgttaccgccagcagcgagtatcaaagacagctgcggacaacaacaacagtgattactcgtggactggagctaccaagtatcacctcaatggaagagactctctggtgaatccgggcacagccatggccagccacaaggacgatgaagaaaagtattttcctcagagcggggttctcatcttcggaaaacaagactcgggaaaaactaatgtggacattgaaagggtcatgattacagacgaagaggaaatcaggaccaccaatcccgtggctacggagcagtatggttctgtatctaccaatctccagagcggcaacacacaagcagctacctcagatgtcaacacacaaggcgttcttccaggcatggtctggcaggacagagacgtgtacctgcagggacccatctgggcaaagattccacacacggacggacattttcacccttctcctcttatgggaggatttggactgaagcaccctcccccgcagattctcatcaagaataccccggtacctgcgaatccttctaccaccttcagcgcggcaaagtttgcttccttcatcacacagtactccacggggcaggtcagcgtggagatcgagtgggagctgcagaaagagaacagcaaacgctggaaccccgagatccagtatacctccaactacaacaagtctgttaatgtggactttactgtggacactaagggcgtgtattcagagcctcgccccattggcacaagatacctgactcgtaatctgtaa

SEQ ID NO: 1106 - DNA, 2208 bp, Artificial Sequence
  Synthetic Polynucleotide
atggctgccgatggttatcttccagattggctcgaggacactctctctgaaggaataagacagtggtggaagctcaaacctggcccaccaccgccaaagcccgcagagcggcataaggacgacagcaggggtcttgtgcttcctgggtacaagtacctcggacccttcaacggactcgacaaaggagagccggtcaacgaggcagacgccgcggccctcgagcacgacaaggcctacgaccggcagctcgacagcggagacaacccgtacctcaagtacaaccacgccgacgcggagtttcaggagcgccttaaagaagatacgtcttttgggggcaacctcgcaagagcagtattccaggcgaaaaagagggttcttgaacctctgggcctggttgaggagcctgttaagacggctccgggaaaaaagaggccggtagagcactctcctgcggagccagattcctcctccggaactggaaagtcgggccaacagcctgcaagaaagagattgaattttggtcagactggagacgcagactccgtacctgacccccagcctctcggacagccaccagcagccccctctggtctgggaactaatacgatggcttcaggcagtggcgcaccaatggcagacaataacgagggcgccgacggagtgggtaattcctcgggaaattggcattgcgattccacatggatgggcgacagagtcatcaccaccagcacccgcacctgggctctgcccacctacaacaaccatctgtacaagcaaatttccagccagtctggagccagcaacgacaaccactactttggctacagcaccccttgggggtattttgacttcaacagattccactgccacttctccccacgtgactggcaaagactcatcaacaacaattggggattccggcccaaaagactcaacttcaagctctttaacattcaagtcaaggaggtcacgcagaatgacggtacgacgacgattgccaataaccttaccagcacggttcaggtgtttactgactcggagtaccagctcccgtacgtcctcggctcggcgcatcaaggatgcctcccgccgttcccagcagacgtcttcatggtgccacagtatggatacctcaccctgaacaacgggagtcaggcggtaggacgctcttcattttactgcctggagtactttccttctcagatgctgcgtaccggaaacaactttaccttcagctacacctttgaggacgttccttttcacagcagctacgctcacagccagagtttggaccgtctcatgaatcctctcatcgaccagtacctgtattacttgagcagaacaaacactccaagcggaaccactacgcagtccaggcttcagttttctcaagccggagcgagtgacattcgggaccagtctaggaactggcttcctggaccctgttaccgccagcagcgagtatcaaagacagctgcggacaacaacaacagtgattactcgtggactggagctaccaagtatcacctcaatggaagagactctctggtgaatccgggcacagccatggccagccacaaggacgatgaagaaaagtattttcctcagagcggggttctcatcttcggaaaacaagactcgggaaaaactaatgtggacattgaaaaggtcatgattacagacgaagaggaaatcaggaccaccaatcccgtggctacggagcagtatggttctgtatctaccaatctccagagcggcaacacacaagcagctacctcagatgtcaacacacaaggcgttcttccaggcatggtctggcaggacagagacgtgtacctgcagggacccatctgggcaaagattccacacacggacggacactttcacccttctcctcttatgggaggatttggactgaagcaccctcccccgcagattctcatcaagagtaccccggtacctgcgaatccttctaccaccttcagcgcggcaaagtttgcttccttcatcacacagtactccacggggcaggtcagcgtggagatcgagtgggagctgcagaaagagaacagcaaacgctggaaccccgagatccagtatacctccaactacaacaagtctgttaatgtggactttactgtggacactaatggcgtgtattcagagcctcgccccattggcacaagatacctgactcgtaatctgtaa

SEQ ID NO: 1107 - DNA, 2208 bp, Artificial Sequence
  Synthetic Polynucleotide
atggctgccgatggttatcttccagattggctcgaggacactctctctgaaggaataagacagtggtggaagctcaaacctggcccaccaccgccaaagcccgcagagcggcataaggacgacagcaggggtcttgtgcttcctgggtacaagtacctcggacccttcaacggactcgacaaaggagagccggtcaacgaggcagacgccgcggccctcgagcacgacaaggcctacgaccggcagctcgacagcggagacaacccgtacctcaagtacaaccacgccgacgcggagtttcaggagcgccttaaagaagatacgtcttttgggggcaacctcgcaagagcagtattccaggcgaaaaagagggttcttgaacctctgggcctggttgaggagcctgttaagacggctccgggaaaaaagaggccggtagagcactctcctgcggagctagattcctcctccggaactggaaagtcgggccaacagcctgcaagaaagagattgaattttggtcagactggagacgcagactccgtacctgacccccagcctctcggacagccaccagcagccccctctggtctgggaactaatacgatggcttcaggcagtggcgcaccaatggcagacaataacgagggcgccgacggagtgggtaattcctcgggaaattggcattgcgattccacatggatgggcgacagagtcatcaccaccagcacccgcacctgggctctgcccacctacaacaaccatctgtacaagcaaatttccagccagtctggggccagcaacgacaaccactactttggctacagcaccccttgggggtattttgacttcaacagattccactgccacttctccccacgtgactggcaaagactcatcaacaacaattggggattccggcccaaaagactcaacttcaagctctttaacattcaagtcaaggaggtcacgcagaatgacggtacgacgacgattgccaataaccttaccagcacggttcaggtgtttactgactcggagtaccagctcccgtacgtcctcggctcggcgcatcaaggatgcctcccgccgttcccagcagacgtcttcatggtgccacagtatggatacctcaccctgaacaacgggagtcaggcggtaggacgctcttcattttactgcctggagtactttccttctcagatgctgcgtaccggaaacaactttaccttcagctacacctttgaggacgttccttttcacagcagctacgctcacagccagagtttggaccgtctcatgaatcctctcatcgaccagtacctgtattacttgagcagaacaaacactccaagcggaaccactacgcagtccaggcttcagttttctcaagccggagcgagtgacattcgggaccagtctaggaactggcttcctggaccctgttaccgccagcagcgagtatcaaagacagctgcggacaacaacaacagtgattactcgtggactggagctaccaagtatcacctcaatggaagagactctctggtgaatccgggcacagccatggccagccacaaggacgatgaagaaaagtattttcctcagagcggggttctcatcttcggaaaacaagactcgggaaaaactaatgtggacattgaaaaggtcatgattacagacgaagaggaaatcaggaccaccaatcccgtggctacggagcagtatggttctgtatctaccaatctccagagcggcaacacacaagcagctacctcagatgtcaacacacaaggcgttcttccaggcatggtctggcaggacagagacgtgtacctgcagggacccatctgggcaaagattccacacacggacggacattttcacccttctcctcttatgggaggatttggaccgaagcaccctcccccgcagattctcatcaagaataccccggtacctgcgaatccttctaccaccttcagcgcggcaaagtttgcttccttcatcacacagtactccacggggcaggtcagcgtggagatcgagtgggagctgcagaaagagaacagcaaacgctggaaccccgagatccagtatacctccaactacaacaagtctgttaatgtggactttactgtggacgctaatggcgtgtattcagagcctcgccccattggcacaagatacctgactcgtaatctgtaa

SEQ ID NO: 1108 - DNA, 2208 bp, Artificial Sequence
  Synthetic Polynucleotide
atggctgccgatggttatcttccagattggctcgaggacactctctctgaaggaataagacagtggtggaagctcaaacctggcccaccaccgccaaagcccgcagagcggcataaggacgacagcaggggtcttgtgcttcctgggtacaagtacctcggacccttcaacggactcgacaaaggagagccggtcaacgaggcagacgccgcggccctcgagcacgacaaggcctacgaccggcagctcgacagcggagacaacccgtacctcaagtacaaccacgccgacgcggagtttcaggagcgccttaaagaagatacgtcttttgggggcaacctcgcaagagcagtattccaggcgaaaaagagggttcttgaacctctgggcctggttgaggagcctgttaagacggctccgggaaaaaagaggccggtagagcactctcctgcggagctagattcctcctccggaactggaaagtcgggccaacagcctgcaagaaagagattgaattttggtcagactggagacgcagactccgtacctgacccccagcctctcggacagccaccagcagccccctctggtctgggaactaatacgatggcttcaggcagtggcgcaccaatggcagacaataacgagggcgccgacggagtgggtaattcctcgggaaattggcattgcgattccacatggatgggcgacagagtcatcaccaccagcacccgcacctgggctctgcccacctacaacaaccatctgtacaagcaaatttccagccagtctggggccagcaacgacaaccactactttggctacagcaccccttgggggtattttgacttcaacagattccactgccacttctccccacgtgactggcaaagactcatcaacaacaattggggattccggcccaaaagactcaacttcaagctctttaacattcaagtcaaggaggtcacgcagaatgacggtacgacgacgattgccaataaccttaccagcacggttcaggtgtttactgactcggagtaccagctcccgtacgtcctcggctcggcgcatcaaggatgcctcccgccgttcccagcagacgtcttcatggtgccacagtatggatacctcaccctgaacaacgggagtcaggcggtaggacgctcttcattttactgcctggagtactttccttctcagatgctgcgtaccggaaacaactttaccttcagctacacctttgaggacgttccttttcacagcagctacgctcacagccagagtttggaccgtctcatgaatcctctcatcgaccagtacctgtattacttgagcagaacaaacactccaagcggaaccactacgcagtccaggcttcagttttctcaagccggagcgagtgacattcgggaccagtctaggaactggcttcctggaccctgttaccgccagcagcgagtatcaaagacagctgcggacaacaacaacagtgattactcgtggactggagctaccaagtatcacctcaatggaagagactctctggtgaatccgggcacagccatggccagccacaaggacgatgaagaaaagtattttcctcagagcggggttctcatcttcggaaaacaagactcgggaaaaactaatgtggacattgaaaaggtcatgattacagacgaagaggaaatcaggaccaccaatcccgtggctacggagcagtatggttctgtatctaccaatctccggagcggcaacacacaagcagctacctcagatgtcaacacacaaggcgttcttccaggcatggtctggcaggacagagacgtgtacctgcagggacccatctgggcaaagattccacacacggacggacattttcacccttctcctcttatgggaggatttggaccgaagcaccctcccccgcagattctcatcaagaataccccggtacctgcgaatccttctaccaccttcagcgcggcaaagtttgcttccttcatcacacagtactccacggggcaggtcagcgtggagatcgagtgggagctgcagaaagagaacagcaaacgctggaaccccgagatccagtatacctccaactacaacaagtctgttaatgtggactttactgtggacactaatggcgtgtattcagagcctcgccccattggcacaagatacctgactcgtaatctgtaa

SEQ ID NO: 1109 - DNA, 2208 bp, Artificial Sequence
  Synthetic Polynucleotide
atggctgccgatggttatcttccagattggctcgaggacactctctctgaaggaataagacagtggtggaagctcaaacctggcccaccaccgccaaagcccgcagagcggcataaggacgacagcaggggtcttgtgcttcctgggtacaagtacctcggacccttcaacggactcgacaaaggagagccggtcaacgaggcagacgccgcggccctcgagcacgacaaggcctacgaccggcagctcgacagcggagacaacccgtacctcaagtacaaccacgccgacgcggagtttcaggagcgccttaaagaagatacgccttttgggggcaacctcgcaagagcagtattccaggcgaaaaagagggttcttgaacctctgggcctggttgaggagcctgttaagacggctccgggaaaaaagaggccggtagagcactctcctgcggagctagattcctcctccggaactggaaagtcgggccaacagcctgcaagaaagagattgaattttggtcagactggagacgcagactccgtacctgacccccagcctctcggacagccaccagcagccccctctggtctgggaactaatacgatggcttcaggcagtggcgcaccaatggcagacaataacgagggcgccgacggagtgggtaattcctcgggaaattggcattgcgattccacatggatgggcgacagagtcatcaccaccagcacccgcacctgggctctgcccacctacaacaaccatctgtacaagcaaatttccagccagtctggggccagcaacgacaaccactactttggctacagcaccccttgggggtattttgacttcaacagattccactgccacttctccccacgtgactggcaaagactcatcaacaacaattggggattccggcccaaaggactcaacttcaagctctttaacattcaagtcaaggaggtcacgcagaatgacggtacgacgacgattgccaataaccttaccagcacggttcaggtgtttactgactcggagtaccagctcccgtacgtcctcggctcggcgcatcaaggatgcctcccgccgttcccagcagacgtcttcatggtgccacagtatggatacctcaccctgaacaacgggagtcaggcggtaggacgctcttcattttactgcctggagtactttccttctcagatgctgcgtaccggaaacaactttaccttcagctacacctttgaggacgttccttttcacagcagctacgctcacagccagagtttggaccgtctcatgaatcctctcatcgaccagtacctgtattacttgagcagaacaaacactccaagcggaaccactacgcagtccaggcttcagttttctcaagccggagcgagtgacattcgggaccagtctaggaactggcttcctggaccctgttaccgccagcagcgagtatcaaagacagctgcggacaacaacaacagtgattactcgtggactggagctaccaagtatcacctcaatggaagagactctctggtgaatccgggcacagccatggccagccacaaggacgatgaagaaaagtattttcctcagagcggggttctcatcttcggaaaacaagactcgggaaaaactaatgtggacattgaaaaggtcatgattacagacgaagaggaaatcaggaccaccaatcccgtggctacggagcagtatggttctgtatctaccaatctccagagcggcaacacacaagcagctacctcagatgtcaacacacaaggcgttcttccaggcatggtctggcaggacagagacgtgtacctgcagggacccatctgggcaaagattccacacacggacggacattttcacccttctcctcttatgggaggatttggaccgaagcaccctcccccgcagattctcatcaagaataccccggtacctgcgaatccttctaccaccttcagcgcggcaaagtttgcttccttcatcacacagtactccacggggcaggtcagcgtggagatcgagtgggagctgcagaaagagaacagcaaacgctggaaccccgagatccagtatacctccaactacaacaagtctgttaatgtggactttactgtggacactaatggcgtgtattcagagcctcgccccattggcacaagatacctgactcgtaatctgtaa

SEQ ID NO: 1110 - DNA, 2208 bp, Artificial Sequence
  Synthetic Polynucleotide
atggctgccgatggttatcttccagattggctcgaggacactctctctgaaggaataagacagtggtggaagctcaaacctggcccaccaccgccaaagcccgcagagcggcataaggacgacagcaggggtcttgtgcttcctgggtacaagtacctcggacccttcaacggactcgacaaaggagagccggtcaacgaggcagacgccgcggccctcgagcacgacaaggcctacgaccggcagctcgacagcggagacaacccgtacctcaagtacaaccacgccgacgcggagtttcaggagcgccttaaagaagatacgtcttttgggggcaacctcgcaagagcagtattccaggcgaaaaagagggttcttgaacctctgggcctggttgaggagcctgttaagacggctccgggaaaaaagaggccggtagagcactctcctgcggagctagattcctcctccggaactggaaagtcgggccaacagcctgcaagaaagagattgaattttggtcagactggagacgcagactccgtacctgacccccagcctctcggacagccaccagcagccccctctggtctgggaactaatacgatggcttcaggcagtggcgcaccaatggcagacaataacgagggcgccgacggggtgggtaattcctcgggaaattggcattgcgattccacatggatgggcgacagagtcatcaccaccagcacccgcacctgggctctgcccacctacaacaaccatctgtacaagcaaatttccagccagtctggggccagcaacgacaaccactaccttggctacagcaccccttgggggtattttgacttcaacagattccactgccacttctccccacgtgactggcaaagactcatcaacaacaattggggattccggcccaaaagactcaacttcaagctctttaacattcaagtcaaggaggtcacgcagaatgacggtacgacgacgattgccaataaccttaccagcacggttcaggtgtttactgactcggagtaccagctcccgtacgtcctcggctcggcgcatcaaggatgcctcccgccgttcccagcagacgtcttcatggtgccacagtatggatacctcaccctgaacaacgggagtcaggcggtaggacgctcttcattttactgcctggagtactttccttctcagatgctgcgtaccggaaacaactttaccttcagctacacctttgaggacgttccttttcacagcagctacgctcacagccagagtttggaccgtctcatgaatcctctcatcgaccagtacctgtattacttgagcagaacaaacactccaagcggaaccactacgcagtccaggcttcagttttctcaagccggagcgagtggcattcgggaccagtctaggaactggcttcctggaccctgttaccgccagcagcgagtatcaaagacagctgcggacaacaacaacagtgattactcgtggactggagctaccaagtatcacctcaatggaagagactctctggtgaatccgggcacagccatggccagccacaaggacgatgaagaaaagtattttcctcagagcggggttctcatcttcggaaaacaagactcgggaaaaactaatgtggacattgaaaaggtcatgattacagacgaagaggaaatcaggaccaccaatcccgtggctacggagcagtatggttctgtatctaccaatctccagagcggcaacacacaagcagctacctcagatgtcaacacacaaggcgttcttccaggcatggtctggcaggacagagacgtgtacctgcagggacccatctgggcaaagattccacacacggacggacattttcacccttctcctcttatgggaggatttggaccgaagcaccctcccccgcagattctcatcaagaataccccggtacctgcgaatccttctaccaccttcagcgcggcaaagtttgcttccttcatcacacagtactccacggggcaggtcagcgtggagatcgagtgggagctgcagaaagggaacagcaaacgctggaaccccgagatccagtatacctccaactacaacaagtctgttaatgtggactttactgtggacactaatggcgtgtattcagagcctcgccccattggcacaagatacctgactcgtaatctgtaa

SEQ ID NO: 1111 - DNA, 2208 bp, Artificial Sequence
  Synthetic Polynucleotide
atggctgccgatggttatcttccagattggctcgaggacactctctctgaaggaataagacagtggtggaagctcaaacctggcccaccaccgccaaagcccgcagagcggcataaggacgacagcaggggtcttgtgcttcctgggtacaagtacctcggacccttcaacggactcgacaaaggagagccggtcaacgaggcagacgccgcggccctcgagcacgacaaggcctacgaccggcagctcgacagcggagacaacccgtacctcaagtacaaccacgccgacgcggagtttcaggagcgccttaaagaagatacgtcttttgggggcaacctcgcaagagcagtattccaggcgaaaaagagggttcttgaacctctgggcctggttgaggagcctgttaagacggctccgggaaaaaagaggccggtagagcactctcctgcggagctagattcctcctccggaactggaaagtcgggccaacagcctgcaagaaagagattgaattttggtcagactggagacgcagactccgtacctgacccccagcctctcggacagccaccagcagccccctctggtctgggaactaatacgatggcttcaggcagtggcgcaccaatggcagacaataacgagggcgccgacggagtgggtaattcctcgggaaattggcattgcgattccacatggatgggcgacagagtcatcaccaccagcacccgcacctgggctctgcccacctacaacaaccatctgtacaagcaaatttccagccagtctggggccagcaacgacaaccactactttggctacagcaccccttgggggtattttgacttcaacagattccactgccacttctccccacgtgactggcaaagactcatcaacaacaattggggattccggcccaaaagactcaacttcaagctctttaacattcaagtcaaggaggtcacgcagaatgacggtacgacgacgattgccaataaccttaccagcacggttcaggtgtttactgactcggagtaccagctcccgtacgtcctcggctcggcgcatcaaggatgcctcccgccgttcccagcagacgtcttcatggtgccacagtatggatacctcaccctgaacaacgggagtcaggcggtaggacgctcttcattttactgcctggagtactttccttctcagatgctgcgtaccggaaacaactttaccttcagctacacctttgaggacgttccttttcacagcagctacgctcacagccagagtttggaccgtctcatgaatcctctcatcgaccagtacctgtattacttgagcagaacaaacactccaagcggaaccactacgcagtccaggcttcagttttctcaagccggagcgagtgacattcgggaccagtctaggaactggcttcctggaccctgttaccgccagcagcgagtatcaaagacagctgcggacaacaacaacagtgattactcgtggactggagctaccaagtatcacctcaatggaagagactctctggtgaatccgggcacagccatggccagccacaaggacgatgaagaaaagtattttcctcagagcggggttctcatcttcggaaaacaagactcgggaaaaactaatgtggacattgaaaaggtcatgattacagacgaagaggaaatcaggaccaccaatcccgtggctacggagcagtatggttctgtatctaccaatctccagagcggcaacacacaagcagctacctcagatgtcaacacacaaggcgttcttccaggcatggtctggcaggacagagacgtgtacctgcagggacccatctgggcaaagattccacacacggacggacattttcacccttctcctcttatgggaggatttggaccgaagcaccctcccccgcagattctcatcaagaataccccggtacctgcgaatccttctaccaccttcagcgcggcaaagtttgcttccttcatcacacagtactccacggggcaggtcagcgtggagatcgagtgggagctgcagaaagagaacagcaaacgctggaaccccgagatccagtatacctccaactacaacaagtctgttaatgtggactttactgtggacactaatggcgtgtattcagagcctcgccccattggcacaagatacccgactcgtaatctgtaa

SEQ ID NO: 1112 - DNA, 2208 bp, Artificial Sequence
  Synthetic Polynucleotide
atggctgccgatggttatcttccagattggctcgaggacactctctctgaaggaataagacagtggtggaagctcaaacctggcccaccaccgccaaagcccgcagagcggcataaggacgacagcaggggtcttgtgcttcctgggtacaagtacctcggacccttcaacggactcgacaaaggagagccggtcaacgaggcagacgccgcggccctcgagcacgacaaggcctacgaccggcagctcgacagcggagacaacccgtacctcaagtacaaccacgccgacgcggagtttcaggagcgccttaaagaagatacgtcttttgggggcaacctcgcaagagcagtattccaggcgaaaaagagggttcttgaacctctgggcctggttgaggagcctgttaagacggctccgggaaaaaagaggccggtagagcactctcctgcggagctagattcctcctccggaactggaaagtcgggccaacagcctgcaagaaagagattgaattttggtcagactggagacgcagactccgtacctgacccccagcctctcggacagccaccagcagccccctctggtctgggaactaatacgatggcttcaggcagtggcgcaccaatggcagacaataacgagggcgccgacggagtgggtaattcctcgggaaattggcattgcgattccacatggatgggcgacagagtcatcaccaccagcacccgcacctgggctctgcccacctacaacaaccatctgtacaagcaaatttccagccagtctggggccagcaacgacaaccactactttggctacagcaccccttgggggtattttgacttcaacagattccactgccacttctccccacgtgactggcaaagactcatcaacaacaattggggattccggcccaaaagactcaacttcaagctctttaacattcaagtcaaggaggtcacgcagaatgacggtacgacgacgattgccaataaccttaccagcacggttcaggtgtttactgactcggagtaccagctcccgtacgtcctcggctcggcgcatcaaggatgcctcccgccgttcccagcagacgtcttcatggtgccacagtatggatacctcaccctgaacaacgggagtcaggcggtaggacgctcttcattttactgcctggagtactttccttctcagatgctgcgtaccggaaacaactttaccttcagctacacctttgaggacgttccttttcacagcagctacgctcacagccagagtttggaccgtctcatgaatcctctcatcgaccagtacctgtattacttgagcagaacaaacactccaagcggaaccactacgcagtccaggcttcagttttctcaagccggagcgagtgacattcgggaccagtctaggaactggcttcctggaccctgttaccgccagcagcgagtatcaaagacagctgcggacaacaacaacagtgattactcgtggactggagctaccaagtatcacctcaatggaagagactctctggtgaatccgggcacagccatggccagccacaaggacgatgaagaaaagtattttcctcagagcggggttctcatcttcggaaaacaagactcgggaaaaactaatgtggacattgaaaaggtcatgattacagacgaagaggaaatcaggaccaccaatcccgtggctacggagcagtatggttctgtatctaccaatctccagagcggcaacacacaagcagctacctcagatgtcaacacacaaggcgttcttccaggcatggtctggcaggacagagacgtgtacctgcagggacccatctgggcaaagattccacacacggacggacattttcacccttctcctcttatgggaggatttggaccgaagcaccctcccccgcagattctcatcaagaataccccggtacctgcgaatccttctaccaccttcagcgcggcaaagcttgcttccttcatcacacagtactccacggggcaggtcagcgtggagatcgagtgggagctgcagaaagagaacagcaaacgctggaaccccgagatccagtatacctccaactacaacaagtctgttaatgtggactttactgtggacactaatggcgtgtattcagagcctcgccccattggcacaagatacctgactcgtaatctgtaa

SEQ ID NO: 1113 - DNA, 2208 bp, Artificial Sequence
  Synthetic Polynucleotide
atggctgccgatggttatcttccagattggctcgaggacactctctctgaaggaataagacagtggtggaagctcaaacctggcccaccaccgccaaagcccgcagagcggcataaggacgacagcaggggtcttgtgcttcctgggtacaagtacctcggacccttcaacggactcgacaaaggagagccggtcaacgaggcagacgccgcggccctcgagcacgacaaggcctacgaccggcagctcgacagcggagacaacccgtacctcaagtacaaccacgccgacgcggagtttcaggagcgccttaaagaagatacgtcttttgggggcaacctcgcaagagcagtattccaggcgaaaaagagggttcttgaacctctgggcctggttgaggagcctgttaagacggctccgggaaaaaagaggccggtagagcactctcctgcggagctagattcctcctccggaactggaaagtcgggccaacagcctgcaagaaagagattgaattttggtcagactggagacgcagactccgtacctgacccccagcctctcggacagccaccagcagccccctctggtctgggaactaatacgatggcttcaggcagtggcgcaccaatggcagacaataacgagggcgccgacggagtgggtaattcctcgggaaattggcattgcgattccacatggatgggcgacagagtcatcaccaccagcacccgcacctgggctctgcccacctacaacaaccatctgtacaagcaaatttccagccagtctggggccagcaacgacaaccactactttggctacagcaccccttgggggtattttgacttcaacagattccactgccacttctccccacgtgactggcaaagactcatcaacaacaattggggattccggcccaaaagactcaacttcaagctctttaacattcaagtcaaggaggtcacgcagaatgacggtacgacgacgattgccaataaccttaccagcacggttcaggtgtttactgactcggagtaccagctcccgtacgtcctcggctcggcgcatcaaggatgcctcccgccgttcccagcagacgtcttcatggtgccacagtatggatacctcaccctgaacaacgggagtcaggcggtaggacgctcttcattttactgcctggagtactttccttctcagatgctgcgtaccggaaacaactttaccttcagctacacctttgaggacgttccttttcacagcagctacgctcacagccagagtttggaccgtctcatgaatcctctcatcgaccagtacctgtattacttgagcagaacaaacactccaagcggaaccactacgcagtccaggcttcagttttctcaagccggagcgagtgacattcgggaccagtctaggaactggcttcctggaccctgttaccgccagcagcgagtatcaaagacagctgcggacaacaacaacagtgattactcgtggactggagctaccaagtatcacctcaatggaagagactctctggtgaatccgggcacagccatggccagccacaaggacgatgaagaaaagtattttcctcagagcggggttctcatcttcggaaaacaagactcgggaaaaactaatgtggacattgaaaaggtcatgattacagacgaagaggaaatcaggaccaccaatcccgtggctacggagcagtatggttctgtatctaccaatctccagagcggcaacacacaagcagctacctcagatgtcaacacacaaggcgttcttccaggcatggtctggcaggacagagacgtgtacctgcagggacccatctgggcaaagattccacacacggacggacattttcacccttctcctcttatgggaggatttggaccgaagcaccctcccccgcagattctcatcaagaataccccggtacctgcgaatccttctaccaccttcagcgcggcaaagtttgcttccttcaccacacagtactccacggggcaggtcagcgtggagatcgagtgggagctgcagaaagagaacagcaaacgctggaaccccgagatccagtatacctccaactacaacaagtctgttaatgtggactttactgtggacactaatggcgtgtattcagagcctcgccccattggcacaagatacctgactcgtaatctgtaa

SEQ ID NO: 1114 - DNA, 2208 bp, Artificial Sequence
  Synthetic Polynucleotide
atggctgccgatggttatcttccagattggctcgaggacactctctctgaaggaataagacagtggtggaagctcaaacctggcccaccaccgccaaagcccgcagagcggcataaggacgacagcaggggtcttgtgcttcctgggtacaagtacctcggacccttcaacggactcgacaaaggagagccggtcaacgaggcagacgccgcggccctcgagcacgacaaggcctacgaccggcagctcgacagcggagacaacccgtacctcaagtacaaccacgccgacgcggagtttcaggagcgccttaaagaagatacgtcttttgggggcaacctcgcaagagcagtattccaggcgaaaaagagggttcttgaacctctgggcctggttgaggagcctgttaagacggctccgggaaaaaagaggccggtagagcactctcctgcggagctagattcctcctccggaactggaaagtcgggccaacagcctgcaagaaagagattgaattttggtcagactggagacgcagactccgtacctgacccccagcctctcggacagccaccagcagccccctctggtctgggaactaatacgatggcttcaggcagtggcgcaccaatggcagacaataacgagggcgccgacggagtgggtaattcctcgggaaattggcattgcgattccacatggatgggcgacagagtcatcaccaccagcacccgcacctgggctctgcccacctacaacaaccatctgtacaagcaaatttccagccagtctggggccagcaacgacaaccactactttggctacagcaccccttgggggtattttgacttcaacagattccactgccacttctccccacgtgactggcaaagactcatcaacaacaattggggattccggcccaaaagactcaacttcaagctctttaacattcaagtcaaggaggtcacgcagaatgacggtacgacgacgattgccaataaccttaccagcacggttcaggtgtttactgactcggagtaccagctcccgtacgtcctcggctcggcgcatcaaggatgcctcccgccgttcccagcagacgtcttcatggtgccacagtatggatacctcaccctgaacaacgggagtcaggcggtaggacgctcttcattttactgcctggagtactttccttctcagatgctgcgtaccggaaacaactttaccttcagctacacctttgaggacgttccttttcacagcagctacgctcacagccagagtttggaccgtctcatgaatcctctcatcgaccagtacctgtattacttgagcagaacaaacactccaagcggaaccactacgcagtccaggcttcagttttctcaagccggagcgagtgacattcgggaccagtctaggaactggcttcctggaccctgttaccgccagcagcgagtatcaaagacagctgcggacaacaacaacagtgattactcgtggactggagctaccaagtatcacctcaatggaagagactctctggtgaatccgggcacagccatggccagccacaaggacgatgaagaaaagtattttcctcggagcggggttctcatcttcggaaaacaagactcgggaaaaactaatgtggacattgaaaaggtcatgattacagacgaagaggaaatcaggaccaccaatcccgtggctacggagcagtatggttctgtatctaccaatctccagagcggcaacacacaagcagctacctcagatgtcaacacacaaggcgttcttccaggcatggtctggcaggacagagacgtgtacctgcagggacccatctgggcaaagattccacacacggacggacattttcacccttctcctcttatgggaggatttggaccgaagcaccctcccccgcagattctcatcaagaataccccggtacctgcgaatccttctaccaccttcagcgcggcaaagtttgcttccttcatcacacagtactccacggggcaggtcagcgtggagatcgagtgggagctgcagaaagagaacagcaaacgctggaaccccgagatccagtatacctccaactacaacaagtctgttaatgtggactttactgtggacactaatggcgtgtattcagagcctcgccccattggcacaagatacctgactcgtaatctgtaa

SEQ ID NO: 1115 - DNA, 2208 bp, Artificial Sequence
  Synthetic Polynucleotide
atggctgccgatggttatcttccagattggctcgaggacactctctctgaaggaataagacagtggtggaagctcaaacctggcccaccaccgccaaagcccgcagagcggcataaggacgacagcaggggtcttgtgcttcctgggtacaagtacctcggacccttcaacggactcgacaaaggagagccggtcaacgaggcagacgccgcggccctcgagcacgacaaggcctacgaccggcagctcgacagcggagacaacccgtacctcaagtacaaccacgccgacgcggagtttcaggagcgccttaaagaagatacgtcttttgggggcaacctcgcaagagcagtattccaggcgaaaaagagggttcttgaacctctgggcctggttgaggagcctgttaagacggctccgggaaaaaagaggccggtagagcactctcctgcggagctagattcctcctccggaactggaaagtcgggccaacagcctgcaagaaagagattgaattttggtcagactggagacgcagactccgtacctgacccccagcctctcggacagccaccagcagccccctctggtctgggaactaatacgatggcttcaggcagtggcgcaccaatggcagacaataacgagggcgccgacggagtgggtaattcctcgggaaattggcattgcgattccacatggatgggcgacagagtcatcaccaccagcacccgcacctgggctctgcccacctacaacaaccatctgtacaagcaaatttccagccagtctggggccagcaacgacaaccactactttggctacagcaccccttgggggtattttgacttcaacagattccactgccacttctccccacgtgactggcaaagactcatcaacaacaattggggattccggcccaaaagactcaacttcaagctctttaacattcaagtcaaggaggtcacgcagaatgacggtacggcgacgattgccaataaccttaccagcacggttcaggtgtttactgactcggagtaccagctcccgtacgtcctcggctcggcgcatcaaggatgcctcccgccgttcccagcagacgtcttcatggtgccacagtatggatacctcaccctgaacaacgggagtcaggcggtaggacgctcttcattttactgcctggagtactttccttctcagatgctgcgtaccggaaacaactttaccttcagctacacctttgaggacgttccttttcacagcagctacgctcacagccagagtttggaccgtctcatgaatcctctcatcgaccagtacctgtattacttgagcagaacaaacactccaagcggaaccactacgcagtccaggcttcagttttctcaagccggagcgagtgacattcgggaccagtctaggaactggcttcctggaccctgttaccgccagcagcgagtatcaaagacagctgcggacaacaacaacagtgattactcgtggactggagctaccaagtatcacctcaatggaagagactctctggtgaatccgggcacagccatggccagccacaaggacgatgaagaaaagtattttcctcagagcggggttctcatcttcggaaaacaagactcgggaaaaactaatgtggacattgaaaaggtcatgattacagacgaagaggaaatcaggaccaccaatcccgtggctacggagcagtatggttctgtatctaccaatctccagagcggcaacacacaagcagctacctcagatgtcaacacacaaggcgttcttccaggcatggtctggcaggacagagacgtgtacctgcagggacccatctgggcaaagattccacacacggacggacattttcacccttctcctcttatgggaggatttggaccgaagcaccctcccccgcagattctcatcaagaataccccggtacctgcgaatccttctaccaccttcagcgcggcaaagtttgcttccttcatcacacagtactccacggggcaggtcagcgtggagatcgagtgggagctgcagaaagagaacagcaaacgctggaaccccgagatccagtatacctccaactacaacaagtctgttaatgtggactttactgtggacactaatggcgtgtattcagagcctcgccccattggcacaagatacctgactcgtaatctgtaa

SEQ ID NO: 1116 - DNA, 2208 bp, Artificial Sequence
  Synthetic Polynucleotide
atggctgccgatggttatcttccagattggctcgaggacactctctctgaaggaataagacagtggtggaagctcaaacctggcccaccaccgccaaagcccgcagagcggcataaggacgacagcaggggtcttgtgcttcctgggtacaagtacctcggacccttcaacggactcgacaaaggagagccggtcaacgaggcagacgccgcggccctcgagcacgacaaggcctacgaccggcagcccgacagcggagacaacccgtacctcaagtacaaccacgccgacgcggagtttcaggagcgccttaaagaagatacgtcttttgggggcaacctcgcaagagcagtattccaggcgaaaaagagggttcttgaacctctgggcctggttgaggagcctgttaagacggctccgggaaaaaagaggccggtagagcactctcctgcggagctagattcctcctccggaactggaaagtcgggccaacagcctgcaagaaagagattgaattttggtcagactggagacgcagactccgtacctgacccccagcctctcggacagccaccagcagccccctctggtctgggaactaatacgatggcttcaggcagtggcgcaccaatggcagacaataacgagggcgccgacggagtgggtaattcctcgggaaattggcattgcgattccacatggatgggcgacagagtcatcaccaccagcacccgcacctgggctctgcccacctacaacaaccatctgtacaagcaaatttccagccagtctggggccagcaacgacaaccactactttggctacagcaccccttgggggtattttgacttcaacagattccactgccacttctccccacgtgactggcaaagactcatcaacaacaattggggattccggcccaaaagactcaacttcaagctctttaacattcaagtcaaggaggtcacgcagaatgacggtacgacgacgattgccaataaccttaccagcacggttcaggtgtttactgactcggagtaccagctcccgtacgtcctcggctcggcgcatcaaggatgcctcccgccgttcccagcagacgtcttcatggtgccacagtatggatacctcaccctgaacaacgggagtcaggcggtaggacgctcttcattttactgcctggagtactttccttctcagatgctgcgtaccggaaacaactttaccttcagctacacctttgaggacgttccttttcacagcagctacgctcacagccagagtttggaccgtctcatgaatcctctcatcgaccagtacctgtattacttgagcagaacaaacactccaagcggaaccactacgcagtccaggcttcagttttctcaagccggagcgagtgacattcgggaccagtctaggaactggcttcctggaccctgttaccgccagcagcgagtatcaaagacagctgcggacaacaacaacagtgattactcgtggactggagctaccaagtatcacctcaatggaagagactctctggtgaatccgggcacagccatggccagccacaaggacgatgaagaaaagtattttcctcagagcggggttctcatcttcggaaaacaagactcgggaaaaactaatgtggacattgaaaaggtcatgattacagacgaagaggaaatcaggaccaccaatcccgtggctacggagcagtatggttctgtatctaccaatctccagagcggcaacacacaagcagctacctcagatgtcaacacacaaggcgttcttccaggcatggtctggcaggacagagacgtgtacctgcagggacccatctgggcaaagattccacacacggacggacattttcacccttctcctcttatgggaggatttggaccgaagcaccctcccccgcagattctcatcaagaataccccggtacctgcgaatccttctaccaccttcagcgcggcaaagtttgcttccttcatcacacagtactccacggggcaggtcagcgtggagatcgagtgggagctgcagaaagagaacagcaaacgctggaaccccgagatccagtatacctccaactacaacaagtctgttaatgtggactttactgtggacactaatggcgtgtattcagagcctcgccccattggcacaagatacctgactcgtaatctgtaa

SEQ ID NO: 1117 - DNA, 2208 bp, Artificial Sequence
  Synthetic Polynucleotide
atggctgccgatggttatcttccagattggctcgaggacactctctctgaaggaataagacagtggtggaagctcgaacctggcccaccaccgccaaagcccgcagagcggcataaggacgacagcaggggtcttgtgcttcctgggtacaagtacctcggacccttcaacggactcgacaaaggagagccggtcaacgaggcagacgccgcggccctcgagcacgacaaggcctacgaccggcagctcgacagcggagacaacccgtacctcaagtacaaccacgccgacgcggagtttcaggagcgccttaaagaagatacgccttttgggggcaacctcgcaagagcagtattccaggcgaaaaagagggttcttgaacctctgggcctggttgaggagcctgttaagacggctccgggaaaaaagaggccggtagagcactctcctgcggagctagattcctcctccggaactggaaagtcgggccaacagcctgcaagaaagagattgaattttggtcagactggagacgcagactccgtacctgacccccagcctctcggacagccaccagcagccccctctggtctgggaactaatacgatggcttcaggcagtggcgcaccaatggcagacaataacgagggcgccgacggagtgggtaattcctcgggaaattggcattgcgattccacatggatgggcgacagagtcatcaccaccagcacccgcacctgggctctgcccacctacaacaaccatctgtacaagcaaatttccagccagtctggggccagcaacgacaaccactactttggctacagcaccccttgggggtattttgacttcaacagattccactgccacttctccccacgtgactggcaaagactcatcaacaacaattggggattccggcccaaaagactcaacttcaagctctttaacattcaagtcaaggaggtcacgcagaatgacggtacgacgacgattgccaataaccttaccagcacggttcaggtgtttactgactcggagtaccagctcccgtacgtcctcggctcggcgcatcaaggatgcctcccgccgttcccagcagacgtcttcatggtgccacagtatggatacctcaccctgaacaacgggagtcaggcggtaggacgctcttcattttactgcctggagtactttccttctcagatgctgcgtaccggaaacaactttaccttcagctacacctttgaggacgttccttttcacagcagctacgctcacagccagagtttggaccgtctcatgaatcctctcatcgaccagtacctgtattacttgagcagaacaaacactccaagcggaaccactacgcagtccaggcttcagttttctcaagccggagcgagtgacattcgggaccagtctaggaactggcttcctggaccctgttatcgccagcagcgagtatcaaagacagctgcggacaacaacaacagtgattactcgtggactggagctaccaagtatcacctcaatggaagagactctctggtgaatccgggcacagccatggccagccacgaggacgatgaagaaaagtattttcctcagagcggggttctcatcttcggaaaacaagactcgggaaaaactaatgtggacattgaaaaggtcatgattacagacgaagaggaaatcaggaccaccaatcccgtggctacggagcagtatggttctgtatctaccaatctccagagcggcaacacacaagcagctacctcagatgtcaacacacaaggcgttcttccaggcatggtctggcaggacagagacgtgtacctgcagggacccatctgggcaaagattccacacacggacggacattttcacccttctcctcttatgggaggatttggaccgaagcaccctcccccgcagattctcatcaagaataccccggtacctgcgaatccttctaccaccttcagcgcggcaaagtttgcttccttcatcacacagtactccacggggcaggtcagcgtggagatcgagtgggagctgcagaaagagaacagcaaacgctggaaccccgagatccagtatacctccaactacaacaagtctgttaatgtggactttactgtggacactaatggcgtgtattcagagcctcgccccattggcacaagatacctgactcgtaatctgtaa

SEQ ID NO: 1118 - DNA, 2205 bp, Artificial Sequence
  Synthetic Polynucleotide
atggctgccgatggttatcttccagattggctcgaggacactctctctgaaggaataagacagtggtggaagctcaaacctggcccaccaccgccaaagcccgcagagcggcataaggacgacagcaggggtcttgtgcttcctgggtacaagtacctcggacccttcaacggactcgacaaaggagagccggtcaacgaggcagacgccgcggccctcgagcacgacaaggcctacgaccggcagctcgacagcggagacaacccgtacctcaagtacaaccacgccgacgcggagtttcaggagcgccttaaagaagatacgtcttttgggggcaacctcgcaagagcagtattccaggcgaaaaagagggttcttgaacctctgggcctggttgaggagcctgttaagacggctccgggaaaaaagaggccggtagagcactctcctgcggagctagattcctcctccggaactggaaagtcgggccaacagcctgcaagaaagagattgaattttggtcagactggagacgcagactccgtacctgacccccagcctctcggacagccaccagcagccccctctggtctgggaactaatacgatggcttcaggcagtggcgcaccaatggcagacaataacgagggcgccgacggagtgggtaattcctcgggaaattggcattgcgattccacatggatgggcgacagagtcatcaccaccagcacccgcacctgggctctgcccacctacaacaaccatctgtacaagcaaatttccagccagtctggggccagcaacgacaaccactactttggctacagcaccccttgggggtattttgacttcaacagattccactgccacttctccccacgtgactggcaaagactcatcaacaacaattggggattccggcccaaaagactcaacttcaagctctttaacattcaagtcaaggaggtcacgcagaatgacggtacgacgacgattgccaataaccttaccagcacggttcaggtgtttactgactcggagtaccagctcccgtacgtcctcggctcggcgcatcaaggatgcctcccgccgttcccagcagacgtcttcatggtgccacagtatggatacctcaccctgaacaacgggagtcaggcggtaggacgctcttcattttactgcctggagtactttccttctcagatgctgcgtaccggaaacaactttaccttcagctacacctttgaggacgttccttttcacagcagctacgctcacagccagagtttggaccgtctcatgaatcctctcatcgaccagtacctgtattacttgagcagaacaaacactccaagcggaaccactacgcagtccaggcttcagttttctcaagccggagcgagtgacattcgggaccagtctaggaactggcttcctggaccctgttaccgccagcagcgagtatcaaagacagctgcggacaacaacagtgattactcgtggactggagctaccaagtatcacctcaatggaagagactctctggtgaatccgggcacagccatggccagccacaaggacgatgaagaaaagtattttcctcagagcggggttctcatcttcggaaaacaagactcgggaaaaactaatgtggacattgaaaaggtcatgattacagacgaagaggaaatcaggaccaccaatcccgtggctacggagcagtatggttctgtatctaccaatctccagagcggcaacacacaagcagctacctcagatgtcaacacacaaggcgttcttccaggcatggtctggcaggacagagacgtgtacctgcagggacccatctgggcaaagattccacacacggacggacattttcacccttctcctcttatgggaggatttggaccgaagcaccctcccccgcagattctcatcaagaataccccggtacctgcgaatccttctaccaccttcagcgcggcaaagtttgcttccttcatcacacagtactccacggggcaggtcagcgtggagatcgagtgggagctgcagaaagagaacagcaaacgctggaaccccgagatccagtatacctccaactacaacaagtctgttaatgtggactttactgtggacactaatggcgtgtattcagagcctcgccccattggcacaagatacctgactcgtaatctgtaa

SEQ ID NO: 1119 - DNA, 2208 bp, Artificial Sequence
  Synthetic Polynucleotide
atggctgccgatggttatcttccagattggctcgaggacactctctctgaaggaataagacagtggtggaagctcaaacctggcccaccaccgccaaagcccgcagagcggcataaggacgacagcaggggtcttgtgcttcctgggtacaagtacctcggacccttcaacggactcgacaaaggagagccggtcaacgaggcagacgccgcggccctcgagcacgacaaggcctacgaccggcagctcgacagcggagacaacccgtacctcaagtacaaccacgccgacgcggagtttcaggagcgccttaaagaagatacgccttttgggggcaacctcgcaagagcagtattccaggcgaaaaagagggttcttgaacctctgggcctggttgaggagcctgttaagacggctccgggaaaaaagaggccggtagagcactctcctgcggagctagattcctcctccggaactggaaagtcgggccaacagcctgcaagaaagagattgaattttggtcagactggagacgcagactccgtacctgacccccagcctctcggacagccaccagcagccccctctggtctgggaactaatacgatggcttcaggcagtggcgcaccaatggcagacaataacgagggcgccgacggagtgggtaattcctcgggaaattggcattgcgattccacatggatgggcgacagagtcatcaccaccagcacccgcacctgggctctgcccacctacaacaaccatctgtacaagcaaatttccagccagtctggggccagcaacgacaaccactactttggctacagcaccccttgggggtattttgacttcaacagattccactgccacttctccccacgtgactggcaaagactcatcaacaacaattggggattccggcccaaaagactcaacttcaagctctttaacattcaagtcaaggaggtcacgcagaatggcggtacgacgacgattgccaataaccttaccagcacggttcaggtgtttactgactcggagtaccagctcccgtacgtcctcggctcggcgcatcaaggatgcctcccgccgttcccagcagacgtcttcatggtgccacagtatggatacctcaccctgaacaacgggagtcaggcggtaggacgctcttcattttactgcctggagtactttccttctcagatgctgcgtaccggaaacaactttaccttcagctacacctttgaggacgttccttttcacagcagctacgctcacagccagagtttggaccgtctcatgaatcctctcatcgaccagtacctgtattacttgagcagaacaaacactccaagcggaaccactacgcagtccaggcttcagttttctcaagccggagcgagtgacattcgggaccagtctaggaactggcttcctggaccctgttaccgccagcagcgagtatcaaagacagctgcggacaacaacaacagtgattactcgtggactggagctaccaagtatcacctcaatggaagagactctctggtgaatccgggcacagccatggccagccacaaggacgatgaagaaaagtattttcctcagagcggggttctcatcttcggaaaacaagactcgggaaaaactaatgtggacattgaaaaggtcatgattacagacgaagaggaaatcaggaccaccaatcccgtggctacggagcagtatggttctgtatctaccaatctccagagcggcaacacacaagcagctacctcagatgtcaacacacaaggcgttcttccaggcatggtctggcaggacagagacgtgtacctgcagggacccatctgggcaaagattccacacacggacggacattttcacccttctcctcttatgggaggatttggaccgaagcaccctcccccgcagattctcatcaagaataccccggtacctgcgaatccttctaccaccttcagcgcggcaaagtttgcttccttcatcacacagtactccacggggcaggtcagcgtggagatcgagtgggagctgcagaaagagaacagcaaacgctggaaccccgagatccagtatacctccaactacaacaagtctgttaatgtggactttactgtggacactaatggcgtgtattcagagcctcgccccattggcacaagatacctgactcgtaatctgtaa

SEQ ID NO: 1120 - DNA, 2208 bp, Artificial Sequence
  Synthetic Polynucleotide
atggctgccgatggttatcttccagattggctcgaggacactctctctgaaggaataagacagtggtggaagctcaaacctggcccaccaccgccaaagcccgcagagcggcataaggacgacagcaggggtcttgtgcttcctgggtacaagtacctcggacccttcaacggactcgacaaaggagagccggtcaacgaggcagacgccgcggccctcgagcacgacaaggcctacgaccggcagctcgacagcggagacaacccgtacctcaagtacaaccacgccgacgcggagtttcaggagcgccttaaagaagatacgtcttttgggggcaacctcgcaagagcagtattccaggcgaaaaagggggttcttgaacctctgggcctggttgaggagcctgttaagacggctccgggaaaaaagaggccggtagagcactctcctgcggagctagattcctcctccggaactggaaagtcgggccaacagcctgcaagaaagagattgaattttggtcagactggagacgcagactccgtacctgacccccagcctctcggacagccaccagcagccccctctggtctgggaactaatacgatggcttcaggcagtggcgcaccaatggcagacaataacgagggcgccgacggagtgggtaattcctcgggaaattggcattgcgattccacatggatgggcgacagagtcatcaccaccagcacccgcacctgggctctgcccacctacaacaaccatctgtacaagcaaatttccagccagtctggggccagcaacgacaaccactactttggctacagcaccccttgggggtattttgacttcaacagattccactgccacttctccccacgtgactggcaaagactcatcaacaacaattggggattccggcccaaaagactcaacttcaagctctttaacattcaagtcaaggaggtcacgcagaatgacggtacgacgacgattgccaataaccttaccagcacggttcaggtgtttactgactcggagtaccagctcccgtacgtcctcggctcggcgcatcaaggatgcctcccgccgttcccagcagacgtcttcatggtgccacagtatggatacctcaccctgaacaacgggagtcaggcggtaggacgctcttcattttactgcctggagtactttccttctcagatgctgcgtaccggaaacaactttaccttcagctacacctttgaggacgttccttttcacagcagctacgctcacagccagagtttggaccgtctcatgaatcctctcatcgaccagtacctgtattacttgagcagaacaaacactccaagcggaaccactacgcagtccaggcttcagttttctcaagccggagcgagtgacattcgggaccagtctaggaactggcttcctggaccctgttaccgccagcagcgagtatcaaagacagctgcggacaacaacaacagtgattactcgtggactggagctaccaagtatcacctcaatggaagagactctctggtgaatccgggcacagccatggccagccacaaggacgatgaagaaaagtattttcctcagagcggggttctcatcttcggaaaacaagactcgggaaaaactaatgtggacattgaaaaggtcatgattacagacgaagaggaaatcaggaccaccaatcccgtggctacggagcagtatggttctgtatctaccaatctccagagcggcaacacacaagcagctacctcagatgtcaacacacaaggcgttcttccaggcatggtctggcaggacagagacgtgtacctgcagggacccatctgggcaaagattccacacacggacggacattttcacccttctcctcttatgggaggatttggaccgaagcaccctcccccgcagattctcatcaagaataccccggtacctgcgaatccttctaccaccttcagcgcggcaaagtttgcttccttcatcacacagtactccacggggcaggtcagcgtggagatcgagtgggagctgcagaaagagaacagcaaacgctggaaccccgagatccagtatacctccaactacaacaagtctgttaatgtggactttactgtggacactaatggcgtgtattcagagcctcgccccattggcacaagatacctgactcgtaatctgtaa

SEQ ID NO: 1121 - DNA, 2208 bp, Artificial Sequence
  Synthetic Polynucleotide
atggctgccgatggttatcttccagattggctcgaggacactctctctgaaggaataagacagtggtggaagctcaaacctggcccaccaccgccaaagcccgcagagcggcataaggacgacagcaggggtcttgtgcttcctgggtacaagtacctcggacccttcaacggactcgacaaaggagagccggtcaacgaggcagacgccgcggccctcgagcacgacaaggcctacgaccggcagctcgacagcggagacaacccgtacctcaagtacaaccacgccgacgcggagtttcaggagcgccttaaagaagatacgtcttttgggggcaacctcgcaagagcagtattccaggcgaaaaagagggttcttgaacctctgggcctggttgaggagcctgttaagacggctccgggaaaaaagaggccggtagagcactctcctgcggagctagattcctcctccggaactggaaagtcgggccaacagcctgcaagaaagagattgaattttggtcagactggagacgcagactccgtacctgacccccagcctctcggacagccaccagcagccccctctggtctgggaactaatacgatggcttcaggcagtggcgcaccaatggcagacaataacgagggcgccgacggagtgggtaattcctcgggaaattggcattgcgattccacatggatgggcgacagagtcatcaccaccagcacccgcacctgggctctgcccacctacaacaaccatctgtacaagcaaatttccagccagtctggggccagcaacgacaaccactactttggctacagcaccccttgggggtattttgacttcaacagattccactgccacttctccccacgtgactggcaaagactcatcaacaacaattggggattccggcccaaaagactcaacttcaagctctttaacattcaagtcaaggaggtcacgcagaatgacggtacgacgacgattgccaataaccttaccagcacggttcaggtgtttactgactcggagtaccagctcccgtacgtcctcggctcggcgcatcaaggatgcctcccgccgttcccagcagacgtcttcatggtgccacagtatggatacctcaccctgaacaacgggagtcaggcggtaggacgctcttcattttactgcctggagtactttccttctcagatgctgcgtaccggaaacaactttaccttcagctacacctttgaggacgttccttttcacagcagctacgctcacagccagagtttggaccgtctcatgaatcctctcatcgaccagtacctgtattacttgagcagaacaaacactccaagcggaaccactacgcagtccaggcttcagttttctcaagccggagcgagtgacattcgggaccagtctaggaactggcttcctggaccctgttaccgccagcagcgagtatcaaagacagctgcggacaacaacaacagtgattactcgtggactggagctaccaagtatcacctcaatggaagagactctctggtgaatccgggcacagccatggccagccacaaggacgatgaagaaaagtattttcctcagagcggggttctcatcttcggaaaacaagactcgggaaaaactaatgtggacattgaaaaggtcatgattacagacgaagaggaaatcaggaccaccaatcccgtggctacggagcagtatggttctgtatctaccaatctccagagcggcaacacacaagcagctacctcagatgtcaacacacaaggcgttcttccaggcatggtctggcaggacagagacgtgtacctgcagggacccatctgggcaaggattccacacacggacggacattttcacccttctcctcttatgggaggatttggaccgaagcaccctcccccgcagattctcatcaagaataccccggtacctgcgaatccttctaccaccttcagcgcggcaaagtttgcttccttcatcacacagtactccacggggcaggtcagcgtggagatcgagtgggagctgcagaaagagaacagcaaacgctggaaccccgagatccagtatacctccaactacaacaagtctgttaatgtggactttactgtggacactaatggcgtgtattcagagcctcgccccattggcacaagatacctgactcgtaatctgtaa

SEQ ID NO: 1122 - DNA, 2208 bp, Artificial Sequence
  Synthetic Polynucleotide
atggctgccgatggttatcttccagattggctcgaggacactctctctgaaggaataagacagtggtggaagctcaaacctggcccaccaccgccaaagcccgcagagcggcataaggacgacagcaggggtcttgtgcttcctgggtacaagtacctcggacccttcaacggactcgacaaaggagagccggtcaacgaggcagacgccgcggccctcgagcacgacaaggcctacgaccggcagctcgacagcggagacaacccgtacctcaagtacaaccacgccgacgcggagtttcaggagcgccttaaagaagatacgtcttttgggggcaacctcgcaagagcagtattccaggcgaaaaagagggttcttgaacctctgggcctggttgaggagcctgttaagacggctccgggaaaaaagaggccggtagggcactctcctgcggagctagattcctcctccggaactggaaagtcgggccaacagcctgcaagaaagagattgaattttggtcagactggagacgcagactccgtacctgacccccagcctctcggacagccaccagcagccccctctggtctgggaactaatacgatggcttcaggcagtggcgcaccaatggcagacaataacgagggcgccgacggagtgggtaattcctcgggaaattggcattgcgattccacatggatgggcgacagagtcatcaccaccagcacccgcacctgggctctgcccacctacaacaaccatctgtacaagcaaatttccagccagtctggggccagcaacgacaaccactactttggctacagcaccccttgggggtattttgacttcaacagattccactgccacttctccccacgtgactggcaaagactcatcaacaacaattggggattccggcccaaaagactcaacttcaagctctttaacattcaagtcaaggaggtcacgcagaatgacggtacgacgacgattgccaataaccttaccagcacggttcaggtgtttactgactcggagtaccagctcccgtacgtcctcggctcggcgcatcaaggatgcctcccgccgttcccagcagacgtcttcatggtgccacagtatggatacctcaccctgaacaacgggagtcaggcggtaggacgctcttcattttactgcctggagtactttccttctcagatgctgcgtaccggaaacaactttaccttcagctacacctttgaggacgttccttttcacagcagctacgctcacagccagagtttggaccgtctcatgaatcctctcatcgaccagtacctgtattacttgagcagaacaaacactccaagcggaaccactacgcagtccaggcttcagttttctcaagccggagcgagtgacattcgggaccagtctaggaactggcttcctggaccctgttaccgccagcagcgagtatcaaagacagctgcggacaacaacaacagtgattactcgtggactggagctaccaagtatcacctcaatggaagagactctctggtgaatccgggcacagccatggccagccacaaggacgatgaagaaaagtattttcctcagagcggggttctcatcttcggaaaacaagactcgggaaaaactaatgtggacattgaaaaggtcatgattacagacgaagaggaaatcaggaccaccaatcccgtggctacggagcagtatggttctgtatctaccaatctccagagcggcaacacacaagcagctacctcagatgtcaacacacaaggcgttcttccaggcatggtctggcaggacagagacgtgtacctgcagggacccatctgggcaaagattccacacacggacggacattttcacccttctcctcttatgggaggatttggaccgaagcaccctcccccgcagattctcatcaagaataccccggtacctgcgaatccttctaccaccttcagcgcggcaaagtttgcttccttcatcacacagtactccacggggcaggtcagcgtggagatcgagtgggagctgcagaaagagaacagcaaacgctggaaccccgagatccagtatacctccaactacaacaagtctgttaatgtggactttactgtggacactaatggcgtgtattcagagcctcgccccattggcacaagatacctgactcgtaatctgtaa

SEQ ID NO: 1123 - DNA, 2208 bp, Artificial Sequence
  Synthetic Polynucleotide
atggctgccgatggttatcttccagattggctcgaggacactctctctgaaggaataagacagtggtggaagctcaaacctggcccaccaccgccaaagcccgcagagcggcataaggacgacagcaggggtcttgtgcttcctgggtacaagtacctcggacccttcaacggactcgacaaaggagagccggtcaacgaggcagacgccgcggccctcgagcacgacaaggcctacgaccggcagctcgacagcggagacaacccgtacctcaagtacaaccacgccgacgcggagtttcaggagcgccttaaagaagatacgtcttttgggggcaacctcgcaagagcagtattccaggcgaaaaagagggttcttgaacctctgggcctggttgaggagcctgttaagacggctccgggaaaaaagaggccggtagagcactctcctgcggagctagattcctcctccggaactggaaagtcgggccaacagcctgcaagaaagagattgaattttggtcagactggagacgcagactccgtacctgacccccagcctctcggacagccaccagcagccccctctggtctgggaactaatacgatggcttcaggcagtggcgcaccaatggcagacaataacgagggcgccgacggagtgggtaattcctcgggaaattggcattgcgattccacatggatgggcgacagagtcatcaccaccagcacccgcacctgggctctgcccacctacaacaaccatctgtacaagcaaatttccagccagtctggggccagcaacgacaaccactactttggctacagcaccccttgggggtattttgacttcaacagattccactgccacttctccccacgtgactggcaaagactcatcaacaacaattggggattccggcccaaaagactcaacttcaagctctttaacattcaagtcaaggaggtcacgcagaatgacggtacgacgacgattgccaataaccttaccagcacggttcaggtgtttactgactcggagtaccagctcccgtacgtcctcggctcggcgcatcaaggatgcctcccgccgttcccagcagacgtcttcatggtgccacagtatggatacctcaccctgaacaacgggagtcaggcggtaggacgctcttcattttactgcctggagtactttccttctcagatgctgcgtaccggaaacaactttaccttcagctacacctttgaggacgttccttttcacagcagctacgctcacagccagagtttggaccgtctcatgaatcctctcatcgaccagtacctgtattacttgagcagaacaaacactccaagcggaaccactacgcagtccaggcttcagttttctcaagccggagcgagtgacattcgggaccagtctaggaactggcttcctggaccctgttaccgccagcagcgagtatcaaagacagctgcggacaacaacaacagtgattactcgtggactggagctaccaagtatcacctcaatggaagagactctctggtgaatccgggcacagccatggccagccacaaggacgatgaagaaaagtattttcctcagagcggggttctcatcttcggaaaacaagactcgggaaaaactaatgtggacattgaaaaggtcatgattacagacgaagaggaaatcaggaccaccaatcccgtggctacggagcagtatggttctgtatctaccaatctccagagcggcaacacacaagcagctacctcagatgtcaacacacaaggcgttcttccaggcatggtctggcaggacagagacgtgtacctgcagggacccatctgggcaaagattccacacacggacggacattttcacccttctcctcttatgggaggatttggaccgaagcaccctcccccgcagattctcatcaagaataccccggtacctgcgaatccttctaccaccttcagcgcggcaaagtttgcttccttcatcacacagtactccacggggcaggtcagcgtggagatcgagtgggagctgcagaaagggaacagcaaacgctggaaccccgagatccagtatacctccaactacaacaagtctgttaatgtggactttactgtggacactaatggcgtgtattcagagcctcgccccattggcacaagatacctgactcgtaatctgtaa

SEQ ID NO: 1124 - DNA, 2208 bp, Artificial Sequence
  Synthetic Polynucleotide
atggctgccgatggttatcttccagattggctcgaggacactctctctgaaggaataagacagtggtggaagctcaaacctggcccaccaccgccaaagcccgcagagcggcataaggacgacagcaggggtcttgtgcttcctgggtacaagtacctcggacccttcaacggactcgacaaaggagagccggtcaacgaggcagacgccgcggccctcgagcacgacaaggcctacgaccggcagctcgacagcggagacaacccgtacctcaagtacaaccacgccgacgcggagtttcaggagcgccttaaagaagatacgccttttgggggcaacctcgcaagagcagtattccaggcgaaaaagagggttcttgaacctctgggcctggttgaggagcctgttaagacggctccgggaaaaaaggggccggtagagcactctcctgcggagctagattcctcctccggaactggaaagtcgggccaacagcctgcaagaaagagattgaattttggtcagactggagacgcagactccgtacctgacccccagcctctcggacagccaccagcagccccctctggtctgggaactaatacgatggcttcaggcagtggcgcaccaatggcagacaataacgagggcgccgacggagtgggtaattcctcgggaaattggcattgcgattccacatggatgggcgacagagtcatcaccaccagcacccgcacctgggctctgcccacctacaacaaccatctgtacaagcaaatttccagccagtctggggccagcaacgacaaccactactttggctacagcaccccttgggggtattttgacttcaacagattccactgccacttctccccacgtgactggcaaagactcatcaacaacaattggggattccggcccaaaagactcaacttcaagctctttaacattcaagtcaaggaggtcacgcagaatgacggtacgacgacgattgccaataaccttaccagcacggttcaggtgtttactgactcggagtaccagctcccgtacgtcctcggctcggcgcatcaaggatgcctcccgccgttcccagcagacgtcttcatggtgccacagtatggatacctcaccctgaacaacgggagtcaggcggtaggacgctcttcattttactgcctggagtactttccttctcagatgctgcgtaccggaaacaactttaccttcagctacacctttgaggacgttccttttcacagcagctacgctcacagccagagtttggaccgtctcatgaatcctctcatcgaccagtacctgtattacttgagcagaacaaacactccaagcggaaccactacgcagtccaggcttcagttttctcaagccggagcgagtgacattcgggaccagtctaggagctggcttcctggaccctgttaccgccagcagcgagtatcaaagacagctgcggacaacaacaacagtgattactcgtggactggagctaccaagtatcacctcaatggaagagactctctggtgaatccgggcacagccatggccagccacaaggacgatgaagaaaagtattttcctcagagcggggttctcatcttcggaaaacaagactcgggaaaaactaatgtggacattgaaaaggtcatgattacagacgaagaggaaatcaggaccaccaatcccgtggctacggagcagtatggttctgtatctaccaatctccagagcggcaacacacaagcagctacctcagatgtcaacacacaaggcgttcttccaggcatggtctggcaggacagagacgtgtacctgcagggacccatctgggcaaagattccacacacggacggacattttcacccttctcctcttatgggaggatttggaccgaagcaccctcccccgcagattctcatcaagaataccccggtacctgcgaatccttctaccaccttcagcgcggcaaagtttgcttccttcatcacacagtactccacggggcaggtcagcgtggagatcgagtgggagctgcagaaagagaacagcaaacgctggaaccccgagatccagtatacctccaactacaacaagtctgttaatgtggactttactatggacactaatggcgtgtattcagagcctcgccccattggcacaagatacctgactcgtaatctgtaa

SEQ ID NO: 1125 - DNA, 2208 bp, Artificial Sequence
  Synthetic Polynucleotide
atggctgccgatggttatcttccagattggctcgaggacactctctctgaaggaataagacagtggtggaagctcaaacctggcccaccaccgccaaagcccgcagagcggcataaggacgacagcaggggtcttgtgcttcctgggtacaagtacctcggacccttcaacggactcgacaaaggagagccggtcaacgaggcagacgccgcggccctcgagcacgacaaggcctacgaccggcagctcgacagcggagacaacccgtacctcaagtacaaccacgccgacgcggagtttcaggagcgccttaaagaagatacgtcttttgggggcaacctcgcaagagcagtattccaggcgaaaaagagggttcttgaacctctgggcctggttgaggagcctgttaagacggctccgggaaaaaagaggccggtagagcactctcctgcggagctagattcctcctccggaactggaaagtcgggccaacagcctgcaagaaagagattgaattttggtcagactggagacgcagactccgtacctgacccccagcctctcggacagccaccagcagccccctctggtctgggaactaatacgatggcttcaggcagtggcgcaccaatggcagacaataacgagggcgccgacggagtgggtaattcctcgggaaattggcattgcgattccacatggatgggcgacagagtcatcaccaccagcacccgcacctgggctctgcccacctacaacaaccatctgtacaagcaaatttccagccagtctggggccagcaacgacaaccactactttggctacagcaccccttgggggtattttgacttcaacagattccactgccacttctccccacgtgactggcaaagactcatcaacaacaattggggattccggcccaaaagactcaacttcaagctctttaacattcaagtcaaggaggtcacgcagaatgacggtacgacgacgattgccaataaccttaccagcacggttcaggtgtttactgactcggagtaccagctcccgtacgtcctcggctcggcgcatcaaggatgcctcccgccgttcccagcagacgtcttcatggtgccacagtatggatacctcaccctgaacaacgggagtcaggcggtaggacgctcttcattttactgcctggagtactttccttctcagatgctgcgtaccggaaacaactttaccttcagctacacctttgaggacgttccttttcacagcagctacgctcacagccagagtttggaccgtctcatgaatcctctcatcgaccagtacctgtattacttgagcagaacaaacactccaagcggaaccactacgcagtccaggcttcagttttctcaagccggagcgagtgacattcgggaccagtctaggaactggcttcctggaccctgttaccgccagcagcgagtatcaaagacagctgcggacaacaacaacagtgattactcgtggactggagctaccaagtatcacctcaatggaagggactctctggtgaatccgggcacagccatggccagccacaaggacgatgaagaaaagtattttcctcagagcggggttctcatcttcggaaaacaagactcgggaaaaactaatgcggacattgaaaaggtcatgattacagacgaagaggaaatcaggaccaccaatcccgtggctacggagcagtatggttctgtatctaccaatctccagagcggcaacacacaagcagctacctcagatgtcaacacacaaggcgttcttccaggcatggtctggcaggacagagacgtgtacctgcagggacccatctgggcaaagattccacacacggacggacattttcacccttctcctcttatgggaggatttggaccgaagcaccctcccccgcagattctcatcaagaataccccggtacctgcgaatccttctaccaccttcagcgcggcaaagtttgcttccttcatcacacagtactccacggggcaggtcagcgtggagatcgagtgggagctgcagaaagagaacagcaaacgctggaaccccgagatccagtatacctccaactacaacaagtctgttaatgtggactttactgtggacactaatggcgtgtattcagagcctcgccccattggcacaagatacctgactcgtaatctgtaa

SEQ ID NO: 1126 - DNA, 2208 bp, Artificial Sequence
  Synthetic Polynucleotide
atggctgccgatggttatcttccagattggctcgaggacactctctctgaaggaataagacagtggtggaagctcaaacctggcccaccaccgccaaagcccgcagagcggcataaggacgacagcaggggtcttgtgcttcctgggtacaagtacctcggacccttcaacggactcgacaaaggagagccggtcaacgaggcagacgccgcggccctcgagcacgacaaggcctacgaccggcagctcgacagcggagacaacccgtacctcaagtacaaccacgccgacgcggagtttcaggagcgccttaaagaagatacgtcttttgggggcaacctcgcaagagcagtattccaggcgaaaaagagggttcttgaacctctgggcctggttgaggagcctgttaagacggctccgggaaaaaagaggccggtagagcactctcctgcggagctagattcctcctccggaactggaaagtcgggccaacagcctgcaagaaagagattgaattttggtcagactggagacgcagactccgtacctgacccccagcctctcggacagccaccagcagccccctctggtctgggaactaatacgatggcttcaggcagtggcgcaccaatggcagacaataacgagggcggcgacggagtgggtaattcctcgggaaattggcattgcgattccacatggatgggcgacagagtcatcaccaccagcacccgcacctgggctctgcccacctacaacaaccatctgtacaagcaaatttccagccagtctggggccagcaacgacaaccactactttggctacagcaccccttgggggtattttgacttcaacagattccactgccacttctccccacgtgactggcaaagactcatcaacaacaattggggattccggcccaaaagactcaacttcaagctctttaacattcaagtcaaggaggtcacgcagaatgacggtacgacgacgattgccaataaccttaccagcacggttcaggtgtttactgactcggagtaccagctcccgtacgtcctcggctcggcgcatcaaggatgcctcccgccgttcccagcagacgtcttcatggtgccacagtatggatacctcaccctgaacaacgggagtcaggcggtaggacgctcttcattttactgcctggagtactttccttctcagatgctgcgtaccggaaacaactttaccttcagctacacctttgaggacgttccttttcacagcagctacgctcacagccagagtttggaccgtctcatgaatcctctcatcgaccagtacctgtattacttgagcagaacaaacactccaagcggaaccactacgcagtccaggcttcagttttctcaagccggagcgagtgacattcgggaccagtctaggaactggcttcctggaccctgttaccgccagcagcgagtatcaaagacagctgcggacaacaacaacagtgattactcgtggactggagctaccaagtatcacctcaatggaagggactctctggtgaatccgggcacagccatggccagccacaaggacgatgaagaaaagtattttcctcagagcggggttctcatcttcggaaaacaagactcgggaaaaactaatgtggacattgaaaaggtcatgattacagacgaagaggaaatcaggaccaccaatcccgtggctacggagcagtatggttctgtatctaccaatctccagagcggcaacacacaagcagctacctcagatgtcaacacacaaggcgttcttccaggcatggtctggcaggacagagacgtgtacctgcagggacccatctgggcaaagattccacacacggacggacattttcacccttctcctcttatgggaggatttggaccgaagcaccctcccccgcagattctcatcaagaataccccggtacctgcgaatccttctaccaccttcagcgcggcaaagtttgcttccttcatcacacagtactccacggggcaggtcagcgtggagatcgagtgggagctgcagaaagagaacagcaaacgctggaaccccgagatccagtatacctccaactacaacaagtctgttaatgtggactttactgtggacactaatggcgtgtattcagagcctcgccccattggcacaagatacctgactcgtaatctgtaa

SEQ ID NO: 1127 - DNA, 2208 bp, Artificial Sequence
  Synthetic Polynucleotide
atggctgccgatggttatcttccagattggctcgaggacactctctctgaaggaataagacagtggtggaagctcaaacctggcccaccaccgccaaagcccgcagagcggcataaggacgacagcaggggtcttgtgcttcctgggtacaagtacctcggacccttcaacggactcgacaaaggagagccggtcaacgaggcagacgccgcggccctcgagcacgacaaggcctacgaccggcagctcgacagcggagacaacccgtacctcaagtacaaccacgccgacgcggagtttcaggagcgccttaaagaagatacgtcttttgggggcaacctcgcaagagcagtattccaggcgaaaaagagggttcttgaacctctgggcctggttgaggagcctgttaagacggctccgggaaaaaagaggccggtagagcactctcctgcggagctagattcctcctccggaactggaaagtcgggccaacagcctgcaagaaagagattgaattttggtcagactggagacgcagactccgtacctgacccccagcctctcggacagccaccagcagccccctctggtctgggaactaatacgatggcttcaggcagtggcgcaccaatggcagacaataacgagggcgccgacggagtgggtaattcctcgggaaattggcattgcgattccacatggatgggcgacagagtcatcaccaccagcacccgcacctgggctctgcccacctacaacaaccatctgtacaagcaaatttccagccagtctggggccagcaacgacaaccactactttggctacagcaccccttgggggtattttgacttcaacagattccactgccacttccccccacgtgactggcaaagactcatcaacaacaattggggattccggcccaaaagactcaacttcaagctctttaacattcaagtcaaggaggtcacgcagaatgacggtacgacgacgattgccaataaccttaccagcacggttcaggtgtttactgactcggagtaccagctcccgtacgtcctcggctcggcgcatcaaggatgcctcccgccgttcccagcagacgtcttcatggtgccacagtatggatacctcaccctgaacaacgggagtcaggcggtaggacgctcttcattttactgcctggagtactttccttctcagatgctgcgtaccggaaacaactttaccttcagctacacctttgaggacgttccttttcacagcagctacgctcacagccagagtttggaccgtctcatgaatcctctcatcgaccagtacctgtattacttgagcagaacaaacactccaagcggaaccactacgcagtccaggcttcagttttctcaagccggagcgagtgacattcgggaccagtctaggaactggcttcctggaccctgttaccgccagcagcgagtatcaaagacagctgcggacaacaacaacagtgattactcgtggactggagctaccaagtatcacctcaatggaagagactctctggtgaatccgggcacagccatggccagccacaaggacgatgaagaaaagtattttcctcagagcggggttctcatcttcggaaaacaagactcgggaaaaactaatgtggacattgaaaaggtcatgattacagacgaagaggaaatcaggaccaccaatcccgtggctacggagcagtatggttctgtatctaccaatctccagagcggcaacacacaagcagctacctcagatgtcaacacacaaggcgttcttccaggcatggtctggcaggacagagacgtgtacctgcagggacccatctgggcaaagattccacacacggacggacattttcacccttctcctcttatgggaggatttggaccgaagcaccctcccccgcagattctcatcaagaataccccggtacctgcgaatccttctaccaccttcagcgcggcaaagtttgcttccttcatcacacagtactccacggggcaggtcagcgtggagatcgagtgggagctgcagaaagagaacagcaaacgctggaaccccgagatccagtatacctccaactacaacaagtctgttaatgtggactttactgtggacactaatggcgtgtattcagagcctcgccccattggcacaagatacctgactcgtaatctgtaa

SEQ ID NO: 1128 - DNA, 2208 bp, Artificial Sequence
  Synthetic Polynucleotide
atggctgccgatggttatcttccagattggctcgaggacactctctctgaaggaataagacagtggtggaagctcaaacctggcccaccaccgccaaagcccgcagagcggcataaggacgacagcaggggtcttgtgcttcctgggtacaagtacctcggacccttcaacggactcgacaaaggagagccggtcaacgaggcagacgccgcggccctcgagcacgacaaggcctacgaccggcagctcgacagcggagacaacccgtacctcaagtacaaccacgccgacgcggagtttcaggagcgccttaaagaagatacgtcttttgggggcaacctcgcaagagcagtattccaggcgaaaaagagggttcttgaacctctgggcctggttgaggagcctgttaagacggctccgggaaaaaagaggccggtagagcactctcctgcggagctagattcctcctccggagctggaaagtcgggccaacagcctgcaagaaagagattgaattttggtcagactggagacgcagactccgtacctgacccccagcctctcggacagccaccagcagccccctctggtctgggaactaatacgatggcttcaggcagtggcgcaccaatggcagacaataacgagggcgccgacggagtgggtaattcctcgggaaattggcattgcgattccacatggatgggcgacagagtcatcaccaccagcacccgcacctgggctctgcccacctacaacaaccatctgtacaagcaaatttccagccagtctggggccagcaacgacaaccactaccttggctacagcaccccttgggggtattttgacttcaacagattccactgccacttctccccacgtgactggcaaagactcatcaacaacaattggggattccggcccaaaagactcaacttcaagctctttaacattcaagtcaaggaggtcacgcagaatgacggtacgacgacgattgccaataaccttaccagcacggttcaggtgtttactgactcggagtaccagctcccgtacgtcctcggctcggcgcatcaaggatgcctcccgccgttcccagcagacgtcttcatggtgccacagtatggatacctcaccctgaacaacgggagtcaggcggtaggacgctcttcattttactgcctggagtactttccttctcagatgctgcgtaccggaaacaactttaccttcagctacacctttgaggacgttccttttcacagcagctacgctcacagccagagtttggaccgtctcatgaatcctctcatcgaccagtacctgtattacttgagcagaacaaacactccaagcggaaccactacgcagtccaggcttcagttttctcaagccggagcgagtgacattcgggaccagtctaggaactggcttcctggaccctgttaccgccagcagcgagtatcaaagacagctgcggacaacaacaacagtgattactcgtggactggagctaccaagtatcacctcaatggaagagactctctggtgaatccgggcacagccatggccagccacaaggacgatgaagaaaagtattttcctcagagcggggttctcatcttcggaaaacaagactcgggaaaaactaatgtggacattgaaaaggtcatgattacagacgaagaggaaatcaggaccaccaatcccgtggctacggagcagtatggttctgtatctaccaatctccagagcggcaacacacaagcagctacctcagatgtcaacacacaaggcgttcttccaggcatggtctggcaggacagagacgtgtacctgcagggacccatctgggcaaagattccacacacggacggacattttcacccttctcctcttatgggaggatttggaccgaagcaccctcccccgcagattctcatcaagaataccccggtacctgcgaatccttctaccaccttcagcgcggcaaagtttgcttccttcatcacacagtactccacggggcaggtcagcgtggagatcgagtgggagctgcagaaagagaacagcaaacgctggaaccccgagatccagtatacctccaactacaacaagtctgttaatgtggactttactgtggacactaatggcgtgtattcagagcctcgccccattggcacaagatacctgactcgtaatctgtaa

SEQ ID NO: 1129 - DNA, 2208 bp, Artificial Sequence
  Synthetic Polynucleotide
atggctgccgatggttatcttccagattggctcgaggacactctctctgaaggaataagacagtggtggaagctcaaacctggcccaccaccgccaaagcccgcagagcggcataaggacgacagcaggggtcttgtgcttcctgggtacaagtacctcggacccttcaacggactcgacaaaggagagccggtcaacgaggcagacgccgcggccctcgagcacgacaaggcctacgaccggcagctcgacagcggagacaacccgtacctcaagtacaaccacgccgacgcggagtttcaggagcgccttaaagaagatacgccttttgggggcaacctcgcaagagcagtattccaggcgaaaaagagggttcttgaacctctgggcctggttgaggagcctgttaagacggctccgggaaaaaagaggccggtagagcactctcctgcggagctagattcctcctccggaactggaaagtcgggccaacagcctgcaagaaagagattgaattttggtcagactggagacgcagactccgtacctgacccccagcctctcggacagccaccagcagccccctctggtctgggaactaatacgatggtttcaggcagtggcgcaccaatggcagacaataacgagggcgccgacggagtgggtaattcctcgggaaattggcattgcgattccacatggatgggcgacagagtcatcaccaccagcacccgcacctgggctctgcccacctacaacaaccatctgtacaagcaaatttccagccagtctggggccagcaacgacaaccactactttggctacagcaccccttgggggtattttgacttcaacagattccactgccacttctccccacgtgactggcaaagactcatcaacaacaattggggattccggcccaaaagactcaacttcaagctctttaacattcaagtcaaggaggtcacgcagaatgacggtacgacgacgattgccaataaccttaccagcacggttcaggtgtttactgactcggagtaccagctcccgtacgtcctcggctcggcgcatcaaggatgcctcccgccgttcccagcagacgtcttcatggtgccacagtatggatacctcaccctgaacaacgggagtcaggcggtaggacgctcttcattttactgcctggagtactttccttctcagatgctgcgtaccggaaacaactttaccttcagctacacctttgaggacgttccttttcacagcagctacgctcacagccagagtttggaccgtctcatgaatcctctcatcgaccagtacctgtattacttgagcagaacaaacactccaagcggaaccactacgcagtccaggcttcagttttctcaagccggagcgagtgacattcgggaccagtctaggaactggcttcctggaccctgttaccgccagcagcgagtatcaaagacagctgcggacaacaacaacagtgattactcgtggactggagctaccaagtatcacctcaatggaagagactctctggtgaatccgggcacagccatggccagccacaaggacgatgaagaaaagtattttcctcagagcggggttctcatcttcggaaaacaagactcgggaaaaactaatgtggacattgaaaaggtcatgattacagacgaagaggaaatcaggaccaccaatcccgtggctacggagcagtatggttctgtatctaccaatctccagagcggcaacacacaagcagctacctcagatgtcaacacacaaggcgttcttccaggcatggtctggcaggacagagacgtgtacctgcagggacccatctgggcaaagattccacacacggacggacattttcacccttctcctcttatgggaggatttggaccgaagcaccctcccccgcagattctcatcaagaataccccggtacctgcgaatccttctaccaccttcagcgcggcaaagtttgcttccttcatcacacaatactccacggggcaggtcagcgtggagatcgagtgggagctgcagaaagagaacagcaaacgctggaaccccgagatccagtatacctccaactacaacaagtctgttaatgtggactttactgtggacactaatggcgtgtattcagagcctcgccccattggcacaagatacctgactcgtaatctgtaa

SEQ ID NO: 1130 - DNA, 2208 bp, Artificial Sequence
  Synthetic Polynucleotide
atggctgccgatggttatcttccagattggctcgaggacactctctctgaaggaataagacagtggtgggagctcaaacctggcccaccaccgccaaagcccgcagagcggcataaggacgacagcaggggtcttgtgcttcctgggtacaagtacctcggacccttcaacggactcgacaaaggagagccggtcaacgaggcagacgccgcggccctcgagcacgacaaggcctacgaccggcagctcgacagcggagacaacccgtacctcaagtacaaccacgccgacgcggagtttcaggagcgccttaaagaagatacgtcttttgggggcaacctcgcaagagcagtattccaggcgaaaaagagggttcttgaacctctgggcctggttgaggagcctgttaagacggctccgggaaaaaagaggccggtagagcactctcctgcggagctagattcctcctccggaactggaaagtcgggccaacagcctgcaagaaagagattgaattttggtcagactggagacgcagactccgtacctgacccccagcctctcgggcagccaccagcagccccctctggtctgggaactaatacgatggcttcaggcagtggcgcaccaatggcagacaataacgagggcgccgacggagtgggtaattcctcgggaaattggcattgcgattccacatggatgggcgacagagtcatcaccaccagcacccgcacctgggctctgcccacctacaacaaccatctgtacaagcaaatttccagccagtctggggccagcaacgacaaccactactttggctacagcaccccttgggggtattttgacttcaacagattccactgccacttctccccacgtgactggcaaagactcatcaacaacaattggggattccggcccaaaagactcaacttcaagctctttaacattcaagtcaaggaggtcacgcagaatgacggtacgacgacgattgccaataaccttaccagcacggttcaggtgtttactgactcggagtaccagctcccgtacgtcctcggctcggcgcatcaaggatgcctcccgccgttcccagcagacgtcttcatggtgccacagtatggatacctcaccctgaacaacgggagtcaggcggtaggacgctcttcattttactgcctggagtactttccttctcagatgctgcgtaccggaaacaactttaccttcagctacacctttgaggacgttccttttcacagcagctacgctcacagccagagtttggaccgtctcatgaatcctctcatcgaccagtacctgtattacttgagcagaacaaacactccaagcggaaccactacgcagtccaggcttcagttttctcaagccggagcgagtgacattcgggaccagtctaggaactggcttcctggaccctgttaccgccagcagcgagtatcaaagacagctgcggacaacaacaacagtgattactcgtggactggagctaccaagtatcacctcaatggaagagactctctggtgaatccgggcacagccatggccagccacaaggacgatgaagaaaagtattttcctcagagcggggttctcatcttcggaaaacaagactcgggaaaaactaatgtggacattgaaaaggtcatgattacagacgaagaggaaatcaggaccaccaatcccgtggctacggagcagtatggttctgtatctaccaatctccagagcggcaacacacaagcagctacctcagatgtcaacacacaaggcgttcttccaggcatggtctggcaggacagagacgtgtacctgcagggacccatctgggcaaagattccacacacggacggacattttcacccttctcctcttatgggaggatttggaccgaagcaccctcccccgcagattctcatcaagaataccccggtacctgcgaatccttctaccaccttcagcgcggcaaagtttgcttccttcatcacacagtactccacggggcaggtcagcgtggagatcgagtgggagctgcagaaagagaacagcaaacgctggaaccccgagatccagtatacctccaactacaacaagtctgttaatgtggactttactgtggacactaatggcgtgtattcagagcctcgccccattggcacaagatacctgactcgtaatctgtaa

SEQ ID NO: 1131 - DNA, 2208 bp, Artificial Sequence
  Synthetic Polynucleotide
atggctgccgatggttatcttccagattggctcgaggacactctctctgaaggaataagacagtggtggaagctcaaacctggcccaccaccgccaaagcccgcagagcggcataaggacgacagcaggggtcttgtgcttcctgggtacaagtacctcggacccttcaacggactcgacaaaggagagccggtcaacgaggcagacgccgcggccctcgagcacgacaaggcctacgaccggcagctcgacagcggagacaacccgtacctcaagtacaaccacgccgacgcggagtttcaggagcgccttaaagaagatacgccttttgggggcaacctcgcaagagcagtattccaggcgaaaaagagggttcttgaacctctgggcctggttgaggagcctgttaagacggctccgggaaaaaagaggccggtagggcactctcctgcggagctagattcctcctccggaactggaaagtcgggccaacagcctgcaagaaagagattgaattttggtcagactggagacgcagactccgtacctgacccccagcctctcggacagccaccagcagccccctctggtctgggaactaatacgatggcttcaggcagtggcgcaccaatggcagacaataacgagggcgtcgacggagtgggtaattcctcgggaaattggcattgcgattccacatggatgggcgacagagtcatcaccaccagcacccgcacctgggctctgcccacctacaacaaccatctgtacaagcaaatttccagccagtctggggccagcaacgacaaccactactttggctacagcaccccttgggggtattttgacttcaacagattccactgccacttctccccacgtgactggcaaagactcatcaacaacaattggggattccggcccaaaagactcaacttcaagctctttaacattcaagtcaaggaggtcacgcagaatgacggtacgacgacgattgccaataaccttaccagcacggttcaggtgtttactgactcggagtaccagctcccgtacgtcctcggctcggcgcatcaaggatgcctcccgccgttcccagcagacgtcttcatggtgccacagtatggatacctcaccctgaacaacgggagtcaggcggtaggacgctcttcattttactgcctggagtactttccttctcagatgctgcgtaccggaaacaactttaccttcagctacacctttgaggacgttccttttcacagcagctacgctcacagccagagtttggaccgtctcatgaatcctctcatcgaccagtacctgtattacttgagcagaacaaacactccaagcggaaccactacgcagtccaggcttcagttttctcaagccggagcgagtgacattcgggaccagtctaggaactggcttcctggaccctgttaccgccagcagcgagtatcaaagacagctgcggacaacaacaacagtgattactcgtggactggagctaccaagtatcacctcaatggaagagactctctggtgaatccgggcacagccatggccagccacaaggacgatgaagaaaagtattttcctcagagcggggttctcatcttcggaaaacaagactcgggaaaaactaatgtggacattgaaaaggtcatgattacagacgaagaggaaatcaggaccaccaatcccgtggctacggagcagtatggttctgtatctaccaatctccagagcggcaacacacaagcagctacctcagatgtcaacacacaaggcgttcttccaggcatggtctggcaggacagagacgtgtacctgcagggacccatctgggcaaagattccacacacggacggacattttcacccttctcctcttatgggaggatttggaccgaagcaccctcccccgcagattctcatcaagaataccccggtacctgcgaatccttctaccaccttcagcgcggcaaagtttgcttccttcatcacacagtactccacggggcaggtcagcgtggagatcgagtgggagctgcagaaagagaacagcaaacgctggaaccccgagatccagtatacctccaactacaacaagtctgttaatgtggactttactgtggacactaatggcgtgtattcagagcctcgccccattggcacaagatacctgactcgtaatctgtaa

SEQ ID NO: 1132 - DNA, 2208 bp, Artificial Sequence
  Synthetic Polynucleotide
atggctgccgatggttatcttccagattggctcgaggacactctctctgaaggaataagacagtggtgggagctcaaacctggcccaccaccgccaaagcccgcagagcggcataaggacgacagcaggggtcttgtgcttcctgggtacaagtacctcggacccttcaacggactcgacaaaggagagccggtcaacgaggcagacgccgcggccctcgagcacgacaaggcctacgaccggcagctcgacagcggagacaacccgtacctcaagtacaaccacgccgacgcggagtttcaggagcgccttaaagaagatacgtcttttgggggcaacctcgcaagagcagtattccaggcgaaaaagagggttcttgaacctctgggcctggttgaggagcctgttaagacggctccgggaaaaaagaggccggtagagcactctcctgcggagctagattcctcctccggaactggaaagtcgggccaacagcctgcaagaaagagattgaattttggtcagactggagacgcagactccgtacctgacccccagcctctcgggcagccaccagcagccccctctggtctgggaactaatacgatggcttcaggcagtggcgcaccaatggcagacaataacgagggcgccgacggagtgggtaattcctcgggaaattggcattgcgattccacatggatgggcgacagagtcatcaccaccagcacccgcacctgggctctgcccacctacaacaaccatctgtacaagcaaatttccagccagtctggggccagcaacgacaaccactactttggctacagcaccccttgggggtattttgacttcaacagattccactgccacttctccccacgtgactggcaaagactcatcaacaacaattggggattccggcccaaaagactcaacttcaagctctttaacattcaagtcaaggaggtcacgcagaatgacggtacgacgacgattgccaataaccttaccagcacggttcaggtgtttactgactcggagtaccagctcccgtacgtcctcggctcggcgcatcaaggatgcctcccgccgttcccagcagacgtcttcatggtgccacagtatggatacctcaccctgaacaacgggagtcaggcggtaggacgctcttcattttactgcctggagtactttccttctcagatgctgcgtaccggaaacaactttaccttcagctacacctttgaggacgttccttttcacagcagctacgctcacagccagagtttggaccgtctcatgaatcctctcatcgaccagtacctgtattactttagcagaacaaacactccaagcggaaccactacgcagtccaggcttcagttttctcaagccggagcgagtgacattcgggaccagtctaggaactggcttcctggaccctgttaccgccagcagcgagtatcaaagacagctgcggacaacaacaacagtgattactcgtggactggagctaccaagtatcacctcaatggaagagactctctggtgaatccgggcacagccatggccagccacaaggacgatgaagaaaagtattttcctcagagcggggttctcatcttcggaaaacaagactcgggaaaaactaatgtggacattgaaaaggtcatgattacagacgaagaggaaatcaggaccaccaatcccgtggctacggagcagtatggttctgtatctaccaatctccagagcggcaacacacaagcagctacctcagatgtcaacacacaaggcgttcttccaggcatggtctggcaggacagagacgtgtacctgcagggacccatctgggcaaagattccacacacggacggacattttcacccttctcctcttatgggaggatttggaccgaagcaccctcccccgcagattctcatcaagaataccccggtacctgcgaatccttctaccaccttcagcgcggcaaagtttgcttccttcatcacacagtactccacggggcaggtcagcgtggagatcgagtgggagctgcagaaagagaacagcaaacgctggaaccccgagatccagtatacctccaactacaacaagtctgttaatgtggactttactgtggacactaatggcgtgtattcagagcctcgccccattggcacaagatacctgactcgtaatctgtaa

SEQ ID NO: 1133 - DNA, 2208 bp, Artificial Sequence
  Synthetic Polynucleotide
atggctgccgatggttatcttccagattggctcgaggacactctctctgaaggaataagacagtggtggaagctcaaacctggcccaccaccgccaaagcccgcagagcggcataaggacgacagcaggggtcttgtgcttcctgggtacaagtacctcggacccttcaacggactcgacaaaggagagccggtcaacgaggcagacgccgcggccctcgagcacgacaaggcctacgaccggcagctcgacagcggagacaacccgtacctcaagtacaaccacgccgacgcggagtttcaggagcgccttaaagaagatacgtcttttgggggcaacctcgcaagagcagtattccaggcgaaaaagagggttcttgaacctctgggcctggttgaggagcctgttaagacggctccgggaaaaaagaggccggtagagcactctcctgcggagctagattcctcctccggaactggaaagtcgggccaacagcctgcaagaaagagattgaattttggtcagactggagacgcagactccgtacctgacccccagcctctcggacagccaccagcagccccctctggtctgggaactaatacgatggcttcaggcagtggcgcaccaatggcagacaataacgagggcgccgacggagtgggtaattcctcgggaaattggcattgcgattccacatggatgggcgacagagtcatcaccaccagcacccgcacctgggctctgcccacctacaacaaccatctgtacaagcaaatttccagccagtctggggccagcaacgacaaccactactttggctacagcaccccttgggggtattttgacttcaacagattccactgccacttctccccacgtgactggcaaagactcatcaacaacaattggggattccggcccaaaagactcaacttcaagctctttaacattcaagtcaaggaggtcacgcagaatgacggtacgacgacgattgccaataaccttaccagcacggttcaggtgtttactgactcggagtaccagctcccgtacgtcctcggctcggcgcatcaaggatgcctcccgccgttcccagcagacgtcttcatggtgccacagtatggatacctcaccctgaacaacgggagtcaggcggtaggacgctcttcattttaccgcctggagtactttccttctcagatgctgcgtaccggaaacaactttaccttcagctacacctttgaggacgttccttttcacagcagctacgctcacagccagagtttggaccgtctcatgaatcctctcatcgaccagtacctgtattacttgagcagaacaaacactccaagcggaaccactacgcagtccaggcttcagttttctcaagccggagcgagtgacattcgggaccagtctaggaactggcttcctggaccctgttaccgccagcagcgagtatcaaagacagctgcggacaacaacaacagtgattactcgtggactggagctaccaagtatcacctcaatggaagagactctctggtgaatccgggcacagccatggccagccacaaggacgatgaagaaaagtattttcctcagagcggggttctcatcttcggaaaacaagactcgggaaaaactaatgtggacattgaaaaggtcatgattacagacgaagaggaaatcaggaccaccaatcccgtggctacggagcagtatggttctgtatctaccaatctccagagcggcaacacacaagcagctacctcagatgtcaacacacaaggcgttcttccaggcatggtctggcaggacagagacgtgtacctgcagggacccatctgggcaaagattccacacacggacggacattttcacccttctcctcttatgggaggatttggaccgaagcaccctcccccgcagattctcatcaagaataccccggtacctgcgaatccttctaccaccttcagcgcggcaaagtttgcttccttcatcacacagtactccacggggcaggtcagcgtggagatcgagtgggagctgcagaaagagaacagcaaacgctggaaccccgagatccagtatacctccaactacaacaagtctgttaatgtggactttactgtggacactaatggcgtgtattcagagcctcgccccattggcacaagatacctgactcgtaatctgtaa

SEQ ID NO: 1134 - DNA, 2208 bp, Artificial Sequence
  Synthetic Polynucleotide
atggctgccgatggttatcttccagattggctcgaggacactctctctgaaggaataagacagtggtggaagctcaaacctggcccaccaccgccaaagcccgcagagcggcataaggacgacagcaggggtcttgtgcttcctgggtacaagtacctcggacccttcaacggactcgacaaaggagagccggtcaacgaggcagacgccgcggccctcgagcacgacaaggcctacgaccggcagctcgacagcggagacaacccgtacctcaagtacaaccacgccgacgcggagtttcaggagcgccttaaagaagatacgtcttttgggggcaacctcgcaagagcagtattccaggcgaaaaagagggttcttgaacctctgggcctggttgaggagcctgttaagacggctccgggaaaaaagaggccggtagagcactctcctgcggagctagattcctcctccggaactggaaagtcgggccaacagcctgcaagaaagagattgaattttggtcagactggagacgcagactccgtacctgacccccagcctctcggacagccaccagcagccccctctggtctgggaactaatacgatggcttcaggcagtggcgcaccaatggcagacaataacgagggcgccgacggagtgggtaattcctcgggaaattggcattgcgattccacatggatgggcgacagagtcatcaccaccagcacccgcacctgggctctgcccacctacaacaaccatctgtacaagcaaatttccagccagtctggggccagcaacgacaaccactaccttggctacagcaccccttgggggtattttgacttcaacagattccactgccacttctccccacgtgactggcaaagactcatcaacaacaattggggattccggcccaaaagactcaacttcaagctctttaacattcaagtcaaggaggtcacgcagaatgacggtacgacgacgattgccaataaccttaccagcacggttcaggtgtttactgactcggagtaccagctcccgtacgtcctcggctcggcgcatcaaggatgcctcccgccgttcccagcagacgtcttcatggtgccacagtatggatacctcaccctgaacaacgggagtcaggcggtaggacgctcttcattttactgcctggagtactttccttctcagatgctgcgtaccggaaacaactttaccttcagctacacctttgaggacgttccttttcacagcagctacgctcacagccagagtttggaccgtctcatgaatcctctcatcgaccagtacctgtattacttgagcagaacaaacactccaagcggaaccactacgcagtccaggcttcagttttctcaagccggagcgagtgacattcgggaccagtctaggaactggcttcctggaccctgttaccgccagcagcgagtatcaaagacagctgcggacaacaacaacagtgattactcgtggactggagctaccaagtatcacctcaatggaagagactctctggtgaatccgggcacagccatggccagccacaaggacgatgaagaaaagtattttcctcagagcggggttctcatcttcggaaaacaagactcgggaaaaactaatgtggacattgaaaaggtcatgattacagacgaagaggaaatcaggaccaccaatcccgtggctacggagcagtatggttctgtatctaccaatctccagagcggcaacacacaagcagctacctcagatgtcaacacacaaggcgttcttccaggcatggtctggcaggacggagacgtgtacctgcagggacccatctgggcaaagattccacacacggacggacattttcacccttctcctcttatgggaggatttggaccgaagcaccctcccccgcagattctcatcaagaataccccggtacctgcgaatccttctaccaccttcagcgcggcaaagtttgcttccttcatcacacagtactccacggggcaggtcagcgtggagatcgagtgggagctgcagaaagagaacagcaaacgctggaaccccgagatccagtatacctccaactacaacaagtctgttaatgtggactttactgtggacactaatggcgtgtattcagagcctcgccccattggcacaagatacctgactcgtaatctgtaa

SEQ ID NO: 1135 - DNA, 2208 bp, Artificial Sequence
  Synthetic Polynucleotide
atggctgccgatggttatcttccagattggctcgaggacactctctctgaaggaataagacagtggtggaagctcaaacctggcccaccaccgccaaagcccgcagagcggcataaggacgacagcaggggtcttgtgcttcctgggtacaagtacctcggacccttcaacggactcgacaaaggagagccggtcaacgaggcagacgccgcggccctcgagcacgacaaggcctacgaccggcagctcgacagcggagacaacccgtacctcaagtacaaccacgccgacgcggagtttcaggagcgccttaaagaagatacgtcttttgggggcaacctcgcaagagcagtattccaggcgaaaaagagggttcttgaacctctgggcctggttgaggagcctgttaagacggctccgggaaaaaagaggccggtagagcactctcctgcggagctagattcctcctccggaactggaaagtcgggccaacagcctgcaagaaagagattgaattttggtcagactggagacgcagactccgtacctgacccccagcctctcggacagccaccagcagccccctctggtctgggaactaatacgatggcttcaggcagtggcgcaccaatggcagacaataacgagggcgccgacggagtgggtaattcctcgggaaattggcattgcgattccacatggatgggcgacagagtcatcaccaccagcacccgcacctgggctctgcccacctacaacaaccatctgtacaagcaaatttccagccagtctggggccagcaacgacaaccactactttggctacagcaccccttgggggtattttgacttcaacagattccactgccacttctccccacgtgactggcaaagactcatcaacaacaattggggattccggcccaaaagactcaacttcaagctctttaacattcaagtcaaggaggtcacgcagaatgacggtacgacgacgattgccaataaccttaccagcacggttcaggtgtttactgactcggagtaccagctcccgtacgtcctcggctcggcgcatcaaggatgcctcccgccgttcccagcagacgtcttcatggtgccacagtatggatacctcaccctgaacaacgggagtcaggcggtaggacgctcttcattttactgcctggagtactttcctcctcagatgctgcgtaccggaaacaactttaccttcagctacacctttgaggacgttccttttcacagcagctacgctcacagccagagtttggaccgtctcatgaatcctctcatcgaccagtacctgtattacttgagcagaacaaacactccaagcggaaccactacgcagtccaggcttcagttttctcaagccggagcgagtgacattcgggaccagtctaggaactggcttcctggaccctgttaccgccagcagcgagtatcaaagacagctgcggacaacaacaacagtgattactcgtggactggagctaccaagtatcacctcaatggaagagactctctggtgaatccgggcacagccatggccagccacaaggacgatgaagaaaagtattttcctcagagcggggttctcatcttcggaaaacaagactcgggaaaaactaatgtggacattgaaaaggtcatgattacagacgaagaggaaatcaggaccaccaatcccgtggctacggagcagtatggttctgtatctaccaatctccagagcggcaacacacaagcagctacctcagatgtcaacacacaaggcgttcttccaggcatggtctggcaggacagagacgtgtacctgcagggacccatctgggcaaagattccacacacggacggacattttcacccttctcctcttatgggaggatttggaccgaagcaccctcccccgcagattctcatcaagaataccccggtacctgcgaatccttctaccaccttcagcgcggcaaagtttgcttccttcatcacacagtactccacggggcaggtcagcgtggagatcgagtgggagctgcagaaagagaacagcaaacgctggaaccccgagatccagtatacctccaactacaacaagtctgttaatgtggactttactgtggacactaatggcgtgtattcagagcctcgccccattggcacaagatacctgactcgtaatctgtaa

SEQ ID NO: 1136 - DNA, 2208 bp, Artificial Sequence
  Synthetic Polynucleotide
atggctgccgatggttatcttccagattggctcgaggacactctctctgaaggaataagacagtggtggaagctcaaacctggcccaccaccgccaaagcccgcagagcggcataaggacgacagcaggggtcttgtgcttcctgggtacaagtacctcggacccttcaacggactcgacaaaggagagccggtcaacgaggcagacgccgcggccctcgagcacgacaaggcctacgaccggcagctcgacagcggagacaacccgtacctcaagtacaaccacgccgacgcggagtttcaggagcgccttaaagaagatacgtcttttgggggcaacctcgcaagagcagtattccaggcgaaaaagagggttcttgaacctctgggcctggttgaggagcctgttaagacggctccgggaaaaaagaggccggtagagcactctcctgcggagctagattcctcctccggaactggaaagtcgggccaacagcctgcaagaaagagattgaattttggtcagactggagacgcagactccgtacctgacccccagcctctcggacagccaccagcagccccctctggtctgggaactaatacgatggcttcaggcagtggcgcaccaatggcagacaataacgagggcgccgacggggtgggtaattcctcgggaaattggcattgcgattccacatggatgggcgacagagtcatcaccaccagcacccgcgcctgggctctgcccacctacaacaaccatctgtacaagcaaatttccagccagtctggggccagcaacgacaaccactaccttggctacagcaccccttgggggtattttgacttcaacagattccactgccacttctccccacgtgactggcaaagactcatcaacaacaattggggattccggcccaaaagactcaacttcaagctctttaacattcaagtcaaggaggtcacgcagaatgacggtacgacgacgattgccaataaccttaccagcacggttcaggtgtttactgactcggagtaccagctcccgtacgtcctcggctcggcgcatcaaggatgccccccgccgttcccagcagacgtcttcatggtgccacagtatggatacctcaccctgaacaacgggagtcaggcggtaggacgctcttcattttactgcctggagtactttccttctcagatgctgcgtaccggaaacaactttaccttcagctacacctttgaggacgttccttttcacagcagctacgctcacagccagagtttggaccgtctcatgaatcctctcatcgaccagtacctgtattacttgagcagaacaaacactccaagcggaaccactacgcagtccaggcttcagttttctcaagccggagcgagtgacattcgggaccagtctaggaactggcttcctggaccctgttaccgccagcagcgagtatcaaagacagctgcggacaacaacaacagtgattactcgtggactggagctaccaagtatcacctcaatggaagagactctctggtgaatccgggcacagccatggccagccacaaggacgatgaagaaaagtattttcctcagagcggggttctcatcttcggaaaacaagactcgggaaaaactaatgtggacattgaaaaggtcatgattacagacgaagaggaaatcaggaccaccaatcccgtggctacggagcagtatggttctgtatctaccaatctccagagcggcaacacacaagcagctacctcagatgtcaacacacaaggcgttcttccaggcatggtctggcaggacagagacgtgtacctgcagggacccatctgggcaaagattccacacacggacggacattttcacccttctcctcttatgggaggatttggaccgaagcaccctcccccgcagattctcatcaagaataccccggtacctgcgaatccttctaccaccttcagcgcggcaaagtttgcttccttcatcacacagtactccacggggcaggtcagcgtggagatcgagtgggagctgcagaaagagaacagcaaacgctggaaccccgagatccagtatacctccaactacaacaagtctgttaatgtggactttactgtggacactaatggcgtgtattcagagcctcgccccattggcacaagatacctgactcgtaatctgtaa

SEQ ID NO: 1137 - DNA, 2208 bp, Artificial Sequence
  Synthetic Polynucleotide
atggctgccgatggttatcttccagattggctcgaggacactctctctgaaggaataagacagtggtggaagctcaaacctggcccaccaccgccaaagcccgcagagcggcataaggacgacagcaggggtcttgtgcttcctgggtacaagtacctcggacccttcaacggactcgacaaaggagagccggtcaacgaggcagacgccgcggccctcgagcacgacaaggcctacgaccggcagctcgacagcggagacaacccgtacctcaagtacaaccacgccgacgcggagtttcaggagcgccttaaagaagatacgtcttttgggggcaacctcgcaagagcagtattccaggcgaaaaagagggttcttgaacctctgggcctggttgaggagcctgttaagacggctccgggaaaaaagaggccggtagagcactctcctgcggagctagattcctcctccggaactggaaagtcgggccaacagcctgcaagaaagagattgaattttggtcagactggagacgcagactccgtacctgacccccagcctctcggacagccaccagcagccccctctggtctgggaactaatacgatggcttcaggcagtggcgcaccaatggcagacaataacgagggcgccgacggagtgggtaattcctcgggaaattggcattgcgattccacatggatgggcgacagagtcatcaccaccagcacccgcacctgggctctgcccacctacaacaaccatctgtacaagcaaatttccagccagtctggggccagcaacgacaaccactactttggctacagcaccccttgggggtattttgacttcaacagattccactgccacttctccccacgtgactggcaaagactcatcaacaacaattggggattccggcccaaaagactcaacttcaagctctttaacattcaagtcaaggaggtcacgcagaatgacggtacgacgacgattgccaataaccttaccagcacggttcaggtgtttactgactcggagtaccagctcccgtacgtcctcggctcggcgcatcaaggatgcctcccgccgttcccagcagacgtcttcatggtgccacagtatggatacctcaccctgaacaacgggagtcaggcggtaggacgctcttcattttactgcctggagtactttccttctcagatgctgcgtaccggaaacaactttaccttcagctacacctttgaggacgttccttttcacagcagctacgctcacagccagagtttggaccgtctcatgaatcctctcatcgaccagtacctgtattacttgagcagaacaaacactccaagcggaaccactacgcagtccaggcttcagttttctcaagccggagcgagtgacattcgggaccagtctaggaactggcttcctggaccctgttaccgccagcagcgagtatcaaagacagctgcggacaacaacaacagtgattactcgtggactggagctaccaagtatcacctcaatggaagagactctctggtgaatccgggcacagccatggccagccacaaggacgatgaagaaaagtattttcctcagagcggggttctcatcttcggaaaacaagactcgggaaaaactaatgtggacattgaaaaggtcatgattacagacgaagaggaaatcaggaccaccaatcccgtggctacggagcagtatggttctgtatctaccaatctccagagcggcaacacacaagcagctacctcagatgtcaacacacaaggcgttcttccaggcatggtctggcaggacagagacgtgtacctgcagggacccatctgggcaaagattccacacacggacggacattttcacccttctcctcttatgggaggatttggaccgaagcaccctcccccgcagattctcatcaagaataccccggtacctgcgaatccttctaccaccttcagcgcggcaaagtttgctttcttcatcacacagtactccacggggcaggtcagcgtggagatcgagtgggagctgcagaaagagaacagcaaacgctggaaccccgagatccagtatacctccaactacaacaagtctgttaatgtggactttactgtggacactaatggcgtgtattcagagcctcgccccattggcacaagatacctgactcgtaatctgtaa

SEQ ID NO: 1138 - DNA, 2208 bp, Artificial Sequence
  Synthetic Polynucleotide
atggctgccgatggttatcttccagattggctcgaggacactctctctgaaggaataagacagtggtggaagctcaaacctggcccaccaccgccaaagcccgcagagcggcataaggacgacagcaggggtcttgtgcttcctgggtacaagtacctcggacccttcaacggactcgacaaaggagagccggtcaacgaggcagacgccgcggccctcgagcacgacaaggcctacgaccggcagctcgacagcggagacaacccgtacctcaagtacaaccacgccgacgcggagtttcaggagcgccttaaagaagatacgtcttttgggggcaacctcgcaagagcagtattccaggcgaaaaagagggttcttgaacctctgggcctggttgaggagcctgttaagacggctccgggaaaaaagaggccggtagagcactctcctgcggagctagattcctcctccggaactggaaagtcgggccaacagcctgcaagaaagagattgaattttggtcagactggagacgcagactccgtacctgacccccagcctctcggacagccaccagcagccccctctggtctgggaactaatacgatggcttcaggcagtggcgcaccaatggcagacaataacgagggcgccgacggagtgggtaattcctcgggaaattggcattgcgattccacatggatgggcgacagagtcatcaccaccagcacccgcacctgggctctgcccacctacaacaaccatctgtacaagcaaatttccagccagtctggggccagcaacgacaaccactaccttggctacagcaccccttgggggtattttgacttcaacagattccactgccacttctccccacgtgactggcaaagactcatcaacaacaattggggattccggcccaaaagactcaacttcaagctctttaacattcaagtcaaggaggtcacgcagaatgacggtacgacgacgattgccaataaccttaccagcacggttcaggtgtttactgactcggagtaccagctcccgtacgtcctcggctcggcgcatcaaggatgcctcccgccgttcccagcagacgtcttcatggtgccacagtatggatacctcaccctgaacaacgggagtcaggcggtaggacgctcttcattttaccgcctggagtactttccttctcagatgctgcgtaccggaaacaactttaccttcagctacacctttgaggacgttccttttcacagcagctacgctcacagccagagtttggaccgtctcatgaatcctctcatcgaccagtacctgtattacttgagcagaacaaacactccaagcggaaccactacgcagtccaggcttcagttttctcaagccggagcgagtgacattcgggaccagtctaggaactggcttcctggaccctgttaccgccagcagcgagtatcaaagacagctgcggacaacaacaacagtgattactcgtggactggagctaccaagtatcacctcaatggaagagactctctggtgaatccgggcacagccatggccagccacaaggacgatgaagaaaagtattttcctcagagcggggttctcatcttcggaaaacaagactcgggaaaaactaatgtggacattgaaaaggtcatgattacagacgaagaggaaatcaggaccaccaatcccgtggctacggagcagtatggttctgtatctaccaatctccagagcggcaacacacaagcagctacctcagatgtcaacacacaaggcgttcttccaggcatggtctggcaggacagagacgtgtacctgcagggacccatctgggcaaagattccacacacggacggacattttcacccttctcctcttatgggaggatttggaccgaagcaccctcccccgcagattctcatcaagaataccccggtacctgcgaatccttctaccaccttcagcgcggcaaagtttgcttccttcatcacacagtactccacggggcaggtcagcgtggagatcgagtgggagctgcagaaagagaacagcaaacgctggaaccccgagatccagtatacctccaactacaacaagtctgttaatgtggactttactgtggacactaatggcgtgtattcagagcctcgccccattggcacaagatacctgactcgtaatctgtaa

SEQ ID NO: 1139 - DNA, 2205 bp, Artificial Sequence
  Synthetic Polynucleotide
atggctgccgatggttatcttccagattggctcgaggacactctctctgaaggaataagacagtggtggaagctcaaacctggcccaccaccgccaaagcccgcagagcggcataaggacgacagcaggggtcttgtgcttcctgggtacaagtacctcggacccttcaacggactcgacaaaggagagccggtcaacgaggcagacgccgcggccctcgagcacgacaaggcctacgaccggcagctcgacagcggagacaacccgtacctcaagtacaaccacgccgacgcggagtttcaggagcgccttaaagaagatacgtcttttgggggcaacctcgcaagagcagtattccaggcgaaaaagagggttcttgaacctctgggcctggttgaggagcctgttaagacggctccgggaaaaaagaggccggtagagcactctcctgcggagctagattcctcctccggaactggaaagtcgggccaacagcctgcaagaaagagattgaattttggtcagactggagacgcagactccgtacctgacccccagcctctcggacagccaccagcagccccctctggtctgggaactaatacgatggcttcaggcagtggcgcaccaatggcagacaataacgagggcgccgacggggtgggtaattcctcgggaaattggcattgcgattccacatggatgggcgacagagtcatcaccaccagcacccgcacctgggctctgcccacctacaacaaccatctgtacaagcaaatttccagccagtctggggccagcaacgacaaccactaccttggctacagcaccccttgggggtattttgacttcaacagattccactgccacttctccccacgtgactggcaaagactcatcaacaacaattggggattccggcccaaaagactcaacttcaagctctttaacattcaagtcaaggaggtcacgcagaatgacggtacgacgacgattgccaataaccttaccagcacggttcaggtgtttactgactcggagtaccagctcccgtacgtcctcggctcggcgcatcaaggatgcctcccgccgttcccagcagacgtcttcatggtgccacagtatggatacctcaccctgaacaacgggagtcaggcggtaggacgctcttcattttactgcctggagtactttccttctcagatgctgcgtaccggaaacaactttaccttcagctacacctttgaggacgttccttttcacagcagctacgctcacagccagagtttggaccgtctcatgaatcctctcatcgaccagtacctgtattacttgagcagaacaaacactccaagcggaaccactacgcagtccaggcttcagttttctcaagccggagcgagtgacattcgggaccagtctaggaactggcttcctggaccctgttaccgccagcagcgagtatcaaagacagctgcggacaacaacagtgattactcgtggactggagctaccaagtatcacctcaatggaagagactctctggtgaatccgggcacagccatggccagccacaaggacgatgaagaaaagtattttcctcagagcggggttctcatcttcggaaaacaagactcgggaaaaactaatgtggacattgaaaaggtcatgattacagacgaagaggaaatcaggaccaccaatcccgtggctacggagcagtatggttctgtatctaccaatctccagagcggcaacacacaagcagctacctcagatgtcaacacacaaggcgttcttccaggcatggtctggcaggacagagacgtgtacctgcagggacccatctgggcaaagattccacacacggacggacattttcacccttctcctcttatgggaggatttggaccgaagcaccctcccccgcagattctcatcaagaataccccggtacctgcgaatccttctaccaccttcagcgcggcaaagtttgcttccttcatcacacagtactccacggggcaggtcagcgtggagatcgagtgggagctgcagaaagagaacagcaaacgctggaaccccgagatccagtatacctccaactacaacaagtctgttaatgtggactttactgtggacactaatggcgtgtattcagagcctcgccccattggcacaagatacctgactcgtaatctgtaa

SEQ ID NO: 1140 - DNA, 2205 bp, Artificial Sequence
  Synthetic Polynucleotide
atggctgccgatggttatcttccagattggctcgaggacactctctctgaaggaataagacagtggtggaagctcaaacctggcccaccaccgccaaagcccgcagagcggcataaggacgacagcaggggtcttgtgcttcctgggtacaagtacctcggacccttcaacggactcgacaaaggagagccggtcaacgaggcagacgccgcggccctcgagcacgacaaggcctacgaccggcagctcgacagcggagacaacccgtacctcaagtacaaccacgccgacgcggagtttcaggagcgccttaaagaagatacgtctttgggcaacctcgcaagagcagtattccaggcgaaaaagagggttcttgaacctctgggcctggttgaggagcctgttaagacggctccgggaaaaaagaggccggtagagcactctcctgcggagctagattcctcctccggaactggaaagtcgggccaacagcctgcaagaaagagattgaattttggtcagactggagacgcagactccgtacctgacccccagcctctcggacagccaccagcagccccctctggtctgggaactaatacgatggcttcaggcagtggcgcaccaatggcagacaataacgagggcgccgacggagtgggtaattcctcgggaaattggcattgcgattccacatggatgggcgacagagtcatcaccaccagcacccgcacctgggctctgcccacctacaacaaccatctgtacaagcaaatttccagccagtctggggccagcaacgacaaccactactttggctacagcaccccttgggggtattttgacttcaacagattccactgccacttctccccacgtgactggcaaagactcatcaacaacaattggggattccggcccaaaagactcaacttcaagctctttaacattcaagtcaaggaggtcacgcagaatgacggtacgacgacgattgccaataaccttaccagcacggttcaggtgtttactgactcggagtaccagctcccgtacgtcctcggctcggcgcatcaaggatgcctcccgccgttcccagcagacgtcttcatggtgccacagtatggatacctcaccctgaacaacgggagtcaggcggtaggacgctcttcattttactgcctggagtactttccttctcagatgctgcgtaccggaaacaactttaccttcagctacacctttgaggacgttccttttcacagcagctacgctcacagccagagtttggaccgtctcatgaatcctctcatcgaccagtacctgtattacttgagcagaacaaacactccaagcggaaccactacgcagtccaggcttcagttttctcaagccggagcgagtgacattcgggaccagtctaggaactggcttcctggaccctgttaccgccagcagcgagtatcaaagacagctgcggacaacaacaacagtgattactcgtggactggagctaccaagtatcacctcaatggaagagactctctggtgaatccgggcacagccatggccagccacaaggacgatgaagaaaagtattttcctcagagcggggttctcatcttcggaaaacaagactcgggaaaaactaatgtggacattgaaaaggtcatgattacagacgaagaggaaatcaggaccaccaatcccgtggctacggagcagtatggttctgtatctaccaatctccagagcggcaacacacaagcagctacctcagatgtcaacacacaaggcgttcttccaggcatggtctggcaggacagagacgtgtacctgcagggacccatctgggcaaagattccacacacggacggacattttcacccttctcctcttatgggaggatttggaccgaagcaccctcccccgcagattctcatcaagaataccccggtacctgcgaatccttctaccaccttcagcgcggcaaagtttgcttccttcatcacacagtactccacggggcaggtcagcgtggagatcgagtgggagctgcagaaagagaacagcaaacgctggaaccccgagatccagtatacctccaactacaacaagtctgttaatgtggactttactgtggacactaatggcgtgtattcagagcctcgccccattggcacaagatacctgactcgtaatctgtaa

SEQ ID NO: 1141 - DNA, 2208 bp, Artificial Sequence
  Synthetic Polynucleotide
atggctgccgatggttatcttccagattggctcgaggacactctctctgaaggaataagacagtggtggaagctcaaacctggcccaccaccgccaaagcccgcagagcggcataaggacgacagcaggggtcttgtgcttcctgggtacaagtacctcggacccttcaacggactcgacaaaggagagccggtcaacgaggcagacgccgcggccctcgagcacgacaaggcctacgaccggcagctcgacagcggagacaacccgtacctcaagtacaaccacgccgacgcggagtttcaggagcgccttaaagaagatacgtcttttgggggcaacctcgcaagagcagtattccaggcgaaaaagagggttcttgaacctctgggcctggttgaggagcctgttaagacggctccgggaaaaaagaggccggtagagcactctcctgcggagctagattcctcctccggaactggaaagtcgggccaacagcctgcaagaaagagattgaattttggtcagactggagacgcagactccgtacctgacccccagcctctcggacagccaccagcagccccctctggtctgggaactaatacgatggcttcaggcagtggcgcaccaatggcagacaataacgagggcgccgacggagtgggtaattcctcgggaaattggcattgcgattccacatggatgggcgacagagtcatcaccaccagcacccgcacctgggctctgcccacctacaacaaccatctgtacaagcaaatttccagccagtctggggccagcaacgacaaccactactttggctacagcaccccttgggggtattttgacttcaacagattccactgccacttctccccacgtgactggcaaagactcatcaacaacaattggggattccggcccaaaagactcaacttcaagctctttaacattcaagtcaaggaggtcacgcagaatgacggtacgacgacgattgccaataaccttaccagcacggttcaggtgtttactgactcggagtaccagctcccgtacgtcctcggctcggcgcatcaaggatgcctcccgccgttcccagcagacgtcttcatggtgccacagtatggatacctcaccctgaacaacgggagtcaggcggtaggacgctcttcattttactgcctggagtactttccttctcagatgctgcgtaccggaaacaactttaccttcagctacacctttgaggacgttccttttcacagcagctacgctcacagccagagtttggaccgtctcatgaatcctctcatcgaccagtacctgtattacttgagcagaacaaacactccaagcggaaccactacgcagtccaggcttcagttttctcaagccggagcgagtgacattcgggaccagtctaggaactggcttcctggaccctgttaccgccagcagcgagtatcaaagacagctgcggacaacaacaacagtgattactcgtggactggagctaccaagtatcacctcaatggaagagactctctggtgaatccgggcacagccatggccagccacaaggacgatgaagaaaagtattttcctcagagcggggttctcatcttcggaaaacaagactcgggaaaaactaatgtggacattgaaaaggtcatgattacagacgaagaggaaatcaggaccaccaatcccgtggctacggagcagtatggttctgtatctaccaatctccagagcggcaacacacaagcagctacctcagatgtcaacacacaaggcgttcttccaggcatggtctggcaggacagagacgtgtacctgcagggacccatctgggcaaagattccacacacggacggacattttcacccttctcctcttatgggaggatttggaccgaagcaccctcccccgcagattctcatcaagaataccccggtacctgcgaatccttctaccaccttcagcgcggcaaagtttgcttccttcatcacacagtactccacggggcaggtcggcgtggagatcgagtgggagctgcagaaagagaacagcaaacgctggaaccccgagatccagtatacctccaactacaacaagtctgttaatgtggactttactgtggacactaatggcgtgtattcagagcctcgccccattggcacaagatacctgactcgtaatctgtaa

SEQ ID NO: 1142 - DNA, 2208 bp, Artificial Sequence
  Synthetic Polynucleotide
atggctgccgatggttatcttccagattggctcgaggacactctctctgaaggaataagacagtggtggaagctcaaacctggcccaccaccgccaaagcccgcagagcggcataaggacgacagcaggggtcttgtgcttcctgggtacaagtacctcggacccttcaacggactcgacaaaggagagccggtcaacgaggcagacgccgcggccctcgagcacgacaaggcctacgaccggcagctcgacagcggagacaacccgtacctcaagtacaaccacgccgacgcggagtttcaggagcgccttaaagaagatacgtcttttgggggcaacctcgcaagagcagtattccaggcgaaaaagagggttcttgaacctctgggcctggttgaggagcctgttaagacggctccgggaaaaaagaggccggtagagcactctcctgcggagctagattcctcctccggaactggaaagtcgggccaacagcctgcaagaaagagattgaattttggtcagactggagacgcagactccgtacctgacccccagcctctcggacagccaccagcagccccctctggtctgggaactaatacgatggcttcaggcagtggcgcaccaatggcagacaataacgagggcgccgacggagtgggtaattcctcgggaaattggcattgcgattccacatggatgggcgacagagtcatcaccaccagcacccgcacctgggctctgcccacctacaacaaccatctgtacaagcaaatttccagccagtctggggccagcaacgacaaccactactttggctacagcaccccttgggggtattttgacttcaacagattccactgccacttctccccacgtgactggcaaagactcatcaacaacaattggggattccggcccaaaagactcaacttcaagctctttaacattcaagtcaaggaggtcacgcagaatgacagtacgacgacgattgccaataaccttaccagcacggttcaggtgtttactgactcggagtaccagctcccgtacgtcctcggctcggcgcatcaaggatgcctcccgccgttcccagcagacgtcttcatggtgccacagtatggatacctcaccctgaacaacgggagtcaggcggtaggacgctcttcattttactgcctggagtactttccttctcagatgctgcgtaccggaaacaactttaccttcagctacacctttgaggacgttccttttcacagcagctacgctcacagccagagtttggaccgtctcatgaatcctctcatcgaccagtacctgtattacttgagcagaacaaacactccaagcggaaccactacgcagtccaggcttcagttttctcaagccggagcgagtgacattcgggaccagtctaggaactggcttcctggaccctgttaccgccagcagcgagtatcaaagacagctgcggacaacaacaacagtgattactcgtggactggagctaccaagtatcacctcaatggaagagactctctggtgaatccgggcacagccatggccagccacaaggacgatgaagaaaagtattttcctcagagcggggttctcatcttcggaaaacaagactcgggaaaaactaatgtggacattgaaaaggtcatgattacagacgaagaggaaatcaggaccaccaatcccgtggctacggagcagtatggttctgtatctaccaatctccagagcggcaacacacaagcagctacctcagatgtcaacacacaaggcgttcttccaggcatggtctggcaggacagagacgtgtacctgcagggacccatctgggcaaagattccacacacggacggacattttcacccttctcctcttatgggaggatttggaccgaagcaccctcccccgcagattctcatcaagaataccccggtacctgcgaatccttctaccaccttcagcgcggcaaagtttgcttccttcatcacacagtactccacggggcaggtcagcgtggagatcgagtgggagctgcagaaagagaacagcaaacgctggaaccccgagatccagtatacctccaactacaacaagtctgttaatgtggactttactgtggacactaatggcgtgtattcagagcctcgccccattggcacaagatacctgactcgtaatctgtaa

SEQ ID NO: 1143 - DNA, 2208 bp, Artificial Sequence
  Synthetic Polynucleotide
atggctgccgatggttatcttccagattggctcgaggacactctctctgaaggaataagacagtggtggaagctcaaacctggcccaccaccgccaaagcccgcagagcggcataaggacgacagcaggggtcttgtgcttcctgggtacaagtacctcggacccttcaacggactcgacaaaggagagccggtcaacgaggcagacgccgcggccctcgagcacgacaaggcctacgaccggcagctcgacagcggagacaacccgtacctcaagtacaaccacgccgacgcggagtttcaggagcgccttaaagaagatacgtcttttgggggcaacctcgcaagagcagtattccaggcgaaaaagagggttcttgaacctctgggcctggttgaggagcctgttaagacggctccgggaaaaaagaggccggtagagcactctcctgcggagctagattcctcctccggaactggaaagtcgggccaacagcctgcaagaaagagattgaattttggtcagactggagacgcagactccgtacctgacccccagcctctcggacagccaccagcagccccctctggtctgggaactaatacgatggcttcaggcagtggcgcaccaatggcagacaataacgagggcgccgacggagtgggtaattcctcgggaaattggcattgcgattccacatggatgggcgacagagtcatcaccaccagcacccgcacctgggctctgcccacctacaacaaccatctgtacaagcaaatttccagccagtctggggccagcaacgacaaccactactttggctacagcaccccttgggggtattttgacttcaacagattccactgccacttctccccacgtgactggcaaagactcatcaacaacaattggggattccggcccaaaagactcaacttcaagctctttaacattcaagtcaaggaggtcacgcagaatgacggtacgacgacgattgccaataaccttaccagcacggttcaggtgtttactgactcggagtaccagctcccgtacgtcctcggctcggcgcatcaaggatgcctcccgccgttcccagcagacgtcttcatggtgccacagtatggatacctcaccctgaacaacgggagtcaggcggtaggacgctcttcattttactgcctggagtactttccttctcagatgctgcgtaccggaaacaactttaccttcagctacacctttgaggacgttccttttcacagcagctacgctcacagccagagtttggaccgtctcatgaatcctctcatcgaccagtacctgtattacttgagcagaacaaacactccaagcggaaccactacgcagtccaggcttcagttttctcaagccggagcgagtgacattcgggaccagtctaggaactggcttcctggaccctgttaccgccagcagcgagtatcaaagacagctgcggacaacaacaacagtgattactcgtggactggagctaccaagtatcacctcaatggaagagactctctggtgaatccgggcacagccatggccagccacaaggacgatgaagaaaagtattttcctcagagcggggttctcatcttccggaaacaagactcgggaaaaactaatgtggacattgaaaaggtcatgattacagacgaagaggaaatcaggaccaccaatcccgtggctacggagcagtatggttctgtatctaccaatctccagagcggcaacacacaagcagctacctcagatgtcaacacacaaggcgttcttccaggcatggtctggcaggacagagacgtgtacctgcagggacccatctgggcaaagattccacacacggacggacattttcacccttctcctcttatgggaggatttggaccgaagcaccctcccccgcagattctcatcaagaataccccggtacctgcgaatccttctaccaccttcagcgcggcaaagtttgcttacttcatcacacagtactccacggggcaggtcagcgtggagatcgagtgggagctgcagaaagagaacagcaaacgctggaaccccgagatccagtatacctccaactacaacaagtctgttaatgtggactttactgtggacactaatggcgtgtattcagagcctcgccccattggcacaagatacctgactcgtaatctgtaa

SEQ ID NO: 1144 - DNA, 2208 bp, Artificial Sequence
  Synthetic Polynucleotide
atggctgccgatggttatcttccagattggctcgaggacactctctctgaaggaataagacagtggtggaagctcaaacctggcccaccaccgccaaagcccgcagagcggcataaggacgacagcaggggtcttgtgcttcctgggtacaagtacctcggacccttcaacggactcgacaaaggagagccggtcaacgaggcagacgccgcggccctcgagcacgacaaggcctacgaccggcagctcgacagcggagacaacccgtacctcaagtacaaccacgccgacgcggagtttcaggagcgccttaaagaagatacgtcttttgggggcaacctcgcaagagcagtattccaggcgaaaaagagggttcttgaacctctgggcctggttgaggagcctgttaagacggctccgggaaaaaagaggccggtagagcactctcctgcggagctagattcctcctccggaactggaaagtcgggccaacagcctgcaagaaagagattgaattttggtcagactggagacgcagactccgtacctgacccccagcctctcggacagccaccagcagccccctctggtctgggaactaatacgatggcttcaggcagtggcgcaccaatggcagacaataacgagggcgccgacggagtgggtaattcctcgggaaattggcattgcgactccacatggatgggcgacagagtcatcaccaccagcacccgcacctgggctctgcccacctacaacaaccatctgtacaagcaaatttccagccagtctggggccagcaacgacaaccactactttggctacagcaccccttgggggtattttgacttcaacagattccactgccacttctccccacgtgactggcaaagactcatcaacaacaattggggattccggcccaaaagactcgacttcaagctctttaacattcaagtcaaggaggtcacgcagaatgacggtacgacgacgattgccaataaccttaccagcacggttcaggtgtttactgactcggagtaccagctcccgtacgtcctcggctcggcgcatcaaggatgcctcccgccgttcccagcagacgtcttcatggtgccacagtatggatacctcaccctgaacaacgggagtcaggcggtaggacgctcttcattttactgcctggagtactttccttctcagatgctgcgtaccggaaacaactttaccttcagctacacctttgaggacgttccttttcacagcagctacgctcacagccagagtttggaccgtctcatgaatcctctcatcgaccagtacctgtattacttgagcagaacaaacactccaagcggaaccactacgcagtccaggcttcagttttctcaagccggagcgagtgacattcgggaccagtctaggaactggcttcctggaccctgttaccgccagcagcgagtatcaaagacagctgcggacaacaacaacagtgattactcgtggactggagctaccaagtatcacctcaatggaagagactctctggtgaatccgggcacagccatggccagccacaaggacgatgaagaaaagtattttcctcagagcggggttctcatcttcggaaaacaagactcgggaaaaactaatgtggacattgaaaaggtcatgattacagacgaagaggaaatcaggaccaccaatcccgtggctacggagcagtatggttctgtatctaccaatctccagagcggcaacacacaagcagctacctcagatgtcaacacacaaggcgttcttccaggcatggtctggcaggacagagacgtgtacctgcagggacccatctgggcaaagattccacacacggacggacattttcacccttctcctcttatgggaggatttggaccgaagcaccctcccccgcagattctcatcaagaataccccggtacctgcgaatccttctaccaccttcagcgcggcaaagtttgcttccttcatcacacagtactccacggggcaggtcagcgtggagatcgagtgggagctgcagaaagagaacagcaaacgctggaaccccgagatccagtatacctccaactacaacaagtctgttaatgtggactttactgtggacactaatggcgtgtattcagagcctcgccccattggcacaagatacctgactcgtaatctgtaa

SEQ ID NO: 1145 - DNA, 2208 bp, Artificial Sequence
  Synthetic Polynucleotide
atggctgccgatggttatcttccagattggctcgaggacactctctctgaaggaataagacagtggtggaagctcaaacctggcccaccaccgccaaagcccgcagagcggcataaggacgacagcaggggtcttgtgcttcctgggtacaagtacctcggacccttcaacggactcgacaaaggagagccggtcaacgaggcagacgccgcggccctcgagcacgacaaggcctacgaccggcagctcgacagcggagacaacccgtacctcaagtacaaccacgccgacgcggagtttcaggagcgccttaaagaagatacgtcttttgggggcaacctcgcaagagcagtattccaggcgaaaaagagggttcttgaacctctgggcctggttgaggagcctgttaagacggctccgggaaaaaagaggccggtagagcactctcctgcggagctagattcctcctccggaactggaaagtcgggccaacagcctgcaagaaagagattgaattttggtcagactggaggcgcagactccgtacctgacccccagcctctcggacagccaccagcagccccctctggtctgggaactaatacgatggcttcaggcagtggcgcaccaatggcagacaataacgagggcgccgacggagtgggtaattcctcgggaaattggcattgcgattccacatggatgggcgacagagtcatcaccaccagcacccgcacctgggctctgcccacctacaacaaccatctgtacaagcaaatttccagccagtctggggccagcaacgacaaccactactttggctacagcaccccttgggggtattttgacttcaacagattccactgccacttctccccacgtgactggcaaagactcatcaacaacaattggggattccggcccaaaagactcaacttcaagctctttaacattcaagtcaaggaggtcacgcagaatgacggtacgacgacgattgccaataaccttaccagcacggttcaggtgtttactgactcggagtaccagctcccgtacgtcctcggctcggcgcatcaaggatgcctcccgccgttcccagcagacgtcttcatggtgccacagtatggatacctcaccctgaacaacgggagtcaggcggtaggacgctcttcattttactgcctggagtactttccttctcagatgctgcgtaccggaaacaactttaccttcagctacacctttgaggacgttccttttcacagcagctacgctcacagccagagtttggaccgtctcatgaatcctctcatcgaccagtacctgtattacttgagcagaacaaacactccaagcggaaccactacgcagtccaggcttcagttttctcaagccggagcgagtgacattcgggaccagtctaggaactggcttcctggaccctgttaccgccagcagcgagtatcaaagacagctgcggacaacaacaacagtgattactcgtggactggagctaccaagtatcacctcaatggaagagactctctggtgaatccgggcacagccatggccagccacaaggacgatgaagaaaagtattttcctcagagcggggttctcatcttcggaaaacaagactcgggaaaaactaatgtggacattgaaaaggtcatgattacagacgaagaggaaatcaggaccaccaatcccgtggctacggagcagtatggttctgtatctaccaatctccagagcggcaacacacaagcagctacctcagatgtcaacacacaaggcgttcttccaggcatggtctggcaggacagagacgtgtacctgcagggacccatctgggcaaagattccacacacggacggacattttcacccttctcctcttatgggaggatttggaccgaagcaccctcccccgcagattctcatcaagaataccccggtacctgcgaatccttctaccaccttcagcgcggcaaagtttgcttccttcatcacacagtactccacggggcaggtcagcgtggagatcgagtgggagctgcagaaagagaacagcaaacgctggaaccccgagatccagtatacctccaactacaacaagtctgttaatgtggactttactgtggacactaatggcgtgtattcagagcctcgccccattggcacaagatacctgactcgtaatctgtaa

SEQ ID NO: 1146 - DNA, 2208 bp, Artificial Sequence
  Synthetic Polynucleotide
atggctgccgatggttatcttccagattggctcgaggacactctctctgaaggaataagacagtggtggaagctcaaacctggcccaccaccgccaaagcccgcagagcggcataaggacgacagcaggggtcttgtgcttcctgggtacaagtacctcggacccttcaacggactcgacaaaggagagccggtcaacgaggcagacgccgcggccctcgagcacgacaaggcctacgaccggcagctcgacagcggagacaacccgtacctcaagtacaaccacgccgacgcggagtttcaggagcgccttaaagaagatacgtcttttgggggcaacctcgcaagagcagtattccaggcgaaaaagagggttcttgaacctctgggcctggttgaggagcctgttaagacggctccgggaaaaaagaggccggtagagcactctcctgcggagctagattcctcctccggaactggaaagtcgggccaacagcctgcaagaaagagattgaattttggtcagactggagacgcagactccgtacctgacccccagcctctcggacagccaccagcagccccctctggtctgggaactaatacgatggcttcaggcagtggcgcaccaatggcagacaataacgagggcgccgacggagtgggtaattcctcgggaaattggcattgcgattccacatggatgggcgacagagtcatcaccaccagcacccgcacctgggctctgcccacctacaacaaccatctgtacaagcaaatttccagccagtctggggccagcaacgacaaccactactttggctacagcaccccttgggggtattttgacttcaacagattccactgccacttctccccacgtgactggcaaagactcatcaacaacaattggggattccggcccaaaagactcaacttcaagctctttaacattcaagtcaaggaggtcacgcagaatgacggtacgacgacgattgccaataaccttaccagcacggttcaggtgtttactgactcggagtaccagctcccgtacgtcctcggctcggcgcatcaaggatgcctcccgccgttcccagcagacgtcttcatggtgccacagtatggatacctcaccctgaacaacgggagtcaggcggtaggacgctcttcattttactgcctggagtactttccttctcagatgctgcgtaccggaaacaaccttaccttcagctacacctttgaggacgttccttttcacagcagctacgctcacagccagagtttggaccgtctcatgaatcctctcatcgaccagtacctgtattacttgagcagaacaaacactccaagcggaaccactacgcagtccaggcttcagttttctcaagccggagcgagtgacattcgggaccagtctaggaactggcttcctggaccctgttaccgccagcagcgagtatcaaagacagctgcggacaacaacaacagtgattactcgtggactggagctaccaagtatcacctcaatggaagagactctctggtgaatccgggcacagccatggccagccacaaggacgatgaagaaaagtattttcctcagagcggggttctcatcttcggaaaacaagactcgggaaaaactaatgtggacattgaaaaggtcatgattacagacgaagaggaaatcaggaccaccaatcccgtggctacggagcagtatggttctgtatctaccaatctccagagcggcaacacacaagcagctacctcagatgtcaacacacaaggcgttcttccaggcatggtctggcaggacagagacgtgtacctgcagggacccatctgggcaaagattccacacacggacggacattttcacccttctcctcttatgggaggatttggaccgaagcaccctcccccgcagattctcatcaagaataccccggtacctgcgaatccttctaccaccttcagcgcggcaaagtttgcttccttcatcacacagtactccacggggcaggtcagcgtggagatcgagtgggagctgcagaaagagaacagcaaacgctggaaccccgagatccagtatacctccaactacaacaagtctgttaatgtggactttactgtggacactaatggcgtgtattcagagcctcgccccattggcacaagatacctgactcgtaatctgtaa

SEQ ID NO: 1147 - DNA, 2208 bp, Artificial Sequence
  Synthetic Polynucleotide
atggctgccgatggttatcttccagattggctcgaggacactctctctgaaggaataagacagtggtggaagctcaaacctggcccaccaccgccaaagcccgcagagcggcataaggacgacagcaggggtcttgtgcttcctgggtacaagtacctcggacccttcaacggactcgacaaaggagagccggtcaacgaggcagacgccgcggccctcgagcacgacaaggcctacgaccggcagctcgacagcggagacaacccgtacctcaagtacaaccacgccgacgcggagtttcaggagcgccttaaagaagatacgtcttttgggggcaacctcgcaagagcagtattccaggcgaaaaagagggttcttgaacctctgggcctggttgaggagcctgttaagacggctccgggaaaaaagaggccggtagagcactctcctgcggagctagattcctcctccggaactggaaagtcgggccaacagcctgcaagaaagagattgaattttggtcagactggagacgcagactccgtacctgacccccagcctctcggacagccaccagcagccccctctggtctgggaactaatacgatggcttcaggcagtggcgcaccaatggcagacaataacgagggcgccgacggagtgggtaattcctcgggaaattggcattgcgattccacatggatgggcgacagagtcatcaccaccagcacccgcacctgggctctgcccacctacaacaaccatctgtacaagcaaatttccagccagtctggggccagcaacgacaaccactactttggctacagcaccccttgggggtattttgacttcaacagattccactgccacttctccccacgtgactggcaaagactcatcaacaacaattggggattccggcccaaaagactcaacttcaagctctttaacattcaagtcaaggaggtcacgcagaatgacggtacgacgacgattgccaataaccttaccagcacggttcaggtgtttactgactcggagtaccagctcccgtacgtcctcggctcggcgcatcaaggatgcctcccgccgttcccagcagacgtcttcatggtgccacagtatggataccacaccctgaacaacgggagtcaggcggtaggacgctcttcattttactgcctggagtactttccttctcagatgctgcgtaccggaaacaactttaccttcagctacacctttgaggacgttccttttcacagcagctacgctcacagccagagtttggaccgtctcatgaatcctctcatcgaccagtacctgtattacttgagcagaacaaacactccaagcggaaccactacgcagtccaggcttcagttttctcaagccggagcgagtgacattcgggaccagtctaggaactggcttcctggaccctgttaccgccagcagcgagtatcaaagacagctgcggacaacaacaacagtgattactcgtggactggagctaccaagtatcacctcaatggaagagactctctggtgaatccgggcacagccatggccagccacaaggacgatgaagaaaagtattttcctcagagcggggttctcatcttcggaaaacaagactcgggaaaaactaatgtggacattgaaaaggtcatgattacagacgaagaggaaatcaggaccaccaatcccgtggctacggagcagtatggttctgtatctaccaatctccagagcggcaacacacaagcagctacctcagatgtcaacacacaaggcgttcttccaggcatggtctggcaggacagagacgtgtacctgcagggacccatctgggcaaagattccacacacggacggacattttcacccttctcctcttatgggaggatttggaccgaagcaccctcccccgcagattctcatcaagaataccccggtacctgcgaatccttctaccaccttcagcgcggcaaagtttgcttccttcatcacacagtactccacggggcaggtcagcgtggagatcgagtgggagctgcagaaagagaacagcaaacgctggaaccccgagatccagtatacctccaactacaacaagtctgttaatgtggactttactgtggacactaatggcgtgtattcagagcctcgccccattggcacaagatacctgactcgtaatctgtaa

SEQ ID NO: 1148 - DNA, 2208 bp, Artificial Sequence
  Synthetic Polynucleotide
atggctgccgatggttatcttccagattggctcgaggacactctctctgaaggaataagacagtggtggaagctcaaacctggcccaccaccgccaaagcccgcagagcggcataaggacgacagcaggggtcttgtgcttcctgggtacaagtacctcggacccttcaacggactcgacaaaggagagccggtcaacgaggcagacgccgcggccctcgagcacgacaaggcctacgaccggcagctcgacagcggagacaacccgtacctcaagtacaaccacgccgacgcggagtttcaggagcgccttaaagaagatacgtcttttgggggcaacctcgcaagagcagtattccaggcgaaaaagagggttcttgaacctctgggcctggttgaggagcctgttaagacggctccgggaaaaaagaggccggtagagcactctcctgcggagctagattcctcctccggaactggaaagtcgggccaacagcctgcaagaaagagattgaattttggtcagactggagacgcagactccgtacctgacccccagcctctcggacagccaccagcagccccctctggtctgggaactaatacgatggcttcaggcagtggcgcaccaatggcagacaataacgagggcgccgacggagtgggtaattcctcgggaaattggcattgcgattccacatggatgggcgacagagtcatcaccaccagcacccgcacctgggctctgcccacctacaacaaccatctgtacaagcaaatttccagccagtctggggccagcaacgacaaccactactttggctacagcaccccttgggggtattttgacttcaacagattccactgccacttctccccacgtgactggcaaagactcatcaacaacaattggggattccggcccaaaagactcaacttcaagctctttaacattcaagtcaaggaggtcacgcagaatgacggtacgacgacgattgccaataaccttaccagcacggttcaggtgtttactgactcggagtaccagctcccgtacgtcctcggctcggcgcatcaaggatgcctcccgccgttcccagcagacgtcttcatggtgccacagtatggatacctcaccctgaacaacgggagtcaggcggtaggacgctcttcattttactgcctggagtactttccttctcagatgctgcgtaccggaaacaactttaccttcagctacacctttgaggacgttccttttcacagcagctacgctcacagccagagtttggaccgtctcatgaatcctctcatcgaccagtacccgtattacttgagcagaacaaacactccaagcggaaccactacgcagtccaggcttcagttttctcaagccggagcgagtgacattcgggaccagtctaggaactggcttcctggaccctgttaccgccagcagcgagtatcaaagacagctgcggacaacaacaacagtgattactcgtggactggagctaccaagtatcacctcaatggaagagactctctggtgaatccgggcacagccatggccagccacaaggacgatgaagaaaagtattttcctcagagcggggttctcatcttcggaaaacaagactcgggaaaaactaatgtggacattgaaaaggtcatgattacagacgaagaggaaatcaggaccaccaatcccgtggctacggagcagtatggttctgtatctaccaatctccagagcggcaacacacaagcagctacctcagatgtcaacacacaaggcgttcttccaggcatggtctggcaggacagagacgtgtacctgcagggacccatctgggcaaagattccacacacggacggacattttcacccttctcctcttatgggaggatttggaccgaagcaccctcccccgcagattctcatcaagaataccccggtacctgcgaatccttctaccaccttcagcgcggcaaagtttgcttccttcatcacacagtactccacggggcaggtcagcgtggagatcgagtgggagctgcagaaagagaacagcaaacgctggaaccccgagatccagtatacctccaactacaacaagtctgttaatgtggactttactgtggacactaatggcgtgtattcagagcctcgccccattggcacaagatacctgactcgtaatctgtaa

SEQ ID NO: 1149 - DNA, 2208 bp, Artificial Sequence
  Synthetic Polynucleotide
atggctgccgatggttatcttccagattggctcgaggacactctctctgaaggaataagacagtggtggaagctcaaacctggcccaccaccgccaaagcccgcagagcggcataaggacgacagcaggggtcttgtgcttcctgggtacaagtacctcggacccttcaacggactcgacaaaggagagccggtcaacgaggcagacgccgcggccctcgagcacgacaaggcctacgaccggcagctcgacagcggagacaacccgtacctcaagtacaaccacgccgacgcggagtttcaggagcgccttaaagaagatacgtcttttgggggcaacctcgcaagagcagtattccaggcgaaaaagagggttcttgaacctctgggcctggttgaggagcctgttaagacggctccgggaaaaaagaggccggtagagcactctcctgcggagctagattcctcctccggaactggaaagtcgggccaacagcctgcaagaaagagattgaattttggtcagactggagacgcagactccgtacctgacccccagcctctcggacagccaccagcagccccctctggtctgggaactaatacgatggcttcaggcagtggcgcaccaatggcagacaataacgagggcgccgacggagtgggtaattcctcgggaaattggcattgcgattccacatggatgggcgacagagtcatcaccaccagcacccgcacctgggctctgcccacctacaacaaccatctgtacaagcaaatttccagccagtctggggccagcaacgacaaccactactttggctacagcaccccttgggggtattttgacttcaacagattccactgccacttctccccacgtgactggcaaagactcatcaacaacaattggggattccggcccaaaagactcaacttcaagctctttaacattcaagtcaaggaggtcacgcagaatgacggtacgacgacgattgccaataaccttaccagcacggttcaggtgtttactgactcggagtaccagctcccgtacgtcctcggctcggcgcatcaaggatgcctcccgccgttcccagcagacgtcttcatggtgccacagtatggatacctcaccctgaacaacgggagtcaggcggtaggacgctcttcattttactgcctggagtactttccttctcagatgctgcgtaccggaaacaactttaccttcagctacacctttgaggacgttccttttcacagcagctacgctcacagccagagtttggaccgtctcatgaatcctctcatcgaccagtacctgtattacttgagcagaacaaacactccaagcggaaccactacgcagtccaggcttcagttttctcaagccggagcgagtgacattcgggaccagtctaggaactggcttcctggaccctgttaccgccagcagcgagtatcaaagacagctgcggacaacaacaacagtgattactcgtggactggagctaccaagtatcacctcaatggaagagactctctggtgaatccgggcacagccatggccagccacaaggacgatgaagaaaagtattttcctcagagcggggttctcatcttcggaaaacaagactcgggaaaaactaatgtggacattgaaaaggtcatgattacagacgaagaggaaatcaggaccaccaatcccgtggctacggagcagtatggttctgtatctaccaatctccagagcggcaacacacaagcagctacctcagatgtcaacacacaaggcgttcttccaggcatggtctggcaggacagagacgtgtacctgcagggacccatctgggcaaagattccacacacggacggacattttcacccttctcctcttatgggaggatttggaccgaagcaccctcccccgcagattctcatcaagaataccccggtacctgcgaatcctcctaccaccttcagcgcggcaaagtttgcttccttcatcacacagtactccacggggcaggtcagcgtggagatcgagtgggagctgcagaaagagaacagcaaacgctggaaccccgagatccagtatacctccaactacaacaagtctgttaatgtggactttactgtggacactaatggcgtgtattcagagcctcgccccattggcacaagatacctgactcgtaatctgtaa

SEQ ID NO: 1150 - DNA, 2208 bp, Artificial Sequence
  Synthetic Polynucleotide
atggctgccgatggttatcttccagattggctcgaggacactctctctgaaggaataagacagtggtggaagctcaaacctggcccaccaccgccaaagcccgcagagcggcataaggacgacagcaggggtcttgtgcttcctgggtacaagtacctcggacccttcaacggactcgacaaaggagagccggtcaacgaggcagacgccgcggccctcgagcacgacaaggcctacgaccggcagctcgacagcggagacaacccgtacctcaagtacaaccacgccgacgcggagtttcaggagcgccttaaagaagatacgtcttttgggggcaacctcgcaagagcagtattccaggcgaaaaagagggttcttgaacctctgggcctggttgaggagcctgttaagacggctccgggaaaaaagaggccggtagagcactctcctgcggagctagattcctcctccggaactggaaagtcgggccaacagcctgcaagaaagagattgaattttggtcagactggagacgcagactccgtacctgacccccagcctctcggacagccaccagcagccccctctggtctgggaactaatacgatggcttcaggcagtggcgcaccaatggcagacaataacgagggcgccgacggagtgggtaattcctcgggaaattggcattgcgattccacatggatgggcgacagagtcatcaccaccagcacccgcacctgggctctgcccacctacaacaaccatctgtacaagcaaatttccagccagtctggggccagcaacgacaaccactactttggctacagcaccccttgggggtattttgacttcaacagattccactgccacttctccccacgtgactggcaaagactcatcaacaacaattggggattccggcccaaaagactcaacttcaagctctttaacattcaagtcaaggaggtcacgcagaatgacggtacgacgacgattgccaataaccttaccagcacggttcaggtgtttactgactcggagtaccagctcccgtacgtcctcggctcggcgcatcaaggatgcctcccgccgttcccagcagacgtcttcatggtgccacagtatggatacctcaccctgaacaacgggagtcaggcggtaggacgctcttcattttactgcctggagtactttccttctcagatgctgcgtaccggaaacaactttaccttcagctacacctttgaggacgttccttttcacagcagctacgctcacagccagagtttggaccgtctcatgaatcctctcatcgaccagtacctgtattacttgagcagaacaaacactccaagcggaaccactacgcagtccaggcttcagttttctcaagccggagcgagtgacattcgggaccagtctaggaactggcttcctggaccctgttaccgccagcagcgagtaccaaagacagctgcggacaacaacaacagtgattactcgtggactggagctaccaagtatcacctcaatggaagagactctctggtgaatccgggcacagccatggccagccacaaggacgatgaagaaaagtattttcctcagagcggggttctcatcttcggaaaacaagactcgggaaaaactaatgtggacattgaaaaggtcatgattacagacgaagaggaaatcaggaccaccaatcccgtggctacggagcagtatggttctgtatctaccaatctccagagcggcaacacacaagcagctacctcagatgtcaacacacaaggcgttcttccaggcatggtctggcaggacagagacgtgtacctgcagggacccatctgggcaaagattccacacacggacggacattttcacccttctcctcttatgggaggatttggaccgaagcaccctcccccgcagattctcatcaagaataccccggtacctgcgaatccttctaccaccttcagcgcggcaaagtttgcttccttcatcacacagtactccacggggcaggtcagcgtggagatcgagtgggagctgcagaaagagaacagcaaacgctggaaccccgagatccagtatacctccaactacaacaagtctgttaatgtggactttactgtggacactaatggcgtgtattcagagcctcgccccattggcacaagatacctgactcgtaatctgtaa

SEQ ID NO: 1151 - DNA, 2208 bp, Artificial Sequence
  Synthetic Polynucleotide
atggctgccgatggttatcttccagattggctcgaggacactctctctgaaggaataagacagtggtggaagctcaaacctggcccaccaccgccaaagcccgcagagcggcataaggacgacagcaggggtcttgtgcttcctgggtacaagtacctcggacccttcaacggactcgacaaaggagagccggtcaacgaggcagacgccgcggccctcgagcacgacaaggcctacgaccggcagctcgacagcggagacaacccgtacctcaagtacaaccacgccgacgcggagtttcaggagcgccttaaagaagatacgtcttttgggggcaacctcgcaagagcagtattccaggcgaaaaagagggttcttgaacctctgggcctggttgaggagcctgttaagacggctccgggaaaaaagaggccggtagagcactctcctgcggagctagattcctcctccggaactggaaagtcgggccaacagcctgcaagaaagagattgaattttggtcagactggagacgcagactccgtacctgacccccagcctctcggacagccaccagcagccccctctggtctgggaactaatacgatggcttcaggcagtggcgcaccaatggcagacaataacgagggcgccgacggagtgggtaattcctcgggaaattggcattgcgattccacatggatgggcgacagagtcatcaccaccagcacccgcacctgggctctgcccacctacaacaaccatctgtacaagcaaatttccagccagtctggggccagcaacgacaaccactactttggctacagcaccccttgggggtattttgacttcaacagattccactgccacttctccccacgtgactggcaaagactcatcaacaacaattggggattccggcccaaaagactcaacttcaagctctttaacattcaagtcaaggaggtcacgcagaatgacggtacgacgacgattgccaataaccttaccagcacggttcaggtgtttactgactcggagtaccagctcccgtacgtcctcggctcggcgcatcaaggatgcctcccgccgttcccagcagacgtcttcatggtgccacagtatggatacctcaccctgaacaacgggagtcaggcggtaggacgctcttcattttactgcctggagtactttccttctcagatgctgcgtaccggaaacaactttaccttcagctacacctttgaggacgttccttttcacagcagctacgctcacagccagagtttggaccgtctcatgaatcctctcatcgaccagtacctgtattacttgagcagaacaaacactccaagcggaaccactacgcagtccaggcttcagttttctcaagccggagcgagtgacattcgggaccagtctaggaactggcttcctggaccctgttaccgccagcagcgagtatcaaagacagctgcggacaacaacaacagtgattactcgtggactggagctaccaagtatcacctcaatggaagagactctctggtgaatccgggcacagccatggccagccacaaggacgatgaagaaaagtattttcctcagagcggggttctcatcttcggaaaacaagactcgggaaaaactaatgtggacattgaaaaggtcatgattacagacgaagaggaaatcaggaccaccaatcccgtggctacggagcagtatggttctgtatctaccaatctccagagcggcaacacacaagcagctacctcagatgtcaacacacaaggcgttcttccaggcatggtctggcaggacagagacgtgtacctgcagggacccatctgggcaaagattccacacacggacggacattttcacccttctcctcttatgggaggatttggaccgaagcaccctcccccgcagattctcatcaagaataccccggtacctgcgaatccttctaccaccttcagcgcggcaaagtttgcttccttcatcacacagtactccacggggcaggtcagcgtggagatcgagtgggagctgcagaaagagaacagcaaacgctggaaccccgagatccagtatacctccaactacaacaagtctgttaatgtggactttactgtggacactaatggcgtgtattcagagcctcgccccattggcacaagatacctgactcgtaatctgtaa

SEQ ID NO: 1152 - DNA, 2208 bp, Artificial Sequence
  Synthetic Polynucleotide
atggctgccgatggttatcttccagattggctcgaggacactctctctgaaggaataagacagtggtggaagctcaaacctggcccaccaccgccaaagcccgcagagcggcataaggacgacagcaggggtcttgtgcttcctgggtacaagtacctcggacccttcaacggactcgacaaaggagagccggtcaacgaggcagacgccgcggccctcgagcacgacaaggcctacgaccggcagctcgacagcggagacaacccgtacctcaagtacaaccacgccgacgcggagtttcaggagcgccttaaagaagatacgccttttgggggcaacctcgcaagagcagtattccaggcgaaaaagagggttcttgaacctctgggcctggttgaggagcctgttaagacggctccgggaaaaaagaggccggtagagcactctcctgcggagctagattcctcctccggaactggaaagtcgggccaacagcctgcaagaaagagattgaattttggtcagactggagacgcagactccgtacctgacccccagcctctcggacagccaccagcagccccctctggtctgggaactaatacgatggcttcaggcagtggcgcaccaatggcagacaataacgagggcgccgacggagtgggtaattcctcgggaaattggcattgcgattccacatggatgggcgacagagtcatcaccaccagcacccgcacctgggctctgcccacctacaacaaccatctgtacaagcaaatttccagccagtctggggccagcaacgacaaccactactttggctacagcaccccttgggggtattttgacttcaacagattccactgccacttctccccacgtgactggcaaagactcatcaacaacaattggggattccggcccaaaagactcaacttcaagctctttaacattcaagtcaaggaggtcacgcagaatgacggtacgacgacgattgccaataaccttaccagcacggttcaggtgtttactgactcggagtaccagctcccgtacgtcctcggctcggcgcatcaaggatgcctcccgccgttcccagcagacgtcttcatggtgccacagtatggatacctcaccctgaacaacgggagtcaggcggtaggacgctcttcattttactgcctggagtactttccttctcagatgctgcgtaccggaaacaactttaccttcagctacacctttgaggacgttccttttcacagcagctacgctcacagccagagtttggaccgtctcatgaatcctctcatcgaccagtacctgtattacttgagcagaacaaacactccaagcggaaccactacgcagtccaggcttcagttttctcaagccggagcgagtgacattcgggaccagtctaggaactggcttcctggaccctgttaccgccagcagcgagtatcaaagacagctgcggacaacaacaacagtgattactcgtggactggagctaccaagtatcacctcaatggaagagactctctggtgaatccgggcacagccatggccagccacaaggacgatgaagaaaagtattttcctcagagcggggttctcatcttcggaaaacaagactcgggaaaaactaatgtggacattgaaaaggtcatgattacagacgaagaggaaatcaggaccaccaatcccgtggctacggagcagtatggttctgtatctaccaatctccagagcggcaacacacaagcagctacctcagatgtcaacacacaaggcgttcttccaggcatggtctggcaggacagagacgtgtacctgcagggacccatctgggcaaagattccacacacggacggacattttcacccttctcctcttatgggaggatttggaccgaagcaccctcccccgcagattctcatcaagaataccccggtacctgcgaatccttctaccaccttcagcgcggcaaagtttgcttccttcatcacacagtactccacggggcaggtcagcgtggagatcgagtgggagctgcagaaagagaacagcaaacgctggaaccccgagatccagtatacctccaactacaacaagtctgttaatgtggactttactgtggacactaatggcgtgtattcagagcctcgccccattggcacaagatacctgactcgtaatctgtaa

SEQ ID NO: 1153 - DNA, 2208 bp, Artificial Sequence
  Synthetic Polynucleotide
atggctgccgatggttatcttccagattggctcgaggacactctctctgaaggaataagacagtggtggaagctcaaacctggcccaccaccgccaaagcccgcagagcggcataaggacgacagcaggggtcttgtgcttcctgggtacaagtacctcggacccttcaacggactcgacaaaggagagccggtcaacgaggcagacgccgcggccctcgagcacgacaaggcctacgaccggcagctcgacagcggagacaacccgtacctcaagtacaaccacgccgacgcggagtttcaggagcgccttaaagaagatacgtcttttgggggcaacctcgcaagagcagtattccaggcgaaaaagagggttcttgaacctctgggcctggttgaggagcctgttaagacggctccgggaaaaaagaggccggtagagcactctcctgcggagctagattcctcctccggaactggaaagtcgggccaacagcctgcaagaaagagattgaattttggtcagactggagacgcagactccgtacctgacccccagcctctcggacagccaccagcagccccctctggtctgggaactaatacgatggcttcaggcagtggcgcaccaatggcagacaataacgagggcgccgacggagtgggtaattcctcgggaaattggcattgcgattccacatggatgggcgacagagtcatcaccaccagcacccgcacctgggctctgcccacctacaacaaccatctgtacaagcaaatttccagccagtctggggccagcaacgacaaccactactttggctacagcaccccttgggggtattttgacttcaacagattccactgccacttctccccacgtgactggcaaagactcatcaacaacaattggggattccggcccaaaagactcaactccaagctctttaacattcaagtcaaggaggtcacgcagaatgacggtacgacgacgattgccaataaccttaccagcacggttcaggtgtttactgactcggagtaccagctcccgtacgtcctcggctcggcgcatcaaggatgcctcccgccgttcccagcagacgtcttcatggtgccacagtatggatacctcaccctgaacaacgggagtcaggcggtaggacgctcttcattttactgcctggagtactttccttctcagatgctgcgtaccggaaacaactttaccttcagctacacctttgaggacgttccttttcacagcagctacgctcacagccagagtttggaccgtctcatgaatcctctcatcgaccagtacctgtattacttgagcagaacaaacactccaagcggaaccactacgcagtccaggcttcagttttctcaagccggagcgagtgacattcgggaccagtctaggaactggcttcctggaccctgttaccgccagcagcgagtatcaaagacagctgcggacaacaacaacagtgattactcgtggactggagctaccaagtatcacctcaatggaagagactctctggtgaatccgggcacagccatggccagccacaaggacgatgaagaaaagtattttcctcagagcggggttctcatcttcggaaaacaagactcgggaaaaactaatgtggacattgaaaaggtcatgattacagacgaagaggaaatcaggaccaccaatcccgtggctacggagcagtatggttctgtatctaccaatctccagagcggcaacacacaagcagctacctcagatgtcaacacacaaggcgttcttccaggcatggtctggcaggacagagacgtgtacctgcagggacccatctgggcaaagattccacacacggacggacattttcacccttctcctcttatgggaggatttggaccgaagcaccctcccccgcagattctcatcaagaataccccggtacctgcgaatccttctaccaccttcagcgcggcaaagtttgcttccttcatcacacagtactccacggggcaggtcagcgtggagatcgagtgggagctgcagaaagagaacagcaaacgctggaaccccgagatccagtatacctccaactacaacaagtctgttaatgtggactttactgtggacactaatggcgtgtattcagagcctcgccccattggcacaagatacctgactcgtaatctgtaa

SEQ ID NO: 1154 - DNA, 2208 bp, Artificial Sequence
  Synthetic Polynucleotide
atggctgccgatggttatcttccagattggctcgaggacactctctctgaaggaataagacagtggtggaagctcaaacctggcccaccaccgccaaagcccgcagagcggcataaggacgacagcaggggtcttgtgcttcctgggtacaagtacctcggacccttcaacggactcgacaaaggagagccggtcaacgaggcagacgccgcggccctcgagcacgacaaggcctacgaccggcagctcgacagcggagacaacccgtacctcaagtacaaccacgccgacgcggagtttcaggagcgccttaaagaagatacgtcttttgggggcaacctcgcaagagcagtattccaggcgaaaaagagggttcttgaacctctgggcctggttgaggagcctgttaagacggctccgggaaaaaagaggccggtagagcactctcctgcggagctagattcctcctccggaactggaaagtcgggccaacagcctgcaagaaagagattgaattttggtcagactggagacgcagactccgtacctgacccccagcctctcggacagccaccagcagccccctctggtctgggaactaatacgatggcttcaggcagtggcgcaccaatggcagacaataacgagggcgccgacggagtgggtaattcctcgggaaattggcattgcgattccacatggatgggcgacagagtcatcaccaccagcacccgcacctgggctctgcccacctacaacaaccatctgtacaagcaaatttccagccagtctggggccagcaacgacaaccactactttggctacagcaccccttgggggtattttgacttcaacagattccactgccacttctccccacgtgactggcaaagactcatcaacaacaattggggattccggcccaaaagactcaacttcaagctctttaacattcaagtcaaggaggtcacgcagaatgacggtacgacgacgattgccaataaccttaccagcacggttcaggtgtttactgactcggagtaccagctcccgtacgtcctcggctcggcgcatcaaggatgcctcccgccgttcccagcagacgtcttcatggtgccacagtatggatacctcaccctgaacaacgggagtcaggcggtaggacgctcttcattttactgcctggagtactttccttctcagatgctgcgtaccggaaacaactttaccttcagctacacctttgaggacgttccttttcacagcagctacgctcacagccagggtttggaccgtctcatgaatcctctcatcgaccagtacctgtattacttgagcagaacaaacactccaagcggaaccactacgcagtccaggcttcagttttctcaagccggagcgagtgacattcgggaccagtctaggaactggcttcctggaccctgttaccgccagcagcgagtatcaaagacagctgcggacaacaacaacagtgattactcgtggactggagctaccaagtatcacctcaatggaagagactctctggtgaatccgggcacagccatggccagccacaaggacgatgaagaaaagtattttcctcagagcggggttctcatcttcggaaaacaagactcgggaaaaactaatgtggacattgaaaaggtcatgattacagacgaagaggaaatcaggaccaccaatcccgtggctacggagcagtatggttctgtatctaccaatctccagagcggcaacacacaagcagctacctcagatgtcaacacacaaggcgttcttccaggcatggtctggcaggacagagacgtgtacctgcagggacccatctgggcaaagattccacacacggacggacattttcacccttctcctcttatgggaggatttggaccgaagcaccctcccccgcagattctcatcaagaataccccggtacctgcgaatccttctaccaccttcagcgcggcaaagtttgcttccttcatcacacagtactccacggggcaggtcagcgtggagatcgagtgggagctgcagaaagagaacagcaaacgctggaaccccgagatccagtatacctccaactacaacaagtctgttaatgtggactttactgtggacactaatggcgtgtattcagagcctcgccccattggcacaagatacctgactcgtaatctgtaa

SEQ ID NO: 1155 - DNA, 2208 bp, Artificial Sequence
  Synthetic Polynucleotide
atggctgccgatggttatcttccagattggctcgaggacactctctctgaaggaataagacagtggtggaagctcaaacctggcccaccaccgccaaagcccgcagagcggcataaggacgacagcaggggtcttgtgcttcctgggtacaagtacctcggacccttcaacggactcgacaaaggagagccggtcaacgaggcagacgccgcggccctcgagcacgacaaggcctacgaccggcagctcgacagcggagacaacccgtacctcaagtacaaccacgccgacgcggagtttcaggagcgccttaaagaagatacgtcttttgggggcaacctcgcaagagcagtattccaggcgaaaaagagggttcttgaacctctgggcctggttgaggagcctgttaagacggctccgggaaaaaagaggccggtagagcactctcctgcggagctagattcctcctccggaactggaaagtcgggccaacagcctgcaagaaagagattgaattttggtcagactggagacgcagactccgtacctgacccccagcctctcggacagccaccagcagccccctctggtctgggaactaatacgatggcttcaggcagtggcgcaccaatggcagacaataacgagggcgccgacggagtgggtaattcctcgggaaattggcattgcgattccacatggatgggcgacagagtcatcaccaccagcacccgcacctgggctctgcccacctacaacaaccatctgtacaagcaaatttccagccagtctggggccagcaacgacaaccactactttggctacagcaccccttgggggtattttgacttcaacagattccactgccacttctccccacgtgactggcaaagactcatcaacaacaattggggattccggcccaaaagactcaacttcaagctctttaacattcaagtcaaggaggtcacgcagaatgacggtacgacgacgattgccaataaccttaccagcacggttcaggtgtttactgactcggagtaccagctcccgtacgtcctcggctcggcgcatcaaggatgcctcccgccgctcccagcagacgtcttcatggtgccacagtatggatacctcaccctgaacaacgggagtcaggcggtaggacgctcttcattttactgcctggagtactttccttctcagatgctgcgtaccggaaacaactttaccttcagctacacctttgaggacgttccttttcacagcagctacgctcacagccagagtttggaccgtctcatgaatcctctcatcgaccagtacctgtattacttgagcagaacaaacactccaagcggaaccactacgcagtccaggcttcagttttctcaagccggagcgagtgacattcgggaccagtctaggaactggcttcctggaccctgttaccgccagcagcgagtatcaaagacagctgcggacaacaacaacagtgattactcgtggactggagctaccaagtatcacctcaatggaagagactctctggtgaatccgggcacagccatggccagccacaaggacgatgaagaaaagtattttcctcagagcggggttctcatcttcggaaaacaagactcgggaaaaactaatgtggacattgaaaaggtcatgattacagacgaagaggaaatcaggaccaccaatcccgtggctacggagcagtatggttctgtatctaccaatctccagagcggcaacacacaagcagctacctcagatgtcaacacacaaggcgttcttccaggcatggtctggcaggacagagacgtgtacctgcagggacccatctgggcaaagattccacacacggacggacattttcacccttctcctcttatgggaggatttggaccgaagcaccctcccccgcagattctcatcaagaataccccggtacctgcgaatccttctaccaccttcagcgcggcaaagtttgcttccttcatcacacagtactccacggggcaggtcagcgtggagatcgagtgggagctgcagaaagagaacagcaaacgctggaaccccgagatccagtatacctccaactacaacaagtctgttaatgtggactttactgtggacactaatggcgtgtattcagagcctcgccccattggcacaagatacctgactcgtaatctgtaa

SEQ ID NO: 1156 - DNA, 2208 bp, Artificial Sequence
  Synthetic Polynucleotide
atggctgccgatggttatcttccagattggctcgaggacactctctctgaaggaataagacagtggtggaagctcaaacctggcccaccaccgccaaagcccgcagagcggcataaggacgacagcaggggtcttgtgcttcctgggtacaagtacctcggacccttcaacggactcgacaaaggagagccggtcaacgaggcagacgccgcggccctcgagcacgacaaggcctacgaccggcagctcgacagcggagacaacccgtacctcaagtacaaccacgccgacgcggagtttcaggagcgccttaaagaagatacgtcttttgggggcaacctcgcaagagcagtattccaggcgaaaaagagggttcttgaacctctgggcctggttgaggagcctgttaagacggctccgggaaaaaagaggccggtagagcactctcctgcggagctagattcctcctccggaactggaaagtcgggccaacagcctgcaagaaagagattgaattttggtcagactggagacgcagactccgtacctgacccccagcctctcggacagccaccagcagccccctctggtctgggaactaatacgatggcttcaggcagtggcgcaccaatggcagacaataacgagggcgccgacggagtgggtaattcctcgggaaattggcattgcgattccacatggatgggcgacagagtcatcaccaccagcacccgcacctgggctctgcccacctacaacaaccatctgtacaagcaaatttccagccagtctggggccagcaacgacaaccactactttggctacagcaccccttgggggtattttgacttcaacagattccactgccacttctccccacgtgactggcaaagacccatcaacaacaattggggattccggcccaaaagactcaacttcaagctctttaacattcaagtcaaggaggtcacgcagaatgacggtacgacgacgattgccaataaccttaccagcacggttcaggtgtttactgactcggagtaccagctcccgtacgtcctcggctcggcgcatcaaggatgcctcccgccgttcccagcagacgtcttcatggtgccacagtatggatacctcaccctgaacaacgggagtcaggcggtaggacgctcttcattttactgcctggagtactttccttctcagatgctgcgtaccggaaacaactttaccttcagctacacctttgaggacgttccttttcacagcagctacgctcacagccagagtttggaccgtctcatgaatcctctcatcgaccagtacctgtattacttgagcagaacaaacactccaagcggaaccactacgcagtccaggcttcagttttctcaagccggagcgagtgacattcgggaccagtctaggaactggcttcctggaccctgttaccgccagcagcgagtatcaaagacagctgcggacaacaacaacagtgattactcgtggactggagctaccaagtatcacctcaatggaagagactctctggtgaatccgggcacagccatggccagccacaaggacgatgaagaaaagtattttcctcagagcggggttctcatcttcggaaaacaagactcgggaaaaactaatgtggacattgaaaaggtcatgattacagacgaagaggaaatcaggaccaccaatcccgtggctacggagcagtatggttctgtatctaccaatctccagagcggcaacacacaagcagctacctcagatgtcaacacacaaggcgttcttccaggcatggtctggcaggacagagacgtgtacctgcagggacccatctgggcaaagattccacacacggacggacattttcacccttctcctcttatgggaggatttggaccgaagcaccctcccccgcagattctcatcaagaataccccggtacctgcgaatccttctaccaccttcagcgcggcaaagtttgcttccttcatcacacagtactccacggggcaggtcagcgtggagatcgagtgggagctgcagaaagagaacagcaaacgctggaaccccgagatccagtatacctccaactacaacaagtctgttaatgtggactttactgtggacactaatggcgtgtattcagagcctcgccccattggcacaagatacctgactcgtaatctgtaa

SEQ ID NO: 1157 - DNA, 2208 bp, Artificial Sequence
  Synthetic Polynucleotide
atggctgccgatggttatcttccagattggctcgaggacactctctctgaaggaataagacagtggtggaagctcaaacctggcccaccaccgccaaagcccgcagagcggcataaggacgacagcaggggtcttgtgcttcctgggtacaagtacctcggacccttcaacggactcgacaaaggagagccggtcaacgaggcagacgccgcggccctcgagcacgacgaggcctacgaccggcagctcgacagcggagacaacccgtacctcaagtacaaccacgccgacgcggagtttcaggagcgccttaaagaagatacgtcttttgggggcaacctcgcaagagcagtattccaggcgaaaaagagggttcttgaacctctgggcctggttgaggagcctgttaagacggctccgggaaaaaagaggccggtagagcactctcctgcggagctagattcctcctccggaactggaaagtcgggccaacagcctgcaagaaagagattgaattttggtcagactggagacgcagactccgtacctgacccccagcctctcggacagccaccagcagccccctctggtctgggaactaatacgatggcttcaggcagtggcgcaccaatggcagacaataacgagggcgccgacggagtgggtaattcctcgggaaattggcattgcgattccacatggatgggcgacagagtcatcaccaccagcacccgcacctgggctctgcccacctacaacaaccatctgtacaagcaaatttccagccagtctggggccagcaacgacaaccactactttggctacagcaccccttgggggtattttgacttcaacagattccactgccacttctccccacgtgactggcaaagactcatcaacaacaattggggattccggcccaaaagactcaacttcaagctctttaacattcaagtcaaggaggtcacgcagaatgacggtacgacgacgattgtcaataaccttaccagcacggttcaggtgtttactgactcggagtaccagctcccgtacgtcctcggctcggcgcatcaaggatgcctcccgccgttcccagcagacgtcttcatggtgccacagtatggatacctcaccctgaacaacgggagtcaggcggtaggacgctcttcattttactgcctggagtactttccttctcagatgctgcgtaccggaaacaactttaccttcagctacacctttgaggacgttccttttcacagcagctacgctcacagccagagtttggaccgtctcatgaatcctctcatcgaccagtacctgtattacttgagcagaacaaacactccaagcggaaccactacgcagtccaggcttcagttttctcaagccggagcgagtgacattcgggaccagtctaggaactggcttcctggaccctgttaccgccagcagcgagtatcaaagacagctgcggacaacaacaacagtgattactcgtggactggagctaccaagtatcacctcaatggaagagactctctggtgaatccgggcacagccatggccagccacaaggacgatgaagaaaagtattttcctcagagcggggttctcatcttcggaaaacaagactcgggaaaaactaatgtggacattgaaaaggtcatgattacagacgaagaggaaatcaggaccaccaatcccgtggctacggagcagtatggttctgtatctaccaatctccagagcggcaacacacaagcagctacctcagatgtcaacacacaaggcgttcttccaggcatggtctggcaggacagagacgtgtacctgcagggacccatctgggcaaagattccacacacggacggacattttcacccttctcctcttatgggaggatttggaccgaagcaccctcccccgcagattctcatcaagaataccccggtacctgcgaatccttctaccaccttcagcgcggcaaagtttgcttacttcatcacacagtactccacggggcaggtcagcgtggagatcgagtgggagctgcagaaagggaacagcaaacgctggaaccccgagatccagtatacctccaactacaacaagtctgttaatgtggactttactgtggacactaatggcgtgtattcagagcctcgccccattggcacaagatacctgactcgtaatctgtaa

SEQ ID NO: 1158 - DNA, 2208 bp, Artificial Sequence
  Synthetic Polynucleotide
atggctgccgatggttatcttccagattggctcgaggacactctctctgaaggaataagacagtggtggaagctcaaacctggcccaccaccgccaaagcccgcagagcggcataaggacgacagcaggggtcttgtgcttcctgggtacaagtacctcggacccttcaacggactcgacaaaggagagccggtcaacgaggcagacgccgcggccctcgagcacgacaaggcctacgaccggcagctcgacagcggagacaacccgtacctcaagtacaaccacgccgacgcggagtttcaggagcgccttaaagaagatacgtcttttgggggcaacctcgcaagagcagtattccaggcgaaaaagagggttcttgaacctctgggcctggttgaggagcctgttaagacggctccgggaaaaaagaggccggtagagcactctcctgcggagctagattcctcctccggaactggaaagtcgggccaacagcctgcaagaaagagattgaattttggtcagactggagacgcagactccgtacctgacccccagcctctcggacagccaccagcagccccctctggtctgggaactaatacgatggcttcaggcagtggcgcaccaatggcagacaataacgagggcgccgacggagtgggtaattcctcgggaaattggcattgcgattccacatggatgggcgacagagtcatcaccaccagcacccgcacctgggctctgcccacctacaacaaccatctgtacaagcaaatttccagccagtctggggccagcaacgacaaccactactttggctacagcaccccttgggggtattttgacttcaacagattccactgccacttctccccacgtgactggcaaagactcatcaacaacaattggggattccggcccaaaagactcaacttcaagctctttaacattcaagtcaaggaggtcacgcagaatgacggtacgacgacgattgccaataaccttaccagcacggttcaggtgtttactgactcggagtaccagctcccgtacgtcctcggctcggcgcatcaaggatgcctcccgccgttcccagcagacgtcttcatggtgccacagtatggatacctcaccctgaacaacgggagtcaggcggtaggacgctcttcattttactgcctggagtactttccttctcagatgctgcgtaccggaaacaactgtaccttcagctacacctttgaggacgttccttttcacagcagctacgctcacagccagagtttggaccgtctcatgaatcctctcatcgaccagtacctgtattacttgagcagaacaaacactccaagcggaaccactacgcagtccaggcttcagttttctcaagccggagcgagtgacattcgggaccagtctaggaactggcttcctggaccctgttaccgccagcagcgagtatcaaagacagctgcggacaacaacaacagtgattactcgtggactggagctaccaagtatcacctcaatggaagagactctctggtgaatccgggcacagccatggccagccacaaggacgatgaagaaaagtattttcctcagagcggggttctcatcttcggaaaacaagactcgggaaaaactaatgtggacattgaaaaggtcatgattacagacgaagaggaaatcaggaccaccaatcccgtggctacggagcagtatggttctgtatctaccaatctccagagcggcaacacacaagcagctacctcagatgtcaacacacaaggcgttcttccaggcatggtctggcaggacagagacgtgtacctgcagggacccatctgggcaaagattccacacacggacggacattttcacccttctcctcttatgggaggatttggaccgaagcaccctcccccgcagattctcatcaagaataccccggtacctgcgaatccttctaccaccttcagcgcggcaaagtttgcttccttcatcacacagtactccacggggcaggtcagcgtggagatcgagtgggagctgcagaaagagaacagcaaacgctggaaccccgagatccagtatacctccaactacaacaagtctgttaatgtggactttactgtggacactaatggcgtgtattcagagcctcgccccattggcacaagatacctgactcgtaatctgtaa

SEQ ID NO: 1159 - DNA, 2208 bp, Artificial Sequence
  Synthetic Polynucleotide
atggctgccgatggttatcttccagattggctcgaggacactctctctgaaggaataagacagtggtggaagctcaaacctggcccaccaccgccaaagcccgcagagcggcataaggacgacagcaggggtcttgtgcttcctgggtacaagtacctcggacccttcaacggactcgacaaaggagagccggtcaacgaggcagacgccgcggccctcgagcacgacaaggcctacgaccggcagctcgacagcggagacaacccgtacctcaagtacaaccacgccgacgcggagtttcaggagcgccttaaagaagatacgtcttttgggggcaacctcgcaagagcagtattccaggcgaaaaagagggttcttgaacctctgggcctggttgaggagcctgttaagacggctccgggaaaaaagaggccggtagagcactctcctgcggagctagattcctcctccggaactggaaagtcgggccaacagcctgcaagaaagagattgaattttggtcagactggagacgcagactccgtacctgacccccagcctctcggacagccaccagcagccccctctggtctgggaactaatacgatggcttcaggcagtggcgcaccaatggcagacaataacgagggcgccgacggagtgggtaattcctcgggaaattggcattgcgattccacatggatgggcgacagagtcatcaccaccagcacccgcacctgggctctgcccacctacaacaaccatctgtacaagcaaatttccagccagtctggggccagcaacgacaaccactactttggctacagcaccccttgggggtattttgacttcaacagattccactgccacttctccccacgtgactggcaaagactcatcaacaacaattggggattccggcccaaaagacccaacttcaagctctttaacattcaagtcaaggaggtcacgcagaatgacggtacgacgacgattgccaataaccttaccagcacggttcaggtgtttactgactcggagtaccagctcccgtacgtcctcggctcggcgcatcaaggatgcctcccgccgttcccagcagacgtcttcatggtgccacagtatggatacctcaccctgaacaacgggagtcaggcggtaggacgctcttcattttactgcctggagtactttccttctcagatgctgcgtaccggaaacaactttaccttcagctacacctttgaggacgttccttttcacagcagctacgctcacagccagagtttggaccgtctcatgaatcctctcatcgaccagtacctgtattacttgagcagaacaaacactccaagcggaaccactacgcagtccaggcttcagttttctcaagccggagcgagtgacattcgggaccagtctaggaactggcttcctggaccctgttaccgccagcagcgagtatcaaagacagctgcggacaacaacaacagtgattactcgtggactggagctaccaagtatcacctcaatggaagagactctctggtgaatccgggcacagccatggccagccacaaggacgatgaagaaaagtattttcctcagagcggggttctcatcttcggaaaacaagactcgggaaaaactaatgtggacattgaaaaggtcatgattacagacgaagaggaaatcaggaccaccaatcccgtggctacggagcagtatggttctgtatctaccaatctccagagcggcaacacacaagcagctacctcagatgtcaacacacaaggcgttcttccaggcatggtctggcaggacagagacgtgtacctgcagggacccatctgggcaaagattccacacacggacggacattttcacccttctcctcttatgggaggatttggaccgaagcaccctcccccgcagattctcatcaagaataccccggtacctgcgaatccttctaccaccttcagcgcggcaaagtttgcttccttcatcacacagtactccacggggcaggtcagcgtggagatcgagtgggagctgcagaaagagaacagcaaacgctggaaccccgagatccagtatacctccaactacaacaagtctgttaatgtggactttactgtggacactaatggcgtgtattcagagcctcgccccattggcacaagatacctgactcgtaatctgtaa

SEQ ID NO: 1160 - DNA, 2208 bp, Artificial Sequence
  Synthetic Polynucleotide
atggctgccgatggttatcttccagattggctcgaggacactctctctgaaggaataagacagtggtggaagctcaaacctggcccaccaccgccaaagcccgcagagcggcataaggacgacagcaggggtcttgtgcttcctgggtacaagtacctcggacccttcaacggactcgacaaaggagagccggtcaacgaggcagacgccgcggccctcgagcacgacaaggcctacgaccggcagctcgacagcggagacaacccgtacctcaagtacaaccacgccgacgcggagtttcaggagcgccttaaagaagatacgtcttttgggggcaacctcgcaagagcagtattccaggcgaaaaagagggttcttgaacctctgggcctggttgaggagcctgttaagacggctccgggaaaaaagaggccggtagagcactctcctgcggagctagattcctcctccggaactggaaagtcgggccaacagcctgcaagaaagagattgaattttggtcagactggagacgcagactccgtacctgacccccagcctctcggacagccaccagcagccccctctggtctgggaactaatacgatggcttcaggcagtggcgcaccaatggcaggcaataacgagggcgccgacggagtgggtaattcctcgggaaattggcattgcgattccacatggatgggcgacagagtcatcaccaccagcacccgcacctgggctctgcccacctacaacaaccatctgtacaagcaaatttccagccagtctggggccagcaacgacaaccactactttggctacagcaccccttgggggtattttgacttcaacagattccactgccacttctccccacgtgactggcaaagactcatcaacaacaattggggattccggcccaaaagactcaacttcaagctctttaacattcaagtcaaggaggtcacgcagaatgacggtacgacgacgattgccaataaccttaccagcacggttcaggtgtttactgactcggagtaccagctcccgtacgtcctcggctcggcgcatcaaggatgcctcccgccgttcccagcagacgtcttcatggtgccacagtatggatacctcaccctgaacaacgggagtcaggcggtaggacgctcttcattttactgcctggagtactttccttctcagatgctgcgtaccggaaacaactttaccttcagctacacctttgaggacgttccttttcacagcagctacgctcacagccagagtttggaccgtctcatgaatcctctcatcgaccagtacctgtattacttgagcagaacaaacactccaagcggaaccactacgcagtccaggcttcagttttctcaagccggagcgagtgacattcgggaccagtctaggaactggcttcctggaccctgttaccgccagcagcgagtatcaaagacagctgcggacaacaacaacagtgattactcgtggactggagctaccaagtatcacctcaatggaagagactctctggtgaatccgggcacagccatggccagccacaaggacgatgaagaaaagtattttcctcagagcggggttctcatcttcggaaaacaagactcgggaaaaactaatgtggacattgaaaaggtcatgattacagacgaagaggaaatcaggaccaccaatcccgtggctacggagcagtatggttctgtatctaccaatctccagagcggcaacacacaagcagctacctcagatgtcaacacacaaggcgttcttccaggcatggtctggcaggacagagacgtgtacctgcagggacccatctgggcaaagattccacacacggacggacattttcacccttctcctcttatgggaggatttggaccgaagcaccctcccccgcagattctcatcaagaataccccggtacctgcgaatccttctaccaccttcagcgcggcaaagtttgcttccttcatcacacagtactccacggggcaggtcagcgtggagatcgagtgggagctgcagaaagagaacagcaaacgctggaaccccgagatccagtatacctccaactacaacaagtctgttaatgtggactttactgtggacactaatggcgtgtattcagagcctcgccccattggcacaagatacctgactcgtaatctgtaa

SEQ ID NO: 1161 - DNA, 2208 bp, Artificial Sequence
  Synthetic Polynucleotide
atggctgccgatggttatcttccagattggctcgaggacactctctctgaaggaataagacagtggtggaagctcaaacctggcccaccaccgccaaagcccgcagagcggcataaggacgacagcaggggtcttgtgcttcctgggtacaagtacctcggacccttcaacggactcgacaaaggagagccggtcaacgaggcagacgccgcggccctcgagcacgacaaggcctacgaccggcagctcgacagcggagacaacccgtacctcaagtacaaccacgccgacgcggagtttcaggagcgccttaaagaagatacgccttttgggggcaacctcgcaagagcagtattccaggcgaaaaagagggttcttgaacctctgggcctggttgaggagcctgttaagacggctccgggaaaaaagaggccggtagagcactctcctgcggagctagattcctcctccggaactggaaagtcgggccaacagcctgcaagaaagagattgaattttggtcagactggagacgcagactccgtacctgacccccagcctctcggacagccaccagcagccccctctggtctgggaactaatacgatggcttcaggcagtggcgcaccaatggcagacaataacgagggcgccgacggagtgggtaattcctcgggaaattggcattgcgattccacatggatgggcgacagagtcatcaccaccagcacccgcacctgggctctgcccacctacaacaaccatctgtacaagcaaatttccagccagtctggggccagcaacgacaaccactactttggctacagcaccccttgggggtattttgacttcaacagattccactgccacttctccccacgtgactggcaaagactcatcaacaacaattggggattccggcccaaaagactcaacttcaagctctttaacattcaagtcaaggaggtcacgcagaatgacggtacgacgacgattgccaataaccttaccagcacggttcaggtgtttactgactcggagtaccagctcccgtacgtcctcggctcggcgcatcaaggatgcctcccgccgttcccagcagacgtcttcatggtgccacagtatggatacctcaccctgaacaacgggagtcaggcggtaggacgctcttcattttactgcctggagtactttccttctcagatgctgcgtaccggaaacaactttaccttcagctacacctttgaggacgttccttttcacagcagctacgctcacagccagagtttggaccgtctcatgaatcctctcatcgaccagtacctgtattacttgagcagaacaaacactccaagcggaaccactacgcagtccaggcttcagttttctcaagccggagcgagtgacattcgggaccagtctaggaactggcttcctggaccctgttaccgccagcagcgagtatcaaagacagctgcggacaacaacaacagtgattactcgtggactggagctaccaagtatcacctcaatggaagagactctctggtgaatccgggcacagccatggccagccacaaggacgatgaagaaaagtattttcctcagagcggggttctcatcttcggaaaacaagactcgggaaaaactaatgtggacattgaaaaggtcatgattacagacgaagaggaaatcaggaccaccaatcccgtggctacggagcagtatggttctgtatctaccaatctccagagcggcaacacacaagcagctacctcagatgtcaacacacaaggcgttcttccaggcatggtctggcaggacagagacgtgtacctgcagggacccatctgggcaaagattccacacacggacggacattttcacccttctcctcttatgggaggatttggaccgaagcaccctcccccgcagattctcatcaagaataccccggtacctgcgaatccttctaccaccttcagcgcggcaaagtttgcttccttcatcacacagtactccacggggcaggtcagcgtggagatcgagtgggagctgcagaaagagaacagcaaacgctggaaccccgagatccagtatacctccaactacaacaagtctgttaatgtggactttactatggacactaatggcgtgtattcagagcctcgccccattggcacaagatacctgactcgtaatctgtaa

SEQ ID NO: 1162 - DNA, 2208 bp, Artificial Sequence
  Synthetic Polynucleotide
atggctgccgatggttatcttccagattggctcgaggacactctctctgaaggaataagacagtggtggaagctcaaacctggcccaccaccgccaaagcccgcagagcggcataaggacgacagcaggggtcttgtgcttcctgggtacaagtacctcggacccttcaacggactcgacaaaggagagccggtcaacgaggcagacgccgcggccctcgagcacgacaaggcctacgaccggcagctcgacagcggagacaacccgtacctcaagtacaaccacgccgacgcggagtttcaggagcgccttaaagaagatacgtcttttgggggcaacctcgcaagagcagtattccaggcgaaaaagagggttcttgaacctctgggcctggttgaggagcctgttaagacggctccgggaaaaaagaggccggtagagcactctcctgcggagctagattcctcctccggaactggaaagtcgggccaacagcctgcaagaaagagattgaattttggtcagactggagacgcagactccgtacctgacccccagcctctcggacagccaccagcagccccctctggtctgggaactaatacgatggcttcaggcagtggcgcaccaatggcagacaataacgagggcgccgacggagtgggtaattcctcgggaaattggcattgcgattccacatggatgggcgacagagtcatcaccaccagcacccgcacctgggctctgcccacctacaacaaccatctgtacaagcaaatttccagccagtctggggccagcaacgacaaccactactttggctacagcaccccttgggggtattttgacttcaacagattccactgccacttctccccacgtgactggcaaagactcatcaacaacaattggggattccggcccaaaagactcaacttcaagctctttaacattcaagtcaaggaggtcacgcagaatgacggtacgacgacgattgccaataaccttaccagcacggttcaggtgtttactgactcggagtaccagctcccgtacgtcctcggctcggcgcatcaaggatgcctcccgccgttcccagcagacgtcttcatggtgccacagtatggatacctcaccctgaacaacgggagtcaggcggtaggacgctcttcattttactgcctggagtactttccttctcagatgctgcgtaccggaaacaactttaccttcagctacacctttgaggacgttccttttcacagcagctacgctcacagccagagtttggaccgtctcatgaatcctctcatcgaccagtacctgtattacttgagcagaacaaacactccaagcggaaccactacgcagcccaggcttcagttttctcaagccggagcgagtgacattcgggaccagtctaggaactggcttcctggaccctgttaccgccagcagcgagtatcaaagacagctgcggacaacaacaacagtgattactcgtggactggagctaccaagtatcacctcaatggaagagactctctggtgaatccgggcacagccatggccagccacaaggacgatgaagaaaagtattttcctcagagcggggttctcatcttcggaaaacaagactcgggaaaaactaatgtggacattgaaaaggtcatgattacagacgaagaggaaatcaggaccaccaatcccgtggctacggagcagtatggttctgtatctaccaatctccagagcggcaacacacaagcagctacctcagatgtcaacacacaaggcgttcttccaggcatggtctggcaggacagagacgtgtacctgcagggacccatctgggcaaagattccacacacggacggacattttcacccttctcctcttatgggaggatttggaccgaagcaccctcccccgcagattctcatcaagaataccccggtacctgcgaatccttctaccaccttcagcgcggcaaagtttgcttccttcatcacacagtactccacggggcaggtcagcgtggagatcgagtgggagctgcagaaagagaacagcaaacgctggaaccccgagatccagtatacctccaactacaacaagtctgttaatgtggactttactgtggacactaatggcgtgtattcagagcctcgccccattggcacaagatacctgactcgtaatctgtaa

SEQ ID NO: 1163 - DNA, 2208 bp, Artificial Sequence
  Synthetic Polynucleotide
atggctgccgatggttatcttccagattggctcgaggacactctctctgaaggaataagacagtggtggaagctcaaacctggcccaccaccgccaaagcccgcagagcggcataaggacgacagcaggggtcttgtgcttcctgggtacaagtacctcggacccttcaacggactcgacaaaggagagccggtcaacgaggcagacgccgcggccctcgagcacgacaaggcctacgaccggcagctcgacagcggagacaacccgtacctcaagtacaaccacgccgacgcggagtttcaggagcgccttaaagaagatacgtcttttgggggcaacctcgcaagagcagtattccaggcgaaaaagagggttcttgaacctctgggcctggttgaggagcctgttaagacggctccgggaaaaaagaggccggtagagcactctcctgcggagctagattcctcctccggaactggaaagtcgggccaacagcctgcaagaaagagattgaattttggtcagactggagacgcagactccgtacctgacccccagcctctcggacagccaccagcagccccctctggtctgggaactaatacgatggcttcaggcagtggcgcaccaatggcagacaataacgagggcgccgacggagtgggtaattcctcgggaaattggcattgcgattccacatggatgggcgacagagtcatcaccaccagcacccgcacctgggctctgcccacctacaacaaccatctgtacaagcaaatttccagccagtctggggccagcaacgacaaccactactttggctacagcaccccttgggggtattttgacttcaacagattccactgccacttctccccacgtgactggcaaagactcatcaacaacaattggggattccggcccaaaagactcaacttcaagctctttaacattcaagtcaaggaggtcacgcagaatgacggtacgacgacgattgccaataaccttaccagcacggttcaggtgtttactgactcggagtaccagctcccgtacgtcctcggctcggcgcatcaaggatgcctcccgccgttcccagcagacgtcttcatggtgccacagtatggatacctcaccctgaacaacgggagtcaggcggtaggacgctcttcattttactgcctggagtactttccttctcagatgctgcgtaccggaaacaactttaccttcagctacacctttgaggacgttccttttcacagcagctacgctcacagccagagtttggaccgtctcatgaatcctctcatcgaccagtacctgtattacttgagcagaacaaacactccaagcggaaccactacgcagtccaggcttcagttttctcaagccggagcgagtgacattcgggaccagtctaggaactggcttcctggaccctgttaccgccagcagcgagtatcaaagacagctgcggacaacaacaacagtgattactcgtggactggagctaccaagcatcacctcaatggaagagactctctggtgaatccgggcacagccatggccagccacaaggacgatgaagaaaagtattttcctcagagcggggttctcatcttcggaaaacaagactcgggaaaaactaatgtggacattgaaaaggtcatgattacagacgaagaggaaatcaggaccaccaatcccgtggctacggagcagtatggttctgtatctaccaatctccagagcggcaacacacaagcagctacctcagatgtcaacacacaaggcgttcttccaggcatggtctggcaggacagagacgtgtacctgcagggacccatctgggcaaagattccacacacggacggacatttccacccttctcctcttatgggaggatttggaccgaagcaccctcccccgcagattctcatcaagaataccccggtacctgcgaatccttctaccaccttcagcgcggcaaagtttgcttccttcatcacacagtactccacggggcaggtcagcgtggagatcgagtgggagctgcagaaagagaacagcaaacgctggaaccccgagatccagtatacctccaactacaacaagtctgttaatgtggactttactgtggacactaatggcgtgtattcagagcctcgccccattggcacaagatacctgactcgtaatctgtaa

SEQ ID NO: 1164 - DNA, 2208 bp, Artificial Sequence
  Synthetic Polynucleotide
atggctgccgatggttatcttccagattggctcgaggacactctctctgaaggaataagacagtggtggaagctcaaacctggcccaccaccgccaaagcccgcagagcggcataaggacgacagcaggggtcttgtgcttcctgggtacaagtacctcggacccttcaacggactcgacaaaggagagccggtcaacgaggcagacgccgcggccctcgagcacgacaaggcctacgaccggcagctcgacagcggagacaacccgtacctcaagtacaaccacgccgacgcggagtttcaggagcgccttaaagaagatacgtcttttgggggcaacctcgcaagagcagtattccaggcgaaaaagagggttcttgaacctctgggcctggttgaggagcctgttaagacggctccgggaaaaaagaggccggtagagcactctcctgcggagctagattcctcctccggaactggaaagtcgggccaacagcctgcaagaaagagattgaattttggtcagactggagacgcagactccgtacctgacccccagcctctcggacagccaccagcagccccctctggtctgggaactaatacgatggcttcaggcagtggcgcaccaatggcagacaataacgagggcgccgacggagtgggtaattcctcgggaaattggcattgcgattccacatggatgggcgacagagtcatcaccaccagcacccgcacctgggctctgcccacctacaacaaccatctgtacaagcaaatttccagccagtctggggccagcaacgacaaccactactttggctacagcaccccttgggggtattttgacctcaacagattccactgccacttctccccacgtgactggcaaagactcatcaacaacaattggggattccggcccaaaagactcaacttcaagctctttaacattcaagtcaaggaggtcacgcagaatgacggtacgacgacgattgccaataaccttaccagcacggttcaggtgtttactgactcggagtaccagctcccgtacgtcctcggctcggcgcatcaaggatgcctcccgccgttcccagcagacgtcttcatggtgccacagtatggatacctcaccctgaacaacgggagtcaggcggtaggacgctcttcattttactgcctggagtactttccttctcagatgctgcgtaccggaaacaactttaccttcagctacacctttgaggacgttccttttcacagcagctacgctcacagccagagtttggaccgtctcatgaatcctctcatcgaccagtacctgtattacttgagcagaacaaacactccaagcggaaccactacgcagtccaggcttcagttttctcaagccggagcgagtgacattcgggaccagtctaggaactggcttcctggaccctgttaccgccagcagcgagtatcaaagacagctgcggacaacaacaacagtgattactcgtggactggagctaccaagtatcacctcaatggaagagactctctggtgaatccgggcacagccatggccagccacaaggacgatgaagaaaagtattttcctcagagcggggttctcatcttcggaaaacaagactcgggaaaaactaatgtggacattgaaaaggtcatgattacagacgaagaggaaatcaggaccaccaatcccgtggctacggagcagtatggttctgtatctaccaatctccagagcggcaacacacaagcagctacctcagatgtcaacacacaaggcgttcttccaggcatggtctggcaggacagagacgtgtacctgcagggacccatctgggcaaagattccacacacggacggacattttcacccttctcctcttatgggaggatttggaccgaagcaccctcccccgcagattctcatcaagaataccccggtacctgcgaatccttctaccaccttcagcgcggcaaagtttgcttccttcatcacacagtactccacggggcaggtcagcgtggagatcgagtgggagctgcagaaagagaacagcaaacgctggaaccccgagatccagtatacctccaactacaacaagtctgttaatgtggactttactgtggacactaatggcgtgtattcagagcctcgccccattggcacaagatacctgactcgtaatctgtaa

SEQ ID NO: 1165 - DNA, 2208 bp, Artificial Sequence
  Synthetic Polynucleotide
atggctgccgatggttatcttccagattggctcgaggacactctctctgaaggaataagacagtggtggaagctcaaacctggcccaccaccgccaaagcccgcagagcggcataaggacgacagcaggggtcttgtgcttcctgggtacaagtacctcggacccctcaacggactcgacaaaggagagccggtcaacgaggcagacgccgcggccctcgagcacgacaaggcctacgaccggcagctcgacagcggagacaacccgtacctcaagtacaaccacgccgacgcggagtttcaggagcgccttaaagaagatacgtcttttgggggcaacctcgcaagagcagtattccaggcgaaaaagagggttcttgaacctctgggcctggttgaggagcctgttaagacggctccgggaaaaaagaggccggtagagcactctcctgcggagctagattcctcctccggaactggaaagtcgggccaacagcctgcaagaaagagattgaattttggtcagactggagacgcagactccgtacctgacccccagcctctcggacagccaccagcagccccctctggtctgggaactaatacgatggcttcaggcagtggcgcaccaatggcagacaataacgagggcgccgacggagtgggtaattcctcgggaaattggcattgcgattccacatggatgggcgacagagtcatcaccaccagcacccgcacctgggctctgcccacctacaacaaccatctgtacaagcaaatttccagccagtctggggccagcaacgacaaccactactttggctacagcaccccttgggggtattttgacttcaacagattccactgccacttctccccacgtgactggcaaagactcatcaacaacaattggggattccggcccaaaagactcaacttcaagctctttaacattcaagtcaaggaggtcacgcagaatgacggtacgacgacgattgccaataaccttaccagcacggttcaggtgtttactgactcggagtaccagctcccgtacgtcctcggctcggcgcatcaaggatgcctcccgccgttcccagcagacgtcttcatggtgccacagtatggatacctcaccctgaacaacgggagtcaggcggtaggacgctcttcattttactgcctggagtactttccttctcagatgctgcgtaccggaaacaactttaccttcagctacacctttgaggacgttccttttcacagcagctacgctcacagccagagtttggaccgtctcatgaatcctctcatcgaccagtacctgtattacttgagcagaacaaacactccaagcggaaccactacgcagtccaggcttcagttttctcaagccggagcgagtgacattcgggaccagtctaggaactggcttcctggaccctgttaccgccagcagcgagtatcaaagacagctgcggacaacaacaacagtgattactcgtggactggagctaccaagtatcacctcaatggaagagactctctggtgaatccgggcacagccatggccagccacaaggacgatgaagaaaagtattttcctcagagcggggttctcatcttcggaaaacaagactcgggaaaaactaatgtggacattgaaaaggtcatgattacagacgaagaggaaatcaggaccaccaatcccgtggctacggagcagtatggttctgtatctaccaatctccagagcggcaacacacaagcagctacctcagatgtcaacacacaaggcgttcttccaggcatggtctggcaggacagagacgtgtacctgcagggacccatctgggcaaagattccacacacggacggacattttcacccttctcctcttatgggaggatttggaccgaagcaccctcccccgcagattctcatcaagaataccccggtacctgcgaatccttctaccaccttcagcgcggcaaagtttgcttccttcatcacacagtactccacggggcaggtcagcgtggagatcgagtgggagctgcagaaagagaacagcaaacgctggaaccccgagatccagtatacctccaactacaacaagtctgttaatgtggactttactgtggacactaatggcgtgtattcagagcctcgccccattggcacaagatacctgactcgtaatctgtaa

SEQ ID NO: 1166 - DNA, 2208 bp, Artificial Sequence
  Synthetic Polynucleotide
atggctgccgatggttatcttccagattggctcgaggacactctctctgaaggaataagacagtggtggaagctcaaacctggcccaccaccgccaaagcccgcagagcggcataaggacgacagcaggggtcttgtgcttcctgggtacaagtacctcggacccttcaacggactcgacaaaggagagccggtcaacgaggcagacgccgcggccctcgagcacgacaaggcctacgaccggcagctcgacagcggagacaacccgtacctcaagtacaaccacgccgacgcggagtttcaggagcgccttaaagaagatacgtcttttgggggcaacctcgcaagagcagtattccaggcgaaaaagagggttcttgaacctctgggcctggttgaggagcctgttaagacggctccgggaaaaaagaggccggtagagcactctcctgcggagctagattcctcctccggaactggaaagtcgggccaacagcctgcaagaaagagattgaattttggtcagactggagacgcagactccgtacctgacccccagcctctcggacagccaccagcagccccctctggtctgggaactaatacgatggcttcaggcagtggcgcaccaatggcagacaataacgagggcgccgacggagtgggtaattcctcgggaaattggcattgcgattccacatggatgggcgacagagtcatcaccaccagcacccgcacctgggctctgcccacctacaacaaccatctgtacaagcaaatttccagccagtctggggccagcaacgacaaccactactttggctacagcaccccttgggggtattttgacttcaacagattccactgccacttctccccacgtgactggcaaagactcatcaacaacaattggggattccggcccaaaagactcaacttcaagctctttaacattcaagtcaaggaggtcacgcagaatgacggtacgacgacgattgccaataaccttaccagcacggttcaggtgtttactgactcggagtaccagctcccgtacgtcctcggctcggcgcatcaaggatgcctcccgccgttcccagcagacgtcttcatggtgccacagtatggatacctcaccctgaacaacgggagtcaggcggtaggacgctcttcattttactgcctggagtactttccttctcagatgctgcgtaccggaaacaactttaccttcagctacacctttgaggacgttccttttcacagcagctacgctcacagccagagtttggaccgtctcatgaatcctctcatcgaccagtacctgtattacttgagcagaacaaacactccaagcggaaccactacgcagtccaggcttcagttttctcaagccggagcgagtgacattcgggaccagtctaggaactggcttcctggaccctgttaccgccagcagcgagtatcaaagacagctgcggacaacaacaacagtgattactcgtggactggagctaccaagtatcacctcaatggaagagactctctggtgaatccgggcacagccatggccagccacaaggacgatgaagaaaagtattttcctcagagcggggttctcatcttcggaaaacaagactcgggaaaaactaatgtggacattgaaaaggtcatgattacagacgaagaggaaatcaggaccaccaatcccgtggctacggagcagtatggttctgtatctaccaatctccagagcggcaacacacaagcagctacctcagatgtcaacacacaaggcgttcttccaggcatggtctggcaggacagagacgtgtacctgcagggacccatctgggcaaagattccacacacggacggacattttcacccttctcctcttatgggaggatttggaccgaagcaccctcccccgcagattctcatcaagaataccccggtacctgcgaatccttctaccaccttcagcgcggcaaagtttgcttccttcatcacacagtactccacggggcaggtcagcgtggagatcgagtgggagctgcagaaagagaacagcaaacgctggaaccccgagatccagtatacctccaactacaacaagtctgttaatgtggactttactgtggacactaatggcgtgtattcagagcctcgccccattggcacaagatacctggctcgtaatctgtaa

SEQ ID NO: 1167 - DNA, 2208 bp, Artificial Sequence
  Synthetic Polynucleotide
atggctgccgatggttatcttccagattggctcgaggacactctctctgaaggaataagacagtggtggaagctcaaacctggcccaccaccgccaaagcccgcagagcggcataaggacgacagcaggggtcttgtgcttcctgggtacaagtacctcggacccttcaacggactcgacaaaggagagccggtcaacgaggcagacgccgcggccctcgagcacgacaaggcctacgaccggcagctcgacagcggagacaacccgtacctcaagtacaaccacgccgacgcggagtttcaggagcgccttaaagaagatacgtcttttgggggcaacctcgcaagagcagtattccaggcgaaaaagagggttcttgaacctctgggcctggttgaggagcctgttaagacggctccgggaaaaaagaggccggtagagcactctcctgcggagctagattcctcctccggaactggaaagtcgggccaacagcctgcaagaaagagattgaattttggtcagactggagacgcagactccgtacctgacccccagcctctcggacagccaccagcagccccctctggtctgggaactaatacgatggcttcaggcagtggcgcaccaatggcagacaataacgagggcgccgacggagtgggtaattcctcgggaaattggcattgcgattccacatggatgggcgacagagtcatcaccaccagcacccgcacctgggctctgcccacctacaacaaccatctgtacaagcaaatttccagccagtctggggccagcaacgacaaccactactttggctacagcaccccttgggggtattttgacttcaacagattccactgccacttctccccacgtgactggcaaagactcatcaacaacaattggggattccggcccaaaagactcaacttcaagctctttaacattcaagtcaaggaggtcacgcagaatgacggtacgacgacgattgccaataaccttaccagcacggttcaggtgtttactgactcggagtaccagctcccgtacgtcctcggctcggcgcatcaaggatgcctcccgccgttcccagcagacgtcttcatggtgccacagtatggatacctcaccctgaacaacgggagtcaggcggtaggacgctcttcattttactgcctggagtactttccttctcagatgctgcgtaccggaaacaactttaccctcagctacacctttgaggacgttccttttcacagcagctacgctcacagccagagtttggaccgtctcatgaatcctctcatcgaccagtacctgtattacttgagcagaacaaacactccaagcggaaccactacgcagtccaggcttcagttttctcaagccggagcgagtgacattcgggaccagtctaggaactggcttcctggaccctgttaccgccagcagcgagtatcaaagacagctgcggacaacaacaacagtgattactcgtggactggagctaccaagtatcacctcaatggaagagactctctggtgaatccgggcacagccatggccagccacaaggacgatgaagaaaagtattttcctcagagcggggttctcatcttcggaaaacaagactcgggaaaaactaatgtggacattgaaaaggtcatgattacagacgaagaggaaatcaggaccaccaatcccgtggctacggagcagtatggttctgtatctaccaatctccagagcggcaacacacaagcagctacctcagatgtcaacacacaaggcgttcttccaggcatggtctggcaggacagagacgtgtacctgcagggacccatctgggcaaagattccacacacggacggacattttcacccttctcctcttatgggaggatttggaccgaagcaccctcccccgcagattctcatcaagaataccccggtacctgcgaatccttctaccaccttcagcgcggcaaagtttgcttccttcatcacacagtactccacggggcaggtcagcgtggagatcgagtgggagctgcagaaagagaacagcaaacgctggaaccccgagatccagtatacctccaactacaacaagtctgttaatgtggactttactgtggacactaatggcgtgtattcagagcctcgccccattggcacaagatacctgactcgtaatctgtaa

SEQ ID NO: 1168 - DNA, 2208 bp, Artificial Sequence
  Synthetic Polynucleotide
atggctgccgatggttatcttccagattggctcgaggacactctctctgaaggaataagacagtggtggaagctcaaacctggcccaccaccgccaaagcccgcagagcggcataaggacgacagcaggggtcttgtgcttcctgggtacaagtacctcggacccttcaacggactcgacaaaggagagccggtcaacgaggcagacgccgcggccctcgagcacgacaaggcctacgaccggcagctcgacagcggagacaacccgtacctcaagtacaaccacgccgacgcggagtttcaggagcgccttaaagaagatacgtcttttgggggcaacctcgcaagagcagtattccaggcgaaaaagagggttcttgaacctctgggcctggttgaggagcctgttaagacggctccgggaaaaaagaggccggtagagcactctcctgcggagctagattcctcctccggaactggaaagtcgggccaacagcctgcaagaaagagattgaattttggtcagactggagacgcagactccgtacctgacccccagcctctcggacagccaccagcagccccctctggtctgggaactaatacgatggcttcaggcagtggcgcaccaatggcagacaataacgagggcgccgacggagtgggtaattcctcgggaaattggcattgcgattccacatggatgggcgacagagtcatcaccaccagcacccgcacctgggctctgcccacctacaacaaccatctgtacaagcaaatttccagccagtctggggccagcaacgacaaccactactttggctacagcaccccttgggggtattttgacttcaacagattccactgccacttctccccacgtgactggcaaagactcatcaacaacaattggggattccggcccaaaagactcaacttcaagctctttaacattcaagtcaaggaggtcacgcagaatgacggtacgacgacgattgccaataaccttaccagcacggttcaggtgtttactgactcggagtaccagctcccgtacgtcctcggctcggcgcatcaaggatgcctcccgccgttcccagcagacgtcttcatggtgccacagtatggatacctcaccctgaacaacgggagtcaggcggtaggacgctcttcattttactgcctggagtactttccttctcagatgctgcgtaccggaaacaactttaccttcagctacacctttgaggacgttccttttcacagcagctacgctcacagccagagtttggaccgtctcatgaatcctctcatcgaccagtacctgtattacttgagcagaacaaacactccaagcggaaccactacgcagtccaggcttcagttttctcaagccggagcgagtgacattcgggaccagtctaggaactggcttcctggaccctgttaccgccagcagcgagtatcaaagacagctgcggacaacaacaacagtgattactcgtggactggagctaccaagtatcacctcaatggaagagactctctggtgaatccgggcacagccatggccagccacaaggacgatgaagaaaagtattttcctcagagcggggttctcatcttccggaaacaagactcgggaaaaactaatgtggacattgaaaaggtcatgattacagacgaagaggaaatcaggaccaccaatcccgtggctacggagcagtatggttctgtatctaccaatctccagagcggcaacacacaagcagctacctcagatgtcaacacacaaggcgttcttccaggcatggtctggcaggacagagacgtgtacctgcagggacccatctgggcaaagattccacacacggacggacattttcacccttctcctcttatgggaggatttggaccgaagcaccctcccccgcagattctcatcaagaataccccggtacctgcgaatccttctaccaccttcagcgcggcaaagtttgcttccttcatcacacagtactccacggggcaggtcagcgtggagatcgagtgggagctgcagaaagagaacagcaaacgctggaaccccgagatccagtatacctccaactacaacaagtctgttaatgtggactttactgtggacactaatggcgtgtattcagagcctcgccccattggcacaagatacctgactcgtaatctgtaa

SEQ ID NO: 1169 - DNA, 2208 bp, Artificial Sequence
  Synthetic Polynucleotide
atggctgccgatggttatcttccagattggctcgaggacactctctctgaaggaataagacagtggtggaagctcaaacctggcccaccaccgccaaagcccgcagagcggcataaggacgacagcaggggtcttgtgcttcctgggtacaagtacctcggacccttcaacggactcgacaaaggagagccggtcaacgaggcagacgccgcggccctcgagcacgacaaggcctacgaccggcagctcgacagcggagacaacccgtacctcaagtacaaccacgccgacgcggagtttcaggagcgccttaaagaagatacgtcttttgggggcaacctcgcaagagcagtattccaggcgaaaaagagggttcttgaacctctgggcctggttgaggagcctgttaagacggctccgggaaaaaagaggccggtagagcactctcctgcggagctagattcctcctccggaactggaaagtcgggccaacagcctgcaagaaagagattgaattttggtcagactggagacgcagactccgtacctgacccccagcctctcggacagccaccagcagccccctctggtctgggaactaatacgatggcttcaggcagtggcgcaccaatggcagacaataacgagggcgccgacggagtgggtaattcctcgggaaattggcattgcgattccacatggatgggcgacagagtcatcaccaccagcacccgcacctgggctctgcccacctacaacaaccatctgtacaagcaaatttccagccagtctggggccagcaacgacaaccactactttggctacagcaccccttgggggtattttgacttcaacagattccactgccacttctccccacgtgactggcaaagactcatcaacaacaattggggattccggcccaaaagactcaacttcaagctctttaacattcaagtcaaggaggtcacgcagaatgacggtacgacgacgattgccaataaccttaccagcacggttcaggtgtttactgactcggagtaccagctcccgtacgtcctcggctcggcgcatcaaggatgcctcccgccgttcccagcagacgtcttcatggtgccacagtatggatacctcaccctgaacaacgggagtcaggcggtaggacgctcttcattttactgcctggagtactttccttctcagatgctgcgtaccggaaacaactttaccttcagctacacctttgaggacgttccttttcacagcagctacgctcacagccagagtttggaccgtctcatgaatcctctcatcgaccagtacctgtattacttgagcagaacaaacactccaagcggaaccactacgcagtccaggcttcagttttctcaagccggagcgagtgacattcgggaccagtctaggaactggcttcctggaccctgttaccgccagcagcgagtatcaaagacagctgcggacaacaacaacagtgattactcgtggactggagctaccaagtatcacctcaatggaagagactctctggtgaatccgggcacagccatggccagccacaaggacgatgaagaaaagtattttcctcagagcggggttctcatcttcggaaaacgagactcgggaaaaactaatgtggacattgaaaaggtcatgattacagacgaagaggaaatcaggaccaccaatcccgtggctacggagcagtatggttctgtatctaccaatctccagagcggcaacacacaagcagctacctcagatgtcaacacacaaggcgttcttccaggcatggtctggcaggacagagacgtgtacctgcagggacccatctgggcaaagattccacacacggacggacattttcacccttctcctcttatgggaggatttggaccgaagcaccctcccccgcagattctcatcaagaataccccggtacctgcgaatccttctaccaccttcagcgcggcaaagtttgcttccttcatcacacagtactccacggggcaggtcagcgtggagatcgagtgggagctgcagaaagagaacagcaaacgctggaaccccgagatccagtatacctccaactacaacaagtctgttaatgtggactttactgtggacactaatggcgtgtattcagagcctcgccccattggcacaagatacctgactcgtaatctgtaa

SEQ ID NO: 1170 - DNA, 2208 bp, Artificial Sequence
  Synthetic Polynucleotide
atggctgccgatggttatcttccagattggctcgaggacactctctctgaaggaataagacagtggtggaagctcaaacctggcccaccaccgccaaagcccgcagagcggcataaggacgacagcaggggtcttgtgcttcctgggtacaagtacctcggacccttcaacggactcgacaaaggagagccggtcaacgaggcagacgccgcggccctcgagcacgacaaggcctacgaccggcagctcgacagcggagacaacccgtacctcaagtacaaccacgccgacgcggagtttcaggagcgccttaaagaagatacgtcttttgggggcaacctcgcaagagcagtattccaggcgaaaaagagggttcttgaacctctgggcctggttgaggagcctgttaagacggctccgggaaaaaagaggccggtagagcactctcctgcggagctagattcctcctccggaactggaaagtcgggccaacagcctgcaagaaagagattgaattttggtcagactggagacgcagactccgtacctgacccccagcctctcggacagccaccagcagccccctctggtctgggaactaatacgatggcttcaggcagtggcgcaccaatggcagacaataacgagggcgccgacggagtgggtaattcctcgggaaattggcattgcgattccacatggatgggcgacagagccatcaccaccagcacccgcacctgggctctgcccacctacaacaaccatctgtacaagcaaatttccagccagtctggggccagcaacgacaaccactactttggctacagcaccccttgggggtattttgacttcaacagattccactgccacttctccccacgtgactggcaaagactcatcaacaacaattggggattccggcccaaaagactcaacttcaagctctttaacattcaagtcaaggaggtcacgcagaatgacggtacgacgacgattgccaataaccttaccagcacggttcaggtgtttactgactcggagtaccagctcccgtacgtcctcggctcggcgcatcaaggatgcctcccgccgttcccagcagacgtcttcatggtgccacagtatggatacctcaccctgaacaacgggagtcaggcggtaggacgctcttcattttactgcctggagtactttccttctcagatgctgcgtaccggaaacaactttaccttcagctacacctttgaggacgttccttttcacagcagctacgctcacagccagagtttggaccgtctcatgaatcctctcatcgaccagtacctgtattacttgagcagaacaaacactccaagcggaaccactacgcagtccaggcttcagttttctcaagccggagcgagtgacattcgggaccagtctaggaactggcttcctggaccctgttaccgccagcagcgagtatcaaagacagctgcggacaacaacaacagtgattactcgtggactggagctaccaagtatcacctcaatggaagagactctctggtgaatccgggcacagccatggccagccacaaggacgatgaagaaaagtattttcctcagagcggggttctcatcttcggaaaacaagactcgggaaaaactaatgtggacattgaaaaggtcatgattacagacgaagaggaaatcaggaccaccaatcccgtggctacggagcagtatggttctgtatctaccaatctccagagcggcaacacacaagcagctacctcagatgtcaacacacaaggcgttcttccaggcatggtctggcaggacagagacgtgtacctgcagggacccatctgggcaaagattccacacacggacggacattttcacccttctcctcttatgggaggatttggaccgaagcaccctcccccgcagattctcatcaagaataccccggtacctgcgaatccttctaccaccttcagcgcggcaaagtttgcttccttcatcacacagtactccacggggcaggtcagcgtggagatcgagtgggagctgcagaaagagaacagcaaacgctggaaccccgagatccagtatacctccaactacaacaagtctgttaatgtggactttactgtggacactaatggcgtgtattcagagcctcgccccattggcacaagatacctgactcgtaatctgtaa

SEQ ID NO: 1171 - DNA, 2208 bp, Artificial Sequence
  Synthetic Polynucleotide
atggctgccgatggttatcttccagattggctcgaggacactctctctgaaggaataagacagtggtggaagctcaaacctggcccaccaccgccaaagcccgcagagcggcataaggacgacagcaggggtcttgtgcttcctgggtacaagtacctcggacccttcaacggactcgacaaaggagagccggtcaacgaggcagacgccgcggccctcgagcacgacaaggcctacgaccggcagctcgacagcggagacaacccgtacctcaagtacaaccacgccgacgcggagtttcaggagcgccttaaagaagatacgtcttttgggggcaacctcgcaagagcagtattccaggcgaaaaagagggttcttgaacctctgggcctggttgaggagcctgttaagacggctccgggaaaaaagaggccggtagagcactctcctgcggagctagattcctcctccggaactggaaagtcgggccaacagcctgcaagaaagagattgaattttggtcagactggagacgcagactccgtacctgacccccagcctctcggacagccaccagcagccccctctggtctgggaactaatacgatggcttcaggcagtggcgcaccaatggcagacaataacgagggcgccgacggagtgggtaattcctcgggaaattggcattgcgattccacatggatgggcgacagagtcatcaccaccagcacccgcacctgggctctgcccacctacaacaaccatctgtacaagcaaatttccagccagtctggggccagcaacgacaaccactactttggctacagcaccccttgggggtattttgacttcaacagattccactgccacttctccccacgtgactggcaaagactcatcaacaacaattggggattccggcccaaaagactcaacttcaagctctttaacattcaagtcaaggaggtcacgcagaatgacggtacgacgacgattgccaataaccttaccagcacggttcaggtgtttactgactcggagtaccagctcccgtacgtcctcggctcggcgcatcaaggatgcctcccgccgttcccagcagacgtcttcatggtgccacagtatggatacctcaccctgaacaacgggagtcaggcggtaggacgctcttcattttactgcctggagtactttccttctcagatgctgcgtaccggaaacaactttaccttcagctacacctttgaggacgttccttttcacagcagctacgctcacagccagagtttggaccgtctcatgaatcctctcatcgaccagtacctgtattacttgagcagaacaaacactccaagcggaaccactacgcagtccaggcttcagttttctcaagccggagcgagtgacattcgggaccagtctaggaactggcttcctggaccctgttaccgccagcagcgagtatcaaagacagctgcggacaacaacaacagtgattactcgtggactggagctaccaagtatcacctcaatggaagagactctctggtgaatccgggcacagccatggccagccacaaggacgatgaagaaaagtattttcctcagagcggggttctcatcttcggaaaacaagactcgggaaaaactaatgtggacattgaaaaggtcatgattacagacgaagaggaaatcaggaccaccaatcccgtggctacggagcagtatggttctgtatctaccaatctccagagcggcaacacacaagcagctacctcagatgtcaacacacaaggcgttcttccaggcatggtctggcaggacagagacgtgtacctgcagggacccatctgggcaaagattccacacacggacggacattttcacccttctcctcttatgggaggatttggaccgaagcaccctcccccgcagattctcatcaagaataccccggtacctgcgaatccttctaccaccttcagcgcggcaaagtttgcttacttcatcacacagtactccacggggcaggtcagcgtggagatcgagtgggagctgcagaaagagaacagcaaacgctggaaccccgagatccagtatacctccaactacaacaagtctgttaatgtggactttactgtggacactaatggcgtgtattcagagcctcgccccattggcacaagatacctgactcgtaatctgtaa

SEQ ID NO: 1172 - DNA, 2208 bp, Artificial Sequence
  Synthetic Polynucleotide
atggctgccgatggttatcttccagattggctcgaggacactctctctgaaggaataagacagtggtggaagctcaaacctggcccaccaccgccaaagcccgcagagcggcataaggacgacagcaggggtcttgtgcttcctgggtacaagtacctcggacccttcaacggactcgacaaaggagagccggtcaacgaggcagacgccgcggccctcgagcacgacaaggcctacgaccggcagctcgacagcggagacaacccgtacctcaagtacaaccacgccgacgcggagtttcaggagcgccttaaagaagatacgtcttttgggggcaacctcgcaagagcagtattccaggcgaaaaagagggttcttgaacctctgggcctggttgaggagcctgttaagacggctccgggaaaaaagaggccggtagagcactctcctgcggagctagattcctcctccggaactggaaagtcgggccaacagcctgcaagaaagagattgaattttggtcagactggagacgcagactccgtacctgacccccagcctctcggacagccaccagcagccccctctggtctgggaactaatacgatggcttcaggcagtggcgcaccaatggcagacaataacgagggcgccgacggagtgggtaattcctcgggaaattggcattgcgattccacatggatgggcgacagagtcatcaccaccagcacccgcacctgggctctgcccacctacaacaaccatctgtacaagcaaatttccagccagtctggggccagcaacgacaaccactactttggctacagcaccccttgggggtattttggcttcaacagattccactgccacttctccccacgtgactggcaaagactcatcaacaacaattggggattccggcccaaaagactcaacttcaagctctttaacattcaagtcaaggaggtcacgcagaatgacggtacgacgacgattgccaataaccttaccagcacggttcaggtgtttactgactcggagtaccagctcccgtacgtcctcggctcggcgcatcaaggatgcctcccgccgttcccagcagacgtcttcatggtgccacagtatggatacctcaccctgaacaacgggagtcaggcggtaggacgctcttcattttactgcctggagtactttccttctcagatgctgcgtaccggaaacaactttaccttcagctacacctttgaggacgttccttttcacagcagctacgctcacagccagagtttggaccgtctcatgaatcctctcatcgaccagtacctgtattacttgagcagaacaaacactccaagcggaaccactacgcagtccaggcttcagttttctcaagccggagcgagtgacattcgggaccagtctaggaactggcttcctggaccctgttaccgccagcagcgagtatcaaagacagctgcggacaacaacaacagtgattactcgtggactggagctaccaagtatcacctcaatggaagagactctctggtgaatccgggcacagccatggccagccacaaggacgatgaagaaaagtattttcctcagagcggggttctcatcttcggaaaacaagactcgggaaaaactaatgtggacattgaaaaggtcatgattacagacgaagaggaaatcaggaccaccaatcccgtggctacggagcagtatggttctgtatctaccaatctccagagcggcaacacacaagcagctacctcagatgtcaacacacaaggcgttcttccaggcatggtctggcaggacagagacgtgtacctgcagggacccatctgggcaaagattccacacacggacggacattttcacccttctcctcttatgggaggatttggaccgaagcaccctcccccgcagattctcatcaagaataccccggtacctgcgaatccttctaccaccttcagcgcggcaaagtttgcttacttcatcacacagtactccacggggcaggtcagcgtggagatcgagtgggagctgcagaaagagaacagcaaacgctggaaccccgagatccagtatacctccaactacaacaagtctgttaatgtggactttactgtggacactaatggcgtgtattcagagcctcgccccattggcacaagatacctgactcgtaatctgtaa

SEQ ID NO: 1173 - DNA, 2208 bp, Artificial Sequence
  Synthetic Polynucleotide
atggctgccgatggttatcttccagattggctcgaggacactctctctgaaggaataagacagtggtggaagctcaaacctggcccaccaccgccaaagcccgcagagcggcataaggacgacagcaggggtcttgtgcttcctgggtacaagtacctcggacccttcaacggactcgacaaaggagagccggtcaacgaggcagacgccgcggccctcgagcacgacaaggcctacgaccggcagctcgacagcggagacaacccgtacctcaagtacaaccacgccgacgcggagtttcaggagcgccttaaagaagatacgtcttttgggggcaacctcgcaagagcagtattccaggcgaaaaagagggttcttgaacctctgggcctggttgaggagcctgttaagacggctccgggaaaaaagaggccggtagagcactctcctgcggagctagattcctcctccggaactggaaagtcgggccaacagcctgcaagaaagagattgaattttggtcagactggagacgcagactccgtacctgacccccagcctctcggacagccaccagcagccccctctggtctgggaactaatacgatggcttcaggcagtggcgcaccaatggcagacaataacgagggcgccgacggagtgggtaattcctcgggaaattggcattgcgattccacatggatgggcgacagagtcatcaccaccagcacccgcacctgggctctgcccacctacaacaaccatctgtacaagcaaatttccagccagtctggggccagcaacgacaaccgctactttggctacagcaccccttgggggtattttgacttcaacagattccactgccacttctccccacgtgactggcaaagactcatcaacaacaattggggattccggcccaaaagactcaacttcaagctctttaacattcaagtcaaggaggtcacgcagaatgacggtacgacgacgattgccaataaccttaccagcacggttcaggtgtttactgactcggagtaccagctcccgtacgtcctcggctcggcgcatcaaggatgcctcccgccgttcccagcagacgtcttcatggtgccacagtatggatacctcaccctgaacaacgggagtcaggcggtaggacgctcttcattttactgcctggagtactttccttctcagatgctgcgtaccggaaacaactttaccttcagctacacctttgaggacgttccttttcacagcagctacgctcacagccagagtttggaccgtctcatgaatcctctcatcgaccagtacctgtattacttgagcagaacaaacactccaagcggaaccactacgcagtccaggcttcagttttctcaagccggagcgagtgacattcgggaccagtctaggaactggcttcctggaccctgttaccgccagcagcgagtatcaaagacagctgcggacaacaacaacagtgattactcgtggactggagctaccaagtatcacctcaatggaagagactctctggtgaatccgggcacagccatggccagccacaaggacgatgaagaaaagtattttcctcagagcggggttctcatcttcggaaaacaagactcgggaaaaactaatgtggacattgaaaaggtcatgattacagacgaagaggaaatcaggaccaccaatcccgtggctacggagcagtatggttctgtatctaccaatctccagagcggcaacacacaagcagctacctcagatgtcaacacacaaggcgttcttccaggcatggtctggcaggacagagacgtgtacctgcagggacccatctgggcaaagattccacacacggacggacattttcacccttctcctcttatgggaggatttggaccgaagcaccctcccccgcagattctcatcaagaataccccggtacctgcgaatccttctaccaccttcagcgcggcaaagtttgcttccttcatcacacagtactccacggggcaggtcagcgtggagatcgagtgggagctgcagaaagagaacagcaaacgctggaaccccgagatccagtatacctccaactacaacaagtctgttaatgtggactttactgtggacactaatggcgtgtattcagagcctcgccccattggcacaagatacctgactcgtaatctgtaa

SEQ ID NO: 1174 - DNA, 2208 bp, Artificial Sequence
  Synthetic Polynucleotide
atggctgccgatggttatcttccagattggctcgaggacactctctctgaaggaataagacagtggtggaagctcaaacctggcccaccaccgccaaagcccgcagagcggcataaggacgacagcaggggtcttgtgcttcctgggtacaagtacctcggacccttcaacggactcgacaaaggagagccggtcaacgaggcagacgccgcggccctcgagcacgacaaggcctacgaccggcagctcgacagcggagacaacccgtacctcaagtacaaccacgccgacgcggagtttcaggagcgccttaaagaagatacgccttttgggggcaacctcgcaagagcagtattccaggcgaaaaagagggttcttgaacctctgggcctggttgaggagcctgttaagacggctccgggaaaaaagaggccggtagagcactctcctgcggagctagattcctcctccggaactggaaagtcgggccaacagcctgcaagaaagagattgaattttggtcagactggagacgcagactccgtacctgacccccagcctctcggacagccaccagcagccccctctggtctgggaactaatacgatggcttcaggcagtggcgcaccaatggcagacaataacgagggcgccgacggagtgggtaattcctcgggaaattggcattgcgattccacatggatgggcgacagagtcatcaccaccagcacccgcacctgggctctgcccacctacaacaaccatctgtacaagcaaatttccagccagtctggggccagcaacgacaaccactactttggctacagcaccccttgggggtattttgacttcaacagattccactgccacttctccccacgtgactggcaaagactcatcaacaacaattggggattccggcccaaaagactcaacttcaagctctttaacattcaagtcaaggaggtcacgcagaatgacggtacgacgacgattgccaataaccttaccagcacggttcaggtgtttactgactcggagtaccagctcccgtacgtcctcggctcggcgcatcaaggatgcctcccgccgttcccagcagacgtcttcatggtgccacagtatggatacctcaccctgaacaacgggagtcaggcggtaggacgctcttcattttactgcctggagtactttccttctcagatgctgcgtaccggaaacaactttaccttcagctacacctttgaggacgttccttttcacagcagctacgctcacagccggagtttggaccgtctcatgaatcctctcatcgaccagtacctgtattacttgagcagaacaaacactccaagcggaaccactacgcagtccaggcttcagttttctcaagccggagcgagtgacattcgggaccagtctaggaactggcttcctggaccctgttaccgccagcagcgagtatcaaagacagctgcggacaacaacaacagtgattactcgtggactggagctaccaagtatcacctcaatggaagagactctctggtgaatccgggcacagccatggccagccacaaggacgatgaagaaaagtattttcctcagagcggggttctcatcttcggaaaacaagactcgggaaaaactaatgtggacattgaaaaggtcatgattacagacgaagaggaaatcaggaccaccaatcccgtggctacggagcagtatggttctgtatctaccaatctccagagcggcaacacacaagcagctacctcagatgtcaacacacaaggcgttcttccaggcatggtctggcaggacagagacgtgtacctgcagggacccatctgggcaaagattccacacacggacggacattttcacccttctcctcttatgggaggatttggaccgaagcaccctcccccgcagattctcatcaagaataccccggtacctgcgaatccttctaccaccttcagcgcggcaaagtttgcttccttcatcacacagtactccacggggcaggtcagcgtggagatcgagtgggagctgcagaaagagaacagcaaacgctggaaccccgagatccagtatacctccaactacaacaagtctgttaatgtggactttactgtggacactaatggcgtgtattcagagcctcgccccattggcacaagatacctgactcgtaatctgtaa

SEQ ID NO: 1175 - DNA, 2208 bp, Artificial Sequence
  Synthetic Polynucleotide
atggctgccgatggttatcttccagattggctcgaggacactctctctgaaggaataagacagtggtggaagctcaaacctggcccaccaccgccaaagcccgcagagcggcataaggacggcagcaggggtcttgtgcttcctgggtacaagtacctcggacccttcaacggactcgacaaaggagagccggtcaacgaggcagacgccgcggccctcgagcacgacaaggcctacgaccggcagctcgacagcggagacaacccgtacctcaagtacaaccacgccgacgcggagtttcaggagcgccttaaagaagatacgtcttttgggggcaacctcgcaagagcagtattccaggcgaaaaagagggttcttgaacctctgggcctggttgaggagcctgttaagacggctccgggaaaaaagaggccggtagagcactctcctgcggagctagattcctcctccggaactggaaagtcgggccaacagcctgcaagaaagagattgaattttggtcagactggagacgcagactccgtacctgacccccagcctctcggacagccaccagcagccccctctggtctgggaactaatacgatggcttcaggcagtggcgcaccaatggcagacaataacgagggcgccgacggagtgggtaattcctcgggaaattggcattgcgattccacatggatgggcgacagagtcatcaccaccagcacccgcacctgggctctgcccacctacaacaaccatctgtacaagcaaatttccagccagtctggggccagcaacgacaaccactactttggctacagcaccccttgggggtattttgacttcaacagattccactgccacttctccccacgtgactggcaaagactcatcaacaacaattggggattccggcccaaaagactcaacttcaagctctttaacattcaagtcaaggaggtcacgcagaatgacggtacgacgacgattgccaataaccttaccagcacggttcaggtgtttactgactcggagtaccagctcccgtacgtcctcggctcggcgcatcaaggatgcctcccgccgttcccagcagacgtcttcatggtgccacagtatggatacctcaccctgaacaacgggagtcaggcggtaggacgctcttcattttactgcctggagtactttccttctcagatgctgcgtaccggaaacaactttaccttcagctacacctttgaggacgttccttttcacagcagctacgctcacagccagagtttggaccgtctcatgaatcctctcatcgaccagtacctgtattacttgagcagaacaaacactccaagcggaaccactacgcagtccaggcttcagttttctcaagccggagcgagtgacattcgggaccagtctaggaactggcttcctggaccctgttaccgccagcagcgagtatcaaagacagctgcggacaacaacaacagtgattactcgtggactggagctaccaagtatcacctcaatggaagagactctctggtgaatccgggcacagccatggccagccacaaggacgatgaagaaaagtattttcctcagagcggggttctcatcttcggaaaacaagactcgggaaaaactaatgtggacattgaaaaggtcatgattacagacgaagaggaaatcaggaccaccaatcccgtggctacggagcagtatggttctgtatctaccaatctccagagcggcaacacacaagcagctacctcagatgtcaacacacaaggcgttcttccaggcatggtctggcaggacagagacgtgtacctgcagggacccatctgggcaaagattccacacacggacggacattttcacccttctcctcttatgggaggatttggaccgaagcaccctcccccgcagattctcatcaagaataccccggtacctgcgaatccttctaccaccttcagcgcggcaaagtttgcttccttcatcacacagtactccacggggcaggtcagcgtggagatcgagtgggagctgcagaaagagaacagcaaacgctggaaccccgagatccagtatacctccaactacaacaagtctgttaatgtggactttactgtggacactaatggcgtgtattcagagcctcgccccattggcacaagatacctgactcgtaatctgtaa

SEQ ID NO: 1176 - DNA, 2208 bp, Artificial Sequence
  Synthetic Polynucleotide
atggctgccgatggttatcttccagattggctcgaggacactctctctgaaggaataagacagtggtggaagctcaaacctggcccaccaccgccaaagcccgcagagcggcataaggacgacagcaggggtcttgtgcttcctgggtacaagtacctcggacccttcaacggactcgacaaaggagagccggtcaacgaggcagacgccgcggccctcgagcacgacaaggcctacgaccggcagctcgacagcggagacaacccgtacctcaagtacaaccacgccgacgcggggtttcaggagcgccttaaagaagatacgtcttttgggggcaacctcgcaagagcagtattccaggcgaaaaagagggttcttgaacctctgggcctggttgaggagcctgttaagacggctccgggaaaaaagaggccggtagagcactctcctgcggagctagattcctcctccggaactggaaagtcgggccaacagcctgcaagaaagagattgaattttggtcagactggagacgcagactccgtacctgacccccagcctctcggacagccaccagcagccccctctggtctgggaactaatacgatggcttcaggcagtggcgcaccaatggcagacaataacgagggcgccgacggagtgggtaattcctcgggaaattggcattgcgattccacatggatgggcgacagagtcatcaccaccagcacccgcacctgggctctgcccacctacaacaaccatctgtacaagcaaatttccagccagtctggggccagcaacgacaaccactactttggctacagcaccccttgggggtattttgacttcaacagattccactgccacttctccccacgtgactggcaaagactcatcaacaacaattggggattccggcccaaaagactcaacttcaagctctttaacattcaagtcaaggaggtcacgcagaatgacggtacgacgacgattgccaataaccttaccagcacggttcaggtgtttactgactcggagtaccagctcccgtacgtcctcggctcggcgcatcaaggatgcctcccgccgttcccagcagacgtcttcatggtgccacagtatggatacctcaccctgaacaacgggagtcaggcggtaggacgctcttcattttactgcctggagtactttccttctcagatgctgcgtaccggaaacaactttaccttcagctacacctttgaggacgttccttttcacagcagctacgctcacagccagagtttggaccgtctcatgaatcctctcatcgaccagtacctgtattacttgagcagaacaaacactccaagcggaaccactacgcagtccaggcttcagttttctcaagccggagcgagtgacattcgggaccagtctaggaactggcttcctggaccctgttaccgccagcagcgagtatcaaagacagctgcggacaacaacaacagtgattactcgtggactggagctaccaagtatcacctcaatggaagagactctctggtgaatccgggcacagccatggccagccacaaggacgatgaagaaaagtattttcctcagagcggggttctcatcttcggaaaacaagactcgggaaaaactaatgtggacattgaaaaggtcatgattacagacgaagaggaaatcaggaccaccaatcccgtggctacggagcagtatggttctgtatctaccaatctccagagcggcaacacacaagcagctacctcagatgtcaacacacaaggcgttcttccaggcatggtctggcaggacagagacgtgtacctgcagggacccatctgggcaaagattccacacacggacggacattttcacccttctcctcttatgggaggatttggaccgaagcaccctcccccgcagattctcatcaagaataccccggtacctgcgaatccttctaccaccttcagcgcggcaaagtttgcttccttcatcacacagtactccacggggcaggtcagcgtggagatcgagtgggagctgcagaaagagaacagcaaacgctggaaccccgagatccagtatacctccaactacaacaagtctgttaatgtggactttactgtggacactaatggcgtgtattcagagcctcgccccattggcacaagatacctgactcgtaatctgtaa

SEQ ID NO: 1177 - DNA, 2208 bp, Artificial Sequence
  Synthetic Polynucleotide
atggctgccgatggttatcttccagattggctcgaggacactctctctgaaggaataagacagtggtggaagctcaaacctggcccaccaccgccaaagcccgcagagcggcataaggacgacagcaggggtcttgtgcttcctgggtacaagtacctcggacccttcaacggactcgacaaaggagagccggtcaacgaggcagacgccgcggccctcgagcacgacaaggcctacgaccggcagctcgacagcggagacaacccgtacctcaagtacaaccacgccgacgcggagtttcaggagcgccttaaagaagatacgtcttttgggggcaacctcgcaagagcagtattccaggcgaaaaagagggttcttgaacctctgggcctggttgaggagcctgttaagacggctccgggaaaaaagaggccggtagagcactctcctgcggagctagattcctcctccggaactggaaagtcgggccaacagcctgcaagaaagagattgaattttggtcagactggagacgcagactccgtacctgacccccagcctctcggacagccaccagcagccccctctggtctgggaactaatacgatggcttcaggcagtggcgcaccaatggcagacaataacgagggcgccgacggagtgggtaattcctcgggaaattggcattgcgattccacatggatgggcgacagagtcatcaccaccagcacccgcacctgggctctgcccacctacaacaaccatctgtacaagcaaatttccagccagtctggggccagcaacgacaaccactaccttggctacagcaccccttgggggtattttgacttcaacagattccactgccacttctccccacgtgactggcaaagactcatcaacaacaattggggattccggcccaaaagactcaacttcaagctctttaacattcaagtcaaggaggtcacgcagaatgacggtacgacgacgattgccaataaccttaccagcacggttcaggtgtttactgactcggagtaccagctcccgtacgtcctcggctcggcgcatcaaggatgcctcccgccgttcccagcagacgtcttcatggtgccacagtatggatacctcaccctgaacaacgggagtcaggcggtaggacgctcttcattttactgcctggagtactttccttctcagatgctgcgtaccggaaacaactttaccttcagctacacctttgaggacgttccttttcacagcagctacgctcacagccagagtttggaccgtctcatgaatcctctcatcgaccagtacctgtattacttgagcagaacaaacactccaagcggaaccactacgcagtccaggcttcagttttctcaagccggagcgagtgacattcgggaccagtctaggaactggcttcctggaccctgttaccgccagcagcgagtatcaaagacagctgcggacaacaacaacagtgattactcgtggactggagctaccaagtatcacctcaatggaagagactctctggtgaatccgggcacagccatggccagccacaaggacgatgaagaaaagtattttcctcagagcggggttctcatcttcggaaaacaagactcgggaaaaactaatgtggacattgaaaaggtcatgattacagacgaagaggaaatcaggaccaccaatcccgtggctacggagcagtatggttctgtatctaccaatctccagagcggcaacacacaagcagctacctcagatgtcaacacacaaggcgttcttccaggcatggtctggcaggacagagacgtgtacctgcagggacccatctgggcaaagattccacacacggacggacattttcacccttctcctcttatgggaggatttggaccgaagcaccctcccccgcagattctcatcaagaataccccggtacctgcgaatccttctaccaccttcagcgcggcaaagtttgcttccttcatcacacagtactccacggggcaggtcagcgtggagatcgagcgggagctgcagaaagagaacagcaaacgctggaaccccgagatccagtatacctccaactacaacaagtctgttaatgtggactttactgtggacactaatggcgtgtattcagagcctcgccccattggcacaagatacctgactcgtaatctgtaa

SEQ ID NO: 1178 - DNA, 2208 bp, Artificial Sequence
  Synthetic Polynucleotide
atggctgccgatggttatcttccagattggctcgaggacactctctctgaaggaataagacagtggtggaagctcaaacctggcccaccaccgccaaagcccgcagagcggcataaggacgacagcaggggtcttgtgcttcctgggtacaagtacctcggacccttcaacggactcgacaaaggagagccggtcaacgaggcagacgccgcggccctcgagcacgacaaggcctacgaccggcagctcgacagcggagacaacccgtacctcaagtacaaccacgccgacgcggagtttcaggagcgccttaaagaagatacgtcttttgggggcaacctcgcaagagcagtattccaggcgaaaaagagggttcttgaacctctgggcctggttgaggagcctgttaagacggctccgggaaaaaagaggccggtagagcactctcctgcggagctagattcctcctccggaactggaaagtcgggccaacagcctgcaagaaagagattgaattttggtcagactggagacgcagactccgtacctgacccccagcctctcggacagccaccagcagccccctctggtctgggaactaatacgatggcttcaggcagtggcgcaccaatggcagacaataacgagggcgccgacggagtgggtaattcctcgggaaattggcattgcgattccacatggatgggcgacagagtcatcaccaccagcacccgcacctgggctctgcccacctacaacaaccatctgtacaagcaaatttccagccagtctggggccagcaacgacaaccactactttggctacagcaccccttgggggtattttgacttcaacagattccactgccacttctccccacgtgactggcaaagactcatcaacaacaattggggattccggcccaaaagactcaacttcaagctctttaacattcaagtcaaggaggtcacgcagaatgacggtacgacgacgattgccaataaccttaccagcacggttcaggtgtttactgactcggagtaccagctcccgtacgtcctcggctcggcgcatcaaggatgcctcccgccgttcccagcagacgtcttcatggtgccacagtatggatacctcaccctgaacaacgggagtcaggcggtaggacgctcttcattttactgcctggagtactttccttctcagatgctgcgtaccggaaacaactttaccttcagctacacctttgaggacgttccttttcacagcagctacgctcacagccagagtttggaccgtctcatgaatcctctcatcgaccagtacctgtattacttgagcagaacaaacactccaagcggaaccactacgcagtccaggcttcagttttctcaagccggagcgagtgacattcgggaccagtctaggaactggcttcctggaccctgttaccgccagcagcgagtatcaaagacagctgcggacaacaacaacagtgattactcgtggactggagctaccaagtatcacctcaatggaagagactctctggtgaatccgggcacagccatggccagccacaaggacgatgaagaaaagtattttcctcagagcggggttctcatcttcggaaaacaagactcgggaaaagctaatgtggacattgaaaaggtcatgattacagacgaagaggaaatcaggaccaccaatcccgtggctacggagcagtatggttctgtatctaccaatctccagagcggcaacacacaagcagctacctcagatgtcaacacacaaggcgttcttccaggcatggtctggcaggacagagacgtgtacctgcagggacccatctgggcaaagattccacacacggacggacattttcacccttctcctcttatgggaggatttggaccgaagcaccctcccccgcagattctcatcaagaataccccggtacctgcgaatccttctaccaccttcagcgcggcaaagtttgcttccttcatcacacagtactccacggggcaggtcagcgtggagatcgagtgggagctgcagaaagagaacagcaaacgctggaaccccgagatccagtatacctccaactacaacaagtctgttaatgtggactttactgtggacactaatggcgtgtattcagagcctcgccccattggcacaagatacctgactcgtaatctgtaa

SEQ ID NO: 1179 - DNA, 2208 bp, Artificial Sequence
  Synthetic Polynucleotide
atggctgccgatggttatcttccagattggctcgaggacactctctctgaaggaataagacagtggtggaagctcaaacctggcccaccaccgccaaagcccgcagagcggcataaggacgacagcaggggtcttgtgcttcctgggtacaagtacctcggacccttcaacggactcgacaaaggagagccggtcaacgaggcagacgccgcggccctcgagcacgacaaggcctacgaccggcagctcgacagcggagacaacccgtacctcaagtacaaccacgccgacgcggagtttcaggagcgccttaaagaagatacgtcttttgggggcaacctcgcaagagcagtattccaggcgaaaaagagggttcttgaacctctgggcctggttgaggagcctgttaagacggctccgggaaaaaagaggccggtagagcactctcctgcggagctagattcctcctccggaactggaaagtcgggccaacagcctgcaagaaagagattgaattttggtcagactggagacgcagactccgtacctgacccccagcctctcggacagccaccagcagccccctctggtctgggaactaatacgatggcttcaggcagtggcgcaccaatggcagacaataacgagggcgccgacggagtgggtaattcctcgggaaattggcattgcgattccacatggatgggcgacagagtcatcaccaccagcacccgcacctgggctctgcccacctacaacaaccatctgtacaagcaaatttccagccagtctggggccagcaacgacaaccactactttggctacagcaccccttgggggtattttgacttcaacagattccactgccacttctccccacgtgactggcaaagactcaccaacaacaattggggattccggcccaaaagactcaacttcaagctctttaacattcaagtcaaggaggtcacgcagaatgacggtacgacgacgattgccaataaccttaccagcacggttcaggtgtttactgactcggagtaccagctcccgtacgtcctcggctcggcgcatcaaggatgcctcccgccgttcccagcagacgtcttcatggtgccacagtatggatacctcaccctgaacaacgggagtcaggcggtaggacgctcttcattttactgcctggagtactttccttctcagatgctgcgtaccggaaacaactttaccttcagctacacctttgaggacgttccttttcacagcagctacgctcacagccagagtttggaccgtctcatgaatcctctcatcgaccagtacctgtattacttgagcagaacaaacactccaagcggaaccactacgcagtccaggcttcagttttctcaagccggagcgagtgacattcgggaccagtctaggaactggcttcctggaccctgttaccgccagcagcgagtatcaaagacagctgcggacaacaacaacagtgattactcgtggactggagctaccaagtatcacctcaatggaagagactctctggtgaatccgggcacagccatggccagccacaaggacgatgaagaaaagtattttcctcagagcggggttctcatcttcggaaaacaagactcgggaaaaactaatgtggacattgaaaaggtcatgattacagacgaagaggaaatcaggaccaccaatcccgtggctacggagcagtatggttctgtatctaccaatctccagagcggcaacacacaagcagctacctcagatgtcaacacacaaggcgttcttccaggcatggtctggcaggacagagacgtgtacctgcagggacccatctgggcaaagattccacacacggacggacattttcacccttctcctcttatgggaggatttggaccgaagcaccctcccccgcagattctcatcaagaataccccggtacctgcgaatccttctaccaccttcagcgcggcaaagtttgcttccttcatcacacagtactccacggggcaggtcagcgtggagatcgagtgggagctgcagaaagagaacagcaaacgctggaaccccgagatccagtatacctccaactacaacaagtctgttaatgtggactttactgtggacactaatggcgtgtattcagagcctcgccccattggcacaagatacctgactcgtaatctgtaa

SEQ ID NO: 1180 - DNA, 2208 bp, Artificial Sequence
  Synthetic Polynucleotide
atggctgccgatggttatcttccagattggctcgaggacactctctctgaaggaataagacagtggtggaagctcaaacctggcccaccaccgccaaagcccgcagagcggcataaggacgacagcaggggtcttgtgcttcctgggtacaagtacctcggacccttcaacggactcgacaaaggagagccggtcaacgaggcagacgccgcggccctcgagcacgacaaggcctacgaccggcagctcgacagcggagacaacccgtacctcaagtacaaccacgccgacgcggagtttcaggagcgccttaaagaagatacgtcttttgggggcaacctcgcaagagcagtattccaggcgaaaaagagggttcttgaacctctgggcctggttgaggagcctgttaagacggctccgggaaaaaagaggccggtagagcactctcctgcggagctagattcctcctccggaactggaaagtcgggccaacagcctgcaagaaagagattgaattttggtcagactggagacgcagactccgtacctgacccccagcctctcggacagccaccagcagccccctctggtctgggaactaatacgatggcttcaggcagtggcgcaccaatggcagacaataacgagggcgccgacggagtgggtaattcctcgggaaattggcattgcgattccacatggatgggcgacagagtcatcaccaccagcacccgcacctgggctctgcccacctacaacaaccatctgtacaagcaaatttccagccagtctggggccagcaacgacaaccactactttggctacagcaccccttgggggtattttgacttcaacagattccactgccacttctccccacgtgactggcaaagactcatcaacaacaattggggattccggcccaaaagactcaacttcaagctctttaacattcaagtcaaggaggtcacgcagaatgacggtacgacgacgattgccaataaccttaccagcacggttcgggtgtttactgactcggagtaccagctcccgtacgtcctcggctcggcgcatcaaggatgcctcccgccgttcccagcagacgtcttcatggtgccacagtatggatacctcaccctgaacaacgggagtcaggcggtaggacgctcttcattttactgcctggagtactttccttctcagatgctgcgtaccggaaacaactttaccttcagctacacctttgaggacgttccttttcacagcagctacgctcacagccagagtttggaccgtctcatgaatcctctcatcgaccagtacctgtattacttgagcagaacaaacactccaagcggaaccactacgcagtccaggcttcagttttctcaagccggagcgagtgacattcgggaccagtctaggaactggcttcctggaccctgttaccgccagcagcgagtatcaaagacagctgcggacaacaacaacagtgattactcgtggactggagctaccaagtatcacctcaatggaagagactctctggtgaatccgggcacagccatggccagccacaaggacgatgaagaaaagtattttcctcagagcggggttctcatcttcggaaaacaagactcgggaaaaactaatgtggacattgaaaaggtcatgattacagacgaagaggaaatcaggaccaccaatcccgtggctacggagcagtatggttctgtatctaccaatctccagagcggcaacacacaagcagctacctcagatgtcaacacacaaggcgttcttccaggcatggtctggcaggacagagacgtgtacctgcagggacccatctgggcaaagattccacacacggacggacattttcacccttctcctcttatgggaggatttggaccgaagcaccctcccccgcagattctcatcaagaataccccggtacctgcgaatccttctaccaccttcagcgcggcaaagtttgcttccttcatcacacagtactccacggggcaggtcagcgtggagatcgagtgggagctgcagaaagagaacagcaaacgctggaaccccgagatccagtatacctccaactacaacaagtctgttaatgtggactttactgtggacactaatggcgtgtattcagagcctcgccccattggcacaagatacctgactcgtaatctgtaa

SEQ ID NO: 1181 - DNA, 2208 bp, Artificial Sequence
  Synthetic Polynucleotide
atggctgccgatggttatcttccagattggctcgaggacactctctctgaaggaataagacagtggtggaagctcaaacctggcccaccaccgccaaagcccgcagagcggcataaggacgacagcaggggtcttgtgcttcctgggtacaagtacctcggacccttcaacggactcgacaaaggagagccggtcaacgaggcagacgccgcggccctcgagcacgacaaggcctacgaccggcagctcgacagcggagacaacccgtacctcaagtacaaccacgccgacgcggagtttcaggagcgccttaaagaagatacgtcttttgggggcaacctcgcaagagcagtattccaggcgaaaaagagggttcttgaacctctgggcctggttggggagcctgttaagacggctccgggaaaaaagaggccggtagagcactctcctgcggagctagattcctcctccggaactggaaagtcgggccaacagcctgcaagaaagagattgaattttggtcagactggagacgcagactccgtacctgacccccagcctctcggacagccaccagcagccccctctggtctgggaactaatacgatggcttcaggcagtggcgcaccaatggcagacaataacgagggcgccgacggagtgggtaattcctcgggaaattggcattgcgattccacatggatgggcgacagagtcatcaccaccagcacccgcacctgggctctgcccacctacaacaaccatctgtacaagcaaatttccagccagtctggggccagcaacgacaaccactactttggctacagcaccccttgggggtattttgacttcaacagattccactgccacttctccccacgtgactggcaaagactcatcaacaacaattggggattccggcccaaaagactcaacttcaagctctttaacattcaagtcaaggaggtcacgcagaatgacggtacgacgacgattgccaataaccttaccagcacggttcaggtgtttactgactcggagtaccagctcccgtacgtcctcggctcggcgcatcaaggatgcctcccgccgttcccagcagacgtcttcatggtgccacagtatggatacctcaccctgaacaacgggagtcaggcggtaggacgctcttcattttactgcctggagtactttccttctcagatgctgcgtaccggaaacaactttaccttcagctacacctttgaggacgttccttttcacagcagctacgctcacagccagagtttggaccgtctcatgaatcctctcatcgaccagtacctgtattacttgagcagaacaaacactccaagcggaaccactacgcagtccaggcttcagttttctcaagccggagcgagtgacattcgggaccagtctaggaactggcttcctggaccctgttaccgccagcagcgagtatcaaagacagctgcggacaacaacaacagtgattactcgtggactggagctaccaagtatcacctcaatggaagagactctctggtgaatccgggcacagccatggccagccacaaggacgatgaagaaaagtattttcctcagagcggggttctcatcttcggaaaacaagactcgggaaaaactaatgtggacattgaaaaggtcatgattacagacgaagaggaaatcaggaccaccaatcccgtggctacggagcagtatggttctgtatctaccaatctccagagcggcaacacacaagcagctacctcagatgtcaacacacaaggcgttcttccaggcatggtctggcaggacagagacgtgtacctgcagggacccatctgggcaaagattccacacacggacggacattttcacccttctcctcttatgggaggatttggaccgaagcaccctcccccgcagattctcatcaagaataccccggtacctgcgaatccttctaccaccttcagcgcggcaaagtttgcttccttcatcacacagtactccacggggcaggtcagcgtggagatcgagtgggagctgcagaaagagaacagcaaacgctggaaccccgagatccagtatacctccaactacaacaagtctgttaatgtggactttactgtggacactaatggcgtgtattcagagcctcgccccattggcacaagatacctgactcgtaatctgtaa

SEQ ID NO: 1182 - DNA, 2208 bp, Artificial Sequence
  Synthetic Polynucleotide
atggctgccgatggttatcttccagattggctcgaggacactctctctgaaggaataagacagtggtggaagctcaaacctggcccaccaccgccaaagcccgcagagcggcataaggacgacagcaggggtcttgtgcttcctgggtacaagtacctcggacccttcaacggactcgacaaaggagagccggtcaacgaggcagacgccgcggccctcgagcacgacaaggcctacgaccggcagctcgacagcggagacaacccgtacctcaagtacaaccacgccgacgcggagtttcaggagcgccttaaagaagatacgtcttttgggggcaacctcgcaagagcagtattccaggcgaaaaagagggttcttgaacctctgggcctggttgaggagcctgttaagacggctccgggaaaaaagaggccggtagagcactctcctgcggagctagattcctcctccggaactggaaagtcgggccaacagcctgcaagaaagagattgaattttggtcagactggagacgcagactccgtacctggcccccagcctctcggacagccaccagcagccccctctggtccgggaactaatacgatggcttcaggcagtggcgcaccaatggcagacaataacgagggcgccgacggagtgggtaattcctcgggaaattggcattgcgattccacatggatgggcgacagagtcgtcaccaccagcacccgcacctgggctctgcccacctacaacaaccatctgtacaagcaaatttccagccagtctggggccagcaacgacaaccactactttggctacagcaccccttgggggtattttgacttcaacagattccactgccacttctccccacgtgactggcaaagactcatcaacaacaattggggattccggcccaaaagactcaacttcaagctctttaacattcaagtcaaggaggtcacgcagaatgacggtacgacgacgattgccaataaccttaccagcacggttcaggtgtttactgactcggagtaccagctcccgtacgtcctcggctcggcgcatcaaggatgcctcccgccgttcccagcagacgtcttcatggtgccacagtatggatacctcaccctgaacaacgggagtcaggcggtaggacgctcttcattttactgcctggagtactttccttctcagatgctgcgtaccggaaacaactttaccttcagctacacctttgaggacgttccttttcacagcagctacgctcacagccagagtttggaccgtctcatgaatcctctcatcgaccagtacctgtattacttgagcagaacaaacactccaagcggaaccactacgcagtccaggcttcagttttctcaagccggagcgagtgacattcgggaccagtctaggaactggcttcctggaccctgttaccgccagcagcgagtaccaaagacagctgcggacaacaacaacagtgattactcgtggactggagctaccaagtatcacctcaatggaagagactctctggtgaatccgggcacagccatggccagccacaaggacgatgaagaaaagtattttcctcagagcggggttctcatcttcggaaaacaagactcgggaaaaactaatgtggacattgaaaaggtcatgattacagacgaagaggaaatcaggaccaccaatcccgtggctacggagcagtatggttctgtatctaccaatctccagagcggcaacacacaagcagctacctcagatgtcaacacacaaggcgttcttccaggcatggtctggcaggacagagacgtgtacctgcagggacccatctgggcaaagattccacacacggacggacattttcacccttctcctcttatgggaggatttggaccgaagcaccctcccccgcagattctcatcaagaataccccggtacctgcgaatccttctaccaccttcagcgcggcaaagtttgcttccttcatcacacagtactccacggggcaggtcagcgtggagatcgagtgggagctgcagaaagagaacagcaaacgctggaaccccgagatccagtatacctccaactacaacaagtctgttaatgtggactttactgtggacactaatggcgtgtattcagagcctcgccccattggcacaagatacctgactcgtaatctgtaa

SEQ ID NO: 1183 - DNA, 2208 bp, Artificial Sequence
  Synthetic Polynucleotide
atggctgccgatggttatcttccagattggctcgaggacactctctctgaaggaataagacagtggtggaagctcaaacctggcccaccaccgccaaagcccgcagagcggcataaggacgacagcaggggtcttgtgcttcctgggtacaagtacctcggacccttcaacggactcgacaaaggagagccggtcaacgaggcagacgccgcggccctcgagcacgacaaggcctacgaccggcagctcgacagcggagacaacccgtacctcaagtacaaccacgccgacgcggagtttcaggagcgccttaaagaagatacgtcttttgggggcaacctcgcaagagcagtattccaggcgaaaaagagggttcttgaacctctgggcctggttgaggggcctgttaagacggctccgggaaaaaagaggccggtagagcactctcctgcggagctagattcctcctccggaactggaaagtcgggccaacagcctgcaagaaagagattgaattttggtcagactggagacgcagactccgtacctgacccccagcctctcggacagccaccagcagccccctctggtctgggaactaatacgatggcttcaggcagtggcgcaccaatggcagacaataacgagggcgccgacggagtgggtaattcctcgggaaattggcattgcgattccacatggatgggcgacagagtcatcaccaccagcacccgcacctgggctctgcccacctacaacaaccatctgtacaagcaaatttccagccagtctggggccagcaacgacaaccactactttggctacagcaccccttgggggtattttgacttcaacagattccactgccacttctccccacgtgactggcaaagactcatcaacaacaattggggattccggcccaaaagactcaacttcaagctctttaacattcaagtcaaggaggtcacgcagaatgacggtacgacgacgattgccaataaccttaccagcacggttcaggtgtttactgactcggagtaccagctcccgtacgtcctcggctcggcgcatcaaggatgcctcccgccgttcccagcagacgtcttcatggtgccacagtatggatacctcaccctgaacaacgggagtcaggcggtaggacgctcttcattttactgcctggagtactttccttctcagatgctgcgtaccggaaacaactttaccttcagctacacctttgaggacgttccttttcacagcagctacgctcacagccagagtttggaccgtctcatgaatcctctcatcgaccagtacctgtattacttgagcagaacaaacactccaagcggaaccactacgcagtccaggcttcagttttctcaagccggagcgagtgacattcgggaccagtctaggaactggcttcctggaccctgttaccgccagcagcgagtatcaaagacagctgcggacaacaacaacagtgattactcgtggactggagctaccaagtatcacctcaatggaagagactctctggtgaatccgggcacagccatggccagccacaaggacgatgaagaaaagtattttcctcagagcggggttctcatcttcggaaaacaagactcgggaaaaactaatgtggacattgaaaaggtcatgattacagacgaagaggaaatcaggaccaccaatcccgtggctacggagcagtatggttctgtatctaccaatctccagagcggcaacacacaagcagctacctcagatgtcaacacacaaggcgttcttccaggcatggtctggcaggacagagacgtgtacctgcagggacccatctgggcaaagattccacacacggacggacattttcacccttctcctcttatgggaggatttggaccgaagcaccctcccccgcagattctcatcaagaataccccggtacctgcgaatccttctaccaccttcagcgcggcaaagtttgcttccttcatcacacagtactccacggggcaggtcagcgtggagatcgagtgggagctgcagaaagagaacagcaaacgctggaaccccgagatccagtatacctccaactacaacaagtctgttaatgtggactttactgtggacactaatggcgtgtattcagagcctcgccccattggcacaagatacctgactcgtaatctgtaa

SEQ ID NO: 1184 - DNA, 2208 bp, Artificial Sequence
  Synthetic Polynucleotide
atggctgccgatggttatcttccagattggctcgaggacactctctctgaaggaataagacagtggtggaagctcaaacctggcccaccaccgccaaagcccgcagagcggcataaggacgacagcaggggtcttgtgcttcctgggtacaagtacctcggacccttcaacggactcgacaaaggagagccggtcaacgaggcagacgccgcggccctcgagcacgacaaggcctacgaccggcagctcgacagcggagacaacccgtacctcaagtacaaccacgccgacgcggagtttcaggagcgccttaaagaagatacgtcttttgggggcaacctcgcaagagcagtattccaggcgaaaaagagggttcttgaacctctgggcctggttgaggagcctgttaagacggctccgggaaaaaagaggccggtagagcactctcctgcggagctagattcctcctccggaactggaaagtcgggccaacagcctgcaagaaagagattgaattttggtcagactggagacgcagactccgtacctgacccccagcctctcggacagccaccagcagccccctctggtctgggaactaatacgatggcttcaggcagtggcgcaccaatggcagacaataacgagggcgccgacggggtgggtaattcctcgggaaattggcattgcgattccacatggatgggcgacagagtcatcaccaccagcacccgcacctgggctctgcccacctacaacaaccatctgtacaagcaaatttccagccagtctggggccagcaacgacaaccactaccttggctacagcaccccttgggggtattttgacttcaacagattccactgccacttctccccacgtgactggcaaagactcatcaacaacaattggggattccggcccaaaagactcaacttcaagctctttaacattcaagtcaaggaggtcacgcagaatgacggtacgacgacgattgccaataaccttaccagcacggttcaggtgtttactgactcggagtaccagctcccgtacgtcctcggctcggcgcatcaaggatgcctcccgccgttcccagcagacgtcttcatggtgccacagtatggatacctcaccctgaacaacgggagtcaggcggtaggacgctcttcattttactgcctggagtactttccttctcagatgctgcgtaccggaaacaactttaccttcagctacacctttgaggacgttccttttcacagcagctacgctcacagccagagtttggaccgtctcatgaatcctctcatcgaccagtacctgtattacttgagcagaacaaacactccaagcggaaccactacgcagtccaggcttcagttttctcaagccggagcgagtgacattcgggaccagtctaggaactggcttcctggaccctgttaccgccagcagcgagtatcaaagacagctgcggacaacaacaacagtgattactcgtggactggagctaccaagtatcacctcaatggaagagactctctggtgaatccgggcacagccatggccagccacaaggacgatgaagaaaagtattttcctcagagcggggttctcatcttcggaaaacaagactcgggaaaaactaatgtggacattgaaaaggtcatgattacagacgaagaggaaatcaggaccaccaatcccgtggctacggagcagtatggttctgtatctaccaatctccagagcggcaacacacaagcagctacctcagatgtcaacacacaaggcgttcttccaggcatggtctggcaggacagagacgtgtacctgcagggacccatctgggcaaagattccacacacggacggacattttcacccttctcctcttatgggaggatttggaccgaagcaccctcccccgcagattctcatcaagaataccccggtacctgcgaatccttctaccaccttcagcgcggcaaagtttgcttccttcatcacacagtactccacggggcaggtcagcgtggagatcgagtgggagctgcagaaagagaacagcaaacgctggaaccccgagatccagtatacctccaactacaacaagtctgttaatgtggactttactgtggacactaatggcgtgtattcagagcctcgccccattggcacaagatacctgactcgtaatctgtaa

SEQ ID NO: 1185 - DNA, 2208 bp, Artificial Sequence
  Synthetic Polynucleotide
atggctgccgatggttatcttccagattggctcgaggacactctctctgaaggaataagacagtggtggaagctcaaacctggcccaccaccgccaaagcccgcagagcggcataaggacgacagcaggggtcttgtgcttcctgggtacaagtacctcggacccttcaacggactcgacaaaggagagccggtcaacgaggcagacgccgcggccctcgagcacgacaaggcctacgaccggcagctcgacagcggagacaacccgtacctcaagtacaaccacgccgacgcggagtttcaggagcgccttaaagaagatacgtcttttgggggcaacctcgcaagagcagtattccaggcgaaaaagagggttcttgaacctctgggcctggttgaggagcctgttaagacggctccgggaaaaaaggggccggtagagcactctcctgcggagctagattcctcctccggaactggaaagtcgggccaacagcctgcaagaaagagattgaattttggtcagactggagacgcagactccgtacctgacccccagcctctcggacagccaccagcagccccctctggtctgggaactaatacgatggcttcaggcagtggcgcaccaatggcagacaataacgagggcgccgacggagtgggtaattcctcgggaaattggcattgcgattccacatggatgggcgacagagtcatcaccaccagcacccgcacctgggctctgcccacctacaacaaccatctgtacaagcaaatttccagccagtctggggccagcaacgacaaccactactttggctacagcaccccttgggggtattttgacttcaacagattccactgccacttctccccacgtgactggcaaagactcatcaacaacaattggggattccggcccaaaagactcaacttcaagctctttaacattcaagtcaaggaggtcacgcagaatgacggtacgacgacgattgccaataaccttaccagcacggttcaggtgtttactgactcggagtaccagctcccgtacgtcctcggctcggcgcatcaaggatgcctcccgccgttcccagcagacgtcttcatggtgccacagtatggatacctcaccctgaacaacgggagtcaggcggtaggacgctcttcattttactgcctggagtactttccttctcagatgctgcgtaccggaaacaactttaccttcagctacacctttgaggacgttccttttcacagcagctacgctcacagccagagtttggaccgtctcatgaatcctctcatcgaccagtacctgtattacttgagcagaacaaacactccaagcggaaccactacgcagtccaggcttcagttttctcaagccggagcgagtgacattcgggaccagtctaggaactggcttcctggaccctgttaccgccagcagcgagtatcaaagacagctgcggacaacaacaacagtgattactcgtggactggagctaccaagtatcacctcaatggaagagactctctggtgaatccgggcacagccatggccagccacaaggacgatgaagaaaagtattttcctcagagcggggttctcatcttcggaaaacaagactcgggaaaaactaatgtggacattgaaaaggtcatgattacagacgaagaggaaatcaggaccaccaatcccgtggctacggagcagtatggttctgtatctaccaatctccagagcggcaacacacaagcagctacctcagatgtcaacacacaaggcgttcttccaggcatggtctggcaggacagagacgtgtacctgcagggacccatctgggcaaagattccacacacggacggacattttcacccttctcctcttatgggaggatttggaccgaagcaccctcccccgcagattctcatcaagaataccccggtacctgcgaatccttctaccaccttcagcgcggcaaagtttgcttccttcatcacacagtactccacggggcaggtcagcgtggagatcgagtgggagctgcagaaagagaacagcaaacgctggaaccccgagatccagtatacctccaactacaacaagtctgttaatgtggactttactgtggacactaatggcgtgtattcagagcctcgccccattggcacaagatacctgactcgtaatctgtaa

SEQ ID NO: 1186 - DNA, 2208 bp, Artificial Sequence
  Synthetic Polynucleotide
atggctgccgatggttatcttccagattggctcgaggacactctctctgaaggaataagacagtggtggaagctcaaacctggcccaccaccgccaaagcccgcagagcggcataaggacgacagcaggggtcttgtgcttcctgggtacaagtacctcggacccttcaacggactcgacaaaggagagccggtcaacgaggcagacgccgcggccctcgagcacgacaaggcctacgaccggcagctcgacagcggagacaacccgtacctcaagtacaaccacgccgacgcggagtttcaggagcgccttaaagaagatacgccttttgggggcaacctcgcaagagcagtattccaggcgaaaaagagggttcttgaacctctgggcctggttgaggagcctgttaagacggctccgggaaaaaagaggccggtagagcactctcctgcggagctagattcctcctccggaactggaaagtcgggccaacagcctgcaagaaagagattgaattttggtcagactggagacgcagactccgtacctgacccccagcctctcggacagccaccagcagccccctctggtctgggaactaatacgatggcttcaggcagtggcgcaccaatggcagacaataacgagggcgccgacggagtgggtaattcctcgggaaattggcattgcgattccacatggatgggcgacagagtcatcaccaccagcacccgcacctgggctctgcccacctacaacaaccatctgtacaagcaaatttccagccagtctggggccagcaacgacaaccactactttggctacagcaccccttgggggtattttgacttcaacagattccactgccacttctccccacgtgactggcaaagactcatcaacaacaattggggattccggcccaaaagactcaacttcaagctctttaacattcaagtcaaggaggtcacgcagaatgacggtacgacgacgattgccaataaccttaccagcacggttcaggtgtttactgactcggagtaccagctcccgtacgtcctcggctcggcgcatcaaggatgcctcccgccgttcccagcagacgtcttcatggtgccacagtatggatacctcaccctgaacaacgggagtcaggcggtaggacgctcttcattttactgcctggagtactttccttctcagatgctgcgtaccggaaacaactttaccttcagctacacctttgaggacgttccttttcacagcagctacgctcacagccagagtttggaccgtctcatgaatcctctcatcgaccagtacctgtattacttgagcagagcaaacactccaagcggaaccactacgcagtccaggcttcagttttctcaagccggagcgagtgacattcgggaccagtctaggaactggcttcctggaccctgttaccgccagcagcgagtatcaaagacagctgcggacaacaacaacagtgattactcgtggactggagctaccaagtatcacctcaatggaagagactctctggtgaatccgggcacagccatggccagccacaaggacgatgaagaaaagtattttcctcagagcggggttctcatcttcggaaaacaagactcgggaaaaactaatgtggacattgaaaaggtcatgattacagacgaagaggaaatcaggaccaccaatcccgtggctacggagcagtatggttctgtatctaccaatctccagagcggcaacacacaagcagctacctcagatgtcaacacacaaggcgttcttccaggcatggtctggcaggacagagacgtgtacctgcagggacccatctgggcaaagattccacacacggacggacattttcacccttctcctcttatgggaggatttggaccgaagcaccctcccccgcagattctcatcaagaataccccggtacctgcgaatccttctaccaccttcagcgcggcaaagtttgcttccttcatcacacagtactccacggggcaggtcagcgtggagatcgagtgggagctgcagaaagagaacagcaaacgctggaaccccgagatccagtatacctccaactacaacaagtctgttaatgtggactttactgtggacactaatggcgtgtattcagagcctcgccccattggcacaagatacctgactcgtaatctgtaa

SEQ ID NO: 1187 - DNA, 2208 bp, Artificial Sequence
  Synthetic Polynucleotide
atggctgccgatggttatcttccagattggctcgaggacactctctctgaaggaataagacagtggtggaagctcaaacctggcccaccaccgccaaagcccgcagagcggcataaggacgacagcaggggtcttgtgcttcctgggtacaagtacctcggacccttcaacggactcgacaaaggagagccggtcaacgaggcagacgccgcggccctcgagcacgacaaggcctacgaccggcagctcgacagcggagacaacccgtacctcaagtacaaccacgccgacgcggagtttcaggagcgccttaaagaagatacgtcttttgggggcaacctcgcaagagcagtattccaggcgaaaaagagggttcttgaacctctgggcctggttgaggagcctgttaagacggctccgggaaaaaagaggccggtagagcactctcctgcggagctagattcctcctccggaactggaaagtcgggccaacagcctgcaagaaagagattgaattttggtcagactggagacgcagactccgtacctgacccccagcctctcggacagccaccagcagccccctctggtctgggaactaatacgatggcttcaggcagtggcgcaccaatggcagacaataacgagggcgccgacggagtgggtaattcctcgggaaattggcattgcgattccacatggatgggcgacagagtcatcaccaccagcacccgcacctgggctctgcccacctacaacaaccatctgtacaagcaaatttccagccagtctggggccagcaacgacaaccactactttggctacagcgccccttgggggtattttgacttcaacagattccactgccacttctccccacgtgactggcaaagactcatcaacaacaattggggattccggcccaaaagactcaacttcaagctctttaacattcaagtcaaggaggtcacgcagaatgacggtacgacgacgattgccaataaccttaccagcacggttcaggtgtttactgactcggagtaccagctcccgtacgtcctcggctcggcgcatcaaggatgcctcccgccgttcccagcagacgtcttcatggtgccacagtatggatacctcaccctgaacaacgggagtcaggcggtaggacgctcttcattttactgcctggagtactttccttctcagatgctgcgtaccggaaacaactttaccttcagctacacctttgaggacgttccttttcacagcagctacgctcacagccagagtttggaccgtctcatgaatcctctcatcgaccagtacctgtattacttgagcagaacaaacactccaagcggaaccactacgcagtccaggcttcagttttctcaagccggagcgagtgacattcgggaccagtctaggaactggcttcctggaccctgttaccgccagcagcgagtatcaaagacagctgcggacaacaacaacagtgattactcgtggactggagctaccaagtatcacctcaatggaagagactctctggtgaatccgggcacagccatggccagccacaaggacgatgaagaaaagtattttcctcagagcggggttctcatcttcggaaaacaagactcgggaaaaactaatgtggacattgaaaaggtcatgattacagacgaagaggaaatcaggaccaccaatcccgtggctacggagcagtatggttctgtatctaccaatctccagagcggcaacacacaagcagctacctcagatgtcaacacacaaggcgttcttccaggcatggtctggcaggacagagacgtgtacctgcagggacccatctgggcaaagattccacacacggacggacattttcacccttctcctcttatgggaggatttggaccgaagcaccctcccccgcagattctcatcaagaataccccggtacctgcgaatccttctaccaccttcagcgcggcaaagtttgcttccttcatcacacagtactccacggggcaggtcagcgtggagatcgagtgggagctgcagaaagagaacagcaaacgctggaaccccgagatccagtatacctccaactacaacaagtctgttaatgtggactttactgtggacactaatggcgtgtattcagagcctcgccccattggcacaagatacctgactcgtaatctgtaa

SEQ ID NO: 1188 - DNA, 2208 bp, Artificial Sequence
  Synthetic Polynucleotide
atggctgccgatggttatcttccagattggctcgaggacactctctctgaaggaataagacagtggtggaagctcaaacctggcccaccaccgccaaagcccgcagagcggcataaggacgacagcaggggtcttgtgcttcctgggtacaagtacctcggacccttcaacggactcgacaaaggagagccggtcaacgaggcagacgccgcggccctcgagcacgacaaggcctacgaccggcagctcgacagcggagacaacccgtacctcaagtacaaccacgccgacgcggagtttcaggagcgccttaaagaagatacgtcttttgggggcaacctcgcaagagcagtattccaggcgaaaaagagggttcttgaacctctgggcctggttgaggagcctgttaagacggctccgggaaaaaagaggccggtagagcactctcctgcggagctagattcctcctccggaactggaaagtcgggccaacagcctgcaagaaagagattgaattttggtcagactggagacgcagactccgtacctgacccccagcctctcggacagccaccagcagccccctctggtctgggaactaatacgatggcttcaggcagtggcgcaccaatggcagacaataacgagggcgccgacggagtgggtaattcctcgggaaattggcattgcgattccacatggatgggcgacagagtcatcaccaccagcacccgcacctgggctctgcccacctacaacaaccatctgtacaagcaaatttccagccagtctggggccagcaacgacaaccactactttggctacagcaccccttgggggtattttgacttcaacagattccactgccacttctccccacgtgactggcaaagactcatcaacaacaattggggattccggcccaaaagactcaacttcaagctctttaacattcaagtcaaggaggtcacgcagaatgacggtacgacgacgattgccaataaccttaccagcacggttcaggtgtttactgactcggagtaccagctcccgtacgtcctcggctcggcgcatcaaggatgcctcccgccgttcccagcagacgtcttcatggtgccacagtatggatacctcaccctgaacaacgggagtcaggcggtaggacgctcttcattttactgcctggagtactttccttctcagatgctgcgtaccggaaacaactttaccttcagctacacctttgaggacgttccttttcacagcagctacgctcacagccagagtttggaccgtctcatgaatcctctcatcgaccagtacctgtattacttgagcagaacaaacactccaagcggaaccactacgcagtccaggcttcagttttctcaagccggagcgagtgacattcgggaccagtctaggaactggcttcctggaccctgttaccgccagcagcgagtatcaaagacagctgcggacaacaacaacagtgattactcgtggactggagctaccaagtatcacctcaatggaagagactctctggtgaatccgggcacagccatggccagccacaaggacgatgaagaaaagtattttcctcagagcggggttctcatcttcggaaaacaagactcgggaaaaactaatgtggacattgaaaaggtcatgattacagacgaagaggaaatcaggaccaccaatcccgtggctacggagcagtatggttctgtatctaccaatctccagagcggcaacacacaagcagctacctcagatgtcaacacacaaggcgttcttccaggcatggtctggcaggacagagacgtgtacctgcagggacccatctgggcaaagattccacacacggacggacattttcacccttctcctcttatgggaggatttggaccgaagcaccctcccccgcagattctcatcaagaataccccggtacctgcgaatccttctaccaccttcagcgcggcaaagtttgcttccctcatcacacagtactccacggggcaggtcagcgtggagatcgagtgggagctgcagaaagagaacagcaaacgctggaaccccgagatccagtatacctccaactacaacaagtctgttaatgtggactttactgtggacactaatggcgtgtattcagagcctcgccccattggcacaagatacctgactcgtaatctgtaa

SEQ ID NO: 1189 - DNA, 2208 bp, Artificial Sequence
  Synthetic Polynucleotide
atggctgccgatggttatcttccagattggctcgaggacactctctctgaaggaataagacagtggtggaagctcaaacctggcccaccaccgccaaagcccgcagagcggcataaggacgacagcaggggtcttgtgcttcctgggtacaagtacctcggacccttcaacggactcgacaaaggagagccggtcaacgaggcagacgccgcggccctcgagcacgacaaggcctacgaccggcagctcgacagcggagacaacccgtacctcaagtacaaccacgccgacgcggagtttcaggagcgccttaaagaagatacgtcttttgggggcaacctcgcaagagcagtattccaggcgaaaaagagggttcttgaacctctgggcctggttgaggagcctgttaagacggctccgggaaaaaagaggccggtagagcactctcctgcggagctagattcctcctccggaactggaaagtcgggccaacagcctgcaagaaagggattgaattttggtcagactggagacgcagactccgtacctgacccccagcctctcggacagccaccagcagccccctctggtctgggaactaatacgatggcttcaggcagtggcgcaccaatggcagacaataacgagggcgccgacggagtgggtaattcctcgggaaattggcattgcgattccacatggatgggcgacagagtcatcaccaccagcacccgcacctgggctctgcccacctacaacaaccatctgtacaagcaaatttccagccagtctggggccagcaacgacaaccactactttggctacagcaccccttgggggtattttgacttcaacagattccactgccacttctccccacgtgactggcaaagactcatcaacaacaattggggattccggcccaaaagactcaacttcaagctctttaacattcaagtcaaggaggtcacgcagaatgacggtacgacgacgattgccaataaccttaccagcacggttcaggtgtttactgactcggagtaccagctcccgtacgtcctcggctcggcgcatcaaggatgcctcccgccgttcccagcagacgtcttcatggtgccacagtatggatacctcaccctgaacaacgggagtcaggcggtaggacgctcttcattttactgcctggagtactttccttctcagatgctgcgtaccggaaacaactttaccttcagctacacctttgaggacgttccttttcacagcagctacgctcacagccagagtttggaccgtctcatgaatcctctcatcgaccagtacctgtattacttgagcagaacaaacactccaagcggaaccactacgcagtccaggcttcagttttctcaagccggagcgagtgacattcgggaccagtctaggaactggcttcctggaccctgttaccgccagcagcgagtatcaaagacagctgcggacaacaacaacagtgattactcgtggactggagctaccaagtatcacctcaatggaagagactctctggtgaatccgggcacagccatggccagccacaaggacgatgaagaaaagtattttcctcagagcggggttctcatcttcggaaaacaagactcgggaaaaactaatgtggacattgaaaaggtcatgattacagacgaagaggaaatcaggaccaccaatcccgtggctacggagcagtatggttctgtatctaccaatctccagagcggcaacacacaagcagctacctcagatgtcaacacacaaggcgttcttccaggcatggtctggcaggacagagacgtgtacctgcagggacccatctgggcaaagattccacacacggacggacattttcacccttctcctcttatgggaggatttggaccgaagcaccctcccccgcagattctcatcaagaataccccggtacctgcgaatccttctaccaccttcagcgcggcaaagtttgcttccttcatcacacagtactccacggggcaggtcagcgtggagatcgagtgggagctgcagaaagagaacagcaaacgctggaaccccgagatccagtatacctccaactacaacaagtctgttaatgtggactttactgtggacactaatggcgtgtattcagagcctcgccccattggcacaagatacctgactcgtaatctgtaa

SEQ ID NO: 1190 - DNA, 2208 bp, Artificial Sequence
  Synthetic Polynucleotide
atggctgccgatggttatcttccagattggctcgaggacactctctctgaaggaataagacagtggtggaagctcaaacctggcccaccaccgccaaagcccgcagagcggcataaggacgacagcaggggtcttgtgcttcctgggtacaagtacctcggacccttcaacggactcgacaaaggagagccggtcaacgaggcagacgccgcggccctcgagcacgacgaggcctacgaccggcagctcgacagcggagacaacccgtacctcaagtacaaccacgccgacgcggagtttcaggagcgccttaaagaagatacgtcttttgggggcaacctcgcaagagcagtattccaggcgaaaaagagggttcttgaacctctgggcctggttgaggagcctgttaagacggctccgggaaaaaagaggccggtagagcactctcctgcggagctagattcctcctccggaactggaaagtcgggccaacagcctgcaagaaagagattgaattttggtcagactggagacgcagactccgtacctgacccccagcctctcggacagccaccagcagccccctctggtctgggaactaatacgatggcttcaggcagtggcgcaccaatggcagacaataacgagggcgccgacggagtgggtaattcctcgggaaattggcattgcgattccacatggatgggcgacagagtcatcaccaccagcacccgcacctgggctctgcccacctacaacaaccatctgtacaagcaaatttccagccagtctggggccagcaacgacaaccactactttggctacagcaccccttgggggtattttgacttcaacagattccactgccacttctccccacgtgactggcaaagactcatcaacaacaattggggattccggcccaaaagactcaacttcaagctctttaacattcaagtcaaggaggtcacgcagaatgacggtacgacgacgattgtcaataaccttaccagcacggttcaggtgtttactgactcggagtaccagctcccgtacgtcctcggctcggcgcatcaaggatgcctcccgccgttcccagcagacgtcttcatggtgccacagtatggatacctcaccctgaacaacgggagtcaggcggtaggacgctcttcattttactgcctggagtactttccttctcagatgctgcgtaccggaaacaactttaccttcagctacacctttgaggacgttccttttcacagcagctacgctcacagccagagtttggaccgtctcatgaatcctctcatcgaccagtacctgtattacttgagcagaacaaacactccaagcggaaccactacgcagtccaggcttcagttttctcaagccggagcgagtgacattcgggaccagtctaggaactggcttcctggaccctgttaccgccagcagcgagtatcaaagacagctgcggacaacaacaacagtgattactcgtggactggagctaccaagtatcacctcaatggaagagactctctggtgaatccgggcacagccatggccagccacaaggacgatgaagaaaagtattttcctcagagcggggttctcatcttcggaaaacaagactcgggaaaaactaatgtggacattgaaaaggtcatgattacagacgaagaggaaatcaggaccaccaatcccgtggctacggagcagtatggttctgtatctaccaatctccagagcggcaacacacaagcagctacctcagatgtcaacacacaaggcgttcttccaggcatggtctggcaggacagagacgtgtacctgcagggacccatctgggcaaagattccacacacggacggacattttcacccttctcctcttatgggaggatttggaccgaagcaccctcccccgcagattctcatcaagaataccccggtacctgcgaatccttctaccaccttcagcgcggcaaagtttgcttacttcatcacacagtactccacggggcaggtcagcgtggagatcgagtgggagctgcagaaagagaacagcaaacgctggaaccccgagatccagtatacctccaactacaacaagtctgttaatgtggactttactgtggacactaatggcgtgtattcagagcctcgccccattggcacaagatacctgactcgtaatctgtaa

SEQ ID NO: 1191 - DNA, 2208 bp, Artificial Sequence
  Synthetic Polynucleotide
atggctgccgatggttatcttccagattggctcgaggacactctctctgaaggaataagacagtggtggaagctcaaacctggcccaccaccgccaaagcccgcagagcggcataaggacgacagcaggggtcttgtgcttcctgggtacaagtacctcggacccttcaacggactcgacaaaggagagccggtcaacgaggcagacgccgcggccctcgagcacgacaaggcctacgaccggcagctcgacagcggagacaacccgtacctcaagtacaaccacgccgacgcggagtttcaggagcgccttaaagaagatacgtcttttgggggcaacctcgcaagagcagtattccaggcgaaaaagagggttcttgaacctctgggcctggttgaggagcctgttaagacggctccgggaaaaaagaggccggtagagcactctcctgcggagctagattcctcctccggaactggaaagtcgggccaacagcctgcaagaaagagattgaattttggtcagactggagacgcagactccgtacctgacccccagcctctcggacagccaccagcagccccctctggtctgggaactaatacgatggcttcaggcagtggcgcaccaatggcagacaataacgagggcgccgacggagtgggtaattcctcgggaaattggcattgcgattccacatggatgggcgacagagtcatcaccaccagcacccgcacctgggctctgcccacctacaacaaccatctgtacaagcaaatttccagccagtctggggccagcaacgacaaccactactttggctacagcaccccttgggggtattttgacttcaacagattccactgccacttctccccacgtgactggcaaagactcatcaacaacaattggggattccggcccaaaagactcaacttcaagctctttaacattcaagtcaaggaggtcacgcagaatgacggtacgacgacgattgccaataaccttaccagcacggttcaggtgtttactgactcggagtaccagctcccgtacgtcctcggctcggcgcatcaaggatgcctcccgccgttcccagcagacgtcttcatggtgccacagtatggatacctcaccctgaacaacgggagtcaggcggtaggacgctcttcattttactgcctggagtactttccttctcagatgctgcgtaccggaaacaactttaccttcagctacacctttgaggacgttccttttcacagcagctacgctcacagccagagtttggaccgtctcatgaatcctctcatcgaccagtacctgtattacttgagcagaacaaacactccaagcggaaccactacgcagtccaggcttcagttttctcaagccggagcgagtggcattcgggaccagtctaggaactggcttcctggaccctgttaccgccagcagcgagtatcaaagacagctgcggacaacaacaacagtgattactcgtggactggagctaccaagtatcacctcaatggaagggactctctggtgaatccgggcacagccatggccagccacaaggacgatgaagaaaagtattttcctcagagcggggttctcatcttcggaaaacaagactcgggaaaaactaatgtggacattgaaaaggtcatgattacagacgaagaggaaatcaggaccaccaatcccgtggctacggagcagtatggttctgtatctaccaatctccagagcggcaacacacaagcagctacctcagatgtcaacacacaaggcgttcttccaggcatggtctggcaggacagagacgtgtacctgcagggacccatctgggcaaagattccacacacggacggacattttcacccttctcctcttatgggaggatttggaccgaagcaccctcccccgcagattctcatcaagaataccccggtacctgcgaatccttctaccaccttcagcgcggcaaagtttgcttccttcatcacacagtactccacggggcaggtcagcgtggagatcgagtgggagctgcagaaagagaacagcaaacgctggaaccccgagatccagtatacctccaactacaacaagtctgttaatgtggactttactgtggacactaatggcgtgtattcagagcctcgccccattggcacaagatacctgactcgtaatctgtaa

SEQ ID NO: 1192 - DNA, 2208 bp, Artificial Sequence
  Synthetic Polynucleotide
atggctgccgatggttatcttccagattggctcgaggacactctctctgaaggaataagacagtggtggaagctcaaacctggcccaccaccgccaaagcccgcagagcggcataaggacgacagcaggggtcttgtgcttcctgggtacaagtacctcggacccttcaacggactcgacaaaggagagccggtcaacgaggcagacgccgcggccctcgagcacgacaaggcctacgaccggcagctcgacagcggagacaacccgtacctcaagtacaaccacgccgacgcggagtttcaggagcgccttaaagaagatacgtcttttgggggcaacctcgcaagagcagtattccaggcgaaaaagagggttcttgaacctctgggcctggttgaggagcctgttaagacggctccgggaaaaaagaggccggtagagcactctcctgcggagctagattcctcctccggaactggaaagtcgggccaacagcctgcaagaaagagattgaattttggtcagactggagacgcagactccgtacctgacccccagcctctcggacagccaccagcagccccctctggtctgggaactaatacgatggcttcaggcagtggcgcaccaatggcagacaataacgagggcgccgacggagtgggtaattcctcgggaaattggcattgcgattccacatggatgggcgacagagtcatcaccaccagcacccgcacctgggctctgcccacctacaacaaccatctgtacaagcaaatttccagccagtctggggccagcaacgacaaccactactttggctacagcaccccttgggggtattttgacttcaacagattccactgccacttctccccacgtgactggcaaagactcatcaacaacaattggggattccggcccaaaagactcaacttcaagctctttaacattcaagtcaaggaggtcacgcagaatgacggtacgacgacgattgccaataaccttaccagcacggttcaggtgtttactgactcggagtaccagctcccgtacgtcctcggctcggcgcatcaaggatgcctcccgccgttcccagcagacgtcttcatggtgccacagtatggatacctcaccctgaacaacgggagtcaggcggtaggacgctcttcattttactgcctggagtactttccttctcagatgctgcgtaccggaaacaactttaccttcagctacacctttgaggacgttccttttcacagcagctacgctcacagccagagtttggaccgtctcatgaatcctctcatcgaccagtacctgtattacttgagcagaacaaacactccaagcggaaccactacgcagtccaggcttcagttttctcaagccggagcgagtgacattcgggaccagtctaggaactggcttcctggaccctgttaccgccagcagcgagtatcaaagacagctgcggacaacaacaacagtgattactcgtggactggagctaccaagtatcacctcaatggaagagactctctggtgaatccgggcacagccatggccagccacaaggacgatgaagaaaagtattttcctcagagcggggttctcatcttcggaaaacaagactcgggaaaaactaatgtggacattgaaaaggtcgtgattacagacgaagaggaaatcaggaccaccaatcccgtggctacggagcagtatggttctgtatctaccaatctccagagcggcaacacacaagcagctacctcagatgtcaacacacaaggcgttcttccaggcatggtctggcaggacagagacgtgtacctgcagggacccatctgggcaaagattccacacacggacggacattttcacccttctcctcttatgggaggatttggaccgaagcaccctcccccgcagattctcatcaagaataccccggtacctgcgaatccttctaccaccttcagcgcggcaaagtttgcttccttcatcacacagtactccacggggcaggtcagcgtggagatcgagtgggagctgcagaaagagaacagcaaacgctggaaccccgagatccagtatacctccaactacaacaagtctgttaatgtggactttactgtggacactaatggcgtgtattcagagcctcgccccattggcacaagatacctgactcgtaatctgtaa

SEQ ID NO: 1193 - DNA, 2208 bp, Artificial Sequence
  Synthetic Polynucleotide
atggctgccgatggttatcttccagattggctcgaggacactctctctgaaggaataagacagtggtggaagctcaaacctggcccaccaccgccaaagcccgcagagcggcataaggacgacagcaggggtcttgtgcttcctgggtacaagtacctcggacccttcaacggactcgacaaaggagagccggtcaacgaggcagacgccgcggccctcgagcacgacaaggcctacgaccggcagctcgacagcggagacaacccgtacctcaagtacaaccacgccgacgcggagtttcaggagcgccttaaagaagatacgtcttttgggggcaacctcgcaagagcagtattccaggcgaaaaagagggttcttgaacctctgggcctggttgaggagcctgttaagacggctccgggaaaaaagaggccggtagagcactctcctgcggagctagattcctcctccggaactggaaagtcgggccaacagcctgcaagaaagagattgaattttggtcagactggagacgcagactccgtacctgacccccagcctctcggacagccaccagcagccccctctggtctgggaactaatacgatggcttcaggcagtggcgcaccaatggcagacaataacgagggcgccgacggagtgggtaattcctcgggaaattggcattgcgattccacatggatgggcgacagagtcatcaccaccagcacccgcacctgggctctgcccacctacaacaaccatctgtacaagcaaatttccagccagtctggggccagcaacgacaaccactactttggctacagcaccccttgggggtattttgacttcaacagattccactgccacttctccccacgtgactggcaaagactcatcaacaacaattggggattccggcccaaaagactcaacttcaagctctttaacattcaagtcaaggaggtcacgcagaatgacggtacgacgacgattgccaataaccttaccagcacggttcaggtgtttactgactcggagtaccagctcccgtacgtcctcggctcggcgcatcaaggatgcctcccgccgttcccagcagacgtcttcatggtgccacagtatggatacctcaccctgaacaacgggagtcaggcggtaggacgctcttcattttactgcctggagtactttccttctcagatgctgcgtaccggaaacaactttaccttcagctacacctttgaggacgttccttttcacagcagctacgctcacagccagagtttggaccgtctcatgaatcctctcatcgaccagtacctgtattacttgagcagaacaaacactccaagcggaaccactacgcagtccaggcttcagttttctcaagccggagcgagtgacattcgggaccagtctaggaactggcttcctggaccctgttaccgccagcagcgagtatcaaagacagctgcggacaacaacaacagtgattactcgtggactggagctaccaagtatcacctcaatggaagagactctctggtgaatccgggcacagccatggccagccacaaggacgatgaagaaaagtattttcctcagagcggggttctcatcttcggaaaacaagactcgggaaaaactaatgtggacattgaaaaggtcatgattacagacgaagaggaaatcaggaccaccaatcccgtggctacggagcagtatggttctgtatctaccaatctccagagcggcgacacacaagcagctacctcagatgtcaacacacaaggcgttcttccaggcatggtctggcaggacagagacgtgtacctgcagggacccatctgggcaaagattccacacacggacggacattttcacccttctcctcttatgggaggatttggaccgaagcaccctcccccgcagattctcatcaagaataccccggtacctgcgaatccttctaccaccttcagcgcggcaaagtttgcttccttcatcacacagtactccacggggcaggtcagcgtggagatcgagtgggagctgcagaaagagaacagcaaacgctggaaccccgagatccagtatacctccaactacaacaagtctgttaatgtggactttactgtggacactaatggcgtgtattcagagcctcgccccattggcacaagatacctgactcgtaatctgtaa

SEQ ID NO: 1194 - DNA, 2208 bp, Artificial Sequence
  Synthetic Polynucleotide
atggctgccgatggttatcttccagattggctcgaggacactctctctgaaggaataagacagtggtggaagctcaaacctggcccaccaccgccaaagcccgcagagcggcataaggacgacagcaggggtcttgtgcttcctgggtacaagtacctcggacccttcaacggactcgacaaaggagagccggtcaacgaggcagacgccgcggccctcgagcacgacaaggcctacgaccggcagctcgacagcggagacaacccgtacctcaagtacaaccacgccgacgcggagtttcaggagcgccttaaagaagatacgtcttttgggggcaacctcgcaagagcagtattccaggcgaaaaagagggttcttgaacctctgggcctggttgaggagcctgttaagacggctccgggaaaaaagaggccggtagagcactctcctgcggagctagattcctcctccggaactggaaagtcgggccaacagcctgcaagaaagagattgaattttggtcagactggagacgcagactccgtacctgacccccagcctctcggacagccaccagcagccccctctggtctgggaactaatacgatggcttcaggcagtggcgcaccaatggcagacaataacgagggcgccgacggagtgggtaattcctcgggaaattggcattgcgattccacatggatgggcgacagagtcatcaccaccagcacccgcacctgggctctgcccacctacaacaaccatctgtacaagcaaatttccagccagtctggggccagcaacgacaaccactactttggctacagcaccccttgggggtattttgacttcaacagattccactgccacttctccccacgtgactggcaaagactcatcaacaacaattggggattccggcccaaaagactcaacttcaggctctttaacattcaagtcaaggaggtcacgcagaatgacggtacgacgacgattgccaataaccttaccagcacggttcaggtgtttactgactcggagtaccagctcccgtacgtcctcggctcggcgcatcaaggatgcctcccgccgttcccagcagacgtcttcatggtgccacagtatggatacctcaccctgaacaacgggagtcaggcggtaggacgctcttcattttactgcctggagtactttccttctcagatgctgcgtaccggaaacaactttaccttcagctacacctttgaggacgttccttttcacagcagctacgctcacagccagagtttggaccgtctcatgaatcctctcatcgaccagtacctgtattacttgagcagaacaaacactccaagcggaaccactacgcagtccaggcttcagttttctcaagccggagcgagtgacattcgggaccagtctaggaactggcttcctggaccctgttaccgccagcagcgagtatcaaagacagctgcggacaacaacaacagtgattactcgtggactggagctaccaagtatcacctcaatggaagagactctctggtgaatccgggcacagccatggccagccacaaggacgatgaagaaaagtattttcctcagagcggggttctcatcttcggaaaacaagactcgggaaaaactaatgtggacattgaaaaggtcatgattacagacgaagaggaaatcaggaccaccaatcccgtggctacggagcagtatggttctgtatctaccaatctccagagcggcaacacacaagcagctacctcagatgtcaacacacaaggcgttcttccaggcatggtctggcaggacagagacgtgtacctgcagggacccatctgggcaaagattccacacacggacggacattttcacccttctcctcttatgggaggatttggaccgaagcaccctcccccgcagattctcatcaagaataccccggtacctgcgaatccttctaccaccttcagcgcggcaaagtttgcttccttcatcacacagtactccacggggcaggtcagcgtggagatcgagtgggagctgcagaaagagaacagcaaacgctggaaccccgagatccagtatacctccaactacaacaagtctgttaatgtggactttactgtggacactaatggcgtgtattcagagcctcgccccattggcacaagatacctgactcgtaatctgtaa

SEQ ID NO: 1195 - DNA, 2208 bp, Artificial Sequence
  Synthetic Polynucleotide
atggctgccgatggttatcttccagattggctcgaggacactctctctgaaggaataagacagtggtggaagctcaaacctggcccaccaccgccaaagcccgcagagcggcataaggacgacagcaggggtcttgtgcttcctgggtacaagtacctcggacccttcaacggactcgacaaaggagagccggtcaacgaggcagacgccgcggccctcgagcacggcaaggcctacgaccggcagctcgacagcggagacaacccgtacctcaagtacaaccacgccgacgcggagtttcaggagcgccttaaagaagatacgtcttttgggggcaacctcgcaagagcagtattccaggcgaaaaagagggttcttgaacctctgggcctggttgaggagcctgttaagacggctccgggaaaaaagaggccggtagagcactctcctgcggagctagattcctcctccggaactggaaagtcgggccaacagcctgcaagaaagagattgaattttggtcagactggagacgcagactccgtacctgacccccagcctctcggacagccaccagcagccccctctggtctgggaactaatacgatggcttcaggcagtggcgcaccaatggcagacaataacgagggcgccgacggagtgggtaattcctcgggaaattggcattgcgattccacatggatgggcgacagagtcatcaccaccagcacccgcacctgggctctgcccacctacaacaaccatctgtacaagcaaatttccagccagtctggggccagcaacgacaaccactactttggctacagcaccccttgggggtattttgacttcaacagattccactgccacttctccccacgtgactggcaaagactcatcaacaacaattggggattccggcccaaaagactcaacttcaagctctttaacattcaagtcaaggaggtcacgcagaatgacggtacgacgacgattgccaataaccttaccagcacggttcaggtgtttactgactcggagtaccagctcccgtacgtcctcggctcggcgcatcaaggatgcctcccgccgttcccagcagacgtcttcatggtgccacagtatggatacctcaccctgaacaacgggagtcaggcggtaggacgctcttcattttactgcctggagtactttccttctcagatgctgcgtaccggaaacaactttaccttcagctacacctttgaggacgttccttttcacagcagctacgctcacagccagagtttggaccgtctcatgaatcctctcatcgaccagtacctgtattacttgagcagaacaaacactccaagcggaaccactacgcagtccaggcttcagttttctcaagccggagcgagtgacattcgggaccagtctaggaactggcttcctggaccctgttaccgccagcagcgagtatcaaagacagctgcggacaacaacaacagtgattactcgtggactggagctaccaagtatcacctcaatggaagagactctctggtgaatccgggcacagccatggccagccacaaggacgatgaagaaaagtattttcctcagagcggggttctcatcttcggaaaacaagactcgggaaaaactaatgtggacattgaaaaggtcatgattacagacgaagaggaaatcaggaccaccaatcccgtggctacggagcagtatggttctgtatctaccaatctccagagcggcaacacacaagcagctacctcagatgtcaacacacaaggcgttcttccaggcatggtctggcaggacagagacgtgtacctgcagggacccatctgggcaaagattccacacacggacggacattttcacccttctcctcttatgggaggatttggaccgaagcaccctcccccgcagattctcatcaagaataccccggtacctgcgaatccttctaccaccttcagcgcggcaaagtttgcttccttcatcacacagtactccacggggcaggtcagcgtggagatcgagtgggagctgcagaaagagaacagcaaacgctggaaccccgagatccagtatacctccaactacaacaagtctgttaatgtggactttactgtggacactaatggcgtgtattcagagcctcgccccattggcacaagatacctgactcgtaatctgtaa

SEQ ID NO: 1196 - DNA, 2208 bp, Artificial Sequence
  Synthetic Polynucleotide
atggctgccgatggttatcttccagattggctcgaggacactctctctgaaggaataagacagtggtggaagctcaaacctggcccaccaccgccaaagcccgcagagcggcataaggacgacagcaggggtcttgtgcttcctgggtacaagtacctcggacccttcaacggactcgacaaaggagagccggtcaacgaggcagacgccgcggccctcgagcacgacaaggcctacgaccggcagctcgacagcggagacaacccgtacctcaagtacaaccacgccgacgcggagtttcaggagcgccttaaagaagatacgtcttttgggggcaacctcgcaagagcagtattccaggcgaaaaagagggttcttgaacctctgggcctggttgaggagcctgttaagacggctccgggaaaaaagaggccggtagagcactctcctgcggagctagattcctcctccggaactggaaagtcgggccaacagcctgcaagaaagagattgaattttggtcagactggagacgcagactccgtacctgacccccagcctctcggacagccaccagcagccccctctggtccgggaactaatacgatggcttcaggcagtggcgcaccaatggcagacaataacgagggcgccgacggagtgggtaattcctcgggaaattggcattgcgattccacatggatgggcgacagagtcatcaccaccagcacccgcacctgggctctgcccacctacaacaaccatctgtacaagcaaatttccagccagtctggggccagcaacgacaaccactactttggctacagcaccccttgggggtattttgacttcaacagattccactgccacttctccccacgtgactggcaaagactcatcaacaacaattggggattccggcccaaaagactcaacttcaagctctttaacattcaagtcaaggaggtcacgcagaatgacggtacgacgacgattgccaataaccttaccagcacggttcaggtgtttactgactcggagtaccagctcccgtacgtcctcggctcggcgcatcaaggatgcctcccgccgttcccagcagacgtcttcatggtgccacagtatggatacctcaccctgaacaacgggagtcaggcggtaggacgctcttcattttactgcctggagtactttccttctcagatgctgcgtaccggaaacaactttaccttcagctacacctttgaggacgttccttttcacagcagctacgctcacagccagagtttggaccgtctcatgaatcctctcatcgaccagtacctgtattacttgagcagaacaaacactccaagcggaaccactacgcagtccaggcttcagttttctcaagccggagcgagtgacattcgggaccagtctaggaactggcttcctggaccctgttaccgccagcagcgagtatcaaagacagctgcggacaacaacaacagtgattactcgtggactggagctaccaagtatcacctcaatggaagagactctctggtgaatccgggcacagccatggccagccacaaggacgatgaagaaaagtattttcctcagagcggggttctcatcttcggaaaacaagactcgggaaaaactaatgtggacattgaaaaggtcatgattacagacgaagaggaaatcaggaccaccaatcccgtggctacggagcagtatggttctgtatctaccaatctccagagcggcaacacacaagcagctacctcagatgtcaacacacaaggcgttcttccaggcatggtctggcaggacagagacgtgtacctgcagggacccatctgggcaaagattccacacacggacggacattttcacccttctcctcttatgggaggatttggaccgaagcaccctcccccgcagattctcatcaagaataccccggtacctgcgaatccttctaccaccttcagcgcggcaaagtttgcttccttcatcacacagtactccacggggcaggtcagcgtggagatcgagtgggagctgcagaaagagaacagcaaacgctggaaccccgagatccagtatacctccaactacaacaagtctgttaatgtggactttactgtggacaccaatggcgtgtattcagagcctcgccccattggcacaagatacctgactcgtaatctgtaa

SEQ ID NO: 1197 - DNA, 2208 bp, Artificial Sequence
  Synthetic Polynucleotide
atggctgccgatggttatcttccagattggctcgaggacactctctctgaaggaataagacagtggtggaagctcaaacctggcccaccaccgccaaagcccgcagagcggcataaggacgacagcaggggtcttgtgcttcctgggtacaagtacctcggacccttcaacggactcgacaaaggagagccggtcaacgaggcagacgccgcggccctcgagcacgacaaggcctacgaccggcagctcgacagcggagacaacccgtacctcaagtacaaccacgccgacgcggagtttcaggagcgccttaaagaagatacgtcttttgggggcaacctcgcaagagcagtattccaggcgaaaaagagggttcttgaacctctgggcctggttgaggagcctgttaagacggctccgggaaaaaagaggccggtagagcactctcctgcggggccagattcctcctccggaactggaaagtcgggccaacagcctgcaagaaagagattgaattttggtcagactggagacgcagactccgtacctgacccccagcctctcggacagccaccagcagccccctctggtctgggaactaatacgatggcttcaggcagtggcgcaccaatggcagacaataacgagggcgccgacggagtgggtaattcctcgggaaattggcattgcgattccacatggatgggcgacagagtcatcaccaccagcacccgcacctgggctctgcccacctacaacaaccatctgtacaagcaaatttccagccagtctggagccagcaacgacaaccactactttggctacagcaccccttgggggtattttgacttcaacagattccactgccacttctccccacgtgactggcaaagactcatcaacaacaattggggattccggcccaaaagactcaacttcgagctctttaacattcaagtcaaggaggtcacgcagaatgacggtacgacgacgattgccaataaccttaccagcacggttcaggtgtttactgactcggagtaccagctcccgtacgtcctcggctcggcgcatcaaggatgcctcccgccgttcccagcagacgtcttcatggtgccacagtatggatacctcaccctgaacaacgggagtcaggcggtaggacgctcttcattttactgcctggagtactttccttctcagatgctgcgtaccggaaacaactttaccttcagctacacctttgaggacgttccttttcacagcagctacgctcacagccagagtttggaccgtctcatgaatcctctcatcgaccagtacctgtattacttgagcagaacaaacactccaagcggaaccactacgcagtccaggcttcagttttctcaagccggagcgagtgacattcgggaccagtctaggaactggcttcctggaccctgttaccgccagcagcgagtatcaaagacagctgcggacaacaacaacagtgattactcgtggactggagctaccaagtatcacctcaatggaagagactctctggtgaatccgggcacagccatggccagccacaaggacgatgaagaaaagtattttcctcagagcggggttctcatcttcggaaaacaagactcggaaaaaactaatgtggacattgaaaaggtcatgattacagacgaagaggaaatcaggaccaccaatcccgtggctacggagcagtatggttctgtatctaccaatctccagagcggcaacacacaagcagctacctcagatgtcaacacacaaggcgttcttccaggcatggtctggcaggacagagacgtgtacctgcagggacccatctgggcaaagattccacacacggacggacactttcacccttctcctcttatgggaggatttggactgaagcaccctcccccgcagattctcatcaagagtaccccggtacctgcgaatccttctaccaccttcagcgcggcaaagtttgcttccttcatcacacagtactccacggggcaggtcagcgtggagatcgagtgggagctgcagaaagagaacagcaaacgctggaaccccgagatccagtatacctccaactacaacaagtctgttaatgtggactttactgtggacactaatggcgtgtattcagagcctcgccccattggcacaagatacctgactcgtaatctgtaa

SEQ ID NO: 1198 - DNA, 2208 bp, Artificial Sequence
  Synthetic Polynucleotide
atggctgccgatggttatcttccagattggctcgaggacactctctctgaaggaataagacagtggtggaagctcaaacctggcccaccaccgccaaagcccgcagagcggcataaggacgacagcaggggtcttgtgcttcctgggtacaagtacctcggacccttcaacggactcgacaaaggagagccggtcaacgaggcagacgccgcggccctcgagcacgacaaggcctacgaccggcagctcgacagcggagacaacccgtacctcaagtacaaccacgccgacgcggagtttcaggagcgccttaaagaagatacgtcttttgggggcaacctcgcaagagcagtattccaggcgaaaaagagggttcttgaacctctgggcctggttgaggagcctgttaagacggctccgggaaaaaagaggccggtagagcactctcctgcggggccagattcctcctccggaactggaaagtcgggccaacagcctgcaagaaagagattgaattttggtcagactggagacgcagactccgtacctgacccccagcctctcggacagccaccagcagccccctctggtctgggaactaatacgatggcttcaggcagtggcgcaccaatggcagacaataacgagggcgccgacggagtgggtaattcctcgggaaattggcattgcgattccacatggatgggcgacagagtcatcaccaccagcacccgcacctgggctctgcccacctacaacaaccatctgtacaagcaaatttccagccagtctggagccagcaacgacaaccactactttggctacagcaccccttgggggtattttgacttcaacagattccactgccacttctccccacgtgactggcaaagactcatcaacaacaattggggattccggcccaaaagactcaacttcgagctctttaacattcaagtcaaggaggtcacgcagaatgacggtacgacgacgattgccaataaccttaccagcacggttcaggtgtttactgactcggagtaccagctcccgtacgtcctcggctcggcgcatcaaggatgcctcccgccgttcccagcagacgtcttcatggtgccacagtatggatacctcaccctgaacaacgggagtcaggcggtaggacgctcttcattttactgcctggagtactttccttctcagatgctgcgtaccggaaacaactttaccttcagctacacctttgaggacgttccttttcacagcagctacgctcacagccagagtttggaccgtctcatgaatcctctcatcgaccagtacctgtattacttgagcagaacaaacactccaagcggaaccactacgcagtccaggcttcagttttctcaagccggagcgagtgacattcgggaccagtctaggaactggcttcctggaccctgttaccgccagcagcgagtatcaaagacagctgcggacaacaacaacagtgattactcgtggactggagctaccaagtatcacctcaatggaagagactctctggtgaatccgggcacagccatggccagccacaaggacgatgaagaaaagtattttcctcagagcggggttctcatcttcggaaaacaagactcgggaaaaactaatgtggacattgaaaaggtcatgattacagacgaagaggaaatcaggaccaccaatcccgtggctacggagcagtatggttctgtatctaccaatctccagagcggcaacacacaagcagctacctcagatgtcaacacacaaggcgttcttccaggcatggtctggcaggacagagacgtgtacctgcagggacccatctgggcaaagattccacacacggacggacactttcacccttctcctcttatgggaggatttggactgaagcaccctcccccgcagattctcatcaagagtaccccggtacctgcgaatccttctaccaccctcagcgcggcaaagtttgcttccttcatcacacagtactccacggggcaggtcagcgtggagatcgagtgggagctgcagaaagagaacagcaaacgctggaaccccgagatccagtatacctccaactacaacaagtctgttaatgtggactttactgtggacactaatggcgtgtattcagagcctcgccccattggcacaagatacctgactcgtaatctgtaa

SEQ ID NO: 1199 - DNA, 2205 bp, Artificial Sequence
  Synthetic Polynucleotide
atggctgccgatggttatcttccagattggctcgaggacactctctctgaaggaataagacagtggtggaagctcaaacctggcccaccaccgccaaagcccgcagagcggcataaggacgacagcaggggtcttgtgcttcctgggtacaagtacctcggacccttcaacggactcgacaaaggagagccggtcaacgaggcagacgccgcggccctcgagcacgacaaggcctacgaccggcagctcgacagcggagacaacccgtacctcaagtacaaccacgccgacgcggagtttcaggagcgccttaaagaagatacgtcttttgggggcaacctcgcaagagcagtattccaggcgaaaaagagggttcttgaacctctgggcctggttgaggagcctgttaagacggctccgggaaaaaagaggccggtagagcactctcctgcggggccagattcctcctccggaactggaaagtcgggccaacagcctgcaagaaagagattgaattttggtcagactggagacgcagactccgtacctgacccccagcctctcggacagccaccagcagccccctctggtctgggaactaatacgatggcttcaggcagtggcgcaccaatggcagacaataacgagggcgccgacggagtgggtaattcctcgggaaattggcattgcgattccacatggatgggcgacagagtcatcaccaccagcacccgcacctgggctctgcccacctacaacaaccatctgtacaagcaaatttccagccagtctggagccagcaacgacaaccactactttggctacagcaccccttgggggtattttgacttcaacagattccactgccacttctccccacgtgactggcaaagactcatcaacaacaattggggattccggcccaaaagactcaacttcgagctctttaacattcaagtcaaggaggtcacgcagaatgacggtacgacgacgattgccaataaccttaccagcacggttcaggtgtttactgactcggagtaccagctcccgtacgtcctcggctcggcgcatcaaggatgcctcccgccgttcccagcagacgtcttcatggtgccacagtatggatacctcaccctgaacaacgggagtcaggcggtaggacgctcttcattttactgcctggagtactttccttctcagatgctgcgtaccggaaacaactttaccttcagctacacctttgaggacgttccttttcacagcagctacgctcacagccagagtttggaccgtctcatgaatcctctcatcgaccagtacctgtattacttgagcagaacaaacactccaagcggaaccactacgcagtccaggcttcagttttctcaagccggagcgagtgacattcgggaccagtctaggaactggcttcctggaccctgttaccgccagcagcgagtatcaaagacagctgcggacaacaacagtgattactcgtggactggagctaccaagtatcacctcaatggaagagactctctggtgaatccgggcacagccatggccagccacaaggacgatgaagaaaagtattttcctcagagcggggttctcatcttcggaaaacaagactcgggaaaaactaatgtggacattgaaaaggtcatgattacagacgaagaggaaatcaggaccaccaatcccgtggctacggagcagtatggttctgtatctaccaatctccagagcggcaacacacaagcagctacctcagatgtcaacacacaaggcgttcttccaggcatggtctggcaggacagagacgtgtacctgcagggacccatctgggcaaagattccacacacggacggacactttcacccttctcctcttatgggaggatttggactgaagcaccctcccccgcagattctcatcaagagtaccccggtacctgcgaatccttctaccaccttcagcgcggcaaagtttgcttccttcatcacacagtactccacggggcaggtcagcgtggagatcgagtgggagctgcagaaagagaacagcaaacgctggaaccccgagatccagtatacctccaactacaacaagtctgttaatgtggactttactgtggacactaatggcgtgtattcagagcctcgccccattggcacaagatacctgactcgtaatctgtaa

SEQ ID NO: 1200 - DNA, 2208 bp, Artificial Sequence
  Synthetic Polynucleotide
atggctgccgatggttatcttccagattggctcgaggacactctctctgaaggaataagacagtggtggaagctcaaacctggcccaccaccgccaaagcccgcagagcggcataaggacgacagcaggggtcttgtgcttcctgggtacaagtacctcggacccttcaacggactcgacaagggggagccggtcaacgaggcagacgccgcggccctcgagcacgacaaggcctacgaccggcagctcgacagcggagacaacccgtacctcaagtacaaccacgccgacgcggagtttcaggagcgtcttaaagaagatacgtcttttgggggcaacctcggacgaacagtcttccaggcgaaaaagagggttcttgaacctctgggcctggttgaggaacctgttaagacggctccgggaaaaaagaggccggtagagcactctcctgtggagccagactcctcctcgggaaccggaaaggcgggccagcagcctgcaagaaaaagattgaatttcggtcagactggagacgcagactccgtacctgacccccagcctctcggacagccaccagcagccccctctggtctgggaactaatacgatggctacaggcagtggcgcaccaatggcagacaataacgagggcgccgacggagtgggtaattcctcgggaaattggcattgcgattccacatggatgggcgacagagtcatcaccaccagcacccgcacctgggctctgcccacctacaacaaccatctgtacaagcaaatttccagccaatcaggagcatcgaacgacaaccactactttggctacagcaccccctgggggtattttgacttcaacagattccactgccacttttcgccacgtgactggcaaagactcatcaacaacaactggggattccggcccaagagactcagcttcaagctctttaacattcaagtcaaggaggtcacgcagaatgacggtacgacgacgattgccaataaccttaccagcacggttcaggtctttactgactcggagtaccagctcccgtacgtcctcggctcggcgcatcaaggatgcctcccgccgttcccagcagacgtcttcatggtgccacagtatggatacctcaccctgaacaacgggagtcaggcggtaggacgctcttcattttactgcctggagtacttcccttctcagatgcttcgcacgggaaacaactttaccttcagctacacctttgaggacgtgccttttcacagcagctacgctcacagccaaagtctggaccgtctcatgaatcctctcatcgaccaatacctgtattacttgagcaaaacaaacgctccaagcggaaccaccacgatgtccaggcttcagttttctcaggccggagcgagtgacattcgggaccagtctagaaactggcttcctggaccctgttaccgccagcagcgagtatcaaagacagctgcggacaacaacaacagtgattactcgtggactggagctaccaagtaccacctcaatggaagagactctctggtgaacccgggcccagctatggccagccacaaggatgatgaagaaaaatattttcctcagagcggggttctcatcttcgggaaacaaggctcaaataaaactaatgtggacattgaaaaggttatgattacagacgaagaggaaatcaggaccaccaatcccgtggctacggagcagtatggttctgtatctaccaaccttcaaagcggcaacacacaagcagctacctcagatgtcaacacacaaggcgttcttcctggcatggtctggcaggacagagatgtgtacctgcaggggcccatctgggcaaagattcctcacacggacggacactttcacccttctcccctcatgggcggatttggattgaagcaccctcccccacagattctcatcaagaataccccggtacctgcgaatccttcgaccaccttcagtgcggcaaagtttgcttccttcatcacacagtattccacgggacaggtcagcgtggagatagagtgggagctgcagaaggagaacagcaaacgctggaaccccgagatccagtatacttccaactacaacaaatctgttaatgtggactttactgtggacactaatggtgtgtattcagagcctcgccccattggcaccagatacctgactcgtaatctgtaa

SEQ ID NO: 1201 - DNA, 2208 bp, Artificial Sequence
  Synthetic Polynucleotide
atggctgccgatggttatcttccagattggctcgaggacactctctctgaaggaataagacagtggtggaagctcaaacctggcccaccaccgccaaagcccgcagagcggcataaggacgacagcaggggtcttgtgcttcctgggtacaagtacctcggacccttcaacggactcgacaagggggagccggtcaacgaggcagacgccgcggccctcgagcacgacaaggcctacgaccggcagctcgacagcggagacaacccgtacctcaagtacaaccacgccgacgcggagtttcaggagcgtcttaaagaagatacgtcttttgggggcaacctcggacgagcagtcttccaggcgaaaaagagggttcttgaacctctgggcctggttgaggaacctgttaagacggctccgggaaaaaagaggccggtagagcactctcctgtggagccagactcctcctcgggaaccggaaaggcgggccagcagcctgcaagaaaaagattgaatttcggtcagactggagacgcagactccgtacctgacccccagcctctcggacagccaccagcagccccctctggtctgggaactaatacgatggctacaggcagtggcgcaccaatggcagacaataacgagggcgccgacggagtgggtaattcctcgggaaattggcattgcgattccacatggatgggcgacagagtcatcaccaccagcacccgcacctgggctctgcccacctacaacaaccatctgtacaagcaaatttccagccaatcaggagcatcgaacgacaaccactactttggctacagcaccccctgggggtattttgacttcaacagattccactgccacttttcgccacgtgactggcaaagactcatcaacaacaactggggattccggcccaagagactcagcttcaagctctttaacattcaagtcaaggaggtcacgcagaatgacggtacgacgacgattgccaataaccttaccagcacggttcaggtctttactgactcggagtaccagctcccgtacgtcctcggctcggcgcatcaaggatgcctcccgccgttcccagcagacgtcttcatggtgccacagtatggatacctcaccctgaacaacgggagtcaggcggtaggacgctcttcattttactgcctggagtacttcccttctcagatgcttcgcacgggaaacaactttaccttcagctacacctttgaggacgtgccttttcacagcagctacgctcacagccaaagtctggaccgtctcatgaatcctctcatcgaccaatacctgtattacttgagcaaaacaaacgctccaagcggaaccaccacgatgtccaggcttcagttttctcaggccggagcgagtgacattcgggaccagtctagaaactggcttcctggaccctgttaccgccagcagcgagtatcaaagacagctgcggacaacaacaacagtgattactcgtggactggagctaccaagtaccacctcaatggaagagactctctggtgaacccgggcccagctatggccaaccacaaggatgatgaagaaaaatattttcctcagagcggggttctcatcttcgggaaacaaggctcaaataaaactaatgtggacattgaaaaggttatgattacagacgaagaggaaatcaggaccaccaatcccgtggctacggagcagtatggttctgtatctaccaaccttcaaagcggcaacacacaagcagctacctcagatgtcaacacacaaggcgttcttcctggcatggtctggcaggacagagatgtgtacctgcaggggcccatctgggcaaagattcctcacacggacggacactttcacccttctcccctcatgggcggatttggattgaagcaccctcccccacagattctcatcaagaataccccggtacctgcgaatccttcgaccaccttcagtgcggcaaagtttgcttccttcatcacacagtattccacgggacaggtcagcgtggagatagagtgggagctgcagaaggagaacagcaaacgctggaaccccgagatccagtatacttccaactacaacaaatctgttaatgtggactttactgtggacactaatggtgtgtattcagagcctcgccccattggcaccagatacctgactcgtaatctgtaa

SEQ ID NO: 1202 - DNA, 2208 bp, Artificial Sequence
  Synthetic Polynucleotide
atggctgccgatggttatcttccagattggctcgaggacactctctctgaaggaataagacagtggtggaagctcaaacctggcccaccaccgccaaagcccgcagagcggcataaggacgacagcaggggtcttgtgcttcctgggtacaagtacctcggacccttcaacggactcgacaagggggagccggtcaacgaggcagacgccgcggccctcgagcacgacaaggcctacgaccggcagctcgacagcggagacaacccgtacctcaagtacaaccacgccgacgcggagtttcaggagcgtcttaaagaagatacgtcttttgggggcaacctcggacgagcagtcttccaggcgaaaaagagggttcttgaacctctgggcctggttgaggaacctgttaagacggctccgggaaaaaagaggccggtagagcactctcctgtggagccagactcctcctcgggaaccggaaaggcgggccagcagcctgcaagaaaaagattgaatttcggtcagactggagacgcagactccgtacctgacccccagcctctcggacagccaccagcagccccctctggtctgggaactaatacgatggctacaggcagtggcgcaccaatggcagacaataacgagggcgccgacggagtgggtaattcctcgggaaattggcattgcgattccacatggatgggcgacagagtcatcaccaccagcacccgcacctgggctctgcccacctacaacaaccatctgtacaagcaaatttccagccaatcaggagcatcgaacgacaaccactactttggctacagcaccccctgggggtattttgacttcaacagattccactgccacttttcgccacgtgactggcaaagactcatcaacaacaactggggattccggcccaagagactcagcttcaagctctttaacattcaagtcaaggaggtcacgcagaatgacggtacgacgacgattgccaataaccttaccagcacggttcaggtctttactgactcggagtaccagctcccgtacgtcctcggctcggcgcatcaaggatgcctcccgccgttcccagcagacgtcttcatggtgccacagtatggatacctcaccctgaacaacgggagtcaggcggtaggacgctcttcattttactgcctggagtacttcccttctcagatgcttcgcacgggaaacaactttaccttcagctacacctttgaggacgtgccttttcacagcagctacgctcacagccaaagtctggaccgtctcatgaatcctctcatcgaccaatacctgtattacttgagcaaaacaaacgctccaagcggaaccaccacgatgtccaggcttcagttttctcaggccggagcgagtgacattcgggaccagtctagaaactggcttcctggaccctgttaccgccagcagcgagtatcaaagacagctgcggacaacaacaacagtgattactcgtggactggagctaccaagtaccacctcaatggaagagactctctggtgaacccgggcccagctatggccagccacaaggatgatgaagaaaaatattttcctcagagcggggttctcatcttcgggaaacaaggctcaaataaaactaatgtggacattgaaaaggttatgattacagacgaagaggaaatcaggaccaccaatcccgtggctacggagcagtatggttctgtatctaccaaccttcaaagcggcaacacacaagcagctacctcagatgtcaacacacaaggcgttcttcctggcatggtctggcaggacagagatgtgtacctgcaggggcccatctgggcaaagattcctcacacggacggacactttcacccttctcccctcatgggcggatttggattgaagcaccctcccccacagattctcatcaagaataccccggtacctgcgaatccttcgaccaccttcagtgcggcaaagtttgcttccttcatcacacagtattccacgggacaggtcagcgtggagatagagtgggagctgcagaaggagaacagcaaacgctggaaccccgagatccagtatacttccaactacaacaaatctgttaatgtggactttactgtggacactaatggtgtgtattcagagcctcgccccattggcaccagatacccgactcgtaatctgtaa

SEQ ID NO: 1203 - DNA, 2208 bp, Artificial Sequence
  Synthetic Polynucleotide
atggctgccgatggttatcttccagattggctcgaggacactctctctgaaggaataagacagtggtggaagctcaaacctggcccaccaccgccaaagcccgcagagcggcataaggacgacagcaggggtcttgtgcttcctgggtacaagtacctcggacccttcaacggactcgacaagggggagccggtcaacgaggcagacgccgcggccctcgagcacgacaaggcctacgaccggcagctcgacagcggagacaacccgtacctcaagtacaaccacgccgacgcggagtttcaggagcgtcttaaagaagatacgtcttttgggggcaacctcggacgagcagtcttccaggcgaaaaagagggttcttgaacctctgggcctggttgaggaacctgttaagacggctccgggaaaaaagaggccggtagagcactctcctgtggagccagactcctcctcgggaaccggaaaggcgggccagcagcctgcaagaaaaagattgaatttcggtcagactggagacgcagactccgtacctgacccccagcctctcggacagccaccagcagccccctctggtctgggaactaatacgatggctacaggcagtggcgcaccaatggcagacaataacgagggcgccgacggagtgggtaattcctcgggaaattggcattgcgattccacatggatgggcgacagagtcatcaccaccagcacccgcacctgggctctgcccacctacaacaaccatctgtacaagcaaatttccagccaatcaggagcatcgaacgacaaccactactttggctacagcaccccctgggggtattttgacttcaacagattccactgccacttttcgccacgtgactggcaaagactcatcaacaacaactggggattccggcccaagagactcagcttcaagctctttaacattcaagtcaaggaggtcacgcagaatgacggtacgacgacgattgccaataaccttaccagcacggttcaggtctttactgactcggagtaccagctcccgtacgtcctcggctcggcgcatcaaggatgcctcccgccgttcccagcagacgtcttcatggtgccacagtatggatacctcaccctgaacaacgggagtcaggcggtaggacgctcttcattttactgcctggagtacttcccttctcagatgcttcgcacgggaaacaactttaccttcagctacacctttgaggacgtgccttttcacagcagctacgctcacagccaaagtctggaccgtctcatgaatcctctcatcgaccaatacctgtattacttgagcaaaacaaacgctccaagcggaaccaccacgatgtccaggcttcagttttctcaggccggagcgagtgacattcgggaccagtctagaaactggcttcctggaccctgttaccgccagcagcgagtatcaaagacagctgcggacaacaacaacagtgattactcgtggactggagctaccaagtaccacctcaatggaagagactctctggtgaacccgggcccagctatggccagccacaaggatgatgaagaaaaatattttcctcagagcggggttctcatcttcgggaaacaaggctcaaataaaactaatgtggacattgaaaaggttatgattacagacgaagaggaaatcaggaccaccaatcccgtggctacggagcagtatggttctgtatctaccaaccttcaaagcggcaacacacaagcagctacctcagatgtcaacacacaaggcgttcttcctggcatggtctggcaggacagagatgtgtacctgcaggggcccatctgggcaaagattcctcacacggacggacactttcacccttctcccctcatgggcggatttggattgaagcaccctcccccacagattctcatcaagaataccccggtacctgcgaatccttcgaccaccttcagtgcggcaaagtttgcttccttcatcacacagtattccacgggacaggtcagcgtggagatagagtgggagctgcagaaggagaacagcaaacgctggaaccccgagatccagtatacttccaactacaacaaatctgttaatgtggactttactgtgggcactaatggtgtgtattcagagcctcgccccattggcaccagatacctgactcgtaatctgtaa

SEQ ID NO: 1204 - DNA, 2208 bp, Artificial Sequence
  Synthetic Polynucleotide
atggctgccgatggttatcttccagattggctcgaggacactctctctgaaggaataagacagtggtggaagctcaaacctggcccaccaccgccaaagcccgcagagcggcataaggacgacagcaggggtcttgtgcttcctgggtacaagtacctcggacccttcaacggactcgacaagggggagccggtcaacgaggcagacgccgcggccctcgagcacgacaaggcctacgaccggcagctcgacagcggagacaacccgtacctcaagtacaaccacgccgacgcggagtttcaggagcgtcttaaagaagatacgtcttttgggggcaacctcggacgagcagtcttccaggcgaaaaagagggttcttgaacctctgggcctggttgaggaacctgttaagacggctccgggaaaaaagaggccggtagagcactctcctgtggagccagactcctcctcgggaaccggaaaggcgggccagcagcctgcaagaaaaagattgaatttcggtcagactggagacgcagactccgtacctgacccccagcctctcggacagccaccagcagccccctctggtctgggaactaatacgatggctacaggcagtggcgcaccaatggcagacaataacgagggcgccgacggagtgggtaattcctcgggaaattggcattgcgattccacatggatgggcgacagagtcatcaccaccagcacccgcacctgggctctgcccacctacaacaaccatctgtacaagcaaatttccagccaatcaggagcatcgaacgacaaccactactttggctacagcaccccctgggggtattttgacttcaacagattccactgccacttttcgccacgtgactggcaaagactcatcaacaacaactggggattccggcccaagagactcagcttcaagctctttaacattcaagtcaaggaggtcacgcagaatgacggtacgacgacgattgccaataaccttaccagcacggttcaggtctttactgactcggagtaccagctcccgtacgtcctcggctcggcgcatcaaggatgcctcccgccgttcccagcagacgtcttcatggtgccacagtatggatacctcaccctgaacaacgggagtcaggcggtaggacgctcttcattttactgcctggagtacttcccttctcagatgcttcgcacgggaaacaactttaccttcagctacacctttgaggacgtgccttttcacagcagctacgctcacagccaaagtctggaccgtctcatgaatcctctcatcgaccaatacctgtattacttgagcaaaacaaacgctccaagcggaaccaccacgatgtccaggcttcagttttctcaggccggagcgagtgacattcgggaccagtctagaaactggcttcctggaccctgttaccgccagcagcgagtatcaaagacagctgcggacaacaacaacagtgattactcgtggactggagctaccaagtaccacctcaatggaagagactctctggtgaacccgggcccagctatggccagccacaaggatgatgaagaaaaatattttcctcagagcggggttctcatcttcgggaaacaaggctcaaataaaactaatgtggacattgaaaaggttatgattacagacgaagaggaaatcaggaccaccaatcccgtggctacggagcagtatggttctgtatctaccaaccttcaaagcggcaacacacaagcagctacctcagatgtcaacacacaaggcgttcttcctggcatggtctggcaggacagagatgtgtacctgcaggggcccatctgggcaaagattcctcacacggacggacactttcacccttctcccctcatgggcggatttggattgaagtaccctcccccacagattctcatcaagaataccccggtacctgcgaatccttcgaccaccttcagtgcggcaaagtttgcttccttcatcacacagtattccacgggacaggtcagcgtggagatagagtgggagctgcagaaggagaacagcaaacgctggaaccccgagatccagtatacttccaactacaacaaatctgttaatgtggactttactgtggacactaatggtgtgtattcagagcctcgccccattggcaccagatacctgactcgtaatctgtaa

SEQ ID NO: 1205 - DNA, 2208 bp, Artificial Sequence
  Synthetic Polynucleotide
atggctgccgatggttatcttccagattggctcgaggacactctctctgaaggaataagacagtggtggaagctcaaacctggcccaccaccgccaaagcccgcagagcggcataaggacgacagcaggggtcttgtgcttcctgggtacaagtacctcggacccttcaacggactcgacaagggggagccggtcaacgaggcagacgccgcggccctcgagcacgacaaggcctacgaccggcagctcgacagcggagacaacccgtacctcaagtacaaccacgccgacgcggagtttcaggagcgtcttaaagaagatacgtcttttgggggcaacctcggacgagcagtcttccaggcgaaaaagagggttcttgaacctctgggcctggttgaggaacctgttaagacggctccgggaaaaaagaggccggtagagcactctcctgtggagccagactcctcctcgggaaccggaaaggcgggccagcagcctgcaagaaaaagattgaatttcggtcagactggagacgcagactccgtacctgacccccagcctctcggacagccaccagcagccccctctggtctgggaactaatacgatggctacaggcagtggcgcaccaatggcagacaataacgagggcgccgacggagtgggtaattcctcgggaaattggcattgcgattccacatggatgggcgacagagtcatcaccaccagcacccgcacctgggctctgcccacctacaacaaccatctgtacaagcaaatttccggccaatcaggagcatcgaacgacaaccactactttggctacagcaccccctgggggtattttgacttcaacagattccactgccacttttcgccacgtgactggcaaagactcatcaacaacaactggggattccggcccaagagactcagcttcaagctctttaacattcaagtcaaggaggtcacgcagaatgacggtacgacgacgattgccaataaccttaccagcacggttcaggtctttactgactcggagtaccagctcccgtacgtcctcggctcggcgcatcaaggatgcctcccgccgttcccagcagacgtcttcatggtgccacagtatggatacctcaccctgaacaacgggagtcaggcggtaggacgctcttcattttactgcctggagtacttcccttctcagatgcttcgcacgggaaacaactttaccttcagctacacctttgaggacgtgccttttcacagcagctacgctcacagccaaagtctggaccgtctcatgaatcctctcatcgaccaatacctgtattacttgagcaaaacaaacgctccaagcggaaccaccacgatgtccaggcttcagttttctcaggccggagcgagtgacattcgggaccagtctagaaactggcttcctggaccctgttaccgccagcagcgagtatcaaagacagctgcggacaacaacaacagtgattactcgtggactggagctaccaagtaccacctcaatggaagagactctctggtgaacccgggcccagctatggccagccacaaggatgatgaagaaaaatattttcctcagagcggggttctcatcttcgggaaacaaggctcaaataaaactaatgtggacattgaaaaggttatgattacagacgaagaggaaatcaggaccaccaatcccgtggctacggagcagtatggttctgtatctaccaaccttcaaagcggcaacacacaagcagctacctcagatgtcaacacacaaggcgttcttcctggcatggtctggcaggacagagatgtgtacctgcaggggcccatctgggcaaagattcctcacacggacggacactttcacccttctcccctcatgggcggatttggattgaagcaccctcccccacagattctcatcaagaataccccggtacctgcgaatccttcgaccaccttcagtgcggcaaagtttgcttccttcatcacacagtattccacgggacaggtcagcgtggagatagagtgggagctgcagaaggagaacagcaaacgctggaaccccgagatccagtatacttccaactacaacaaatctgttaatgtggactttactgtggacactaatggtgtgtattcagagcctcgccccattggcaccagatacctgactcgtaatctgtaa

SEQ ID NO: 1206 - DNA, 2208 bp, Artificial Sequence
  Synthetic Polynucleotide
atggctgccgatggttatcttccagattggctcgaggacactctctctgaaggaataagacagtggtggaagctcaaacctggcccaccaccgccaaagcccgcagagcggcataaggacgacagcaggggtcttgtgcttcctgggtacaagtacctcggacccttcaacggactcgacaagggggagccggtcaacgaggcagacgccgcggccctcgagcacgacaaggcctacgaccggcagctcgacagcggagacaacccgtacctcaagtacaaccacgccgacgcggagtttcaggagcgtcttaaagaagatacgtcttttgggggcaacctcggacgagcagtcttccaggcgaaaaagagggttcttgaacctctgggcctggttgaggaacctgttaagacggctccgggaaaaaagaggccggtagagcactctcctgtggagccagactcctcctcgggaaccggaaaggcgggccagcagcctgcaagaaaaagattgaatttcggtcagactggagacgcagactccgtacctgacccccagcctctcggacagccaccagcagccccctctggtctgggaactaatacgatggctacaggcagtggcgcaccaatggcagacaataacgagggcgccgacggagtgggtaattcctcgggaaattggcattgcgattccacatggatgggcgacagagtcatcaccaccagcacccgcacctgggctctgcccacctacaacaaccatctgtacaagcaaatttccagccaatcaggagcatcgaacgacaaccactactttggctacagcaccccctgggggtattttgacttcaacagattccactgccacttttcgccacgtgactggcaaagactcatcaacaacaactggggattccggcccaagagactcagcttcaagctctttaacattcaagtcaaggaggtcacgcagaatgacggtacgacgacgattgccaataaccttaccagcacggttcaggtctttactgactcggagtaccggctcccgtacgtcctcggctcggcgcatcaaggatgcctcccgccgttcccagcagacgtcttcatggtgccacagtatggatacctcaccctgaacaacgggagtcaggcggtaggacgctcttcattttactgcctggagtacttcccttctcagatgcttcgcacgggaaacaactttaccttcagctacacctttgaggacgtgccttttcacagcagctacgctcacagccaaagtctggaccgtctcatgaatcctctcatcgaccaatacctgtattacttgagcaaaacaaacgctccaagcggaaccaccacgatgtccaggcttcagttttctcaggccggagcgagtgacattcgggaccagtctagaaactggcttcctggaccctgttaccgccagcagcgagtatcaaagacagctgcggacaacaacaacagtgattactcgtggactggagctaccaagtaccacctcaatggaagagactctctggtgaacccgggcccagctatggccagccacaaggatgatgaagaaaaatattttcctcagagcggggttctcatcttcgggaaacaaggctcaaataaaactaatgtggacattgaaaaggttatgattacagacgaagaggaaatcaggaccaccaatcccgtggctacggagcagtatggttctgtatctaccaaccttcaaagcggcaacacacaagcagctacctcagatgtcaacacacaaggcgttcttcctggcatggtctggcaggacagagatgtgtacctgcaggggcccatctgggcaaagattcctcacacggacggacactttcacccttctcccctcatgggcggatttggattgaagcaccctcccccacagattctcatcaagaataccccggtacctgcgaatccttcgaccaccttcagtgcggcaaagtttgcttccttcatcacacagtattccacgggacaggtcagcgtggagatagagtgggagctgcagaaggagaacagcaaacgctggaaccccgagatccagtatacttccaactacaacaaatctgttaatgtggactttactgtggacactaatggtgtgtattcagagcctcgccccattggcaccagatacctgactcgtaatctgtaa

SEQ ID NO: 1207 - DNA, 2208 bp, Artificial Sequence
  Synthetic Polynucleotide
atggctgccgatggttatcttccagattggctcgaggacactctctctgaaggaataagacagtggtggaagctcaaacctggcccaccaccgccaaagcccgcagagcggcataaggacgacagcaggggtcttgtgcttcctgggtacaagtacctcggacccttcaacggactcgacaagggggagccggtcaacgaggcagacgccgcggccctcgagcacgacaaggcctacgaccggcagctcgacagcggagacaacccgtacctcaagtacaaccacgccgacgcggagtttcaggagcgtcttaaagaagatacgtcttttgggggcaacctcggacgagcagtcttccaggcgaaaaagagggttcttgaacctctgggcctggttgaggaacctgttaagacggctccgggaaaaaagaggccggtagagcactctcctgtggagccagactcctcctcgggaaccggaaaggcgggccagcagcctgcaagaaaaagattgaatttcggtcagactggagacgcagactccgtacctgacccccagcctctcggacagccaccagcagccccctctggtctgggaactaatacgatggctacaggcagtggcgcaccaatggcagacaataacgagggcgccgacggagtgggtaattcctcgggaaattggcattgcgattccacatggatgggcgacagagtcatcaccaccagcacccgcacctgggctctgcccacctacaacaaccatctgtacaagcaaatttccagccaatcaggagcatcgaacgacaaccactactttggctacagcaccccctgggggtattttgacttcaacagattccactgccacttttcgccacgtgactggcaaagactcatcaacaacaactggggattccggcccaagagactcagcttcaagctctttaacattcaagtcaaggaggtcacgcagaatgacggtacgacgacgattgccaataaccttaccagcacggttcaggtctttactgactcggagtaccagctcccgtacgtcctcggctcggcgcatcgaggatgcctcccgccgttcccagcagacgtcttcatggtgccacagtatggatacctcaccctgaacaacgggagtcaggcggtaggacgctcttcattttactgcctggagtacttcccttctcagatgcttcgcacgggaaacaactttaccttcagctacacctttgaggacgtgccttttcacagcagctacgctcacagccaaagtctggaccgtctcatgaatcctctcatcgaccaatacctgtattacttgagcaaaacaaacgctccaagcggaaccaccacgatgtccaggcttcagttttctcaggccggagcgagtgacattcgggaccagtctagaaactggcttcctggaccctgttaccgccagcagcgagtatcaaagacagctgcggacaacaacaacagtgattactcgtggactggagctaccaagtaccacctcaatggaagagactctctggtgaacccgggcccagctatggccagccacaaggatgatgaagaaaaatattttcctcagagcggggttctcatcttcgggaaacaaggctcaaataaaactaatgtggacattgaaaaggttatgattacagacgaagaggaaatcaggaccaccaatcccgtggctacggagcagtatggttctgtatctaccaaccttcaaagcggcaacacacaagcagctacctcagatgtcaacacacaaggcgttcttcctggcatggtctggcaggacagagatgtgtacctgcaggggcccatctgggcaaagattcctcacacggacggacactttcacccttctcccctcatgggcggatttggattgaagcaccctcccccacagattctcatcaagaataccccggtacctgcgaatccttcgaccaccttcagtgcggcaaagtttgcttccttcatcacacagtattccacgggacaggtcagcgtggagatagagtgggagctgcagaaggagaacagcaaacgctggaaccccgagatccagtatacttccaactacaacaaatctgttaatgtggactttactgtggacactaatggtgtgtattcagagcctcgccccattggcaccagatacctgactcgtaatctgtaa

SEQ ID NO: 1208 - DNA, 2208 bp, Artificial Sequence
  Synthetic Polynucleotide
atggctgccgatggttatcttccagattggctcgaggacactctctctgaaggaataagacagtggtggaagctcaaacctggcccaccaccgccaaagcccgcagagcggcataaggacgacagcaggggtcttgtgcttcctgggtacaagtacctcggacccttcaacggactcgacaagggggagccggtcaacgaggcagacgccgcggccctcgagcacgacaaggcctacgaccggcagctcgacagcggagacaacccgtacctcaagtacaaccacgccgacgcggagtttcaggagcgtcttaaagaagatacgtcttttgggggcaacctcggacgagcagtcttccaggcgaaaaagagggttcttgaacctctgggcctggttgaggaacctgttaagacggctccgggaaaaaagaggccggtagagcactctcctgtggagccagactcctcctcgggaaccggaaaggcgggccagcagcctgcaagaaaaagattgaatttcggtcagactggagacgcagactccgtacctgacccccagcctctcggacagccaccagcagccccctctggtctgggaactaatacgatggctacaggcagtggcgcaccaatggcagacaataacgagggcgccgacggagtgggtaattcctcgggaaattggcattgcgattccacatggatgggcgacagagtcatcaccaccagcacccgcacctgggctctgcccacctacaacaaccatctgtacaagcaaatttccagccaatcaggagcatcgaacgacaaccactactttggctacagcaccccctgggggtattttgacttcaacagattccactgccacttttcgccacgtgactggcaaagactcatcaacaacaactggggattccggcccaagagactcagcttcaagctctttaacattcaagtcaaggaggtcacgcagaatgacggtacgacgacgattgccaataaccttaccagcacggttcaggtctttactgactcggagtaccagctcccgtacgtcctcggctcggcgcatcaaggatgcctcccgccgttcccagcagacgtcttcatggtgccacagtatggatacctcaccctgaacaacgggagtcaggcggtaggacgctcttcattttactgcctggagtacttcccttctcagatgcttcgcgcgggaaacaactttaccttcagctacacctttgaggacgtgccttttcacagcagctacgctcacagccaaagtctggaccgtctcatgaatcctctcatcgaccaatacctgtattacttgagcaaaacaaacgctccaagcggaaccaccacgatgtccaggcttcagttttctcaggccggagcgagtgacattcgggaccagtctagaaactggcttcctggaccctgttaccgccagcagcgagtatcaaagacagctgcggacaacaacaacagtgattactcgtggactggagctaccaagtaccacctcaatggaagagactctctggtgaacccgggcccagctatggccagccacaaggatgatgaagaaaaatattttcctcagagcggggttctcatcttcgggaaacaaggctcaaataaaactaatgtggacattgaaaaggttatgattacagacgaagaggaaatcaggaccaccaatcccgtggctacggagcagtatggttctgtatctaccaaccttcaaagcrgcaacacacaagcagctacctcagatgtcaacacacaaggcgttcttcctggcatggtctggcaggacagagatgtgtacctgcaggggcccatctgggcaaagattcctcacacggacggacactttcacccttctcccctcatgggcggatttggattgaagcaccctcccccacagattctcatcaagaataccccggtacctgcgaatccttcgaccaccttcagtgcggcaaagtttgcttccttcatcacacagtattccacgggacaggtcagcgtggagatagagtgggagctgcagaaggagaacagcaaacgctggaaccccgagatccagtatacttccaactacaacaaatctgttaatgtggactttactgtggacactaatggtgtgtattcagagcctcgccccattggcaccagatacctgactcgtaatctgtaa

SEQ ID NO: 1209 - DNA, 2208 bp, Artificial Sequence
  Synthetic Polynucleotide
atggctgccgatggttatcttccagattggctcgaggacactctctctgaaggaataagacagtggtggaagctcaaacctggcccaccaccgccaaagcccgcagagcggcataaggacgacagcaggggtcttgtgcttcctgggtacaagtacctcggacccttcaacggactcgacaagggggagccggtcaacgaggcagacgccgcggccctcgagcacgacaaggcctacgaccggcagctcgacagcggagacaacccgtacctcaagtacaaccacgccgacgcggagtttcaggagcgtcttaaagaagatacgtcttttgggggcaacctcggacgagcagtcttccaggcgaaaaagagggttcttgaacctctgggcctggttgaggaacctgttaagacggctccgggaaaaaagaggccggtagagcactctcctgtggagccagactcctcctcgggaaccggaaaggcgggccagcagcctgcaagaaaaagattgaatttcggtcagactggagacgcagactccgtacctgacccccagcctctcggacagccaccagcagccccctctggtctgggaactaatacgatggctacaggcagtggcgcaccaatggcagacaataacgagggcgccgacggagtgggtaattcctcgggaaattggcattgcgattccacatggatgggcgacagagtcatcaccaccagcacccgcacctgggctctgcccacctacaacaaccatctgtacaagcaaatttccagccaatcaggagcatcgaacgacaaccactactttggctacagcaccccctgggggtattttgacttcaacagattccactgccacttttcgccacgtgactggcaaagactcatcaacaacaactggggattccggcccaagagactcggcttcaagctctttaacattcaagtcaaggaggtcacgcagaatgacggtacgacgacgattgccaataaccttaccagcacggttcaggtctttactgactcggagtaccagctcccgtacgtcctcggctcggcgcatcaaggatgcctcccgccgttcccagcagacgtcttcatggtgccacagtatggatacctcaccctgaacaacgggagtcaggcggtaggacgctcttcattttactgcctggagtacttcccttctcagatgcttcgcacgggaaacaactttaccttcagctacacctttgaggacgtgccttttcacagcagctacgctcacagccaaagtctggaccgtctcatgaatcctctcatcgaccaatacctgtattacttgagcaaaacaaacgctccaagcggaaccaccacgatgtccaggcttcagttttctcaggccggagcgagtgacattcgggaccagtctagaaactggcttcctggaccctgttaccgccagcagcgagtatcaaagacagctgcggacaacaacaacagtgattactcgtggactggagctaccaagtaccacctcaatggaagagactctctggtgaacccgggcccagctatggccagccacaaggatgatgaagaaaaatattttcctcagagcggggttctcatcttcgggaaacaaggctcaaataaaactaatgtggacattgaaaaggttatgattacagacgaagaggaaatcaggaccaccaatcccgtggctacggagcagtatggttctgtatctaccaaccttcaaagcggcaacacacaagcagctacctcagatgtcaacacacaaggcgttcttcctggcatggtctggcaggacagagatgtgtacctgcaggggcccatctgggcaaagattcctcacacggacggacactttcacccttctcccctcatgggcggatttggattgaagcaccctcccccacagattctcatcaagaataccccggtacctgcgaatccttcgaccaccttcagtgcggcaaagtttgcttccttcatcacacagtattccacgggacaggtcagcgtggagatagagtgggagctgcagaaggagaacagcaaacgctggaaccccgagatccagtatacttccaactacaacaaatctgttaatgtggactttactgtggacactaatggtgtgtattcagagcctcgccccattggcaccagatacctgactcgtaatctgtaa

SEQ ID NO: 1210 - DNA, 2208 bp, Artificial Sequence
  Synthetic Polynucleotide
atggctgccgatggttatcttccagattggctcgaggacactctctctgaaggaataagacagtggtggaagctcaaacctggcccaccaccgccaaagcccgcagagcggcataaggacgacagcaggggtcttgtgcttcctgggtacaagtacctcggacccttcaacggactcgacaagggggagccggtcaacgaggcagacgccgcggccctcgagcacgacaaggcctacgaccggcagctcgacagcggagacaacccgtacctcaagtacaaccacgccgacgcggagtttcaggagcgtcttaaagaagatacgtcttttgggggcaacctcggacgagcagtcttccaggcgaaaaagagggttcttgaacctctgggcctggttgaggaacctgttaagacggctccgggaaaaaagaggccggtagagcactctcctgtggagccagactcctcctcgggaaccggaaaggcgggccagcagcctgcaagaaaaagattgaatttcggtcagactggagacgcagactccgtacctgacccccagcctctcggacagccaccagcagccccctctggtctgggaactaatacgatggctacaggcagtggcgcaccaatggcagacaataacgagggcgccgacggagtgggtaattcctcgggaaattggcattgcgattccacatggatgggcgacagagtcatcaccaccagcacccgcacctgggctctgcccacctacaacaaccatctgtacaagcaaatttccagccaatcaggagtatcgaacgacaaccactactttggctacagcaccccctgggggtattttgacttcaacagattccactgccacttttcgccacgtgactggcaaagactcatcaacaacaactggggattccggcccaagagactcagcttcaagctctttaacattcaagtcaaggaggtcacgcagaatgacggtacgacgacgattgccaataaccttaccagcacggttcaggtctttactgactcggagtaccagctcccgtacgtcctcggctcggcgcatcaaggatgcctcccgccgttcccagcagacgtcttcatggtgccacagtatggatacctcaccctgaacaacgggagtcaggcggtaggacgctcttcattttactgcctggagtacttcccttctcagatgcttcgcacgggaaacaactttaccttcagctacacctttgaggacgtgccttttcacagcagctacgctcacagccaaagtctggaccgtctcatgaatcctctcatcgaccaatacctgtattacttgagcaaaacaaacgctccaagcggaaccaccacgatgtccaggcttcagttttctcaggccggagcgagtgacattcgggaccagtctagaaactggcttcctggaccctgttaccgccagcagcgagtatcaaagacagctgcggacaacaacaacagtgattactcgtggactggagctaccaagtaccacctcaatggaagagactctctggtgaacccgggcccagctatggccagccacaaggatgatgaagaaaaatattttcctcagagcggggttctcatcttcgggaaacaaggctcaaataaaactaatgtggacattgaaaaggttatgattacagacgaagaggaaatcaggaccaccaatcccgtggctacggagcagtatggttctgtatctaccaaccttcaaagcggcaacacacaagcagctacctcagatgtcaacacacaaggcgttcttcctggcatggtctggcaggacagagatgtgtacctgcaggggcccatctgggcaaagattcctcacacggacggacactttcacccttctcccctcatgggcggatttggattgaagcaccctcccccacagattctcatcaagaataccccggtacctgcgaatccttcgaccaccttcagtgcggcaaagtttgcttccttcatcacacagtattccacgggacaggtcagcgtggagatagagtgggagctgcagaaggagaacagcaaacgctggaaccccgagatccagtatacttccaactacaacaaatctgttaatgtggactttactgtggacactaatggtgtgtattcagagcctcgccccattggcaccagatacctgactcgtaatctgtaa

SEQ ID NO: 1211 - DNA, 2208 bp, Artificial Sequence
  Synthetic Polynucleotide
atggctgccgatggttatcttccagattggctcgaggacactctctctgaaggaataagacagtggtggaagctcaaacctggcccaccaccgccaaagcccgcagagcggcataaggacgacagcaggggtcttgtgcttcctgggtacaagtacctcggacccttcaacggactcgacaagggggagccggtcaacgaggcagacgccgcggccctcgagcacgacaaggcctacgaccggcagctcgacagcggagacaacccgtacctcaagtacaaccacgccgacgcggagtttcaggagcgtcttaaagaagatacgtcttttgggggcaacctcggacgagcagtcttccaggcgaaaaagagggttcttgaacctctgggcctggttgaggaacctgttaagacggctccgggaaaaaagaggccggtagagcactctcctgtggagccagactcctcctcgggaaccggaaaggcgggccagcagcctgcaagaaaaagattgaatttcggtcagactggagacgcagactccgtacctgacccccagcctctcggacagccaccagcagccccctctggtctgggaactaatacgatggctacaggcagtggcgcaccaatggcagacaataacgagggcgccgacggagtgggtaattcctcgggaaattggcattgcgattccacatggatgggcgacagagtcatcaccaccagcacccgcacctgggctctgcccacctacaacaaccatctgtacaagcaaatttccagccaatcaggagcatcgaacgacaaccactactttggctacagcaccccctgggggtattttgacttcaacagattccactgccacttttcgccacgtgactggcaaagactcatcaacaacaactggggattccggcccaagagactcagcttcaagctctttaacattcaagtcaaggaggtcacgcagaatgacggtacgacgacgattgccaataaccttaccagcacggttcaggtctttactgactcggagtaccagctcccgtacgtcctcggctcggcgcatcaaggatgcctcccgccgttcccagcagacgtcttcatggtgccacagtatggatacctcaccctgaacaacgggagtcaggcggtaggacgctcttcattttactgcctggagtacttcccttctcagatgcttcgcacgggaaacaactttaccttcagctacacctttgaggacgtgccttttcacagcagctacgctcacagccaaagtctggaccgtctcatgaatcctctcatcgaccaatacctgtattacttgagcaaaacaaacgctccaagcggaaccaccacgatgtccaggcttcagttttctcaggccggagcgagtgacattcgggaccagtctagaaactggcttcctggaccctgttaccgccagcagcgagtatcaaagacagctgcggacaacaacaacagtgattactcgtggactggagctaccaagtaccacctcaatggaagagactctctggtgaacccgggcccagctatggccagccacaaggatgatgaagaaaaatattttcctcagagcggggttctcatcttcgggaaacaaggctcaaataaaactaatgtggacattgaaaaggttatgattacagacgaagaggaaatcaggaccaccaatcccatggctacggagcagtatggttctgtatctaccaaccttcaaagcggcaacacacaagcagctacctcagatgtcaacacacaaggcgttcttcctggcatggtctggcaggacagagatgtgtacctgcaggggcccatctgggcaaagattcctcacacggacggacactttcacccttctcccctcatgggcggatttggattgaagcaccctcccccacagattctcatcaagaataccccggtacctgcgaatccttcgaccaccttcagtgcggcaaagtttgcttccttcatcacacagtattccacgggacaggtcagcgtggagatagagtgggagctgcagaaggagaacagcaaacgctggaaccccgagatccagtatacttccaactacaacaaatctgttaatgtggactttactgtggacactaatggtgtgtattcagagcctcgccccattggcaccagatacctgactcgtaatctgtaa

SEQ ID NO: 1212 - DNA, 2208 bp, Artificial Sequence
  Synthetic Polynucleotide
atggctgccgatggttatcttccagattggctcgaggacactctctctgaaggaataagacagtggtggaagctcaaacctggcccaccaccgccaaagcccgcagagcggcataaggacgacagcaggggtcttgtgcttcctgggtacaagtacctcggacccttcaacggactcgacaagggggagccggtcaacgaggcagacgccgcggccctcgagcacgacaaggcctacgaccggcagctcgacagcggagacaacccgtacctcaagtacaaccacgccgacgcggagtttcaggagcgtcttaaagaagatacgtcttttgggggcaacctcggacgagcagtcttccaggcgaaaaagagggttcttgaacctctgggcctggttgaggaacctgttaagacggctccgggaaaaaagaggccgatagagcactctcctgtggagccagactcctcctcgggaaccggaaaggcgggccagcagcctgcaagaaaaagattgaatttcggtcagactggagacgcagactccgtacctgacccccagcctctcggacagccaccagcagccccctctggtctgggaactaatacgatggctacaggcagtggcgcaccaatggcagacaataacgagggcgccgacggagtgggtaattcctcgggaaattggcattgcgattccacatggatgggcgacagagtcatcaccaccagcacccgcacctgggctctgcccacctacaacaaccatctgtacaagcaaatttccagccaatcaggagcatcgaacgacaaccactactttggctacagcaccccctgggggtattttgacttcaacagattccactgccacttttcgccacgtgactggcaaagactcatcaacaacaactggggattccggcccaagagactcagcttcaagctctttaacattcaagtcaaggaggtcacgcagaatgacggtacgacgacgattgccaataaccttaccagcacggttcaggtctttactgactcggagtaccagctcccgtacgtcctcggctcggcgcatcaaggatgcctcccgccgttcccagtagacgtcttcatggtgccacagtatggatacctcaccctgaacaacgggagtcaggcggtaggacgctcttcattttactgcctggagtacttcccttctcagatgcttcgcacgggaaacaactttaccttcagctacacctttgaggacgtgccttttcacagcagctacgctcacagccaaagtctggaccgtctcatgaatcctctcatcgaccaatacctgtattacttgagcaaaacaaacgctccaagcggaaccaccacgatgtccaggcttcagttttctcaggccggagcgagtgacattcgggaccagtctagaaactggcttcctggaccctgttaccgccagcagcgagtatcaaagacagctgcggacaacaacaacagtgattactcgtggactggagctaccaagtaccacctcaatggaagagactctctggtgaacccgggcccagctatggccagccacaaggatgatgaagaaaaatattttcctcagagcggggttctcatcttcgggaaacaaggctcaaataaaactaatgtggacattgaaaaggttatgattacagacgaagaggaaatcaggaccaccaatcccgtggctacggagcagtatggttctgtatctaccaaccttcaaagcggcaacacacaagcagctacctcagatgtcaacacacaaggcgttcttcctggcatggtctggcaggacagagatgtgtacctgcaggggcccatctgggcaaagattcctcacacggacggacactttcacccttctcccctcatgggcggatttggattgaagcaccctcccccacagattctcatcaagaataccccggtacctgcgaatccttcgaccaccttcagtgcggcaaagtttgcttccttcatcacacagtattccacgggacaggtcagcgtggagatagagtgggagctgcagaaggagaacagcaaacgctggaaccccgagatccagtatacttccaactacaacaaatctgttaatgtggactttactgtggacactaatggtgtgtattcagagcctcgccccattggcaccagatacctgactcgtaatctgtaa

SEQ ID NO: 1213 - DNA, 2208 bp, Artificial Sequence
  Synthetic Polynucleotide
atggctgccgatggttatcttccagattggctcgaggacactctctctgaaggaataagacagtggtggaagctcaaacctggcccaccaccgccaaagcccgcagagcggcataaggacgacagcaggggtcttgtgcttcctgggtacaagtacctcggacccttcaacggactcgacaagggggagccggtcaacgaggcagacgccgcggccctcgagcacgacaaggcctacgaccggcagctcgacagcggagacaacccgtacctcaagtacaaccacgccgacgcggagtttcaggagcgtcttaaagaagatacgtcttttgggggcaacctcggacgagcagtcttccaggcgaaaaagagggttcttgaacctctgggcctggttgaggaacctgttaagacggctccgggaaaaaagaggccggtagagcactctcctgtggagccagactcctcctcgggaaccggaaaggcgggccagcagcctgcaagaaaaagattgaatttcggtcagactggagacgcagactccgtacctgacccccagcctctcggacagccaccagcagccccctctggtctgggaactaatacgatgactacaggcagtggcgcaccaatggcagacaataacgagggcgccgacggagtgggtaattcctcgggaaattggcattgcgattccacatggatgggcgacagagtcatcaccaccagcacccgcacctgggctctgcccacctacaacaaccatctgtacaagcaaatttccagccaatcaggagcatcgaacgacaaccactactttggctacagcaccccctgggggtattttgacttcaacagattccactgccacttttcgccacgtgactggcaaagactcatcaacaacaactggggattccggcccaagagactcagcttcaagctctttaacattcaagtcaaggaggtcacgcagaatgacggtacgacgacgattgccaataaccttaccagcacggttcaggtctttactgactcggagtaccagctcccgtacgtcctcggctcggcgcatcaaggatgcctcccgccgttcccagcagacgtcttcatggtgccacagtatggatacctcaccctgaacaacgggagtcaggcggtaggacgctcttcattttactgcctggagtacttcccttctcagatgcttcgcacgggaaacaactttaccttcagctacacctttgaggacgtgccttttcacagcagctacgctcacagccaaagtctggaccgtctcatgaatcctctcatcgaccaatacctgtattacttgagcaaaacaaacgctccaagcggaaccaccacgatgtccaggcttcagttttctcaggccggagcgagtgacattcgggaccagtctagaaactggcttcctggaccctgttaccgccagcagcgagtatcaaagacagctgcggacaacaacaacagtgattactcgtggactggagctaccaagtaccacctcaatggaagagactctctggtgaacccgggcccagctatggccagccacaaggatgatgaagaaaaatattttcctcagagcggggttctcatcttcgggaaacaaggctcaaataaaactaatgtggacattgaaaaggttatgattacagacgaagaggaaatcaggaccaccaatcccgtggctacggagcagtatggttctgtatctaccaaccttcaaagcggcaacacacaagcagctacctcagatgtcaacacacaaggcgttcttcctggcatggtctggcaggacagagatgtgtacctgcaggggcccatctgggcaaagattcctcacacggacggacactttcacccttctcccctcatgggcggatttggattgaagcaccctcccccacagattctcatcaagaataccccggtacctgcgaatccttcgaccaccttcagtgcggcaaagtttgcttccttcatcacacagtattccacgggacaggtcagcgtggagatagagtgggagctgcagaaggagaacagcaaacgctggaaccccgagatccagtatacttccaactacaacaaatctgttaatgtggactttactgtggacactaatggtgtgtattcagagcctcgccccattggcaccagatacctgactcgtaatctgtaa

SEQ ID NO: 1214 - DNA, 2208 bp, Artificial Sequence
  Synthetic Polynucleotide
atggctgccgatggttatcttccagattggctcgaggacactctctctgaaggaataagacagtggtggaagctcaaacctggcccaccaccgccaaagcccgcagagcggcataaggacgacagcaggggtcttgtgcttcctgggtacaagtacctcggacccttcaacggactcgacaagggggagccggtcaacgaggcagacgccgcggccctcgagcacgacaaggcctacgaccggcagctcgacagcggagacaacccgtacctcaagtacaaccacgccgacgcggagtttcaggagcgtcttaaagaagatacgtcttttgggggcaacctcggacgagcagtcttccaggcgaaaaagagggttcttgaacctctgggcctggttgaggaacctgttaagacggctccgggaaaaaagaggtcggtagagcactctcctgtggagccagactcctcctcgggaaccggaaaggcgggccagcagcctgcaagaaaaagattgaatttcggtcagactggagacgcagactccgtacctgacccccagcctctcggacagccaccagcagccccctctggtctgggaactaatacgatggctacaggcagtggcgcaccaatggcagacaataacgagggcgccgacggagtgggtaattcctcgggaaattggcattgcgattccacatggatgggcgacagagtcatcaccaccagcacccgcacctgggctctgcccacctacaacaaccatctgtacaagcaaatttccagccaatcaggagcatcgaacgacaaccactactttggctacagcaccccctgggggtattttgacttcaacagattccactgccacttttcgccacgtgactggcaaagactcatcaacaacaactggggattccggcccaagagactcagcttcaagctctttaacattcaagtcaaggaggtcacgcagaatgacggtacgacgacgattgccaataaccttaccagcacggttcaggtctttactgactcggagtaccagctcccgtacgtcctcggctcggcgcatcaaggatgcctcccgccgttcccagcagacgtcttcatggtgccacagtatggatacctcaccctgaacaacgggagtcaggcggtaggacgctcttcattttactgcctggagtacttcccttctcagatgcttcgcacgggaaacaactttaccttcagctacacctttgaggacgtgccttttcacagcagctacgctcacagccaaagtctggaccgtctcatgaatcctctcatcgaccaatacctgtattacttgagcaaaacaaacgctccaagcggaaccaccacgatgtccaggcttcagttttctcaggccggagcgagtgacattcgggaccagtctagaaactggcttcctggaccctgttaccgccagcagcgagtatcaaagacagctgcggacaacaacaacagtgattactcgtggactggagctaccaagtaccacctcaatggaagagactctctggtgaacccgggcccagctatggccagccacaaggatgatgaagaaaaatattttcctcagagcggggttctcatcttcgggaaacaaggctcaaataaaactaatgtggacattgaaaaggttatgattacagacgaagaggaaatcaggaccaccaatcccgtggctacggagcagtatggttctgtatctaccaaccttcaaagcggcaacacacaagcagctacctcagatgtcaacacacaaggcgttcttcctggcatggtctggcaggacagagatgtgtacctgcaggggcccatctgggcaaagattcctcacacggacggacactttcacccttctcccctcatgggcggatttggattgaagcaccctcccccacagattctcatcaagaataccccggtacctgcgaatccttcgaccaccttcagtgcggcaaagtttgcttccttcatcacacagtattccacgggacaggtcagcgtggagatagagtgggagctgcagaaggagaacagcaaacgctggaaccccgagatccagtatacttccaactacaacaaatctgttaatgtggactttactgtggacactaatggtgtgtattcagagcctcgccccattggcaccagatacctgactcgtaatctgtaa

SEQ ID NO: 1215 - DNA, 2208 bp, Artificial Sequence
  Synthetic Polynucleotide
atggctgccgatggttatcttccagattggctcgaggacactctctctgaaggaataagacagtggtggaagctcaaacctggcccaccaccgccaaagcccgcagagcggcataaggacgacagcaggggtcttgtgcttcctgggtacaagtacctcggacccttcaacggactcgacaagggggagccggtcaacgaggcagacgccgcggccctcgagcacgacaaggcctacgaccggcagctcgacagcggagacaacccgtacctcaagtacaaccacgccgacgcggagtttcaggagcgtcttaaagaagatacgtcttttgggggcaacctcggacgagcagtcttccaggcgaaaaagagggttcttgaacctctgggcctggttgaggaacctgttaagacggctccgggaaaaaagaggccggtagagcactctcctgtggagccagactcctcctcgggaaccggaaaggcgggccagcagcctgcaagaaaaagattgaatttcggtcagactggagacgcagactccgtacctgacccccagcctctcggacagccaccagcagccccctctggtctgggaactaatacgatggctacaggcagtggcgcaccaatggcagacaataacgagggcgccgacggagtgggtaattcctcgggaaattggcattgcgattccacatggatgggcgacagagtcatcaccaccagcacccgcacctgggctctgcccacctacaacaaccatctgtacaagcaaatttccagccaatcaggagcatcgaacgacaaccactactttggctacagcaccccctgggggtattttgacttcaacagattccactgccacttttcgccacgtgactggcaaagactcatcaacaacaactggggattccggcccaagagactcagcttcaagctctttaacattcaagtcaaggaggtcacgcagaatgacggtacgacgacgattgccaataaccttaccagcacggttcaggtctttactgactcggagtaccagctcccgtacgtcctcggctcggcgcatcaaggatgcctcccgccgttcccagcagacgtcttcgtggtgccacagtatggatacctcaccctgaacaacgggagtcaggcggtaggacgctcttcattttactgcctggagtacttcccttctcagatgcttcgcacgggaaacaactttaccttcagctacacctttgaggacgtgccttttcacagcagctacgctcacagccaaagtctggaccgtctcatgaatcctctcatcgaccaatacctgtattacttgagcaaaacaaacgctccaagcggaaccaccacgatgtccaggcttcagttttctcaggccggagcgagtgacattcgggaccagtctagaaactggcttcctggaccctgttaccgccagcagcgagtatcaaagacagctgcggacaacaacaacagtgattactcgtggactggagctaccaagtaccacctcaatggaagagactctctggtgaacccgggcccagctatggccagccacaaggatgatgaagaaaaatattttcctcagagcggggttctcatcttcgggaaacaaggctcaaataaaactaatgtggacattgaaaaggttatgattacagacgaagaggaaatcaggaccaccaatcccgtggctacggagcagtatggttctgtatctaccaaccttcaaagcggcaacacacaagcagctacctcagatgtcaacacacaaggcgttcttcctggcatggtctggcaggacagagatgtgtacctgcaggggcccatctgggcaaagattcctcacacggacggacactttcacccttctcccctcatgggcggatttggattgaagcaccctcccccacagattctcatcaagaataccccggtacctgcgaatccttcgaccaccttcagtgcggcaaagtttgcttccttcatcacacagtattccacgggacaggtcggcgtggagatagagtgggagctgcagaaggagaacagcaaacgctggaaccccgagatccagtatacttccaactacaacaaatctgttaatgtggactttactgtggacactaatggtgtgtattcagagcctcgccccattggcaccagatacctgactcgtaatctgtaa

SEQ ID NO: 1216 - DNA, 2208 bp, Artificial Sequence
  Synthetic Polynucleotide
atggctgccgatggttatcttccagattggctcgaggacactctctctgaaggaataagacagtggtggaagctcaaacctggcccaccaccgccaaagcccgcagagcggcataaggacgacagcaggggtcttgtgcttcctgggtacaagtacctcggacccttcaacggactcgacaagggggagccggtcaacgaggcagacgccgcggccctcgagcacgacaaggcctacgaccggcagctcgacagcggagacaacccgtacctcaagtacaaccacgccgacgcggagtttcaggagcgtcttaaagaagatacgtcttttgggggcaacctcggacgagcagtcttccaggcgaaaaagagggttcttgaacctctgggcctggttgaggaacctgttaagacggctccgggaaaaaagaggccggtagagcactctcctgtggagccagactcctcctcgggaaccggaaaggcgggccagcagcctgcaagaaaaagattgaatttcggtcagactggagacgcagactccgtacctgacccccagcctctcggacagccaccagcagccccctctggtctgggaactaatacgatggctacaggcagtggcgcaccaatggcagacaataacgagggcgccgacggagtgggtaattcctcgggaaattggcattgcgattccacatggatgggcgacagagtcatcaccaccagcacccgcacctgggctctgcccacctacaacaaccatctgtacaagcaaatttccagccaatcaggagcatcgaacgacaaccactactttggctacagcaccccctgggggtattttgacttcaacagattccactgccacttttcgccacgtgactggcaaagactcatcaacaacaactggggattccggcccaagagactcagcttcaagctctttaacattcaagtcaaggaggtcacgcagaatgacggtacgacgacgattgccaataaccttaccagcacggttcaggtctttactgactcggagtaccagctcccgtacgtcctcggctcggcgcatcaaggatgcctcccgccgttcccagcagacgtcttcatggtgccacagtatggatacctcaccctgaacaacgggagtcaggcggtaggacgctcttcattttactgcctggagtacttcccttctcagatgcttcgcacgggaaacaactttaccttcagctacacctttgaggacgtgccttttcacagcagctacgctcacagccaaagtctggaccgtctcatgaatcctctcatcgaccaatacctgtattacttgagcaaaacaaacgctccaagcggaaccaccgcgatgtccaggcttcagttttctcaggccggagcgagtgacattcgggaccagtctagaaactggcttcctggaccctgttaccgccagcagcgagtatcaaagacagctgcggacaacaacaacagtgattactcgtggactggagctaccaagtaccacctcaatggaagagactctctggtgaacccgggcccagctatggccagccacaaggatgatgaagaaaaatattttcctcagagcggggttctcatcttcgggaaacaaggctcaaataaaactaatgtggacattgaaaaggttatgattacagacgaagaggaaatcaggaccaccaatcccgtggctacggagcagtatggttctgtatctaccaaccttcaaagcggcaacacacaagcagctacctcagatgtcaacacacaaggcgttcttcctggcatggtctggcaggacagagatgtgtacctgcaggggcccatctgggcaaagattcctcacacggacggacactttcacccttctcccctcatgggcggatttggattgaagcaccctcccccacagattctcatcaagaataccccggtacctgcgaatccttcgaccaccttcagtgcggcaaagtttgcttccttcatcacacagtattccacgggacaggtcagcgtggagatagagtgggagctgcagaaggagaacagcaaacgctggaaccccgagatccagtatacttccaactacaacaaatctgttaatgtggactttactgtggacactaatggtgtgtattcagagcctcgccccattggcaccagatacctgactcgtaatctgtaa

SEQ ID NO: 1217 - DNA, 2208 bp, Artificial Sequence
  Synthetic Polynucleotide
atggctgccgatggttatcttccagattggctcgaggacactctctctgaaggaataagacagtggtggaagctcaaacctggcccaccaccgccaaagcccgcagagcggcataaggacgacagcaggggtcttgtgcttcctgggtacaagtacctcggacccttcaacggactcgacaagggggagccggtcaacgaggcagacgccgcggccctcgagcacgacaaggcctacgaccggcagctcgacagcggagacaacccgtacctcaagtacaaccacgccgacgcggagtttcaggagcgtcttaaagaagatacgtcttttgggggcaacctcggacgagcagtcttccaggcgaaaaagagggttcttgaacctctgggcctggttgaggaacctgttaagacggctccgggaaaaaagaggccggtagagcactctcctgtggagccagactcctcctcgggaaccggaaaggcgggccagcagcctgcaagaaaaagattgaatttcggtcagactggagacgcagactccgtacctgacccccagcctctcggacagccaccagcagccccctctggtctgggaactaatacgatggctacaggcagtggcgcaccaatggcagacaataacgagggcgccgacggagtgggtaattcctcgggaaattggcattgcgattccacatggatgggcgacagagtcatcaccaccagcacccgcacctgggctctgcccacctacaacaaccatctgtacaagcaaatttccagccaatcaggagcatcgaacgacaaccactactttggctacagcaccccctgggggtattttgacttcaacagattccactgccacttttcgccacgtgactggcaaagactcatcaacaacaactggggattccggcccaagagactcagcttcaagctctttaacattcaagtcaaggaggtcacgcagaatgacggtacgacgacgattgccaataaccttaccagcacggttcaggtctttactgactcggagtaccagctcccgtacgtcctcggctcggcgcatcaaggatgcctcccgccgttcccagcagacgtcttcatggtgccacagtatggatacctcaccctgaacaacgggagtcaggcggtaggacgctcttcattttactgcctggagtacttcccttctcagatgcttcgcacgggaaacaactttaccttcagctacacctttgaggacgtgccttttcacagcagctacgctcacagccaaagtctggaccgtctcatgaatcctcccatcgaccaatacctgtattacttgagcaaaacaaacgctccaagcggaaccaccacgatgtccaggcttcagttttctcaggccggagcgagtgacattcgggaccagtctagaaactggcttcctggaccctgttaccgccagcagcgagtatcaaagacagctgcggacaacaacaacagtgattactcgtggactggagctaccaagtaccacctcaatggaagagactctctggtgaacccgggcccagctatggccagccacaaggatgatgaagaaaaatattttcctcagagcggggttctcatcttcgggaaacaaggctcaaataaaactaatgtggacattgaaaaggttatgattacagacgaagaggaaatcaggaccaccaatcccgtggctacggagcagtatggttctgtatctaccaaccttcaaagcggcaacacacaagcagctacctcagatgtcaacacacaaggcgttcttcctggcatggtctggcaggacagagatgtgtacctgcaggggcccatctgggcaaagattcctcacacggacggacactttcacccttctcccctcatgggcggatttggattgaagcaccctcccccacagattctcatcaagaataccccggtacctgcgaatccttcgaccaccttcagtgcggcaaagtttgcttccttcatcacacagtattccacgggacaggtcagcgtggagatagagtgggagctgcagaaggagaacagcaaacgctggaaccccgagatccagtatacttccaactacaacaaatctgttaatgtggactttactgtggacactaatggtgtgtattcagagcctcgccccattggcaccagatacctgactcgtaatctgtaa

SEQ ID NO: 1218 - DNA, 2208 bp, Artificial Sequence
  Synthetic Polynucleotide
atggctgccgatggttatcttccagattggctcgaggacactctctctgaaggaataagacagtggtggaagctcaaacctggcccaccaccgccaaagcccgcagagcggcataaggacgacagcaggggtcttgtgcttcctgggtacaagtacctcggacccttcaacggactcgacaagggggagccggtcaacgaggcagacgccgcggccctcgagcacgacaaggcctacgaccggcagctcgacagcggagacaacccgtacctcaagtacaaccacgccgacgcggagtttcaggagcgtcttaaagaagatacgtcttttgggggcaacctcggacgagcagtcttccaggcgaaaaagagggttcttgaacctctgggcctggttgaggaacctgttaagacggctccgggaaaaaagaggccggtagagcactctcctgtggagccagactcctcctcgggaaccggaaaggcgggccagcagcctgcaagaaaaagattgaatttcggtcagactggagacgcagactccgtacctgacccccagcctctcggacagccaccagcagccccctctggtctgggaactaatacgatggctacaggcagtggcgcaccaatggcagacaataacgagggcgccgacggagtgggtaattcctcgggaaattggcattgcgattccacatggatgggcgacagagtcatcaccaccagcacccgcacctgggctctgcccacctacaacaaccatctgtacaagcaaatttccagccaatcaggagcatcgaacgacaaccactactttggctacagcaccccctgggggtattttgacttcaacagattccactgccacttttcgccacgtgactggcaaagactcatcaacaacaactggggattccggcccaagagactcagcttcaagctctttaacattcaagtcaaggaggtcacgcagaatgacggtacgacgacgattgccaataaccttaccagcacggttcaggtctttactgactcggagtaccagctcccgtacgtcctcggctcggcgcatcaaggatgcctcccgccgttcccagcagacgtcttcatggtgccacagtatggatacctcaccctgaacaacgggagtcaggcggtaggacgctcttcattttactgcctggagtacttcccttctcagatgcttcgcacgggaaacaactttaccttcagctacacctttgaggacgtgccttttcacagcagctacgctcacggccaaagtctggaccgtctcatgaatcctctcatcgaccaatacctgtattacttgagcaaaacaaacgctccaagcggaaccaccacgatgtccaggcttcagttttctcaggccggagcgagtgacattcgggaccagtctagaaactggcttcctggaccctgttaccgccagcagcgagtatcaaagacagctgcggacaacaacaacagtgattactcgtggactggagctaccaagtaccacctcaatggaagagactctctggtgaacccgggcccagctatggccagccacaaggatgatgaagaaaaatattttcctcagagcggggttctcatcttcgggaaacaaggctcaaataaaactaatgtggacattgaaaaggttatgattacagacgaagaggaaatcaggaccaccaatcccgtggctacggagcagtatggttctgtatctaccaaccttcaaagcggcaacacacaagcagctacctcagatgtcaacacacaaggcgttcttcctggcatggtctggcaggacagagatgtgtacctgcaggggcccatctgggcaaagattcctcacacggacggacactttcacccttctcccctcatgggcggatttggattgaagcaccctcccccacagattctcatcaagaataccccggtacctgcgaatccttcgaccaccttcagtgcggcaaagtttgcttccttcatcacacagtattccacgggacaggtcagcgtggagatagagtgggagctgcagaaggagaacagcaaacgctggaaccccgagatccagtatacttccaactacaacaaatctgttaatgtggactttactgtggacactaatggtgtgtattcagagcctcgccccattggcaccagatacctgactcgtaatctgtaa

SEQ ID NO: 1219 - DNA, 2208 bp, Artificial Sequence
  Synthetic Polynucleotide
atggctgccgatggttatcttccagattggctcgaggacactctctctgaaggaataagacagtggtggaagctcaaacctggcccaccaccgccaaagcccgcagagcggcataaggacgacagcaggggtcttgtgcttcctgggtacaagtacctcggacccttcaacggactcgacaagggggagccggtcaacgaggcagacgccgcggccctcgagcacgacaaggcctacgaccggcagctcgacagcggagacaacccgtacctcaagtacaaccacgccgacgcggagtttcaggagcgtcttaaagaagatacgtcttttgggggcaacctcggacgagcagtcttccaggcgaaaaagagggttcttgaacctctgggcctggttgaggaacctgttaagacggctccgggaaaaaagaggccggtagagcactctcctgtggagccagactcctcctcgggaaccggaaaggcgggccagcagcctgcaagaaaaagattgaatttcggtcagactggagacgcagactccgtacctgacccccagcctctcggacagccaccagcagccccctctggtctgggaactaatacgatggctacaggcagtggcgcaccaatggcagacaataacgagggcgccgacggagtgggtaattcctcgggaaattggcattgcgattccacatggatgggcgacagagtcatcaccaccagcacccgcacctgggctctgcccacctacaacaaccatctgtacaagcaaatttccagccaatcaggagcatcgaacgacaaccactactttggctacagcaccccctgggggtattttgacttcaacagattccactgccacttttcgccacgtgactggcaaagactcatcaacaacaactggggattccggcccaagagactcagcttcaagctctttaacattcaagtcaaggaggtcacgcagaatgacggtacgacgacgattgccaataaccttaccagcacggttcaggtctttactgactcggagtaccagctcccgtacgtcctcggctcggcgcatcaaggatgcctcccgccgttcccagcagacgtcttcatggtgccacagtatggatacctcaccctgaacaacgggagtcaggcggtaggacgctcttcattttactgcctggagtacttcccttctcagatgcttcgcacgggaaacaactttaccttcagctacacctttgaggacgtgccttttcacagcagctacgctcacagccaaagtctggaccgtctcatgaatcctctcatcgaccaatacctgtattacttgagcaaaacaaacgctccaagcggaaccaccacgatgtccaggcctcagttttctcaggccggagcgagtgacattcgggaccagtctagaaactggcttcctggaccctgttaccgccagcagcgagtatcaaagacagctgcggacaacaacaacagtgattactcgtggactggagctaccaagtaccacctcaatggaagagactctctggtgaacccgggcccagctatggccagccacaaggatgatgaagaaaaatattttcctcagagcggggttctcatcttcgggaaacaaggctcaaataaaactaatgtggacattgaaaaggttatgattacagacgaagaggaaatcaggaccaccaatcccgtggctacggagcagtatggttctgtatctaccaaccttcaaagcggcaacacacaagcagctacctcagatgtcaacacacaaggcgttcttcctggcatggtctggcaggacagagatgtgtacctgcaggggcccatctgggcaaagattcctcacacggacggacactttcacccttctcccctcatgggcggatttggattgaagcaccctcccccacagattctcatcaagaataccccggtacctgcgaatccttcgaccaccttcagtgcggcaaagtttgcttccttcatcacacagtattccacgggacaggtcagcgtggagatagagtgggagctgcagaaggagaacagcaaacgctggaaccccgagatccagtatacttccaactacaacaaatctgttaatgtggactttactgtggacactaatggtgtgtattcagagcctcgccccattggcaccagatacctgactcgtaatctgtaa

SEQ ID NO: 1220 - DNA, 2208 bp, Artificial Sequence
  Synthetic Polynucleotide
atggctgccgatggttatcttccagattggctcgaggacactctctctgaaggaataagacagtggtggaagctcaaacctggcccaccaccgccaaagcccgcagagcggcataaggacgacagcaggggtcttgtgcttcctgggtacaagtacctcggacccttcaacggactcgacaagggggagccggtcaacgaggcagacgccgcggccctcgagcacgacaaggcctacgaccggcagctcgacagcggagacaacccgtacctcaagtacaaccacgccgacgcggagtttcaggagcgtcttaaagaagatacgtcttttgggggcaacctcggacgagcagtcttccaggcgaaaaagagggttcttgaacctctgggcctggttgaggaacctgttaagacggctccgggaaaaaagaggccggtagagcactctcctgtggagccagactcctcctcgggaaccggaaaggcgggccagcagcctgcaagaaaaagattgaatttcggtcagactggagacgcagactccgtacctgacccccagcctctcggacagccaccagcagccccctctggtctgggaactaatacgatggctacaggcagtggcgcaccaatggcagacaataacgagggcgccgacggagtgggtaattcctcgggaaattggcattgcgattccacatggatgggcgacagagtcatcaccaccagcacccgcacctgggctctgcccacctacaacaaccatctgtacaagcaaatttccagccaatcaggaacatcgaacgacaaccactactttggctacagcaccccctgggggtattttgacttcaacagattccactgccacttttcgccacgtgactggcaaagactcatcaacaacaactggggattccggcccaagagactcagcttcaagctctttaacattcaagtcaaggaggtcacgcagaatgacggtacgacgacgattgccaataaccttaccagcacggttcaggtctttactgactcggagtaccagctcccgtacgtcctcggctcggcgcatcaaggatgcctcccgccgttcccagcagacgtcttcatggtgccacagtatggatacctcaccctgaacaacgggagtcaggcggtaggacgctcttcattttactgcctggagtacttcccttctcagatgcttcgcacgggaaacaactttaccttcagctacacctttgaggacgtgccttttcacagcagctacgctcacagccaaagtctggaccgtctcatgaatcctctcatcgaccaatacctgtattacttgagcaaaacaaacgctccaagcggaaccaccacgatgtccaggcttcagttttctcaggccggagcgagtgacattcgggaccagtctagaaactggcttcctggaccctgttaccgccagcagcgagtatcaaagacagctgcggacaacaacaacagtgattactcgtggactggagctaccaagtaccacctcaatggaagagactctctggtgaacccgggcccagctatggccagccacaaggatgatgaagaaaaatattttcctcagagcggggttctcatcttcgggaaacaaggctcaaataaaactaatgtggacattgaaaaggttatgattacagacgaagaggaaatcaggaccaccaatcccgtggctacggagcagtatggttctgtatctaccaaccttcaaagcggcaacacacaagcagctacctcagatgtcaacacacaaggcgttcttcctggcatggtctggcaggacagagatgtgtacctgcaggggcccatctgggcaaagattcctcacacggacggacactttcacccttctcccctcatgggcggatttggattgaagcaccctcccccacagattctcatcaagaataccccggtacctgcgaatccttcgaccaccttcagtgcggcaaagtttgcttccttcatcacacagtattccacgggacaggtcagcgtggagatagagtgggagctgcagaaggagaacagcaaacgctggaaccccgagatccagtatacttccaactacaacaaatctgttaatgtggactttactgtggacactaatggtgtgtattcagagcctcgccccattggcaccagatacctgactcgtaatctgtaa

SEQ ID NO: 1221 - DNA, 2208 bp, Artificial Sequence
  Synthetic Polynucleotide
atggctgccgatggttatcttccagattggctcgaggacactctctctgaaggaataagacagtggtggaagctcaaacctggcccaccaccgccaaagcccgcagagcggcataaggrcgacagcaggggtcttgtgcttcctgggtacaagtacctcggacccttcaacggactcgacaagggggagccggtcaacgaggcagacgccgcggccctcgagcacgacaaggcctacgaccggcagctcgacagcggagacaacccgtacctcaagtacaaccacgccgacgcggagtttcaggagcgtcttaaagaagatacgtcttttgggggcaacctcggacgagcagtcttccaggcgaaaaagagggttcttgaacctctgggcctggttgaggaacctgttaagacggctccgggaaaaaagaggccggtagagcactctcctgtggagccagactcctcctcgggaaccggaaaggcgggccagcagcctgcaagaaaaagattgaatttcggtcagactggagacgcagactccgtacctgacccccagcctctcggacagccaccagcagccccctctggtctgggaactaatacgatggctacaggcagtggcgcaccaatggcagacaataacgagggcgccgacggagtgggtaattcctcgggaaattggcattgcgattccacatggatgggcgacagagtcatcaccaccagcacccgcacctgggctctgcccacctacaacaaccatctgtacaagcaaatttccagccaatcaggagcatcgaacgacaaccactactttggctacagcaccccctgggggtattttgacttcaacagattccactgccacttttcgccacgtgactggcaaagactcatcaacaacaactggggattccggcccaagagactcagcttcaagctctttaacattcaagtcaaggaggtcacgcagaatgacggtacgacgacgattgccaataaccttaccagcacggttcaggtctttactgactcggagtaccagctcccgtacgtcctcggctcggcgcatcaaggatgcctcccgccgttcccagcagacgtcttcatggtgccacagtatggatacctcaccctgaacaacgggagtcaggcggtaggacgctcttcattttactgcctggagtacttcccttctcagatgcttcgcacgggaaacaactttaccttcagctacacctttgaggacgtgccttttcacagcagctacgctcacagccaaagtctggaccgtctcatgaatcctctcatcgaccaatacctgtattacttgagcaaaacaaacgctccaagcggaaccaccacgatgtccaggcttcagttttctcaggccggagcgagtgacattcgggaccagtctagaaactggcttcctggaccctgttaccgccagcagcgagtatcaaagacagctgcggacaacaacaacagtgattactcgtggactggagctaccaagtaccacctcaatggaagagactctctggtgaacccgggcccagctatggccagccacaaggatgatgaagaaaaatattttcctcagagcggggttctcatcttcgggaaacaaggctcaaataaaactaatgtggacattgaaaaggttatgattacagacgaagaggaaatcaggaccaccaatcccgtggctacggagcagtatggttctgtatctaccaaccttcaaagcggcaacacacaagcagctacctcagatgtcaacacacaaggcgttcttcctggcatggtctggcaggacagagatgtgtacctgcaggggcccatctgggcaaagattcctcacacggacggacactttcacccttctcccctcatgggcggatttggattgaagcaccctcccccacagattctcatcaagaataccccggtacctgcgaatccttcgaccaccttcagtgcggcaaagtttgcttccttcatcacacagtattccacgggacaggtcagcgtggagatagagtgggagctgcagaaggagaacagcaaacgctggaaccccgagatccagtatacttccaactacaacaaatctgttaatgtggactttactgtggacactaatggtgtgtattcagagcctcaccccattggcaccagatacctgactcgtaatctgtaa

SEQ ID NO: 1222 - DNA, 2208 bp, Artificial Sequence
  Synthetic Polynucleotide
atggctgccgatggttatcttccagattggctcgaggacactctctctgaaggaataagacagtggtggaagttcaaacctggcccaccaccgccaaagcccgcagagcggcataaggacgacagcaggggtcttgtgcttcctgggtacaagtacctcggacccttcaacggactcgacaagggggagccggtcaacgaggcagacgccgcggccctcgagcacgacaaggcctacgaccggcagctcgacagcggagacaacccgtacctcaagtacaaccacgccgacgcggagtttcaggagcgtcttaaagaagatacgtcttttgggggcaacctcggacgagcagtcttccaggcgaaaaagagggttcttgaacctctgggcctggttgaggaacctgttaagacggctccgggaaaaaagaggccggtagagcactctcctgtggagccagactcctcctcgggaaccggaaaggcgggccagcagcctgcaagaaaaagattgaatttcggtcagactggagacgcagactccgtacctgacccccagcctctcggacagccaccagcagccccctctggtctgggaactaatacgatggctacaggcagtggcgcaccaatggcagacaataacgagggcgccgacggagtgggtaattcctcgggaaattggcattgcgattccacatggatgggcgacagagtcatcaccaccagcacccgcacctgggctctgcccacctacaacaaccatctgtacaagcaaatttccagccaatcaggagcatcgaacgacaaccactactttggctacagcaccccctgggggtattttgacttcaacagattccactgccacttttcgccacgtgactggcaaagactcatcaacaacaactggggattccggcccaagagactcagcttcaagctctttaacattcaagtcaaggaggtcacgcagaatgacggtacgacgacgattgccaataaccttaccagcacggttcaggtctttactgactcggagtaccagctcccgtacgtcctcggctcggcgcatcaaggatgcctcccgccgttcccagcagacgtcttcatggtgccacagtatggatacctcaccctgaacaacgggagtcaggcggtaggacgctcttcattttactgcctggagtacttcccttctcagatgcttcgcacgggaaacaactttaccttcagctacacctttgaggacgtgccttttcacagcagctacgctcacagccaaagtctggaccgtctcatgaatcctctcatcgaccaatacctgtattacttgagcaaaacaaacgctccaagcggaaccaccacgatgtccaggcttcagttttctcaggccggagcgagtgacattcgggaccagtctagaaactggcttcctggaccctgttaccgccagcagcgagtatcaaagacagctgcggacaacaacaacagtgattactcgtggactggagctaccaagtaccacctcaatggaagagactctctggtgaacccgggcccagctatggccagccacaaggatgatgaagaaaaatattttcctcagagcggggttctcatcttcgggaaacaaggctcaaataaaactaatgtggacattgaaaaggttatgattacagacgaagaggaaatcaggaccaccaatcccgtggctacggagcagtatggttctgtatctaccaaccttcaaagcggcaacacacaagcagctacctcagatgtcaacacacaaggcgttcttcctggcatggtctggcaggacagagatgtgtacctgcaggggcccatctgggcaaagattcctcacacggacggacactttcacccttctcccctcatgggcggatttggattgaagcaccctcccccacagattctcatcaagaataccccggtacctgcgaatccttcgaccaccttcagtgcggcaaagtttgcttccttcatcacacagtattccacgggacaggtcagcgtggagatagagtgggagctgcagaaggagaacagcaaacgctggaaccccgagatccagtatacttccaactacaacaaatctgttaatgtggactttactgtggacactaatggtgtgtattcagagcctcgccccattggcaccagatacctgactcgtaatctgtaa

SEQ ID NO: 1223 - DNA, 2208 bp, Artificial Sequence
  Synthetic Polynucleotide
atggctgccgatggttatcttccagattggctcgaggacactctctctgaaggaataagacagtggtggaagctcaaacctggcccaccaccgccaaagcccgcagagcggcataaggacgacagcaggggtcttgtgcttcctgggtacaagtacctcggacccttcaacggactcgacaagggggagccggtcaacgaggcagacgccgcggccctcgagcacgacaaggcctacgaccggcagctcgacagcggagacaacccgtacctcaagtacaaccacgccgacgcggagtttcaggagcgtcttaaagaagatacgtcttttgggggcaacctcggacgagcagtcttccaggcgaaaaagagggttcttgaacctctgggcctggttgaggaacctgttaagacggctccgggaaaaaagaggccggtagagcactctcctgtggagccagactcctcctcgggaaccggaaaggcgggccagcagcctgcaagaaaaagattgaatttcggtcagactggagacgcagactccgtacctgacccccagcctctcggacagccaccagcagccccctctggtctgggaactaatacgatggctacaggcagtggcgcaccaatggcagacaataacgagggcgccgacggagtgggtaattcctcgggaaattggcattgcgattccacatggatgggcgacagagtcatcaccaccagcacccgcacctgggctctgcccacctacaacaaccatctgtacaagcaaatttccagccaatcaggagcatcgaacgacaaccactactttggctacagcaccccctgggggtattttgacttcaacagattccactgccacttttcgtcacgtgactggcaaagactcatcaacaacaactggggattccggcccaagagactcagcttcaagctctttaacattcaagtcaaggaggtcacgcagaatgacggtacgacgacgattgccaataaccttaccagcacggttcaggtctttactgactcggagtaccagctcccgtacgtcctcggctcggcgcatcaaggatgcctcccgccgttcccagcagacgtcttcatggtgccacagtatggatacctcaccctgaacaacgggagtcaggcggtaggacgctcttcattttactgcctggagtacttcccttctcagatgcttcgcacgggaaacaactttaccttcagctacacctttgaggacgtgccttttcacagcagctacgctcacagccaaagtctggaccgtctcatgaatcctctcatcgaccaatacctgtattacttgagcaaaacaaacgctccaagcggaaccaccacgatgtccaggcttcagttttctcaggccggagcgagtgacattcgggaccagtctagaaactggcttcctggaccctgttaccgccagcagcgagtatcaaagacagctgcggacaacaacaacagtgattactcgtggactggagctaccaagtaccacctcaatggaagagactctctggtgaacccgggcccagctatggccagccacaaggatgatgaagaaaaatattttcctcagagcggggttctcatcttcgggaaacaaggctcaaataaaactaatgtggacattgaaaaggttatgattacagacgaagaggaaatcaggaccaccaatcccgtggctacggagcagtatggttctgtatctaccaaccttcaaagcggcaacacacaagcagctacctcagatgtcaacacacaaggcgttcttcctggcatggtctggcaggacagagatgtgtacctgcaggggcccatctgggcaaagattcctcacacggacggacactttcacccttctcccctcatgggcggatttggattgaagcaccctcccccacagattctcatcaagaataccccggtacctgcgaatccttcgaccaccttcagtgcggcaaagtttgcttccttcatcacacagtattccacgggacaggtcagcgtggagatagagtgggagctgcagaaggagaacagcaaacgctggaaccccgagatccagtatacttccaactacaacaaatctgttaatgtggactttactgtggacactaatggtgtgtattcagagcctcgccccattggcaccagatacctgactcgtaatctgtaa

SEQ ID NO: 1224 - DNA, 2208 bp, Artificial Sequence
  Synthetic Polynucleotide
atggctgccgatggttatcttccagattggctcgaggacactctctctgaaggaataagacagtggtggaagctcaaacctggcccaccaccgccaaagcccgcagagcggcatgaggacgacagcaggggtcttgtgcttcctgggtacaagtacctcggacccttcaacggactcgacaagggggagccggtcaacgaggcagacgccgcggccctcgagcacgacaaggcctacgaccggcagctcgacagcggagacaacccgtacctcaagtacaaccacgccgacgcggagtttcaggagcgtcttaaagaagatacgtcttttgggggcaacctcggacgagcagtcttccaggcgaaaaagagggttcttgaacctctgggcctggttgaggaacctgttaagacggctccgggaaaaaagaggccggtagagcactctcctgtggagccagactcctcctcgggaaccggaaaggcgggccagcagcctgcaagaaaaagattgaatttcggtcagactggagacgcagactccgtacctgacccccagcctctcggacagccaccagcagccccctctggtctgggaactaatacgatggctacaggcagtggcgcaccaatggcagacaataacgagggcgccgacggagtgggtaattcctcgggaaattggcattgcgattccacatggatgggcgacagagtcatcaccaccagcacccgcacctgggctctgcccacctacaacaaccatctgtacaagcaaatttccagccaatcaggagcatcgaacgacaaccactactttggctacagcaccccctgggggtattttgacttcaacagattccactgccacttttcgccacgtgactggcaaagactcatcaacaacaactggggattccggcccaagagactcagcttcaagctctttaacattcaagtcaaggaggtcacgcagaatgacggtacgacgacgattgccaataaccttaccagcacggttcaggtctttactgactcggagtaccagctcccgtacgtcctcggctcggcgcatcaaggatgcctcccgccgttcccagcagacgtcttcatggtgccacagtatggatacctcaccctgaacaacgggagtcaggcggtaggacgctcttcattttactgcctggagtacttcccttctcagatgcttcgcacgggaaacaactttaccttcagctacacctttgaggacgtgccttttcacagcagctacgctcacagccaaagtctggaccgtctcatgaatcctctcatcgaccaatacctgtattacttgagcaaaacaaacgctccaagcggaaccaccacgatgtccaggcttcagttttctcaggccggagcgagtgacattcgggaccagtctagaaactggcttcctggaccctgttaccgccagcagcgagtatcaaagacagctgcggacaacaacaacagtgattactcgtggactggagctaccaagtaccacctcaatggaagagactctctggtgaacccgggcccagctatggccagccacaaggatgatgaagaaaaatattttcctcagagcggggttctcatcttcgggaaacaaggctcaaataaaactaatgtggacattgaaaaggttatgattacagacgaagaggaaatcaggaccaccaatcccgtggctacggagcagtatggttctgtatctaccaaccttcaaagcggcaacacacaagcagctacctcagatgtcaacacacaaggcgttcttcctggcatggtctggcaggacagagatgtgtacctgcaggggcccatctgggcaaagattcctcacacggacggacactttcacccttctcccctcatgggcggatttggattgaagcaccctcccccacagattctcatcaagaataccccggtacctgcgaatccttcgaccaccttcagtgcggcaaagtttgcttccttcatcacacagtattccacgggacaggtcagcgtggagatagagtgggagctgcagaaggagaacagcaaacgctggaaccccgagatccagtatacttccaactacaacaaatctgttaatgtggactttactgtggacactaatggtgtgtattcagagcctcgccccattggcaccagatacctgactcgtaatctgtaa

SEQ ID NO: 1225 - DNA, 2205 bp, Artificial Sequence
  Synthetic Polynucleotide
atggctgccgatggttatcttccagattggctcgaggacactctctctgaaggaataagacagtggtggaagctcaaacctggcccaccaccgccaaagcccgcagagcggcataaggacgacagcaggggtcttgtgcttcctgggtacaagtacctcggacccttcaacggactcgacaagggggagccggtcaacgaggcagacgccgcggccctcgagcacgacaaggcctacgaccggcagctcgacagcggagacaacccgtacctcaagtacaaccacgccgacgcggagtttcaggagcgtcttaaagaagatacgtcttttgggggcaacctcggacgagcagtcttccaggcgaaaaagagggttcttgaacctctgggcctggttgaggaacctgttaagacggctccgggaaaaaagaggccggtagagcactctcctgtggagccagactcctcctcgggaaccggaaaggcgggccagcagcctgcaagaaaaagattgaatttcggtcagactggagacgcagactccgtacctgacccccagcctctcggacagccaccagcagccccctctggtctgggaactaatacgatggctacaggcagtggcgcaccaatggcagacaataacgagggcgccgacggagtgggtaattcctcgggaaattggcattgcgattccacatggatgggcgacagagtcatcaccaccagcacccgcacctgggctctgcccacctacaacaaccatctgtacaagcaaatttccagccaatcaggagcatcgaacgacaaccactactttggctacagcaccccctgggggtattttgacttcaacagattccactgccacttttcgccacgtgactggcaaagactcatcaacaacaactggggattccggcccaagagactcagcttcaagctctttaacattcaagtcaaggaggtcacgcagaatgacggtacgacgacgattgccaataaccttaccagcacggttcaggtctttactgactcggagtaccagctcccgtacgtcctcggctcggcgcatcaaggatgcctcccgccgttcccagcagacgtcttcatggtgccacagtatggatacctcaccctgaacaacgggagtcaggcggtaggacgctcttcattttactgcctggagtacttcccttctcagatgcttcgcacgggaaacaactttaccttcagctacacctttgaggacgtgccttttcacagcagctacgctcacagccaaagtctggaccgtctcatgaatcctctcatcgaccaatacctgtattacttgagcaaaacaaacgctccaagcggaaccaccacgatgtccaggcttcagttttctcaggccggagcgagtgacattcgggaccagtctagaaactggcttcctggaccctgttaccgccagcagcgagtatcaaagacagctgcggacaacaacagtgattactcgtggactggagctaccaagtaccacctcaatggaagagactctctggtgaacccgggcccagctatggccagccacaaggatgatgaagaaaaatattttcctcagagcggggttctcatcttcgggaaacaaggctcaaataaaactaatgtggacattgaaaaggttatgattacagacgaagaggaaatcaggaccaccaatcccgtggctacggagcagtatggttctgtatctaccaaccttcaaagcggcaacacacaagcagctacctcagatgtcaacacacaaggcgttcttcctggcatggtctggcaggacagagatgtgtacctgcaggggcccatctgggcaaagattcctcacacggacggacactttcacccttctcccctcatgggcggatttggattgaagcaccctcccccacagattctcatcaagaataccccggtacctgcgaatccttcgaccaccttcagtgcggcaaagtttgcttccttcatcacacagtattccacgggacaggtcagcgtggagatagagtgggagctgcagaaggagaacagcaaacgctggaaccccgagatccagtatacttccaactacaacaaatctgttaatgtggactttactgtggacactaatggtgtgtattcagagcctcgccccattggcaccagatacctgactcgtaatctgtaa

SEQ ID NO: 1226 - DNA, 2208 bp, Artificial Sequence
  Synthetic Polynucleotide
atggctgccgatggttatcttccagattggctcgaggacactctctctgaaggaataagacagtggtggaagctcaaacctggcccaccaccgccaaagcccgcagagtggcataaggacgacagcaggggtcttgtgcttcctgggtacaagtacctcggacccttcaacggactcgacaagggggagccggtcaacgaggcagacgccgcggccctcgagcacgacaaggcctacgaccggcagctcgacagcggagacaacccgtacctcaagtacaaccacgccgacgcggagtttcaggagcgtcttaaagaagatacgtcttttgggggcaacctcggacgagcagtcttccaggcgaaaaagagggttcttgaacctctgggcctggttgaggaacctgttaagacggctccgggaaaaaagaggccggtagagcactctcctgtggagccagactcctcctcgggaaccggaaaggcgggccagcagcctgcaagaaaaagattgaatttcggtcagactggagacgcagactccgtacctgacccccagcctctcggacagccaccagcagccccctctggtctgggaactaatacgatggctacaggcagtggcgcaccaatggcagacaataacgagggcgccgacggagtgggtaattcctcgggaaattggcattgcgattccacatggatgggcgacagagtcatcaccaccagcacccgcacctgggctctgcccacctacaacaaccatctgtacaagcaaatttccagccaatcaggagcatcgaacgacaaccactactttggctacagcaccccctgggggtattttgacttcaacagattccactgccacttttcgccacgtgactggcaaagactcatcaacaacaactggggattccggcccaagagactcagcttcaagctctttaacattcaagtcaaggaggtcacgcagaatgacggtacgacgacgattgccaataaccttaccagcacggttcaggtctttactgactcggagtaccagctcccgtacgtcctcggctcggcgcatcaaggatgcctcccgccgttcccagcagacgtcttcatggtgccacagtatggatacctcaccctgaacaacgggagtcaggcggtaggacgctcttcattttactgcctggagtacttcccttctcagatgcttcgcacgggaaacaactttaccttcagctacacctttgaggacgtgccttttcacagcagctacgctcacagccaaagtctggaccgtctcatgaatcctctcatcgaccaatacctgtattacttgagcaaaacaaacgctccaagcggaaccaccacgatgtccaggcttcagttttctcaggccggagcgagtgacattcgggaccagtctagaaactggcttcctggaccctgttaccgccagcagcgagtatcaaagacagctgcggacaacaacaacagtgattactcgtggactggagctaccaagtaccacctcaatggaagagactctctggtgaacccgggcccagctatggccagccacaaggatgatgaagaaaaatattttcctcagagcggggttctcatcttcgggaaacaaggctcaaataaaactaatgtggacattgaaaaggttatgattacagacgaagaggaaatcaggaccaccaatcccgtggctacggagcagtatggttctgtatctaccaaccttcaaagcggcaacacacaagcagctacctcagatgtcaacacacaaggcgttcttcctggcatggtctggcaggacagagatgtgtacctgcaggggcccatctgggcaaagattcctcacacggacggacactttcacccttctcccctcatgggcggatttggattgaagcaccctcccccacagattctcatcaagaataccccggtacctgcgaatccttcgaccaccttcagtgcggcaaagtttgcttccttcatcacacagtattccacgggacaggtcagcgtggagatagagtgggagctgcagaaggagaacagcaaacgctggaaccccgagatccagtatacttccaactacaacaaatctgttaatgtggactttactgtggacactaatggtgtgtattcagagcctcgccccattggcaccagatacctgactcgtaatctgtaa

SEQ ID NO: 1227 - DNA, 2208 bp, Artificial Sequence
  Synthetic Polynucleotide
atggctgccgatggttatcttccagattggctcgaggacactctctctgaaggaataagacagtggtggaagctcaaacctggcccaccaccgccaaagcccgcagagcggcataaggacgacagcaggggtcttgtgcttcctgggtacaagtacctcggacccttcaacggactcgacaagggggagccggtcaacgaggcagacgccgcggccctcgagcacgacaaggcctacgaccggcagctcgacagcggagacaacccgtacctcaagtacaaccacgccgacgcggagtttcaggagcgtcttaaagaagatacgtcttttgggggcaacctcggacgagcagtcttccaggcgaaaaagagggttcttgaacctctgggcctggttgaggaacctgttaagacggctccgggaaaaaagaggccggtagagcactctcctgtggagccagactcctcctcgggaaccggaaaggcgggccagcagcctgcaagaaaaagattgaatttcggtcagactggagacgcagactccgtacctgacccccagcctctcggacagccaccagcagccccctctggtctgggaactaatacgatggctacaggcagtggcgcaccaatggcagacaataacgagggcgccgacggagtgggtaattcctcgggaaattggcattgcgattccacatggatgggcgacagagtcatcaccaccagcacccgcacctgggctctgcccacctacaacaaccatctgtacaagcaaatttccagccaatcaggagcatcgaacgacaaccactactttggctacagcaccccctgggggtattttgacttcaacagattccactgccacttttcgccacgtgactggcaaagactcatcaacaacaactggggattccggcccaagagactcagcttcaagctctttaacattcaagtcaaggaggtcacgcagaatgacggtacgacgacgattgccaataaccttaccagcacggttcaggtctttactgactcggagtaccagctcccgtacgtcctcggctcggcgcatcaaggatgcctcccgccgttcccagcagacgtcttcatggtgccacagtatggatacctcaccctgaacaacgggagtcaggcggtaggacgctcttcattttactgcctggagtacttcccttctcagatgcttcgcacgggaaacaactttaccttcagctacacctttgaggacgtgccttttcacagcagctacgctcacagccaaagtctggaccgtctcatgaatcctctcatcgaccaatacctgtattacttgagcaaaacaaacgctccaagcggaaccaccacgatgtccaggcttcagttttctcaggccggagcgagtgacattcgggaccagtctagaaactggcttcctggaccctgttaccgccagcagcgagtatcaaagacagctgcggacaacaacaacagtgattactcgtggactggagctaccaagtaccacctcaatggaagagactctctggtgaacccgggcccagctatggccagccacaaggatgatgaagaaaaatattttcctcagagcggggttctcatcttcgggaaacaaggctcaaataaaactaatgtggacattgaaaaggttatgattacagacgaagaggaaatcaggaccaccaatcccgtggctacggagcagtatggttctgtatctaccaaccttcaaagcggcaacacacaagcagctacctcagatgtcaacacacaaggcgttcttcctgacatggtctggcaggacagagatgtgtacctgcaggggcccatctgggcaaagattcctcacacggacggacactttcacccttctcccctcatgggcggatttggattgaagcaccctcccccacagattctcatcaagaataccccggtacctgcgaatccttcgaccaccttcagtgcggcaaagtttgcttccttcatcacacagtattccacgggacaggtcagcgtggagatagagtgggagctgcagaaggagaacagcaaacgctggaaccccgagatccagtatacttccaactacaacaaatctgttaatgtggactttactgtggacactaatggtgtgtattcagagcctcgccccattggcaccagatacctgactcgtaatctgtaa

SEQ ID NO: 1228 - DNA, 2208 bp, Artificial Sequence
  Synthetic Polynucleotide
atggctgccgatggttatcttccagattggctcgaggacactctctctgaaggaataagacagtggtggaagctcaaacctggcccaccaccgccaaagcccgcagagcggcataaggacgacagcaggggtcttgtgcttcctgggtacaagtacctcggacccttcaacggactcgacaagggggagccggtcaacgaggcagacgccgcggccctcgagcacgacaaggcctacgaccggcagctcgacagcggagacaacccgtacctcaagtacaaccacgccgacgcggagtttcaggagcgtcttaaagaagatacgtcttttggggacaacctcggacgagcagtcttccaggcgaaaaagagggttcttgaacctctgggcctggttgaggaacctgttaagacggctccgggaaaaaagaggccggtagagcactctcctgtggagccagactcctcctcgggaaccggaaaggcgggccagcagcctgcaagaaaaagattgaatttcggtcagactggagacgcagactccgtacctgacccccagcctctcggacagccaccagcagccccctctggtctgggaactaatacgatggctacaggcagtggcgcaccaatggcagacaataacgagggcgccgacggagtgggtaattcctcgggaaattggcattgcgattccacatggatgggcgacagagtcatcaccaccagcacccgcacctgggctctgcccacctacaacaaccatctgtacaagcaaatttccagccaatcaggagcatcgaacgacaaccactactttggctacagcaccccctgggggtattttgacttcaacagattccactgccacttttcgccacgtgactggcaaagactcatcaacaacaactggggattccggcccaagagactcagcttcaagctctttaacattcaagtcaaggaggtcacgcagaatgacggtacgacgacgattgccaataaccttaccagcacggttcaggtctttactgactcggagtaccagctcccgtacgtcctcggctcggcgcatcaaggatgcctcccgccgttcccagcagacgtcttcatggtgccacagtatggatacctcaccctgaacaacgggagtcaggcggtaggacgctcttcattttactgcctggagtacttcccttctcagatgcttcgcacgggaaacaactttaccttcagctacacctttgaggacgtgccttttcacagcagctacgctcacagccaaagtctggaccgtctcatgaatcctctcatcgaccaatacctgtattacttgagcaaaacaaacgctccaagcggaaccaccacgatgtccaggcttcagttttctcaggccggagcgagtgacattcgggaccagtctagaaactggcttcctggaccctgttaccgccagcagcgagtatcaaagacagctgcggacaacaacaacagtgattactcgtggactggagctaccaagtaccacctcaatggaagagactctctggtgaacccgggcccagctatggccagccacaaggatgatgaagaaaaatattttcctcagagcggggttctcatcttcgggaaacaaggctcaaataaaactaatgtggacattgaaaaggttatgattacagacgaagaggaaatcaggaccaccaatcccgtggctacggagcagtatggttctgtatctaccaaccttcaaagcggcaacacacaagcagctacctcagatgtcaacacacaaggcgttcttcctggcatggtctggcaggacagagatgtgtacctgcaggggcccatctgggcaaagattcctcacacggacggacactttcacccttctcccctcatgggcggatttggattgaagcaccctcccccacagattctcatcaagaataccccggtacctgcgaatccttcgaccaccttcagtgcggcaaagtttgcttccttcatcacacagtattccacgggacaggtcagcgtggagatagagtgggagctgcagaaggagaacagcaaacgctggaaccccgagatccagtatacttccaactacaacaaatctgttaatgtggactttactgtggacactaatggtgtgtattcagagcctcgccccattggcaccagatacctgactcgtaatctgtaa

SEQ ID NO: 1229 - DNA, 2208 bp, Artificial Sequence
  Synthetic Polynucleotide
atggctgccgatggttatcttccagattggctcgaggacactctctctgaaggaataagacagtggtggaagctcaaacctggcccaccaccgccaaagcccgcagagcggcataaggacgacagcaggggtcttgtgcttcctgggtacaagtacctcggacccttcaacggactcgacaagggggagccggtcaacgaggcagacgccgcggccctcgagcacgacaaggcctacgaccggcagctcgacagcggagacaacccgtacctcaagtacaaccacgccgacgcggagtttcaggagcgtcttaaagaagatacgtcttttgggggcaacctcggacgagcagtcttccaggcgaaaaagagggttcttgaacctctgggcctggttgaggaacctgttaagacggctccgggaaaaaagaggccggtagagcactctcctgtggagccagactcctcctcgggaaccggaaaggcgggccagcagcctgcaagaaaaagattgaatttcggtcagactggagacgcagactccgtacctgacccccagcctctcggacagccaccagcagccccctctggtctgggaactaatacgatggctacaggcagtggcgcaccaatggcagacaataacgagggcgccgacggagtgggtaattcctcgggaaattggcattgcgattccacatggatgggcgacagagtcatcaccaccagcacccgcacctgggctctgcccacctacaacaaccatctgtacaagcaaatttccagccaatcaggagcatcgaacgacaaccactactttggctacagcaccccctgggggtattttgacttcaacagattccactgccacttttcgccacgtgactggcaaagactcatcaacaacaactggggattccggcccaagagactcagcttcaagctctttaacattcaagtcaaggaggtcacgcagaatgacggtacgacgacgattgccaataaccttaccagcacggttcaggtctttactgactcggagtaccagctcccgtacgtcctcgactcggcgcatcaaggatgcctcccgccgttcccagcagacgtcttcatggtgccacagtatggatacctcaccctgaacaacgggagtcaggcggtaggacgctcttcattttactgcctggagtacttcccttctcagatgcttcgcacgggaaacaactttaccttcagctacacctttgaggacgtgccttttcacagcagctacgctcacagccaaagtctggaccgtctcatgaatcctctcatcgaccaatacctgtattacttgagcaaaacaaacgctccaagcggaaccaccacgatgtccaggcttcagttttctcaggccggagcgagtgacattcgggaccagtctagaaactggcttcctggaccctgttaccgccagcagcgagtatcaaagacagctgcggacaacaacaacagtgattactcgtggactggagctaccaagtaccacctcaatggaagagactctctggtgaacccgggcccagctatggccagccacaaggatgatgaagaaaaatattttcctcagagcggggttctcatcttcgggaaacaaggctcaaataaaactaatgtggacattgaaaaggttatgattacagacgaagaggaaatcaggaccaccaatcccgtggctacggagcagtatggttctgtatctaccaaccttcaaagcggcaacacacaagcagctacctcagatgtcaacacacaaggcgttcttcctggcatggtctggcaggacagagatgtgtacctgcaggggcccatctgggcaaagattcctcacacggacggacactttcacccttctcccctcatgggcggatttggattgaagcaccctcccccacagattctcatcaagaataccccggtacctgcgaatccttcgaccaccttcagtgcggcaaagtttgcttccttcatcacacagtattccacgggacaggtcagcgtggagatagagtgggagctgcagaaggagaacagcaaacgctggaaccccgagatccagtatacttccaactacaacaaatctgttaatgtggactttactgtggacactaatggtgtgtattcagagcctcgccccattggcaccagatacctgactcgtaatctgtaa

SEQ ID NO: 1230 - DNA, 2208 bp, Artificial Sequence
  Synthetic Polynucleotide
atggctgccgatggttatcttccagattggctcgaggacactctctctgaaggaataagacagtggtggaagctcaaacctggcccaccaccgccaaagcccgcagagcggcataaggacgacagcaggggtcttgtgcttcctgggtacaagtacctcggacccttcaacggactcgacaagggggagccggtcaacgaggcagacgccgcggccctcgagcacgacaaggcctacgaccggcagctcgacagcggagacaacccgtacctcaagtacaaccacgccgacgcggagtttcaggagcgtcttaaagaagatacgtcttttgggggcaacctcggacgagcagtcttccaggcgaaaaagagggttcttgaacctctgggcctggttgaggaacctgttaagacggctccgggaaaaaagaggccggtagagcactctcctgtggagccagactcctcctcgggaaccggaaaggcgggccagcagcctgcaagaaaaagattgaatttcggtcagactggagacgcagactccgtacctgacccccagcctctcggacagccaccagcagccccctctggtctgggaactaatacgatggctacaggcagtggcgcaccaatggcagacaataacgagggcgccgacggagtgggtaattcctcgggaaattggcattgcgattccacatggatgggcgacagagtcatcaccaccagcacccgcacctgggctctgcccacctacaacaaccatctgtacaagcaaatttccagccaatcaggagcatcgaacgacaaccactactttggctacagcaccccctgggggtattttgacttcaacagattccactgccacttttcgccacgtgactggcaaagactcatcaacaacaactggggattccggcccaagagactcagcttcaagctctttaacattcaagtcaaggaggtcacgcagaatgacggtacgacgacgattgccaataaccttaccagcacggttcaggtctttactgactcggagtaccagctcccgtacgtcctcggctcggcgcatcaaggatgcctcccgccgttcccagcagacgtcttcatggtgccacagtatggatacctcaccctgaacaacgggagtcaggcggtaggacgctcttcattttactgcctggagtacttcccttctcagatgcttcgcacgggaaacaactttaccttcagctacacctttgaggacgtgccttttcacagcagctacgctcacagccaaagtctggaccgtctcatgaatcctctcatcgaccaatacctgtattacttgagcaaaacaaacgctccaagcggaaccaccacgatgtccaggcttcagttttctcaggccggagcgagtgacattcgggaccagtctagaaactggcttcctggaccctgttaccgccagcagcgagtatcaaagacagctgcggacaacaacaacagtgattactcgtggactggagctaccaagtaccacctcaatggaagagactctctggtgaacccgggcccagctatggccagccacaaggatgatgaagaaaaatattttcctcagagcggggttctcatcttcgggaaacaaggctcaaataaaactaatgtggacattgaaaaggttatgattacagacgaagaggaaatcaggaccaccaatcccgtggctacggagcagtatggttctgtatctaccaaccttcaaagcggcaacacacaagcagctacctcagatgtcaacacacaaggcgttcttcctggcatggtctggcaggacagagatgtgtacctgcaggggcccatctgggcaaagattcctcacacggacggacactttcacccttctcccctcatgggcggatttggattgaagcaccctcccccacagattctcatcaagaataccccggtacctgcgaatccttcgaccaccttcagtgcgacaaagtttgcttccttcatcacacagtattccacgggacaggtcagcgtggagatagagtgggagctgcagaaggagaacagcaaacgctggaaccccgagatccagtatacttccaactacaacaaatctgttaatgtggactttactgtggacactaatggtgtgtattcagagcctcgccccattggcaccagatacctgactcgtaatctgtaa

SEQ ID NO: 1231 - DNA, 2208 bp, Artificial Sequence
  Synthetic Polynucleotide
atggctgccgatggttatcttccagattggctcgaggacactctctctgaaggaataagacagtggtggaagctcaaacctggcccaccaccgccaaagcccgcagagcggcataaggacgacagcaggggtcttgtgcttcctgggtacaagtacctcggacccttcaacggactcgacaagggggagtcggtcaacgaggcagacgccgcggccctcgagcacgacaaggcctacgaccggcagctcgacagcggagacaacccgtacctcaagtacaaccacgccgacgcggagtttcaggagcgtcttaaagaagatacgtcttttgggggcaacctcggacgagcagtcttccaggcgaaaaagagggttcttgaacctctgggcctggttgaggaacctgttaagacggctccgggaaaaaagaggccggtagagcactctcctgtggagccagactcctcctcgggaaccggaaaggcgggccagcagcctgcaagaaaaagattgaatttcggtcagactggagacgcagactccgtacctgacccccagcctctcggacagccaccagcagccccctctggtctgggaactaatacgatggctacaggcagtggcgcaccaatggcagacaataacgagggcgccgacggagtgggtaattcctcgggaaattggcattgcgattccacatggatgggcgacagagtcatcaccaccagcacccgcacctgggctctgcccacctacaacaaccatctgtacaagcaaatttccagccaatcaggagcatcgaacgacaaccactactttggctacagcaccccctgggggtattttgacttcaacagattccactgccacttttcgccacgtgactggcaaagactcatcaacaacaactggggattccggcccaagagactcagcttcaagctctttaacattcaagtcaaggaggtcacgcagaatgacggtacgacgacgattgccaataaccttaccagcacggttcaggtctttactgactcggagtaccagctcccgtacgtcctcggctcggcgcatcaaggatgcctcccgccgttcccagcagacgtcttcatggtgccacagtatggatacctcaccctgaacaacgggagtcaggcggtaggacgctcttcattttactgcctggagtacttcccttctcagatgcttcgcacgggaaacaactttaccttcagctacacctttgaggacgtgccttttcacagcagctacgctcacagccaaagtctggaccgtctcatgaatcctctcatcgaccaatacctgtattacttgagcaaaacaaacgctccaagcggaaccaccacgatgtccaggcttcagttttctcaggccggagcgagtgacattcgggaccagtctagaaactggcttcctggaccctgttaccgccagcagcgagtatcaaagacagctgcggacaacaacaacagtgattactcgtggactggagctaccaagtaccacctcaatggaagagactctctggtgaacccgggcccagctatggccagccacaaggatgatgaagaaaaatattttcctcagagcggggttctcatcttcgggaaacaaggctcaaataaaactaatgtggacattgaaaaggttatgattacagacgaagaggaaatcaggaccaccaatcccgtggctacggagcagtatggttctgtatctaccaaccttcaaagcggcaacacacaagcagctacctcagatgtcaacacacaaggcgttcttcctggcatggtctggcaggacagagatgtgtacctgcaggggcccatctgggcaaagattcctcacacggacggacactttcacccttctcccctcatgggcggatttggattgaagcaccctcccccacagattctcatcaagaataccccggtacctgcgaatccttcgaccaccttcagtgcggcaaagtttgcttccttcatcacacagtattccacgggacaggtcagcgtggagatagagtgggagctgcagaaggagaacagcaaacgctggaaccccgagatccagtatacttccaactacaacaaatctgttaatgtggactttactgtggacactaatggtgtgtattcagagcctcgccccattggcaccagatacctgactcgtaatctgtaa

SEQ ID NO: 1232 - DNA, 2208 bp, Artificial Sequence
  Synthetic Polynucleotide
atggctgccgatggttatcttccagattggctcgaggacactctctctgaaggaataagacagtggtggaagctcaaacctggcccaccaccgccaaagcccgcagagcggcataaggacgacagcaggggtcttgtgcttcctgggtacaagtacctcggacccttcaacggactcgacaagggggagccggtcaacgaggcagacgccgcggccctcgagcacgacaaggcctacgaccggcagctcgacagcggagacaacccgtacctcaagtacaaccacgccgacgcggagtttcaggagcgtcttaaagaagatacgtcttttgggggcaacctcggacgagcagtcttccaggcgaaaaagagggttcttgaacctctgggcctggttgaggaacctgttaagacggctccgggaaaaaagaggccggtagagcactctcctgtggagccagactcctcctcgggaaccggaaaggcgggccagcagcctgcaagaaaaagattgaatttcggtcagactggagacgcagactccgtacctgacccccagcctctcggacagccaccagcagccccctctggtctgggaactaatacgatggctacaggcagtggcgcaccaatggcagacaataacgagggcgccgacggagtgggtaattcctcgggaaattggcattgcgattccacatggatgggcgacagagtcatcaccaccagcacccgcacctgggctctgcccacctacaacaaccatctgtacaagcaaatttccagccaatcaggagcatcgaacgacaaccactactttggctacagcaccccctgggggtattttgacttcaacagattccactgccacttttcgccacgtgactggcaaagactcatcaacaacaactggggattccggcccaagagactcagcttcaagctctttaacattcaagtcaaggaggtcacgcagaatgacggtacgacgacgattgccaataaccttaccagcacggttcaggtctttactgactcggagtaccagctcccgtacgtcctcggctcggtgcatcaaggatgcctcccgccgttcccagcagacgtcttcatggtgccacagtatggatacctcaccctgaacaacgggagtcaggcggtaggacgctcttcattttactgcctggagtacttcccttctcagatgcttcgcacgggaaacaactttaccttcagctacacctttgaggacgtgccttttcacagcagctacgctcacagccaaagtctggaccgtctcatgaatcctctcatcgaccaatacctgtattacttgagcaaaacaaacgctccaagcggaaccaccacgatgtccaggcttcagttttctcaggccggagcgagtgacattcgggaccagtctagaaactggcttcctggaccctgttaccgccagcagcgagtatcaaagacagctgcggacaacaacaacagtgattactcgtggactggagctaccaagtaccacctcaatggaagagactctctggtgaacccgggcccagctatggccagccacaaggatgatgaagaaaaatattttcctcagagcggggttctcatcttcgggaaacaaggctcaaataaaactaatgtggacattgaaaaggttatgattacagacgaagaggaaatcaggaccaccaatcccgtggctacggagcagtatggttctgtatctaccaaccttcaaagcggcaacacacaagcagctacctcagatgtcaacacacaaggcgttcttcctggcatggtctggcaggacagagatgtgtacctgcaggggcccatctgggcaaagattcctcacacggacggacactttcacccttctcccctcatgggcggatttggattgaagcaccctcccccacagattctcatcaagaataccccggtacctgcgaatccttcgaccaccttcagtgcggcaaagtttgcttccttcatcacacagtattccacgggacaggtcagcgtggagatagagtgggagctgcagaaggagaacagcaaacgctggaaccccgagatccagtatacttccaactacaacaaatctgttaatgtggactttactgtggacactaatggtgtgtattcagagcctcgccccattggcaccagatacctgactcgtaatctgtaa

SEQ ID NO: 1233 - DNA, 2208 bp, Artificial Sequence
  Synthetic Polynucleotide
atggctgccgatggttatcttccagattggctcgaggacactctctctgaaggaataagacagtggtggaagctcaaacctggcccaccaccgccaaagcccgcagagcggcataaggacgacagcaggggtcttgtgcttcctgggtacaagtacctcggacccttcaacggactcgacaagggggagccggtcaacgaggcagacgccgcggccctcgagcacgacaaggcctacgaccggcagctcgacagcggagacaacccgtacctcaagtacaaccacgccgacgcggagtttcaggagcgtcttaaagaagatacgtcttttgggggcaacctcggacgagcagtcttccaggcgaaaaagagggttcttgaacctctgggcctggttgaggaacctgttaagacggctccgggaaaaaagaggccggtagagcactctcctgtggagtcagactcctcctcgggaaccggaaaggcgggccagcagcctgcaagaaaaagattgaatttcggtcagactggagacgcagactccgtacctgacccccagcctctcggacagccaccagcagccccctctggtctgggaactaatacgatggctacaggcagtggcgcaccaatggcagacaataacgagggcgccgacggagtgggtaattcctcgggaaattggcattgcgattccacatggatgggcgacagagtcatcaccaccagcacccgcacctgggctctgcccacctacaacaaccatctgtacaagcaaatttccagccaatcaggagcatcgaacgacaaccactactttggctacagcaccccctgggggtattttgacttcaacagattccactgccacttttcgccacgtgactggcaaagactcatcaacaacaactggggattccggcccaagagactcagcttcaagctctttaacattcaagtcaaggaggtcacgcagaatgacggtacgacgacgattgccaataaccttaccagcacggttcaggtctttactgactcggagtaccagctcccgtacgtcctcggctcggcgcatcaaggatgcctcccgccgttcccagcagacgtcttcatggtgccacagtatggatacctcaccctgaacaacgggagtcaggcggtaggacgctcttcattttactgcctggagtacttcccttctcagatgcttcgcacgggaaacaactttaccttcagctacacctttgaggacgtgccttttcacagcagctacgctcacagccaaagtctggaccgtctcatgaatcctctcatcgaccaatacctgtattacttgagcaaaacaaacgctccaagcggaaccaccacgatgtccaggcttcagttttctcaggccggagcgagtgacattcgggaccagtctagaaactggcttcctggaccctgttaccgccagcagcgagtatcaaagacagctgcggacaacaacaacagtgattactcgtggactggagctaccaagtaccacctcaatggaagagactctctggtgaacccgggcccagctatggccagccacaaggatgatgaagaaaaatattttcctcagagcggggttctcatcttcgggaaacaaggctcaaataaaactaatgtggacattgaaaaggttatgattacagacgaagaggaaatcaggaccaccaatcccgtggctacggagcagtatggttctgtatctaccaaccttcaaagcggcaacacacaagcagctacctcagatgtcaacacacaaggcgttcttcctggcatggtctggcaggacagagatgtgtacctgcaggggcccatctgggcaaagattcctcacacggacggacactttcacccttctcccctcatgggcggatttggattgaagcaccctcccccacagattctcatcaagaataccccggtacctgcgaatccttcgaccaccttcagtgcggcaaagtttgcttccttcatcacacagtattccacgggacaggtcagcgtggagatagagtgggagctgcagaaggagaacagcaaacgctggaaccccgagatccagtatacttccaactacaacaaatctgttaatgtggactttactgtggacactaatggtgtgtattcagagcctcgccccattggcaccagatacctgactcgtaatctgtaa

SEQ ID NO: 1234 - DNA, 2208 bp, Artificial Sequence
  Synthetic Polynucleotide
atggctgccgatggttatcttccagattggctcgaggacactctctctgaaggaataagacagtggtggaagctcaaacctggcccaccaccgccaaagcccgcagagcggcataaggacgacagcaggggtcttgtgcttcctgggtacaagtacctcggacccttcaacggactcgacaagggggagccggtcaacgaggcagacgccgcggccctcgagcacgacaaggcctacgaccggcagctcgacagcggagacaacccgtacctcaagtacaaccacgccgacgcggagtttcaggagcgtcttaaagaagatacgtcttttgggggcaacctcggacgagcagtcttccaggcgaaaaagagggttcttgaacctctgggcctggttgaggaacctgttaagacggctccgggaaaaaagaggccggtagagcactctcctgtggagccagactcctcctcgggaaccggaaaggcgggccagcagcctgcaagaaaaagattgaatttcggtcagactggagacgcagactccgtacctgacccccagcctctcggacagccaccagcagccccctctggtctgggaactaatacgatggctacaggcagtggcgcaccaatggcagacaataacgagggcgccgacggagtgggtaattcctcgggaaattggcattgcgattccacatggatgggcgacagagtcatcaccaccagcacccgcacctgggctctgcccacctacaacaaccatctgtacaagcaaatttccagccaatcaggagcatcgaacgacaaccactactttggctacagcaccccctgggggtattttgacttcaacagattccactgccacttttcgccacgtgactggcaaagactcatcaacaacaactggggattccggcccaagagactcagcttcaagctctttaacattcaagtcaaggaggtcacgcagaatgacggtacgacgacgattgccaataaccttaccagcacggttcaggtctttactgactcggagtaccagctcccgtacgtcctcggctcggcgcatcaaggatgcctcccgccgttcccagcagacgtcttcatggtgccacagtatggatacctcaccctgaacaacgggagtcaggcggtaggacgctcttcattttactgcctggagtacttcccttctcagatgcttcgcacgggaaacaactttaccttcagctacacctttgaggacgtgccttttcacagcagctacgctcacagccaaagtatggaccgtctcatgaatcctctcatcgaccaatacctgtattacttgagcaaaacaaacgctccaagcggaaccaccacgatgtccaggcttcagttttctcaggccggagcgagtgacattcgggaccagtctagaaactggcttcctggaccctgttaccgccagcagcgagtatcaaagacagctgcggacaacaacaacagtgattactcgtggactggagctaccaagtaccacctcaatggaagagactctctggtgaacccgggcccagctatggccagccacaaggatgatgaagaaaaatattttcctcagagcggggttctcatcttcgggaaacaaggctcaaataaaactaatgtggacattgaaaaggttatgattacagacgaagaggaaatcaggaccaccaatcccgtggctacggagcagtatggttctgtatctaccaaccttcaaagcggcaacacacaagcagctacctcagatgtcaacacacaaggcgttcttcctggcatggtctggcaggacagagatgtgtacctgcaggggcccatctgggcaaagattcctcacacggacggacactttcacccttctcccctcatgggcggatttggattgaagcaccctcccccacagattctcatcaagaataccccggtacctgcgaatccttcgaccaccttcagtgcggcaaagtttgcttccttcatcacacagtattccacgggacaggtcagcgtggagatagagtgggagctgcagaaggagaacagcaaacgctggaaccccgagatccagtatacttccaactacaacaaatctgttaatgtggactttactgtggacactaatggtgtgtattcagagcctcgccccattggcaccagatacctgactcgtaatctgtaa

SEQ ID NO: 1235 - DNA, 2208 bp, Artificial Sequence
  Synthetic Polynucleotide
atggctgccgatggttatcttccagattggctcgaggacactctctctgaaggaataagacagtggtggaagctcaaacctggcccaccaccgccaaagcccgcagagcggcataaggacgacagcaggggtcttgtgcttcctgggtacaagtacctcggacccttcaacggactcgacaagggggagccggtcaacgaggcagacgccgcggccctcgagcacgacaaggcctacgaccggcagctcgacagcggagacaacccgtacctcaagtacaaccacgccgacgcggagtttcaggagcgtcttaaagaagatacgtcttttgggggcaacctcggacgagcagtcttccaggcgaaaaagagggttcttgaacctctgggcctggttgaggaacctgttaagacggctccgggaaaaaagaggccggtagagcactctcctgtggagccagactcctcctcgggaaccggaaaggcgggccagcagcctgcaagaaaaagattgaatttcggtcagactggagacgcagactccgtacctgacccccagcctctcggacagccaccagcagccccctctggtctgggaactaatacgatggctacaggcagtggcgcaccaatggcagacaataacgagggcgccgacggagtgggtaattcctcgggaaattggcattgcgattccacatggatgggcgacagagtcatcaccaccagcacccgcacctgggctctgcccacctacaacaaccatctgtacaagcaaatttccagccaatcaggagcatcgaacgacaaccactactttggctacagcaccccctgggggtattttgacttcaacagattccactgccacttttcgccacgtgactggcaaagactcatcaacaacaactggggattccggcccaagagactcagcttcaagctctttaacattcaagtcaaggaggtcacgcagaatgacggtacgacgacgattgccaataaccttaccagcacggttcaggtctttactgactcggagtaccagctcccgtacgtcctcggctcggcgcatcaaggatgcctcccgccgttcccagcagacgtcttcatggtgccacagtatggatacctcaccctgaacaacgggagtcaggcggtaggacgctcttcattttactgcctggagtacttcccttctcagatgcttcgcacgggaaacaactttaccttcagctacacctttgaggacgtgccttttcacagcagctacgctcacagccaaagtctggaccgtctcatgaatcctctcatcgaccaatacctgtattacttgagcaaaacaaacgctccaagcggaaccaccacgatgtccaggcttcagttttctcaggccggagcgagtgacattcgggaccagtctagaaactggcttcctggaccctgttaccgccagcagcgagtatcaaagacagctgcggacaacaacaacagtgattactcgtggactggagctaccaagtaccacctcaatggaagagactctctggtgaacccgggcccagctatggccagccacaaggatgatgaagaaaaatattttcctcagagcggggttctcatctttcggaaacaaggctcaaataaaactaatgtggacattgaaaaggttatgattacagacgaagaggaaatcaggaccaccaatcccgtggctacggagcagtatggttctgtatctaccaaccttcaaagcggcaacacacaagcagctacctcagatgtcaacacacaaggcgttcttcctggcatggtctggcaggacagagatgtgtacctgcaggggcccatctgggcaaagattcctcacacggacggacactttcacccttctcccctcatgggcggatttggattgaagcaccctcccccacagattctcatcaagaataccccggtacctgcgaatccttcgaccaccttcagtgcggcaaagtttgcttccttcatcacacagtattccacgggacaggtcagcgtggagatagagtgggagctgcagaaggagaacagcaaacgctggaaccccgagatccagtatacttccaactacaacaaatctgttaatgtggactttactgtggacactaatggtgtgtattcagagcctcgccccattggcaccagatacctgactcgtaatctgtaa

SEQ ID NO: 1236 - DNA, 2208 bp, Artificial Sequence
  Synthetic Polynucleotide
atggctgccgatggttatcttccagattggctcgaggacactctctctgaaggaataagacagtggtggaagctcaaacctggcccaccaccgccaaagcccgcagagcggcataaggacgacagcaggggtcttgtgcttcctgggtacaagtacctcggacccttcaacggactcgacaagggggagccggtcaacgaggcagacaccgcggccctcgagcacgacaaggcctacgaccggcagctcgacagcggagacaacccgtacctcaagtacaaccacgccgacgcggagtttcaggagcgtcttaaagaagatacgtcttttgggggcaacctcggacgagcagtcttccaggcgaaaaagagggttcttgaacctctgggcctggttgaggaacctgttaagacggctccgggaaaaaagaggccggtagagcactctcctgtggagccagactcctcctcgggaaccggaaaggcgggccagcagcctgcaagaaaaagattgaatttcggtcagactggagacgcagactccgtacctgacccccagcctctcggacagccaccagcagccccctctggtctgggaactaatacgatggctacaggcagtggcgcaccaatggcagacaataacgagggcgccgacggagtgggtaattcctcgggaaattggcattgcgattccacatggatgggcgacagagtcatcaccaccagcacccgcacctgggctctgcccacctacaacaaccatctgtacaagcaaatttccagccaatcaggagcatcgaacgacaaccactactttggctacagcaccccctgggggtattttgacttcaacagattccactgccacttttcgccacgtgactggcaaagactcatcaacaacaactggggattccggcccaagagactcagcttcaagctctttaacattcaagtcaaggaggtcacgcagaatgacggtacgacgacgattgccaataaccttaccagcacggttcaggtctttactgactcggagtaccagctcccgtacgtcctcggctcggcgcatcaaggatgcctcccgccgttcccagcagacgtcttcatggtgccacagtatggatacctcaccctgaacaacgggagtcaggcggtaggacgctcttcattttactgcctggagtacttcccttctcagatgcttcgcacgggaaacaactttaccttcagctacacctttgaggacgtgccttttcacagcagctacgctcacagccaaagtctggaccgtctcatgaatcctctcatcgaccaatacctgtattacttgagcaaaacaaacgctccaagcggaaccaccacgatgtccaggcttcagttttctcaggccggagcgagtgacattcgggaccagtctagaaactggcttcctggaccctgttaccgccagcagcgagtatcaaagacagctgcggacaacaacaacagtgattactcgtggactggagctaccaagtaccacctcaatggaagagactctctggtgaacccgggcccagctatggccagccacaaggatgatgaagaaaaatattttcctcagagcggggttctcatcttcgggaaacaaggctcaaataaaactaatgtggacattgaaaaggttatgattacagacgaagaggaaatcaggaccaccaatcccgtggctacggagcagtatggttctgtatctaccaaccttcaaagcggcaacacacaagcagctacctcagatgtcaacacacaaggcgttcttcctggcatggtctggcaggacagagatgtgtacctgcaggggcccatctgggcaaagattcctcacacggacggacactttcacccttctcccctcatgggcggatttggattgaagcaccctcccccacagattctcatcaagaataccccggtacctgcgaatccttcgaccaccttcagtgcggcaaagtttgcttccttcatcacacagtattccacgggacaggtcagcgtggagatagagtgggagctgcagaaggagaacagcaaacgctggaaccccgagatccagtatacttccaactacaacaaatctgttaatgtggactttactgtggacactaatggtgtgtattcagagcctcgccccattggcaccagatacctgactcgtaatctgtaa

SEQ ID NO: 1237 - DNA, 2208 bp, Artificial Sequence
  Synthetic Polynucleotide
atggctgccgatggttatcttccagattggctcgaggacactctctctgaaggaataagacagtggtggaagctcaaacctggcccaccaccgccaaagcccgcagagcggcataaggacgacagcaggggtcttgtgcttcctgggtacaagtacctcggacccttcaacggactcgacaagggggagccggtcaacgaggcagacgccgcggccctcgagcacgacaaggcctacgaccggcagctcgacagcggagacaacccgtacctcaagtacaaccacgccgacgcggagtttcaggagcgtcttaaagaagatacgtcttttgggggcaacctcggacgagcagtcttccaggcgaaaaagagggttcttgaacctctgggcctggttgaggaacctgttaagacggctccgggaaaaaagaggccggtagagcactctcctgtggagccagactcctcctcgggaaccggaaaggcgggccagcagcctgcaagaaaaagattgaatttcggtcagactggagacgcagactccgtacctgacccccagcctctcggacagccaccagcagccccctctggtctgggaactaatacgatggctacaggcagtggcacaccaatggcagacaataacgagggcgccgacggagtgggtaattcctcgggaaattggcattgcgattccacatggatgggcgacagagtcatcaccaccagcacccgcacctgggctctgcccacctacaacaaccatctgtacaagcaaatttccagccaatcaggagcatcgaacgacaaccactactttggctacagcaccccctgggggtattttgacttcaacagattccactgccacttttcgccacgtgactggcaaagactcatcaacaacaactggggattccggcccaagagactcagcttcaagctctttaacattcaagtcaaggaggtcacgcagaatgacggtacgacgacgattgccaataaccttaccagcacggttcaggtctttactgactcggagtaccagctcccgtacgtcctcggctcggcgcatcaaggatgcctcccgccgttcccagcagacgtcttcatggtgccacagtatggatacctcaccctgaacaacgggagtcaggcggtaggacgctcttcattttactgcctggagtacttcccttctcagatgcttcgcacgggaaacaactttaccttcagctacacctttgaggacgtgccttttcacagcagctacgctcacagccaaagtctggaccgtctcatgaatcctctcatcgaccaatacctgtattacttgagcaaaacaaacgctccaagcggaaccaccacgatgtccaggcttcagttttctcaggccggagcgagtgacattcgggaccagtctagaaactggcttcctggaccctgttaccgccagcagcgagtatcaaagacagctgcggacaacaacaacagtgattactcgtggactggagctaccaagtaccacctcaatggaagagactctctggtgaacccgggcccagctatggccagccacaaggatgatgaagaaaaatattttcctcagagcggggttctcatcttcgggaaacaaggctcaaataaaactaatgtggacattgaaaaggttatgattacagacgaagaggaaatcaggaccaccaatcccgtggctacggagcagtatggttctgtatctaccaaccttcaaagcggcaacacacaagcagctacctcagatgtcaacacacaaggcgttcttcctggcatggtctggcaggacagagatgtgtacctgcaggggcccatctgggcaaagattcctcacacggacggacactttcacccttctcccctcatgggcggatttggattgaagcaccctcccccacagattctcatcaagaataccccggtacctgcgaatccttcgaccaccttcagtgcggcaaagtttgcttccttcatcacacagtattccacgggacaggtcagcgtggagatagagtgggagctgcagaaggagaacagcaaacgctggaaccccgagatccagtatacttccaactacaacaaatctgttaatgtggactttactgtggacactaatggtgtgtattcagagcctcgccccattggcaccagatacctgactcgtaatctgtaa

SEQ ID NO: 1238 - DNA, 2208 bp, Artificial Sequence
  Synthetic Polynucleotide
atggctgccgatggttatcttccagattggctcgaggacactctctctgaaggaataagacagtggtggaagctcaaacctggcccaccaccgccaaagcccgcagagcggcataaggacgacagcaggggtcttgtgcttcctgggtacaagtacctcggacccttcaacggactcgacaagggggagccggtcaacgaggcagacgccgcggccctcgagcacgacaaggcctacgaccggcagctcgacagcggagacaacccgtacctcaagtacaaccacgccgacgcggagtttcaggagcgtcttaaagaagatacgtcttttgggggcaacctcggacgagcagtcttccaggcgaaaaagagggttcttgaacctctgggcctggttgaggaacctgttaagacggctccgggaaaaaagaggccggtagagcactctcctgtggagccagactcctcctcgggaaccggaaaggcgggccagcagcctgcaagaaaaagattgaatttcggtcagactggagacgcagactccgtacctgacccccagcctctcggacagccaccagcagccccctctggtctgggaactaatacgatggctacaggcagtggcgcaccaatggcagacaataacgagggcgccgacggagtgggtaattcctcgggaaattggcattgcgattccacatggatgggcgacagagtcatcaccaccagcacccgcacctgggctctgtccacctacaacaaccatctgtacaagcaaatttccagccaatcaggagcatcgaacgacaaccactactttggctacagcaccccctgggggtattttgacttcaacagattccactgccacttttcgccacgtgactggcaaagactcatcaacaacaactggggattccggcccaagagactcagcttcaagctctttaacattcaagtcaaggaggtcacgcagaatgacggtacgacgacgattgccaataaccttaccagcacggttcaggtctttactgactcggagtaccagctcccgtacgtcctcggctcggcgcatcaaggatgcctcccgccgttcccagcagacgtcttcatggtgccacagtatggatacctcaccctgaacaacgggagtcaggcggtaggacgctcttcattttactgcctggagtacttcccttctcagatgcttcgcacgggaaacaactttaccttcagctacacctttgaggacgtgccttttcacagcagctacgctcacagccaaagtctggaccgtctcatgaatcctctcatcgaccaatacctgtattacttgagcaaaacaaacgctccaagcggaaccaccacgatgtccaggcttcagttttctcaggccggagcgagtgacattcgggaccagtctagaaactggcttcctggaccctgttaccgccagcagcgagtatcaaagacagctgcggacaacaacaacagtgattactcgtggactggagctaccaagtaccacctcaatggaagagactctctggtgaacccgggcccagctatggccagccacaaggatgatgaagaaaaatattttcctcagagcggggttctcatcttcgggaaacaaggctcaaataaaactaatgtggacattgaaaaggttatgattacagacgaagaggaaatcaggaccaccaatcccgtggctacggagcagtatggttctgtatctaccaaccttcaaagcggcaacacacaagcagctacctcagatgtcaacacacaaggcgttcttcctggcatggtctggcaggacagagatgtgtacctgcaggggcccatctgggcaaagattcctcacacggacggacactttcacccttctcccctcatgggcggatttggattgaagcaccctcccccacagattctcatcaagaataccccggtacctgcgaatccttcgaccaccttcagtgcggcaaagtttgcttccttcatcacacagtattccacgggacaggtcagcgtggagatagagtgggagctgcagaaggagaacagcaaacgctggaaccccgagatccagtatacttccaactacaacaaatctgttaatgtggactttactgtggacactaatggtgtgtattcagagcctcgccccattggcaccagatacctgactcgtaatctgtaa

SEQ ID NO: 1239 - DNA, 2208 bp, Artificial Sequence
  Synthetic Polynucleotide
atggctgccgatggttatcttccagattggctcgaggacactctctctgaaggaataagacagtggtggaagctcaaacctggcccaccaccgccaaagcccgcagagcggcataaggacgacagcaggggtcttgtgcttcctgggtacaagtacctcggacccttcaacggactcgacaagggggagccggtcaacgaggcagacgccgcggccctcgagcacgacaaggcctacgaccggcagctcgacagcggagacaacccgtacctcaagtacaaccacgccgacgcggagtttcaggagcgtcttaaagaagatacgtcttttgggggcaacctcggacgagcagtcttccaggcgaaaaagagggttcttgaacctctgggcctggttgaggaacctgttaagacggctccgggaaaaaagaggccggtagagcactctcctgtggagccagactcctcctcgggaaccggaaaggcgggccagcagcctgcaagaaaaagattgaatttcggtcagactggagacgcagactccgtacctgacccccagcctctcggacagccaccagcagccccctctggtctgggaactaatacgatggctacaggcagtggcgcaccaatggcagacaataacgagggcgccgacggagtgggtaattcctcgggaaattggcattgcgattccacatggatgggcgacagagtcatcaccaccagcacccgcacctgggctctgcccacctacaacaaccatctgtacaagcaaatttccagccaatcaggagcatcgaacgacaaccactactttggctacagcaccccctgggggtattttgacttcaacagattccactgccacttttcgccacgtgactggcaaagactcatcaacaacaactggggattccggcccaagagactcagcttcaagctctttaacattcaagtcaaggaggtcacgcagaatgacggtacgacgacgattgccaataaccttaccagcacggttcaggtctttactgactcggagtaccagctcccgtacgtcctcggctcggcgcatcaaggatgcctcccgccgttcccagcagacgtcttcatggtgccacagtatggatacctcaccctgaacaacgggagtcaggcggtaggacgctcttcattttactgcctggagtacttcccttctcagatgcttcgcacgggaaacaactttaccttcagctacacctttgaggacgtgccttttcacagcagctacgctcacagccaaagtctggaccgtctcatgaatcctctcatcgaccaatacctgtattacttgagcaaaacaaacgctccaagcggaaccaccacgatgtccaggcttcagttttctcaggccggagcgagtgacattcgggaccagtctagaaactggcttcctggaccctgttaccgccagcagcgagtatcaaagacagctgtggacaacaacaacagtgattactcgtggactggagctaccaagtaccacctcaatggaagagactctctggtgaacccgggcccagctatggccagccacaaggatgatgaagaaaaatattttcctcagagcggggttctcatcttcgggaaacaaggctcaaataaaactaatgtggacattgaaaaggttatgattacagacgaagaggaaatcaggaccaccaatcccgtggctacggagcagtatggttctgtatctaccaaccttcaaagcggcaacacacaagcagctacctcagatgtcaacacacaaggcgttcttcctggcatggtctggcaggacagagatgtgtacctgcaggggcccatctgggcaaagattcctcacacggacggacactttcacccttctcccctcatgggcggatttggattgaagcaccctcccccacagattctcatcaagaataccccggtacctgcgaatccttcgaccaccttcagtgcggcaaagtttgcttccttcatcacacagtattccacgggacaggtcagcgtggagatagagtgggagctgcagaaggagaacagcaaacgctggaaccccgagatccagtatacttccaactacaacaaatctgttaatgtggactttactgtggacactaatggtgtgtattcagagcctcgccccattggcaccagatacctgactcgtaatctgtaa

SEQ ID NO: 1240 - DNA, 2208 bp, Artificial Sequence
  Synthetic Polynucleotide
atggctgccgatggttatcttccagattggctcgaggacactctctctgaaggaataagacagtggtggaagctcaaacctggcccaccaccgccaaagcccgcagagcggcataaggacgacagcaggggtcttgtgcttcctgggtacaagtacctcggacccttcaacggactcgacaagggggagccggtcaacgaggcagacgccgcggccctcgagcacgacaaggcctacgaccggcagctcgacagcggagacaacccgtacctcaagtacaaccacgccgacgcggagtttcaggagcgtcttaaagaagatacgtcttttgggggcaacctcggacgagcagtcttccaggcgaaaaagagggttcttgaacctctgggcctggttgaggaacctgttaagacggctccgggaaaaaagaggccggtagagcactctcctgtggagccagactcctcctcgggaaccggaaaggcgggccagcagcctgcaagaaaaagattgaatttcggtcagactggagacgcagactccgtacctgacccccagcctctcggacagccaccagcagccccctctggtctgggaactaatacgatggctacaggcagtggcgcaccaatggcagacaataacgagggcgccgacggagtgggtaattcctcgggaaattggcattgcgattccacatggatgggcgacagagtcatcaccaccagcacccgcacctgggctctgcccacctacaacaaccatctgtacaagcaaatttccagccaatcaggagcatcgaacgacaaccactactttggctacagcaccccctgggggtattttgacttcaacagattccactgccacttttcgccacgtgactggcaaagactcatcaacaacaactggggattccggcccaagagactcagcttcaagctctttaacattcaagtcaaggaggtcacgcagaatgacggtacgacgacgattgccaataaccttaccagcacggttcaggtctttactgactcggagtaccagctcccgtacgtcctcggctcggcgcatcaaggatgcctcccgccgttcccagcagacgtcttcatggtgccacagtatggatacctcaccctgaacaacgggagtcaggcggtaggacgctcttcattttactgcctggagtacttcccttctcagatacttcgcacgggaaacaactttaccttcagctacacctttgaggacgtgccttttcacagcagctacgctcacagccaaagtctggaccgtctcatgaatcctctcatcgaccaatacctgtattacttgagcaaaacaaacgctccaagcggaaccaccacgatgtccaggcttcagttttctcaggccggagcgagtgacattcgggaccagtctagaaactggcttcctggaccctgttaccgccagcagcgagtatcaaagacagctgcggacaacaacaacagtgattactcgtggactggagctaccaagtaccacctcaatggaagagactctctggtgaacccgggcccagctatggccagccacaaggatgatgaagaaaaatattttcctcagagcggggttctcatcttcgggaaacaaggctcaaataaaactaatgtggacattgaaaaggttatgattacagacgaagaggaaatcaggaccaccaatcccgtggctacggagcagtatggttctgtatctaccaaccttcaaagcggcaacacacaagcagctacctcagatgtcaacacacaaggcgttcttcctggcatggtctggcaggacagagatgtgtacctgcaggggcccatctgggcaaagattcctcacacggacggacactttcacccttctcccctcatgggcggatttggattgaagcaccctcccccacagattctcatcaagaataccccggtacctgcgaatccttcgaccaccttcagtgcggcaaagtttgcttccttcatcacacagtattccacgggacaggtcagcgtggagatagagtgggagctgcagaaggagaacagcaaacgctggaaccccgagatccagtatacttccaactacaacaaatctgttaatgtggactttactgtggacactaatggtgtgtattcagagcctcgccccattggcaccagatacctgactcgtaatctgtaa

SEQ ID NO: 1241 - DNA, 2208 bp, Artificial Sequence
  Synthetic Polynucleotide
atggctgccgatggttatcttccagattggctcgaggacactctctctgaaggaataagacagtggtggaagctcaaacctggcccaccaccgccaaagcccgcagagcggcataaggacgacagcaggggtcttgtgcttcctgggtacaagtacctcggacccttcaacggactcgacaagggggagccggtcaacgaggcagacgccgcggccctcgagcacgacaaggcctacgaccggcagctcgacagcggagacaacccgtacctcaagtacaaccacgccgacgcggagtttcaggagcgtcttaaagaagatacgtcttttgggggcaacctcggacgagcagtcttccaggcgaaaaagagggttcttgaacctctgggcctggttgaggaacctgttaagacggctccgggaaaaaagaggccggtagagcactctcctgtggagccagactcctcctcgggaaccggaaaggtgggccagcagcctgcaagaaaaagattgaatttcggtcagactggagacgcagactccgtacctgacccccagcctctcggacagccaccagcagccccctctggtctgggaactaatacgatggctacaggcagtggcgcaccaatggcagacaataacgagggcgccgacggagtgggtaattcctcgggaaattggcattgcgattccacatggatgggcgacagagtcatcaccaccagcacccgcacctgggctctgcccacctacaacaaccatctgtacaagcaaatttccagccaatcaggagcatcgaacgacaaccactactttggctacagcaccccctgggggtattttgacttcaacagattccactgccacttttcgccacgtgactggcaaagactcatcaacaacaactggggattccggcccaagagactcagcttcaagctctttaacattcaagtcaaggaggtcacgcagaatgacggtacgacgacgattgccaataaccttaccagcacggttcaggtctttactgactcggagtaccagctcccgtacgtcctcggctcggcgcatcaaggatgcctcccgccgttcccagcagacgtcttcatggtgccacagtatggatacctcaccctgaacaacgggagtcaggcggtaggacgctcttcattttactgcctggagtacttcccttctcagatgcttcgcacgggaaacaactttaccttcagctacacctttgaggacgtgccttttcacagcagctacgctcacagccaaagtctggaccgtctcatgaatcctctcatcgaccaatacctgtattacttgagcaaaacaaacgctccaagcggaaccaccacgatgtccaggcttcagttttctcaggccggagcgagtgacattcgggaccagtctagaaactggcttcctggaccctgttaccgccagcagcgagtatcaaagacagctgcggacaacaacaacagtgattactcgtggactggagctaccaagtaccacctcaatggaagagactctctggtgaacccgggcccagctatggccagccacaaggatgatgaagaaaaatattttcctcagagcggggttctcatcttcgggaaacaaggctcaaataaaactaatgtggacattgaaaaggttatgattacagacgaagaggaaatcaggaccaccaatcccgtggctacggagcagtatggttctgtatctaccaaccttcaaagcggcaacacacaagcagctacctcagatgtcaacacacaaggcgttcttcctggcatggtctggcaggacagagatgtgtacctgcaggggcccatctgggcaaagattcctcacacggacggacactttcacccttctcccctcatgggcggatttggattgaagcaccctcccccacagattctcatcaagaataccccggtacctgcgaatccttcgaccaccttcagtgcggcaaagtttgcttccttcatcacacagtattccacgggacaggtcagcgtggagatagagtgggagctgcagaaggagaacagcaaacgctggaaccccgagatccagtatacttccaactacaacaaatctgttaatgtggactttactgtggacactaatggtgtgtattcagagcctcgccccattggcaccagatacctgactcgtaatctgtaa

SEQ ID NO: 1242 - DNA, 2208 bp, Artificial Sequence
  Synthetic Polynucleotide
atggctgccgatggttatcttccagattggctcgaggacactctctctgaaggaataagacagtggtggaagctcaaacctggcccaccaccgccaaagcccgcagagcggcataaggacgacagcaggggtcttgtgcttcctgggtacaagtacctcggacccttcaacggactcgacaagggggagccggtcaacgaggcagacgccgcggccctcgagcacgacaaggcctacgaccggcagctcgacagcggagacaacccgtacctcaagtacaaccacgccgacgcggagtttcaggagcgtcttaaagaagatacgtcttttgggggcaacctcggacgagcagtcttccaggcgaaaaagagggttcttgaacctctgggcctggttgaggaacctgttaagacggctccgggaaaaaagaggccggtagagcactctcctgtggagccagactcctcctcgggaaccggaaaggcgggccagcagcctgcaagaaaaagattgaatttcggtcagactggagacgcagactccgtacctgacccccagcctctcggacagccaccagcagccccctctggtctgggaactaatacgatggctgcaggcagtggcgcaccaatggcagacaataacgagggcgccgacggagtgggtaattcctcgggaaattggcattgcgattccacatggatgggcgacagagtcatcaccaccagcacccgcacctgggctctgcccacctacaacaaccatctgtacaagcaaatttccagccaatcaggagcatcgaacgacaaccactactttggctacagcaccccctgggggtattttgacttcaacagattccactgccacttttcgccacgtgactggcaaagactcatcaacaacaactggggattccggcccaagagactcagcttcaagctctttaacattcaagtcaaggaggtcacgcagaatgacggtacgacgacgattgccaataaccttaccagcacggttcaggtctttactgactcggagtaccagctcccgtacgtcctcggctcggcgcatcaaggatgcctcccgccgttcccagcagacgtcttcatggtgccacagtatggatacctcaccctgaacaacgggagtcaggcggtaggacgctcttcattttactgcctggagtacttcccttctcagatgcttcgcacgggaaacaactttaccttcagctacacctttgaggacgtgccttttcacagcagctacgctcacagccaaagtctggaccgtctcatgaatcctctcatcgaccaatacctgtattacttgagcaaaacaaacgctccaagcggaaccaccacgatgtccaggcttcagttttctcaggccggagcgagtgacattcgggaccagtctagaaactggcttcctggaccctgttaccgccagcagcgagtatcaaagacagctgcggacaacaacaacagtgattactcgtggactggagctaccaagtaccacctcaatggaagagactctctggtgaacccgggcccagctatggccagccacaaggatgatgaagaaaaatattttcctcagagcggggttctcatcttcgggaaacaaggctcaaataaaactaatgtggacattgaaaaggttatgattacagacgaagaggaaatcaggaccaccaatcccgtggctacggagcagtatggttctgtatctaccaaccttcaaagcggcaacacacaagcagctacctcagatgtcaacacacaaggcgttcttcctggcatggtctggcaggacagagatgtgtacctgcaggggcccatctgggcaaagattcctcacacggacggacactttcacccttctcccctcatgggcggatttggattgaagcaccctcccccacagattctcatcaagaataccccggtacctgcgaatccttcgaccaccttcagtgcggcaaagtttgcttccttcatcacacagtattccacgggacaggtcagcgtggagatagagtgggagctgcagaaggagaacagcaaacgctggaaccccgagatccagtatacttccaactacaacaaatctgttaatgtggactttactgtggacactaatggtgtgtattcagagcctcgccccattggcaccagatacctgactcgtaatctgtaa

SEQ ID NO: 1243 - DNA, 2208 bp, Artificial Sequence
  Synthetic Polynucleotide
atggctgccgatggttatcttccagattggctcgaggacactctctctgaaggaataagacagtggtggaagctcaaacctggcccaccaccgccaaagcccgcagagcggcataaggacgacagcaggggtcttgtgcttcctgggtacaagtacctcggacccttcaacggactcgacaagggggagccggtcaacgaggcagacgccgcggccctcgagcacgacaaggcctacgaccggcagctcgacagcggagacaacccgtacctcaagtacaaccacgccgacgcggagtttcaggagcgtcttaaagaagatacgtcttttgggggcaacctcggacgagcagtcttccaggcgaaaaagagggttcttgaacctctgggcctggttgaggaacctgttaagacggctccgggaaaaaagaggccggtagagcactctcctgtggagccagactcctcctcgggaaccggaaaggcgggccagcagcctgcaagaaaaagattgaatttcggtcagactggagacgcagactccgtacctgacccccagcctctcggacagccaccagcagccccctctggtctgggaactaatacgatggctacaggcagtggcgcaccaatggcagacaataacgagggcgccgacggagtgggtaattcctcgggaaattggcattgcgattccacatggatgggcgacagagtcatcaccaccagcacccgcacctgggctctgcccacctacaacaaccatctgtacaagcaaatttccagccaatcaggagcatcgaacgacaaccactactttggctacagcaccccctgggggtattttgacttcaacagattccactgccacttttcgccacgtgactggcaaagactcatcaacaacaactggggattccggcccaagagactcagcttcaagctctttaacattcaagtcaaggaggtcacgcagaatgacggtacgacgacgattgccaataaccttaccagcacggttcaggtctttactgactcggagtaccagctcccgtacgtcctcggctcggcgcatcaaggatgcctcccgccgttcccagcagacgtcttcatggtgccacagtatggatacctcaccctgaacaacgggagtcaggcggtaggacgctcttcattttactgcctggagtacttcccttctcagatgcttcgcacgggaaacaactttaccttcagctacacctttgaggacgtgccttttcacagcagctacgctcacagccaaagtctggaccgtctcatgaatcctctcatcgaccaatacctgtattacttgagcaaaacaaacgctccaagcggaaccaccacgatgtccaggcttcagttttctcaggccggagcgagtgacattcgggaccagtctagaaactggcttcctggaccctgttaccgccagcagcgagtatcaaagacagctgcggacaacaacaacagtgattactcgtggactggagctaccaagtaccacctcaatggaagagactctctggtgaacccgggcccagctatggccagccacaaggatgatgaagaaaaatattttcctcagagcggggttctcatcttcgggaaacaaggctcaaataaaactaatgtggacattgaaaaggttatgattacagacgaagaggaaatcaggaccaccaatcccgtggctacggagcagtatggttctgtatctaccaaccttcaaagcgacaacacacaagcagctacctcagatgtcaacacacaaggcgttcttcctggcatggtctggcaggacagagatgtgtacctgcaggggcccatctgggcaaagattcctcacacggacggacactttcacccttctcccctcatgggcggatttggattgaagcaccctcccccacagattctcatcaagaataccccggtacctgcgaatccttcgaccaccttcagtgcggcaaagtttgcttccttcatcacacagtattccacgggacaggtcagcgtggagatagagtgggagctgcagaaggagaacagcaaacgctggaaccccgagatccagtatacttccaactacaacaaatctgttaatgtggactttactgtggacactaatggtgtgtattcagagcctcgccccattggcaccagatacctgactcgtaatctgtaa

SEQ ID NO: 1244 - DNA, 2208 bp, Artificial Sequence
  Synthetic Polynucleotide
atggctgccgatggttatcttccagattggctcgaggacactctctctgaaggaataagacagtggtggaagctcaaacctggcccaccaccgccaaagcccgcagagcggcataaggacgacagcaggggtcttgtgcttcctgggtacaagtacctcggacccttcaacggactcgacaagggggagccggtcaacgaggcagacgccgcggccctcgagcacgacaaggcctacgaccggcagctcgacagcggagacaacccgtacctcaagtacaaccacgccgacgcggagtttcaggagcgtcttaaagaagatacgtcttttgggggcaacctcggacgagcagtcttccaggcgaaaaagagggttcttgaacctctgggcctggttgaggaacctgttaagacggctccgggaaaaaagaggccggtagagcactctcctgtggagccagactcctcctcgggaaccggaaaggcgggccagcagcctgcaagaaaaagattgaatttcggtcagactggagacgcagactccgtacctgacccccagcctctcggacagccaccagcagccccctctggtctgggaactaatacgatggctacaggcagtggcgcaccaatggcagacaataacgagggcgccgacggagtgggtaattcctcgggaaattggcattgcgattccacatggatgggcgacagagtcatcaccaccagcacccgcacctgggctctgcccacctacaacaaccatctgtacaagcaaatttccagccaatcaggagcatcgaacgacaaccactactttggctacagcaccccctgggggtattttgacttcaacagattccactgccacttttcgccacgtgactggcaaagactcatcaacaacaactggggattccggcccaagagactcagcttcaagctctttaacattcaagtcaaggaggtcacgcagaatgacggtaygacgacgattgccaataaccttaccagcacggttcaggtctttactgactcggagtaccagctcccgtacgtcctcggctcggcgcatcaaggatgcctcccgccgttcccagcagacgtcttcatggtgccacagtatggatacctcaccctgaacaacgggagtcaggcggtaggacgctcttcattttactgcctggagtacttcccttctcagatgcttcgcacgggaaacaactttaccttcagctacacctttgaggacgtgccttttcacagcagctacgctcacagccaaagtctggaccgtctcatgaatcctctcatcgaccaatacctgtattacttgagcaaaacaaacgctccaagcggaaccaccacgatgtccaggcttcagttttctcaggccggagcgagtgacattcgggaccagtctagaaactggcttcctggaccctgttaccgccagcagcgagtatcaaagacagctgcggacaacaacaacagtgattactcgtggactggagctaccaagtaccacctcaatggaagagactctctggtgaacccgggcccagctatggccagccacaaggatgatgaagaaaaatattttcctcagagcggggttctcatcttcgggaaacaaggctcaaataaaactaatgtggacattgaaaaggttatgattacagacgaagaggaaatcaggaccaccaatcccgtggctacggagcagtatggttctgtatctaccaaccttcaaagcggcaacacacaagcagctacctcagatgtcaacacacaaggcgttcttcctggcatggtctggcaggacagagatgtgtacctgcaggggcccatctgggcaaagattcctcacacggacggacactttcacccttctcccctcatgggcggatttggattgaagcaccctcccccacagattctcatcaagaataccccggtacctgcgaatccttcgaccaccttcagtgcggcaaagtttgcttccttcatcacacagtattccacgggacaggtcagcgtggagatagagtgggagctgcagaaggagaacagcaaacgctggaaccccgagatccagtatacttccaactacaacaaatctgttaatgtggactttactgtggacactaatggtgtgtattcagagcctcgccccattggcaccagatacctgactcgtaatctgtaa

SEQ ID NO: 1245 - DNA, 2208 bp, Artificial Sequence
  Synthetic Polynucleotide
atggctgccgatggttatcttccagattggctcgaggacactctctctgaaggaataagacagtggtggaagctcaaacctggcccaccaccgccaaagcccgcagagcggcataaggacgacagcaggggtcttgtgcttcctgggtacaagtacctcggacccttcaacggactcgacaagggggagccggtcaacgaggcagacgccgcggccctcgagcacgacaaggcctacgaccggcagctcgacagcggagacaacccgtacctcaagtacaaccacgccgacgcggagtttcaggagcgtcttaaagaagatacgtcttttgggggcaacctcggacgagcagtcttccaggcgaaaaagagggttcttgaacctctgggcctggttgaggaacctgttaagacggctccgggaaaaaagaggccggtagagcactctcctgtggagccagactcctcctcgggaaccggaaaggcgggccagcagcctgcaagaaaaagattgaatttcggtcagactggagacgcagactccgtacctgacccccagcctctcggacagccaccagcagccccctctggtctgggaactaatacgatggctacaggcagtggcgcaccaatggcagacaataacgagggcgccgacggagtgggtaattcctcgggaaattggcattgcgattccacatggatgggcgacagagtcatcaccaccagcacccgcacctgggctctgcccacctacaacaaccatctgtacaagcaaatttccagccaatcaggagcatcgaacgacaaccactactttggctacagcaccccctgggggtattttgacttcaacagattccactgccacttttcgccacgtgactggcaaagactcatcaacaacaactggggattccggcccaagagactcagcttcaagctctttaacattcaagtcaaggaggtcacgcagaatgacggtacgacgacgattgccaataaccttaccagcacggttcaggtctttactgactcggagtaccagctcccgtacgtcctcggctcggcgcatcaaggatgcctcccgccgttcccagcagacgtcttcatggtgccacagtatggatacctcaccctgaacaacgggagtcaggcggtaggacgctcttcattttactgcctggagtacttcccttctcagatgcttcgcacgggaaacaactttaccttcagctacacctttgaggacgtgccttttcacagcagctacgctcacagccaaagtctggaccgtctcatgaatcctctcatcgaccaatacctgtattacttgagcaaaacaaacgctccaagcggaaccaccacgatgtccaggcttcagttttctcaggccggagcgagtgacattcgggaccagtctagaaactggcttcctggaccctgttaccgccagcagcgagtatcaaagacagctgcggacaacaacaacagtgattactcgtggactggagctaccaagtaccacctcaatggaagagactctctggtgaacccgggcccagctatggccagccacaaggatgatgaagaaaaatattttcctcagagcggggttctcatcttcgggaaacaaggctcaaataaaactaatgtggacattgaaaaggttatgattacagacgaagaggaaatcaggaccaccaatcccgtggctacggagcagtatggttctgtatctaccaaccttcaaagcggcaacacacaagcagctacctcagatgtcaacacacaaggcgttcttcctggcatggtctggcaggacagagatgtgtacctgcaggggcccatctgggcaaagattcctcacacggacggacactttcacccttctcccctcatgggcggatttggattgaagcaccctcccccacagattctcatcaagaataccccggtacctgcgaatccttcgaccaccttcagtgcggcaaagtttgcttccttcatcacacagtattccacgggacaggtcagcgtggagatagagtgggagctgcagaaggagaacagcaaacgctggaaccccgagatccagtatacttccaactacaacaaatctgttaatgtggactttactgtggacactaatggtgtgtattcagagcctcgccccattgacaccagatacctgactcgtaatctgtaa

SEQ ID NO: 1246 - DNA, 2208 bp, Artificial Sequence
  Synthetic Polynucleotide
atggctgccgatggttatcttccagattggctcgaggacactctctctgaaggaataagacagtggtggaagctcaaacctggcccaccaccgccaaagcccgcagagcggcataaggacgacagcaggggtcttgtgcttcctgggtacaagtacctcggacccttcaacggactcgacaagggggagccggtcaacgaggcagacgccgcggccctcgagcacgacaaggcctacgaccggcagctcgacagcggagacaacccgtacctcaagtacaaccacgccgacgcggagtttcaggagcgtcttaaagaagatacgtcttttgggggcaacctcggacgagcagtcttccaggcgaaaaagagggttcttgaacctctgggcctggttgaggaacctgttaagacggctccgggaaaaaagaggccggtagagcactctcctgtggagccagactcctcctcgggaaccggaaaggcgggccagcagcctgcaagaaaaagattgaatttcggtcagactggagacacagactccgtacctgacccccagcctctcggacagccaccagcagccccctctggtctgggaactaatacgatggctacaggcagtggcgcaccaatggcagacaataacgagggcgccgacggagtgggtaattcctcgggaaattggcattgcgattccacatggatgggcgacagagtcatcaccaccagcacccgcacctgggctctgcccacctacaacaaccatctgtacaagcaaatttccagccaatcaggagcatcgaacgacaaccactactttggctacagcaccccctgggggtattttgacttcaacagattccactgccacttttcgccacgtgactggcaaagactcatcaacaacaactggggattccggcccaagagactcagcttcaagctctttaacattcaagtcaaggaggtcacgcagaatgacggtacgacgacgattgccaataaccttaccagcacggttcaggtctttactgactcggagtaccagctcccgtacgtcctcggctcggcgcatcaaggatgcctcccgccgttcccagcagacgtcttcatggtgccacagtatggatacctcaccctgaacaacgggagtcaggcggtaggacgctcttcattttactgcctggagtacttcccttctcagatgcttcgcacgggaaacaactttaccttcagctacacctttgaggacgtgccttttcacagcagctacgctcacagccaaagtctggaccgtctcatgaatcctctcatcgaccaatacctgtattacttgagcaaaacaaacgctccaagcggaaccaccacgatgtccaggcttcagttttctcaggccggagcgagtgacattcgggaccagtctagaaactggcttcctggaccctgttaccgccagcagcgagtatcaaagacagctgcggacaacaacaacagtgattactcgtggactggagctaccaagtaccacctcaatggaagagactctctggtgaacccgggcccagctatggccagccacaaggatgatgaagaaaaatattttcctcagagcggggttctcatcttcgggaaacaaggctcaaataaaactaatgtggacattgaaaaggttatgattacagacgaagaggaaatcaggaccaccaatcccgtggctacggagcagtatggttctgtatctaccaaccttcaaagcggcaacacacaagcagctacctcagatgtcaacacacaaggcgttcttcctggcatggtctggcaggacagagatgtgtacctgcaggggcccatctgggcaaagattcctcacacggacggacactttcacccttctcccctcatgggcggatttggattgaagcaccctcccccacagattctcatcaagaataccccggtacctgcgaatccttcgaccaccttcagtgcggcaaagtttgcttccttcatcacacagtattccacgggacaggtcagcgtggagatagagtgggagctgcagaaggagaacagcaaacgctggaaccccgagatccagtatacttccaactacaacaaatctgttaatgtggactttactgtggacactaatggtgtgtattcagagcctcgccccattggcaccagatacctgactcgtaatctgtaa

SEQ ID NO: 1247 - DNA, 2208 bp, Artificial Sequence
  Synthetic Polynucleotide
atggctgccgatggttatcttccagattggctcgaggacactctctctgaaggaataagacagtggtggaagctcaaacctggcccaccaccgccaaagcccgcagagcggcataaggacgacagcaggggtcttgtgcttcctgggtacaagtacctcggacccttcaacggactcgacaagggggagccggtcaacgaggcagacgccgcggccctcgagcacgacaaggcctacgaccggcagctcgacagcggagacaacccgtacctcaagtacaaccacgccgacgcggagtttcaggagcgtcttaaagaagatacgtcttttgggggcaacctcggacgagcagtcttccaggcgaaaaagagggttcttgaacctctgggcctggttgaggaacctgttaagacgactccgggaaaaaagaggccggtagagcactctcctgtggagccagactcctcctcgggaaccggaaaggcgggccagcagcctgcaagaaaaagattgaatttcggtcagactggagacgcagactccgtacctgacccccagcctctcggacagccaccagcagccccctctggtctgggaactaatacgatggctacaggcagtggcgcaccaatggcagacaataacgagggcgccgacggagtgggtaattcctcgggaaattggcattgcgattccacatggatgggcgacagagtcatcaccaccagcacccgcacctgggctctgcccacctacaacaaccatctgtacaagcaaatttccagccaatcaggagcatcgaacgacaaccactactttggctacagcaccccctgggggtattttgacttcaacagattccactgccacttttcgccacgtgactggcaaagactcatcaacaacaactggggattccggcccaagagactcagcttcaagctctttaacattcaagtcaaggaggtcacgcagaatgacggtacgacgacgattgccaataaccttaccagcacggttcaggtctttactgactcggagtaccagctcccgtacgtcctcggctcggcgcatcaaggatgcctcccgccgttcccagcagacgtcttcatggtgccacagtatggatacctcaccctgaacaacgggagtcaggcggtaggacgctcttcattttactgcctggagtacttcccttctcagatgcttcgcacgggaaacaactttaccttcagctacacctttgaggacgtgccttttcacagcagctacgctcacagccaaagtctggaccgtctcatgaatcctctcatcgaccaatacctgtattacttgagcaaaacaaacgctccaagcggaaccaccacgatgtccaggcttcagttttctcaggccggagcgagtgacattcgggaccagtctagaaactggcttcctggaccctgttaccgccagcagcgagtatcaaagacagctgcggacaacaacaacagtgattactcgtggactggagctaccaagtaccacctcaatggaagagactctctggtgaacccgggcccagctatggccagccacaaggatgatgaagaaaaatattttcctcagagcggggttctcatcttcgggaaacaaggctcaaataaaactaatgtggacattgaaaaggttatgattacagacgaagaggaaatcaggaccaccaatcccgtggctacggagcagtatggttctgtatctaccaaccttcaaagcggcaacacacaagcagctacctcagatgtcaacacacaaggcgttcttcctggcatggtctggcaggacagagatgtgtacctgcaggggcccatctgggcaaagattcctcacacggacggacactttcacccttctcccctcatgggcggatttggattgaagcaccctcccccacagattctcatcaagaataccccggtacctgcgaatccttcgaccaccttcagtgcggcaaagtttgcttccttcatcacacagtattccacgggacaggtcagcgtggagatagagtgggagctgcagaaggagaacagcaaacgctggaaccccgagatccagtatacttccaactacaacaaatctgttaatgtggactttactgtggacactaatggtgtgtattcagagcctcgccccattggcaccagatacctgactcgtaatctgtaa

SEQ ID NO: 1248 - DNA, 2208 bp, Artificial Sequence
  Synthetic Polynucleotide
atggctgccgatggttatcttccagattggctcgaggacactctctctgaaggaataagacagtggtggaagctcaaacctggcccaccaccgccaaagcccgcagagcggcataaggacgacagcaggggtcttgtgcttcctgggtacaagtacctcggacccttcaacggactcgacaagggggagccggtcaacgaggcagacgccgcggccctcgagcacgacaaggcctacgaccggcagctcgacagcggagacaacccgtacctcaagtacaaccacgccgacgcggagtttcaggagcgtcttaaagaagatacgtcttttgggggcaacctcggacgagcagtcttccaggcgaaaaagagggttcttgaacctctgggcctggttgaggaacctgttaagacggctccgggaaaaaagaggccggtagagcactctcctgtggagccagactcctcctcgggaaccggaaaggcgggccagcagcctgcaagaaaaagattgaatttcggtcagactggagacgcagactccgtacctgacccccagcctctcggacagtcaccagcagccccctctggtctgggaactaatacgatggctacaggcagtggcgcaccaatggcagacaataacgagggcgccgacggagtgggtaattcctcgggaaattggcattgcgattccacatggatgggcgacagagtcatcaccaccagcacccgcacctgggctctgcccacctacaacaaccatctgtacaagcaaatttccagccaatcaggagcatcgaacgacaaccactactttggctacagcaccccctgggggtattttgacttcaacagattccactgccacttttcgccacgtgactggcaaagactcatcaacaacaactggggattccggcccaagagactcagcttcaagctctttaacattcaagtcaaggaggtcacgcagaatgacggtacgacgacgattgccaataaccttaccagcacggttcaggtctttactgactcggagtaccagctcccgtacgtcctcggctcggcgcatcaaggatgcctcccgccgttcccagcagacgtcttcatggtgccacagtatggatacctcaccctgaacaacgggagtcaggcggtaggacgctcttcattttactgcctggagtacttcccttctcagatgcttcgcacgggaaacaactttaccttcagctacacctttgaggacgtgccttttcacagcagctacgctcacagccaaagtctggaccgtctcatgaatcctctcatcgaccaatacctgtattacttgagcaaaacaaacgctccaagcggaaccaccacgatgtccaggcttcagttttctcaggccggagcgagtgacattcgggaccagtctagaaactggcttcctggaccctgttaccgccagcagcgagtatcaaagacagctgcggacaacaacaacagtgattactcgtggactggagctaccaagtaccacctcaatggaagagactctctggtgaacccgggcccagctatggccagccacaaggatgatgaagaaaaatattttcctcagagcggggttctcatcttcgggaaacaaggctcaaataaaactaatgtggacattgaaaaggttatgattacagacgaagaggaaatcaggaccaccaatcccgtggctacggagcagtatggttctgtatctaccaaccttcaaagcggcaacacacaagcagctacctcagatgtcaacacacaaggcgttcttcctggcatggtctggcaggacagagatgtgtacctgcaggggcccatctgggcaaagattcctcacacggacggacactttcacccttctcccctcatgggcggatttggattgaagcaccctcccccacagattctcatcaagaataccccggtacctgcgaatccttcgaccaccttcagtgcggcaaagtttgcttccttcatcacacagtattccacgggacaggtcagcgtggagatagagtgggagctgcagaaggagaacagcaaacgctggaaccccgagatccagtatacttccaactacaacaaatctgttaatgtggactttactgtggacactaatggtgtgtattcagagcctcgccccattggcaccagatacctgactcgtaatctgtaa

SEQ ID NO: 1249 - DNA, 2208 bp, Artificial Sequence
  Synthetic Polynucleotide
atggctgccgatggttatcttccagattggctcgaggacactctctctgaaggaataagacagtggtggaagctcaaacctggcccaccaccgccaaagcccgcagagcggcataaggacgacagcaggggtcttgtgcttcctgggtacaagtacctcggacccttcaacggactcgacaagggggagccggtcaacgaggcagacgccgcggccctcgagcacgacaaggcctacgaccggcagctcgacagcggagacaacccgtacctcaagtacaaccacgccgacgcggagtttcaggagcgtcttaaagaagatacgtcttttgggggcaacctcggacgagcagtcttccaggcgaaaaagagggttcttgaacctctgggcctggttgaggaacctgttaagacggctccgggaaaaaagaggccggtagagcactctcctgtggagccagactcctcctcgggaaccggaaaggcgggccagcagcctgcaagaaaaagattgaatttcggtcagactggagacgcagactccgtacctgacccccagcctctcggacagccaccagcagccccctctggtctgggaactaatacgatggctacaggcagtggcgcaccaatggcagacaataacgagggcgccgacggagtgggtaattcctcgggaaattggcattgcgattccacatggatgggcgacagagtcatcaccaccagcacccgcacctgggctctgcccacctacaacaaccatctgtacaagcaaatttccagccaatcaggagcatcgaacgacaaccactactttggctacagcaccccctgggggtattttgacttcaacagattccactgccacttttcgccacgtgactggcaaagactcatcaacaacaactggggattccggcccaagagactcagcttcaagctctttaacattcaagtcaaggaggtcacgcagaatgacggtacgacgacgattgccaataaccttaccagcacggttcaggtctttactgactcggagtaccagctcccgtacgtcctcggctcggcgcatcaaggatgcctcccgccgttcccagcagacgtcttcatggtgccacagtatggatacctcaccctgaacaacgggagtcaggcggtaggacgctcttcattttactgcctggagtacttcccttctcagatgcttcgcacgggaaacaactttaccttcagctacacctttgaggacgtgccttttcacagcagctacgctcacagccaaagtctggaccgtctcatgaatcctctcatcgaccaatacctgtattacttgagcaaaacaaacgctccaagcggaaccaccacgatgtccaggcttcagttttctcaggccggagcgagtgacattcgggaccagtctagaaactggcttcctggaccctgttaccgccagcagcgagtatcaaagacagctgcggacaacaacaacagtgattactcgtggactggagctaccaagtaccacctcaatggaagagactctctggtgaacccgggcccagctatggtcagccacaaggatgatgaagaaaaatattttcctcagagcggggttctcatcttcgggaaacaaggctcaaataaaactaatgtggacattgaaaaggttatgattacagacgaagaggaaatcaggaccaccaatcccgtggctacggagcagtatggttctgtatctaccaaccttcaaagcggcaacacacaagcagctacctcagatgtcaacacacaaggcgttcttcctggcatggtctggcaggacagagatgtgtacctgcaggggcccatctgggcaaagattcctcacacggacggacactttcacccttctcccctcatgggcggatttggattgaagcaccctcccccacagattctcatcaagaataccccggtacctgcgaatccttcgaccaccttcagtgcggcaaagtttgcttccttcatcacacagtattccacgggacaggtcagcgtggagatagagtgggagctgcagaaggagaacagcaaacgctggaaccccgagatccagtatacttccaactacaacaaatctgttaatgtggactttactgtggacactaatggtgtgtattcagagcctcgccccattggcaccagatacctgactcgtaatctgtaa

SEQ ID NO: 1250 - DNA, 2208 bp, Artificial Sequence
  Synthetic Polynucleotide
atggctgccgatggttatcttccagattggctcgaggacactctctctgaaggaataagacagtggtggaagctcaaacctggcccaccaccgccaaagcccgcagagcggcataaggacgacagcaggggtcttgtgcttcctgggtacaagtacctcggacccttcaacggactcgacaagggggagccggtcaacgaggcagacgccgcggccctcgagcacgacaaggcctacgaccggcagctcgacagcggagacaacccgtacctcaagtacaaccacgccgacgcggagtttcaggagcgtcttaaagaagatacgtcttttgggggcaacctcggacgagcagtcttccaggcgaaaaagagggttcttgaacctctgggcctggttgaggaacctgttaagacggctccgggaaaaaagaggccggtagagcactctcctgtggagccagactcctcctcgggaaccggaaaggcgggccagcagcctgcaagaaaaagattgaatttcggtcagactggagacgcagactccgtacctgacccccagcctctcggacagccaccagcagccccctctggtctgggaactaatacgatggctacaggcagtggcgcaccaatggcagacaataacgagggcgccgacggagtgggtaattcctcgggaaattggcattgcgattccacatggatgggcgacagagtcatcaccaccagcacccgcacctgggctctgcccacctacaacaaccatctgtacaagcaaatttccagccaatcaggagcatcgaacgacaaccactactttggctacagcaccccctgggggtattttgacttcaacagattccactgccacttttcgccacgtgactggcaaagactcatcaacaacaactggggattccggcccaagagactcagcttcaagctctttaacattcaagtcaaggaggtcacgcagaatgacggtacgacgacgattgccaataaccttaccagcacggttcaggtctttactgactcggagtaccagctcccgtacgtcctcggctcggcgcatcaaggatgcctcccgccgttcccagcagacgtcttcatggtgccacagtatggatacctcaccctgaacaacgggagtcaggcggtaggacgctcttcattttactgcctggagtacttcccttctcagatgcttcgcacgggaaacaactttaccttcagctacacctttgaggacgtgccttttcacagcagctacgctcacagccaaagtctggaccgtctcatgaatcctctcatcgaccaatacctgtattacttgagcaaaacaaacgctccaagcggaaccaccacgatgtccaggcttcagttttctcaggccggagcgagtgacattcgggaccagtctagaaactggcttcctggaccctgttaccgccagcagcgagtatcaaagacagctgcggacaacaacaacagtgattactcgtggactggagctaccaagtaccacctcaatggaagagactctctggtgaacccgggcccagctatggccagccacaaggatgatgaagaaaaatattttcctcagagcggggttctcatcttcgggaaacaaggctcaaataaaactaatgtggacattgaaaaggttatgattacagacgaagaggaaatcaggaccaccaatcccgtggctacggagcagtatggttctgtatctaccaaccttcaaagcggcaacacacaagcagctacctcagatgtcaacacacaaggcgttcttcctggcatggtctggcaggacagagatgtgtacctgcaggggcccatctgggcaaagattcctcacacggacggacactttcacccttctcccctcatgggcggatttggattgaagcaccctcccccacagattctcatcaagaataccccggtacctgcgaatccttcgaccaccttcagtgcggcaaagtttgcttccttcatcacacagtattccatgggacaggtcagcgtggagatagagtgggagctgcagaaggagaacagcaaacgctggaaccccgagatccagtatacttccaactacaacaaatctgttaatgtggactttactgtggacactaatggtgtgtattcagagcctcgccccattggcaccagatacctgactcgtaatctgtaa

SEQ ID NO: 1251 - DNA, 2208 bp, Artificial Sequence
  Synthetic Polynucleotide
atggctgccgatggttatcttccagattggctcgaggacactctctctgaaggaataagacagtggtggaagctcaaacctggcccaccaccgccaaagcccgcagagcggcataaggacgacagcaggggtcttgtgcttcctgggtacaagtacctcggacccttcaacggactcgacaagggggagccggtcaacgaggcagacgccgcggccctcgagcacgacaaggtctacgaccggcagctcgacagcggagacaacccgtacctcaagtacaaccacgccgacgcggagtttcaggagcgtcttaaagaagatacgtcttttgggggcaacctcggacgagcagtcttccaggcgaaaaagagggttcttgaacctctgggcctggttgaggaacctgttaagacggctccgggaaaaaagaggccggtagagcactctcctgtggagccagactcctcctcgggaaccggaaaggcgggccagcagcctgcaagaaaaagattgaatttcggtcagactggagacgcagactccgtacctgacccccagcctctcggacagccaccagcagccccctctggtctgggaactaatacgatggctacaggcagtggcgcaccaatggcagacaataacgagggcgccgacggagtgggtaattcctcgggaaattggcattgcgattccacatggatgggcgacagagtcatcaccaccagcacccgcacctgggctctgcccacctacaacaaccatctgtacaagcaaatttccagccaatcaggagcatcgaacgacaaccactactttggctacagcaccccctgggggtattttgacttcaacagattccactgccacttttcgccacgtgactggcaaagactcatcaacaacaactggggattccggcccaagagactcagcttcaagctctttaacattcaagtcaaggaggtcacgcagaatgacggtacgacgacgattgccaataaccttaccagcacggttcaggtctttactgactcggagtaccagctcccgtacgtcctcggctcggcgcatcaaggatgcctcccgccgttcccagcagacgtcttcatggtgccacagtatggatacctcaccctgaacaacgggagtcaggcggtaggacgctcttcattttactgcctggagtacttcccttctcagatgcttcgcacgggaaacaactttaccttcagctacacctttgaggacgtgccttttcacagcagctacgctcacagccaaagtctggaccgtctcatgaatcctctcatcgaccaatacctgtattacttgagcaaaacaaacgctccaagcggaaccaccacgatgtccaggcttcagttttctcaggccggagcgagtgacattcgggaccagtctagaaactggcttcctggaccctgttaccgccagcagcgagtatcaaagacagctgcggacaacaacaacagtgattactcgtggactggagctaccaagtaccacctcaatggaagagactctctggtgaacccgggcccagctatggccagccacaaggatgatgaagaaaaatattttcctcagagcggggttctcatcttcgggaaacaaggctcaaataaaactaatgtggacattgaaaaggttatgattacagacgaagaggaaatcaggaccaccaatcccgtggctacggagcagtatggttctgtatctaccaaccttcaaagcggcaacacacaagcagctacctcagatgtcaacacacaaggcgttcttcctggcatggtctggcaggacagagatgtgtacctgcaggggcccatctgggcaaagattcctcacacggacggacactttcacccttctcccctcatgggcggatttggattgaagcaccctcccccacagattctcatcaagaataccccggtacctgcgaatccttcgaccaccttcagtgcggcaaagtttgcttccttcatcacacagtattccacgggacaggtcagcgtggagatagagtgggagctgcagaaggagaacagcaaacgctggaaccccgagatccagtatacttccaactacaacaaatctgttaatgtggactttactgtggacactaatggtgtgtattcagagcctcgccccattggcaccagatacctgactcgtaatctgtaa

SEQ ID NO: 1252 - DNA, 2208 bp, Artificial Sequence
  Synthetic Polynucleotide
atggctgccgatggttatcttccagattggctcgaggacactctctctgaaggaataagacagtggtggaagctcaaacctggcccaccaccgccaaagcccgcagagcggcataaggacgacagcaggggtcttgtgcttcctgggtacaagtacctcggacccttcaacggactcgacaagggggagccggtcaacgaggcagacgccgcggccctcgagcacgacaaggcctacgaccggcagctcgacagcggagacaacccgtacctcaagtacaaccacgccgacgcggagtttcaggagcgtcttaaagaagatacgtcttttgggggcaacctcggacgagcagtcttccaggcgaaaaagagggttcttgaacctctgggcctggttgaggaacctgttaagacggctccgggaaaaaagaggccggtagagcactctcctgtggagccagactcctcctcgggaaccggaaaggcgggccagcagcctgcaagaaaaagattgaatttcggtcagactggagacgcagactccgtacctgacccccagcctctcggacagccaccagcagccccctctggtctgggaactaatacgatggctacaggcagtggcgcaccaatggcagacaataacgagggcgccgacggagtgggtaattcctcgggaaattggcattgcgattccacatggatgggcgacagagtcatcaccaccagcacccgcacctgggctctgcccacctacaacaaccatctgtacaagcaaatttccagccaatcaggagcatcgaacgacaaccactactttggctacagcaccccctgggggtattttgacttcaacagattccactgccacttttcgccacgtgactggcaaagactcatcaacaacaactggggattccggcccaagagactcagcttcaagctctttaacattcaagtcaaggaggtcacgcagaatgacggtacgacgacgattgccaataaccttaccagcacggttcaggtctttactgactcggagtaccagctcccgtacgtcctcggctcggcgcatcaaggatgcctcccgccgttcccagcagacgtcttcatggtgccacagtatggatacctcaccctgaacaacgggagtcaggcggtaggacgctcttcattttactgcctggagtacttcccttctcagatgcttcgcacgggaaacaactttaccttcagctacacctttgaggacgtgccttttcacagcagctacgctcacagccaaagtctggaccgtctcatgaatcctctcatcgaccaatacctgtattacttgagcaaaacaaacgctccaagcggaaccaccacgatgtccaggcttcagttttctcaggccggagcgagtgacattcgggaccagtctagaaactggcttcctggaccctgttaccgccagcagcgagtatcaaagacagctgcggacaacaacaacagtgattactcgtggactggagctaccaagtaccacctcaatggaagagactctctggtgaacccgggcccagctatggccagccacaaggatgatgaagaaaaatattttcctcagagcggggttctcatcttcgggaaacaaggctcaaataaaactaatgtggacattgaaaaggttatgattacagacgaagaggaaatcaggaccaccaatcccgtggctacggagcagtatggttctgtatctaccaaccttcaaagcggcaacacacaagcagctacctcagatgtcaacacacaaggcgttcttcctggcatggtctggcaggacagagatgtgtacctgcaggggcccatctgggcaaagattcctcacacggacggacactttcacccttctcccctcatgggcggatttggattgaagcaccctcccccacagattctcatcaagaataccccggtacctgcgaatccttcgaccaccttcagtgcggcaaagtttgcttccttcatcacacagtattccacgggacaggtcagcgtggagatagagtgggagctgcagaaggagaacaacaaacgctggaaccccgagatccagtatacttccaactacaacaaatctgttaatgtggactttactgtggacactaatggtgtgtattcagagcctcgccccattggcaccagatacctgactcgtaatctgtaa

SEQ ID NO: 1253 - DNA, 2208 bp, Artificial Sequence
  Synthetic Polynucleotide
atggctgccgatggttatcttccagattggctcgaggacactctctctgaaggaataagacagtggtggaagctcaaacctggcccaccaccgccaaagcccgcagagcggcataaggacgacagcaggggtcttgtgcttcctgggtacaagtacctcggacccttcaacggactcgacaagggggagccggtcaacgaggcagacgccgcggccctcgagcacgacaaggcctacgaccggcagctcgacagcggagacaacccgtacctcaagtacaaccacgccgacgcggagtttcaggagcgtcttaaagaagatacgtcttttgggggcaacctcggacgagcagtcttccaggcgaaaaagagggttcttgaacctctgggcctggttgaggaacctgttaagacggctccgggaaaaaagaggccggtagagcactctcctgtggagccagactcctcctcgggaaccggaaaggcgggccagcagcctacaagaaaaagattgaatttcggtcagactggagacgcagactccgtacctgacccccagcctctcggacagccaccagcagccccctctggtctgggaactaatacgatggctacaggcagtggcgcaccaatggcagacaataacgagggcgccgacggagtgggtaattcctcgggaaattggcattgcgattccacatggatgggcgacagagtcatcaccaccagcacccgcacctgggctctgcccacctacaacaaccatctgtacaagcaaatttccagccaatcaggagcatcgaacgacaaccactactttggctacagcaccccctgggggtattttgacttcaacagattccactgccacttttcgccacgtgactggcaaagactcatcaacaacaactggggattccggcccaagagactcagcttcaagctctttaacattcaagtcaaggaggtcacgcagaatgacggtacgacgacgattgccaataaccttaccagcacggttcaggtctttactgactcggagtaccagctcccgtacgtcctcggctcggcgcatcaaggatgcctcccgccgttcccagcagacgtcttcatggtgccacagtatggatacctcaccctgaacaacgggagtcaggcggtaggacgctcttcattttactgcctggagtacttcccttctcagatgcttcgcacgggaaacaactttaccttcagctacacctttgaggacgtgccttttcacagcagctacgctcacagccaaagtctggaccgtctcatgaatcctctcatcgaccaatacctgtattacttgagcaaaacaaacgctccaagcggaaccaccacgatgtccaggcttcagttttctcaggccggagcgagtgacattcgggaccagtctagaaactggcttcctggaccctgttaccgccagcagcgagtatcaaagacagctgcggacaacaacaacagtgattactcgtggactggagctaccaagtaccacctcaatggaagagactctctggtgaacccgggcccagctatggccagccacaaggatgatgaagaaaaatattttcctcagagcggggttctcatcttcgggaaacaaggctcaaataaaactaatgtggacattgaaaaggttatgattacagacgaagaggaaatcaggaccaccaatcccgtggctacggagcagtatggttctgtatctaccaaccttcaaagcggcaacacacaagcagctacctcagatgtcaacacacaaggcgttcttcctggcatggtctggcaggacagagatgtgtacctgcaggggcccatctgggcaaagattcctcacacggacggacactttcacccttctcccctcatgggcggatttggattgaagcaccctcccccacagattctcatcaagaataccccggtacctgcgaatccttcgaccaccttcagtgcggcaaagtttgcttccttcatcacacagtattccacgggacaggtcagcgtggagatagagtgggagctgcagaaggagaacagcaaacgctggaaccccgagatccagtatacttccaactacaacaaatctgttaatgtggactttactgtggacactaatggtgtgtattcagagcctcgccccattggcaccagatacctgactcgtaatctgtaa

SEQ ID NO: 1254 - DNA, 2208 bp, Artificial Sequence
  Synthetic Polynucleotide
atggctgccgatggttatcttccagattggctcgaggacactctctctgaaggaataagacagtggtggaagctcaaacctggcccaccaccgccaaagcccgcagagcggcataaggacgacagcaggggtcttgtgcttcctgggtacaagtacctcggacccttcaacggactcgacaagggggagccggtcaacgaggcagacgccgcggccctcgagcacgacaaggcctacgaccggcagctcgacagcggagacaacccgtacctcaagtacaaccacgccgacgcggagtttcaggagcgtcttaaagaagatacgtcttttgggggcaacctcggacgagcagtcttccaggcgaaaaagagggttcttgaacctctgggcctggttgaggaacctgttaagacggctccgggaaaaaagaggccggtagagcactctcctgtggagccagactcctcctcgggaaccggaaaggcgggccagcagcctgcaagaaaaagattgaatttcggtcagactggagacgcagactccgtacctgacccccagcctctcggacagccaccagcagccccctctggtctgggaactaatacgatggctacaggcagtggcgcaccaatggcagacaataacgagggcgccgacggagtgggtaattcctcgggaaattggcattgcgattccacatggatgggcgacagagtcatcaccaccagcacccgcacctgggctctgcccacctacaacaaccatctgtacaagcaaatttccagccaatcaggagcatcgaacgacaaccactactttggctacagcaccccctgggggtattttgacttcaacagattccactgccacttttcgccacgtgactggcaaagactcatcaacaacaactggggattccggcccaagagactcagcttcaagctctttaacattcaagtcaaggaggtcacgcagaatgacggtacgacgacgattgccaataaccttaccagcacggttcaggtctttactgactcggagtaccagctcccgtacgtcctcggctcggcgcatcaaggatgcctcccgccgttcccagcagacgtcttcatggtgccacagtatggatacctcaccctgaacaacgggagtcaggcggtaggacgctcttcattttactgcctggagtacttcccttctcagatgcttcgcacgggaaacaactttaccttcagctacacctttgaggacgtgccttttcacagcagctacgctcacagccaaagtctggaccgtctcatgaatcctctcatcgaccaatacctgtattacttgagcaaaacaaacgctccaagcggaaccaccacgatgtccaggcttcagttttctcaggccggagcgagtgacattcgggaccagtctagaaactggcttcctggaccctgttaccgccagcagcgagtatcaaagacagctgcggacaacaacaacagtgattactcgtggactggagctaccaagtaccacctcaatggaagagactctctggtgaacccgggcccagctatggccagccacaaggatgatgaagaaaaatattttcctcagagcggggttctcatcttcgggaaacaaggctcaaataaaactaatgtggacattgaaagggttatgattacagacgaagaggaaatcaggaccaccaatcccgtggctacggagcagtatggttctgtatctaccaaccttcaaagcggcaacacacaagcagctacctcagatgtcaacacacaaggcgttcttcctggcatggtctggcaggacagagatgtgtacctgcaggggcccatctgggcaaagattcctcacacggacggacactttcacccttctcccctcatgggcggatttggattgaagcaccctcccccacagattctcatcaagaataccccggtacctgcgaatccttcgaccaccttcagtgcggcaaagtttgcttccttcatcacacagtattccacgggacaggtcagcgtggagatagagtgggagctgcagaaggagaacagcaaacgctggaaccccgagatccagtatacttccaactacaacaaatctgttaatgtggactttactgtggacactaatggtgtgtattcagagcctcgccccattggcaccagatacctgactcgtaatctgtaa

SEQ ID NO: 1255 - DNA, 2208 bp, Artificial Sequence
  Synthetic Polynucleotide
atggctgccgatggttatcttccagattggctcgaggacactctctctgaaggaataagacagtggtggaagctcaaacctggcccaccaccgccaaagcccgcagagcggcataaggacgacagcaggggtcttgtgcttcctgggtacaagtacctcggacccttcaacggactcgacaagggggagccggtcaacgaggcagacgccgcggccctcgagcacgacaaggcctacgaccggcagctcgacagcggagacaacccgtacctcaagtacaaccacgccgacgcggagtttcaggagcgtcttaaagaagatacgtcttttgggggcaacctcggacgagcagtcttccaggcgaaaaagagggttcttgaacctctgggcctggttgaggaacctgttaagacggctccgggaaaaaagaggccggtagagcactctcctgtggagccagactcctcctcgggaaccggaaaggcgggccagcagcctgtaagaaaaagattgaatttcggtcagactggagacgcagactccgtacctgacccccagcctctcggacagccaccagcagccccctctggtctgggaactaatacgatggctacaggcagtggcgcaccaatggcagacaataacgagggcgccgacggagtgggtaattcctcgggaaattggcattgcgattccacatggatgggcgacagagtcatcaccaccagcacccgcacctgggctctgcccacctacaacaaccatctgtacaagcaaatttccagccaatcaggagcatcgaacgacaaccactactttggctacagcaccccctgggggtattttgacttcaacagattccactgccacttttcgccacgtgactggcaaagactcatcaacaacaactggggattccggcccaagagactcagcttcaagctctttaacattcaagtcaaggaggtcacgcagaatgacggtacgacgacgattgccaataaccttaccagcacggttcaggtctttactgactcggagtaccagctcccgtacgtcctcggctcggcgcatcaaggatgcctcccgccgttcccagcagacgtcttcatggtgccacagtatggatacctcaccctgaacaacgggagtcaggcggtaggacgctcttcattttactgcctggagtacttcccttctcagatgcttcgcacgggaaacaactttaccttcagctacacctttgaggacgtgccttttcacagcagctacgctcacagccaaagtctggaccgtctcatgaatcctctcatcgaccaatacctgtattacttgagcaaaacaaacgctccaagcggaaccaccacgatgtccaggcttcagttttctcaggccggagcgagtgacattcgggaccagtctagaaactggcttcctggaccctgttaccgccagcagcgagtatcaaagacagctgcggacaacaacaacagtgattactcgtggactggagctaccaagtaccacctcaatggaagagactctctggtgaacccgggcccagctatggccagccacaaggatgatgaagaaaaatattttcctcagagcggggttctcatcttcgggaaacaaggctcaaataaaactaatgtggacattgaaaaggttatgattacagacgaagaggaaatcaggaccaccaatcccgtggctacggagcagtatggttctgtatctaccaaccttcaaagcggcaacacacaagcagctacctcagatgtcaacacacaaggcgttcttcctggcatggtctggcaggacagagatgtgtacctgcaggggcccatctgggcaaagattcctcacacggacggacactttcacccttctcccctcatgggcggatttggattgaagcaccctcccccacagattctcatcaagaataccccggtacctgcgaatccttcgaccaccttcagtgcggcaaagtttgcttccttcatcacacagtattccacgggacaggtcagcgtggagatagagtgggagctgcagaaggagaacagcaaacgctggaaccccgagatccagtatacttccaactacaacaaatctgttaatgtggactttactgtggacactaatggtgtgtattcagagcctcgccccattggcaccagatacctgactcgtaatctgtaa

SEQ ID NO: 1256 - DNA, 2208 bp, Artificial Sequence
  Synthetic Polynucleotide
atggctgccgatggttatcttccagattggctcgaggacactctctctgaaggaataagacagtggtggaagctcaaacctggcccaccaccgccaaagcccgcagagcggcataaggacgacagcaggggtcttgtgcttcctgggtacaagtacctcggacccttcaacggactcgacaagggggagccggtcaacgaggcagacgccgcggccctcgagcacgacaaggcctacgaccggcagctcgacagcggagacaacccgtacctcaagtacaaccacgccgacgcggagtttcaggagcgtcttaaagaagatacgtcttttgggggcaacctcggacgagcagtcttccaggcgaaaaagagggttcttgaacctctgggcctggttgaggaacctgttaagacggctccgggaaaaaagaggccggtagagcactctcctgtggagccagactcctcctcgggaaccggaaaggcgggccagcagcctgcaagaaaaagattgaatttcggtcagactggagacgcagactccgtacctgacccccagcctctcggacagccaccagcagccccctctggtctgggaactaatacgatggctacaggcagtggcgcaccaatggcagacaataacgagggcgccgacggagtgggtaattcctcgggaaattggcattgcgattccacatggatgggcgacagagtcatcaccaccagcacccgcacctgggctctgcccacctacaacaaccatctgtacaagcaaatttccagccaatcaggagcatcgaacgacaaccactactttggctacagcaccccctgggggtattttgacttcaacagattccactgccacttttcgccacgtgactggcaaagactcatcaacaacaactggggattccggcccaagagactcagcttcaagctctttaacattcaagtcaaggaggtcacgcagaatgacggtacgacgacgattgccaataaccttaccagcacggttcaggtctttactgactcggagtaccagctcccgtacgtcctcggctcggcgcatcaaggatgcctcccgccgttcccagcagacgtcttcatggtgccacagtatggataccccaccctgaacaacgggagtcaggcggtaggacgctcttcattttactgcctggagtacttcccttctcagatgcttcgcacgggaaacaactttaccttcagctacacctttgaggacgtgccttttcacagcagctacgctcacagccaaagtctggaccgtctcatgaatcctctcatcgaccaatacctgtattacttgagcaaaacaaacgctccaagcggaaccaccacgatgtccaggcttcagttttctcaggccggagcgagtgacattcgggaccagtctagaaactggcttcctggaccctgttaccgccagcagcgagtatcaaagacagctgcggacaacaacaacagtgattactcgtggactggagctaccaagtaccacctcaatggaagagactctctggtgaacccgggcccagctatggccagccacaaggatgatgaagaaaaatattttcctcagagcggggttctcatcttcgggaaacaaggctcaaataaaactaatgtggacattgaaaaggttatgattacagacgaagaggaaatcaggaccaccaatcccgtggctacggagcagtatggttctgtatctaccaaccttcaaagcggcaacacacaagcagctacctcagatgtcaacacacaaggcgttcttcctggcatggtctggcaggacagagatgtgtacctgcaggggcccatctgggcaaagattcctcacacggacggacactttcacccttctcccctcatgggcggatttggattgaagcaccctcccccacagattctcatcaagaataccccggtacctgcgaatccttcgaccaccttcagtgcggcaaagtttgcttccttcatcacacagtattccacgggacaggtcagcgtggagatagagtgggagctgcagaaggagaacagcaaacgctggaaccccgagatccagtatacttccaactacaacaaatctgttaatgtggactttactgtggacactaatggtgtgtattcagagcctcgccccattggcaccagatacctgactcgtaatctgtaa

SEQ ID NO: 1257 - DNA, 2208 bp, Artificial Sequence
  Synthetic Polynucleotide
atggctgccgatggttatcttccagattggctcgaggacactctctctgaaggaataagacagtggtggaagctcaaacctggcccaccaccgccaaagcccgcagagcggcataaggacgacagcaggggtcttgtgcttcctgggtacaagtacctcggacccttcaacggactcgacaagggggagccggtcaacgaggcagacgccgcggccctcgagcacgacaaggcctacgaccggcagctcgacagcggagacaacccgtacctcaagtacaaccacgccgacgcggagtttcaggagcgtcttaaagaagatacgtcttttgggggcaacctcggacgagcagtcttccaggcgaaaaagagggttcttgaacctctgggcctggttgaggaacctgttaagacggctccgggaaaaaagaggccggtagagcactctcctgtggagccagactcctcctcgggaaccggaaaggcgggccagcagcctgcaagaaaaagattgaatttcggtcagactggagacgcagactccgtacctgacccccagtctctcggacagccaccagcagccccctctggtctgggaactaatacgatggctacaggcagtggcgcaccaatggcagacaataacgagggcgccgacggagtgggtaattcctcgggaaattggcattgcgattccacatggatgggcgacagagtcatcaccaccagcacccgcacctgggctctgcccacctacaacaaccatctgtacaagcaaatttccagccaatcaggagcatcgaacgacaaccactactttggctacagcaccccctgggggtattttgacttcaacagattccactgccacttttcgccacgtgactggcaaagactcatcaacaacaactggggattccggcccaagagactcagcttcaagctctttaacattcaagtcaaggaggtcacgcagaatgacggtacgacgacgattgccaataaccttaccagcacggttcaggtctttactgactcggagtaccagctcccgtacgtcctcggctcggcgcatcaaggatgcctcccgccgttcccagcagacgtcttcatggtgccacagtatggatacctcaccctgaacaacgggagtcaggcggtaggacgctcttcattttactgcctggagtacttcccttctcagatgcttcgcacgggaaacaactttaccttcagctacacctttgaggacgtgccttttcacagcagctacgctcacagccaaagtctggaccgtctcatgaatcctctcatcgaccaatacctgtattacttgagcaaaacaaacgctccaagcggaaccaccacgatgtccaggcttcagttttctcaggccggagcgagtgacattcgggaccagtctagaaactggcttcctggaccctgttaccgccagcagcgagtatcaaagacagctgcggacaacaacaacagtgattactcgtggactggagctaccaagtaccacctcaatggaagagactctctggtgaacccgggcccagctatggccagccacaaggatgatgaagaaaaatattttcctcagagcggggttctcatcttcgggaaacaaggctcaaataaaactaatgtggacattgaaaaggttatgattacagacgaagaggaaatcaggaccaccaatcccgtggctacggagcagtatggttctgtatctaccaaccttcaaagcggcaacacacaagcagctacctcagatgtcaacacacaaggcgttcttcctggcatggtctggcaggacagagatgtgtacctgcaggggcccatctgggcaaagattcctcacacggacggacactttcacccttctcccctcatgggcggatttggattgaagcaccctcccccacagattctcatcaagaataccccggtacctgcgaatccttcgaccaccttcagtgcggcaaagtttgcttccttcatcacacagtattccacgggacaggtcagcgtggagatagagtgggagctgcagaaggagaacagcaaacgctggaaccccgagatccagtatacttccaactacaacaaatctgttaatgtggactttactgtggacactaatggtgtgtattcagagcctcgccccattggcaccagatacctgactcgtaatctgtaa

SEQ ID NO: 1258 - DNA, 2208 bp, Artificial Sequence
  Synthetic Polynucleotide
atggctgccgatggttatcttccagattggctcgaggacactctctctgaaggaataagacagtggtggaagctcaaacctggcccaccaccgccaaagcccgcagagcggcataaggacgacagcaggggtcttgtgcttcctgggtacaagtacctcggacccttcaacggactcgacaagggggagccggtcaacgaggcagacgccgcggccctcgagcacgacaaggcctacgaccggcagctcgacagcggagacaacccgtacctcaagtacaaccacgccgacgcggagtttcaggagcgtcttaaagaagatacgtcttttgggggcaacctcggacgagcagtcttccaggcgaaaaagagggttcttgaacctctgggcctggttgaggaacctgttaagacggctccgggaaaaaagaggccggtagagcactctcctgtggagccagactcctcctcgggaaccggaaaggcgggccagcagcctgcaagaaaaagattgaatttcggtcagactggagacgcagactccgtacctgacccccagcctctcggacagccaccagcagccccctctggtctgggaactaatacgatggctacaggcagtggcgcaccaatggcagacaataacgagggcgccgacggagtgggtaattcctcgggaaattggcattgcgattccacatggatgggcgacagagtcatcaccaccagcacccgcacctgggctctgcccacctacaacaaccatctgtacaagcaaatttccagccaatcaggagcatcgaacgacaaccactactttggctacagcaccccctgggggtattttgacttcaacagattccactgccacttttcgccacgtgactggcaaagactcatcaacaacaactggggattccggcccaagagactcagcttcaagctctttaacattcaagtcaaggaggtcacgcagaatggcggtacgacgacgattgccaataaccttaccagcacggttcaggtctttactgactcggagtaccagctcccgtacgtcctcggctcggcgcatcaaggatgcctcccgccgttcccagcagacgtcttcatggtgccacagtatggatacctcaccctgaacaacgggagtcaggcggtaggacgctcttcattttactgcctggagtacttcccttctcagatgcttcgcacgggaaacaactttaccttcagctacacctttgaggacgtgccttttcacagcagctacgctcacagccaaagtctggaccgtctcatgaatcctctcatcgaccaatacctgtattacttgagcaaaacaaacgctccaagcggaaccaccacgatgtccaggcttcagttttctcaggccggagcgagtgacattcgggaccagtctagaaactggcttcctggaccctgttaccgccagcagcgagtatcaaagacagctgcggacaacaacaacagtgattactcgtggactggagctaccaagtaccacctcaatggaagagactctctggtgaacccgggcccagctatggccagccacaaggatgatgaagaaaaatattttcctcagagcggggttctcatcttcgggaaacaaggctcaaataaaactaatgtggacattgaaaaggttatgattacagacgaagaggaaatcaggaccaccaatcccgtggctacggagcagtatggttctgtatctaccaaccttcaaagcggcaacacacaagcagctacctcagatgtcaacacacaaggcgttcttcctggcatggtctggcaggacagagatgtgtacctgcaggggcccatctgggcaaagattcctcacacggacggacactttcacccttctcccctcatgggcggatttggattgaagcaccctcccccacagattctcatcaagaataccccggtacctgcgaatccttcgaccaccttcagtgcggcaaagtttgcttccttcatcacacagtattccacgggacaggtcagcgtggagatagagtgggagctgcagaaggagaacagcaaacgctggaaccccgagatccagtatacttccaactacaacaaatctgttaatgtggactttactgtggacactaatggtgtgtattcagagcctcgccccattggcaccagatacctgactcgtaatctgtaa

SEQ ID NO: 1259 - DNA, 2208 bp, Artificial Sequence
  Synthetic Polynucleotide
atggctgccgatggttatcttccagattggctcgaggacactctctctgaaggaataagacagtggtggaagctcaaacctggcccaccaccgccaaagcccgcagagcggcataaggacgacagcaggggtcttgtgcttcctgggtacaagtacctcggacccttcaacggactcgacaagggggagccggtcaacgaggcagacgccgcggccctcgagcacgacaaggcctacgaccggcagctcgacagcggagacaacccgtacctcaagtacaaccacgccgacgcggagtttcaggagcgtcttaaagaagatacgtcttttgggggcaacctcggacgagcagtcttccaggcgaaaaagagggttcttgaacctctgggcctggttgaggaacctgttaagacggctccgggaaaaaagaggccggtagagcactctcctgtggagccagactcctcctcgggaaccggaaaggcgggccagcagcctgcaagaaaaagattgaatttcggtcagactggagacgcagactccgtacctgacccccagcctctcggacagccaccagcagccccctctggtctgggaactaatacgatggctacaggcagtggcgcaccaatggcagacaataacgagggcgccgacggagtgggtaattcctcgggaaattggcattgcgattccacatggatgggcgacagagtcatcaccaccagcacccgcacctgggctctgcccacctacaacaaccatctgtacaagcaaatttccagccaatcaggagcatcgaacgacaaccactactttggctacagcaccccctgggggtattttgacttcaacagattccactgccacttttcgccacgtgactggcaaagactcatcaacaacaactggggattccggcccaagagactcagcttcaagctctttaacattcaagtcaaggaggtcacgcagaatgacggtacgacgacgattgccaataaccttaccagcacggttcaggtctttactgactcggagtaccagctcccgtacgtcctcggctcggcgcatcaaggatgcctcccgccgttcccagcagacgtcttcatggtgccacagtatggatacctcaccctgaacaacgggagtcaggcggtaggacgctcttcattttactgcctggagtacttcccttctcagatgcttcgcacgggaaacaactttaccttcagctacacctttgaggacgtgccttttcacagcagctacgctcacagccaaagtctggaccgtctcatgaatcctctcatcgaccaatacctgtattacttgagcaaaacaaacgctccaagcggaaccaccacgatgtccgggcttcagttttctcaggccggagcgagtgacattcgggaccagtctagaaactggcttcctggaccctgttaccgccagcagcgagtatcaaagacagctgcggacaacaacaacagtgattactcgtggactggagctaccaagtaccacctcaatggaagagactctctggtgaacccgggcccagctatggccagccacaaggatgatgaagaaaaatattttcctcagagcggggttctcatcttcgggaaacaaggctcaaataaaactaatgtggacattgaaaaggttatgattacagacgaagaggaaatcaggaccaccaatcccgtggctacggagcagtatggttctgtatctaccaaccttcaaagcggcaacacacaagcagctacctcagatgtcaacacacaaggcgttcttcctggcatggtctggcaggacagagatgtgtacctgcaggggcccatctgggcaaagattcctcacacggacggacactttcacccttctcccctcatgggcggatttggattgaagcaccctcccccacagattctcatcaagaataccccggtacctgtgaatccttcgaccaccttcagtgcggcaaagtttgcttccttcatcacacagtattccacgggacaggtcagcgtggagatagagtgggagctgcagaaggagaacagcaaacgctggaaccccgagatccagtatacttccaactacaacaaatctgttaatgtggactttactgtggacactaatggtgtgtattcagagcctcgccccattggcaccagatacctgactcgtaatctgtaa

SEQ ID NO: 1260 - DNA, 2208 bp, Artificial Sequence
  Synthetic Polynucleotide
atggctgccgatggttatcttccagattggctcgaggacactctctctgaaggaataagacagtggtggaagctcaaacctggcccaccaccgccaaagcccgcagagcggcataaggacgacagcaggggtcttgtgcttcctgggtacaagtacctcggacccttcaacggactcgacaagggggagccggtcaacgaggcagacgccgcggccctcgagcacgacaaggcctacgaccggcagctcgacagcggagacaacccgtacctcaagtacaaccacgccgacgcggagtttcaggagcgtcttaaagaagatacgtcttttgggggcaacctcggacgagcagtcttccaggcgaaaaagagggttcttgaacctctgggcctggttgaggaacctgttaagacggctccgggaaaaaagaggccggtagagcactctcctgtggagccagactcctcctcgggaaccggaaaggcgggccagcagcctgcaagaaaaagattgaatttcggtcagactggagacgcagactccgtacctgacccccagcctctcggacagccaccagcagccccctctggtctgggaactaatacgatggctacaggcagtggcgcaccaatggcagacaataacgagggcgccgacggagtgggtaattcctcgggaaattggcattgcgattccacatggatgggcgacagagtcatcaccaccagcacccgcacctgggctctgcccacctacaacaaccatctgtacaagcaaatttccagccaatcaggagcatcgaacgacaaccactactttggctacagcaccccctgggggtattttgacttcaacagattccactgccacttttcgccacgtgactggcaaagactcatcaacaacaactggggattccggcccaagagactcagcttcaagctctttaacattcaagtcaaggaggtcacgcagaatgacggtacgacgacgattgccaataaccttaccagcacggttcaggtctttactgactcggagtaccagctcccgtacgtcctcggctcggcgcatcaaggatgcctcccgccgttcccagcagacgtcttcatggtgccacagtatggatacctcaccctgaacaacgggagtcaggcggtaggacgctcttcattttactgcctggagtacttcccttctcagatgcttcgcacgggaaacaactttaccttcagctacacctttgaggacgtgccttttcacagcagctacgctcacagccaaagtctggaccgtctcatgaatcctctcatcgaccaatacctgtattacttgagcaaaacaaacgctccaagcggaaccaccacgatgtccaggcttcagttttctcaggccggagcgagtgacattcgggaccagtctagaaactggcttcctggaccctgttaccgccagcagcgagtatcaaagacagctgcggacaacaacaacagtgattactcgtggactggagctaccaagtaccacctcaatggaagagactctctggtgaacccgggcccaactatggccagccacaaggatgatgaagaaaaatattttcctcagagcggggttctcatcttcgggaaacaaggctcaaataaaactaatgtggacattgaaaaggttatgattacagacgaagaggaaatcaggaccaccaatcccgtggctacggagcagtatggttctgtatctaccaaccttcaaagcggcaacacacaagcagctacctcagatgtcaacacacaaggcgttcttcctggcatggtctggcaggacagagatgtgtacctgcaggggcccatctgggcaaagattcctcacacggacggacactttcacccttctcccctcatgggcggatttggattgaagcaccctcccccacagattctcatcaagaataccccggtacctgcgaatccttcgaccaccttcagtgcggcaaagtttgcttccttcatcacacagtattccacgggacaggtcagcgtggagatagagtgggagctgcagaaggagaacagcaaacgctggaaccccgagatccagtatacttccaactacaacaaatctgttaatgtggactttactgtggacactaatggtgtgtattcagagcctcgccccattggcaccagatacctgactcgtaatctgtaa

SEQ ID NO: 1261 - DNA, 2208 bp, Artificial Sequence
  Synthetic Polynucleotide
atggctgccgatggttatcttccagattggctcgaggacactctctctgaaggaataagacagtggtggaagctcaaacctggcccaccaccgccaaagcccgcagagcggcataaggacgacagcaggggtcttgtgcttcctgggtacaagtacctcggacccctcaacggactcgacaagggggagccggtcaacgaggcagacgccgcggccctcgagcacgacaaggcctacgaccggcagctcgacagcggagacaacccgtacctcaagtacaaccacgccgacgcggagtttcaggagcgtcttaaagaagatacgtcttttgggggcaacctcggacgagcagtcttccaggcgaaaaagagggttcttgaacctctgggcctggttgaggaacctgttaagacggctccgggaaaaaagaggccggtagagcactctcctgtggagccagactcctcctcgggaaccggaaaggcgggccagcagcctgcaagaaaaagattgaatttcggtcagactggagacgcagactccgtacctgacccccagcctctcggacagccaccagcagccccctctggtctgggaactaatacgatggctacaggcagtggcgcaccaatggcagacaataacgagggcgccgacggagtgggtaattcctcgggaaattggcattgcgattccacatggatgggcgacagagtcatcaccaccagcacccgcacctgggctctgcccacctacaacaaccatctgtacaagcaaatttccagccaatcaggagcatcgaacgacaaccactactttggctacagcaccccctgggggtattttgacttcaacagattccactgccacttttcgccacgtgactggcaaagactcatcaacaacaactggggattccggcccaagagactcagcttcaagctctttaacattcaagtcaaggaggtcacgcagaatgacggtacgacgacgattgccaataaccttaccagcacggttcaggtctttactgactcggagtaccagctcccgtacgtcctcggctcggcgcatcaaggatgcctcccgccgttcccagcagacgtcttcatggtgccacagtatggatacctcaccctgaacaacgggagtcaggcggtaggacgctcttcattttactgcctggagtacttcccttctcagatgcttcgcacgggaaacaactttaccttcagctacacctttgaggacgtgccttttcacagcagctacgctcacagccaaagtctggaccgtctcatgaatcctctcatcgaccaatacctgtattacttgagcaaaacaaacgctccaagcggaaccaccacgatgtccaggcttcagttttctcaggccggagcgagtgacattcgggaccagtctagaaactggcttcctggaccctgttaccgccagcagcgagtatcaaagacagctgcggacaacaacaacagtgattactcgtggactggagctaccaagtaccacctcaatggaagagactctctggtgaacccgggcccagctatggccagccacaaggatgatgaagaaaaatattttcctcagagcggggttctcatcttcgggaaacaaggctcaaataaaactaatgtggacattgaaaaggttatgattacagacgaagaggaaatcaggaccaccaatcccgtggctacggagcagtatggttctgtatctaccaaccttcaaagcggcaacacacaagcagctacctcagatgtcaacacacaaggcgttcttcctggcatggtctggcaggacagagatgtgtacctgcaggggcccatctgggcaaagattcctcacacggacggacactttcacccttctcccctcatgggcggatttggattgaagcaccctcccccacagattctcatcaagaataccccggtacctgcgaatccttcgaccaccttcagtgcggcaaagtttgcttccttcatcacacagtattccacgggacaggtcagcgtggagatagagtgggagctgcagaaggagaacagcaaacgctggaaccccgagatccagtatacttccaactacaacaaatctgttaatgtggactttactgtggacactaatggtgtgtattcagagcctcgccccattggcaccagatacctgactcgtaatctgtaa

SEQ ID NO: 1262 - DNA, 2208 bp, Artificial Sequence
  Synthetic Polynucleotide
atggctgccgatggttatcttccagattggctcgaggacactctctctgaaggaataagacagtggtggaagctcaaacctggcccaccaccgccaaagcccgcagagcggcataaggacgacagcaggggtcttgtgcttcctgggtacaagtacctcggacccttcaacggactcgacaagggggagccggtcaacgaggcagacgccgcggccctcgagcacgacaaggcctacgaccggcagctcgacagcggagacaacccgtacctcaagtacaaccacgccgacgcggagtttcaggagcgtcttaaagaagatacgtcttttgggggcaacctcggacgagcagtcttccaggcgaaaaagagggttcttgaacctctgggcctggttgaggaacctgttaagacggctccgggaaaaaagaggccggtagagcactctcctgtggagccagactcctcctcgggaaccggaaaggcgggccagcagcctgcaagaaaaagattgaatttcggtcagactggagacgcagactccgtacctgacccccagcctctcggacagccaccagcagccccctctggtctgggaactaatacgatggctacaggcagtggcgcaccaatggcagacaataacgagggcgccgacggagtgggtaattcctcgggaaattggcattgcgattccacatggatgggcgacagagtcatcaccaccagcacccgcacctgggctctgcccacctacaacaaccatctgtacaagcaaatttccagccaatcaggagcatcgaacgacaaccactactttggctacagcaccccctgggggtattttgacttcaacagattccactgccacttttcgccacgtgactggcaaagactcatcaacaacaactggggattccggcccaagagactcagcttcaagctctttaacattcaagtcaaggaggtcacgcagaatgacggtacgacgacgattgccaataaccttaccagcacggttcaggtctttactgactcggagtaccagctcccgtacgtcctcggctcggcgcatcaaggatgcctcccgccgttcccagcagacgtcttcatggtgccacagtatggatacctcaccctgaacaacgggagtcaggcggtaggacgctcttcattttactgcctggagtacttcccttctcagatgcttcgcacgggaaacaactttaccttcagctacacctttgaggacgtgccttttcacagcagctacgctcacagccaaagtctggaccgtctcatgaatcctctcatcgaccaatacctgtattacttgagcaaaacaaacgctccaagcggaaccaccacgatgtccaggcttcagttttctcaggccggagcgagtgacattcgggaccagtctagaaactggcttcctggaccctgttaccgccagcagcgagtatcaaagacagctgcggacaacaacaacagtgattactcgtggactggagctaccaagtaccacctcaatggaagagactctctggtgaacccgggcccagctatgaccagccacaaggatgatgaagaaaaatattttcctcagagcggggttctcatcttcgggaaacaaggctcaaataaaactaatgtggacattgaaaaggttatgattacagacgaagaggaaatcaggaccaccaatcccgtggctacggagcagtatggttctgtatctaccaaccttcaaagcggcaacacacaagcagctacctcagatgtcaacacacaaggcgttcttcctggcatggtctggcaggacagagatgtgtacctgcaggggcccatctgggcaaagattcctcacacggacggacactttcacccttctcccctcatgggcggatttggattgaagcaccctcccccacagattctcatcaagaataccccggtacctgcgaatccttcgaccaccttcagtgcggcaaagtttgcttccttcatcacacagtattccacgggacaggtcagcgtggagatagagtgggagctgcagaaggagaacagcaaacgctggaaccccgagatccagtatacttccaactacaacaaatctgttaatgtggactttactgtggacactaatggtgtgtattcagagcctcgccccattggcaccagatacctgactcgtaatctgtaa

SEQ ID NO: 1263 - DNA, 2208 bp, Artificial Sequence
  Synthetic Polynucleotide
atggctgccgatggttatcttccagattggctcgaggacactctctctgaaggaataagacagtggtggaagctcaaacctggcccaccaccgccaaagcccgcagagcggcataaggacgacagcaggggtcttgtgcttcctgggtacaagtacctcggacccttcaacggactcgacaagggggagccggtcaacgaggcagacgccgcggccctcgagcacgacaaggcctacgaccggcagctcgacagcggagacaacccgtacctcaagtacaaccacgccgacgcggagtttcaggagcgtcttaaagaagatacgtcttttgggggcaacctcggacgagcagtcttccaggcgaaaaagagggttcttgaacctctgggcctggttgaggaacctgttaagacggctccgggaaaaaagaggccggtagagcactctcctgtggagccagactcctcctcgggaaccggaaaggcgggccagcagcctgcaagaaaaagattgaatttcggtcagactggagacgcagactccgtacctgacccccagcctctcggacagccaccagcagccccctctggtctgggaactaatacgatggctacaggcagtggcgcaccaatggcagacaataacgagggcgccgacggagtgggtaattcctcgggaaattggcattgcgattccacatggatgggcgacagagtcatcaccaccagcacccgcacctgggctctgcccacctacaacaaccatctgtacaagcaaatttccagccaatcaggagcatcgaacgacaaccactactttggctacagcaccccctgggggtattttgacttcaacagattccactgccacttttcgccacgtgactggcaaagactcatcaacaacaactggggattccggcccaagagactcagcttcaagctctttaacattcaagtcaaggaggtcacgcagaatgacggtacgacgacgattgccaataaccttaccagcacggttcaggtctttactgactcggagtaccagctcccgtacgtcctcggctcggcgcatcaaggatgcctcccgccgttcccagcagacgtcttcatggtgccacagtatggatacctcaccctgaacaacgggagtcaggcggtaggacgctcttcattttactgcctggagtacttcccttctcagatgcttcgcacgggaaacaactttaccttcagctacacctttgaggacgtgccttttcacagcagctacgctcacagccaaagtctggaccgtctcatgaatcctctcatcgaccaatacctgtattacttgagcaaaacaaacgctccaagcggaaccaccacgatgtccaggcttcagttttctcaggccggagcgagtgacattcgggaccagtctagaaactggcttcctggaccctgttaccgccagcagcgagtatcaaagacagctgcggacaacaacaacagtgattactcgtggactggagctaccaagtaccacctcaatggaagagactctctggtgaacccgggcccagctatggccagccacaaggatgatgaagaaaaatattttcctcagagcggggttctcatcttcgggaaacaaggctcaaataaaactaatgtggacattgaaaaggttatgattacagacgaagaggaaatcaggaccaccaatcccgtggctacggagcagtatggttctgtatctaccaaccttcaaagcggcaacacacaagcagctacctcagatgtcaacacacaaggcgttcttcctggcatggtctggcaggacagagatgtgtacctgcaggggcccatctggacaaagattcctcacacggacggacactttcacccttctcccctcatgggcggatttggattgaagcaccctcccccacagattctcatcaagaataccccggtacctgcgaatccttcgaccaccttcagtgcggcaaagtttgcttccttcatcacacagtattccacgggacaggtcagcgtggagatagagtgggagctgcagaaggagaacagcaaacgctggaaccccgagatccagtatacttccaactacaacaaatctgttaatgtggactttactgtggacactaatggtgtgtattcagagcctcgccccattggcaccagatacctgactcgtaatctgtaa

SEQ ID NO: 1264 - DNA, 2208 bp, Artificial Sequence
  Synthetic Polynucleotide
atggctgccgatggttatcttccagattggctcgaggacactctctctgaaggaataagacagtggtggaagctcaaacctggcccaccaccgccaaagcccgcagagcggcataaggacgacagcaggggtcttgtgcttcctgggtacaagtacctcggacccttcaacggactcgacaagggggagccggtcaacgaggcagacgccgcggccctcgagcacgacaaggcctacgaccggcagctcgacagcggagacaacccgtacctcaagtacaaccacgccgacgcggagtttcaggagcgtcttaaagaagatacgtcttttgggggcaacctcggacgagcagtcttccaggcgaaaaagagggttcttgaacctctgggcctggttgaggaacctgttaagacggctccgggaaaaaagaggccggtagagcactctcctgtggagccagactcctcctcgggaaccggaaaggcgggccagcagcctgcaagaaaaagattgaatttcggtcagactggagacgcagactccgtacctgacccccagcctctcggacagccaccagtagccccctctggtctgggaactaatacgatggctacaggcagtggcgcaccaatggcagacaataacgagggcgccgacggagtgggtaattcctcgggaaattggcattgcgattccacatggatgggcgacagagtcatcaccaccagcacccgcacctgggctctgcccacctacaacaaccatctgtacaagcaaatttccagccaatcaggagcatcgaacgacaaccactactttggctacagcaccccctgggggtattttgacttcaacagattccactgccacttttcgccacgtgactggcaaagactcatcaacaacaactggggattccggcccaagagactcagcttcaagctctttaacattcaagtcaaggaggtcacgcagaatgacggtacgacgacgattgccaataaccttaccagcacggttcaggtctttactgactcggagtaccagctcccgtacgtcctcggctcggcgcatcaaggatgcctcccgccgttcccagcagacgtcttcatggtgccacagtatggatacctcaccctgaacaacgggagtcaggcggtaggacgctcttcattttactgcctggagtacttcccttctcagatgcttcgcacgggaaacaactttaccttcagctacacctttgaggacgtgccttttcacagcagctacgctcacagccaaagtctggaccgtctcatgaatcctctcatcgaccaatacctgtattacttgagcaaaacaaacgctccaagcggaaccaccacgatgtccaggcttcagttttctcaggccggagcgagtgacattcgggaccagtctagaaactggcttcctggaccctgttaccgccagcagcgagtatcaaagacagctgcggacaacaacaacagtgattactcgtggactggagctaccaagtaccacctcaatggaagagactctctggtgaacccgggcccagctatggccagccacaaggatgatgaagaaaaatattttcctcagagcggggttctcatcttcgggaaacaaggctcaaataaaactaatgtggacattgaaaaggttatgattacagacgaagaggaaatcaggaccaccaatcccgtggctacggagcagtatggttctgtatctaccaaccttcaaagcggcaacacacaagcagctacctcagatgtcaacacacaaggcgttcttcctggcatggtctggcaggacagagatgtgtacctgcaggggcccatctgggcaaagattcctcacacggacggacactttcacccttctcccctcatgggcggatttggattgaagcaccctcccccacagattctcatcaagaataccccggtacctgcgaatccttcgaccaccttcagtgcggcaaagtttgcttccttcatcacacagtattccacgggacaggtcagcgtggagatagagtgggagctgcagaaggagaacagcaaacgctggaaccccgagatccagtatacttccaactacaacaaatctgttaatgtggactttactgtggacactaatggtgtgtattcagagcctcgccccattggcaccagatacctgactcgtaatctgtaa

SEQ ID NO: 1265 - DNA, 2208 bp, Artificial Sequence
  Synthetic Polynucleotide
atggctgccgatggttatcttccagattggctcgaggacactctctctgaaggaataagacagtggtggaagctcaaacctggcccaccaccgccaaagcccgcagagcggcataaggacgacagcaggggtcttgtgcttcctgggtacaagtacctcggacccttcaacggactcgacaagggggagccggtcaacgaggcagacgccgcggccctcgagcacgacaaggcctacgaccggcagctcgacagcggagacaacccgtacctcaagtacaaccacgccgacgcggagtttcaggagcgtcttaaagaagatacgtcttttgggggcaacctcggacgagcagtcttccaggcgaaaaagagggttcttgaacctctgggcctggttgaggaacctgttaagacggctccgggaaaaaagaggccggtagagcactctcctgtggagccagactcctcctcgggaaccggaaaggcgggccagcagcctgcaagaaaaagattgaatttcggtcagactggagacgcagactccgtacctgacccccagcctctcggacagccaccagcagccccctctggtctgggaactaatacgatggctacaggcagtggcgcaccaatggcagacaataacgagggcgccgacggagtgggtaattcctcgggaaattggcattgcgattccacatggatgggcgacagagtcatcaccaccagcacccgcacctgggctctgcccacctacaacaaccatctgtacaagcaaatttccagccaatcaggagcatcgaacgacaaccactactttggctacagcaccccctgggggtattttgacttcaacagattccactgccacttttcgccacgtgactggcaaagactcatcaacaacaactggggattccggcccaagagactcagcttcaagctctttaacattcaagtcaaggaggtcacgcagaatgacggtacgacgacgattgccaataaccttaccagcacggttcaggtctttactgactcggagtaccagctcccgtacgtcctcggctcggcgcatcaaggatgcctcccgccgttcccagcagacgtcttcatggtgccacagtatggatacctcaccctgaacaacgggagtcaggcggtaggacgctcttcattttactgcctggagtacttcccttctcagatgcttcgcacgggaaacaactttaccttcagctacacctttgaggacgtgccttttcacagcagctacgctcacagccaaagtctggaccgtctcatgaatcctctcatcgaccaatacctgtattacttgagcaaaacaaacgctccaagcggaaccaccacgatgtccaggcttcagttttctcaggccggagcgagtgacattcgggaccagtctagaaactggcttcctggaccctgttaccgccagcagcgagtatcaaagacagctgcggacaacaacaacagtgattactcgtggactggagctaccaagtaccacctcaatggaagagactctctggtgaacccgggcccagctatggccagccacaaggatgatgaagaaaaatattttcctcagagcggggttctcatcttcgggaaacaaggctcaaataaaactaatgtggacattgaaaaggttatgattacagacgaagaggaaatcaggaccaccaatcccgtggctacggagcagtatggttctgtatctaccaaccttcaaagcggcaacacacaagcagctacctcagatgtcaacacacaaggcgttcttcctggcatggtctggcaggacagagatgtgtacctgcaggggcccatctgggcaaagattcctcacacggacggacactttcacccttctcccctcatgggcggatttggattgaagcaccctcccccacagattctcatcaagaataccccggtacctgcgaatccttcgaccaccttcagtgcggcaaagtttgcttccttcatcacacagtattccacgggacaggtcagcgtggagatagagtgggagccgcagaaggagaacagcaaacgctggaaccccgagatccagtatacttccaactacaacaaatctgttaatgtggactttactgtggacactaatggtgtgtattcagagcctcgccccattggcaccagatacctgactcgtaatctgtaa

SEQ ID NO: 1266 - DNA, 2208 bp, Artificial Sequence
  Synthetic Polynucleotide
atggctgccgatggttatcttccagattggctcgaggacactctctctgaaggaataagacagtggtggaagctcaaacctggcccaccaccgccaaagcccgcagagcggcataaggacgacagcaggggtcttgtgcttcctgggtacaagtacctcggacccttcaacggactcgacaagggggagccggtcaacgaggcagacgccgcggccctcgagcacgacaaggcctacgaccggcagctcgacagcggagacaacccgtacctcaagtacaaccacgccgacgcggagtttcaggagcgtcttaaagaagatacgtcttttgggggcaacctcggacgagcagtcttccaggcgaaaaagagggttcttgaacctctgggcctggttgaggaacctgttaagacggctccgggaaaaaagaggccggtagagcactctcctgtggagccagactcctcctcgggaaccggaaaggcgggccagcagcctgcaagaaaaagattgaatttcggtcagactggagacgcagactccgtacctgacccccagcctctcggacagccaccagcagccccctctggtctgggaactaatacgatggctacaggcagtggcgcaccaatggcagacaataacgagggcgccgacggagtgggtaattcctcgggaaattggcattgcgattccacatggatgggcgacagagtcatcaccaccagcacccgcacctgggctctgcccacctacaacaaccatctgtacaagcaaatttccagccaatcaggagcatcgaacgacaaccactactttggctacagcaccccctgggggtattttgacttcaacagattccactgccacttttcgccacgtgactggcaaagactcatcaacaacaactggggattccggcccaagagactcagcttcaagctctttaacattcaagtcaaggaggtcacgcagaatgacggtacgacgacgattgccaataaccttaccagcacggttcaggtctttactgactcggagtaccagctcccgtacgtcctcggctcggcgcatcaaggatgcctcccgccgttcccagcagacgtcttcatggtgccacagtatggatacctcaccctgaacaacgggagtcaggcggtaggacgctcttcattttactgcctggagtacttcccttctcagatgcttcgcacgggaaacaactttaccttcagctacacctttgaggacgtgccttttcacagcagctacgctcacagccaaagtctggaccgtctcatgaatcctctcatcgaccaatacctgtattacttgagcaaaacaaacgctccaagcggaaccaccacgatgtccaggcttcagttttctcaggccggagcgagtgacattcgggaccagtctagaaactggcttcctggaccctgttaccgccagcagcgagtatcaaagacagttgcggacaacaacaacagtgattactcgtggactggagctaccaagtaccacctcaatggaagagactctctggtgaacccgggcccagctatggccagccacaaggatgatgaagaaaaatattttcctcagagcggggttctcatcttcgggaaacaaggctcaaataaaactaatgtggacattgaaaaggttatgattacagacgaagaggaaatcaggaccaccaatcccgtggctacggagcagtatggttctgtatctaccaaccttcaaagcggcaacacacaagcagctacctcagatgtcaacacacaaggcgttcttcctggcatggtctggcaggacagagatgtgtacctgcaggggcccatctgggcaaagattcctcacacggacggacactttcacccttctcccctcatgggcggatttggattgaagcaccctcccccacagattctcatcaagaataccccggtacctgcgaatccttcgaccaccttcagtgcggcaaagtttgcttccttcatcacacagtattccacgggacaggtcagcgtggagatagagtgggagctgcagaaggagaacagcaaacgctggaaccccgagatccagtatacttccaactacaacaaatctgttaatgtggactttactgtggacactaatggtgtgtattcagagcctcgccccattggcaccagatacctgactcgtaatctgtaa

SEQ ID NO: 1267 - DNA, 2208 bp, Artificial Sequence
  Synthetic Polynucleotide
atggctgccgatggttatcttccagattggctcgaggacactctctctgaaggaataagacagtggtggaagctcaaacctggcccaccaccgccaaagcccgcagagcggcataaggacgacagcaggggtcttgtgcttcctgggtacaagtacctcggacccttcaacggactcgacaagggggagccggtcaacgaggcagacgccgcggccctcgagcacgacaaggcctacgaccggcagctcgacagcggagacaacccgtacctcaagtacaaccacgccgacgcggagtttcaggagcgtcttaaagaagatacgtcttttgggggcaacctcggacgagcagtcttccaggcgaaaaagagggttcttgaacctctgggcctggttgaggaacctgttaagacggctccgggaaaaaagaggccggtagagcactctcctgtggagccagactcctcctcgggaaccggaaaggcgggccagcagcctgcaagaaaaagattgaatttcggtcagactggagacgcagactccgtacctgacccccagcctctcggacagccaccagcagccccctctggtctgggaactaatacgatggctacaggcagtggcgcaccaatggcagacaataacgagggcgccgacggagtgggtaattcctcgggaaattggcattgcgattccacatggatgggcgacagagtcatcaccaccagcacccgcacctgggctctgcccacctacaacaaccatctgtacaagcaaatttccagccaatcaggagcatcgaacgacaaccactactttggctacagcaccccctgggggtattttgacttcaacagattccactgccacttttcgccacgtgactggcaaagactcatcaacaacaactggggattccggcccaagagactcagcttcaagctctttaacattcaagtcaaggaggtcacgcagaatgacggtacgacgacgattgccaataaccttaccagcacggttcaggtctttactgactcggagtaccagctcccgtacgtcctcggctcggcgcatcaaggatgcctcccgccgttcccagcagacgtcttcatggtgccacagtatggatacctcaccctgaacaacgggagtcaggcggtaggacgctcttcattttactgcctggagtacttcccttctcagatgcttcgcacgggaaacaactttaccttcagctacacctttgaggacgtgccttttcacagcagctacgctcacagccaaagtctggaccgtctcatgaatcctctcatcgaccaatacccgtattacttgagcaaaacaaacgctccaagcggaaccaccacgatgtccaggcttcagttttctcaggccggagcgagtgacattcgggaccagtctagaaactggcttcctggaccctgttaccgccagcagcgagtatcaaagacagctgcggacaacaacaacagtgattactcgtggactggagctaccaagtaccacctcaatggaagagactctctggtgaacccgggcccagctatggccagccacaaggatgatgaagaaaaatattttcctcagagcggggttctcatcttcgggaaacaaggctcaaataaaactaatgtggacattgaaaaggttatgattacagacgaagaggaaatcaggaccaccaatcccgtggctacggagcagtatggttctgtatctaccaaccttcaaagcggcaacacacaagcagctacctcagatgtcaacacacaaggcgttcttcctggcatggtctggcaggacagagatgtgtacctgcaggggcccatctgggcaaagattcctcacacggacggacactttcacccttctcccctcatgggcggatttggattgaagcaccctcccccacagattctcatcaagaataccccggtacctgcgaatccttcgaccaccttcagtgcggcaaagtttgcttccttcatcacacagtattccacgggacaggtcagcgtggagatagagtgggagctgcagaaggagaacagcaaacgctggaaccccgagatccagtatacttccaactacaacaaatctgttaatgtggactttactgtggacactaatggtgtgtattcagagcctcgccccattggcaccagatacctgactcgtaatctgtaa

SEQ ID NO: 1268 - DNA, 2208 bp, Artificial Sequence
  Synthetic Polynucleotide
atggctgccgatggttatcttccagattggctcgaggacactctctctgaaggaataagacagtggtggaagctcaaacctggcccaccaccgccaaagcccgcagagcggcataaggacgacagcaggggtcttgtgcttcctgggtacaagtacctcggacccttcaacggactcgacaagggggagccggtcaacgaggcagacgccgcggccctcgagcacgacaaggcctacgaccggcagctcgacagcggagacaacccgtacctcaagtacaaccacaccgacgcggagtttcaggagcgtcttaaagaagatacgtcttttgggggcaacctcggacgagcagtcttccaggcgaaaaagagggttcttgaacctctgggcctggttgaggaacctgttaagacggctccgggaaaaaagaggccggtagagcactctcctgtggagccagactcctcctcgggaaccggaaaggcgggccagcagcctgcaagaaaaagattgaatttcggtcagactggagacgcagactccgtacctgacccccagcctctcggacagccaccagcagccccctctggtctgggaactaatacgatggctacaggcagtggcgcaccaatggcagacaataacgagggcgccgacggagtgggtaattcctcgggaaattggcattgcgattccacatggatgggcgacagagtcatcaccaccagcacccgcacctgggctctgcccacctacaacaaccatctgtacaagcaaatttccagccaatcaggagcatcgaacgacaaccactactttggctacagcaccccctgggggtattttgacttcaacagattccactgccacttttcgccacgtgactggcaaagactcatcaacaacaactggggattccggcccaagagactcagcttcaagctctttaacattcaagtcaaggaggtcacgcagaatgacggtacgacgacgattgccaataaccttaccagcacggttcaggtctttactgactcggagtaccagctcccgtacgtcctcggctcggcgcatcaaggatgcctcccgccgttcccagcagacgtcttcatggtgccacagtatggatacctcaccctgaacaacgggagtcaggcggtaggacgctcttcattttactgcctggagtacttcccttctcagatgcttcgcacgggaaacaactttaccttcagctacacctttgaggacgtgccttttcacagcagctacgctcacagccaaagtctggaccgtctcatgaatcctctcatcgaccaatacctgtattacttgagcaaaacaaacgctccaagcggaaccaccacgatgtccaggcttcagttttctcaggccggagcgagtgacattcgggaccagtctagaaactggcttcctggaccctgttaccgccagcagcgagtatcaaagacagctgcggacaacaacaacagtgattactcgtggactggagctaccaagtaccacctcaatggaagagactctctggtgaacccgggcccagctatggccagccacaaggatgatgaagaaaaatattttcctcagagcggggttctcatcttcgggaaacaaggctcaaataaaactaatgtggacattgaaaaggttatgattacagacgaagaggaaatcaggaccaccaatcccgtggctacggagcagtatggttctgtatctaccaaccttcaaagcggcaacacacaagcagctacctcagatgtcaacacacaaggcgttcttcctggcatggtctggcaggacagagatgtgtacctgcaggggcccatctgggcaaagattcctcacacggacggacactttcacccttctcccctcatgggcggatttggattgaagcaccctcccccacagattctcatcaagaataccccggtacctgcgaatccttcgaccaccttcagtgcggcaaagtttgcttccttcatcacacagtattccacgggacaggtcagcgtggagatagagtgggagctgcagaaggagaacagcaaacgctggaaccccgagatccagtatacttccaactacaacaaatctgttaatgtggactttactgtggacactaatggtgtgtattcagagcctcgccccattggcaccagatacctgactcgtaatctgtaa

SEQ ID NO: 1269 - DNA, 2208 bp, Artificial Sequence
  Synthetic Polynucleotide
atggctgccgatggttatcttccagattggctcgaggacactctctctgaaggaataagacagtggtggaagctcaaacctggcccaccaccgccaaagcccgcagagcggcataaggacgacagcaggggtcttgtgcttcctgggtacaagtacctcggacccttcaacggactcgacaagggggggccggtcaacgaggcagacgccgcggccctcgagcacgacaaggcctacgaccggcagctcgacagcggagacaacccgtacctcaagtacaaccacgccgacgcggagtttcaggagcgtcttaaagaagatacgtcttttgggggcaacctcggacgagcagtcttccaggcgaaaaagagggttcttgaacctctgggcctggttgaggaacctgttaagacggctccgggaaaaaagaggccggtagagcactctcctgtggagccagactcctcctcgggaaccggaaaggcgggccagcagcctgcaagaaaaagattgaatttcggtcagactggagacgcagactccgtacctgacccccagcctctcggacagccaccagcagccccctctggtctgggaactaatacgatggctacaggcagtggcgcaccaatggcagacaataacgagggcgccgacggagtgggtaattcctcgggaaattggcattgcgattccacatggatgggcgacagagtcatcaccaccagcacccgcacctgggctctgcccacctacaacaaccatctgtacaagcaaatttccagccaatcaggagcatcgaacgacaaccactactttggctacagcaccccctgggggtattttgacttcaacagattccactgccacttttcgccacgtgactggcaaagactcatcaacaacaactggggattccggcccaagagactcagcttcaagctctttaacattcaagtcaaggaggtcacgcagaatgacggtacgacgacgattgccaataaccttaccagcacggttcaggtctttactgactcggagtaccagctcccgtacgtcctcggctcggcgcatcaaggatgcctcccgccgttcccagcagacgtcttcatggtgccacagtatggatacctcaccctgaacaacgggagtcaggcggtaggacgctcttcattttactgcctggagtacttcccttctcagatgcttcgcacgggaaacaactttaccttcagctacacctttgaggacgtgccttttcacagcagctacgctcacagccaaagtctggaccgtctcatgaatcctctcatcgaccaatacctgtattacttgagcaaaacaaacgctccaagcggaaccaccacgatgtccaggcttcagttttctcaggccggagcgagtgacattcgggaccagtctagaaactggcttcctggaccctgttaccgccagcagcgagtatcaaagacagctgcggacaacaacaacagtgattactcgtggactggagctaccaagtaccacctcaatggaagagactctctggtgaacccgggcccagctatggccagccacaaggatgatgaagaaaaatattttcctcagagcggggttctcatcttcgggaaacaaggctcaaataaaactaatgtggacattgaaaaggttatgattacagacgaagaggaaatcaggaccaccaatcccgtggctacggagcagtatggttctgtatctaccaaccttcaaagcggcaacacacaagcagctacctcagatgtcaacacacaaggcgttcttcctggcatggtctggcaggacagagatgtgtacctgcaggggcccatctgggcaaagattcctcacacggacggacactttcacccttctcccctcatgggcggatttggattgaagcaccctcccccacagattctcatcaagaataccccggtacctgcgaatccttcgaccaccttcagtgcggcaaagtttgcttccttcatcacacagtattccacgggacaggtcagcgtggagatagagtgggagctgcagaaggagaacagcaaacgctggaaccccgagatccagtatacttccaactacaacaaatctgttaatgtggactttactgtggacactaatggtgtgtattcagagcctcgccccattggcaccagatacctgactcgtaatctgtaa

SEQ ID NO: 1270 - DNA, 2208 bp, Artificial Sequence
  Synthetic Polynucleotide
atggctgccgatggttatcttccagattggctcgaggacactctctctgaaggaataagacagtggtggaagctcaaacctggcccaccaccgccaaagcccgcagagcggcataaggacgacagcaggggtcttgtgcttcctgggtacaagtacctcggacccttcaacggactcgacaagggggagccggtcaacgaggcagacgccgcggccctcgagcacgacaaggcctacgaccggcagctcgacagcggagacaacccgtacctcaagtacaaccacgccgacgcggagtttcaggagcgtcttaaagaagatacgtcttttgggggcaacctcggacgagcagtcttccaggcgaaaaagagggttcttgaacctctgggcctggttgaggaacctgttaagacggctccgggaaaaaagaggccggtagagcactctcctgtggagccagactcctcctcgggaaccggaaaggcgggccagcagcctgcaagaaaaagattgaatttcggtcagactggagacgcagactccgtacctgacccccagcctctcggacagccaccagcagccccctctggtctgggaactaatacgatggctacaggcagtggcgcaccaatggcagacaataacgagggcgccgacggagtgggtaattcctcgggaaattggcattgcgattccacatggatgggcgacagagtcatcaccaccagcacccgcacctggactctgcccacctacaacaaccatctgtacaagcaaatttccagccaatcaggagcatcgaacgacaaccactactttggctacagcaccccctgggggtattttgacttcaacagattccactgccacttttcgccacgtgactggcaaagactcatcaacaacaactggggattccggcccaagagactcagcttcaagctctttaacattcaagtcaaggaggtcacgcagaatgacggtacgacgacgattgccaataaccttaccagcacggttcaggtctttactgactcggagtaccagctcccgtacgtcctcggctcggcgcatcaaggatgcctcccgccgttcccagcagacgtcttcatggtgccacagtatggatacctcaccctgaacaacgggagtcaggcggtaggacgctcttcattttactgcctggagtacttcccttctcagatgcttcgcacgggaaacaactttaccttcagctacacctttgaggacgtgccttttcacagcagctacgctcacagccaaagtctggaccgtctcatgaatcctctcatcgaccaatacctgtattacttgagcaaaacaaacgctccaagcggaaccaccacgatgtccaggcttcagttttctcaggccggagcgagtgacattcgggaccagtctagaaactggcttcctggaccctgttaccgccagcagcgagtatcaaagacagctgcggacaacaacaacagtgattactcgtggactggagctaccaagtaccacctcaatggaagagactctctggtgaacccgggcccagctatggccagccacaaggatgatgaagaaaaatattttcctcagagcggggttctcatcttcgggaaacaaggctcaaataaaactaatgtggacattgaaaaggttatgattacagacgaagaggaaatcaggaccaccaatcccgtggctacggagcagtatggttctgtatctaccaaccttcaaagcggcaacacacaagcagctacctcagatgtcaacacacaaggcgttcttcctggcatggtctggcaggacagagatgtgtacctgcaggggcccatctgggcaaagattcctcacacggacggacactttcacccttctcccctcatgggcggatttggattgaagcaccctcccccacagattctcatcaagaataccccggtacctgcgaatccttcgaccaccttcagtgcggcaaagtttgcttccttcatcacacagtattccacgggacaggtcagcgtggagatagagtgggagctgcagaaggagaacagcaaacgctggaaccccgagatccagtatacttccaactacaacaaatctgttaatgtggactttactgtggacactaatggtgtgtattcagagcctcgccccattggcaccagatacctgactcgtaatctgtaa

SEQ ID NO: 1271 - DNA, 2208 bp, Artificial Sequence
  Synthetic Polynucleotide
atggctgccgatggttatcttccagattggctcgaggacactctctctgaaggaataagacagtggtggaagctcaaacctggcccaccaccgccaaagcccgcagagcggcataaggacgacagcaggggtcttgtgcttcctgggtacaagtacctcggacccttcaacggactcgacaagggggagccggtcaacgaggcagacgccgcggtcctcgagcacgacaaggcctacgaccggcagctcgacagcggagacaacccgtacctcaagtacaaccacgccgacgcggagtttcaggagcgtcttaaagaagatacgtcttttgggggcaacctcggacgagcagtcttccaggcgaaaaagagggttcttgaacctctgggcctggttgaggaacctgttaagacggctccgggaaaaaagaggccggtagagcactctcctgtggagccagactcctcctcgggaaccggaaaggcgggccagcagcctgcaagaaaaagattgaatttcggtcagactggagacgcagactccgtacctgacccccagcctctcggacagccaccagcagccccctctggtctgggaactaatacgatggctacaggcagtggcgcaccaatggcagacaataacgagggcgccgacggagtgggtaattcctcgggaaattggcattgcgattccacatggatgggcgacagagtcatcaccaccagcacccgcacctgggctctgcccacctacaacaaccatctgtacaagcaaatttccagccaatcaggagcatcgaacgacaaccactactttggctacagcaccccctgggggtattttgacttcaacagattccactgccacttttcgccacgtgactggcaaagactcatcaacaacaactggggattccggcccaagagactcagcttcaagctctttaacattcaagtcaaggaggtcacgcagaatgacggtacgacgacgattgccaataaccttaccagcacggttcaggtctttactgactcggagtaccagctcccgtacgtcctcggctcggcgcatcaaggatgcctcccgccgttcccagcagacgtcttcatggtgccacagtatggatacctcaccctgaacaacgggagtcaggcggtaggacgctcttcattttactgcctggagtacttcccttctcagatgcttcgcacgggaaacaactttaccttcagctacacctttgaggacgtgccttttcacagcagctacgctcacagccaaagtctggaccgtctcatgaatcctctcatcgaccaatacctgtattacttgagcaaaacaaacgctccaagcggaaccaccacgatgtccaggcttcagttttctcaggccggagcgagtgacattcgggaccagtctagaaactggcttcctggaccctgttaccgccagcagcgagtatcaaagacagctgcggacaacaacaacagtgattactcgtggactggagctaccaagtaccacctcaatggaagagactctctggtgaacccgggcccagctatggccagccacaaggatgatgaagaaaaatattttcctcagagcggggttctcatcttcgggaaacaaggctcaaataaaactaatgtggacattgaaaaggttatgattacagacgaagaggaaatcaggaccaccaatcccgtggctacggagcagtatggttctgtatctaccaaccttcaaagcggcaacacacaagcagctacctcagatgtcaacacacaaggcgttcttcctggcatggtctggcaggacagagatgtgtacctgcaggggcccatctgggcaaagattcctcacacggacggacactttcacccttctcccctcatgggcggatttggattgaagcaccctcccccacagattctcatcaagaataccccggtacctgcgaatccttcgaccaccttcagtgcggcaaagtttgcttccttcatcacacagtattccacgggacaggtcagcgtggagatagagtgggagctgcagaaggagaacagcaaacgctggaaccccgagatccagtatacttccaactacaacaaatctgttaatgtggactttactgtggacactaatggtgtgtattcagagcctcgccccattggcaccagatacctgactcgtaatctgtaa

SEQ ID NO: 1272 - DNA, 2208 bp, Artificial Sequence
  Synthetic Polynucleotide
atggctgccgatggttatcttccagattggctcgaggacactctctctgaaggaataagacagtggtggaagctcaaacctggcccaccaccgccaaagcccgcagagcggcataaggacgacagcaggggtcttgtgcttcctgggtacaagtacctcggacccttcaacggactcgacaagggggagccggtcaacgaggcagacgccgcggccctcgagcacgacaaggcctacgaccggcagctcgacagcggagacaacccgtacctcaagtacaaccacgccgacgcggagtttcaggagcgtcttaaagaagatacgtcttttgggggcaacctcggacgagcagtcttccaggcgaaaaagagggttcttgaacctctgggcctggttgaggaacctgttaagacggctccgggaaaaaagaggccggtagagcactctcctgtggagccagactcctcctcgggaaccggaaaggcgggccagcagcctgcaagaaaaagattgaatttcggtcagactggagacgcagactccgtacctgacccccagcctctcggacagccaccagcagccccctctggtctgggaactaatacgatggctacaggcagtggcgcaccaatggcagacaataacgagggcgccgacggagtgggtaattcctcgggaaattggcattgcgattccacatggatgggcgacagagtcatcaccaccagcacccacacctgggctctgcccacctacaacaaccatctgtacaagcaaatttccagccaatcaggagcatcgaacgacaaccactactttggctacagcaccccctgggggtattttgacttcaacagattccactgccacttttcgccacgtgactggcaaagactcatcaacaacaactggggattccggcccaagagactcagcttcaagctctttaacattcaagtcaaggaggtcacgcagaatgacggtacgacgacgattgccaataaccttaccagcacggttcaggtctttactgactcggagtaccagctcccgtacgtcctcggctcggcgcatcaaggatgcctcccgccgttcccagcagacgtcttcatggtgccacagtatggatacctcaccctgaacaacgggagtcaggcggtaggacgctcttcattttactgcctggagtacttcccttctcagatgcttcgcacgggaaacaactttaccttcagctacacctttgaggacgtgccttttcacagcagctacgctcacagccaaagtctggaccgtctcatgaatcctctcatcgaccaatacctgtattacttgagcaaaacaaacgctccaagcggaaccaccacgatgtccaggcttcagttttctcaggccggagcgagtgacattcgggaccagtctagaaactggcttcctggaccctgttaccgccagcagcgagtatcaaagacagctgcggacaacaacaacagtgattactcgtggactggagctaccaagtaccacctcaatggaagagactctctggtgaacccgggcccagctatggccagccacaaggatgatgaagaaaaatattttcctcagagcggggttctcatcttcgggaaacaaggctcaaataaaactaatgtggacattgaaaaggttatgattacagacgaagaggaaatcaggaccaccaatcccgtggctacggagcagtatggttctgtatctaccaaccttcaaagcggcaacacacaagcagctacctcagatgtcaacacacaaggcgttcttcctggcatggtctggcaggacagagatgtgtacctgcaggggcccatctgggcaaagattcctcacacggacggacactttcacccttctcccctcatgggcggatttggattgaagcaccctcccccacagattctcatcaagaataccccggtacctgcgaatccttcgaccaccttcagtgcggcaaagtttgcttccttcatcacacagtattccacgggacaggtcagcgtggagatagagtgggagctgcagaaggagaacagcaaacgctggaaccccgagatccagtatacttccaactacaacaaatctgttaatgtggactttactgtggacactaatggtgtgtattcagagcctcgccccattggcaccagatacctgactcgtaatctgtaa

SEQ ID NO: 1273 - DNA, 2208 bp, Artificial Sequence
  Synthetic Polynucleotide
atggctgccgatggttatcttccagattggctcgaggacactctctctgaaggaataagacagtggtggaagctcaaacctggcccaccaccgccaaagcccgcagagcggcataaggacgacagcaggggtcttgtgcttcctgggtacaagtacctcggacccttcaacggactcgacaagggggagccggtcaacgaggcagacgccgcggccctcgagcacgacaaggcctacgaccggcagctcgacagcggagacaacccgtacctcaagtacaaccacgccgacgcggagtttcaggagcgtcttaaagaagatacgtcttttgggggcaacctcggacgagcagtcttccaggcgaaaaagagggttcttgaacctctgggcctggttgaggaacctgttaagacggctccgggaaaaaagaggccggtagagcactctcctgtggagccagactcctcctcgggaaccggaaaggcgggccagcagcctgcaagaaaaagattgaatttcggtcagactggagacgcagactccgtacctgacccccagcctctcggacagccaccagcagccccctctggtctgggaactaatacgatggctacaggcagtggcgcaccaatggcagacaataacgagggcgccgacggagtgggtaattcctcgggaaattggcattgcgattccacatggatgggcgacagagtcatcaccaccagcacccgcacctgggctctgcccacctacaacaaccatctgtacaagcaaatttccagccaatcaggagcatcgaacgacaaccactactttggctacagcaccccctgggggtattttgacttcaacagattccactgccacttttcgccacgtgactggcaaagactcatcaacaacaactggggattccggcccaagagactcagcttcaagctctttaacattcaagtcaaggaggtcacgcagaatgacggtacgacgacgattgccaataaccttaccagcacggttcaggtctttactgactcggagtaccagctcccgtacgtcctcggctcggcgcatcaaggatgcctcccgccgttcccagcagacgtcttcatggtgccacagtatggatacctcaccctgaacaacgggagtcaggcggtaggacgctcttcattttactgcctggagtacttcccttctcagatgcttcgcacgggaaacaactttaccttcagctacacctttgaggacgtgccttttcacagcagctacgctcacagccaaagtctggaccgtctcatgaatcctctcatcgaccaatacctgtattacttgagcaaaacaaacgctccaagcggaaccaccacgatgtccaggcttcagttttctcaggccggagcgagtggcattcgggaccagtctagaaactggcttcctggaccctgttaccgccagcagcgagtatcaaagacagctgcggacaacaacaacagtgattactcgtggactggagctaccaagtaccacctcaatggaagagactctctggtgaacccgggcccagctatggccagccacaaggatgatgaagaaaaatattttcctcagagcggggttctcatcttcgggaaacaaggctcaaataaaactaatgtggacattgaaaaggttatgattacagacgaagaggaaatcaggaccaccaatcccgtggctacggagcagtatggttctgtatctaccaaccttcaaagcggcaacacacaagcagctacctcagatgtcaacacacaaggcgttcttcctggcatggtctggcaggacagagatgtgtacctgcaggggcccatctgggcaaagattcctcacacggacggacactttcacccttctcccctcatgggcggatttggattgaagcaccctcccccacagattctcatcaagaataccccggtacctgcgaatccttcgaccaccttcagtgcggcaaagtttgcttccttcatcacacagtattccacgggacaggtcagcgtggagatagagtgggagctgcagaaggagaacagcaaacgctggaaccccgagatccagtatacttccaactacaacaaatctgttaatgtggactttactgtggacactaatggtgtgtattcagagcctcgccccattggcaccagatacctgactcgtaatctgtaa

SEQ ID NO: 1274 - DNA, 2208 bp, Artificial Sequence
  Synthetic Polynucleotide
atggctgccgatggttatcttccagattggctcgaggacactctctctgaaggaataagacagtggtggaagctcaaacctggcccaccaccgccaaagcccgcagagcggcataaggacgacagcaggggtcttgtgcttcctgggtacaagtacctcggacccttcaacggactcgacaagggggagccggtcaacgaggcagacgccgcggccctcgagcacgacaaggcctacgaccggcagctcgacagcggagacaacccgtacctcaagtacaaccacgccgacgcggagtttcaggagcgtcttaaagaagatacgtcttttgggggcaacctcggacgagtagtcttccaggcgaaaaagagggttcttgaacctctgggcctggttgaggaacctgttaagacggctccgggaaaaaagaggccggtagagcactctcctgtggagccagactcctcctcgggaaccggaaaggcgggccagcagcctgcaagaaaaagattgaatttcggtcagactggagacgcagactccgtacctgacccccagcctctcggacagccaccagcagccccctctggtctgggaactaatacgatggctacaggcagtggcgcaccaatggcagacaataacgagggcgccgacggagtgggtaattcctcgggaaattggcattgcgattccacatggatgggcgacagagtcatcaccaccagcacccgcacctgggctctgcccacctacaacaaccatctgtacaagcaaatttccagccaatcaggagcatcgaacgacaaccactactttggctacagcaccccctgggggtattttgacttcaacagattccactgccacttttcgccacgtgactggcaaagactcatcaacaacaactggggattccggcccaagagactcagcttcaagctctttaacattcaagtcaaggaggtcacgcagaatgacggtacgacgacgattgccaataaccttaccagcacggttcaggtctttactgactcggagtaccagctcccgtacgtcctcggctcggcgcatcaaggatgcctcccgccgttcccagcagacgtcttcatggtgccacagtatggatacctcaccctgaacaacgggagtcaggcggtaggacgctcttcattttactgcctggagtacttcccttctcagatgcttcgcacgggaaacaactttaccttcagctacacctttgaggacgtgccttttcacagcagctacgctcacagccaaagtctggaccgtctcatgaatcctctcatcgaccaatacctgtattacttgagcaaaacaaacgctccaagcggaaccaccacgatgtccaggcttcagttttctcaggccggagcgagtgacattcgggaccagtctagaaactggcttcctggaccctgttaccgccagcagcgagtatcaaagacagctgcggacaacaacaacagtgattactcgtggactggagctaccaagtaccacctcaatggaagagactctctggtgaacccgggcccagctatggccagccacaaggatgatgaagaaaaatattttcctcagagcggggttctcatcttcgggaaacaaggctcaaataaaactaatgtggacattgaaaaggttatgattacagacgaagaggaaatcaggaccaccaatcccgtggctacggagcagtatggttctgtatctaccaaccttcaaagcggcaacacacaagcagctacctcagatgtcaacacacaaggcgttcttcctggcatggtctggcaggacagagatgtgtacctgcaggggcccatctgggcaaagattcctcacacggacggacactttcacccttctcccctcatgggcggatttggattgaagcaccctcccccacagattctcatcaagaataccccggtacctgcgaatccttcgaccaccttcagtgcggcaaagtttgcttccttcatcacacagtattccacgggacaggtcagcgtggagatagagtgggagctgcagaaggagaacagcaaacgctggaaccccgagatccagtatacttccaactacaacaaatctgttaatgtggactttactgtggacactaatggtgtgtattcagagcctcgccccattggcaccagatacctgactcgtaatctgtaa

SEQ ID NO: 1275 - DNA, 2208 bp, Artificial Sequence
  Synthetic Polynucleotide
atggctgccgatggttatcttccagattggctcgaggacactctctctgaaggaataagacagtggtggaagctcaaacctggcccaccaccgccaaagcccgcagagcggcataaggacgacagcaggggtcttgtgcttcctgggtacaagtacctcggacccttcaacggactcgacaagggggagccggtcaacgaggcagacgccgcggccctcgagcacgacaaggcctacgaccggcagctcgacagcggagacaacccgtacctcaagtacaaccacgccgacgcggagtttcaggagcgtcttaaagaagatacgtcttttgggggcaacctcggacgagcagtcttccaggcgaaaaagagggttcttgaacctctgggcctggttgaggaacctgttaagacggctccgggaaaaaagaggccggtagagcactctcctgtggagccagactcctcctcgggaaccggaaaggcgggccagcagcctgcaagaaaaagattgaatttcggtcagactggagacgcagactccgtacctgacccccagcctctcggacagccaccagcagccccctctggtctgggaactaatacgatggctacaggcagtggcgcaccaatggcagacaataacgagggcgccgacggagtgggtaattcctcgggaaattggcattgcgattccacatggatgggcgacagagtcatcaccaccagcacccgcacctgggctctgcccacctacaacaaccatctgtacaagcaaatttccagccaatcaggagcatcgaacgacaaccactactttggctacagcaccccctgggggtattttgacttcaacagattccactgccacttttcgccacgtgactggcaaagactcatcaacaacaactggggattccggcccaagagactcagcttcaagctctttaacattcaagtcaaggaggtcacgcagaatgacggtacgacgacgattgccaataaccttaccagcacggttcaggtctttactgactcggagtaccagctcccgtacatcctcggctcggcgcatcaaggatgcctcccgccgttcccagcagacgtcttcatggtgccacagtatggatacctcaccctgaacaacgggagtcaggcggtaggacgctcttcattttactgcctggagtacttcccttctcagatgcttcgcacgggaaacaactttaccttcagctacacctttgaggacgtgccttttcacagcagctacgctcacagccaaagtctggaccgtctcatgaatcctctcatcgaccaatacctgtattacttgagcaaaacaaacgctccaagcggaaccaccacgatgtccaggcttcagttttctcaggccggagcgagtgacattcgggaccagtctagaaactggcttcctggaccctgttaccgccagcagcgagtatcaaagacagctgcggacaacaacaacagtgattactcgtggactggagctaccaagtaccacctcaatggaagagactctctggtgaacccgggcccagctatggccagccacaaggatgatgaagaaaaatattttcctcagagcggggttctcatcttcgggaaacaaggctcaaataaaactaatgtggacattgaaaaggttatgattacagacgaagaggaaatcaggaccaccaatcccgtggctacggagcagtatggttctgtatctaccaaccttcaaagcggcaacacacaagcagctacctcagatgtcaacacacaaggcgttcttcctggcatggtctggcaggacagagatgtgtacctgcaggggcccatctgggcaaagattcctcacacggacggacactttcacccttctcccctcatgggcggatttggattgaagcaccctcccccacagattctcatcaagaataccccggtacctgcgaatccttcgaccaccttcagtgcggcaaagtttgcttccttcatcacacagtattccacgggacaggtcagcgtggagatagagtgggagctgcagaaggagaacagcaaacgctggaaccccgagatccagtatacttccaactacaacaaatctgttaatgtggactttactgtggacactaatggtgtgtattcagagcctcgccccattggcaccagatacctgactcgtaatctgtaa

SEQ ID NO: 1276 - DNA, 2208 bp, Artificial Sequence
  Synthetic Polynucleotide
atggctgccgatggttatcttccagattggctcgaggacactctctctgaaggaataagacagtggtggaagctcaaacctggcccaccaccgccaaagcccgcagagcggcataaggacgacagcaggggtcttgtgcttcctgggtacaagtacctcggacccttcaacggactcgacaagggggagccggtcaacgaggcagacgccgcggccctcgagcacgacaaggcctacgaccggcagctcgacagcggagacaacccgtacctcaagtacaaccacgccgacgcggagtttcaggagcgtcttaaagaagatacgtcttttgggggcaacctcggacgagcagtcttccaggcgaaaaagagggttcttgaacctctgggcctggttgaggaacctgttaagacggctccgggaaaaaagaggccggtagagcactctcctgtggagccagactcctcctcgggaaccggaaaggcgggccagcagcctgcaagaaaaagattgaatttcggtcagactggagacgcagactccgtacctgacccccagcctctcggacagccaccagcagccccctctggtctgggaactaatacgatggctacaggcagtggcgcaccaatggcagacaataacgagggcgtcgacggagtgggtaattcctcgggaaattggcattgcgattccacatggatgggcgacagagtcatcaccaccagcacccgcacctgggctctgcccacctacaacaaccatctgtacaagcaaatttccagccaatcaggagcatcgaacgacaaccactactttggctacagcaccccctgggggtattttgacttcaacagattccactgccacttttcgccacgtgactggcaaagactcatcaacaacaactggggattccggcccaagagactcagcttcaagctctttaacattcaagtcaaggaggtcacgcagaatgacggtacgacgacgattgccaataaccttaccagcacggttcaggtctttactgactcggagtaccagctcccgtacgtcctcggctcggcgcatcaaggatgcctcccgccgttcccagcagacgtcttcatggtgccacagtatggatacctcaccctgaacaacgggagtcaggcggtaggacgctcttcattttactgcctggagtacttcccttctcagatgcttcgcacgggaaacaactttaccttcagctacacctttgaggacgtgccttttcacagcagctacgctcacagccaaagtctggaccgtctcatgaatcctctcatcgaccaatacctgtattacttgagcaaaacaaacgctccaagcggaaccaccacgatgtccaggcttcagttttctcaggccggagcgagtgacattcgggaccagtctagaaactggcttcctggaccctgttaccgccagcagcgagtatcaaagacagctgcggacaacaacaacagtgattactcgtggactggagctaccaagtaccacctcaatggaagagactctctggtgaacccgggcccagctatggccagccacaaggatgatgaagaaaaatattttcctcagagcggggttctcatcttcgggaaacaaggctcaaataaaactaatgtggacattgaaaaggttatgattacagacgaagaggaaatcaggaccaccaatcccgtggctacggagcagtatggttctgtatctaccaaccttcaaagcggcaacacacaagcagctacctcagatgtcaacacacaaggcgttcttcctggcatggtctggcaggacagagatgtgtacctgcaggggcccatctgggcaaagattcctcacacggacggacactttcacccttctcccctcatgggcggatttggattgaagcaccctcccccacagattctcatcaagaataccccggtacctgcgaatccttcgaccaccttcagtgcggcaaagtttgcttccttcatcacacagtattccacgggacaggtcagcgtggagatagagtgggagctgcagaaggagaacagcaaacgctggaaccccgagatccagtatacttccaactacaacaaatctgttaatgtggactttactgtggacactaatggtgtgtattcagagcctcgccccattggcaccagatacctgactcgtaatctgtaa

SEQ ID NO: 1277 - DNA, 2208 bp, Artificial Sequence
  Synthetic Polynucleotide
atggctgccgatggttatcttccagattggctcgaggacactctctctgaaggaataagacagtggtggaagctcaaacctggcccaccaccgccaaagcccgcagagcggcataaggacgacagcaggggtcttgtgcttcctgggtacaagtacctcggacccttcaacggactcgacaagggggagccggtcaacgaggcagacgccgcggccctcgagcacgacaaggcctacgaccggcagctcgacagcggagacaacccgtacctcaagtacaaccacgccgacgcggagtttcaggagcgtcttaaagaagatacgtcttttgggggcaacctcggacgagcagtcttccaggcgaaaaagagggttcttgaacctctgggcctggttgaggaacctgttaagacggctccgggaaaaaagaggccggtagagcactctcctgtggagccagactcctcctcgggaaccggaaaggcgggccagcagcctgcaagaaaaagattgaatttcggtcagactggagacgcagactccgtacctgacccccagcctctcggacagccaccagcagccccctctggtctgggaactaatacgatggctacaggcagtggcgcaccaatggcagacaataacgagggcgccgacggagtgggtaattcctcgggaaattggcattgcgattccacatggatgggcgacagagtcatcaccaccagcacccgcacctgggctctgcccacctacaacaaccatctgtacaagcaaatttccagccaatcaggagcatcgaacgacaaccactactttggctacagcaccccctgggggtattttgacttcaacagattccactgccacttttcgccacgtgactggcaaagactcatcaacaacaactggggattccggcccaagagactcagcttcaagctctttaacattcaagtcaaggaggtcacgcagaatgacggtacgacgacgattgccaataaccttaccagcacggttcaggtctttactgactcggagtaccagctcccgtacgtcctcggctcggcgcatcaaggatgcctcccgccgttcccagcagacgtcttcatggtgccacagtatggatacctcaccctgaacaacgggagtcaggcggtaggacgctcttcattttactgcctggagtacttcccttctcagatgcttcgcacgggaaacaactttaccttcagctacacctttgaggacgtgccttttcacagcagctacgctcacagccaaagtctggaccgtctcatgaatcctctcatcgaccaatacctgtattacttgagcaaaacaaacgctccaagcggaaccaccacgatgtccaggcttcagttttctcaggccggagcgagtgacattcgggaccagtctagaaactggcttcctggaccctgttaccgccagcagcgagtatcaaagacagctgcggacaacaacaacagtgattactcgtggactggagctaccaagtaccacctcaatggaagaggctctctggtgaacccgggcccagctatggccagccacaaggatgatgaagaaaaatattttcctcagagcggggttctcatcttcgggaaacaaggctcaaataaaactaatgtggacattgaaaaggttatgattacagacgaagaggaaatcaggaccaccaatcccgtggctacggagcagtatggttctgtatctaccaaccttcaaagcggcaacacacaagcagctacctcagatgtcaacacacaaggcgttcttcctggcatggtctggcaggacagagatgtgtacctgcaggggcccatctgggcaaagattcctcacacggacggacactttcacccttctcccctcatgggcggatttggattgaagcaccctcccccacagattctcatcaagaataccccggtacctgcgaatccttcgaccaccttcagtgcggcaaagtttgcttccttcatcacacagtattccacgggacaggtcagcgtggagatagagtgggagctgcagaaggagaacagcaaacgctggaaccccgagatccagtatacttccaactacaacaaatctgttaatgtggactttactgtggacactaatggtgtgtattcagagcctcgccccattggcaccagatacctgactcgtaatctgtaa

SEQ ID NO: 1278 - DNA, 2208 bp, Artificial Sequence
  Synthetic Polynucleotide
atggctgccgatggttatcttccagattggctcgaggacactctctctgaaggaataagacagtggtggaagctcaaacctggcccaccaccgccaaagcccgcagagcggcataaggacgacagcaggggtcttgtgcttcctgggtacaagtacctcggacccttcaacggactcgacaagggggagccggtcaacgaggcagacgccgcggccctcgagcacgacaaggcctacgaccggcagctcgacagcggagacaacccgtacctcaagtacaaccacgccgacgcggagtttcaggagcgtcttaaagaagatacgtcttttgggggcaacctcggacgagcagtcttccaggcgaaaaagagggttcttgaacctctgggcctggttgaggaacctgttaagacggctccgggaaaaaagaggccggtagagcactctcctgtggagccagactcctcctcgggaaccggaaaggcgggccagcagcctgcaagaaaaagattgaatttcggtcagactggagacgcagactccgtacctgacccccagcctctcggacagccaccagcagccccctctggtctgggaactaatacgatggctacaggcagtggcgcaccaatggcagacaataacgagggcgccgacggagtgggtaattcctcgggaaattggcattgcgattccacatggatgggcgacagagtcatcaccaccagcacccgcacctgggctctgcccacctacaacaaccatctgtacaagcaaatttccagccaatcaggagcatcgaacgacaaccactactttggctacagcaccccctgggggtattttgacttcaacagattccactgccacttttcgccacgtgactggcaaagactcatcaacaacaactggggattccggcccaagagactcagcttcaagctctttaacattcaagtcaaggaggtcacgcagaatgacggtacgacgacgattgccaataaccttaccagcacggttcaggtctttactgactcggagtaccagctcccgtacgtcctcggctcggcgcatcaaggatgcctcccgccgttcccagcagacgtcttcatggtgccacagtatggatacctcaccctgaacaacgggagtcaggcggtaggacgctcttcattttactgcctggagtacttcccttctcagatgcttcgcacgggaaacaactttaccttcagctacacctttgaggacgtgccttttcacagcagctacgctcacagccaaagtctggaccgtctcatgaatcctctcatcgaccaatacctgtattacttgagcaaaacaaacgctccaagcggaaccaccacgatgtccaggcttcagttttctcaggccggagcgagtgacattcgggaccagtctagaaactggcttcctggaccctgttaccgccagcagcgagtatcaaagacagctgcggacaacaacaacagtgattactcgtggactggagctaccaagtaccacctcaatggaagagactctctggtgaacccgggcccagctatggccagccacaaggatgatgaagaaaaatattttcctcagagcggggttctcatcttcgggaaacaaggctcaaataaaactaatgtggacattgaaaaggttatgattacagacgaagaggaaatcaggaccaccaatcccgtggctacggagcagtatggttctgtatctaccaaccttcaaagcggcaacacacaagcagctaccccagatgtcaacacacaaggcgttcttcctggcatggtctggcaggacagagatgtgtacctgcaggggcccatctgggcaaagattcctcacacggacggacactttcacccttctcccctcatgggcggatttggattgaagcaccctcccccacagattctcatcaagaataccccggtacctgcgaatccttcgaccaccttcagtgcggcaaagtttgcttccttcatcacacagtattccacgggacaggtcagcgtggagatagagtgggagctgcagaaggagaacagcaaacgctggaaccccgagatccagtatacttccaactacaacaaatctgttaatgtggactttactgtggacactaatggtgtgtattcagagcctcgccccattggcaccagatacctgactcgtaatctgtaa

SEQ ID NO: 1279 - DNA, 2208 bp, Artificial Sequence
  Synthetic Polynucleotide
atggctgccgatggttatcttccagattggctcgaggacactctctctgaaggaataagacagtggtggaagctcaaacctggcccaccaccgccaaagcccgcagagcggcataaggacgacagcaggggtcttgtgcttcctgggtacaagtacctcggacccttcaacggactcgacaagggggagccggtcaacgaggcagacgccgcggccctcgagcacgacaaggcctacgaccggcagctcgacagcggagacaacccgtacctcaagtacaaccacgccgacgcggagtttcaggagcgtcttaaagaagatacgtcttttgggggcaacctcggacgagcagtcttccaggcgaaaaagagggttcttgaacctctgggcctggttgaggaacctgttaagacggctccgggaaaaaagaggccggtagagcactctcctgtggagccagactcctcctcgggaaccggaaaggcgggccagcagcctgcaagaaaaagattgaatttcggtcagactggagacgcagactccgtacctgacccccagcctctcggacagccaccagcagccccctctggtctgggaactaatacgatggctacaggcagtggcgcaccaatggcagacaataacgagggcgccgacggagtgggtaattcctcgggaaattggcattgcgattccacatggatgggcgacagagtcatcaccaccagcacccgcacctgggctctgcccacctacaacaaccatctgtacaagcaaatttccagccaatcaggagcatcgaacgacaaccactactttggctacagcaccccctgggggtattttgacttcaacagattccactgccacttttcgccacgtgactggcaaagactcatcaacaacaactggggattccggcccaagagactcagcttcaagctctttaacattcaagtcaaggaggtcacgcagaatgacggtacgacgacgattgccaataaccttaccagcacggttcaggtctttactgactcggagtaccagctcccgtacgtcctcggctcggcgcatcaaggatgcctcccgccgttcccagcagacgtcttcatggtgccacagtatggatacctcaccctgaacaacgggagtcaggcggtaggacgctcttcattttactgcctggagtacttcccttctcagatgcttcgcacgggaaacaactttaccttcagctacacctttgaggacgtgccttttcacagcagctacgctcacagccaaagtctggaccgtctcatgaatcctctcatcgaccaatacctgtattacttgagcaaaacaaacgctccaagcggaaccaccacgatgtccaggcttcagttttctcaggccggagcgagtgacattcgggaccagtctagaaactggcttcctggaccctgttaccgccagcagcgagtatcaaagacagctgcggacaacaacaacagtgattactcgtggactggagctaccaagtaccacctcaatggaagagactctctggtgaacccgggcccagctatggccagccacaaggatgatgaagaaaaatattttcctcagagcggggttctcatcttcgggaaacaaggctcaaataaaactaatgtggacattgaaaaggttatgattacagacgaagaggaaatcaggaccaccaatcccgtggctacggagcagtatggttctgtatctaccaaccttcaaagcggcaacacacaagcagctacctcagatgtcaacacacaaggcgttcttcctggcatggtctggcaggacagagatgtgtacctgcaggggcccatctgggcaaagattcctcacacggacggacactttcacccttctcccctcatgggcggatttggattgaagcaccctcccccacagattctcatcaagaataccccggtacctgcgaatccttcgaccaccttcagtgtggcaaagtttgcttccttcatcacacagtattccacgggacaggtcagcgtggagatagagtgggagctgcagaaggagaacagcaaacgctggaaccccgagatccagtatacttccaactacaacaaatctgttaatgtggactttactgtggacactaatggtgtgtattcagagcctcgccccattggcaccagatacctgactcgtaatctgtaa

SEQ ID NO: 1280 - DNA, 2208 bp, Artificial Sequence
  Synthetic Polynucleotide
atggctgccgatggttatcttccagattggctcgaggacactctctctgaaggaataagacagtggtggaagctcaaacctggcccaccaccgccaaagcccgcagagcggcataaggacgacagcaggggtcttgtgcttcctgggtacaagtacctcggacccttcaacggactcgacaagggggagccggtcaacgaggcagacgccgcggccctcgagcacgacaaggcctacgaccggcagctcgacagcggagacaacccgtacctcaagtacaaccacgccgacgcggagtttcaggagcgtcttaaagaagatacgtcttttgggggcaacctcggacgagcagtcttccaggcgaaaaagagggttcttgaacctctgggcctggttgaggaacctgttaagacggctccgggaaaaaagaggccggtagagcactctcctgtggagccagactcctcctcgggaaccggaaaggcgggccagcagcctgcaagaaaaagattgaatttcggtcagactggagacgcagactccgtacctgacccccagcctctcggacagccaccagcagccccctctggtctgggaactaatacgatggctacaggcagtggcgcaccaatggcagacaataacgagggcgccgacggagtgggtaattcctcgggaaattggcattgcgattccacatggatgggcgacagagtcatcaccaccagcacccgcacctgggctctgcccacctacaacaaccatctgtacaagcaaatttccagccaatcaggagcatcgaacgacaaccactactttggctacagcaccccctgggggtattttgacttcaacagattccactgccacttttcgccacgtgactggcaaagactcatcaacaacaactggggattccggcccaagagactcagcttcaagctctttaacattcaagtcaaggaggtcacgcagaatgacggtacgacgacgattgccaataaccttaccagcacggttcaggtctttactgactcggagtaccagctcccgtacgtcctcggctcggcgcatcaaggatgcctcccgccgttcccagcagacgtcttcatggtgccacagtatggatacctcaccctgaacaacgggagtcaggcggtaggacgctcttcattttactgcctggagtacttcccttctcagatgcttcgcacgggaaacaactttaccttcagctacacctttgaggacgtgccttttcgcagcagctacgctcacagccaaagtctggaccgtctcatgaatcctctcatcgaccaatacctgtattacttgagcaaaacaaacgctccaagcggaaccaccacgatgtccaggcttcagttttctcaggccggagcgagtgacattcgggaccagtctagaaactggcttcctggaccctgttaccgccagcagcgagtatcaaagacagctgcggacaacaacaacagtgattactcgtggactggagctaccaagtaccacctcaatggaagagactctctggtgaacccgggcccagctatggccagccacaaggatgatgaagaaaaatattttcctcagagcggggttctcatcttcgggaaacaaggctcaaataaaactaatgtggacattgaaaaggttatgattacagacgaagaggaaatcaggaccaccaatcccgtggctacggagcagtatggttctgtatctaccaaccttcaaagcggcaacacacaagcagctacctcagatgtcaacacacaaggcgttcttcctggcatggtctggcaggacagagatgtgtacctgcaggggcccatctgggcaaagattcctcacacggacggacactttcacccttctcccctcatgggcggatttggattgaagcaccctcccccacagattctcatcaagaataccccggtacctgcgaatccttcgaccaccttcagtgcggcaaagtttgcttccttcatcacacagtattccacgggacaggtcagcgtggagatagagtgggagctgcagaaggagaacagcaaacgctggaaccccgagatccagtatacttccaactacaacaaatctgttaatgtggactttactgtggacactaatggtgtgtattcagagcctcgccccattggcaccagatacctgactcgtaatctgtaa

SEQ ID NO: 1281 - DNA, 2208 bp, Artificial Sequence
  Synthetic Polynucleotide
atggctgccgatggttatcttccagattggctcgaggacactctctctgaaggaataagacagtggtggaagctcaaacctggcccaccaccgccaaagcccgcagagcggcataaggacgacagcaggggtcttgtgcttcctgggtacaagtacctcggacccttcaacggactcgacaagggggagccggtcaacgaggcagacgccgcggccctcgagcacgacaaggcctacgaccggcagctcgacagcggagacaacccgtacctcaagtacaaccacgccgacgcggagtttcaggagcgtcttaaagaagatacgtcttttgggggcaacctcggacgagcagtcttccaggcgaaaaagagggttcttgaacctctgggcctggttgaggaacctgttaagacggctccgggaaaaaagaggccggtagagcactctcctgtggagccagactcctcctcgggaaccggaaaggcggaccagcagcctgcaagaaaaagattgaatttcggtcagactggagacgcagactccgtacctgacccccagcctctcggacagccaccagcagccccctctggtctgggaactaatacgatggctacaggcagtggcgcaccaatggcagacaataacgagggcgccgacggagtgggtaattcctcgggaaattggcattgcgattccacatggatgggcgacagagtcatcaccaccagcacccgcacctgggctctgcccacctacaacaaccatctgtacaagcaaatttccagccaatcaggagcatcgaacgacaaccactactttggctacagcaccccctgggggtattttgacttcaacagattccactgccacttttcgccacgtgactggcaaagactcatcaacaacaactggggattccggcccaagagactcagcttcaagctctttaacattcaagtcaaggaggtcacgcagaatgacggtacgacgacgattgccaataaccttaccagcacggttcaggtctttactgactcggagtaccagctcccgtacgtcctcggctcggcgcatcaaggatgcctcccgccgttcccagcagacgtcttcatggtgccacagtatggatacctcaccctgaacaacgggagtcaggcggtaggacgctcttcattttactgcctggagtacttcccttctcagatgcttcgcacgggaaacaactttaccttcagctacacctttgaggacgtgccttttcacagcagctacgctcacagccaaagtctggaccgtctcatgaatcctctcatcgaccaatacctgtattacttgagcaaaacaaacgctccaagcggaaccaccacgatgtccaggcttcagttttctcaggccggagcgagtgacattcgggaccagtctagaaactggcttcctggaccctgttaccgccagcagcgagtatcaaagacagctgcggacaacaacaacagtgattactcgtggactggagctaccaagtaccacctcaatggaagagactctctggtgaacccgggcccagctatggccagccacaaggatgatgaagaaaaatattttcctcagagcggggttctcatcttcgggaaacaaggctcaaataaaactaatgtggacattgaaaaggttatgattacagacgaagaggaaatcaggaccaccaatcccgtggctacggagcagtatggttctgtatctaccaaccttcaaagcggcaacacacaagcagctacctcagatgtcaacacacaaggcgttcttcctggcatggtctggcaggacagagatgtgtacctgcaggggcccatctgggcaaagattcctcacacggacggacactttcacccttctcccctcatgggcggatttggattgaagcaccctcccccacagattctcatcaagaataccccggtacctgcgaatccttcgaccaccttcagtgcggcaaagtttgcttccttcatcacacagtattccacgggacaggtcagcgtggagatagagtgggagctgcagaaggagaacagcaaacgctggaaccccgagatccagtatacttccaactacaacaaatctgttaatgtggactttactgtggacactaatggtgtgtattcagagcctcgccccattggcaccagatacctgactcgtaatctgtaa

SEQ ID NO: 1282 - DNA, 2208 bp, Artificial Sequence
  Synthetic Polynucleotide
atggctgccgatggttatcttccagattggctcgaggacactctctctgaaggaataagacagtggtggaagctcaaacctggcccaccaccgccaaagcccgcagagcggcataaggacgacagcaggggtcttgtgcttcctgggtacaagtacctcggacccttcaacggactcgacaagggggagccggtcaacgaggcagacgccgcggccctcgagcacgacaaggcctacgaccggcagctcgacagcggagacaacccgtacctcaagtacaaccacgccgacgcggagtttcaggagcgtcttaaagaagatacgtcttttgggggcaacctcggacgagcagtcttccaggcgaaaaagagggttcttgaacctctgggcctggttgaggaacctgttaagacggctccgggaaaaaagaggccggtagagcactctcctgtggagccagactcctcctcgggaaccggaaaggcgggccagcagcctgcaagaaaaagattgaatttcggtcagactggagacgcagactccgtacctgacccccagcctctcggacagccaccagcagccccctctggtctgggaactaatacgatggctacaggcagtggcgcaccaatggcagacaataacgagggcgccgacggagtgggtaattcctcgggaaattggcattgcgattccacatggatgggcgacagagtcatcaccaccagcacccgcacctgggctctgcccacctacaacaaccatctgtacaagcaaatttccagccaatcaggagcatcgaacgacaaccactactttggctacagcaccccctgggggtattttgacttcaacagattccactgccacttttcgccacgtgactggcaaagactcatcaacaacaactggggattccggcccaagagactcagcttcaagctctttaacattcaagtcaaggaggtcacgcagaatgacggtacgacgacgattgccaataaccttaccaacacggttcaggtctttactgactcggagtaccagctcccgtacgtcctcggctcggcgcatcaaggatgcctcccgccgttcccagcagacgtcttcatggtgccacagtatggatacctcaccctgaacaacgggagtcaggcggtaggacgctcttcattttactgcctggagtacttcccttctcagatgcttcgcacgggaaacaactttaccttcagctacacctttgaggacgtgccttttcacagcagctacgctcacagccaaagtctggaccgtctcatgaatcctctcatcgaccaatacctgtattacttgagcaaaacaaacgctccaagcggaaccaccacgatgtccaggcttcagttttctcaggccggagcgagtgacattcgggaccagtctagaaactggcttcctggaccctgttaccgccagcagcgagtatcaaagacagctgcggacaacaacaacagtgattactcgtggactggagctaccaagtaccacctcaatggaagagactctctggtgaacccgggcccagctatggccagccacaaggatgatgaagaaaaatattttcctcagagcggggttctcatcttcgggaaacaaggctcaaataaaactaatgtggacattgaaaaggttatgattacagacgaagaggaaatcaggaccaccaatcccgtggctacggagcagtatggttctgtatctaccaaccttcaaagcggcaacacacaagcagctacctcagatgtcaacacacaaggcgttcttcctggcatggtctggcaggacagagatgtgtacctgcaggggcccatctgggcaaagattcctcacacggacggacactttcacccttctcccctcatgggcggatttggattgaagcaccctcccccacagattctcatcaagaataccccggtacctgcgaatccttcgaccaccttcagtgcggcaaagtttgcttccttcatcacacagtattccacgggacaggtcagcgtggagatagagtgggagctgcagaaggagaacagcaaacgctggaaccccgagatccagtatacttccaactacaacaaatctgttaatgtggactttactgtggacactaatggtgtgtattcagagcctcgccccattggcaccagatacctgactcgtaatctgtaa

SEQ ID NO: 1283 - DNA, 2208 bp, Artificial Sequence
  Synthetic Polynucleotide
atggctgccgatggttatcttccagattggctcgaggacactctctctgaaggaataagacagtggtggaagctcaaacctggcccaccaccgccaaagcccgcagagcggcataaggacgacagcaggggtcttgtgcttcctgggtacaagtacctcggacccttcaacggactcgacaagggggagccggtcaacgaggcagacgccgcggccctcgagcacgacaaggcctacgaccggcagctcgacagcggagacaacccgtacctcaagtacaaccacgccgacgcggagtttcaggagcgtcttaaagaagatacgtcttttgggggcaacctcggacgagcagtcttccaggcgaaaaagagggttcttgaacctctgggcctggttgaggaacctgttaagacggctccgggaaaaaagaggccggtagagcactctcctgtggagccagactcctcctcgggaaccggaaaggcgggccagcagcctgcaagaaaaagattgaatttcggtcagactggagacgcagactccgtacctgacccccagcctctcggacagccaccagcagccccctctggtctgggaactaatacgatggctacaggcagtggcgcaccaatggcagacaataacgagggcgccgacggagtgggtaattcctcgggaaattggcattgcgattccacatggatgggcgacagagtcatcaccaccagcacccgcacctgggctctgcccacctacaacaaccatctgtacaagcaaatttccagccaatcaggagcatcgaacgacaaccactactttggctacaacaccccctgggggtattttgacttcaacagattccactgccacttttcgccacgtgactggcaaagactcatcaacaacaactggggattccggcccaagagactcagcttcaagctctttaacattcaagtcaaggaggtcacgcagaatgacggtacgacgacgattgccaataaccttaccagcacggttcaggtctttactgactcggagtaccagctcccgtacgtcctcggctcggcgcatcaaggatgcctcccgccgttcccagcagacgtcttcatggtgccacagtatggatacctcaccctgaacaacgggagtcaggcggtaggacgctcttcattttactgcctggagtacttcccttctcagatgcttcgcacgggaaacaactttaccttcagctacacctttgaggacgtgccttttcacagcagctacgctcacagccaaagtctggaccgtctcatgaatcctctcatcgaccaatacctgtattacttgagcaaaacaaacgctccaagcggaaccaccacgatgtccaggcttcagttttctcaggccggagcgagtgacattcgggaccagtctagaaactggcttcctggaccctgttaccgccagcagcgagtatcaaagacagctgcggacaacaacaacagtgattactcgtggactggagctaccaagtaccacctcaatggaagagactctctggtgaacccgggcccagctatggccagccacaaggatgatgaagaaaaatattttcctcagagcggggttctcatcttcgggaaacaaggctcaaataaaactaatgtggacattgaaaaggttatgattacagacgaagaggaaatcaggaccaccaatcccgtggctacggagcagtatggttctgtatctaccaaccttcaaagcggcaacacacaagcagctacctcagatgtcaacacacaaggcgttcttcctggcatggtctggcaggacagagatgtgtacctgcaggggcccatctgggcaaagattcctcacacggacggacactttcacccttctcccctcatgggcggatttggattgaagcaccctcccccacagattctcatcaagaataccccggtacctgcgaatccttcgaccaccttcagtgcggcaaagtttgcttccttcatcacacagtattccacgggacaggtcagcgtggagatagagtgggagctgcagaaggagaacagcaaacgctggaaccccgagatccagtatacttccaactacaacaaatctgttaatgtggactttactgtggacactaatggtgtgtattcagagcctcgccccattggcaccagatacctgactcgtaatctgtaa

SEQ ID NO: 1284 - DNA, 2208 bp, Artificial Sequence
  Synthetic Polynucleotide
atggctgccgatggttatcttccagattggctcgaggacactctctctgaaggaataagacagtggtggaagctcaaacctggcccaccaccgccaaagcccgcagagcggcataaggacgacagcaggggtcttgtgcttcctgggtacaagtacctcggacccttcaacggactcgacaagggggagccggtcaacgaggcagacgccgcggccctcgagcacgacaaggcctacgaccggcagctcgacagcggagacaacccgtacctcaagtacaaccacgccgacgcggagtttcaggagcgtcttaaagaagatacgtcttttgggggcaacctcggacgagcagtcttccaggcgaaaaagagggttcttgaacctctgggcctggttgaggaacctgttaagacggctccgggaaaaaagaggccggtagagcactctcctgtggagccagactcctcctcgggaaccggaaaggcgggccagcagcctgcaagaaaaagattgaatttcggtcagactggaggcgcagactccgtacctgacccccagcctctcggacagccaccagcagccccctctggtctgggaactaatacgatggctacaggcagtggcgcaccaatggcagacaataacgagggcgccgacggagtgggtaattcctcgggaaattggcattgcgattccacatggatgggcgacagagtcatcaccaccagcacccgcacctgggctctgcccacctacaacaaccatctgtacaagcaaatttccagccaatcaggagcatcgaacgacaaccactactttggctacagcaccccctgggggtattttgacttcaacagattccactgccacttttcgccacgtgactggcaaagactcatcaacaacaactggggattccggcccaagagactcagcttcaagctctttaacattcaagtcaaggaggtcacgcagaatgacggtacgacgacgattgccaataaccttaccagcacggttcaggtctttactgactcggagtaccagctcccgtacgtcctcggctcggcgcatcaaggatgcctcccgccgttcccagcagacgtcttcatggtgccacagtatggatacctcaccctgaacaacgggagtcaggcggtaggacgctcttcattttactgcctggagtacttcccttctcagatgcttcgcacgggaaacaactttaccttcagctacacctttgaggacgtgccttttcacagcagctacgctcacagccaaagtctggaccgtctcatgaatcctctcatcgaccaatacctgtattacttgagcaaaacaaacgctccaagcggaaccaccacgatgtccaggcttcagttttctcaggccggagcgagtgacattcgggaccagtctagaaactggcttcctggaccctgttaccgccagcagcgagtatcaaagacagctgcggacaacaacaacagtgattactcgtggactggagctaccaagtaccacctcaatggaagagactctctggtgaacccgggcccagctatggccagccacaaggatgatgaagaaaaatattttcctcagagcggggttctcatcttcgggaaacaaggctcaaataaaactaatgtggacattgaaaaggttatgattacagacgaagaggaaatcaggaccaccaatcccgtggctacggagcagtatggttctgtatctaccaaccttcaaagcggcaacacacaagcagctacctcagatgtcaacacacaaggcgttcttcctggcatggtctggcaggacagagatgtgtacctgcaggggcccatctgggcaaagattcctcacacggacggacactttcacccttctcccctcatgggcggatttggattgaagcaccctcccccacagattctcatcaagaataccccggtacctgcgaatccttcgaccaccttcagtgcggcaaagtttgcttccttcatcacacagtattccacgggacaggtcagcgtggagatagagtgggagctgcagaaggagaacagcaaacgctggaaccccgagatccagtatacttccaactacaacaaatctgttaatgtggactttactgtggacactaatggtgtgtattcagagcctcgccccattggcaccagatacctgactcgtaatctgtaa

SEQ ID NO: 1285 - DNA, 2208 bp, Artificial Sequence
  Synthetic Polynucleotide
atggctgccgatggttatcttccagattggctcgaggacactctctctgaaggaataagacagtggtggaagctcaaacccggcccaccaccaccaaggcccgcagagcggcatcaggacgacagcaggggtcttgtgcttcctgggtacaagtacctcggacccttcaacggactcgacaaaggagagccggtcaacgaggcagacgctgcggccctcgagcacgacaaggcctacgaccggcagctcgacagcggagacaacccgtacctcaagtacaaccacgccgacgcggagtttcaggagcgtcttaaagaagatacgtcttttgggggcaacctcggacgagcagtcttccaggcgaaaaagagggttcttgaacctctgggcctggttgaggaacctgttaagacggctccgggaaaaaagaggccggtagagcactctcctgcggagccagactcctcctcgggaaccggaaaagcgggccagcagcctgcaagaaagagattgaatttcggtcagactggagacgcagactccgtacctgacccccagcctctcggacagccaccagcagcccccacaagtttgggatctactacaatggctacaggcagtggcgcaccaatggcagacaataacgagggtgccgatggagtgggtaattcctcaggaaattggcattgcgattcccaatggctgggcgacagagtcatcaccaccagcacccgaacctgggccctgcccacctacaacaaccacctctacaagcaaatctccagccaatcaggagcatcgaacgacaaccactactttggctacagcaccccttgggggtattttgacttcaacagattccactgtcacttctccccacgtgactggcaaagactcatcaacaacaactggggattccgacccaagagactcaacttcaagctctttaacattcaagtcaaagaggtcacgcagaatgacggtacgacgacgattgccaataaccttaccagcacggttcaggtgtttactgactcggagtaccagctcccgtacgtcctcggctcggcgcatcaaggatgcctcccgccgtttccagcggacgtcttcatggtcccacagtatggatacctcaccctgaacaacgggagtcaggcggtaggacgctcttccctttactgcctggagtactttccttctcagatgctgcgtaccggaaacaactttaccttcagctacacctttgaggacgtgcccttccacagcagctacgctcacagccagagtttggaccggctgatgaatcctctgatcgaccagtatctgtattatctgaacaggacacaatcaaatagtggaactcttcagcagtctaggctactgtttagccaagctggacccaccagcatgtcccttcaagctaaaaactggctgcctggaccttgctacagacagcagcgtctgtcaaagcaggcaaacgacaacaacaacagcaactttccctggactgcggctacaaagtatcatctaaatggtcgggactcgttggttaatccaggaccagctatggccagccacaaagacgatgaagaaaagtttttccccatgcatggaaccctgatatttggtaaacaaggaacaaatgctaacgacgcggatttggaacatgtcatgattacagatgaagaagaaatcaggaccaccaatcccgtggctacagagcagtacggaaacgtgtcaaataatttgcaaaactcaaatactggtccaactacagaaaatgtcaatcaccagggagcgttacctggtatggtgtggcaggatcgagacgtgtacctgcagggacccatttgggccaagattcctcacaccgacggacactttcacccttctccactgatgggaggttttggactcaaacacccgcctcctcaaatcatgatcaaaaacactcctgttccagccaatcctcctacaaacttcagcgcggcaaagtttgcttccttcatcacacagtattccacgggacaggtcagcgtggagatcgagtgggagctgcagaaggagaacagcaaacgctggaaccccgagatccagtacacttccaactacaacaaatctgttaatgtggactttactgtggacgctaatggtgtgtattcagagcctcgccccattggcaccagatacctgactcgtaatctgtaa

SEQ ID NO: 1286 - DNA, 2208 bp, Artificial Sequence
  Synthetic Polynucleotide
atggctgccgatggttatcttccagattggctcgaggacactctctctgaaggaataagacagtggtggaagctcaaacctggcccaccaccaccaaggcccgcagagcggcatcaggacgacagcaggggtcttgtgcttcctgggtacaagtacctcggacccttcaacggactcgacaaaggagagccggtcaacgaggcagacgctgcggccctcgagcacgacaaggcctacgaccggcagctcgacagcggagacaacccgtacctcaagtacaaccacgccgacgcggagtttcaggagcgtcttaaagaagatacgtcttttgggggcaacctcggacgagcagtcttccaggcgaaaaagagggttcttgaacctctgggcctggttgaggaacctgttaagacggctccgggaaaaaagaggccggtagagcactctcctgcggagccagactcctcctcgggaaccggaaaagcgggccagcagcctgcaagaaagagattgaatttcggtcagactggagacgcagactccgtacctgacccccagcctctcggacagccaccagcagcccccacaagtttgggatctactacaatggctacaggcagtggcgcaccaatggcagacaataacgagggtgccgatggagtgggtaattcctcaggaaattggcattgcgatccccaatggctgggcgacagagtcatcaccaccagcacccgaacctgggccctgcccacctacaacaaccacctctacaagcaaatctccagccaatcaggagcatcgaacgacaaccactactttggctacagcaccccttgggggtattttgacttcaacagattccactgtcacttctccccacgtgactggcaaagactcatcaacaacaactggggattccgacccaagagactcaacttcaagctctttaacattcaagtcaaagaggtcacgcagaatgacggtacgacgacgattgccaataaccttaccagcacggttcaggtgtttactgactcggagtaccagctcccgtacgtcctcggctcggcgcatcaaggatgcctcccgccgtttccagcggacgtcttcatggtcccacagtatggatacctcaccctgaacaacgggagtcaggcggtaggacgctcttccttttactgcctggagtactttccttctcagatgctgcgtaccggaaacaactttaccttcagctacacctttgaggacgtgcccttccacagcagctacgctcacagccagagtttggaccggctgatgaatcctctgatcgaccagtatctgtattatctgaacaggacacaatcaaatagtggaactcttcagcagtctaggctactgtttagccaagctggacccaccagcatgtcccttcaagctaaaaactggctgcctggaccttgctacagacagcagcgtctgtcaaagcaggcaaacgacaacaacaacagcaactttccctggactgcggctacaaagtatcatctaaatggtcgggactcgttggttaatccaggaccagctatggccagccacaaagacgatgaagaaaagtttttccccatgcatggaaccctgatatttggtaaacaaggaacaaatgctaacgacgcggatttggaacatgtcatgattacagatgaagaagaaatcaggaccaccaatcccgtggctacagagcagtacggaaacgtgtcaaataatttgcaaaactcaaatactggtccaactacagaaaatgtcaatcaccagggagcgttacctggtatggtgtggcaggatcgagacgtgtacctgcagggacccatttgggccaagattcctcacaccgacggacactttcacccttctccactgatgggaggttttggactcaaacacccgcctcctcaaatcatgatcaaaaacactcctgttccagccaatcctcctacaaacttcagcgcggcaaagtttgcttccttcatcacacagtattccacgggacaggtcagcgtggagatcgagtgggagctgcagaaggagaacagcaaacgctggaaccccgagatccagtacacttccaactacaacaaatctgttaatgtggactttactgtggacgctaatggtgtgtattcagagcctcgccccattggcaccagatacctgactcgtaatctgtaa

SEQ ID NO: 1287 - DNA, 2208 bp, Artificial Sequence
  Synthetic Polynucleotide
atggctgccgatggttatcttccagattggctcgaggacactctctctgaaggaataagacagtggtggaagctcaaacctggcccaccaccaccaaggcccgcagagcggcatcaggacgacagcaggggtcttgtgcttcctgggtacaagtacctcggacccttcaacggactcgacaaaggagagccggtcaacgaggcagacgctgcggccctcgagcacgacaaggcctacgaccggcagctcgacagcggagacaacccgtacctcaagtacaaccacgccgacgcggagtttcaggagcgtcttaaagaagatacgtcttttgggggcaacctcggacgagcagtctcccaggcgaaaaagagggttcttgaacctctgggcctggttgaggaacctgttaagacggctccgggaaaaaagaggccggtagagcactctcctgcggagccagactcctcctcgggaaccggaaaagcgggccagcagcctgcaagaaagagattgaatttcggtcagactggagacgcagactccgtacctgacccccagcctctcggacagccaccagcagcccccacaagtttgggatctactacaatggctacaggcagtggcgcaccaatggcagacaataacgagggtgccgatggagtgggtaattcctcaggaaattggcattgcgattcccaatggctgggcgacagagtcatcaccaccagcacccgaacctgggccctgcccacctacaacaaccacctctacaagcaaatctccagccaatcaggagcatcgaacgacaaccactactttggctacagcaccccttgggggtattttgacttcaacagattccactgtcacttctccccacgtgactggcaaagactcatcaacaacaactggggattccgacccaagagactcaacttcaagctctttaacattcaagtcaaagaggtcacgcagaatgacggtacgacgacgattgccaataaccttaccagcacggttcaggtgtttactgactcggagtaccagctcccgtacgtcctcggctcggcgcatcaaggatgcctcccgccgtttccagcggacgtcttcatggtcccacagtatggatacctcaccctgaacaacgggagtcaggcggtaggacgctcttccttttactgcctggagtactttccttctcagatgctgcgtaccggaaacaactttaccttcagctacacctttgaggacgtgcccttccacagcagctacgctcacagccagagtttggaccggctgatgaatcctctgatcgaccagtatctgtattatctgaacaggacacaatcaaatagtggaactcttcagcagtctaggctactgtttagccaagctggacccaccagcatgtcccttcaagctaaaaactggctgcctggaccttgctacagacagcagcgtctgtcaaagcaggcaaacgacaacaacaacagcaactttccctggactgcggctacaaagtatcatctaaatggtcgggactcgttggttaatccaggaccagctatggccagccacaaagacgatgaagaaaagtttttccccatgcatggaaccctgatatttggtaaacaaggaacaaatgctaacgacgcggatttggaacatgtcatgattacagatgaagaagaaatcaggaccaccaatcccgtggctacagagcagtacggaaacgtgtcaaataatttgcaaaactcaaatactggtccaactacagaaaatgtcaatcaccagggagcgttacctggtatggtgtggcaggatcgagacgtgtacctgcagggacccatttgggccaagattcctcacaccgacggacactttcacccttctccactgatgggaggttttggactcaaacacccgcctcctcaaatcatgatcaaaaacactcctgttccagccaatcctcctacaaacttcagcgcggcaaagtttgcttccttcatcacacagtattccacgggacaggtcagcgtggagatcgagtgggagctgcagaaggagaacagcaaacgctggaaccccgagatccagtacacttccaactacaacaaatctgttaatgtggactttactgtggacgctaatggtgtgtattcagagcctcgccccattggcaccagatacctgactcgtaatctgtaa

SEQ ID NO: 1288 - DNA, 2208 bp, Artificial Sequence
  Synthetic Polynucleotide
atggctgccgatggttatcttccagattggctcgaggacactctctctgaaggaataagacagtggtggaagctcaaacctggcccaccaccaccaaggcccgcagagcggcatcaggacgacagcaggggtcttgtgcttcctgggtacaagtacctcggacccttcaacggactcgacaaaggagagccggtcaacgaggcagacgctgcggccctcgagcacgacaaggcctacgaccggcagctcgacagcggagacaacccgtacctcaagtacaaccacgccgacgcggagtttcaggagcgtcttaaagaagatacgtcttttgggggcaacctcggacgagcagtcttccaggcgaaaaagagggttcttgaacctctgggcctggttgaggaacctgttaagacggctccgggaaaaaagaggccggtagagcactctcctgcggagccagactcctcctcgggaaccggaaaagcgggccagcagcctgcaagaaagagattgaatttcggtcagactggagacgcagactccgtacctgacccccagcctctcggacagccaccagcagcccccacaagtttgggatctactacaatggctacaggcagtggcgcaccaatggcagacaataacgagggtgccgatggagtgggtaattcctcaggaaattggcattgcgattcccaatggctgggcgacagagtcatcaccaccagcacccgaacctgggccctgcccacctacaacaaccacctctacaagcaaatctccagccaatcaggagcatcgaacgacaaccactactttggctacagcaccccttgggggtattttgacttcaacagattccactgtcacttctccccacgtgactggcaaagactcatcaacaacaactggggattccgacccaagagactcaacttcaagctctttaacattcaagtcaaagaggtcacgcagaatgacggtacgacgacgattgccaataaccttaccagcacggttcaggtgtttactgactcggagtaccagctcccgtacgtcctcggctcggcgcatcaaggatgcctcccgccgtttccagcggacgtcttcatggtcccacagtatggatacctcaccctgaacaacgggagtcaggcggtaggacgctcttccttttactgcctggagtactttccttctcagatgctgcgtaccggaaacaactttaccttcagctacacctttgaggacgtgcccttccacagcagctacgctcacagccagagtttggaccggctgatgagtcctctgatcgaccagtatctgtattatctgaacaggacacaatcaaatagtggaactcttcagcagtctaggctactgtttagccaagctggacccaccagcatgtcccttcaagctaaaaactggctgcctggaccttgctacagacagcagcgtctgtcaaagcaggcaaacgacaacaacaacagcaactttccctggactgcggctacaaagtatcatctaaatggtcgggactcgttggttaatccaggaccagctatggccagccacaaagacgatgaagaaaagtttttccccatgcatggaaccctgatatttggtaaacaaggaacaaatgctaacgacgcggatttggaacatgtcatgattacagatgaagaagaaatcaggaccaccaatcccgtggctacagagcagtacggaaacgtgtcaaataatttgcaaaactcaaatactggtccaactacagaaaatgtcaatcaccagggagcgttacctggtatggtgtggcaggatcgagacgtgtacctgcagggacccatttgggccaagattcctcacaccgacggacactttcacccttctccactgatgggaggttttggactcaaacacccgcctcctcaaatcatgatcaaaaacactcctgttccagccaatcctcctacaaacttcagcgcggcaaagtttgcttccttcatcacacagtattccacgggacaggtcagcgtggagatcgagtgggagctgcagaaggagaacagcaaacgctggaaccccgagatccagtacacttccaactacaacaaatctgttaatgtggactttactgtggacgctaatggtgtgtattcagagcctcgccccattggcaccagatacctgactcgtaatctgtaa

SEQ ID NO: 1289 - DNA, 2208 bp, Artificial Sequence
  Synthetic Polynucleotide
atggctgccgatggttatcttccagattggctcgaggacactctctctgaaggaataagacagtggtggaagctcaaacctggcccaccaccaccaaggcccgcagagcggcatcaggacgacagcaggggtcttgtgcttcctgggtacaagtacctcggacccttcaacggactcgacaaaggagagccggtcaacgaggcagacgctgcggccctcgagcacgacaaggcctacgaccggcagctcgacagcggagacaacccgtacctcaagtacaaccacgccgacgcggagtttcaggagcgtcttaaagaagatacgtcttttgggggcaacctcggacgagcagtcttccaggcgaaaaagagggttcttgaacctctgggcctggttgaggaacctgttaagacggctccgggaaaaaagaggccggtagagcactctcctgcggagccagactcctcctcgggaaccggaaaagcgggccagcagcctgcaagaaagagattgaatttcggtcagactggagacgcagactccgtacctgacccccagcctctcggacagccaccagcagcccccacaagtttgggatctactacaatggctacaggcagtggcgcaccaatggcaggcaataacgagggtgccgatggagtgggtaattcctcaggaaattggcattgcgattcccaatggctgggcgacagagtcatcaccaccagcacccgaacctgggccctgcccacctacaacaaccacctctacaagcaaatctccagccaatcaggagcatcgaacgacaaccactactttggctacagcaccccttgggggtattttgacttcaacagattccactgtcacttctccccacgtgactggcaaagactcatcaacaacaactggggattccgacccaagagactcaacttcaagctctttaacattcaagtcaaagaggtcacgcagaatgacggtacgacgacgattgccaataaccttaccagcacggttcaggtgtttactgactcggagtaccagctcccgtacgtcctcggctcggcgcatcaaggatgcctcccgccgtttccagcggacgtcttcatggtcccacagtatggatacctcaccctgaacaacgggagtcaggcggtaggacgctcttccttttactgcctggagtactttccttctcagatgctgcgtaccggaaacaactttaccttcagctacacctttgaggacgtgcccttccacagcagctacgctcacagccagagtttggaccggctgatgaatcctctgatcgaccagtatctgtattatctgaacaggacacaatcaaatagtggaactcttcagcagtctaggctactgtttagccaagctggacccaccagcatgtcccttcaagctaaaaactggctgcctggaccttgctacagacagcagcgtctgtcaaagcaggcaaacgacaacaacaacagcaactttccctggactgcggctacaaagtatcatctaaatggtcgggactcgttggttaatccaggaccagctatggccagccacaaagacgatgaagaaaagtttttccccatgcatggaaccctgatatttggtaaacaaggaacaaatgctaacgacgcggatttggaacatgtcatgattacagatgaagaagaaatcaggaccaccaatcccgtggctacagagcagtacggaaacgtgtcaaataatttgcaaaactcaaatactggtccaactacagaaaatgtcaatcaccagggagcgttacctggtatggtgtggcaggatcgagacgtgtacctgcagggacccatttgggccaagattcctcacaccgacggacactttcacccttctccactgatgggaggttttggactcaaacacccgcctcctcaaatcatgatcaaaaacactcctgttccagccaatcctcctacaaacttcagcgcggcaaagtttgcttccttcatcacacagtattccacgggacaggtcagcgtggagatcgagtgggagctgcagaaggagaacagcaaacgctggaaccccgagatccagtacacttccaactacaacaaatctgttaatgtggactttactgtggacgctaatggtgtgtattcagagcctcgccccattggcaccagatacctgactcgtaatctgtaa

SEQ ID NO: 1290 - DNA, 2208 bp, Artificial Sequence
  Synthetic Polynucleotide
atggctgccgatggttatcttccagattggctcgaggacactctctctgaaggaataagacagtggtggaagctcaaacctggcccaccaccaccaaggcccgcagagcggcatcaggacgacagcaggggtcttgtgcttcctgggtacaagtacctcggacccttcaacggactcgacaaaggagagccggtcaacgaggcagacgctgcggccctcgagcacgacaaggcctacgaccggcagctcgacagcggagacaacccgtacctcaagtacaaccacgccgacgcggagtttcaggagcgtcttaaagaagatacgtcttttgggggcaacctcggacgagcagtcttccaggcgaaaaagagggttcttgaacctctgggcctggttgaggaacctgttaagacggctccgggaaaaaagaggccggtagagcactctcctgcggagccagactcctcctcgggaaccggaaaagcgggccagcagcctgcaagaaagagattgaatttcggtcagactggagacgcagactccgtacctgacccccagcctctcggacagccaccagcagcccccacaagtttgggatctactacaatggctacaggcagtggcgcaccaatggcagacagtaacgagggtgccgatggagtgggtaattcctcaggaaattggcattgcgattcccaatggctgggcgacagagtcatcaccaccagcacccgaacctgggccctgcccacctacaacaaccacctctacaagcaaatctccagccaatcaggagcatcgaacgacaaccactactttggctacagcaccccttgggggtattttgacttcaacagattccactgtcacttctccccacgtgactggcaaagactcatcaacaacaactggggattccgacccaagagactcaacttcaagctctttaacattcaagtcaaagaggtcacgcagaatgacggtacgacgacgattgccaataaccttaccagcacggttcaggtgtttactgactcggagtaccagctcccgtacgtcctcggctcggcgcatcaaggatgcctcccgccgtttccagcggacgtcttcatggtcccacagtatggatacctcaccctgaacaacgggagtcaggcggtaggacgctcttccttttactgcctggagtactttccttctcagatgctgcgtaccggaaacaactttaccttcagctacacctttgaggacgtgcccttccacagcagctacgctcacagccagagtttggaccggctgatgaatcctctgatcgaccagtatctgtattatctgaacaggacacaatcaaatagtggaactcttcagcagtctaggctactgtttagccaagctggacccaccagcatgtcccttcaagctaaaaactggctgcctggaccttgctacagacagcagcgtctgtcaaagcaggcaaacgacaacaacaacagcaactttccctggactgcggctacaaagtatcatctaaatggtcgggactcgttggttaatccaggaccagctatggccagccacaaagacgatgaagaaaagtttttccccatgcatggaaccctgatatttggtaaacaaggaacaaatgctaacgacgcggatttggaacatgtcatgattacagatgaagaagaaatcaggaccaccaatcccgtggctacagagcagtacggaaacgtgtcaaataatttgcaaaactcaaatactggtccaactacagaaaatgtcaatcaccagggagcgttacctggtatggtgtggcaggatcgagacgtgtacctgcagggacccatttgggccaagattcctcacaccgacggacactttcacccttctccactgatgggaggttttggactcaaacacccgcctcctcaaatcatgatcaaaaacactcctgttccagccaatcctcctacaaacttcagcgcggcaaagtttgcttccttcatcacacagtattccacgggacaggtcagcgtggagatcgagtgggagctgcagaaggagaacagcaaacgctggaaccccgagatccagtacacttccaactacaacaaatctgttaatgtggactttactgtggacgctaatggtgtgtattcagagcctcgccccattggcaccagatacctgactcgtaatctgtaa

SEQ ID NO: 1291 - DNA, 2208 bp, Artificial Sequence
  Synthetic Polynucleotide
atggctgccgatggttatcttccagattggctcgaggacactctctctgaaggaataagacagtggtggaagctcaaacctggcccaccaccaccaaggcccgcagagcggcatcaggacgacagcaggggtcttgtgcttcctgggtacaagtacctcggacccttcaacggactcgacaaaggagagccggtcaacgaggcagacgctgcggccctcgagcacgacaaggcctacgaccggcagctcgacagcggagacaacccgtacctcaagtacaaccacgccgacgcggagtttcaggagcgtcttaaagaagatacgtcttttgggggcaacctcggacgagcagtcttccaggcgaaaaagagggttcttgaacctctgggcctggttgaggaacctgttaagacggctccgggaaaaaagaggccggtagagcactctcctgcggagccagactcctcctcgggaaccggaaaagcgggccagcagcctgcaagaaagagattgaatttcggtcagactggagacgcagactccgtacctgacccccagcctctcggacagccaccagcagcccccacaagtttgggatctactacaatggctacaggcagtggcgcaccaatggcagacaataacgagggtgccgatggagtgggtaattcctcaggaaattggcattgcgattcccaatggctgggcgacagagtcatcaccaccagcacccgaacctgggccctgcccacctacaacaaccaccactacaagcaaatctccagccaatcaggagcatcgaacgacaaccactactttggctacagcaccccttgggggtattttgacttcaacagattccactgtcacttctccccacgtgactggcaaagactcatcaacaacaactggggattccgacccaagagactcaacttcaagctctttaacattcaagtcaaagaggtcacgcagaatgacggtacgacgacgattgccaataaccttaccagcacggttcaggtgtttactgactcggagtaccagctcccgtacgtcctcggctcggcgcatcaaggatgcctcccgccgtttccagcggacgtcttcatggtcccacagtatggatacctcaccctgaacaacgggagtcaggcggtaggacgctcttccttttactgcctggagtactttccttctcagatgctgcgtaccggaaacaactttaccttcagctacacctttgaggacgtgcccttccacagcagctacgctcacagccagagtttggaccggctgatgaatcctctgatcgaccagtatctgtattatctgaacaggacacaatcaaatagtggaactcttcagcagtctaggctactgtttagccaagctggacccaccagcatgtcccttcaagctaaaaactggctgcctggaccttgctacagacagcagcgtctgtcaaagcaggcaaacgacaacaacaacagcaactttccctggactgcggctacaaagtatcatctaaatggtcgggactcgttggttaatccaggaccagctatggccagccacaaagacgatgaagaaaagtttttccccatgcatggaaccctgatatttggtaaacaaggaacaaatgctaacgacgcggatttggaacatgtcatgattacagatgaagaagaaatcaggaccaccaatcccgtggctacagagcagtacggaaacgtgtcaaataatttgcaaaactcaaatactggtccaactacagaaaatgtcaatcaccagggagcgttacctggtatggtgtggcaggatcgagacgtgtacctgcagggacccatttgggccaagattcctcacaccgacggacactttcacccttctccactgatgggaggttttggactcaaacacccgcctcctcaaatcatgatcaaaaacactcctgttccagccaatcctcctacaaacttcagcgcggcaaagtttgcttccttcatcacacagtattccacgggacaggtcagcgtggagatcgagtgggagctgcagaaggagaacagcaaacgctggaaccccgagatccagtacacttccaactacaacaaatctgttaatgtggactttactgtggacgctaatggtgtgtattcagagcctcgccccattggcaccagatacctgactcgtaatctgtaa

SEQ ID NO: 1292 - DNA, 2208 bp, Artificial Sequence
  Synthetic Polynucleotide
atggctgccgatggttatcttccagattggctcgaggacactctctctgaaggaataagacagtggtggaagctcaaacctggcccaccaccaccaaggcccgcagagcggcatcaggacgacagcaggggtcttgtgcttcctgggtacaagtacctcggacccttcaacggactcgacaaaggagagccggtcaacgaggcagacgctgcggccctcgagcacgacaaggcctacgaccggcagctcgacagcggagacaacccgtacctcaagtacaaccacgccgacgcggagtttcaggagcgtcttaaagaagatacgtcttttgggggcaacctcggacgagcagtcttccaggcgaaaaagagggttcttgaacctctgggcctggttgaggaacctgtgaagacggctccgggaaaaaagaggccggtagagcactctcctgcggagccagactcctcctcgggaaccggaaaagcgggccagcagcctgcaagaaagagattgaatttcggtcagactggagacgcagactccgtacctgacccccagcctctcggacagccaccagcagcccccacaagtttgggatctactacaatggctacaggcagtggcgcaccaatggcagacaataacgagggtgccgatggagtgggtaattcctcaggaaattggcattgcgattcccaatggctgggcgacagagtcatcaccaccagcacccgaacctgggccctgcccacctacaacaaccacctctacaagcaaatctccagccaatcaggagcatcgaacgacaaccactactttggctacagcaccccttgggggtattttgacttcaacagattccactgtcacttctccccacgtgactggcaaagactcatcaacaacaactggggattccgacccaagagactcaacttcaagctctttaacattcaagtcaaagaggtcacgcagaatgacggtacgacgacgattgccaataaccttaccagcacggttcgggtgtttactgactcggagtaccagctcccgtacgtcctcggctcggcgcatcaaggatgcctcccgccgtttccagcggacgtcttcatggtcccacagtatggatacctcaccctgaacaacgggagtcaggcggtaggacgctcttccttttactgcctggagtactttccttctcagatgctgcgtaccggaaacaactttaccttcagctacacctttgaggacgtgcccttccacagcagctacgctcacagccagagtttggaccggctgatgaatcctctgatcgaccagtatctgtattatctgaacaggacacaatcaaatagtggaactcttcagcagtctaggctactgtttagccaagctggacccaccagcatgtcccttcaagctaaaaactggctgcctggaccttgctacagacagcagcgtctgtcaaagcaggcaaacgacaacaacaacagcaactttccctggactgcggctacaaagtatcatctaaatggtcgggactcgttggttaatccaggaccagctatggccagccacaaagacgatgaagaaaagtttttccccatgcatggaaccctgatatttggtaaacaaggaacaaatgctaacgacgcggatttggaacatgtcatgattacagatgaagaagaaatcaggaccaccaatcccgtggctacagagcagtacggaaacgtgtcaaataatttgcaaaactcaaatactggtccaactacagaaaatgtcaatcaccagggagcgttacctggtatggtgtggcaggatcgagacgtgtacctgcagggacccatttgggccaagattcctcacaccgacggacactttcacccttctccactgatgggaggttttggactcaaacacccgcctcctcaaatcatgatcaaaaacactcctgttccagccaatcctcctacaaacttcagcgcggcaaagtttgcttccttcatcacacagtattccacgggacaggtcagcgtggagatcgagagggagctgcagaaggagaacagcaaacgctggaaccccgagatccagtacacttccaactacaacaagtctgttaatgtggactttactgtggacgctaatggtgtgtattcagagcctcgccccattggcaccagatacctgactcgtaatctgtaa

SEQ ID NO: 1293 - DNA, 2208 bp, Artificial Sequence
  Synthetic Polynucleotide
atggctgccgatggttatcttccagattggctcgaggacactctctctgaaggaataagacagtggtggaagctcaaacctggcccaccaccaccaaggcccgcagagcggcatcaggacgacagcaggggtcttgtgcttcctgggtacaagtacctcggacccttcaacggactcgacaaaggagagccggtcaacgaggcagacgctgcggccctcgagcacgacaaggcctacgaccggcagctcgacagcggagacaacccgtacctcaagtacaaccacgccgacgcggagtttcaggagcgtcttaaagaagatacgtcttttgggggcaacctcggacgagcagtcttccaggcgaaaaagagggttcttgaacctctgggcctggttgaggaacctgttaagacggctccgggaaaaaagaggccggtagagcactctcctgcggagccagactcctcctcgggaaccggaaaagcgggccagcagcctgcaagaaagagattgaatttcggtcagactggagacgcagactccgtacctgacccccagcctctcggacagccaccagcagcccccacaagtttgggatctactacaatggctacaggcagtggcgcaccaatggcagacaataacgagggtgccgatggagtgggtaattcctcaggaaattggcattgcgattcccaatggctgggcgacagagtcatcaccaccagcacccgaacctgggccctgcccacctacaacaaccacctctacaagcaaatctccagccaatcaggagcatcgaacgacaaccactactttggctacagcaccccttgggggtattttgacttcaacagattccactgtcacttctccccacgtgactggcaaagactcatcaacaacaactggggattccgacccaagagactcaacttcaagctctttaacattcaagtcaaagaggtcacgcagaatgacggtacgacgacgattgccaataaccttaccagcacggttcaggtgtttactgactcggagtaccagctcccgtacgtcctcggctcggcgcatcaaggatgcctcccgccgtttccagcggacgtcttcatggtcccacagtatggatacctcaccctgaacaacgggagtcaggcggtaggacgctcttccttttactgcctggagtactttccttctcagatgctgcgtaccggaaacaactttaccttcagctacacctttgaggacgtgccctcccacagcagctacgctcacagccagagtttggaccggctgatgaatcctctgatcgaccagtatctgtattatctgaacaggacacaatcaaatagtggaactcttcagcagtctaggctactgtttagccaagctggacccaccagcatgtcccttcaagctaaaaactggctgcctggaccttgctacagacagcagcgtctgtcaaagcaggcaaacgacaacaacaacagcaactttccctggactgcggctacaaagtatcatctaaatggtcgggactcgttggttaatccaggaccagctatggccagccacaaagacgatgaagaaaagttcttccccatgcatggaaccctgatatttggtaaacaaggaacaaatgctaacgacgcggatttggaacatgtcatgattacagatgaagaagaaatcaggaccaccaatcccgtggctacagagcagtacggaaacgtgtcaaataatttgcaaaactcaaatactggtccaactacagaaaatgtcaatcaccagggagcgttacctggtatggtgtggcaggatcgagacgtgtacctgcagggacccatttgggccaagattcctcacaccgacggacactttcacccttctccactgatgggaggttttggactcaaacacccgcctcctcaaatcatgatcaaaaacactcctgttccagccaatcctcctacaaacttcagcgcggcaaagtttgcttccttcatcacacagtattccacgggacaggtcagcgtggagatcgagtgggagctgcagaaggagaacagcaaacgctggaaccccgagatccagtacacttccaactacaacaaatctgttaatgtggactttactgtggacgctaatggtgtgtattcagagcctcgccccattggcaccagatacctgactcgtaatctgtaa

SEQ ID NO: 1294 - DNA, 2208 bp, Artificial Sequence
  Synthetic Polynucleotide
atggctgccgatggttatcttccagattggctcgaggacactctctctgaaggaataagacagtggtggaagctcaaacctggcccaccaccaccaaggcccgcagagcggcatcaggacgacagcaggggtcttgtgcttcctgggtacaagtacctcggacccttcaacggactcgacaaaggagagccggtcaacgaggcagacgctgcggccctcgagcacgacaaggcctacgaccggcagctcgacagcggagacaacccgtacctcaagtacaaccacgccgacgcggagtttcaggagcgtcttaaagaagatacgtcttttgggggcaacctcggacgagcagtcttccaggcgaaaaagagggttcttgaacctctgggcctggttgaggaacctgttaagacggctccgggaaaaaagaggccggtagagcactctcctgcggagccagactcctcctcgggaaccggaaaagcgggccagcggcctgcaagaaagagattgaatttcggtcagactggagacgcagactccgtacctgacccccagcctctcggacagccaccagcagcccccacaagtttgggatctactacaatggctacaggcagtggcgcaccaatggcagacaataacgagggtgccgatggagtgggtaattcctcaggaaattggcattgcgattcccaatggctgggcgacagagtcatcaccaccagcacccgaacctgggccctgcccacctacaacaaccacctctacaagcaaatctccagccaatcaggagcatcgaacgacaaccactactttggctacagcaccccttgggggtattttgacttcaacagattccactgtcacttctccccacgtgactggcaaagactcatcaacaacaactggggattccgacccaagagactcaacttcaagctctttaacattcaagtcaaagaggtcacgcagaatgacggtacgacgacgattgccaataaccttaccagcacggttcaggtgtttactgactcggagtaccagctcccgtacgtcctcggctcggcgcatcaaggatgcctcccgccgtttccagcggacgtcttcatggtcccacagtatggatacctcaccctgaacaacgggagtcaggcggtaggacgctcttccttttactgcctggagtactttccttctcagatgctgcgtaccggaaacaactttaccttcagctacacctttgaggacgtgcccttccacagcagctacgctcacagccagagtttggaccggctgatgaatcctctgatcgaccagtatctgtattatctgaacaggacacaatcaaatagtggaactcttcagcagtctaggctactgtttagccaagctggacccaccagcatgtcccttcaagctaaaaactggctgcctggaccttgctacagacagcagcgtctgtcaaagcaggcaaacgacaacaacaacagcaactttccctggactgcggctacaaagtatcatctaaatggtcgggactcgttggttaatccaggaccagctatggccagccacaaagacgatgaagaaaagtttttccccatgcatggaaccctgatatttggtaaacaaggaacaaatgctaacgacgcggatttggaacatgtcatgattacagatgaagaagaaatcaggaccaccaatcccgtggctacagagcagtacggaaacgtgtcaaataatttgcaaaactcaaatactggtccaactacagaaaatgtcaatcaccagggagcgttacctggtatggtgtggcaggatcgagacgtgtacctgcagggacccatttgggccaagattcctcacaccgacggacactttcacccttctccactgatgggaggttttggactcaaacacccgcctcctcaaatcatgatcaaaaacactcctgttccagccaatcctcctacaaacttcagcgcggcaaagtttgcttccttcatcacacagtattccacgggacaggtcagcgtggagatcgagtgggagctgcagaaggagaacagcaaacgctggaaccccgagatccagtacacttccaactacaacaaatctgttaatgtggactttactgtggacgctaatggtgtgtattcagagcctcgccccattggcaccagatacctgactcgtaatctgtaa

SEQ ID NO: 1295 - DNA, 2208 bp, Artificial Sequence
  Synthetic Polynucleotide
atggctgccgatggttatcttccagattggctcgaggacactctctctgaaggaataagacagtggtggaagctcaaacctggcccaccaccgccaaagcccgcagagcggcataaggacgacagcaggggtcttgtgcttcctgggtacaagtacctcggacccttcaacggactcgacaaaggagagccggtcaacgaggcagacgccgcggccctcgagcacgacaaggcctacgaccggcagctcgacagcggagacaacccgtacctcaagtacaaccacgccgacgcggagtttcaggagcgccttaaagaagatacgtcttttgggggcaacctcgcaagagcagtattccaggcgaaaaagagggttcttgaacctctgggcctggttgaggagcctgttaagacggctccgggaaaaaagaggccggtagagcactctcctgcggagccagattcctcctccggaactggaaagtcgggccaacagcctgcaagaaagagattgaattttggtcagactggagacgcagactccgtacctgacccccagcctctcggacagccaccagcagccccctctggtctgggaactaatacgatggcttcaggcagtggcgcaccaatggcagacaataacgagggcgccgacggagtgggtaattcctcgggaaattggcattgcgattccacatggatgggcgacagagtcatcaccaccagcacccgcacctgggctctgcccacctacaacaaccatctgtacaagcaaatttccagccagtctggagcagcgaacgacaaccactactttggctacagcaccccttgggggtattttgacttcaacagattccactgccacttctccccacgtgactggcaaagactcatcaacaacaattggggattccggcccaaaagactcaacttcaagctctttaacattcaagtcaaggaggtcacgcagaatgacggtacgacgacgattgccaataaccttaccagcacggttcaggtgtttactgactcggagtaccagctcccgtacgtcctcggctcggcgcatcaaggatgcctcccgccgttcccagcagacgtcttcatggtgccacagtatggatacctcaccctgaacaacgggagtcaggcggtaggacgctcttcattttactgcctggagtactttccttctcagatgctgcgtaccggaaacaactttaccttcagctacacctttgaggacgtgcccttccacagcagctacgctcacagccagagtttggaccggctgatgaatcctctgatcgaccagtatctgtattatctgaacaggacacaatcaaatagtggaactcttcagcagtctaggctactgtttagccaagctggacccaccagcatgtcccttcaagctaaaaactggctgcctggaccttgctacagacagcagcgtctgtcaaagcaggcaaacgacaacaacaacagcaactttccctggactgcggctacaaagtatcatctaaatggtcgggactcgttggttaatccaggaccagctatggccagccacaaagacgatgaagaaaagtttttccccatgcatggaaccctgatatttggtaaacaaggaacaaatgctaacgacgcggatttggaacatgtcatgattacagatgaagaagaaatcaggaccaccaatcccgtggctacagagcagtacggaaacgtgtcaaataatttgcaaaactcaaatactggtccaactacagaaaatgtcaatcaccagggagcgttacctggtatggtgtggcaggatcgagacgtgtacctgcagggacccatttgggccaagattcctcacaccgacggacactttcacccttctccactgatgggaggttttggactcaaacacccgcctcctcaaatcatgatcaaaaacactcctgttccagccaatcctcctacaaacttcagcgcggcaaagtttgcttccttcatcacacagtattccacgggacaggtcagcgtggagatcgagtgggagctgcagaaggagaacagcaaacgctggaaccccgagatccagtacacttccaactacaacaaatctgttaatgtggactttactgtggacgctaatggtgtgtattcagagcctcgccccattggcaccagatacctgactcgtaatctgtaa

SEQ ID NO: 1296 - DNA, 2208 bp, Artificial Sequence
  Synthetic Polynucleotide
atggctgccgatggttatcttccagattggctcgaggacactctctctgaaggaataagacagtggtggaagctcaaacctggcccaccaccaccaaggcccgcagagcggcatcaggacgacagcaggggtcttgtgcttcctgggtacaagtacctcggacccttcaacggactcgacaaaggagagccggtcaacgaggcagacgctgcggccctcgagcacgacaaggcctacgaccggcagctcgacagcggagacaacccgtacctcaagtacaaccacgccgacgcggagtttcaggagcgtcttaaagaagatacgtcttttgggggcaacctcggacgagcagtcttccaggcgaaaaagagggttcttgaacctctgggcctggttgaggaacctgttaagacggctccgggaaaaaagaggccggtagagcactctcctgcggagccagactcctcctcgggaaccggaaaagcgggccagcagcctgcaagaaagagattgaatttcggtcagactggagacgcagactccgtacctgacccccggcctctcggacagccaccagcagcccccacaagtttgggatctactacaatggctacaggcagtggcgcaccaatggcagacaataacgagggtgccgatggagtgggtaattcctcaggaaattggcattgcgattcccaatggctgggcgacagagtcatcaccaccagcacccgaacctgggccctgcccacctacaacaaccacctctacaagcaaatctccagccaatcaggagcatcgaacgacaaccactactttggctacagcaccccttgggggtattttgacttcaacagattccactgtcacttctccccacgtgactggcaaagactcatcaacaacaactggggattccgacccaagagactcaacttcaagctctttaacattcaagtcaaagaggtcacgcagaatgacggtacgacgacgattgccaataaccttaccagcacggttcaggtgtttactgactcggagtaccagctcccgtacgtcctcggctcggcgcatcaaggatgcctcccgccgtttccagcggacgtcttcatggtcccacagtatggatacctcaccctgaacaacgggagtcaggcggtaggacgctcttccttttactgcctggagtactttccttctcagatgctgcgtaccggaaacaactttaccttcagctacacctttgaggacgtgcccttccacagcagctacgctcacagccagagtttggaccggctgatgaatcctctgatcgaccagtatctgtattatctgaacaggacacaatcaaatagtggaactcttcagcagtctaggctactgtttagccaagctggacccaccagcatgtcccttcaagctaaaaactggctgcctggaccttgctacagacagcagcgtctgtcaaagcaggcaaacgacaacaacaacagcaactttccctggactgcggctacaaagtatcatctaaatggtcgggactcgttggttaatccaggaccagctatggccagccacaaagacgatgaagaaaagtttttccccatgcatggaaccctgatatttggtaaacaaggaacaaatgctaacgacgcggatttggaacatgtcatgattacagatgaagaagaaatcaggaccaccaatcccgtggctacagagcagtacggaaacgtgtcaaataatttgcaaaactcaaatactggtccaactacagaaaatgtcaatcaccagggagcgttacctggtatggtgtggcaggatcgagacgtgtacctgcagggacccatttgggccaagattcctcacaccgacggacactttcacccttctccactgatgggaggttttggactcaaacacccgcctcctcaaatcatgatcaaaaacactcctgttccagccaatcctcctacaaacttcagcgcggcaaagtttgcttccttcatcacacagtattccacgggacaggtcagcgtggagatcgagtgggagctgcagaaggagaacagcaaacgctggaaccccgagatccagtacacttccaactacaacaaatctgttaatgtggactttactgtggacgctaatggtgtgtattcagagcctcgccccattggcaccagatacctgactcgtaatctgtaa

SEQ ID NO: 1297 - DNA, 2208 bp, Artificial Sequence
  Synthetic Polynucleotide
atggctgccgatggttatcttccagattggctcgaggacactctctctgaaggaataagacagtggtggaagctcaaacctggcccaccaccgccaaagcccgcagagcggcataaggacgacagcaggggtcttgtgcttcctgggtacaagtacctcggacccttcaacggactcgacaaaggagagccggtcaacgaggcagacgccgcggccctcgagcacgacaaggcctacgaccggcagctcgacagcggagacaacccgtacctcaagtacaaccacgccgacgcggagtttcaggagcgccttaaagaagatacgtcttttgggggcaacctcgcaagagcagtattccaggcgaaaaagagggttcttgaacctctgggcctggttgaggagcctgttaagacggctccgggaaaaaagaggccggtagagcactctcctgcggagccagattcctcctccggaactggaaagtcgggccaacagcctgcaagaaagagattgaatttcggtcagactggagacgcagactccgtacctgacccccagcctctcggacagccaccagcagcccccacaagtttgggatctactacaatggctacaggcagtggcgcaccaatggcagacaataacgagggtgccgatggagtgggtaattcctcaggaaattggcattgcgattcccaatggctgggcgacagagtcatcaccaccagcacccgaacctgggccctgcccacctacaacaaccacctctacaagcaaatctccagccaatcaggagcatcgaacgacaaccactactttggctacagcaccccttgggggtattttgacttcaacagattccactgtcacttctccccacgtgactggcaaagactcatcaacaacaactggggattccgacccaagagactcaacttcaagctctttaacattcaagtcaaagaggtcacgcagaatgacggtacgacgacgattgccaataaccttaccagcacggttcaggtgtttactgactcggagtaccagctcccgtacgtcctcggctcggcgcatcaaggatgcctcccgccgtttccagcggacgtcttcatggtcccacagtatggatacctcaccctgaacaacgggagtcaggcggtaggacgctcttccttttactgcctggagtactttccttctcagatgctgcgtaccggaaacaactttaccttcagctacacctttgaggacgtgcccttccacagcagctacgctcacagccagagtttggaccggctgatgaatcctctgatcgaccagtatctgtattatctgaacaggacacaatcaaatagtggaactcttcagcagtctaggctactgtttagccaagctggacccaccagcatgtcccttcaagctaaaaactggctgcctggaccttgctacagacagcagcgtctgtcaaagcaggcaaacgacaacaacaacagcaactttccctggactgcggctacaaagtatcatctaaatggtcgggactcgttggttaatccaggaccagctatggccagccacaaagacgatgaagaaaagtttttccccatgcatggaaccctgatatttggtaaacaaggaacaaatgctaacgacgcggatttggaacatgtcatgattacagatgaagaagaaatcaggaccaccaatcccgtggctacagagcagtacggaaacgtgtcaaataatttgcaaaactcaaatactggtccaactacagaaaatgtcaatcaccagggagcgttacctggtatggtgtggcaggatcgagacgtgtacctgcagggacccatttgggccaagattcctcacaccgacggacactttcacccttctccactgatgggaggttttggactcaaacacccgcctcctcaaatcatgatcaaaaacactcctgttccagccaatcctcctacaaacttcagcgcggcaaagtttgcttccttcatcacacagtattccacgggacaggtcagcgtggagatcgagtgggagctgcagaaggagaacagcaaacgctggaaccccgagatccagtacacttccaactacaacaaatctgttaatgtggactttactgtggacgctaatggtgtgtattcagagcctcgccccattggcaccagatacctgactcgtaatctgtaa

SEQ ID NO: 1298 - DNA, 2208 bp, Artificial Sequence
  Synthetic Polynucleotide
atggctgccgatggttatcttccagattggctcgaggacactctctctgaaggaataagacagtggtggaagctcaaacctggcccaccaccaccaaggcccgcagagcggcatcaggacgacagcaggggtcttgtgcttcctgggtacaagtacctcggacccttcaacggactcgacaaaggagagccggtcaacgaggcagacgctgcggccctcgagcacgacaaggcctacgaccggcagctcgacagcggagacaacccgtacctcaagtacaaccacgccgacgcggagtttcaggagcgtcttaaagaagatacgtcttttgggggcaacctcggacgagcagtcttccaggcgaaaaagagggttcttgaacctctgggcctggttgaggaacctgttaagacggctccgggaaaaaagaggccggtagagcactctcctgcggagccagactcctcctcgggaaccggaaaagcgggccagcagcctgcaagaaagagattgaatttcggtcagactggagacgcagactccgtacctgacccccagcctctcggacagccaccagcagcccccacaagtttgggatctactacaatggctacaggcagtggcgcaccaatggcagacaataacgagggtgccgatggagtgggtaattcctcaggaaattggcattgcgattcccaatggctgggcgacagagtcatcaccaccagcacccgaacctgggccctgcccacctacaacaaccacctctacaagcaaatctccagccaatcaggagcatcgaacgacaaccactactttggctacagcaccccttgggggtattttgacttcaacagattccactgtcacttctccccacgtgactggcaaagactcatcaacaacaactggggattccgacccaagagactcaacttcaagctctttaacattcaagtcaaagaggtcacgcagaatgacggtacgacgacgattgccaataaccttaccagcacggttcgggtgtttactgactcggagtaccagctcccgtacgtcctcggctcggcgcatcaaggatgcctcccgccgtttccagcggacgtcttcatggtcccacagtatggatacctcaccctgaacaacgggagtcaggcggtaggacgctcttccttttactgcctggagtactttccttctcagatgctgcgtaccggaaacaactttaccttcagctacacctttgaggacgtgcccttccacagcagctacgctcacagccagagtttggaccggctgatgaatcctctgatcgaccagtatctgtattatctgaacaggacacaatcaaatagtggaactcttcagcagtctaggctactgtttagccaagctggacccaccagcatgtcccttcaagctaaaaactggctgcctggaccttgctacagacagcagcgtctgtcaaagcaggcaaacgacaacaacaacagcaactttccctggactgcggctacaaagtatcatctaaatggtcgggactcgttggttaatccaggaccagctatggccagccacaaagacgatgaagaaaagtttttccccatgcatggaaccctgatatttggtaaacaaggaacaaatgctaacgacgcggatttggaacatgtcatgattacagatgaagaagaaatcaggaccaccaatcccgtggctacagagcagtacggaaacgtgtcaaataatttgcaaaactcaaatactggtccaactacagaaaatgtcaatcaccagggagcgttacctggtatggtgtggcaggatcgagacgtgtacctgcagggacccatttgggccaagattcctcacaccgacggacactttcacccttctccactgatgggaggttttggactcaaacacccgcctcctcaaatcatgatcaaaaacactcctgttccagccaatcctcctacaaacttcagcgcggcaaagtttgcttccttcatcacacagtattccacgggacaggtcagcgtggagatcgagagggagctgcagaaggagaacagcaaacgctggaaccccgagatccagtacacttccaactacaacaagtctgttaatgtggactttactgtgggcgctaatggtgtgtattcagagcctcgccccattggcaccagatacctgactcgtaatctgtaa

SEQ ID NO: 1299 - DNA, 2208 bp, Artificial Sequence
  Synthetic Polynucleotide
atggctgccgatggttatcttccagattggctcgaggacactctctctgaaggaataagacagtggtggaagctcaaacctggcccaccaccgccaaagcccgcagagcggcataaggacgacagcaggggtcttgtgcttcctgggtacaagtacctcggacccttcaacggactcgacaaaggagagccggtcaacgaggcagacgccgcggccctcgagcacgacaaggcctacgaccggcagctcgacagcggagacaacccgtacctcaagtacaaccacgccgacgcggagtttcaggagcgccttaaagaagatacgtcttttgggggcaacctcgcaagagcagtattccaggcgaaaaagagggttcttgaacctctgggcctggttgaggagcctgttaagacggctccgggaaaaaagaggccggtagagcactctcctgcggagccagattcctcctccggaactggaaagtcgggccaacagcctgcaagaaagagattgaattttggtcagactggagacgcagactccgtacctgacccccagcctctcggacagccaccagcagccccctctggtctgggaactaatacgatggcttcaggcagtggcgcaccaatggcagacaataacgagggcgccgacggagtgggtaattcctcaggaaattggcattgcgattcccaatggctgggcgacagagtcatcaccaccagcacccgaacctgggccctgcccacctacaacaaccacctctacaagcaaatctccagccaatcaggagcatcgaacgacaaccactactttggctacagcaccccttgggggtattttgacttcaacagattccactgtcacttctccccacgtgactggcaaagactcatcaacaacaactggggattccgacccaagagactcaacttcaagctctttaacattcaagtcaaagaggtcacgcagaatgacggtacgacgacgattgccaataaccttaccagcacggttcaggtgtttactgactcggagtaccagctcccgtacgtcctcggctcggcgcatcaaggatgcctcccgccgtttccagcggacgtcttcatggtcccacagtatggatacctcaccctgaacaacgggagtcaggcggtaggacgctcttccttttactgcctggagtactttccttctcagatgctgcgtaccggaaacaactttaccttcagctacacctttgaggacgtgcccttccacagcagctacgctcacagccagagtttggaccggctgatgaatcctctgatcgaccagtatctgtattatctgaacaggacacaatcaaatagtggaactcttcagcagtctaggctactgtttagccaagctggacccaccagcatgtcccttcaagctaaaaactggctgcctggaccttgctacagacagcagcgtctgtcaaagcaggcaaacgacaacaacaacagcaactttccctggactgcggctacaaagtatcatctaaatggtcgggactcgttggttaatccaggaccagctatggccagccacaaagacgatgaagaaaagtttttccccatgcatggaaccctgatatttggtaaacaaggaacaaatgctaacgacgcggatttggaacatgtcatgattacagatgaagaagaaatcaggaccaccaatcccgtggctacagagcagtacggaaacgtgtcaaataatttgcaaaactcaaatactggtccaactacagaaaatgtcaatcaccagggagcgttacctggtatggtgtggcaggatcgagacgtgtacctgcagggacccatttgggccaagattcctcacaccgacggacactttcacccttctccactgatgggaggttttggactcaaacacccgcctcctcaaatcatgatcaaaaacactcctgttccagccaatcctcctacaaacttcagcgcggcaaagtttgcttccttcatcacacagtattccacgggacaggtcagcgtggagatcgagtgggagctgcagaaggagaacagcaaacgctggaaccccgagatccagtacacttccaactacaacaaatctgttaatgtggactttactgtggacgctaatggtgtgtattcagagcctcgccccattggcaccagatacctgactcgtaatctgtaa

SEQ ID NO: 1300 - DNA, 2208 bp, Artificial Sequence
  Synthetic Polynucleotide
atggctgccgatggttatcttccagattggctcgaggacactctctctgaaggaataagacagtggtggaagctcaaacctggcccaccaccaccaaggcccgcagagcggcatcaggacgacagcaggggtcttgtgcttcctgggtacaagtacctcggacccttcaacggactcgacaaaggagagccggtcaacgaggcagacgctgcggccctcgagcacgacaaggcctacgaccggcagctcgacagcggagacaacccgtacctcaagtacaaccacgccgacgcggagtttcaggagcgtcttaaagaagatacgtcttttgggggcaacctcggacgagcagtcttccaggcgaaaaagagggttcttgaacctctgggcctggttgaggaacctgttaagacggctccgggaaaaaagaggccggtagagcactctcctgcggagccagactcctcctcgggaaccggaaaagcgggccagcagcctgcaagaaagagattgaatttcggtcagactggagacgcagactccgtacctgacccccagcctctcggacagccaccagcagcccccacaagtttgggatctactacaatggctacaggcagtggcgcaccaatggcagacaataacgagggtgccgatggagtgggtaattcctcaggaaattggcattgcgattcccaatggctgggcgacagagtcatcaccaccagcacccgaacctgggccctgcccacctacaacaaccacctctacaagcaaatctccagccaatcaggagcatcgaacgacaaccactactttggctacagcaccccttgggggtattttgacttcaacagattccactgtcacttctccccacgtgactggcaaagactcatcaacaacaactggggattccgacccaagagactcaacttcaagctctttaacattcaagtcaaagaggtcacgcagaatgacggtacgacgacgattgccaataaccttaccagcacggttcaggtgtttactgactcggagtaccagctcccgtacgtcctcggctcggcgcatcaaggatgcctcccgccgtttccagcggacgtcttcatggtcccacagtatggatacctcaccctgaacaacgggagtcaggcggtaggacgctcttccttttactgcctggagtactttccttctcagatgctgcgtaccggaaacaactttaccttcagctacacctttgaggacgtgcccttccacagcagctacgctcacagccagagtttggaccggctgatgaatcctctgatcgaccagtatctgtattatctgaacaggacacaatcaaatagtggaactcttcagcagtctaggctactgtttagccaagctggacccaccagcatgtcccttcaagctaaaaactggctgcctggaccttgctacagacagcagcgtctgtcaaagcaggcaaacgacaacaacaacagcaactttccctggactgcggctacaaagtatcatctaaatggtcgggactcgttggttaatccaggaccagctatggccagccacaaagacgatgaagaaaagtttttccccatgcatggaaccctgatatttggtaaacaaggaacaaatgctaacgacgcggatttggaacatgtcatgattacagatgaagaagaaatcaggaccaccaatcccgtggctacagagcagtacggaaacgtgtcaaataatttgcaaaactcaaatactggtccaactacagaaaatgtcaatcaccagggagcgttacctggtatggtgtggcaggatcgagacgtgtacctgcagggacccatttgggccaagattcctcacaccgacggacactttcacccttctcctcttatgggaggatttggactgaagcaccctcccccgcagattctcatcaagaataccccggtacctgcgaatccttctaccaccttcagcgcggcaaagtttgcttccttcatcacacagtactccacggggcaggtcagcgtggagatcgagtgggagctgcagaaagagaacagcaaacgctggaaccccgagatccagtatacctccaactacaacaagtctgttaatgtggactttactgtggacactaatggcgtgtattcagagcctcgccccattggcacaagatacctgactcgtaatctgtaa

SEQ ID NO: 1301 - DNA, 2208 bp, Artificial Sequence
  Synthetic Polynucleotide
atggctgccgatggttatcttccagattggctcgaggacactctctctgaaggaataagacagtggtggaagctcaaacctggcccaccaccaccaaggcccgcagagcggcatcaggacgacagcaggggtcttgtgcttcctgggtacaagtacctcggacccttcaacggactcgacaaaggagagccggtcaacgaggcagacgctgcggccctcgagcacgacaaggcctacgaccggcagctcgacagcggagacaacccgtacctcaagtacaaccacgccgacgcggagtttcaggagcgtcttaaagaagatacgtcttttgggggcaacctcggacgagcagtcttccaggcgaaaaagagggttcttgaacctctgggcctggttgaggaacctgttaagacggctccgggaaaaaagaggccggtagagcactctcctgcggagccagactcctcctcgggaaccggaaaagcgggccagcagcctgcaagaaagagattgaatttcggtcagactggagacgcagactccgtacctgacccccagcctctcggacagccaccagcagcccccacaagtttgggatctactacaatggctacaggcagtggcgcaccaatggcagacaataacgagggtgccgatggagtgggtaattcctcaggaaattggcattgcgattcccaatggctgggcgacagagtcatcaccaccagcacccgaacctgggccctgcccacctacaacaaccacctctacaagcaaatctccagccaatcaggagcatcgaacgacaaccactactttggctacagcaccccttgggggtattttgacttcaacagattccactgtcacttctccccacgtgactggcaaagactcatcaacaacaactggggattccgacccaagagactcaacttcaagctctttaacattcaagtcaaagaggtcacgcagaatgacggtacgacgacgattgccaataaccttaccagcacggttcaggtgtttactgactcggagtaccagctcccgtacgtcctcggctcggcgcatcaaggatgcctcccgccgtttccagcggacgtcttcatggtcccacagtatggatacctcaccctgaacaacgggagtcaggcggtaggacgctcttccttttactgcctggagtactttccttctcagatgctgcgtaccgggaacaactttaccttcagctacacctttgaggacgtgcccttccacagcagctacgctcacagccagagtttggaccggctgatgaatcctctgatcgaccagtatctgtattatctgaacaggacacaatcaaatagtggaactcttcagcagtctaggctactgtttagccaagctggacccaccagcatgtcccttcaagctaaaaactggctgcctggaccttgctacagacagcagcgtctgtcaaagcaggcaaacgacaacaacaacagcaactttccctggactgcggctacaaagtatcatctaaatggtcgggactcgtcggttaatccaggaccagctatggccagccacaaagacgatgaagaaaagtttttctccatgcatggaaccctgatatttggtaaacaaggaacaaatgctaacgacgcggatttggaacatgtcatgattacagatgaagaagaaatcaggaccaccaatcccgtggctacagagcagtacggaaacgtgtcaaataatttgcaaaactcaaatactggtccaactacagaaaatgtcaatcaccagggagcgttacctggtatggtgtggcaggatcgagacgtgtacctgcagggacccatttgggccaagattcctcacaccgacggacactttcacccttctccactgatgggaggttttggactcaaacacccgcctccccaaatcatgatcaaaaacactcctgttccagccaatcctcctacaaacttcagcgcggcaaagtttgcttccttcatcacacagtattccacgggacaggtcagcgtggagatcgagtgggagctgcagaaggagaacagcaaacgctggaaccccgagatccagtacacttccaactacaacaaatctgttaatgtggactttactgtggacgctaatggtgtgtattcagagcctcgccccattggcaccagatacctgactcgtaatctgtaa

SEQ ID NO: 1302 - DNA, 2208 bp, Artificial Sequence
  Synthetic Polynucleotide
atggctgccgatggttatcttccagattggctcgaggacactctctctgaaggaataagacagtggtggaagctcaaacctggcccaccaccaccaaggcccgcagagcggcatcaggacgacagcaggggtcttgtgcttcctgggtacaagtacctcggacccttcaacggactcgacaaaggagagccggtcaacgaggcagacgctgcggccctcgagcacgacaaggcctacgaccggcagctcgacagcggagacaacccgtacctcaagtacaaccacgccgacgcggagtttcaggagcgtcttaaagaagatacgtcttttgggggcaacctcggacgagcagtcttccaggcgaaaaagagggttcttgaacctctgggcctggttgaggaacctgttaagacggctccgggaaaaaagaggccggtagagcactctcctgcggagccagactcctcctcgggaaccggaaaagcgggccagcagcctgcaagaaagagattgaatttcggtcagactggagacgcagactccgtacctgacccccagcctctcggacagccaccagcagcccccacaagtttgggatctactacaatggctacaggcagtggcgcaccaatggcagacaataacgagggtgccgatggagtgggtaattcctcaggaaattggcattgcgattcccaatggctgggcgacagagtcatcaccaccagcacccgaacctgggccctgcccacctacaacaaccacctctacaagcaaatctccagccaatcaggagcatcgaacgacaaccactactttggctacagcaccccttgggggtattttgacttcaacagattccactgtcacttctccccacgtgactggcaaagactcatcaacaacaactggggattccgacccaagagactcaacttcaagctctttaacattcaagtcaaagaggtcacgcagaatgacggtacgacgacgattgccaataaccttaccagcacggttcaggtgtttactgactcggagtaccagctcccgtacgtcctcggctcggcgcatcaaggatgcctcccgccgtttccagcgggcgtcttcatggtcccacagtatggatacctcaccctgaacaacgggagtcaggcggtaggacgctcttccttttactgcctggagtactttccttctcagatgctgcgtaccggaaacaactttaccttcagctacacctttgaggacgtgcccttccacagcagctacgctcacagccagagtttggaccggctgatgaatcctctgatcgaccagtatctgtattatctgaacaggacacaatcaaatagtggaactcttcagcagtctaggctactgtttagccaagctggacccaccagcatgtcccttcaagctaaaaactggctgcctggaccttgctgcagacagcagcgtctgtcaaagcaggcaaacgacaacaacaacagcaactttccctggactgcggctacaaagtatcatctaaatggtcgggactcgttggttaatccaggaccagctatggccagccacaaagacgatgaagaaaagtttttccccatgcatggaaccctgatatttggtaaacaaggaacaaatgctaacgacgcggatttggaacatgtcatgattacagatgaagaagaaatcaggaccaccaatcccgtggctacagagcagtacggaaacgtgtcaaataatttgcaaaactcaaatactggtccaactacagaaaatgtcaatcaccagggagcgttacctggtatggtgtggcaggatcgagacgtgtacctgcagggacccatttgggccaagattcctcacaccgacggacactttcacccttctccactgatgggaggttttggactcaaacacccgcctcctcaaatcatgatcaaaaacactcctgttccagccaatcctcctacaaacttcagcgcggcaaagtttgcttccttcatcacacagtattccacgggacaggtcagcgtggagatcgagtgggagctgcagaaggagaacagcaaacgctggaaccccgagatccagtacacttccaactacaacaaatctgttaatgtggactttactgtggacgctaatggtgtgtattcagagcctcgccccattggcaccagatacctgactcgtaatctgtaa

SEQ ID NO: 1303 - DNA, 2208 bp, Artificial Sequence
  Synthetic Polynucleotide
atggctgccgatggttatcttccagattggctcgaggacactctctctgaaggaataagacagtggtggaagctcaaacctggcccaccaccaccaaggcccgcagagcggcatcaggacgacagcaggggtcttgtgcttcctgggtacaagtacctcggacccttcaacggactcgacaaaggagagccggtcaacgaggcagacgctgcggccctcgagcacgacaaggcctacgaccggcagctcgacagcggagacaacccgtacctcaagtacaaccacgccgacgcggagtttcaggagcgtcttaaagaagatacgtcttttgggggcaacctcggacgagcagtcttccaggcgaaaaagagggttcttgaacctctgggcctggttgaggaacctgttaagacggctccgggaaaaaagaggccggtagagcactctcctgcggagccagactcctcctcgggaaccggaaaagcgggccagcagcctgcaagaaagagattgaatttcggccagactggagacgcagactccgtacctgacccccagcctcccggacagccaccagcagcccccacaagtttgggatctactacaatggctacaggcagtggcgcaccaatggcagacaataacgagggtgccgatggagtgggtaattcctcaggaaattggcattgcgattcccaatggctgggcgacagagtcatcaccaccagcacccgaacctgggccctgcccacctacaacaaccacctctacaagcaaatctccagccaatcaggagcatcgaacgacaaccactactttggctacagcaccccttgggggtattttgacttcaacagattccactgtcacttctccccacgtgactggcaaagactcatcaacaacaactggggattccgacccaagagactcaacttcaagctctttaacattcaagtcaaagaggtcacgcagaatgacggtacgacgacgattgccaataaccttaccagcacggttcaggtgtttactgactcggagtaccagctcccgtacgtcctcggctcggcgcatcaaggatgcctcccgccgtttccagcggacgtcttcatggtcccacagtatggatacctcaccctgaacaacgggagtcaggcggtaggacgctcttccttttactgcctggagtactttccttctcagatgctgcgtaccggaaacaactttaccttcagctacacctttgaggacgtgcccttccacagcagctacgctcacagccagagtttggaccggctgatgaatcctctgatcgaccagtatctgtattatctgaacaggacacaatcaaatagtggaactcttcagcagtctaggctactgtttagccaagctggacccaccagcatgtcccttcaagctaaaaactggctgcctggaccttgctacagacagcagcgtctgtcaaagcaggcaaacgacaacaacaacagcaactttccctggactgcggctacaaagtatcatctaaatggtcgggactcgttggttaatccaggaccagctatggccagccacaaagacgatgaagaaaagtttttccccatgcatggaaccctgatatttggtaaacaaggaacaaatgctaacgacgcggatttggaacatgtcatgattacagatgaagaagaaatcaggaccaccaatcccgtggctacagagcagtacggaaacgtgtcaaataatttgcaaaactcaaatactggtccaactacagaaaatgtcaatcaccagggagcgttacctggtatggtgtggcaggatcgagacgtgtacctgcagggacccatttgggccaagattcctcacaccgacggacactttcacccttctccactgatgggaggttttggactcaaacacccgcctcctcaaatcatgatcaaaaacactcctgttccagccaatcctcctacaaacttcagcgcggcaaagtttgcttccttcatcacacagtattccacgggacaggtcagcgtggagatcgagtgggagctgcagaaggagaacagcaaacgctggaaccccgagatccagtacacttccaactacaacaaatctgttaatgtggactttactgtggacgctaatggtgtgtattcagagcctcgccccattggcaccagatacctgactcgtaatctgtaa

SEQ ID NO: 1304 - DNA, 2208 bp, Artificial Sequence
  Synthetic Polynucleotide
atggctgccgatggttatcttccagattggctcgaggacactctctctgaaggaataagacagtggtggaagctcaaacctggcccaccaccaccaaggcccgcagagcggcatcaggacgacagcaggggtcttgtgcttcctgggtacaagtacctcggacccttcaacggactcgacaaaggagagccggtcaacgaggcagacgctgcggccctcgagcacgacaaggcctacgaccggcagctcgacagcggagacaacccgtacctcaagtacaaccacgccgacgcggagtttcaggagcgtcttaaagaagatacgtcttttgggggcaacctcggacgagcagtcttccaggcgaaaaagagggttcttgaacctctgggcctggttgaggaacctgttaagacggctccgggaaaaaagaggccggtagagcactctcctgcggagccagactcctcctcgggaaccggaaaagcgggccagcagcctgcaagaaagagattgaatttcggtcagactggagacgcagactccgtacctgacccccagcctctcggacagccaccagcagcccccacaagtttgggatctactacaatggctacaggcagtggcgcaccaatggcagacaataacgagggtgccgatggagtgggtaattcctcaggaaattggcattgcgattcccaatggctgggcgacagagtcatcaccaccagcacccgaacctgggccctgcccacctacaacaaccaccactacaagcaaatctccagccaatcaggagcatcgaacgacaaccactactttggctacagcaccccttgggggtattttgacttcaacagattccactgtcacttctccccacgtgactggcaaagactcatcaacaacaactggggattccgacccaagagactcaacttcaagctctttaacattcaagtcaaagaggtcacgcagaatgacggtacgacgacgattgccaataaccttaccagcacggttcaggtgtttactgactcggagtaccagctcccgtacgtcctcggctcggcgcatcaaggatgcctcccgccgtttccagcggacgtcttcatggtcccacagtatggatacctcaccctgaacaacgggagtcaggcggtaggacgctcttccttttactgcctggagtactttccttctcagatgctgcgtaccggaaacaactttaccttcagctacacctttgaggacgtgcccttccacagcagctacgctcacagccagagtttggaccggctgatgaatcctctgatcgaccagtatctgtattatctgaacaggacacaatcaaatagtggaactcttcagcagtctaggctactgtttagccaagctggacccaccagcatgtcccttcaagctaaaaactggctgcctggaccttgctacagacagcagcgtctgtcaaagcaggcaaacgacaacaacaacagcaactttccctggactgcggctacaaagtatcatctaaatggtcgggactcgttggttaatccaggaccagctatggccagccacaaagacgatgaagaaaagtttttccccatgcatggaaccctgatatttggtaaacaaggaacaaatgctaacgacgcggatttggaacatgtcatgattacagatgaagaagaaatcaggaccaccaatcccgtggctacagagcagtacggaaacgtgtcaaataatttgcaaaactcaaatactggtccaactacagaagatgtcaatcaccagggagcgttacctggtatggtgtggcaggatcgagacgtgtacctgcagggacccatttgggccaagattcctcacaccgacggacactttcacccttctccactgatgggaggttttggactcaaacacccgcctcctcaaatcatgatcaaaaacactcctgttccagccaatcctcctacaaacttcagcgcggcaaagtttgcttccttcatcacacagtattccacgggacaggtcagcgtggagatcgagtgggagctgcagaaggagaacagcaaacgctggaaccccgagatccagtacacttccaactacaacaaatctgttaatgtggactttactgtggacgctaatggtgtgtattcagagcctcgccccattggcaccagatacctgactcgtaatctgtaa

SEQ ID NO: 1305 - DNA, 2208 bp, Artificial Sequence
  Synthetic Polynucleotide
atggctgccgatggttatcttccagattggctcgaggacactctctctgaaggaataagacagtggtggaagctcaaacctggcccaccaccaccaaggcccgcagagcggcatcaggacgacagcaggggtcttgtgcttcctgggtacaagtacctcggacccttcaacggactcgacaaaggagagccggtcaacgaggcagacgctgcggccctcgagcacgacaaggcctacgaccggcagctcgacagcggagacaacccgtacctcaagtacaaccacgccgacgcggagtttcaggagcgtcttaaagaagatacgtcttttgggggcaacctcggacgagcagtcttccaggcgaaaaagagggttcttgaacctctgggcctggttgaggaacctgttaagacggctccgggaaaaaagaggccggtagagcactctcctgcggagccagactcctcctcgggaaccggaaaagcgggccagcagcctgcaagaaagagattgaatttcggtcagactggagacgcagactccgtacctgacccccggcctctcggacagccaccagcagcccccacaagtttgggatctactacaatggctacaggcagtggcgcaccaatggcagacaataacgagggtgccgatggagtgggtaattcctcaggaaattggcattgcgattcccaatggctgggcgacagagtcatcaccaccagcacccgaacctgggccctgcccacctacaacaaccacctctacaagcaaatctccagccaatcaggagcatcgaacgacaaccactactttggctacagcaccccttgggggtattttgacttcaacagattccactgtcacttctccccacgtgactggcaaagactcatcaacaacaactggggattccgacccaagagactcaacttcaagctctttaacattcaagtcaaagaggtcacgcagaatgacggtacgacgacgattgccaataaccttaccagcacggttcaggtgtttactgactcggagtaccagctcccgtacgtcctcggctcggcgcatcaaggatgcctcccgccgtttccagcggacgtcttcatggtcccacagtatggatacctcaccctgaacaacgggagtcaggcggtaggacgctcttccttttactgcctggagtactttccttctcagatgctgcgtaccggaaacaactttaccttcagctacacctttgaggacgtgcccttccacagcagctacgctcacagccagagtttggaccggctgatgaatcctctgatcgaccagtatctgtattatctgaacaggacacaatcaaatagtggaactcttcagcagtctaggctactgtttagccaagctggacccaccagcatgtcccttcaagctaaaaactggctgcctggaccttgctacagacagcagcgtctgtcaaagcaggcaaacgacaacaacaacagcaactttccctggactgcggctacaaagtatcatctaaatggtcgggactcgttggttaatccaggaccagctatggccagccacaaagacgatgaagaaaagtttttccccatgcatggaaccctgatatttggtaaacaaggaacaaatgctaacgacgcggatttggaacatgtcatgattacagatgaagaagaaatcaggaccaccgatcccgtggctacagagcagtacggaaacgtgtcaaataatttgcaaaactcaaatactggtccaactacagaaaatgtcaatcaccagggagcgttacctggtatggtgtggcaggatcgagacgtgtacctgcagggacccatttgggccaagattcctcacaccgacggacactttcacccttctccactgatgggaggttttggactcaaacacccgcctcctcaaatcatgatcaaaaacactcctgttccagccaatcctcctacaaacttcagcgcggcaaagtttgcttccttcatcacacagtattccacgggacaggtcagcgtggagatcgagtgggagctgcagaaggagaacagcaaacgctggaaccccgagatccagtacacttccaactacaacaaatctgttaatgtggactttactgtggacgctaatggtgtgtattcagagcctcgccccattggcaccagatacctgactcgtaatctgtaa

SEQ ID NO: 1306 - DNA, 2208 bp, Artificial Sequence
  Synthetic Polynucleotide
atggctgccgatggttatcttccagattggctcgaggacactctctctgaaggaataagacagtggtggaagctcaaacctggcccaccaccaccaaggcccgcagagcggcatcaggacgacagcaggggtcttgtgcttcctgggtacaagtacctcggacccttcaacggactcgacaaaggagagccggtcaacgaggcagacgctgcggccctcgagcacgacaaggcctacgaccggcagctcgacagcggagacaacccgtacctcaagtacaaccacgccgacgcggagtttcaggagcgtcttaaagaagatacgtcttttgggggcaacctcggacgagcagtcttccaggcgaaaaagagggttcttgaacctctgggcctggttgaggaacctgttaagacggctccgggaaaaaagaggccggtagagcactctcctgcggagccagactcctcctcgggaaccggaaaagcgggccagcagcctgcaagaaagagattgaatttcggtcagactggagacgcagactccgtacctgacccccagcctctcggacagccaccagcagcccccacaagtttgggatctactacaatggctacaggcagtggcgcaccaatggcagacaataacgagggtgccgatggagtgggtaattcctcaggaaattggcattgcgattcccaatggctgggcgacagagtcatcaccaccagcacccgaacctgggccctgcccacctacaacaaccacctctacaagcaaatctccagccaatcaggagcatcgaacgacaaccactactttggctacagcaccccttgggggtattttgacttcaacagattccactgtcacttctccccacgtgactggcaaagactcatcaacaacaactggggattccgacccaagagactcaacttcaagctctttaacattcaagtcaaagaggtcacgcagaatgacggtacgacgacgattgccaataaccttaccagcacggttcaggtgtttactgactcggagtaccagctcccgtacgtcctcggctcggcgcatcaaggatgcctcccgccgtttccagcggacgtcttcatggtcccacagtatggatacctcaccctgaacaacgggagtcaggcggtaggacgctcttccttttactgcctggagtactttccttctcagatgctgcgtaccggaaacaactttaccttcagctacacctttgaggacgtgcccttccacagcagctacgctcacagccagagtttggaccggctgatgaatcctctgatcgaccagtatctgtattatctgaacaggacacaatcaaatagtggaactcttcagcagtctaggctactgtttagccaagctggacccaccagcatgtcccttcaagctaaaaactggctgcctggaccttgctacagacagcagcgtctgtcaaagcaggcaaacgacaacaacaacagcaactttccctggactgcggctacaaagtatcatctaaatggtcgggactcgttggttaatccaggaccagctatggccagccacaaagacgatgaagaaaagtttttccccatgcatggaaccctgatatttggtaaacaaggaacaaatgctaacgacgcggatttggaacatgtcatgattacagatgaagaagaaatcaggaccaccaatcccgtggctacagagcagtacggaaacgtgtcaaataatttgcaaaactcaaatactggtccaactacaggaaatgtcaatcaccagggagcgttacctggtatggtgtggcaggatcgagacgtgtacctgcagggacccatttgggccaagattcctcacaccgacggacactttcacccttctccactgatgggaggttttggactcaaacacccgcctcctcaaatcatgatcaaaaacactcctgttccagccaatcctcctacaaacttcagcgcggcaaagtttgcttccttcatcacacagtattccacgggacaggtcagcgtggagatcgagtgggagctgcagaaggagaacagcaaacgctggaaccccgagatccagtacacttccaactacaacaaatctgttaatgtggactttactgtggacgctaatggtgtgtattcagagcctcgccccattggcaccagatacctgactcgtaatctgtaa

SEQ ID NO: 1307 - DNA, 2208 bp, Artificial Sequence
  Synthetic Polynucleotide
atggctgccgatggttatcttccagattggctcgaggacactctctctgaaggaataagacagtggtggaagctcaaacctggcccaccaccaccaaggcccgcagagcggcatcaggacgacagcaggggtcttgtgcttcctgggtacaagtacctcggacccttcaacggactcgacaaaggagagccggtcaacgaggcagacgctgcggccctcgagcacgacaaggcctacgaccggcagctcgacagcggagacaacccgtacctcaagtacaaccacgccgacgcggagtttcaggagcgtcttaaagaagatacgtcttttgggggcaacctcggacgagcagtcttccaggcgaaaaagagggttcttgaacctctgggcctggttgaggaacctgttaagacggctccgggaaaaaagaggccggtagagcactctcctgcggagccagactcctcctcgggaaccggaaaagcgggccagcagcctgcaagaaagagattgaatttcggtcagactggagacgcagactccgtacctgacccccagcctctcggacagccaccagcagcccccacaagtttgggatctactacaatggctacaggcagtggcgcaccaatggcagacaataacgagggtgccgatggagtgggtaattcctcaggagattggcattgcgattcccaatggctgggcgacagagtcatcaccaccagcacccgaacctgggccctgcccacctacaacaaccacctctacaagcaaatctccagccaatcaggagcatcgaacgacaaccactactttggctacagcaccccttgggggtattttgacttcaacagattccactgtcacttctccccacgtgactggcaaagactcatcaacaacaactggggattccgacccaagagactcaacttcaagctctttaacattcaagtcaaagaggtcacgcagaatgacggtacgacgacgattgccaataaccttaccagcacggttcaggtgtttactgactcggagtaccagctcccgtacgtcctcggctcggcgcatcaaggatgcctcccgccgtttccagcggacgtcttcatggtcccacagtatggatacctcaccctgaacaacgggagtcaggcggtaggacgctcttccttttactgcctggagtactttccttctcagatgctgcgtaccggaaacaactttaccttcagctacacctttgaggacgtgcccttccacagcagctacgctcacagccagagtttggaccggctgatgaatcctctgatcgaccagtatctgtattatctgaacaggacacaatcaaatagtggaactcttcagcagtctaggctactgtttagccaagctggacccaccagcatgtcccttcaagctaaaaactggctgcctggaccttgctacagacagcagcgtctgtcaaagcaggcaaacgacaacaacaacagcaactttccctggactgcggctacaaagtatcatctaaatggtcgggactcgttggttaatccaggaccagctatggccagccacaaagacgatgaagaaaagtttttccccatgcatggaaccctgatatttggtaaacaaggaacaaatgctaacgacgcggatttggaacatgtcatgattacagatgaagaagaaatcaggaccaccaatcccgtggctacagagcagtacggaaacgtgtcaaatagtttgcaaaactcaaatactggtccaactacagaaaatgtcaatcaccagggagcgttacctggtatggtgtggcaggatcgagacgtgtacctgcagggacccatttgggccaagattcctcacaccgacggacactttcacccttctccactgatgggaggttttggactcaaacacccgcctcctcaaatcatgatcaaaaacactcctgttccagccaatcctcctacaaacttcagcgcggcaaagtttgcttccttcatcacacagtattccacgggacaggtcagcgtggagatcgagtgggagctgcagaaggagaacagcaaacgctggaaccccgagatccagtacacttccaactacaacaaatctgttaatgtggactttactgtggacgctaatggtgtgtattcagagcctcgccccattggcaccagatacctgactcgtaatctgtaa

SEQ ID NO: 1308 - DNA, 2208 bp, Artificial Sequence
  Synthetic Polynucleotide
atggctgccgatggttatcttccagattggctcgaggacattctctctgaaggaataagacagtggtggaagctcaaacctggcccaccaccaccaaagcccgcagagcggcataaggacgacagcaggggtcttgtgcttcctgggtacaagtacctcggacccttcaacggactcgacaaaggagagccggtcaacgaggcagacgccgcggccctcgagcacgacaaggcctacgaccggcagctcgacagcggagacaacccgtacctcaagtacaaccacgccgacgcggagtttcaggagcgtcttaaagaagatacgtcttttgggggcaacctcggacgagcagtcttccaggcaaaaaagagggttcttgaacctctgggcctggttgaggaacctgttaagacgactccgggaaaaaagaggccggtagagcaatctcctgcggagccagactcctcctcgggaaccggaaaggcgggcaaccagcctgcaagaaagagattgaattttggtcagactggagacgcagactccgtacctgacccccagcctctcggacagccaccagcagccccctctggtctgggatctactacaatggctacaggcagtggcgcaccaatggcagacaataacgagggtgccgatggagtgggtaattcctcaggaaattggcattgcgattcccaatggttgggcgacagagtcatcaccaccagcacccgaacctgggccctgcccacctacaacaatcacctctacaagcaaatctccagccaatcaggagccagcaacgacaaccactactttggctacagcaccccctgggggtattttgacttcaacagattccactgccacttttcaccacgtgactggcaaagactcatcaacaacaactggggattccgacccaaaagactcaacttcaagctctttaacattcaagtcaaagaggtcacgcagaatgacggtacgacgacgattgccaataaccttaccagcacggttcaggtgtttactgactcggagtaccagctcccgtacgtcctcggctcggcgcatcaaggatgcctcccgccgtttccagcggacgtcttcatggtcccacagtatggatacctcaccctgaacaacgggagtcaggcggtaggacgctcttccttttactgcctggagtactttccttctcagatgcttcgtaccggaaacaactttaccttcagttacacctttgaagacgttcctttccacagcagctacgctcacagtcaaagtctggaccggctgatgaatcctctgatagaccagtacctgtattatctaaacaaaacacaatcaaatagtggaactcttcagcagtctcggctactgtttagtcaagctggacccaccagcatgtctcttcaagctaaaaactggctgcctggaccttgctacagacaacagcgtctgtcaaagcaggcaaacgacaacaacaacagcaactttccctggactgcggctacaaagtatcatctaaatggccgggactcgttggttaatccaggaccagctatggccagccacaaagacgatgaagaaaagtttttccccatgcatggaaccctgatatttggtaaacaaggaacaaatgctaacgacgcggatttggacaatgtcatgattacagatgaagaagaaatccgcaccaccaatcccgtggctacggagcagtacgggactgtgtcaaataatttgcaaaactcaaatactggtccaactactggaactgtcaatcaccaaggagcgttacctggtatggtgtggcaggatcgagacgtgtaccttcagggacccatttgggccaagattcctcacaccgatggacactttcatccttctccactgatgggaggttttggactcaaacacccgcctcctcagatcatgatcaaaaacactcccgttccagccaatcctcctacaaacttcagttctgccaagtttgcttctttcatcacacagtattccacggggcaggtcagcgtggagatagagtgggagctgcagaaggagaacagcaaacgctggaaccccgagatccagtatacttccaactacaacaagtctgttaatgtggactttactgtggacactaatggtgtgtattcagagcctcgccccattggcaccagatacctgactcgtaatctgtaa

SEQ ID NO: 1309 - DNA, 2208 bp, Artificial Sequence
  Synthetic Polynucleotide
atggctgccgatggttatcttccagattggctcgaggacattctctctgaaggaataagacagtggtggaagctcaaacctggcccaccaccaccaaagcccgcagagcggcataaggacgacagcaggggtcttgtgcttcctgggtacaagtacctcggacccttcaacggactcgacaaaggagagccggtcaacgaggcagacgccgcggccctcgagcacgacaaggcctacgaccggcagctcgacagcggagacaacccgtacctcaagtacaaccacgccgacgcggagtttcaggagcgtcttaaagaagatacgtcttttgggggcaacctcggacgagcagtcttccaggcaaaaaagagggttcttgaacctctgggcctggttgaggaacctgttaagacggctccgggaaaaaagaggccggtagagcaatctcctgcggagccagactcctcctcgggaaccggaaaggcgggcaaccagcctgcaagaaagagattgaattttggtcagactggagacgcagactccgtacctgacccccagcctctcggacagccaccagcagccccctctggtctgggatctactacaatggctacaggcagtggcgcaccaatggcagacaataacgagggtgccgatggagtgggtaattcctcaggaaattggcattgcgattcccaatggttgggcgacagagtcatcaccaccagcacccgaacctgggccctgcccacctacaacaatcacctctacaagcaaatctccagccaatcaggagccagcaacgacaaccactactttggctacagcaccccctgggggtattttgacttcaacagattccactgccacttttcaccacgtgactggcaaagactcatcaacaacaactggggattccgacccaaaagactcaacttcaagctctttaacattcaagtcaaagaggtcacgcagaatgacggtacgacgacgattgccaataaccttaccagcacggttcaggtgtttactgactcggagtaccagctcccgtacgtcctcggctcggcgcatcaaggatgcctcccgccgtttccagcggacgtcttcatggtcccacagtatggatacctcaccctgaacaacgggagtcaggcggtaggacgctcttccttttactgcctggagtactttccttctcagatgcttcgtaccggaaacaactttaccttcagttacacctttgaagacgttcctttccacagcagctacgctcacagtcaaagtctggaccggctgatgaatcctctgatagaccagtacctgtattatctaaacaaaacacaatcaaatagtggaactcttcagcagtctcggctactgtttagtcaagctggacccaccagcatgtctcttcaagctaaaaactggctgcctggaccttgctacagacaacagcgtctgtcaaagcaggcaaacgacaacaacaacagcaactttccctggactgcggctacaaagtatcatctaaatggccgggactcgttggttaatccaggaccagctatggccagccacaaagacgatgaagaaaagtttttccccatgcatggaaccctgatatttggtaaacaaggaacaaatgctaacgacgcggatttggacaatgtcatgattacagatgaagaagaaatccgcaccaccaatcccgtggctacggagcagtacgggactgtgtcaaataatttgcaaaactcaaatactggtccaactactggaactgtcaatcaccaaggagcgttacctggtatggtgtggcaggatcgagacgtgtaccttcagggacccatttgggccaagattcctcacaccgatggacactttcatccttctccactgatgggaggttttggactcaaacacccgcctcctcagatcatgatcaaaaacactcccgttccagccaatcctcctacaaacttcagttctgccaagtttgcttctttcatcacacagtattccacggggcaggtcagcgtggagatagagtgggagctgcagaaggagaacagcaaacgctggaaccccgagatccagtatacttccaactacaacaagtctgttaatgtggactttactgtggacactaatggtgtgtattcagagcctcgccccattggcaccagatacctgactcgtaatctgtaa

SEQ ID NO: 1310 - DNA, 2208 bp, Artificial Sequence
  Synthetic Polynucleotide
atggctgccgatggttatcttccagattggctcgaggacattctctctgaaggaataagacagtggtggaagctcaaacctggcccaccaccaccaaagcccgcagagcggcataaggacgacagcaggggtcttgtgcttcctgggtacaagtacctcggacccttcaacggactcgacaaaggagagccggtcaacgaggcagacgccgcggccctcgagcacgacaaggcctacgaccggcagctcgacagcggagacaacccgtacctcaagtacaaccacgccgacgcggagtttcaggagcgtcttaaagaagatacgtcttttgggggcaacctcggacgagcagtcttccaggcaaaaaagagggttcttgaacctctgggcctggttgaggaacctgttaagacggctccgggaaaaaagaggccggtagagcaatctcctgcggagccagactcctcctcgggaaccggaaaggcgggcaaccagcctgcaagaaagagattgaattttggtcagactggagacgcagactccgtacctgacccccagcctctcggacagccaccagcagccccctctggtctgggatctactacaatggctacaggcagtggcgcaccaatggcagacaataacgagggtgccgatggagtgggtaattcctcaggaaattggcattgcgattcccaatggttgggcgacagagtcatcaccaccagcacccgaacctgggccctgcccacctacaacaatcacctctacaagcaaatctccagccaatcaggagccagcaacgacaaccactactttggctacagcaccccctgggggtattttgacttcaacagattccactgccacttttcaccacgtgactggcaaagactcatcaacaacaactggggattccgacccaaaagactcaacttcaagctctttaacattcaagtcaaagaggtcacgcagaatgacggtacgacgacgattgccaataaccttaccagcacggttcaggtgtttactgactcggagtaccagctcccgtacgtcctcggctcggcgcatcaaggatgcctcccgccgtttccagcggacgtcttcatggtcccacagtatggatacctcaccctgaacaacgggagtcaggcggtaggacgctcttccttttactgcctggagtactttccttctcagatgcttcgtaccggaaacaactttaccttcagttacacctttgaagacgttcctttccacagcggctacgctcacagtcaaagtctggaccggctgatgaatcctctgatagaccagtacctgtattatctaaacaaaacacaatcaaatagtggaactcttcagcagtctcggctactgtttagtcaagctggacccaccagcatgtctcttcaagctaaaaactggctgcctggaccttgctacagacaacagcgtctgtcaaagcaggcaaacgacaacaacaacagcaactttccctggactgcggctacaaagtatcatctaaatggccgggactcgttggttaatccaggaccagctatggccagccacaaagacgatgaagaaaagtttttccccatgcatggaaccctgatatttggtaaacaaggaacaaatgctaacgacgcggatttggacaatgtcatgattacagatgaagaagaaatccgcaccaccaatcccgtggctacggagcagtacgggactgtgtcaaataatttgcaaaactcaaatactggtccaactactggaactgtcaatcaccaaggagcgttacctggtatggtgtggcaggatcgagacgtgtaccttcagggacccatttgggccaagattcctcacaccgatggacactttcatccttctccactgatgggaggttttggactcaaacacccgcctcctcagatcatgatcaaaaacactcccgttccagccaatcctcctacaaacttcagttctgccaagtttgcttctttcatcacacagtattccacggggcaggtcagcgtggagatagagtgggagctgcagaaggagaacagcaaacgctggaaccccgagatccagtatacttccaactacaacaagtctgttaatgtggactttactgtggacactaatggtgtgtattcagagcctcgccccattggcaccagatacctgactcgtaatctgtaa

SEQ ID NO: 1311 - DNA, 2205 bp, Artificial Sequence
  Synthetic Polynucleotide
atggctgccgatggttatcttccagattggctcgaggacattctctctgaaggaataagacagtggtggaagctcaaacctggcccaccaccaaagcccgcagagcggcataaggacgacagcaggggtcttgtgcttcctgggtacaagtacctcggacccttcaacggactcgacaaaggagagccggtcaacgaggcagacgccgcggccctcgagcacgacaaggcctacgaccggcagctcgacagcggagacaacccgtacctcaagtacaaccacgccgacgcggagtttcaggagcgtcttaaagaagatacgtcttttgggggcaacctcggacgagcagtcttccaggcaaaaaagagggttcttgaacctctgggcctggttgaggaacctgttaagacggctccgggaaaaaagaggccggtagagcaatctcctgcggagccagactcctcctcgggaaccggaaaggcgggcaaccagcctgcaagaaagagattgaattttggtcagactggagacgcagactccgtacctgacccccagcctctcggacagccaccagcagccccctctggtctgggatctactacaatggctacaggcagtggcgcaccaatggcagacaataacgagggtgccgatggagtgggtaattcctcaggaaattggcattgcgattcccaatggttgggcgacagagtcatcaccaccagcacccgaacctgggccctgcccacctacaacaatcacctctacaagcaaatctccagccaatcaggagccagcaacgacaaccactactttggctacagcaccccctgggggtattttgacttcaacagattccactgccacttttcaccacgtgactggcaaagactcatcaacaacaactggggattccgacccaaaagactcaacttcaagctctttaacattcaagtcaaagaggtcacgcagaatgacggtacgacgacgattgccaataaccttaccagcacggttcaggtgtttactgactcggagtaccagctcccgtacgtcctcggctcggcgcatcaaggatgcctcccgccgtttccagcggacgtcttcatggtcccacagtatggatacctcaccctgaacaacgggagtcaggcggtaggacgctcttccttttactgcctggagtactttccttctcagatgcttcgtaccggaaacaactttaccttcagttacacctttgaagacgttcctttccacagcagctacgctcacagtcaaagtctggaccggctgatgaatcctctgatagaccagtacctgtattatctaaacaaaacacaatcaaatagtggaactcttcagcagtctcggctactgtttagtcaagctggacccaccagcatgtctcttcaagctaaaaactggctgcctggaccttgctacagacaacagcgtctgtcaaagcaggcaaacgacaacaacaacagcaactttccctggactgcggctacaaagtatcatctaaatggccgggactcgttggttaatccaggaccagctatggccagccacaaagacgatgaagaaaagtttttccccatgcatggaaccctgatatttggtaaacaaggaacaaatgctaacgacgcggatttggacaatgtcatgattacagatgaagaagaaatccgcaccaccaatcccgtggctacggagcagtacgggactgtgtcaaataatttgcaaaactcaaatactggtccaactactggaactgtcaatcaccaaggagcgttacctggtatggtgtggcaggatcgagacgtgtaccttcagggacccatttgggccaagattcctcacaccgatggacactttcatccttctccactgatgggaggttttggactcaaacacccgcctcctcagatcatgatcaaaaacactcccgttccagccaatcctcctacaaacttcagttctgccaagtttgcttctttcatcacacagtattccacggggcaggtcagcgtggagatagagtgggagctgcagaaggagaacagcaaacgctggaaccccgagatccagtatacttccaactacaacaagtctgttaatgtggactttactgtggacactaatggtgtgtattcagagcctcgccccattggcaccagatacctgactcgtaatctgtaa

SEQ ID NO: 1312 - DNA, 2208 bp, Artificial Sequence
  Synthetic Polynucleotide
atggctgccgatggttatcttccagattggctcgaggacactctctctgaaggaataagacagtggtggaagctcaaacctggcccaccaccaccaaggcccgcagagcggcatcaggacgacagcaggggtcttgtgcttcctgggtacaagtacctcggacccttcaacggactcgacaaaggagagccggtcaacgaggcagacgctgcggccctcgagcacgacaaggcctacgaccggcagctcgacagcggagacaacccgtacctcaagtacaaccacgccgacgcggagtttcaggagcgtcttaaagaagatacgtcttttgggggcaacctcggacgagcagtcttccaggcgaaaaagagggttcttgaacctctgggcctggttgaggaacctgttaagacggctccgggaaaaaagaggccggtagagcactctcctgcggagccagactcctcctcgggaaccggaaaagcgggccagcagcctgcaagaaagagattgaatttcggtcagactggagacgcagactccgtacctgacccccagcctctcggacagccaccagcagcccccacaagtttgggatctactacaatggctacaggcagtggcgcaccaatggcagacaataacgagggtgccgatggagtgggtaattcctcaggaaattggcattgcgattcccaatggctgggcgacagagtcatcaccaccagcacccgaacctgggccctgcccacctacaacaaccacctctacaagcaaatctccagccaatcaggagcatcgaacgacaaccactactttggctacagcaccccttgggggtattttgacttcaacagattccactgtcacttctccccacgtgactggcaaagactcatcaacaacaactggggattccgacccaagagactcaacttcaagctctttaacattcaagtcaaagaggtcacgcagaatgacggtacgacgacgattgccaataaccttaccagcacggttcaggtgtttactgactcggagtaccagctcccgtacgtcctcggctcggcgcatcaaggatgcctcccgccgtttccagcggacgtcttcatggtcccacagtatggatacctcaccctgaacaacgggagtcaggcggtaggacactcttcctcttactgcctggagtactttccttctcagatgctgcgtaccggaaacaactttaccttcagctacacctttgaggacgtgcctttccacagcagctacgctcacagccagagtttggaccggctgatgaatcctctgatcgaccagtatctgtattatctgaacaggacacaatcaaatagtggaactcttcagcagtctaggctactgtttagccaagctggacccaccagcatgtctcttcaagctaaaaactggctgcctggaccttgctacagacagcagcgtctgtcaaagcaggcaaacgacaacaacaacagcaactttccctggactgcggctacaaagtatcatctaaatggtcgggactcgttggttaatccaggaccagctatggccagccacaaagacgatgaagaaaagtttttccccatgcatggaaccctgatatttggtaaacaaggaacaaatgctaacgacgcggatttggaacatgtcatgattacagatgaagaagaaatcaggaccaccaatcccgtggctacagagcagtacggaaacgtgtcaaataatttgcaaaactcaaatactggtccaactacagaaaatgtcaatcaccagggagcgttacctggtatggtgtggcaggatcgagacgtgtacctgcagggacccatttgggccaagattcctcacaccgacggacactttcacccttctccactgatgggaggttttggactcaaacacccgcctcctcaaatcatgatcaaaaacactcctgttccagccaatcctcctacaaacttcagcgcggcaaagtttgcttccttcatcacacagtattccacgggacaggtcagcgtggagatcgagtgggagctgcagaaggagaacagcaaacgctggaaccccgagatccagtacacttccaactacaacaaatctgttaatgtggactttactgtagacactaatggtgtgtattcagagcctcgccccattggcaccagatacctgactcgtaatctgtaa

SEQ ID NO: 1313 - DNA, 2208 bp, Artificial Sequence
  Synthetic Polynucleotide
atggctgccgatggttatcttccagattggctcgaggacactctctctgaaggaataagacagtggtggaagctcaaacctggcccaccaccaccaaagcccgcagagcggcatcaggacgacagcaggggtcttgtgcttcccgggcacaagtacctcggacccttcaacggactcgacaaaggagagccggtcaacgaggcagacgctgcggccctcgagcacgacaaggcctacgaccggcagctcgacagcggagacaacccgtacctcaagtacaaccacgccgacgcggagtttcaggagcgtcttaaagaagatacgtcttttgggggcaacctcggacgagcagtcttccaggcgaaaaagagggttcttgaacctctgggcctggttgaggaacctgttaagacggctccgggaaaaaagaggccggtagagcactctcctgcggagccagactcctcctcgggaaccggaaaagcgggccagcagcctgcaagaaagagattgaatttcggtcagactggagacgcagactccgtacctgacccccagcctctcggacagccaccagcagcccccacaagtttgggatctactacaatggctacaggcagtggcgcaccaatggcagacaataacgagggtgccgatggagtgggtaattcctcaggaaattggcattgcgattcccaatggctgggcgacagagtcatcaccaccagcacccgaacctgggccctgcccacctacaacaaccacctctataagcaaatctccagccaatcaggagcatcgaacgacaaccactactttggctacagcaccccttgggggtattttgacttcaacagattccactgtcacttctccccacgtgactggcaaagactcatcaacaacaactggggattccgacccaagagactcaacttcaagctctttaacattcaagtcaaagaggtcacgcagaatgacggtacgacgacgattgccaataaccttaccagcacggttcaggtgtttactgactcggagtaccagctcccgtacgtcctcggctcggcgcatcaaggatgcctcccgccgtttccagcggacgtcttcatggtcccacagtatggatacctcaccctgaacaacgggagtcaggcggtaggacgctcttccttttactgcctggagtactttccttctcagatgctgcgtaccggaaacaactttaccttcagctacacctttgaggacgtgcccttccacagcagctacgctcacagccagagtttggaccggctgatgaatcctctgatcgaccagtatctgtattatctgaacaggacacaatcaaatagtggaactcttcagcagtctaggctactgtttagccaagctggacccaccagcatgtcccttcaagctaaaaactggctgcctggaccttgctacagacagcagcgtctgtcaaagcaggcaaacgacaacaacaacagcaactttccctggactgcggctacaaagtatcatctaaatggtcgggactcgttggttaatccaggaccagctatggccagccacaaagacgatgaagaaaagtttttccccatgcatggaaccctgatatttggtaaacaaggaacaaatgctaacgacgcggatttggaacatgtcatgattacagatgaagaagaaatcaggaccaccaatcccgtggctacagagcagtacggaaacgtgtcaaataatttgcaaaactcaaatactggtccaactacagaaaatgtcaatcaccagggagcgttacctggtatggtgtggcaggatcgagacgtgtacctgcagggacccatttgggccaagattcctcacaccgacggacactttcacccttctccactgatgggaggttttggactcaaacacccgcctcctcaaatcatgatcaaaaacactcctgttccagccaatcctcctacaaacttcagcgcggcaaagtttgcttccttcatcacacagtattccacgggacaggtcagcgtggagatcgagtgggagctgcagaaggagaacagcaaacgctggaaccccgagatccagtacacttccaactacaacaaatctgttaatgtggactttactgtggacgctaatggtgtgtattcagagcctcgccccattggcaccagatacctgactcgtaatctgtaa

SEQ ID NO: 1314 - DNA, 2208 bp, Artificial Sequence
  Synthetic Polynucleotide
atggctgccgatggttatcttccagattggctcgaggacactctctctgaaggaataagacagtggtggaagctcaaacctggcccaccaccgccaaagcccgcagagcggcataaggacgacagcaggggtcttgtgcttcctgggtacaagtacctcggacccttcaacggactcgacaagggagagccggtcaacgaggcagacgccgcggccctcgagcacgacaaggcctacgaccggcagctcgacagcggagacaacccgtacctcaagtacaaccacgccgacgcggagtttcaggagcgccttaaagaagatacgtcttttgggggcaacctcggacgagcagtcttccaggcgaaaaagagggttcttgaacctctgggcctggttgaggaacctgttaagacggctccgggaaaaaagaggccggtagagcactctcctgcggagccagactcctcctcgggaaccggaaaagcgggccagcagcctgcaagaaagagattgaatttcggtcagactggagacgcagactccgtacctgacccccagcctctcggacagccaccagcagcccccacaagtttgggatctactacaatggctacaggcagtggcgcaccaatggcagacaataacgagggtgccgatggagtgggtaattcctcaggaaattggcattgcgattcccaatggctgggcgacagagtcatcaccaccagcacccgaacctgggccctgcccacctacaacaaccacctctacaagcaaatctccagccaatcaggagcatcgaacgacaaccactactttggctacagcaccccttgggggtattttgacttcaacagattccactgtcacttctccccacgtgactggcaaagactcatcaacaacaactggggattccgacccaagagactcaacttcaagctctttaacattcaagtcaaagaggtcacgcagaatgacggtacgacgacgattgccaataaccttaccagcacggttcaggtgtttactgactcggagtaccagctcccgtacgtcctcggctcggcgcatcaaggatgcctcccgccgtttccagcggacgtcttcatggtcccacagtatggatacctcaccctgaacaacgggagtcaggcggtaggacgctcttccttttactgcctggagtactttccttctcagatgctgcgtaccggaaacaactttaccttcagctacacctttgaggacgtgcccttccacagcagctacgctcacagccagagtttggaccggctgatgaatcctctgatcgaccagtatctgtattatctgaacaggacacaatcaaatagtggaactcttcagcagtctaggctactgtttagccaagctggacccaccagcatgtcccttcaagctaaaaactggctgcctggaccttgctacagacagcagcgtctgtcaaagcaggcaaacgacaacaacaacagcaactttccctggactgcggctacaaagtatcatctaaatggtcgggactcgttggttaatccaggaccagctatggccagccacaaagacgatgaagaaaagtttttccccatgcatggaaccctgatatttggtaaacaaggaacaaatgctaacgacgcggatttggaacatgtcatgattacagatgaagaagaaatcaggaccaccaatcccgtggctacagagcagtacggaaacgtgtcaaataatttgcaaaactcaaatactggtccaactacagaaaatgtcaatcaccagggagcgttacctggtatggtgtggcaggatcgagacgtgtacctgcagggacccatttgggccaagattcctcacaccgacggacactttcacccttctccactgatgggaggttttggactcaaacacccgcctcctcaaatcatgatcaaaaacactcctgttccagccaatcctcctacaaacttcagcgcggcaaagtttgcttccttcatcacacagtattccacgggacaggtcagcgtggagatcgagtgggagctgcagaaggagaacagcaaacgctggaaccccgagatccagtacacttccaactacaacaaatctgttaatgtggactttactgtggacgctaatggtgtgtattcagagcctcgccccattggcaccagatacctgactcgtaatctgtaa

SEQ ID NO: 1315 - DNA, 2208 bp, Artificial Sequence
  Synthetic Polynucleotide
atggctgccgatggttatcttccagattggctcgaggacactctctctgaaggaataagacagtggtggaagctcaaacctggcccaccaccaccaaggcccgcagagcggcatcaggacgacagcaggggtcttgtgcttcctgggtacaagtacctcggacccttcaacggactcgacaaaggagagccggtcaacgaggcagacgctgcggccctcgagcacgacaaggcctacgaccggcagctcgacagcggagacaacccgtacctcaagtacaaccacgccgacgcggagtttcaggagcgtcttaaagaagatacgtcttttgggggcaacctcggacgagcagtcttccaggcgaaaaagagggttcttgaacctctgggcctggttgaggaacctgttaagacggctccgggaaaaaagaggccggtagagcactctcctgcggagccagactcctcctcgggaaccggaaaagcgggccagcagcctgcaagaaagagattgaatttcggtcagactggagacgcagactccgtacctgacccccagcctctcggacagccaccagcagcccccacaagtttgggatctactacaatggctacaggcagtggcgcaccaatggcagacaataacgagggtgccgatggagtgggtaattcctcaggaaattggcattgcgattcccaatggctgggcgacagagtcatcaccaccagcacccgaacctgggccctgcccacctacaacaaccacctctacaagcaaatctccagccaatcaggagcatcgaacgacaaccactactttggctacagcaccccttgggggtattttgacttcaacagattccactgtcacttctccccacgtgactggcaaagactcatcaacaacaactggggattccgacccaagagactcaacttcaagctctttaacattcaagtcaaagaggtcacgcagaatgacggtacgacgacgattgccaataaccttaccagcacggttcaggtgtttactgactcggagtaccagctcccgtacgtcctcggctcggcgcatcaaggatgcctcccgccgtttccagcggacgtcttcatggtcccacagtatggatacctcaccctgaacaacgggagtcaggcggtaggacgctcttcctcttactgcctggagtactttccttctcagatgctgcgtaccggaaacaactttaccttcagctacacctttgaggacgtgcccttccacagcagctacgctcacagccagagtttggaccggctgatgaatcctctgatcgaccagtatctgtattatctgaacaggacacaatcaaatagtggaactcttcagcagtctaggctactgtttagccaagctggacccaccagcatgtcccttcaagctaaaaactggctgcctggaccttgctacagacagcagcgtctgtcaaagcaggcaaacgacaacaacaacagcaactttccctggactgcggctacaaagtatcatctaaatggtcgggactcgttggttaatccaggaccagctatggccagccacaaagacgatgaagaaaagtttttccccatgcatggaaccctgatatttggtaaacaaggaacaaatgctaacgacgcggatttggaacatgtcatgattacagatgaagaagaaatcaggaccaccaatcccgtggctacagagcagtacggaaacgtgtcaaataatttgcaaaactcaaatactggtccaactacagaaaatgtcaatcaccagggagcgttacctggtatggtgtggcaggatcgagacgtgtacctgcagggacccatttgggccaagattcctcacaccgacggacactttcacccttctccactgatgggaggttttggactcaaacacccgcctcctcaaatcatgatcaaaaacactcctgttccagccaatcctcctacaaacttcagcgcggcaaagtttgcttccttcatcacacagtattccacgggacaggtcagcgtggagatcgagtgggagctgcagaaggagaacagcaaacgctggaaccccgagatccagtacacttccaactacaacaaatctgttaatgtggactttactgtggacgctaatggtgtgtattcagagcctcgccccattggcaccagatacctgactcgtaatctgtaa

SEQ ID NO: 1316 - DNA, 2208 bp, Artificial Sequence
  Synthetic Polynucleotide
atggctgccgatggttatcttccagattggctcgaggacactctctctgaaggaataagacagtggtggaagctcaaacctggcccaccaccaccaaggcccgcagagcggcatcaggacgacagcaggggtcttgtgcttcctgggtacaagtacctcggacccttcaacggactcgacaaaggagagccggtcaacgaggcagacgctgcggccctcgagcacgacaaggcctacgaccggcagctcgacagcggagacaacccgtacctcaagtacaaccacgccgacgcggagtttcaggagcgtcttaaagaagatacgtcttttgggggcaacctcggacgagcagtcttccaggcgaaaaagagggttcttgaacctctgggcctggttgaggaacctgttaagacggctccgggaaaaaagaggccggtagagcactctcctgcggagccagactcctcctcgggaaccggaaaagcgggccagcagcctgcaagaaagagattgaatttcggtcagactggagacgcagactccgtacctgacccccagcctctcggacagccaccagcagcccccacaagtttgggatctactacaatggctacaggcagtggcgcaccaatggcagacaataacgagggtgccgatggagtgggtaattcctcaggaaattggcattgcgattcccaatggctgggcgacagagtcatcaccaccagcacccgaacctgggccctgcccacctacaacaaccacctctacaagcaaatctccagccaatcaggagcatcgaacgacaaccactactttggctacagcaccccttgggggtattttgacttcaacagattccactgtcacttctccccacgtgactggcaaagactcatcaacaacaactggggattccgacccaagagactcaacttcaagctctttaacattcaagtcaaagaggtcacgcagaatgacggtacgacgacgattgccaataaccttaccagcacggttcaggtgtttactgactcggagtaccagctcccgtacgtcctcggctcggcgcatcaaggatgcctcccgccgtttccagcggacgtcttcatggtcccacagtatggatacctcaccctgaacaacgggagtcaggcggtaggacgctcttccttttactgcctggagtactttccttctcagatgctgcgtaccggaaacaactttaccttcagctacacctttgaggacgtgcccttccacagcagctacgctcacagccagagtttggaccggctgatgaatcctctgatcgaccagtatctgtattatccgaacaggacacaatcaaatagtggaactcttcagcagtctaggctactgtttagccaagctggacccaccagcatgtcccttcaagctaaaaactggctgcctggaccttgctacagacagcagcgtctgtcaaagcaggcaaacgacaacaacaacagcaactttccctggactgcggctacaaagtatcatctaaatggtcgggactcgttggttaatccaggaccagctatggccagccacaaagacgatgaagaaaagtttttccccatgcatggaaccctgatatttggtaaacaaggaacaaatgctaacgacgcggatttggaacatgtcatgattacagatgaagaagaaatcaggaccaccaatcccgtggctacagagcagtacggaaacgtgtcaaataatttgcaaaactcaaatactggtccaactacagaaaatgtcaatcaccagggagcgttacctggtatggtgtggcaggatcgagacgtgtacctgcagggacccatttgggccaagattcctcacaccgacggacactttcacccttctccactgatgggaggttttggactcaaacacccgcctcctcaaatcatgatcaaaaacactcctgttccagccaatcctcctacaaacttcagcgcggcaaagtttgcttccttcatcacacagtattccacgggacaggtcagcgtggagatcgagtgggagctgcagaaggagaacagcaaacgctggaaccccgagatccagtacacttccaactacaacaaatctgttaatgtggactttactgtggacgctaatggtgtgtattcagagcctcgccccattggcaccagatacctgactcgtaatctgtaa

SEQ ID NO: 1317 - DNA, 2208 bp, Artificial Sequence
  Synthetic Polynucleotide
atggctgccgatggttatcttccagattggctcgaggacactctctctgaaggaataagacagtggtggaagctcaaacctggcccaccaccaccaaggcccgcagagcggcatcaggacgacagcaggggtcttgtgcttcctgggtacaagtacctcggacccttcaacggactcgacaaaggagagccggtcaacgaggcagacgctgcggccctcgagcacgacaaggcctacgaccggcagctcgacagcggagacaacccgtacctcaagtacaaccacgccgacgcggagtttcaggagcgtcttaaagaagatacgtcttttgggggcaacctcggacgagcagtcttccaggcgaaaaagagggttcttgaacctctgggcctggttgaggaacctgttaagacggctccgggaaaaaagaggccggtagagcactctcctgcggagccagactcctcctcgggaaccggaaaagcgggccagcagcctgcaagaaagagattgaatttcggtcagactggagacgcagactccgtacctgacccccagcctctcggacagccaccagcagcccccacaagtttgggatctactacaatggctacaggcagtggcgcaccaatggcagacaataacgagggtgccgatggagtgggtaattcctcaggaaattggcattgcgattcccaatggctgggcgacagagtcatcaccaccagcacccgaacctgggccctgcccacctacaacaaccacctctacaagcaaatctccagccaatcaggagcatcgaacgacaaccactactttggctacagcaccccttgggggtattttgacttcaacagattccactgtcacttctccccacgtgactggcaaagactcatcaacaacaactggggattccgacccaagagactcaacttcaagctctttaacattcaagtcaaagaggtcacgcagaatgacggtacgacgacgattgccaataaccttaccagcacggttcaggtgtttactgactcggagtaccagctcccgtacgtcctcggctcggcgcatcaaggatgcctcccgccgtttccagcggacgtcttcatggtcccacagtatggatacctcaccctgaacaacgggagtcaggcggtaggacgctcttccttttactgcctggagtactttccttctcagatgcttcgtaccggaaacaactttaccttcagttacacctttgaagacgttcctttccacagcagctacgctcacagtcaaagtctggaccggctgatgaatcctcttatcgaccagtacctgtattatctaaacaaaacacaatcaaatagtggaactcttcagcagtctcggctactgtttagtcaagctggacctaccagcatgtctcttcaagctaaaaactggctgcctggaccttgctacagacaacagcgtctgtcaaagcaggcaaacgacaacaacaacagcaactttccctggactgcggctacaaagtatcatctaaatggccgggactcgttggttaatccaggaccagctatggccagccacaaagacgatgaagaaaagtttttccccatgcatggaaccctgatatttggcaaacaagggacaaatgctaacgacgcggatttggacaatgtcatgattacagatgaagaagaaatccgtaccaccaatcccgtggctacggagcagtacgggactgtgtcaaataatttgcaaaactcaaatactggtccaactactggaactgtcaatcaccaaggagcgttacctggtatggtgtggcaggatcgagacgtgtaccttcagggacccatttgggccaagattcctcacaccgatggacactttcacccttctccgctgatgggaggttttggactcaaacacccgcctcctcagatcatgatcaaaaacactcccgttccagccaatcctcccacaaacttcagttctgccaagtttgcttctttcatcacacagtattccacgggacaggttagcgtggagatcgagtgggagctgcagaaggagaacagcaaacgctggaaccccgagatccagtacacttccaactacaacaagtctgttaatgtggactttactgtggacactaatggtgtgtattcagagcctcgccccattggcaccagatacctgactcgtaatctgtaa

SEQ ID NO: 1318 - DNA, 2208 bp, Artificial Sequence
  Synthetic Polynucleotide
atggctgccgatggttatcttccagattggctcgaggacactctctctgaaggaataagacagtggtggaagctcaaacctggcccaccaccaccaaagcccgcagagcggcatcaggacgacagcaggggtcttgtgcttcccgggcacaagtacctcggacccttcaacggactcgacaaaggagagccggtcaacgaggcagacgctgcggccctcgagcacgacaaggcctacgaccggcagctcgacagcggagacaacccgtacctcaagtacaaccacgccgacgcggagtttcaggagcgtcttaaagaagatacgtcttttgggggcaacctcggacgagcagtcttccaggcgaaaaagagggttcttgaacctctgggcctggttgaggaacctgttaagacggctccgggaaaaaagaggccggtagagcactctcctgcggagccagactcctcctcgggaaccggaaaagcgggccagcagcctgcaagaaagagattgaatttcggtcagactggagacgcagactccgtacctgacccccagcctctcggacagccaccagcagcccccacaagtttgggatctactacaatggctacaggcagtggcgcaccaatggcagacaataacgagggtgccgatggagtgggtaattcctcaggaaattggcattgcgattcccaatggctgggcgacagagtcatcaccaccagcacccgaacctgggccctgcccacctacaacaaccacctctataagcaaatctccagccaatcaggagcatcgaacgacaaccactactttggctacagcaccccttgggggtattttgacttcaacagattccactgtcacttctccccacgtgactggcaaagactcatcaacaacaactggggattccgacccaagagactcaacttcaagctctttaacattcaagtcaaagaggtcacgcagaatgacggtacgacgacgattgccaataaccttaccagcacggttcaggtgtttactgactcggagtaccagctcccgtacgtcctcggctcggcgcatcaaggatgcctcccgccgtttccagcggacgtcttcatggtcccacagtatggatacctcaccctgaacaacgggagtcaggcggtaggacactcttcctcttactgcctggagtactttccttctcagatgctgcgtaccggaaacaactttaccttcagctacacctttgaggacgtgcctttccacagcagctacgctcacagccagagtttggaccggctgatgaatcctctgatcgaccagtatctgtattatctgaacaggacacaatcaaatagtggaactcttcagcagtctaggctactgtttagccaagctggacccaccagcatgtctcttcaagctaaaaactggctgcctggaccttgctacagacagcagcgtctgtcaaagcaggcaaacgacaacaacaacagcaactttccctggactgcggctacaaagtatcatctaaatggtcgggactcgttggttaatccaggaccagctatggccagccacaaagacgatgaagaaaagtttttccccatgcatggaaccctgatatttggtaaacaaggaacaaatgctaacgacgcggatttggaacatgtcatgattacagatgaagaagaaatcaggaccaccaatcccgtggctacagagcagtacggaaacgtgtcaaataatttgcaaaactcaaatactggtccaactacagaaaatgtcaatcaccagggagcgttacctggtatggtgtggcaggatcgagacgtgtacctgcagggacccatttgggccaagattcctcacaccgacggacactttcacccttctccactgatgggaggttttggactcaaacacccgcctcctcaaatcatgatcaaaaacactcctgttccagccaatcctcctacaaacttcagcgcggcaaagtttgcttccttcatcacacagtattccacgggacaggtcagcgtggagatcgagtgggagctgcagaaggagaacagcaaacgctggaaccccgagatccagtacacttccaactacaacaaatctgttaatgtggactttactgtagacactaatggtgtgtattcagagcctcgccccattggcaccagatacctgactcgtaatctgtaa

SEQ ID NO: 1319 - DNA, 2208 bp, Artificial Sequence
  Synthetic Polynucleotide
atggctgccgatggttatcttccagattggctcgaggacactctctctgaaggaataagacagtggtggaagctcaaacctggcccaccaccaccaaggcccgcagagcggcatcaggacgacagcaggggtcttgtgcttcctgggtacaagtacctcggacccttcaacggactcgacaaaggagagccggtcaacgaggtagacgctgcggccctcgagcacgacaaggcctacgaccggcagctcgacagcggagacaacccgtacctcaagtacaaccacgccgacgcggagtttcaggagcgtcttaaagaagatacgtcttttgggggcaacctcggacgagcagtcttccaggcgaaaaagagggttcttgaacctctgggcctggttgaggaacctgttaagacggctccgggaaaaaagaggccggtagagcactctcctgcggagccagactcctcctcgggaaccggaaaagcgggccagcagcctgcaagaaagagattgaatttcggtcagactggagacgcagactccgtacctgacccccagcctctcggacagccaccagcagcccccacaagtttgggatctactacaatggctacaggcagtggcgcaccaatggcagacaataacgagggtgccgatggagtgggtaattcctcaggaaattggcattgcgattcccaatggctgggcgacagagtcatcaccaccagcacccgaacctgggccctgcccacctacaacaaccacctctacaagcaaatctccagccaatcaggagcatcgaacgacaaccactactttggctacagcaccccttgggggtattttgacttcaacagattccactgtcacttctccccacgtgactggcaaagactcatcaacaacaactggggattccgacccaagagactcaacttcaagctctttaacattcaagtcaaagaggtcacgcagagtgacggtacgacgacgattgccaataaccttaccagcacggttcaggtgtttactgactcggagtaccagctcccgtacgtcctcggctcggcgcatcaaggatgcctcccgccgtttccagcggacgtcttcatggtcccacagtatggatacctcaccctgaacaacgggagtcaggcggtaggacgctcttccttttactgcctggagtactttccttctcagatgctgcgtaccggaaacaactttaccttcagctacacctttgaggacgtgcccttccacagcagctacgctcacagccagagtttggaccggctgatgaatcctctgatcgaccagtatctgtattatctgaacaggacacaatcaaatagtggaactcttcagcagtctaggctactgtttagccaagctggacccaccagcatgtcccttcaagctaaaaactggctgcctggaccttgctacagacagcagcgtctgtcaaagcaggcaaacgacaacaacaacagcaactttccctggactgcggctacaaagtatcatctaaatggtcgggactcgttggttaatccaggaccagctatggccagccacaaagacgatgaagaaaagtttttccccatgcatggaaccctgatatttggtaaacaaggaacaaatgctaacgacgcggatttggaacatgtcatgattacagatgaagaagaaatcaggaccaccaatcccgtggctacagagcagtacggaaacgtgtcaaataatttgcaaaactcaaatactggtccaactacagaaaatgtcaatcaccagggagcgttacctggtatggtgtggcaggatcgagacgtgtacctgcagggacccatttgggccaagattcctcacaccgacggacactttcacccttctccactgatgggaggttttggactcaaacacccgcctcctcaaatcatgatcaaaaacactcctgttccagccaatcctcctacaaacttcagcgcggcaaagtttgcttccttcatcacacagtattccacgggacaggtcagcgtggagatcgagtgggagctgcagaaggagaacagcaaacgctggaaccccgagatccagtacacttccaactacaacaaatctgttaatgtggactttactgtggacgctaatggtgtgtattcagagcctcgccccattggcaccagatacctgactcgtaatctgtaa

SEQ ID NO: 1320 - DNA, 2208 bp, Artificial Sequence
  Synthetic Polynucleotide
atggctgccgatggttatcttccagattggctcgaggacactctctctgaaggaataagacagtggtggaagctcaaacctggcccaccaccaccaaggcccgcagagcggcatcaggacgacagcaggggtcttgtgcttcctgggtacaagtacctcggacccttcaacggactcgacaaaggagagccggtcaacgaggcagacgctgcggccctcgagcacgacaaggcctacgaccggcagctcgacagcggagacaacccgtacctcaagtacaaccacgccgacgcggagtttcaggagcgtcttaaagaagatacgtcttttgggggcaacctcggacgagcagtcttccaggcgaaaaagagggttcttgaacctctgggcctggttgaggaacctgttaagacggctccgggaaaaaagaggccggtagagcactctcctgcggagccagactcctcctcgggaaccggaaaagcgggccagcagcctgcaagaaagagattgaatttcggtcagactggagacgcagactccgtacctgacccccagcctctcggacagccaccagcagcccccacaagtttgggatctactacaatggctacaggcagtggcgcaccaatggcagacaataacgagggtgccgatggagtgggtaattcctcaggaaattggcattgcgattcccaatggctgggcgacagagtcatcaccaccagcacccgaacctgggccctgcccacctacaacaaccacctctacaagcaaatctccagccaatcaggagcatcgaacgacaaccactactttggctacagcaccccttgggggtattttgacttcaacagattccactgtcacttctccccacgtgactggcaaagactcatcaacaacaactggggattccgacccaagagactcaacttcaagctctttaacattcaagtcaaagaggtcacgcagaatgacggtacgacgacgattgccaataaccttaccagcacggttcaggtgtttactgactcggagtaccagctcccgtacgtcctcggctcggcgcatcaaggatgcctcccgccgtttccagcggacgtcttcatggtcccacagtatggatacctcaccctgaacaacgggagtcaggcggtaggacgctcttccttttactgcctggagtactttccttctcagatgctgcgtaccggaaacaactttaccttcagctacacctttgaggacgtgcccttccacagcagctacgctcacagccagagtttggaccggctgatgaatcctctgatcgaccagtatctgtattatctgaacaggacacaatcaaatagtggaactcttcagcagtctaggctactgtttagccaagctggacccaccagcatgtcccttcaagctaaaaactggctgcctggaccttgctacagacagcagcgtctgtcaaagcaggcaaacgacaacaacaacagcaactttccctggactgcggctacaaagtatcatctaaatggtcgggactcgttggttaatccaggaccagctatggccagccacaaagacgatgaagaaaagtttttccccatgcatggaaccctgatatttggtaaacaaggaacaaatgctaacgacgcggatttggaacatgtcatgattacagatgaagaagaaatcaggaccaccaatcccgtggctacagagcagtacggaaacgtgtcaaataatttgcaaaactcaaatactggtccaactacagaaaatgtcaatcaccagggagcgttacctggtatggtgtggcaggatcgagacgtgtacctgcagggacccatttgggccaagattcctcacaccgacggacactttcacccttctccactgatgggaggttttggactcaaacacccgcctcctcaaatcatgatcaaaaacactcctgttccagccaatcctcctacaaacttcagcgcggcaaagtttgcttccttcatcacacagtattccacgggacaggtcagcgtggagatcgagtgggagctgcagaaggagaacagcaaacgctggaaccccgagatccagtatacctccaactacaacaagtctgttaatgtggactttactgtggacactaatggcgtgtattcagagcctcgccccattggcacaagatacctgactcgtaatctgtaa

SEQ ID NO: 1321 - DNA, 2208 bp, Artificial Sequence
  Synthetic Polynucleotide
atggctgccgatggttatcttccagattggctcgaggacactctctctgaaggaataagacagtggtggaagctcaaacctggcccaccaccaccaaagcccgcagagcggcatcaggacgacagcaggggtcttgtgcttcccgggcacaagtacctcggacccttcaacggactcgacaaaggagagccggtcaacgaggcagacgctgcggccctcgagcacgacaaggcctacgaccggcagctcgacagcggagacaacccgtacctcaagtacaaccacgccgacgcggagtttcaggagcgtcttaaagaagatacgtcttttgggggcaacctcggacgagcagtcttccaggcgaaaaagagggttcttgaacctctgggcctggttgaggaacctgttaagacggctccgggaaaaaagaggccggtagagcactctcctgcggagccagactcctcctcgggaaccggaaaagcgggccagcagcctgcaagaaagagattgaatttcggtcagactggagacgcagactccgtacctgacccccagcctctcggacagccaccagcagcccccacaagtttgggatctactacaatggctacaggcagtggcgcaccaatggcagacaataacgagggtgccgatggagtgggtaattcctcaggaaattggcattgcgattcccaatggctgggcgacagagtcatcaccaccagcacccgaacctgggccctgcccacctacaacaaccacctctataagcaaatctccagccaatcaggagcatcgaacgacaaccactactttggctacagcaccccttgggggtattttgacttcaacagattccactgtcacttctccccacgtgactggcaaagactcatcaacaacaactggggattccgacccaagagactcaacttcaagctctttaacattcaagtcaaagaggtcacgcagaatgacggtacgacgacgattgccaataaccttaccagcacggttcaggtgtttactgactcggagtaccagctcccgtacgtcctcggctcggcgcatcaaggatgcctcccgccgtttccagcggacgtcttcatggtcccacagtatggatacctcaccctgaacaacgggagtcaggcggtaggacactcttcctcttactgcctggagtactttccttctcagatgctgcgtaccggaaacaactttaccttcagctacacctttgaggacgtgcctttccacagcagctacgctcacagccagagtttggaccggctgatgaatcctctgatcgaccagtatctgtattatctgaacaggacacaatcaaatagtggaactcttcagcagtctaggctactgtttagccaagctggacccaccagcatgtctcttcaagctaaaaactggctgcctggaccttgctacagacagcagcgtctgtcaaagcaggcaaacgacaacaacaacagcaactttccctggactgcggctacaaagtatcatctaaatggtcgggactcgttggttaatccaggaccagctatggccagccacaaagacgatgaagaaaagtttttccccatgcatggaaccctgatatttggtaaacaaggaacaaatgctaacgacgcggatttggaacatgtcatgattacagatgaagaagaaatcaggaccaccaatcccgtggctacagagcagtacggaaacgtgtcaaataatttgcaaaactcaaatactggtccaactacagaaaatgtcaatcaccagggagcgttacctggtatggtgtggcaggatcgagacgtgtacctgcagggacccatttgggccaagattcctcacaccgacggacactttcacccttctccactgatgggaggttttggactcaaacacccgcctcctcaaatcatgatcaaaaacactcctgttccagccaatcctcctacaaacttcagcgcggcaaagtttgcttccttcatcacacagtattccacgggacaggtcagcgtggagatcgagtgggagctgcagaaggagaacagcaaacgctggaaccccgagatccagtacacttccaactacaacaaatctgttaatgtggactttactgtggacgctaatggtgtgtattcagagcctcgccccattggcaccagatacctgactcgtaatctgtaa

SEQ ID NO: 1322 - DNA, 2208 bp, Artificial Sequence
  Synthetic Polynucleotide
atggctgccgatggttatcttccagattggctcgaggacactctctctgaaggaataagacagtggtggaagctcaaacctggcccaccaccaccaaggcccgcagagcggcatcaggacgacagcaggggtcttgtgcttcctgggtacaagtacctcggacccttcaacggactcgacaaaggagagccggtcaacgaggcagacgctgcggccctcgagcacgacaaggcctacgaccggcagctcgacagcggagacaacccgtacctcaagtacaaccacgccgacgcggagtttcaggagcgtcttaaagaagatacgtcttttgggggcaacctcggacgagcagtcttccaggcgaaaaagagggttcttgaacctctgggcctggttgaggaacctgttaagacggctccgggaaaaaagaggccggtagagcactctcctgcggagccagactcctcctcgggaaccggaaaagcgggccagcagcctgcaagaaagagattgaatttcggtcagactggagacgcagactccgtacctgacccccagcctctcggacagccaccagcagcccccacaagtttgggatctactacaatggctacaggcagtggcgcaccaatggcagacaataacgagggtgccgatggagtgggtaattcctcaggaaattggcattgcgattcccaatggctgggcgacagagtcatcaccaccagcacccgaacctgggccctgcccacctacaacaaccacctctacaagcaaatctccagccaatcaggagcatcgaacgacaaccactactttggctacagcaccccttgggggtattttgacttcaacagattccactgtcacttctccccacgtgactggcaaagactcatcaacaacaactggggattccgacccaagagactcaacttcaagctctttaacattcaagtcaaagaggtcacgcagaatgacggtacgacgacgattgccaataaccttaccagcacggttcaggtgtttactgactcggagtaccagctcccgtacgtcctcggctcggcgcatcaaggatgcctcccgccgtttccagcggacgtcttcatggtcccacagtatggatacctcaccctgaacaacgggagtcaggcggtaggacgctcttccttttactgcctggagtactttccttctcagatgctgcgtaccggaaacaactttaccttcagctacacctttgaggacgtgcccttccacagcagctacgctcacagccagagtttggaccggctgatgaatcctctgatcgaccagtatctgtattatctgaacaggacacaatcaaatagtggaactcttcagcagtctaggctactgtttagccaagctggacccaccagcatgtcccttcaagctaaaaactggctgcctggaccttgctacagacagcagcgtctgtcaaagcaggcaaacgacaacaacaacagcaactttccctggactgcggctacaaagtatcatctaaatggtcgggactcgttggttaatccaggaccagctatggccagccacaaagacgatgaagaaaagtttttccccatgcatggaaccctgatatttggtaaacaaggaacaaatgctaacgacgcggatttggaacatgtcatgattacagatgaagaagaaatcaggaccaccaatcccgtggctacagagcagtacggaaacgtgtcaaataatttgcaaaactcaaatactggtccaactacagaaaatgtcaatcaccagggagcgttacctggtatggtgtggcaggatcgagacgtgtacctgcagggacccatttgggccaagattcctcacaccgacggacactttcacccttctccactgatgggaggttttggactcaaacacccgcctcctcaaatcatgatcaaaaacactcctgttccagccaatcctcctacaaacttcagcgcggcaaagtttgcttccttcatcacacagtattccacgggacaggccagcgtggagatcgagtgggagctgcagaaggagaacagcaaacgctggaaccccgagatccagtacacttccaactacaacaaatctgttaatgtggactttactgtggacgctaatggtgtgtattcagagcctcgccccattggcaccagatacctgactcgtaatctgtaa

SEQ ID NO: 1323 - DNA, 2208 bp, Artificial Sequence
  Synthetic Polynucleotide
atggctgccgatggttatcttccagattggctcgaggacactctctctgaaggaataagacagtggtggaagctcaaacctggcccaccaccgccaaagcccgcagggcggcataaggacgacagcaggggtcttgtgcttcctgggtacaagtacctcggacccttcaacggactcgacaagggagagccggtcaacgaggcagacgccgcggccctcgagcacgacaaggcctacgaccggcagctcgacagcggagacaacccgtacctcaagtacaaccacgccggcgcggagtttcaggagcgccttaaagaagatacgtcttttgggggcaacctcggacgagcagtattccaggcgaaaaagagggttcttgaacctctgggcctggttgaggagcctgttaagacggccccgggaaaaaagaggccggtagagcactctcctgtggagccagactcctcctcgggaaccggaaaagcgggccagcagcctgcgaggaagagattgaattttggtcagactggagacgcagactccgtacctgacccccagcctctcggacagccaccagcagcccccacaagtttgggatctactacaatggctacaggcagtggcgcaccaatggcagacaataacgagggtgccgatggagtgggtaattcctcagggaattggcattgcgattcccaatggttgggcgacagagtcatcaccaccagcacccgaacctgggccctgcccacctacaacaaccacctctacaagcaaatctccagccaatcaggagcagcgaacgacaaccactactttggctacagcaccccttgggggtattttgacttcaacagattccactgccacttttcaccacgtgactggcaaagactcatcaacaacaactggggattccgacccaagagactcaacttcaagctctttaacattcaagtcaaagaggtcacgcagaatgacggtacgacgacgattgccaataaccttaccagcacggttcaggtgtttactgactcggagtaccagctcccgtacgtcctcggctcggcgcatcaaggatgcctcccgccgtttccagcggacgtcttcatggtcccacagtatggatacctcaccctgaacaacgggagtcaggcggtaggacgctcttccttttactgcctggagtactttccttctcagatgctgcgtaccggaaacaactttaccttcagctacacctttgaggacgtgcccttccacagcagctacgctcacagccagagtttggaccggctgatgaatcctctgatcgaccagtatctgtattatctgaacaggacacaatcaaatagtggaactcttcagcagtctaggctactgtttagccaagctggacccaccagcatgtcccttcaagctaaaaactggctgcctggaccttgctacagacagcagcgtctgtcaaagcaggcaaacgacaacaacaacagcaactttccctggactgcggctacaaagtatcatctaaatggtcgggactcgttggttaatccaggaccagctatggccagccacaaagacgatgaagaaaagtttttccccatgcatggaaccctgatatttggtaaacaaggaacaaatgctaacgacgcggatttggaacatgtcatgattacagatgaagaagaaatcaggaccaccaatcccgtggctacagagcagtacggaaacgtgtcaaataatttgcaaaactcaaatactggtccaactacagaaaatgtcaatcaccagggagcgttacctggtatggtgtggcaggatcgagacgtgtacctgcagggacccatttgggccaagattcctcacaccgacggacactttcacccttctccactgatgggaggttttggactcaaacacccgcctcctcaaatcatgatcaaaaacactcctgttccagccaatcctcctacaaacttcagcgcggcaaagtttgcttccttcatcacacagtattccacgggacaggtcagcgtggagatcgagtgggagctgcagaaggagaacagcaaacgctggaaccccgagatccagtacacttccaactacaacaaatctgttaatgtggactttactgtggacgctaatggtgtgtattcagagcctcgccccattggcaccagatacctgactcgtaatctgtaa

SEQ ID NO: 1324 - DNA, 2208 bp, Artificial Sequence
  Synthetic Polynucleotide
atggctgccgatggttatcttccagattggctcgaggacactctctctgaaggaataagacagtggtggaagctcaaacctggcccaccaccaccaaggcccgcagagcggcatcaggacgacagcaggggtcttgtgcttcctgggtacaagtacctcggacccttcaacggactcgacaaaggagagccggtcaacgaggcagacgctgcggccctcgagcacgacaaggcctacgaccggcagctcgacagcggagacaacccgtacctcaagtacaaccacgccgacgcggagtttcaggagcgtcttaaagaagatacgtcttttgggggcaacctcggacgagcagtcttccaggcgaaaaagagggttcttgaacctctgggcctggttgaggaacctgttaagacggctccgggaaaaaagaggccggtagagcactctcctgcggagccagactcctcctcgggaaccggaaaagcgggccagcagcctgcaagaaagagattgaatttcggtcagactggagacgcagactccgtacctgacccccagcctctcggacagccaccagcagcccccacaagtttgggatctactacaatggctacaggcagtggcgcaccaatggcagacaataacgagggtgccgatggagtgggtaattcctcaggaaattggcattgcgattcccaatggctgggcgacagagtcatcaccaccagcacccgaacctgggccctgcccacctacaacaaccacctctacaagcaaatctccagccaatcaggagcatcgaacgacaaccactactttggctacagcaccccttgggggtattttgacttcaacagattccactgtcacttctccccacgtgactggcaaagactcatcaacaacaactggggattccgacccaagagactcaacttcaagctctttaacattcaagtcaaagaggtcacgcagaatgacggtacgacgacgattgccaataaccttaccagcacggttcaggtgtttactgactcggagtaccagctcccgtacgtcctcggctcggcgcatcaaggatgcctcccgccgtttccagcggacgtcttcatggtcccacagtatggatacctcaccctgaacaacgggagtcaggcggtaggacgctcttccttttactgcctggagtactttccttctcagatgctgcgtaccggaaacaactttaccttcagctacacctttgaggacgtgcccttccacagcagctacgctcacagccagagtttggaccggctgatgaatcctctgatcgaccagtatctgtattatctgaacaggacacaatcaaatagtggaactcttcagcagtctaggctactgtttagccaagctggacccaccagcatgtcccttcaagctaaaaactggctgcctggaccttgctacagacagcagcgtctgtcaaagcaggcaaacgacaacaacaacagcaactttccctggactgcggctacaaagtatcatctaaatggtcgggactcgttggttaatccaggaccagctatggccagccacaaagacgatgaagaaaagtttttccccatgcatggaaccctgatatttggtaaacaaggaacaaatgctaacgacgcggatttggaacatgtcatgattacagatgaagaagaaatcaggaccaccaatcccgtggctacagagcagtacggaaacgtgtcaaataatttgcaaaactcaaatactggtccaactacagaaaatgtcaatcaccagggagcgttacctggtatggtgtggcaggatcgagacgtgtacctgcagggacccatttgggccaagattcctcacaccgacggacactttcacccttctccactgatgggaggttttggactcaaacacccgcctcctcaaatcatgatcaaaaacactcctgttccagcctatcctcctacaaacttcagcgcggcaaagtttgcttccttcatcacacagtattccacgagacaggtcagcgtggagatcgagtgggagctgcagaaggagaacagcaaacgctggaaccccgagatccagtacacttccaactacaacaaatctgttaatgtggactttactgtggacgctaatggtgtgtattcagagcctcgccccattggcaccagatacctgactcgtaatctgtaa

SEQ ID NO: 1325 - DNA, 2208 bp, Artificial Sequence
  Synthetic Polynucleotide
atggctgccgatggttatcttccagattggctcgaggacactctctctgaaggaataagacagtggtggaagctcaaacctggcccaccaccaccaaggcccgcagagcggcatcaggacgacagcaggggtcttgtgcttcctgggtacaagtacctcggacccttcaacggactcgacaaaggagagccggtcaacgaggcagacgctgcggccctcgagcacgacaaggcctacgaccggcagctcgacagcggagacaacccgtacctcaagtacaaccacgccgacgcggagtttcaggagcgtcttaaagaagatacgtcttttgggggcaacctcggacgagcagtcttccaggcgaaaaagagggttcttgaacctctgggcctggttgaggaacctgttaagacggctccgggaaaaaagaggccggtagagcactctcctgcggagccagactcctcctcgggaaccggaaaagcgggccagcagcctgcaagaaagagattgaatttcggtcagactggagacgcagactccgtacctgacccccagcctctcggacagccaccagcagcccccacaagtttgggatctactacaatggctacaggcagtggcgcaccaatggcagacaataacgagggtgccgatggagtgggtaattcctcaggaaattggcattgcgattcccaatggctgggcgacagagtcatcaccaccagcacccgaacctgggccctgcccacctacaacaaccacctctacaagcaaatctccagccaatcaggagcatcgaacgacaaccactactttggctacagcaccccttgggggtattttgacttcaacagattccactgtcacttctccccacgtgactggcaaagactcatcaacaacaactggggattccgacccaagagactcaacttcaagctctttaacattcaagtcaaagaggtcacgcagaatgacggtacgacgacgattgccaataaccttaccagcacggttcaggtgtttactgactcggagtaccagctcccgtacgtcctcggctcggcgcatcaaggatgcctcccgccgtttccagcggacgtcttcatggtcccacagtatggatacctcaccctgaacaacgggagtcaggcggtaggacgctcttccttttactgcctggagtactttccttctcagatgctgcgtaccggaaacaactttaccttcagctacacctttgaggacgtgcccttccacagcagctacgctcacagccagagtttggaccggctgatgaatcctctgatcgaccagtatctgtattatctgaacaggacacaatcaaatagtggaactcttcagcagtctaggctactgtttagccaagctggacccaccagcatgtcccttcaagctaaaaactggctgcctggaccttgctacagacagcagcgtctgtcaaagcaggcaaacgacaacaacaacagcaactttccctggactgcggctacaaagtatcatctaaatggccgggactcgttggttaatccaggaccagctatggccagccacaaagacgatgaagaaaagtttttccccatgcatggaaccctgatatttggcaaacaagggacaaatgctaacgacgcggatttggacaatgtcatgattacagatgaagaagaaatccgtaccaccaatcccgtggctacggagcagtacgggactgtgtcaaataatttgcaaaactcaaatactggtccaactactggaactgtcaatcaccaaggagcgttacctggtatggtgtggcaggatcgagacgtgtaccttcagggacccatttgggccaagattcctcacaccgatggacactttcacccttctccgctgatgggaggttttggactcaaacacccgcctcctcagatcatgatcaaaaacactcccgttccagccaatcctcccacaaacttcagttctgccaagtttgcttctttcatcacacagtattccacgggacaggttagcgtggagatcgagtgggagctgcagaaggagaacagcaaacgctggaaccccgagatccagtacacttccaactacaacaagtctgttaatgtggactttactgtggacactaatggtgtgtattcagagcctcgccccattggcaccagatacctgactcgtaatctgtaa

SEQ ID NO: 1326 - DNA, 2208 bp, Artificial Sequence
  Synthetic Polynucleotide
atggctgccgatggttatcttccagattggctcgaggacattctctctgaaggaataagacagtggtggaagctcaaacctggcccaccaccaccaaagcccgcagagcggcataaggacgacagcaggggtcttgtgcttcctgggtacaagtacctcggacccttcaacggactcgacaaaggagagccggtcaacgaggcagacgccgcggccctcgagcacgacaaggcctacgaccggcagctcgacagcggagacaacccgtacctcaagtacaaccacgccgacgcggagtttcaggagcgtcttaaagaagatacgtcttttgggggcaacctcggacgagcagtcttccaggcaaaaaagagggttcttgaacctctgggcctggttgaggaacctgttaagacggctccgggaaaaaagaggccggtagagcaatctcctgcggagccagactcctcctcgggaaccggaaaggcgggcaaccagcctgcaagaaagagattgaattttggtcagactggagacgcagactccgtacctgacccccagcctctcggacagccaccagcagccccctctggtctgggatctactacaatggctacaggcagtggcgcaccaatggcagacaataacgagggtgccgatggagtgggtaattcctcaggaaattggcattgcgattcccaatggttgggcgacagagtcatcaccaccagcacccgaacctgggccctgcccacctacaacaatcacctctacaagcaaatctccagccaatcaggagcagcgaacgacaaccactactttggctacagcaccccctgggggtattttgacttcaacagattccactgccacttttcaccacgtgactggcaaagactcatcaacaacaactggggattccgacccaaaagactcaacttcaagctctttaacattcaagtcaaagaggtcacgcagaatgacggtacgacgacgattgccaataaccttaccagcacggttcaggtgtttactgactcggagtaccagctcccgtacgtcctcggctcggcgcatcaaggatgcctcccgccgtttccagcggacgtcttcatggtcccacagtatggatacctcaccctgaacaacgggagtcaggcggtaggacgctcttccttttactgcctggagtactttccttctcagatgcttcgtaccggaaacaactttaccttcagttacacctttgaagacgttcctttccacagcagctacgctcacagtcaaagtctggaccggctgatgaatcctctgatagaccagtacctgtattatctaaacaaaacacaatcaaatagtggaactcttcagcagtctcggctactgtttagtcaagctggacccaccagcatgtctcttcaagctaaaaactggctgcctggaccttgctacagacaacagcgtctgtcaaagcaggcaaacgacaacaacaacagcaactttccctggactgcggctacaaagtatcatctaaatggccgggactcgttggttaatccaggaccagctatggccagccacaaagacgatgaagaaaagtttttccccatgcatggaaccctgatatttggtaaacaaggaacaaatgctaacgacgcggatttggacaatgtcatgattacagatgaagaagaaatccgcaccaccaatcccgtggctacggagcagtacgggactgtgtcaaataatttgcaaaactcaaatactggtccaactactggaactgtcaatcaccaaggagcgttacctggtatggtgtggcaggatcgagacgtgtaccttcagggacccatttgggccaagattcctcacaccgatggacactttcatccttctccactgatgggaggttttggactcaaacacccgcctcctcagatcatgatcaaaaacactcccgttccagccaatcctcctacaaacttcagttctgccaagtttgcttctttcatcacacagtattccacggggcaggtcagcgtggagatagagtgggagctgcagaaggagaacagcaaacgctggaaccccgagatccagtatacttccaactacaacaagtctgttaatgtggactttactgtggacactaatggtgtgtattcagagcctcgccccattggcaccagatacctgactcgtaatctgtaa

SEQ ID NO: 1327 - DNA, 2208 bp, Artificial Sequence
  Synthetic Polynucleotide
atggctgccgatggttatcttccagattggctcgaggacactctctctgaaggaataagacagtggtggaagctcaaacctggcccaccaccaccaaggcccgcagagcggcatcaggacgacagcaggggtcttgtgcttcctgggtacaagtacctcggacccttcaacggactcgacaaaggagagccggtcaacgaggcagacgctgcggccctcgagcacgacaaggcctacgaccggcagctcgacagcggagacaacccgtacctcaagtacaaccacgccggcgcggagtttcaggagcgccttaaagaagatacgtcttttgggggcaacctcggacgagcagtattccaggcgaaaaagagggttcttgaacctctgggcctggttgaggagcctgttaagacggccccgggaaaaaagaggccggtagagcactctcctgtggagccagactcctcctcgggaaccggaaaagcgggccagcagcctgcgaggaagagattgaattttggtcagactggagacgcagactccgtacctgacccccagcctctcggacagccaccagcagcccccacaagtttgggatctactacaatggctacaggcagtggcgcaccaatggcagacaataacgagggtgccgatggagtgggtaattcctcagggaattggcattgcgattcccaatggttgggcgacagagtcatcaccaccagcacccgaacctgggccctgcccacctacaacaaccacctctacaagcaaatctccagccaatcaggagcagcgaacgacaaccactactttggctacagcaccccctgggggtattttgacttcaacagattccactgccacttttcaccacgtgactggcaaagactcatcaacaacaactggggattccgacccaagagactcaacttcaagctctttaacattcaagtcaaagaggtcacgcagaatgacggtacgacgacgattgccaataaccttaccagcacggttccggtgtttactgactcggagtaccagctcccgtacgtcctcggctcggcgcatcaaggatgcctcccgccgtttccagcggacgtcttcatggtcccacagtatggatacctcaccctgaacaacgggagtcaggcggtaggacgctcttccttttactgcctggagtactttccttctcagatgcttcgtaccggaaacaactttaccttcagttacacctttgaagacgttcctttccacagcagctacgctcacagtcaaagtctggaccggctgatgaatcctcttatcgaccagtacctgtattatctaaacaaaacacaatcaaatagtggaactcttcagcagtctcggctactgtttagtcaagctggacctaccagcatgtctcttcaagctaaaaactggctgcctggaccttgctacagacaacagcgtctgtcaaagcaggcaaacgacaacaacaacagcaactttccctggactgcggctacaaagtatcatctaaatggccgggactcgttggttaatccaggaccagctatggccagccacaaagacgatgaagaaaagtttttccccatgcatggaaccctgatatttggcaaacaagggacaaatgctaacgacgcggatttggacaatgtcatgattacagatgaagaagaaatccgtaccaccaatcccgtggctacggagcagtacgggactgtgtcaaataatttgcaaaactcaaatactggtccaactactggaactgtcaatcaccaaggagcgttacctggtatggtgtggcaggatcgagacgtgtaccttcagggacccatttgggccaagattcctcacaccgatggacactttcacccttctccgctgatgggaggttttggactcaaacacccgcctcctcagatcatgatcaaaaacactcccgttccagccaatcctcccacaaacttcagttctgccaagtttgcttctttcatcacacagtattccacgggacaggttagcgtggagatcgagtgggagctgcagaaggagaacagcaaacgctggaaccccgagatccagtacacttccaactacaacaagtctgttaatgtggactttactgtggacactaatggtgtgtattcagagcctcgccccattggcaccagatacctgactcgtaatctgtaa

SEQ ID NO: 1328 - DNA, 2205 bp, Artificial Sequence
  Synthetic Polynucleotide
atggctgccgatggttatcttccagattggctcgaggacactctctctgaaggaataagacagtggtggaagctcaaacctggcccaccaccaaggcccgcagagcggcatcaggacgacagcaggggtcttgtgcttcctgggtacaagtacctcggacccttcaacggactcgacaaaggagagccggtcaacgaggcagacgctgcggccctcgagcacgacaaggcctacgaccggcagctcgacagcggagacaacccgtacctcaagtacaaccacgccgacgcggagtttcaggagcgtcttaaagaagatacgtcttttgggggcaacctcggacgagcagtcttccaggcgaaaaagagggttcttgaacctctgggcctggttgaggaacctgttaagacggctccgggaaaaaagaggccggtagagcactctcctgcggagccagactcctcctcgggaaccggaaaagcgggccagcagcctgcaagaaagagattgaatttcggtcagactggagacgcagactccgtacctgacccccagcctctcggacagccaccagcagcccccacaagtttgggatctactacaatggctacaggcagtggcgcaccaatggcagacaataacgagggtgccgatggagtgggtaattcctcaggaaattggcattgcgattcccaatggctgggcgacagagtcatcaccaccagcacccgaacctgggccctgcccacctacaacaaccacctctacaagcaaatctccagccaatcaggagcatcgaacgacaaccactactttggctacagcaccccttgggggtattttgacttcaacagattccactgtcacttctccccacgtgactggcaaagactcatcaacaacaactggggattccgacccaagagactcaacttcaagctctttaacattcaagtcaaagaggtcacgcagaatgacggtacgacgacgattgccaataaccttaccagcacggttcaggtgtttactgactcggagtaccagctcccgtacgtcctcggctcggcgcatcaaggatgcctcccgccgtttccagcggacgtcttcatggtcccacagtatggatacctcaccctgaacaacgggagtcaggcggtaggacgctcttccttttactgcctggagtactttccttctcagatgctgcgtaccggaaacaactttaccttcagctacacctttgaggacgtgcccttccacagcagctacgctcacagccagagtttggaccggctgatgaatcctctgatcgaccagtatctgtattatctgaacaggacacaatcaaatagtggaactcttcagcagtctaggctactgtttagccaagctggacccaccagcatgtcccttcaagctaaaaactggctgcctggaccttgctacagacagcagcgtctgtcaaagcaggcaaacgacaacaacaacagcaactttccctggactgcggctacaaagtatcatctaaatggtcgggactcgttggttaatccaggaccagctatggccagccacaaagacgatgaagaaaagtttttccccatgcatggaaccctgatatttggtaaacaaggaacaaatgctaacgacgcggatttggaacatgtcatgattacagatgaagaagaaatcaggaccaccaatcccgtggctacagagcagtacggaaacgtgtcaaataatttgcaaaactcaaatactggtccaactacagaaaatgtcaatcaccagggagcgttacctggtatggtgtggcaggatcgagacgtgtacctgcagggacccatttgggccaagattcctcacaccgacggacactttcacccttctccactgatgggaggttttggactcaaacacccgcctcctcaaatcatgatcaaaaacactcctgttccagccaatcctcctacaaacttcagcgcggcaaagtttgcttccttcatcacacagtattccacgggacaggtcagcgtggagatcgagtgggagctgcagaaggagaacagcaaacgctggaaccccgagatccagtacacttccaactacaacaaatctgttaatgtggactttactgtggacgctaatggtgtgtattcagagcctcgccccattggcaccagatacctgactcgtaatctgtaa

SEQ ID NO: 1329 - DNA, 2208 bp, Artificial Sequence
  Synthetic Polynucleotide
atggctgccgatggttatcttccagattggctcgaggacactctctctgaaggaataagacagtggtggaagctcaaacctggcccaccaccaccaaagcccgcagagcggcatcaggacgacagcaggggtcttgtgcttcccgggcacaagtacctcggacccttcaacggactcgacaaaggagagccggtcaacgaggcagacgctgcggccctcgagcacgacaaggcctacgaccggcagctcgacagcggagacaacccgtacctcaagtacaaccacgccgacgcggagtttcaggagcgtcttaaagaagatacgtcttttgggggcaacctcggacgagcagtcttccaggcgaaaaagagggttcttgaacctctgggcctggttgaggaacctgttaagacggctccgggaaaaaagaggccggtagagcactctcctgcggagccagactcctcctcgggaaccggaaaagcgggccagcagcctgcaagaaagagattgaatttcggtcagactggagacgcagactccgtacctgacccccagcctctcggacagccaccagcagcccccacaagtttgggatctactacaatggctacaggcagtggcgcaccaatggcagacaataacgagggtgccgatggagtgggtaattcctcaggaaattggcattgcgattcccaatggctgggcgacagagtcatcaccaccagcacccgaacctgggccctgcccacctacaacaaccacctctacaagcaaatctccagccaatcaggagcatcgaacgacaaccactactttggctacagcaccccttgggggtattttgacttcaacagattccactgtcacttctccccacgtgactggcaaagactcatcaacaacaactggggattccgacccaagagactcaacttcaagctctttaacattcaagtcaaagaggtcacgcagaatgacggtacgacgacgattgccaataaccttaccagcacggttcaggtgtttactgactcggagtaccagctcccgtacgtcctcggctcggcgcatcaaggatgcctcccgccgtttccagcggacgtcttcatggtcccacagtatggatacctcaccctgaacaacgggagtcaggcggtaggacgctcttccttttactgcctggagtactttccttctcagatgctgcgtaccggaaacaactttaccttcagctacacctttgaggacgtgcccttccacagcagctacgctcacagccagagtttggaccggctgatgaatcctctgatcgaccagtatctgtattatctgaacaggacacaatcaaatagtggaactcttcagcagtctaggctactgtttagccaagctggacccaccagcatgtcccttcaagctaaaaactggctgcctggaccttgctacagacagcagcgtctgtcaaagcaggcaaacgacaacaacaacagcaactttccctggactgcggctacaaagtatcatctaaatggtcgggactcgttggttaatccaggaccagctatggccagccacaaagacgatgaagaaaagtttttccccatgcatggaaccctgatatttggtaaacaaggaacaaatgctaacgacgcggatttggaacatgtcatgattacagatgaagaagaaatcaggaccaccaatcccgtggctacagagcagtacggaaacgtgtcaaataatttgcaaaactcaaatactggtccaactacagaaaatgtcaatcaccagggagcgttacctggtatggtgtggcaggatcgagacgtgtacctgcagggacccatttgggccaagattcctcacaccgacggacactttcacccttctccactgatgggaggttttggactcaaacacccgcctcctcaaatcatgatcaaaaacactcctgttccagccaatcctcctacaaacttcagcgcggcaaagtttgcttccttcatcacacagtattccacgggacaggtcagcgtggagatcgagtgggagctgcagaaggagaacagcaaacgctggaaccccgagatccagtacacttccaactacaacaaatctgttaatgtggactttactgtagacactaatggtgtgtattcagagcctcgccccattggcaccagatacctgactcgtaatctgtaa

SEQ ID NO: 1330 - DNA, 2208 bp, Artificial Sequence
  Synthetic Polynucleotide
atggctgccgatggttatcttccagattggctcgaggacactctctctgaaggaataagacagtggtggaagctcaaacctggcccaccaccaccaaggcccgcagagcggcatcaggacgacagcaggggtcttgtgcttcctgggtacaagtacctcggacccttcaacggactcgacaaaggagagccggtcaacgaggcagacgctgcggccctcgagcacgacaaggcctacgaccggcagctcgacagcggagacaacccgtacctcaagtacaaccacgccgacgcggagtttcaggagcgtcttaaagaagatacgtcttttgggggcaacctcggacgagcagtcttccaggcgaaaaagagggttcttgaacctctgggcctggttgaggaacctgttaagacggctccgggaaaaaagaggccggtagagcactctcctgcggagccagactcctcctcgggaaccggaaaagcgggccagcagcctgcaagaaagagattgaatttcggtcagactggagacgcagactccgtacctgacccccagcctctcggacagccaccagcagcccccacaagtttgggatctactacaatggctacaggcagtggcgcaccaatggcagacaataacgagggtgccgatggagtgggtaattcctcaggaaattggcattgcgattcccaatggctgggcgacagagtcatcaccaccagcacccgaacctgggccctgcccacctacaacaaccacctctacaagcaaatctccagccaatcaggagcatcgaacgacaaccactactttggctacagcaccccttgggggtattttgacttcaacagattccactgtcacttctccccacgtgactggcaaagactcatcaacaacaactggggattccgacccaagagactcaacttcaagctctttaacattcaagtcaaagaggtcacgcagaatgacggtacgacgacgattgccaataaccttaccagcacggttcaggtgtttactgactcggagtaccagctcccgtacgtcctcggctcggcgcatcaaggatgcctcccgccgtttccagcggacgtcttcatggtcccacagtatggatacctcaccctgaacaacgggagtcaggcggtaggacactcttcctcttactgcctggagtactttccttctcagatgctgcgtaccggaaacaactttaccttcagctacacctttgaggacgtgcctttccacagcagctacgctcacagccagagtttggaccggctgatgaatcctctgatcgaccagtatctgtattatctgaacaggacacaatcaaatagtggaactcttcagcagtctaggctactgtttagccaagctggacccaccagcatgtctcttcaagctaaaaactggctgcctggaccttgctacagacagcagcgtctgtcaaagcaggcaaacgacaacaacaacagcaactttccctggactgcggctacaaagtatcatctaaatggtcgggactcgttggttaatccaggaccagctatggccagccacaaagacgatgaagaaaagtttttccccatgcatggaaccctgatatttggtaaacaaggaacaaatgctaacgacgcggatttggaacatgtcatgattacagatgaagaagaaatcaggaccaccaatcccgtggctacagagcagtacggaaacgtgtcaaataatttgcaaaactcaaatactggtccaactacagaaaatgtcaatcaccagggagcgttacctggtatggtgtggcaggatcgagacgtgtacctgcagggacccatttgggccaagattcctcacaccgacggacactttcacccttctccactgatgggaggttttggactcaaacacccgcctcctcaaatcatgatcaaaaacactcctgttccagccaatcctcctacaaacttcagcgcggcaaagtttgcttccttcatcacacagtattccacgggacaggtcagcgtggagatcgagtgggagctgcagaaggagaacagcaaacgctggaaccccgagatccagtacacttccaactacaacaaatctgttaatgtggactttactgtggacgctaatggtgtgtattcagagcctcgccccattggcaccagatacctgactcgtaatctgtaa

SEQ ID NO: 1331 - DNA, 2208 bp, Artificial Sequence
  Synthetic Polynucleotide
atggctgccgatggttatcttccagattggctcgaggacactctctctgaaggaataagacagtggtggaagctcaaacctggcccaccaccaccaaggcccgcagagcggcatcaggacgacagcaggggtcttgtgcttcctgggtacaagtacctcggacccttcaacggactcgacaaaggagagccggtcaacgaggcagacgctgcggccctcgagcacgacaaggcctacgaccggcagctcgacagcggagacaacccgtacctcaagtacaaccacgccgacgcggagtttcaggagcgtcttaaagaagatacgtcttttgggggcaacctcggacgagcagtcttccaggcgaaaaagagggttcttgaacctctgggcctggttgaggaacctgttaagacggctccgggaaaaaagaggccggtagagcactctcctgcggagccagactcctcctcgggaaccggaaaagcgggccagcagcctgcaagaaagagattgaatttcggtcagactggagacgcagactccgtacctgacccccagcctctcggacagccaccagcagcccccacaagtttgggatctactacaatggctacaggcagtggcgcaccaatggcagacaataacgagggtgccgatggagtgggtaattcctcaggaaattggcattgcgattcccaatggctgggcgacagggtcatcaccaccagcacccgaacccgggccctgcccacctacaacaaccacctctacaagcaaatctccagccaatcaggagcatcgaacgacaaccactactttggctacagcaccccttgggggtattttgacttcaacagattccactgtcacttctccccacgtgactggcaaagactcaccaacaacaactggggattccgacccaagagactcaacttcaagctctttaacattcaagtcaaagaggtcacgcagaatgacggtacgacgacgattgccaataaccttaccagcacggttcaggtgtttactgactcggagtaccagctcccgtacgtcctcggctcggcgcatcaaggatgcctcccgccgtttccagcggacgtcttcatggtcccacagtatggatacctcaccctgaacaacgggagtcaggcggtaggacgctcttccttttactgcctggagtactttccttctcagatgctgcgtaccggaaacaactttaccttcagctacacctttgaggacgtgcccttccacagcagctacgctcacagccagagtttggaccggctgatgaatcctctgatcgaccagtatctgtattatctgaacaggacacaatcaaatagtggaactcttcagcagtctaggctactgtttagccaagctggacccaccagcatgtcccttcaagctaaaaactggctgcctggaccttgctacagacagcagcgtctgtcaaagcaggcaaacgacaacaacaacagcaactttccctggactgcggctacaaagtatcatctaaatggtcgggactcgttggttaatccaggaccagctatggccagccacaaagacgatgaagaaaagtttttccccatgcatggaaccctgatatttggtaaacaaggaacaaatgctaacgacgcggatttggaacatgtcatgattacagatgaagaagaaatcaggaccaccaatcccgtggctacagagcagtacggaaacgtgtcaaataatttgcaaaactcaaatactggtccaactacagaaaatgtcaatcaccagggagcgttacctggtatggtgtggcaggatcgagacgtgtacctgcagggacccatttgggccaagattcctcacaccgacggacactttcacccttctccactgatgggaggttttggactcaaacacccgcctcctcaaatcatgatcaaaaacactcctgttccagccaatcctcctacaaacttcagcgcggcaaagtttgcttccttcatcacacagtattccacgggacaggtcagcgtggagatcgagtgggagctgcagaaggagaacagcaaacgctggaaccccgagatccagtacacttccaactacaacaaatctgttaatgtggactttactgtggacgctaatggtgtgtattcagagcctcgccccattggcaccagatacctgactcgtaatctgtaa

SEQ ID NO: 1332 - DNA, 2208 bp, Artificial Sequence
  Synthetic Polynucleotide
atggctgccgatggttatcttccagattggctcgaggacactctctctgaaggaataagacagtggtggaagctcaaacctggcccaccaccgccaaagcccgcagagcggcataaggacgacagcaggggtcttgtgcttcctgggtacaagtacctcggacccttcaacggactcgacaaaggagagccggtcaacgaggcagacgccgcggccctcgagcacgacaaggcctacgaccggcagctcgacagcggagacaacccgtacctcaagtacaaccacgccgacgcggagtttcaggagcgccttaaagaagatacgtcttttgggggcaacctcgcaagagcagtattccaggcgaaaaagagggttcttgaacctctgggcctggttgaggagcctgttaagacggctccgggaaaaaagaggccggtagagcactctcctgcggggccagattcctcctccggaactggaaagtcgggccaacagcctgcaagaaagagattgaattttggtcagactggagacgcagactccgtacctgacccccagcctctcggacagccaccagcagccccctctggtctgggaactaatacgatggcttcaggcagtggcgcaccaatggcagacaataacgagggcgccgacggagtgggtaattcctcgggaaattggcattgcgattccacatggatgggcgacagagtcatcaccaccagcacccgcacctgggctctgcccacctacaacaaccatctgtacaagcaaatttccagccagtctggagcagcgaacgacaaccactactttggctacagcaccccttgggggtattttgacttcaacagattccactgtcacttctccccacgtgactggcaaagactcatcaacaacaactggggattccgacccaagagactcaacttcaagctctttaacattcaagtcaaagaggtcacgcagaatgacggtacgacgacgattgccaataaccttaccagcacggttcaggtgtttactgactcggagtaccagctcccgtacgtcctcggctcggcgcatcaaggatgcctcccgccgtttccagcggacgtcttcatggtcccacagtatggatacctcaccctgaacaacgggagtcaggcggtaggacgctcttccttttactgcctggagtactttccttctcagatgctgcgtaccggaaacaactttaccttcagctacacctttgaggacgtgcccttccacagcagctacgctcacagccagagtttggaccggctgatgaatcctctgatcgaccagtatctgtattatctgaacaggacacaatcaaatagtggaactcttcagcagtctaggctactgtttagccaagctggacccaccagcatgtcccttcaagctaaaaactggctgcctggaccttgctacagacagcagcgtctgtcaaagcaggcaaacgacaacaacaacagcaactttccctggactgcggctacaaagtatcatctaaatggtcgggactcgttggttaatccaggaccagctatggccagccacaaagacgatgaagaaaagtttttccccatgcatggaaccctgatatttggtaaacaaggaacaaatgctaacgacgcggatttggaacatgtcatgattacagatgaagaagaaatcaggaccaccaatcccgtggctacagagcagtacggaaacgtgtcaaataatttgcaaaactcaaatactggtccaactacagaaaatgtcaatcaccagggagcgttacctggtatggtgtggcaggatcgagacgtgtacctgcagggacccatttgggccaagattcctcacaccgacggacactttcacccttctccactgatgggaggttttggactcaaacacccgcctcctcaaatcatgatcaaaaacactcctgttccagccaatcctcctacaaacttcagcgcggcaaagtttgcttccttcatcacacagtattccacgggacaggtcagcgtggagatcgagtgggagctgcagaaggagaacagcaaacgctggaaccccgagatccagtacacttccaactacaacaaatctgttaatgtggactttactgtggacgctaatggtgtgtattcagagcctcgccccattggcaccagatacctgactcgtaatctgtaa

SEQ ID NO: 1333 - DNA, 2205 bp, Artificial Sequence
  Synthetic Polynucleotide
atggctgccgatggttatcttccagattggctcgaggacactctctctgaaggaataagacagtggtggaagctcaaacctggcccaccaccaccaaggcccgcagagcggcatcaggacgacagcaggggtcttgtgcttcctgggtacaagtacctcggacccttcaacggactcgacaaaggagagccggtcaacgaggcagacgctgcggccctcgagcacgacaaggcctacgaccggcagctcgacagcggagacaacccgtacctcaagtacaaccacgccgacgcggagtttcaggagcgtcttaaagaagatacgtcttttgggggcaacctcggacgagcagtcttccaggcgaaaaagagggttcttgaacctctgggcctggttgaggaacctgttaagacggctccgggaaaaaagaggccggtagagcactctcctgcggagccagactcctcctcgggaaccggaaaagcgggccagcagcctgcaagaaagagattgaatttcggtcagactggagacgcagactccgtacctgacccccagcctctcggacagccaccagcagcccccacaagtttgggatctactacaatggctacaggcagtggcgcaccaatggcagacaataacgagggtgccgatggagtgggtaattcctcaggaaattggcattgcgattcccaatggctgggcgacagagtcatcaccaccagcacccgaacctgggccctgcccacctacaacaaccacctctacaagcaaatctccagccaatcaggagcatcgaacgacaaccactactttggctacagcaccccttgggggtattttgacttcaacagattccactgtcacttctccccacgtgactggcaaagactcatcaacaacaactggggattccgacccaagagactcaacttcaagctctttaacattcaagtcaaagaggtcacgcagaatgacggtacgacgacgattgccaataaccttaccagcacggttcaggtgtttactgactcggagtaccagctcccgtacgtcctcggctcggcgcatcaaggatgcctcccgccgtttccagcggacgtcttcatggtcccacagtatggatacctcaccctgaacaacgggagtcaggcggtaggacgctcttccttttactgcctggagtactttccttctcagatgctgcgtaccggaaacaactttaccttcagctacacctttgaggacgtgcccttccacagcagctacgctcacagccagagtttggaccggctgatgaatcctctgatcgaccagtatctgtattatctgaacaggacacaatcaaatagtggaactcttcagcagtctaggctactgtttagccaagctggacccaccagcatgtcccttcaagctaaaaactggctgcctggaccttgctacagacagcagcgtctgtcaaagcaggcaaacgacaacaacagcaactttccctggactgcggctacaaagtatcatctaaatggtcgggactcgttggttaatccaggaccagctatggccagccacaaagacgatgaagaaaagtttttccccatgcatggaaccctgatatttggtaaacaaggaacaaatgctaacgacgcggatttggaacatgtcatgattacagatgaagaagaaatcaggaccaccaatcccgtggctacagagcagtacggaaacgtgtcaaataatttgcaaaactcaaatactggtccaactacagaaaatgtcaatcaccagggagcgttacctggtatggtgtggcaggatcgagacgtgtacctgcagggacccatttgggccaagattcctcacaccgacggacactttcacccttctccactgatgggaggttttggactcaaacacccgcctcctcaaatcatgatcaaaaacactcctgttccagccaatcctcctacaaacttcagcgcggcaaagtttgcttccttcatcacacagtattccacgggacaggtcagcgtggagatcgagtgggagctgcagaaggagaacagcaaacgctggaaccccgagatccagtacacttccaactacaacaaatctgttaatgtggactttactgtggacgctaatggtgtgtattcagagcctcgccccattggcaccagatacctgactcgtaatctgtaa

SEQ ID NO: 1334 - DNA, 2208 bp, Artificial Sequence
  Synthetic Polynucleotide
atggctgccgatggttatcttccagattggctcgaggacactctctctgaaggaataagacagtggtggaagctcaaacctggcccaccaccgccaaagcccgcagagcggcataaggacgacagcaggggtcttgtgcttcctgggtacaagtacctcggacccttcaacggactcgacaaaggagagccggtcaacgaggcagacgccgcggccctcgagcacgacaaggcctacgaccggcagctcgacagcggagacaacccgtacctcaagtacaaccacgccgacgcggagtttcaggagcgccttaaagaagatacgtcttttgggggcaacctcgcaagagcagtattccaggcgaaaaagagggttcttgaacctctgggcctggttgaggagcctgttaagacggctccgggaaaaaagaggccggtagagcactctcctgcggggccagattcctcctccggaactggaaagtcgggccaacagcctgcaagaaagagattgaattttggtcagactggagacgcagactccgtacctgacccccagcctctcggacagccaccagcagcccccacaagtttgggatctactacaatggctacaggcagtggcgcaccaatggcagacaataacgagggtgccgatggagtgggtaattcctcaggaaattggcattgcgattcccaatggctgggcgacagagtcatcaccaccagcacccgaacctgggccctgcccacctacaacaaccacctctacaagcaaatctccagccaatcaggagcatcgaacgacaaccactactttggctacagcaccccttgggggtattttgacttcaacagattccactgtcacttctccccacgtgactggcaaagactcatcaacaacaactggggattccgacccaagagactcaacttcaagctctttaacattcaagtcaaagaggtcacgcagaatgacggtacgacgacgattgccaataaccttaccagcacggttcaggtgtttactgactcggagtaccagctcccgtacgtcctcggctcggcgcatcaaggatgcctcccgccgtttccagcggacgtcttcatggtcccacagtatggatacctcaccctgaacaacgggagtcaggcggtaggacgctcttccttttactgcctggagtactttccttctcagatgctgcgtaccggaaacaactttaccttcagctacacctttgaggacgtgcccttccacagcagctacgctcacagccagagtttggaccggctgatgaatcctctgatcgaccagtatctgtattatctgaacaggacacaatcaaatagtggaactcttcagcagtctaggctactgtttagccaagctggacccaccagcatgtcccttcaagctaaaaactggctgcctggaccttgctacagacagcagcgtctgtcaaagcaggcaaacgacaacaacaacagcaactttccctggactgcggctacaaagtatcatctaaatggtcgggactcgttggttaatccaggaccagctatggccagccacaaagacgatgaagaaaagtttttccccatgcatggaaccctgatatttggtaaacaaggaacaaatgctaacgacgcggatttggaacatgtcatgattacagatgaagaagaaatcaggaccaccaatcccgtggctacagagcagtacggaaacgtgtcaaataatttgcaaaactcaaatactggtccaactacagaaaatgtcaatcaccagggagcgttacctggtatggtgtggcaggatcgagacgtgtacctgcagggacccatttgggccaagattcctcacaccgacggacactttcacccttctccactgatgggaggttttggactcaaacacccgcctcctcaaatcatgatcaaaaacactcctgttccagccaatcctcctacaaacttcagcgcggcaaagtttgcttccttcatcacacagtattccacgggacaggtcagcgtggagatcgagtgggagctgcagaaggagaacagcaaacgctggaaccccgagatccagtacacttccaactacaacaaatctgttaatgtggactttactgtggacgctaatggtgtgtattcagagcctcgccccattggcaccagatacctgactcgtaatctgtaa

SEQ ID NO: 1335 - DNA, 2208 bp, Artificial Sequence
  Synthetic Polynucleotide
atggctgccgatggttatcttccagattggctcgaggacactctctctgaaggaataagacagtggtggaagctcaaacctggcccaccaccgccaaagcccgcagggcggcataaggacgacagcaggggtcttgtgcttcctgggtacaagtacctcggacccttcaacggactcgacaagggagagccggtcaacgaggcagacgccgcggccctcgagcacgacaaggcctacgaccggcagctcgacagcggagacaacccgtacctcaagtacaaccacgccggcgcggagtttcaggagcgccttaaagaagatacgtcttttgggggcaacctcggacgagcagtattccaggcgaaaaagagggttcttgaacctctgggcctggttgaggagcctgttaagacggccccgggaaaaaagaggccggtagagcactctcctgtggagccagactcctcctcgggaaccggaaaagcgggccagcagcctgcgaggaagagattgaattttggtcagactggagacgcagactccgtacctgacccccagcctctcggacagccaccagcagcccccacaagtttgggatctactacaatggctacaggcagtggcgcaccaatggcagacaataacgagggtgccgatggagtgggtaattcctcagggaattggcattgcgattcccaatggttgggcgacagagtcatcaccaccagcacccgaacctgggccctgcccacctacaacaaccacctctacaagcaaatctccagccaatcaggagcagcgaacgacaaccactactttggctacagcaccccctgggggtattttgacttcaacagattccactgccacttttcaccacgtgactggcaaagactcatcaacaacaactggggattccgacccaagagactcaacttcaagctctttaacattcaagtcaaagaggtcacgcagaatgacggtacgacgacgattgccaataaccttaccagcacggttccggtgtttactgactcggagtaccagctcccgtacgtcctcggctcggcgcatcaaggatgcctcccgccgtttccagcggacgtcttcatggtcccacagtatggatacctcaccctgaacaacgggagtcaggcggtaggacgctcttccttttactgcctggagtactttccttctcagatgcttcgtaccggaaacaactttaccttcagttacacctttgaagacgttcctttccacagcagctacgctcacagtcaaagtctggaccggctgatgaatcctcttatcgaccagtacctgtattatctaaacaaaacacaatcaaatagtggaactcttcagcagtctcggctactgtttagtcaagctggacctaccagcatgtctcttcaagctaaaaactggctgcctggaccttgctacagacaacagcgtctgtcaaagcaggcaaacgacaacaacaacagcaactttccctggactgcggctacaaagtatcatctaaatggccgggactcgttggttaatccaggaccagctatggccagccacaaagacgatgaagaaaagtttttccccatgcatggaaccctgatatttggtaaacaaggaacaaatgctaacgacgcggatttggaacatgtcatgattacagatgaagaagaaatcaggaccaccaatcccgtggctacagagcagtacggaaacgtgtcaaataatttgcaaaactcaaatactggtccaactacagaaaatgtcaatcaccagggagcgttacctggtatggtgtggcaggatcgagacgtgtacctgcagggacccatttgggccaagattcctcacaccgacggacactttcacccttctccactgatgggaggttttggactcaaacacccgcctcctcaaatcatgatcaaaaacactcctgttccagccaatcctcctacaaacttcagcgcggcaaagtttgcttccttcatcacacagtattccacgggacaggtcagcgtggagatcgagtgggagctgcagaaggagaacagcaaacgctggaaccccgagatccagtacacttccaactacaacaaatctgttaatgtggactttactgtggacgctaatggtgtgtattcagagcctcgccccattggcaccagatacctgactcgtaatctgtaa

SEQ ID NO: 1336 - DNA, 2208 bp, Artificial Sequence
  Synthetic Polynucleotide
atggctgccgatggttatcttccagattggctcgaggacactctctctgaaggaataagacagtggtggaagctcaaacctggcccaccaccgccaaagcccgcagggcggcataaggacgacagcaggggtcttgtgcttcctgggtacaagtacctcggacccttcaacggactcgacaagggagagccggtcaacgaggcagacgccgcggccctcgagcacgacaaggcctacgaccggcagctcgacagcggagacaacccgtacctcaagtacaaccacgccggcgcggagtttcaggagcgccttaaagaagatacgtcttttgggggcaacctcggacgagcagtattccaggcgaaaaagagggttcttgaacctctgggcctggttgaggagcctgttaagacggccccgggaaaaaagaggccggtagagcactctcctgtggagccagactcctcctcgggaaccggaaaagcgggccagcagcctgcgaggaagagattgaattttggtcagactggagacgcagactccgtacctgacccccagcctctcggacagccaccagcagcccccacaagtttgggatctactacaatggctacaggcagtggcgcaccaatggcagacaataacgagggtgccgatggagtgggtaattcctcagggaattggcattgcgattcccaatggttgggcgacagagtcatcaccaccagcacccgaacctgggccctgcccacctacaacaaccacctctacaagcaaatctccagccaatcaggagcagcgaacgacaaccactactttggctacagcaccccctgggggtattttgacttcaacagattccactgccacttttcaccacgtgactggcaaagactcatcaacaacaactggggattccgacccaagagactcaacttcaagctctttaacattcaagtcaaagaggtcacgcagaatgacggtacgacgacgattgccaataaccttaccagcacggttccggtgtttactgactcggagtaccagctcccgtacgtcctcggctcggcgcatcaaggatgcctcccgccgtttccagcggacgtcttcatggtcccacagtatggatacctcaccctgaacaacgggagtcaggcggtaggacgctcttccttttactgcctggagtactttccttctcagatgcttcgtaccggaaacaactttaccttcagttacacctttgaagacgttcctttccacagcagctacgctcacagtcaaagtctggaccggctgatgaatcctcttatcgaccagtacctgtattatctaaacaaaacacaatcaaatagtggaactcttcagcagtctcggctactgtttagtcaagctggacctaccagcatgtctcttcaagctaaaaactggctgcctggaccttgctacagacaacagcgtctgtcaaagcaggcaaacgacaacaacaacagcaactttccctggactgcggctacaaagtatcatctaaatggccgggactcgttggttaatccaggaccagctatggccagccacaaagacgatgaagaaaagtttttccccatgcatggaaccctgatatttggcaaacaagggacaaatgctaacgacgcggatttggacaatgtcatgattacagatgaagaagaaatccgtaccaccaatcccgtggctacggagcagtacgggactgtgtcaaataatttgcaaaactcaaatactggtccaactactggaactgtcaatcaccaaggagcgttacctggtatggtgtggcaggatcgagacgtgtacctgcagggacccatttgggccaagattcctcacaccgacggacactttcacccttctccactgatgggaggttttggactcaaacacccgcctcctcaaatcatgatcaaaaacactcctgttccagccaatcctcctacaaacttcagcgcggcaaagtttgcttccttcatcacacagtattccacgggacaggtcagcgtggagatcgagtgggagctgcagaaggagaacagcaaacgctggaaccccgagatccagtacacttccaactacaacaaatctgttaatgtggactttactgtggacgctaatggtgtgtattcagagcctcgccccattggcaccagatacctgactcgtaatctgtaa

SEQ ID NO: 1337 - DNA, 2208 bp, Artificial Sequence
  Synthetic Polynucleotide
atggctgccgatggttatcttccagattggctcgaggacactctctctgaaggaataagacagtggtggaagctcaaacctggcccaccaccaccaaggcccgcagagcggcatcaggacgacagcaggggtcttgtgcttcctgggtacaagtacctcggacccttcaacggactcgacaaaggagagccggtcaacgaggcagacgctgcggccctcgagcacgacaaggcctacgaccggcagctcgacagcggagacaacccgtacctcaagtacaaccacgccgacgcggagtttcaggagcgtcttaaagaagatacgtcttttgggggcaacctcggacgagcagtcttccaggcgaaaaagagggttcttgaacctctgggcctggttgaggaacctgttaagacggctccgggaaaaaagaggccggtagagcactctcctgcggagccagactcctcctcgggaaccggaaaagcgggccagcagcctgcaagaaagagattgaatttcggtcagactggagacgcagactccgtacctgacccccagcctctcggacagccaccagcagcccccacaagtttgggatctactacaatggctacaggcagtggcgcaccaatggcagacaataacgagggtgccgatggagtgggtaattcctcaggaaattggcattgcgattcccaatggctgggcgacagagtcatcaccaccagcacccgaacctgggccctgcccacctacaacaaccacctctacaagcaaatctccagccaatcaggagcatcgaacgacaaccactactttggctacagcaccccttgggggtattttgacttcaacagattccactgtcacttctccccacgtgactggcaaagactcatcaacaacaactggggattccgacccaagagactcaacttcaagctctttaacattcaagtcaaagaggtcacgcagaatgacggtacgacgacgattgccaataaccttaccagcacggttcaggtgtttactgactcggagtaccagctcccgtacgtcctcggctcggcgcatcaaggatgcctcccgccgtttccagcggacgtcttcatggtcccacagtatggatacctcaccctgaacaacgggagtcaggcggtaggacgctcttccttttactgcctggagtactttccttctcagatgctgcgtaccggaaacaactttaccttcagctacacctttgaggacgtgcccttccacagcagctacgctcacagccagagtttggaccggctgatgaatcctctgatcgaccagtatctgtattatctgaacaggacacaatcaaatagtggaactcttcagcagtctaggctactgtttagccaagctggacccaccagcatgtcccttcaagctaaaaactggctgcctggaccttgctacagacagcagcgtctgtcaaagcaggcaaacgacaacaacaacagcaactttccctggactgcggctacaaagtatcatctaaatggtcgggactcgttggttaatccaggaccagctatggccagccacaaagacgatgaagaaaagtttttccccatgcatggaaccctgatatttggtaaacaaggaacaaatgctaacgacgcggatttggaacatgtcatgattacagatgaagaagaaatcaggaccaccaatcccgtggctacagagcagtacggaaacgtgtcaaataatttgcaaaactcaaatactggtccaactacagaaaatgtcaatcaccagggagcgttacctggtatggtgtggcaggatcgagacgtgtacctgcagggacccatttgggccaagattcctcacaccgacggacactttcacccttctccgctgatgggaggttttggactcaaacacccgcctcctcagatcatgatcaaaaacactcccgttccagccaatcctcccacaaacttcagttctgccaagtttgcttctttcatcacacagtattccacgggacaggttagcgtggagatcgagtgggagctgcagaaggagaacagcaaacgctggaaccccgagatccagtacacttccaactacaacaagtctgttaatgtggactttactgtggacactaatggtgtgtattcagagcctcgccccattggcaccagatacctgactcgtaatctgtaa

SEQ ID NO: 1338 - DNA, 2208 bp, Artificial Sequence
  Synthetic Polynucleotide
atggctgccgatggttatcttccagattggctcgaggacactctctctgaaggaataagacagtggtggaagctcaaacctggcccaccaccaccaaagcccgcagagcggcatcaggacgacagcaggggtcttgtgcttcctgggtacaagtacctcggacccttcaacggactcgacaaaggagagccggtcaacgaggcagacgctgcggccctcgagcacgacaaggcctacgaccggcagctcgacagcggagacaacccgtacctcaagtacaaccacgccgacgcggagtttcaggagcgtcttaaagaagatacgtcttttgggggcaacctcggacgagcagtcttccaggcgaaaaagagggttcttgaacctctgggcctggttgaggaacctgttaagacggctccgggaaaaaagaggccggtagagcactctcctgcggagccagactcctcctcgggaaccggaaaagcgggccagcagcctgcaagaaagagattgaatttcggtcagactggagacgcagactccgtacctgacccccagcctctcggacagccaccagcagcccccacaagtttgggatctactacaatggctacaggcagtggcgcaccaatggcagacaataacgagggtgccgatggagtgggtaattcctcaggaaattggcattgcgattcccaatggctgggcgacagagtcatcaccaccagcacccgaacctgggccctgcccacctacaacaaccacctctacaagcaaatctccagccaatcaggagcagcgaacgacaaccactactttggctacagcaccccctgggggtattttgacttcaacagattccactgccacttttcaccacgtgactggcaaagactcatcaacaacaactggggattccgacccaagagactcaacttcaagctctttaacattcaagtcaaagaggtcacgcagaatgacggtacgacgacgattgccaataaccttaccagcacggttccggtgtttactgactcggagtaccagctcccgtacgtcctcggctcggcgcatcaaggatgcctcccgccgtttccagcggacgtcttcatggtcccacagtatggatacctcaccctgaacaacgggagtcaggcggtaggacgctcttccttttactgcctggagtactttccttctcagatgcttcgtaccggaaacaactttaccttcagttacacctttgaagacgttcctttccacagcagctacgctcacagtcaaagtctggaccggctgatgaatcctcttatcgaccagtacctgtattatctaaacaaaacacaatcaaatagtggaactcttcagcagtctcggctactgtttagtcaagctggacctaccagcatgtctcttcaagctaaaaactggctgcctggaccttgctacagacaacagcgtctgtcaaagcaggcaaacgacaacaacaacagcaactttccctggactgcggctacaaagtatcatctaaatggccgggactcgttggttaatccaggaccagctatggccagccacaaagacgatgaagaaaagtttttccccatgcatggaaccctgatatttggcaaacaagggacaaatgctaacgacgcggatttggacaatgtcatgattacagatgaagaagaaatccgtaccaccaatcccgtggctacggagcagtacgggactgtgtcaaataatttgcaaaactcaaatactggtccaactactggaactgtcaatcaccaaggagcgttacctggtatggtgtggcaggatcgagacgtgtaccttcagggacccatttgggccaagattcctcacaccgatggacactttcacccttctccgctgatgggaggttttggactcaaacacccgcctcctcagatcatgatcaaaaacactcccgttccagccaatcctcccacaaacttcagttctgccaagtttgcttctttcatcacacagtattccacgggacaggttagcgtggagatcgagtgggagctgcagaaggagaacagcaaacgctggaaccccgagatccagtacacttccaactacaacaagtctgttaatgtggactttactgtggacactaatggtgtgtattcagagcctcgccccattggcaccagatacctgactcgtaatctgtaa

SEQ ID NO: 1339 - DNA, 2208 bp, Artificial Sequence
  Synthetic Polynucleotide
atggctgccgatggttatcttccagattggctcgaggacactctctctgaaggaataagacagtggtggaagctcaaacctggcccaccaccgccaaagcccgcagagcggcataaggacgacagcaggggtcttgtgcttcctgggtacaagtacctcggacccttcaacggactcgacaaaggagagccggtcaacgaggcagacgccgcggccctcgagcacgacaaggcctacgaccggcagctcgacagcggagacaacccgtacctcaagtacaaccacgccgacgcggagtttcaggagcgccttaaagaagatacgtcttttgggggcaacctcgcaagagcagtattccaggcgaaaaagagggttcttgaacctctgggcctggttgaggagcctgttaagacggctccgggaaaaaagaggccggtagagcactctcctgcggggccagattcctcctccggaactggaaagtcgggccaacagcctgcaagaaagagattgaattttggtcagactggagacgcagactccgtacctgacccccagcctctcggacagccaccagcagccccctctggtctgggaactaatacgatggcttcaggcagtggcgcaccaatggcagacaataacgagggcgccgacggagtgggtaattcctcgggaaattggcattgcgattccacatggatgggcgacagagtcatcaccaccagcacccgcacctgggctctgcccacctacaacaaccatctgtacaagcaaatttccagccagtctggagcagcgaacgacaaccactactttggctacagcaccccttgggggtattttgacttcaacagattccactgccacttctccccacgtgactggcaaagactcatcaacaacaattggggattccggcccaaaagactcaacttcgagctctttaacattcaagtcaaggaggtcacgcagaatgacggtacgacgacgattgccaataaccttaccagcacggttcaggtgtttactgactcggagtaccagctcccgtacgtcctcggctcggcgcatcaaggatgcctcccgccgttcccagcagacgtcttcatggtgccacagtatggatacctcaccctgaacaacgggagtcaggcggtaggacgctcttcattttactgcctggagtactttccttctcagatgctgcgtaccggaaacaactttaccttcagctacacctttgaggacgtgcccttccacagcagctacgctcacagccagagtttggaccggctgatgaatcctctgatcgaccagtatctgtattatctgaacaggacacaatcaaatagtggaactcttcagcagtctaggctactgtttagccaagctggacccaccagcatgtcccttcaagctaaaaactggctgcctggaccttgctacagacagcagcgtctgtcaaagcaggcaaacgacaacaacaacagcaactttccctggactgcggctacaaagtatcatctaaatggtcgggactcgttggttaatccaggaccagctatggccagccacaaagacgatgaagaaaagtttttccccatgcatggaaccctgatatttggtaaacaaggaacaaatgctaacgacgcggatttggaacatgtcatgattacagatgaagaagaaatcaggaccaccaatcccgtggctacagagcagtacggaaacgtgtcaaataatttgcaaaactcaaatactggtccaactacagaaaatgtcaatcaccagggagcgttacctggtatggtgtggcaggatcgagacgtgtacctgcagggacccatttgggccaagattcctcacaccgacggacactttcacccttctccactgatgggaggttttggactcaaacacccgcctcctcaaatcatgatcaaaaacactcctgttccagccaatcctcctacaaacttcagcgcggcaaagtttgcttccttcatcacacagtattccacgggacaggtcagcgtggagatcgagtgggagctgcagaaggagaacagcaaacgctggaaccccgagatccagtacacttccaactacaacaaatctgttaatgtggactttactgtggacgctaatggtgtgtattcagagcctcgccccattggcaccagatacctgactcgtaatctgtaa

SEQ ID NO: 1340 - DNA, 2208 bp, Artificial Sequence
  Synthetic Polynucleotide
atggctgccgatggttatcttccagattggctcgaggacattctctctgaaggaataagacagtggtggaagctcaaacctggcccaccaccaccaaagcccgcagagcggcataaggacgacagcaggggtcttgtgcttcctgggtacaagtacctcggacccttcaacggactcgacaaaggagagccggtcaacgaggcagacgccgcggccctcgagcacgacaaggcctacgaccggcagctcgacagcggagacaacccgtacctcaagtacaaccacgccgacgcggagtttcaggagcgtcttaaagaagatacgtcttttgggggcaacctcggacgagcagtcttccaggcgaaaaagagggttcttgaacctctgggcctggttgaggaacctgttaagacggctccgggaaaaaagaggccggtagagcactctcctgcggagccagactcctcctcgggaaccggaaaagcgggccagcagcctgcaagaaagagattgaatttcggtcagactggagacgcagactccgtacctgacccccagcctctcggacagccaccagcagcccccacaagtttgggatctactacaatggctacaggcagtggcgcaccaatggcagacaataacgagggtgccgatggagtgggtaattcctcaggaaattggcattgcgattcccaatggctgggcgacagagtcatcaccaccagcacccgaacctgggccctgcccacctacaacaaccacctctacaagcaaatctccagccaatcaggagcatcgaacgacaaccactactttggctacagcaccccttgggggtattttgacttcaacagattccactgtcacttctccccacgtgactggcaaagactcatcaacaacaactggggattccgacccaagagactcaacttcaagctctttaacattcaagtcaaagaggtcacgcagaatgacggtacgacgacgattgccaataaccttaccagcacggttcaggtgtttactgactcggagtaccagctcccgtacgtcctcggctcggcgcatcaaggatgcctcccgccgtttccagcggacgtcttcatggtcccacagtatggatacctcaccctgaacaacgggagtcaggcggtaggacgctcttccttttactgcctggagtactttccttctcagatgctgcgtaccggaaacaactttaccttcagctacacctttgaggacgtgcccttccacagcagctacgctcacagccagagtttggaccggctgatgaatcctctgatcgaccagtatctgtattatctgaacaggacacaatcaaatagtggaactcttcagcagtctaggctactgtttagccaagctggacccaccagcatgtcccttcaagctaaaaactggctgcctggaccttgctacagacagcagcgtctgtcaaagcaggcaaacgacaacaacaacagcaactttccctggactgcggctacaaagtatcatctaaatggtcgggactcgttggttaatccaggaccagctatggccagccacaaagacgatgaagaaaagtttttccccatgcatggaaccctgatatttggtaaacaaggaacaaatgctaacgacgcggatttggaacatgtcatgattacagatgaagaagaaatcaggaccaccaatcccgtggctacagagcagtacggaaacgtgtcaaataatttgcaaaactcaaatactggtccaactacagaaaatgtcaatcaccagggagcgttacctggtatggtgtggcaggatcgagacgtgtacctgcagggacccatttgggccaagattcctcacaccgacggacactttcacccttctccactgatgggaggttttggactcaaacacccgcctcctcaaatcatgatcaaaaacactcctgttccagccaatcctcctacaaacttcagcgcggcaaagtttgcttccttcatcacacagtattccacgggacaggtcagcgtggagatcgagtgggagctgcagaaggagaacagcaaacgctggaaccccgagatccagtacacttccaactacaacaaatctgttaatgtggactttactgtggacgctaatggtgtgtattcagagcctcgccccattggcaccagatacctgactcgtaatctgtaa

SEQ ID NO: 1341 - DNA, 2208 bp, Artificial Sequence
  Synthetic Polynucleotide
atggctgccgatggttatcttccagattggctcgaggacactctctctgaaggaataagacagtggtggaagctcaaacctggcccaccaccaccaaggcccgcagagcggcatcaggacgacagcaggggtcttgtgcttcctgggtacaagtacctcggacccttcaacggactcgacaaaggagagccggtcaacgaggcagacgctgcggccctcgagcacgacaaggcctacgaccggcagctcgacagcggagacaacccgtacctcaagtacaaccacgccgacgcggagtttcaggagcgtcttaaagaagatacgtcttttgggggcaacctcggacgagcagtattccaggcgaaaaagagggttcttgaacctctgggcctggttgaggagcctgttaagacggccccgggaaaaaagaggccggtagagcactctcctgtggagccagactcctcctcgggaaccggaaaagcgggccagcagcctgcgaggaagagattgaattttggtcagactggagacgcagactccgtacctgacccccagcctctcggacagccaccagcagcccccacaagtttgggatctactacaatggctacaggcagtggcgcaccaatggcagacaataacgagggtgccgatggagtgggtaattcctcagggaattggcattgcgattcccaatggttgggcgacagagtcatcaccaccagcacccgaacctgggccctgcccacctacaacaaccacctctacaagcaaatctccagccaatcaggagcagcgaacgacaaccactactttggctacagcaccccctgggggtattttgacttcaacagattccactgccacttttcaccacgtgactggcaaagactcatcaacaacaactggggattccgacccaagagactcaacttcaagctctttaacattcaagtcaaagaggtcacgcagaatgacggtacgacgacgattgccaataaccttaccagcacggttccggtgtttactgactcggagtaccagctcccgtacgtcctcggctcggcgcatcaaggatgcctcccgccgtttccagcggacgtcttcatggtcccacagtatggatacctcaccctgaacaacgggagtcaggcggtaggacgctcttccttttactgcctggagtactttccttctcagatgcttcgtaccggaaacaactttaccttcagttacacctttgaagacgttcctttccacagcagctacgctcacagtcaaagtctggaccggctgatgaatcctcttatcgaccagtacctgtattatctaaacaaaacacaatcaaatagtggaactcttcagcagtctcggctactgtttagtcaagctggacctaccagcatgtctcttcaagctaaaaactggctgcctggaccttgctacagacaacagcgtctgtcaaagcaggcaaacgacaacaacaacagcaactttccctggactgcggctacaaagtatcatctaaatggccgggactcgttggttaatccaggaccagctatggccagccacaaagacgatgaagaaaagtttttccccatgcatggaaccctgatatttggcaaacaagggacaaatgctaacgacgcggatttggacaatgtcatgattacagatgaagaagaaatccgtaccaccaatcccgtggctacggagcagtacgggactgtgtcaaataatttgcaaaactcaaatactggtccaactactggaactgtcaatcaccaaggagcgttacctggtatggtgtggcaggatcgagacgtgtaccttcagggacccatttgggccaagattcctcacaccgatggacactttcacccttctccgctgatgggaggttttggactcaaacacccgcctcctcagatcatgatcaaaaacactcccgttccagccaatcctcccacaaacttcagttctgccaagtttgcttctttcatcacacagtattccacgggacaggttagcgtggagatcgagtgggagctgcagaaggagaacagcaaacgctggaaccccgagatccagtacacttccaactacaacaagtctgttaatgtggactttactgtggacactaatggtgtgtattcagagcctcgccccattggcaccagatacctgactcgtaatctgtaa

SEQ ID NO: 1342 - DNA, 2208 bp, Artificial Sequence
  Synthetic Polynucleotide
atggctgccgatggttatcttccagattggctcgaggacactctctctgaaggaataagacagtggtggaagctcaaacctggcccaccaccgccaaagcccgcagagcggcataaggacgacagcaggggtcttgtgcttcctgggtacaagtacctcggacccttcaacggactcgacaaaggagagccggtcaacgaggcagacgccgcggccctcgagcacgacaaggcctacgaccggcagctcgacagcggagacaacccgtacctcaagtacaaccacgccgacgcggagtttcaggagcgccttaaagaagatacgtcttttgggggcaacctcgcaagagcagtattccaggcgaaaaagagggttcttgaacctctgggcctggttgaggagcctgttaagacggctccgggaaaaaagaggccggtagagcactctcctgcggagccagattcctcctccggaaccggaaaagcgggccagcagcctgcaagaaagagattgaatttcggtcagactggagacgcagactccgtacctgacccccagcctctcggacagccaccagcagcccccacaagtttgggatctactacaatggctacaggcagtggcgcaccaatggcagacaataacgagggtgccgatggagtgggtaattcctcaggaaattggcattgcgattcccaatggctgggcgacagagtcatcaccaccagcacccgaacctgggccctgcccacctacaacaaccacctctacaagcaaatctccagccaatcaggagcatcgaacgacaaccactactttggctacagcaccccttgggggtattttgacttcaacagattccactgtcacttctccccacgtgactggcaaagactcatcaacaacaactggggattccgacccaagagactcaacttcaagctctttaacattcaagtcaaagaggtcacgcagaatgacggtacgacgacgattgccaataaccttaccagcacggttcaggtgtttactgactcggagtaccagctcccgtacgtcctcggctcggcgcatcaaggatgcctcccgccgtttccagcggacgtcttcatggtcccacagtatggatacctcaccctgaacaacgggagtcaggcggtaggacgctcttccttttactgcctggagtactttccttctcagatgctgcgtaccggaaacaactttaccttcagctacacctttgaggacgtgcccttccacagcagctacgctcacagccagagtttggaccggctgatgaatcctctgatcgaccagtatctgtattatctgaacaggacacaatcaaatagtggaactcttcagcagtctaggctactgtttagccaagctggacccaccagcatgtcccttcaagctaaaaactggctgcctggaccttgctacagacagcagcgtctgtcaaagcaggcaaacgacaacaacaacagcaactttccctggactgcggctacaaagtatcatctaaatggtcgggactcgttggttaatccaggaccagctatggccagccacaaagacgatgaagaaaagtttttccccatgcatggaaccctgatatttggtaaacaaggaacaaatgctaacgacgcggatttggaacatgtcatgattacagatgaagaagaaatcaggaccaccaatcccgtggctacagagcagtacggaaacgtgtcaaataatttgcaaaactcaaatactggtccaactacagaaaatgtcaatcaccagggagcgttacctggtatggtgtggcaggatcgagacgtgtacctgcagggacccatttgggccaagattcctcacaccgacggacactttcacccttctccactgatgggaggttttggactcaaacacccgcctcctcaaatcatgatcaaaaacactcctgttccagccaatcctcctacaaacttcagcgcggcaaagtttgcttccttcatcacacagtattccacgggacaggtcagcgtggagatcgagtgggagctgcagaaggagaacagcaaacgctggaaccccgagatccagtacacttccaactacaacaaatctgttaatgtggactttactgtggacgctaatggtgtgtattcagagcctcgccccattggcaccagatacctgactcgtaatctgtaa

SEQ ID NO: 1343 - DNA, 2208 bp, Artificial Sequence
  Synthetic Polynucleotide
atggctgccgatggttatcttccagattggctcgaggacactctctctgaaggaataagacagtggtggaagctcaaacctggcccaccaccaccaaggcccgcagagcggcatcaggacgacagcaggggtcttgtgcttcctgggtacaagtacctcggacccttcaacggactcgacaaaggagagccggtcaacgaggcagacgctgcggccctcgagcacgacaaggcctacgaccggcagctcgacagcggagacaacccgtacctcaagtacaaccacgccgacgcggagtttcaggagcgtcttaaagaagatacgtcttttgggggcaacctcggacgagcagtcttccaggcgaaaaagagggttcttgaacctctgggcctggttgaggaacctgttaagacggctccgggaaaaaagaggccggtagagcactctcctgcggagccagactcctcctcgggaaccggaaaagcgggccagcagcctgcaagaaagagattgaatttcggtcagactggagacgcagactccgtacctgacccccagcctctcggacagccaccagcagcccccacaagtttgggatctactacaatggctacaggcagtggcgcaccaatggcagacaataacgagggtgccgatggagtgggtaattcctcagggaattggcattgcgattcccaatggttgggcgacagagtcatcaccaccagcacccgaacctgggccctgcccacctacaacaaccacctctacaagcaaatctccagccaatcaggagcagcgaacgacaaccactactttggctacagcaccccctgggggtattttgacttcaacagattccactgccacttttcaccacgtgactggcaaagactcatcaacaacaactggggattccgacccaagagactcaacttcaagctctttaacattcaagtcaaagaggtcacgcagaatgacggtacgacgacgattgccaataaccttaccagcacggttccggtgtttactgactcggagtaccagctcccgtacgtcctcggctcggcgcatcaaggatgcctcccgccgtttccagcggacgtcttcatggtcccacagtatggatacctcaccctgaacaacgggagtcaggcggtaggacgctcttccttttactgcctggagtactttccttctcagatgcttcgtaccggaaacaactttaccttcagttacacctttgaagacgttcctttccacagcagctacgctcacagtcaaagtctggaccggctgatgaatcctcttatcgaccagtacctgtattatctaaacaaaacacaatcaaatagtggaactcttcagcagtctcggctactgtttagtcaagctggacctaccagcatgtctcttcaagctaaaaactggctgcctggaccttgctacagacaacagcgtctgtcaaagcaggcaaacgacaacaacaacagcaactttccctggactgcggctacaaagtatcatctaaatggccgggactcgttggttaatccaggaccagctatggccagccacaaagacgatgaagaaaagtttttccccatgcatggaaccctgatatttggcaaacaagggacaaatgctaacgacgcggatttggacaatgtcatgattacagatgaagaagaaatccgtaccaccaatcccgtggctacggagcagtacgggactgtgtcaaataatttgcaaaactcaaatactggtccaactactggaactgtcaatcaccaaggagcgttacctggtatggtgtggcaggatcgagacgtgtaccttcagggacccatttgggccaagattcctcacaccgatggacactttcacccttctccgctgatgggaggttttggactcaaacacccgcctcctcagatcatgatcaaaaacactcccgttccagccaatcctcccacaaacttcagttctgccaagtttgcttctttcatcacacagtattccacgggacaggttagcgtggagatcgagtgggagctgcagaaggagaacagcaaacgctggaaccccgagatccagtacacttccaactacaacaagtctgttaatgtggactttactgtggacactaatggtgtgtattcagagcctcgccccattggcaccagatacctgactcgtaatctgtaa

SEQ ID NO: 1344 - DNA, 2208 bp, Artificial Sequence
  Synthetic Polynucleotide
atggctgccgatggttatcttccagattggctcgaggacactctctctgaaggaataagacagtggtggaagctcaaacctggcccaccaccgccaaagcccgcagggcggcataaggacgacagcaggggtcttgtgcttcctgggtacaagtacctcggacccttcaacggactcgacaagggagagccggtcaacgaggcagacgccgcggccctcgagcacgacaaggcctacgaccggcagctcgacagcggagacaacccgtacctcaagtacaaccacgccggcgcggagtttcaggagcgccttaaagaagatacgtcttttgggggcaacctcggacgagcagtattccaggcgaaaaagagggttcttgaacctctgggcctggttgaggagcctgttaagacggctccgggaaaaaagaggccggtagagcactctcctgtggagccagactcctcctcgggaaccggaaaagcgggccagcagcctgcgaggaagagattgaattttggtcagactggagacgcagactccgtacctgacccccagcctctcggacagccaccagcagcccccacaagtttgggatctactacaatggctacaggcagtggcgcaccaatggcagacaataacgagggtgccgatggagtgggtaattcctcagggaattggcattgcgattcccaatggttgggcgacagagtcatcaccaccagcacccgaacctgggccctgcccacctacaacaaccacctctacaagcaaatctccagccaatcaggagcagcgaacgacaaccactactttggctacagcaccccctgggggtattttgacttcaacagattccactgccacttttcaccacgtgactggcaaagactcatcaacaacaactggggattccgacccaagagactcaacttcaagctctttaacattcaagtcaaagaggtcacgcagaatgacggtacgacgacgattgccaataaccttaccagcacggttccggtgtttactgactcggagtaccagctcccgtacgtcctcggctcggcgcatcaaggatgcctcccgccgtttccagcggacgtcttcatggtcccacagtatggatacctcaccctgaacaacgggagtcaggcggtaggacgctcttccttttactgcctggagtactttccttctcagatgcttcgtaccggaaacaactttaccttcagttacacctttgaagacgttcctttccacagcagctacgctcacagtcaaagtctggaccggctgatgaatcctcttatcgaccagtacctgtattatctaaacaaaacacaatcaaatagtggaactcttcagcagtctcggctactgtttagtcaagctggacctaccagcatgtctcttcaagctaaaaactggctgcctggaccttgctacagacaacagcgtctgtcaaagcaggcaaacgacaacaacaacagcaactttccctggactgcggctacaaagtatcatctaaatggccgggactcgttggttaatccaggaccagctatggccagccacaaagacgatgaagaaaagtttttccccatgcatggaaccctgatatttggcaaacaagggacaaatgctaacgacgcggatttggacaatgtcatgattacagatgaagaagaaatccgtaccaccaatcccgtggctacggagcagtacgggactgtgtcaaataatttgcaaaactcaaatactggtccaactactggaactgtcaatcaccaaggagcgttacctggtatggtgtggcaggatcgagacgtgtaccttcagggacccatttgggccaagattcctcacaccgatggacactttcacccttctccgctgatgggaggttttggactcaaacacccgcctcctcagatcatgatcaaaaacactcccgttccagccaatcctcccacaaacttcagttctgccaagtttgcttctttcatcacacagtattccacgggacaggttagcgtggagatcgagtgggagctgcagaaggagaacagcaaacgctggaaccccgagatccagtacacttccaactacaacaagtctgttaatgtggactttactgtggacactaatggtgtgtattcagagcctcgccccattggcaccagatacctgactcgtaatctgtaa

SEQ ID NO: 1345 - DNA, 2208 bp, Artificial Sequence
  Synthetic Polynucleotide
atggctgccgatggttatcttccagattggctcgaggacactctctctgaaggaataagacagtggtggaagctcaaacctggcccaccaccaccaaggcccgcagagcggcatcaggacgacagcaggggtcttgtgcttcctgggtacaagtacctcggacccttcaacggactcgacaaaggagagccggtcaacgaggcagacgctgcggccctcgagcacgacaaggcctacgaccggcagctcgacagcggagacaacccgtacctcaagtacaaccacgccgacgcggagtttcaggagcgtcttaaagaagatacgtcttttgggggcaacctcggacgagcagtcttccaggcgaaaaagagggttcttgaacctctgggcctggttgaggaacctgttaagacggctccgggaaaaaagaggccggtagagcactctcctgcggagccagactcctcctcgggaaccggaaaagcgggccagcagcctgcaagaaagagattgaatttcggtcagactggagacgcagactccgtacctgacccccagcctctcggacagccaccagcagcccccacaagtttgggatctactacaatggctacaggcagtggcgcaccaatggcagacaataacgagggtgccgatggagtgggtaattcctcaggaaattggcattgcgattcccaatggctgggcgacagagtcatcaccaccagcacccgaacctgggccctgcccacctacaacaaccacctctacaagcaaatctccagccaatcaggagcatcgaacgacaaccactactttggctacagcacccctttggggtattttgacttcaacagattccactgtcacttctccccacgtgactggcaaagactcatcaacaacaactggggattccgacccaagagactcaacttcaagctctttaacattcaagtcaaagaggtcacgcagaatgacggtacgacgacgattgccaataaccttaccagcacggttcaggtgtttactgactcggagtaccagctcccgtacgtcctcggctcggcgcatcaaggatgcctcccgccgtttccagcggacgtcttcatggtcccacagtatggatacctcaccctgaacaacgggagtcaggcggtaggacgctcttccttttactgcctggagtactttccttctcagatgctgcgtaccggaaacaactttaccttcagctacacctttgaggacgtgcccttccacagcagctacgctcacagccagagtttggaccggctgatgaatcctctgatcgaccagtatctgtattatctgaacaggacacaatcaaatagtggaactcttcagcagtctaggctactgtttagccaagctggacccaccagcatgtcccttcaagctaaaaactggctgcctggaccttgctacagacagcagcgtctgtcaaagcaggcaaacgacaacaacaacagcaactttccctggactgcggctacaaagtatcatctaaatggtcgggactcgttggttaatccaggaccagctatggccagccacaaagacgatgaagaaaagtttttccccatgcatggaaccctgatatttggtaaacaaggaacaaatgctaacgacgcggatttggaacatgtcatgattacagatgaagaagaaatcaggaccaccaatcccgtggctacagagcagtacggaaacgtgtcaaataatttgcaaaactcaaatactggtccaactacagaaaatgtcaatcaccagggagcgttacctggtatggtgtggcaggatcgagacgtgtacctgcagggacccatttgggccaagattcctcacaccgacggacactttcacccttctccactgatgggaggttttggactcaaacacccgcctcctcaaatcatgatcaaaaacactcctgttccagccaatcctcctacaaacttcagcgcggcaaagtttgcttccttcatcacacagtattccacgggacaggtcagcgtggagatcgagtgggagctgcagaaggagaacagcaaacgctggaaccccgagatccagtacacttccaactacaacaaatctgttaatgtggactttactgtggacgctaatggtgtgtattcagagcctcgccccattggcaccagatacctgactcgtaatctgtaa

SEQ ID NO: 1346 - DNA, 2208 bp, Artificial Sequence
  Synthetic Polynucleotide
atggctgccgatggttatcttccagattggctcgaggacactctctctgaaggaataagacagtggtggaagctcaaacctggcccaccaccgccaaagcccgcagggcggcataaggacgacagcaggggtcttgtgcttcctgggtacaagtacctcggacccttcaacggactcgacaagggagagccggtcaacgaggcagacgccgcggccctcgagcacgacaaggcctacgaccggcagctcgacagcggagacaacccgtacctcaagtacaaccacgccggcgcggagtttcaggagcgccttaaagaagatacgtcttttgggggcaacctcggacgagcagtattccaggcgaaaaagagggttcttgaacctctgggcctggttgaggagcctgttaagacggccccgggaaaaaagaggccggtagagcactctcctgtggagccagactcctcctcgggaaccggaaaagcgggccagcagcctgcgaggaagagattgaattttggtcagactggagacgcagactccgtacctgacccccagcctctcggacagccaccagcagcccccacaagtttgggatctactacaatggctacaggcagtggcgcaccaatggcagacaataacgagggtgccgatggagtgggtaattcctcagggaattggcattgcgattcccaatggttgggcgacagagtcatcaccaccagcacccgaacctgggccctgcccacctacaacaaccacctctacaagcaaatctccagccaatcaggagcagcgaacgacaaccactactttggctacagcaccccctgggggtattttgacttcaacagattccactgccacttttcaccacgtgactggcaaagactcatcaacaacaactggggattccgacccaagagactcaacttcaagctctttaacattcaagtcaaagaggtcacgcagaatgacggtacgacgacgattgccaataaccttaccagcacggttccggtgtttactgactcggagtaccagctcccgtacgtcctcggctcggcgcatcaaggatgcctcccgccgtttccagcggacgtcttcatggtcccacagtatggatacctcaccctgaacaacgggagtcaggcggtaggacgctcttccttttactgcctggagtactttccttctcagatgcttcgtaccggaaacaactttaccttcagttacacctttgaagacgttcctttccacagcagctacgctcacagtcaaagtctggaccggctgatgaatcctcttatcgaccagtatctgtattatctgaacaggacacaatcaaatagtggaactcttcagcagtctaggctactgtttagccaagctggacccaccagcatgtcccttcaagctaaaaactggctgcctggaccttgctacagacagcagcgtctgtcaaagcaggcaaacgacaacaacaacagcaactttccctggactgcggctacaaagtatcatctaaatggtcgggactcgttggttaatccaggaccagctatggccagccacaaagacgatgaagaaaagtttttccccatgcatggaaccctgatatttggtaaacaaggaacaaatgctaacgacgcggatttggaacatgtcatgattacagatgaagaagaaatcaggaccaccaatcccgtggctacagagcagtacggaaacgtgtcaaataatttgcaaaactcaaatactggtccaactacagaaaatgtcaatcaccagggagcgttacctggtatggtgtggcaggatcgagacgtgtacctgcagggacccatttgggccaagattcctcacaccgacggacactttcacccttctccactgatgggaggttttggactcaaacacccgcctcctcaaatcatgatcaaaaacactcctgttccagccaatcctcctacaaacttcagcgcggcaaagtttgcttccttcatcacacagtattccacgggacaggtcagcgtggagatcgagtgggagctgcagaaggagaacagcaaacgctggaaccccgagatccagtacacttccaactacaacaaatctgttaatgtggactttactgtggacgctaatggtgtgtattcagagcctcgccccattggcaccagatacctgactcgtaatctgtaa

SEQ ID NO: 1347 - DNA, 2208 bp, Artificial Sequence
  Synthetic Polynucleotide
atggctgccgatggttatcttccagattggctcgaggacattctctctgaaggaataagacagtggtggaagctcaaacctggcccaccaccaccaaagcccgcagagcggcataaggacgacagcaggggtcttgtgcttcctgggtacaagtacctcggacccttcaacggactcgacaaaggagagccggtcaacgaggcagacgccgcggccctcgagcacgacaaggcctacgaccggcagctcgacagcggagacaacccgtacctcaagtacaaccacgccgacgcggagtttcaggagcgtcttaaagaagatacgtcttttgggggcaacctcggacgagcagtcttccaggcaaaaaagagggttcttgaacctctgggcctggttgaggaacctgttaagacggctccgggaaaaaagaggccggtagagcaatctcctgcggagccagactcctcctcgggaaccggaaaggcgggcaaccagcctgcaagaaagagattgaattttggtcagactggagacgcagactccgtacctgacccccagcctctcggacagccaccagcagccccctctggtctgggatctactacaatggctacaggcagtggcgcaccaatggcagacaataacgagggtgccgatggagtgggtaattcctcaggaaattggcattgcgattcccaatggttgggcgacagagtcatcaccaccagcacccgaacctgggccctgcccacctacaacaatcacctctacaagcaaatctccagccaatcaggagcagcgaacgacaaccactactttggctacagcaccccctgggggtattttgacttcaacagattccactgccacttttcaccacgtgactggcaaagactcatcaacaacaactggggattccgacccaagagactcaacttcaagctctttaacattcaagtcaaagaggtcacgcagaatgacggtacgacgacgattgccaataaccttaccagcacggttccggtgtttactgactcggagtaccagctcccgtacgtcctcggctcggcgcatcaaggatgcctcccgccgtttccagcggacgtcttcatggtcccacagtatggatacctcaccctgaacaacgggagtcaggcggtaggacgctcttccttttactgcctggagtactttccttctcagatgcttcgtaccggaaacaactttaccttcagttacacctttgaagacgttcctttccacagcagctacgctcacagtcaaagtctggaccggctgatgaatcctcttatcgaccagtacctgtattatctaaacaaaacacaatcaaatagtggaactcttcagcagtctcggctactgtttagtcaagctggacctaccagcatgtctcttcaagctaaaaactggctgcctggaccttgctacagacaacagcgtctgtcaaagcaggcaaacgacaacaacaacagcaactttccctggactgcggctacaaagtatcatctaaatggccgggactcgttggttaatccaggaccagctatggccagccacaaagacgatgaagaaaagtttttccccatgcatggaaccctgatatttggcaaacaagggacaaatgctaacgacgcggatttggacaatgtcatgattacagatgaagaagaaatccgtaccaccaatcccgtggctacggagcagtacgggactgtgtcaaataatttgcaaaactcaaatactggtccaactactggaactgtcaatcaccaaggagcgttacctggtatggtgtggcaggatcgagacgtgtaccttcagggacccatttgggccaagattcctcacaccgatggacactttcacccttctccgctgatgggaggttttggactcaaacacccgcctcctcagatcatgatcaaaaacactcccgttccagccaatcctcccacaaacttcagttctgccaagtttgcttctttcatcacacagtattccacgggacaggttagcgtggagatcgagtgggagctgcagaaggagaacagcaaacgctggaaccccgagatccagtacacttccaactacaacaagtctgttaatgtggactttactgtggacactaatggtgtgtattcagagcctcgccccattggcaccagatacctgactcgtaatctgtaa

SEQ ID NO: 1348 - DNA, 2208 bp, Artificial Sequence
  Synthetic Polynucleotide
atggctgccgatggttatcttccagattggctcgaggacactctctctgaaggaataagacagtggtggaagctcaaacctggcccaccaccaccaaggcccgcagagcggcatcaggacgacagcaggggtcttgtgcttcctgggtacaagtacctcggacccttcaacggactcgacaaaggagagccggtcaacgaggcagacgctgcggccctcgagcacgacaaggcctacgaccggcagctcgacagcggagacaacccgtacctcaagtacaaccacgccgacgcggagtttcaggagcgtcttaaagaagatacgtcttttgggggcaacctcggacgagcagtcttccaggcgaaaaagagggttcttgaacctctgggcctggttgaggaacctgttaagacggctccgggaaaaaagaggccggtagagcactctcctgcggagccagactcctcctcgggaaccggaaaagcgggccagcagcctgcaagaaagagattgaatttcggtcagactggagacgcagactccgtacctgacccccagcctctcggacagccaccagcagcccccacaagtttgggatctactacaatggctacaggcagtggcgcaccaatggcagacaataacgagggtgccgatggagtgggtaattcctcaggaaattggcattgcgattcccaatggctgggcgacagagtcatcaccaccagcacccgaacctgggccctgcccacctacaacaaccacctctacaagcaaatctccagccaatcaggagcatcgaacgacaaccactactttggctacagcaccccttgggggtattttgacttcaacagattccactgtcacttctccccacgtgactggcaaagactcatcaacaacaactggggattccgacccaagagactcaacttcaagctctttaacattcaagtcaaagaggtcacgcagaatgacggtacgacgacgattgccaataaccttaccagcacggttcaggtgtttactgactcggagtaccagctcccgtacgtcctcggctcggcgcatcaaggatgcctcccgccgtttccagcggacgtcttcatggtcccacagtatggatacctcaccctgaacaacgggagtcaggcggtaggacgctcttccttttactgcctggagtactttccttctcagatgctgcgtaccggaaacaactttaccttcagctacacctttgaggacgtgcccttccacagcagctacgctcacagccagagtttggaccggctgatgaatcctctgatcgaccagtatctgtattatctgaacaggacacaatcaaatagtggaactcttcagcagtctaggctactgtttagccaagctggacccaccagcatgtcccttcaagctaaaaactggctgcctggaccttgctacagacagcagcgtctgtcaaagcaggcaaacgacaacaacaacagcaactttccctggactgcggctacaaagtatcatctaaatggtcgggactcgttggttaatccaggaccagctatggccagccacaaagacgatgaagaaaagtttttccccatgcatggaaccctgatatttggtaaacaaggaacaaatgctaacgacgcggatttggaacatgtcatgattacagatgaagaagaaatcaggaccaccaatcccgtggctacagagcagtacggaaacgtgtcaaataatttgcaaaactcaaatactggtccaactacagaaaatgtcaatcaccagggagcgttacctggtatggtgtggcaggatcgagacgtgtacctgcagggacccatttgggccaagattcctcacaccgacggacactttcacccttctccactgatgggaggttttggactcaaacacccgcctcctcaaatcatgatcaaaaacactcctgttccagccaatcctcctacaaacttcagcgcggcaaagtttgcttccttcatcacacagtattccacgggacaggtcagcgtggagatcgagtgggagctgcagaaggagaacagcaaacgctggaaccccgagatccagtacacttccaactacaacaaatctgttaatgtggactttactgtggacgctaatggtgtgtattcagagcctcgccccattggcaccagatacctgactcgtaatctgtaa

SEQ ID NO: 1349 - DNA, 2208 bp, Artificial Sequence
  Synthetic Polynucleotide
atggctgccgatggttatcttccagattggctcgaggacactctctctgaaggaataagacagtggtggaagctcaaacctggcccaccaccgccaaagcccgcagggcggcataaggacgacagcaggggtcttgtgcttcctgggtacaagtacctcggacccttcaacggactcgacaagggagagccggtcaacgaggcagacgccgcggccctcgagcacgacaaggcctacgaccggcagctcgacagcggagacaacccgtacctcaagtacaaccacgccggcgcggagtttcaggagcgccttaaagaagatacgtcttttgggggcaacctcggacgagcagtattccaggcgaaaaagagggttcttgaacctctgggcctggttgaggagcctgttaagacggctccgggaaaaaagaggccggtagagcactctcctgtggagccagactcctcctcgggaaccggaaaagcgggccagcagcctgcgagaaagagattgaatttcggtcagactggagacgcagactccgtacctgacccccagcctctcggacagccaccagcagcccccacaagtttgggatctactacaatggctacaggcagtggcgcaccaatggcagacaataacgagggtgccgatggagtgggtaattcctcaggaaattggcattgcgattcccaatggctgggcgacagagtcatcaccaccagcacccgaacctgggccctgcccacctacaacaaccacctctataagcaaatctccagccaatcaggagcatcgaacgacaaccactactttggctacagcaccccttgggggtattttgacttcaacagattccactgtcacttctccccacgtgactggcaaagactcatcaacaacaactggggattccgacccaagagactcaacttcaagctctttaacattcaagtcaaagaggtcacgcagaatgacggtacgacgacgattgccaataaccttaccagcacggttcaggtgtttactgactcggagtaccagctcccgtacgtcctcggctcggcgcatcaaggatgcctcccgccgtttccagcggacgtcttcatggtcccacagtatggatacctcaccctgaacaacgggagtcaggcggtaggacactcttccycttactgcctggagtactttccttctcagatgctgcgtaccggaaacaactttaccttcagctacacctttgaggacgtgcctttccacagcagctacgctcacagccagagtttggaccggctgatgaatcctctgatcgaccagtatctgtattatctgaacaggacacaatcaaatagtggaactcttcagcagtctaggctactgtttagccaagctggacccaccagcatgtctcttcaagctaaaaactggctgcctggaccttgctacagacagcagcgtctgtcaaagcaggcaaacgacaacaacaacagcaactttccctggactgcggctacaaagtatcatctaaatggtcgggactcgttggttaatccaggaccagctatggccagccacaaagacgatgaagaaaagtttttccccatgcatggaaccctgatatttggtaaacaaggaacaaatgctaacgacgcggatttggaacatgtcatgattacagatgaagaagaaatcaggaccaccaatcccgtggctacagagcagtacggaaacgtgtcaaataatttgcaaaactcaaatactggtccaactacagaaaatgtcaatcaccagggagcgttacctggtatggtgtggcaggatcgagacgtgtacctgcagggacccatttgggccaagattcctcacaccgacggacactttcacccttctccactgatgggaggttttggactcaaacacccgcctcctcaaatcatgatcaaaaacactcctgttccagccaatcctcctacaaacttcagcgcggcaaagtttgcttccttcatcacacagtattccacgggacaggtcagcgtggagatcgagtgggagctgcagaaggagaacagcaaacgctggaaccccgagatccagtacacttccaactacaacaaatctgttaatgtggactttactgtagacactaatggtgtgtattcagagcctcgccccattggcaccagatacctgactcgtaatctgtaa

SEQ ID NO: 1350 - DNA, 2208 bp, Artificial Sequence
  Synthetic Polynucleotide
atggctgccgatggttatcttccagattggctcgaggacactctctctgaaggaataagacagtggtggaagctcaaacctggcccaccaccgccaaagcccgcagagcggcatmaggacgacagcaggggtcttgtgcttcctgggtacaagtacctcggacccttcaacggactcgacaaaggagagccggtcaacgaggcagacgctgcggccctcgagcacgacaaggcctacgaccggcagctcgacagcggagacaacccgtacctcaagtacaaccacgccgacgcggagtttcaggagcgtcttaaagaagatacgtcttttgggggcaacctcggacgagcagtcttccaggcgaaaaagagggttcttgaacctctgggcctggttgaggaacctgttaagacggctccgggaaaaaagaggccggtagagcactctcctgcggagccagactcctcctcgggaaccggaaaagcgggccagcagcctgcaagaaagagattgaatttcggtcagactggagacgcagactccgtacctgacccccagcctctcggacagccaccagcagcccccacaagtttgggatctactacaatggctacaggcagtggcgcaccaatggcagacaataacgagggtgccgatggagtgggtaattcctcaggaaattggcattgcgattcccaatggctgggcgacagagtcatcaccaccagcacccgaacctgggccctgcccacctacaacaaccacctctacaagcaaatctccagccaatcaggagcatcgaacgacaaccactactttggctacagcaccccttgggggtattttgacttcaacagattccactgtcacttctccccacgtgactggcaaagactcatcaacaacaactggggattccgacccaagagactcaacttcaagctctttaacattcaagtcaaagaggtcacgcagaatgacggtacgacgacgattgccaataaccttaccagcacggttcaggtgtttactgactcggagtaccagctcccgtacgtcctcggctcggcgcatcaaggatgcctcccgccgtttccagcggacgtcttcatggtcccacagtatggatacctcaccctgaacaacgggagtcaggcggtaggacgctcttccttttactgcctggagtactttccttctcagatgctgcgtaccggaaacaactttaccttcagctacacctttgaggacgtgcccttccacagcagctacgctcacagccagagtttggaccggctgatgaatcctctgatcgaccagtatctgtattatctgaacaggacacaatcaaatagtggaactcttcagcagtctaggctactgtttagccaagctggacccaccagcatgtcccttcaagctaaaaactggctgcctggaccttgctacagacagcagcgtctgtcaaagcaggcaaacgacaacaacaacagcaactttccctggactgcggctacaaagtatcatctaaatggtcgggactcgttggttaatccaggaccagctatggccagccacaaagacgatgaagaaaagtttttccccatgcatggaaccctgatatttggtaaacaaggaacaaatgctaacgacgcggatttggaacatgtcatgattacagatgaagaagaaatcaggaccaccaatcccgtggctacagagcagtacggaaacgtgtcaaataatttgcaaaactcaaatactggtccaactacagaaaatgtcaatcaccagggagcgttacctggtatggtgtggcaggatcgagacgtgtacctgcagggacccatttgggccaagattcctcacaccgacggacactttcacccttctccactgatgggaggttttggactcaaacacccgcctcctcaaatcatgatcaaaaacactcctgttccagccaatcctcctacaaacttcagcgcggcaaagtttgcttccttcatcacacagtattccacgggacaggtcagcgtggagatcgagtgggagctgcagaaggagaacagcaaacgctggaaccccgagatccagtacacttccaactacaacaaatctgttaatgtggactttactgtagacactaatggtgtgtattcagagcctcgccccattggcaccagatacctgactcgtaatctgtaa

SEQ ID NO: 1351 - DNA, 2208 bp, Artificial Sequence
  Synthetic Polynucleotide
atggctgccgatggttatcttccagattggctcgaggacactctctctgaaggaataagacagtggtggaagctcaaacctggcccaccaccaccaaagcccgcagagcggcatcaggacgacagcaggggtcttgtgcttcccgggcacaagtacctcggacccttcaacggactcgacaaaggagagccggtcaacgaggcagacgctgcggccctcgagcacgacaaggcctacgaccggcagctcgacagcggagacaacccgtacctcaagtacaaccacgccgacgcggagtttcaggagcgtcttaaagaagatacgtcttttgggggcaacctcggacgagcagtcttccaggcgaaaaagagggttcttgaacctctgggcctggttgaggaacctgttaagacggctccgggaaaaaagaggccggtagagcactctcctgcggagccagactcctcctcgggaaccggaaaagcgggccagcagcctgcaagaaagagattgaatttcggtcagactggagacgcagactccgtacctgacccccagcctctcggacagccaccagcagcccccacaagtttgggatctactacaatggctacaggcagtggcgcaccaatggcagacaataacgagggtgccgatggagtgggtaattcctcaggaaattggcattgcgattcccaatggctgggcgacagagtcatcaccaccagcacccgaacctgggccctgcccacctacaacaaccacctctataagcaaatctccagccaatcaggagcatcgaacgacaaccactactttggctacagcaccccttgggggtattttgacttcaacagattccactgtcacttctccccacgtgactggcaaagactcatcaacaacaactggggattccgacccaagagactcaacttcaagctctttaacattcaagtcaaagaggtcacgcagaatgacggtacgacgacgattgccaataaccttaccagcacggttcaggtgtttactgactcggagtaccagctcccgtacgtcctcggctcggcgcatcaaggatgcctcccgccgtttccagcggacgtcttcatggtcccacagtatggatacctcaccctgaacaacgggagtcaggcggtaggacactcttcctcttactgcctggagtactttccttctcagatgctgcgtaccggaaacaactttaccttcagctacacctttgaggacgtgcctttccacagcagctacgctcacagccagagtttggaccggctgatgaatcctctgatcgaccagtatctgtattatctgaacaggacacaatcaaatagtggaactcttcagcagtctaggctactgtttagccaagctggacccaccagcatgtctcttcaagctaaaaactggctgcctggaccttgctacagacagcagcgtctgtcaaagcaggcaaacgacaacaacaacagcaactttccctggactgcggctacaaagtatcatctaaatggtcgggactcgttggttaatccaggaccagctatggccagccacaaagacgatgaagaaaagtttttccccatgcatggaaccctgatatttggtaaacaaggaacaaatgctaacgacgcggatttggaacatgtcatgattacagatgaagaagaaatcaggaccaccaatcccgtggctacagagcagtacggaaacgtgtcaaataatttgcaaaactcaaatactggtccaactacagaaaatgtcaatcaccagggagcgttacctggtatggtgtggcaggatcgagacgtgtacctgcagggacccatttgggccaagattcctcacaccgacggacactttcacccttctccactgatgggaggatttggactgaagcaccctcccccgcagattctcatcaagaataccccggtacctgcgaatccttctaccaccttcagcgcggcaaagtttgcttccttcatcacacagtactccacggggcaggtcagcgtggagatcgagtgggagctgcagaaagagaacagcaaacgctggaaccccgagatccagtatacctccaactacaacaagtctgttaatgtggactttactgtggacactaatggcgtgtattcagagcctcgccccattggcacaagatacctgactcgtaatctgtaa

SEQ ID NO: 1352 - DNA, 2208 bp, Artificial Sequence
  Synthetic Polynucleotide
atggctgccgatggttatcttccagattggctcgaggacactctctctgaaggaataagacagtggtggaagctcaaacctggcccaccaccgccaaagcccgcagagcggcataaggacgacagcaggggtcttgtgcttcctgggtacaagtacctcggacccttcaacggactcgacaaaggagagccggtcaacgaggcagacgccgcggccctcgagcacgacaaggcctacgaccggcagctcgacagcggagacaacccgtacctcaagtacaaccacgccgacgcggagtttcaggagcgccttaaagaagatacgtcttttgggggcaacctcgcaagagcagtattccaggcgaaaaagagggttcttgaacctctgggcctggttgaggagcctgttaagacggctccgggaaaaaagaggccggtagagcactctcctgcggagccagattcctcctccggaactggaaagtcgggccaacagcctgcaagaaagagattgaattttggtcagactggagacgcagactccgtacctgacccccagcctctcggacagccaccagcagccccctctggtctgggaactaatacgatggcttcaggcagtggcgcaccaatggcagacaataacgagggcgccgacggagtgggtaattcctcgggaaattggcattgcgattccacatggatgggcgacagagtcatcaccaccagcacccgaacctgggccctgcccacctacaacaaccacctctacaagcaaatctccagccaatcaggagcatcgaacgacaaccactactttggctacagcaccccttgggggtattttgacttcaacagattccactgtcacttctccccacgtgactggcaaagactcatcaacaacaactggggattccgacccaagagactcaacttcaagctctttaacattcaagtcaaagaggtcacgcagaatgacggtacgacgacgattgccaataaccttaccagcacggttcaggtgtttactgactcggagtaccagctcccgtacgtcctcggctcggcgcatcaaggatgcctcccgccgtttccagcggacgtcttcatggtcccacagtatggatacctcaccctgaacaacgggagtcaggcggtaggacgctcttccttttactgcctggagtactttccttctcagatgctgcgtaccggaaacaactttaccttcagctacacctttgaggacgtgcccttccacagcagctacgctcacagccagagtttggaccggctgatgaatcctctgatcgaccagtatctgtattatctgaacaggacacaatcaaatagtggaactcttcagcagtctaggctactgtttagccaagctggacccaccagcatgtcccttcaagctaaaaactggctgcctggaccttgctacagacagcagcgtctgtcaaagcaggcaaacgacaacaacaacagcaactttccctggactgcggctacaaagtatcatctaaatggtcgggactcgttggttaatccaggaccagctatggccagccacaaagacgatgaagaaaagtttttccccatgcatggaaccctgatatttggtaaacaaggaacaaatgctaacgacgcggatttggaacatgtcatgattacagatgaagaagaaatcaggaccaccaatcccgtggctacagagcagtacggaaacgtgtcaaataatttgcaaaactcaaatactggtccaactacagaaaatgtcaatcaccagggagcgttacctggtatggtgtggcaggatcgagacgtgtacctgcagggacccatttgggccaagattcctcacaccgacggacactttcacccttctccactgatgggaggttttggactcaaacacccgcctcctcaaatcatgatcaaaaacactcctgttccagccaatcctcctacaaacttcagcgcggcaaagtttgcttccttcatcacacagtattccacgggacaggtcagcgtggagatcgagtgggagctgcagaaggagaacagcaaacgctggaaccccgagatccagtacacttccaactacaacaaatctgttaatgtggactttactgtggacgctaatggtgtgtattcagagcctcgccccattggcaccagatacctgactcgtaatctgtaa

SEQ ID NO: 1353 - DNA, 2208 bp, Artificial Sequence
  Synthetic Polynucleotide
atggctgccgatggttatcttccagattggctcgaggacattctctctgaaggaataagacagtggtggaagctcaaacctggcccaccaccaccaaagcccgcagagcggcataaggacgacagcaggggtcttgtgcttcctgggtacaagtacctcggacccttcaacggactcgacaaaggagagccggtcaacgaggcagacgccgcggccctcgagcacgacaaggcctacgaccggcagctcgacagcggagacaacccgtacctcaagtacaaccacgccgacgcggagtttcaggagcgtcttaaagaagatacgtcttttgggggcaacctcggacgagcagtcttccaggcgaaaaagagggttcttgaacctctgggcctggttgaggaacctgttaagacggctccgggaaaaaagaggccggtagagcaatctcctgcggagccagactcctcctcgggaaccggaaaggcgggcaaccagcctgcaagaaagagattgaattttggtcagactggagacgcagactccgtacctgacccccagcctctcggacagccaccagcagccccctctggtctgggatctactacaatggctacaggcagtggcgcaccaatggcagacaataacgagggtgccgatggagtgggtaattcctcaggaaattggcattgcgattcccaatggttgggcgacagagtcatcaccaccagcacccgaacctgggccctgcccacctacaacaatcacctctacaagcaaatctccagccaatcaggagcagcgaacgacaaccactactttggctacagcaccccctgggggtattttgacttcaacagattccactgccacttttcaccacgtgactggcaaagactcatcaacaacaactggggattccgacccaaragactcaacttcaagctctttaacattcaagtcaaagaggtcacgcagaatgacggtacgacgacgattgccaataaccttaccagcacggttcaggtgtttactgactcggagtaccagctcccgtacgtcctcggctcggcgcatcaaggatgcctcccgccgtttccagcggacgtcttcatggtcccacagtatggatacctcaccctgaacaacgggagtcaggcggtaggacgctcttccttttactgcctggagtactttccttctcagatgctgcgtaccggaaacaactttaccttcagctacacctttgaggacgtgcccttccacagcagctacgctcacagccagagtttggaccggctgatgaatcctctgatcgaccagtatctgtattatctgaacaggacacaatcaaatagtggaactcttcagcagtctaggctactgtttagccaagctggacccaccagcatgtcccttcaagctaaaaactggctgcctggaccttgctacagacagcagcgtctgtcaaagcaggcaaacgacaacaacaacagcaactttccctggactgcggctacaaagtatcatctaaatggtcgggactcgttggttaatccaggaccagctatggccagccacaaagacgatgaagaaaagtttttccccatgcatggaaccctgatatttggtaaacaaggaacaaatgctaacgacgcggatttggaacatgtcatgattacagatgaagaagaaatcaggaccaccaatcccgtggctacagagcagtacggaaacgtgtcaaataatttgcaaaactcaaatactggtccaactacagaaaatgtcaatcaccagggagcgttacctggtatggtgtggcaggatcgagacgtgtacctgcagggacccatttgggccaagattcctcacaccgacggacactttcacccttctccactgatgggaggttttggactcaaacacccgcctcctcaaatcatgatcaaaaacactcctgttccagccaatcctcctacaaacttcagcgcggcaaagtttgcttccttcatcacacagtattccacgggacaggtcagcgtggagatcgagtgggagctgcagaaggagaacagcaaacgctggaaccccgagatccagtacacttccaactacaacaaatctgttaatgtggactttactgtggacgctaatggtgtgtattcagagcctcgccccattggcaccagatacctgactcgtaatctgtaa

SEQ ID NO: 1354 - DNA, 2208 bp, Artificial Sequence
  Synthetic Polynucleotide
atggctgccgatggttatcttccagattggctcgaggacactctctctgaaggaataagacagtggtggaagctcaaacctggcccaccaccaccaaggcccgcagagcggcatcaggacgacagcaggggtcttgtgcttcctgggtacaagtacctcggacccttcaacggactcgacaaaggagagccggtcaacgaggcagacgctgcggccctcgagcacgacaaggcctacgaccggcagctcgacagcggagacaacccgtacctcaagtacaaccacgccgacgcggagtttcaggagcgtcttaaagaagatacgtcttttgggggcaacctcggacgagcagtcttccaggcgaaaaagagggttcttgaacctctgggcctggttgaggaacctgttaagacggctccgggaaaaaagaggccggtagagcactctcctgcggagccagactcctcctcgggaaccggaaaagcgggccagcagcctgcaagaaagagattgaatttcggtcagactggagacgcagactccgtacctgacccccagcctctcggacagccaccagcagcccccacaagtttgggatctactacaatggctacaggcagtggcgcaccaatggcagacaataacgagggtgccgatggagtgggtaattcctcaggaaattggcattgcgattcccaatggctgggcgacagagtcatcaccaccagcacccgaacctgggccctgcccacctacaacaaccacctctacaagcaaatctccagccaatcaggagcatcgaacgacaaccactactttggctacagcaccccttgggggtattttgacttcaacagattccactgtcacttctccccacgtgactggcaaagactcatcaacaacaactggggattccgacccaagagactcaacttcaagctctttaacattcaagtcaaagaggtcacgcagaatgacggtacgacgacgattgccaataaccttaccagcacggttcaggtgtttactgactcggagtaccagctcccgtacgtcctcggctcggcgcatcaaggatgcctcccgccgtttccagcggacgtcttcatggtcccacagtatggatacctcaccctgaacaacgggagtcaggcggtaggacgctcttccttttactgcctggagtactttccttctcagatgctgcgtaccggaaacaactttaccttcagctacacctttgaggacgtgcccttccacagcagctacgctcacagccagagtttggaccggctgatgaatcctctgatcgaccagtatctgtattatctgaacaggacacaatcaaatagtggaactcttcagcagtctaggctactgtttagccaagctggacccaccagcatgtcccttcaagctaaaaactggctgcctggaccttgctacagacagcagcgtctgtcaaagcaggcaaacgacaacaacaacagcaactttccctggactgcggctacaaagtatcatctaaatggtcgggactcgttggttaatccaggaccagctatggccagccacaaagacgatgaagaaaagtttttccccatgcatggaaccctgatatttggtaaacaaggaacaaatgctaacgacgcggatttggaacatgtcatgattacagatgaagaagaaatcaggaccaccaatcccgtggctacagagcagtacggaaacgtgtcaaataatttgcaaaactcaaatactggtccaactacagaaaatgtcaatcaccagggagcgttacctggtatggtgtggcaggatcgagacgtgtacctgcagggacccatttgggccaagattcctcacaccgacggacactttcacccttctcctcttatgggaggatttggactgaagcaccctcccccgcagattctcatcaagagtaccccggtacctgcgaatccttctaccaccttcagcgcggcaaagtttgcttccttcatcacacagtactccacggggcaggtcagcgtggagatcgagtgggagctgcagaaagagaacagcaaacgctggaaccccgagatccagtatacctccaactacaacaagtctgttaatgtggactttactgtggacactaatggcgtgtattcagagcctcgccccattggcacaagatacctgactcgtaatctgtaa

SEQ ID NO: 1355 - DNA, 2208 bp, Artificial Sequence
  Synthetic Polynucleotide
atggctgccgatggttatcttccagattggctcgaggacactctctctgaaggaataagacagtggtggaagctcaaacctggcccaccaccaccaaggcccgcagagcggcatcaggacgacagcaggggtcttgtgcttcctgggtacaagtacctcggacccttcaacggactcgacaaaggagagccggtcaacgaggcagacgctgcggccctcgagcacgacaaggcctacgaccggcagctcgacagcggagacaacccgtacctcaagtacaaccacgccgacgcggagtttcaggagcgtcttaaagaagatacgtcttttgggggcaacctcggacgagcagtcttccaggcgaaaaagagggttcttgaacctctgggcctggttgaggaacctgttaagacggctccgggaaaaaagaggccggtagagcactctcctgcggagccagactcctcctcgggaaccggaaaagcgggccagcagcctgcaagaaagagattgaatttcggtcagactggagacgcagactccgtacctgacccccagcctctcggacagccaccagcagcccccacaagtttgggatctactacaatggctacaggcagtggcgcaccaatggcagacaataacgagggtgccgatggagtgggtaattcctcaggaaattggcattgcgattcccaatggctgggcgacagagtcatcaccaccagcacccgaacctgggccctgcccacctacaacaaccacctctacaagcaaatctccagccaatcaggagcatcgaacgacaaccactactttggctacagcaccccttgggggtattttgacttcaacagattccactgtcacttctccccacgtgactggcaaagactcaccaacaacaactggggattccgacccaagagactcaacttcaagctctttaacattcaagtcaaagaggtcacgcagaatgacggtacgacgacgattgccaataaccttaccagcacggttcaggtgtttactgactcggagtaccagctcccgtacgtcctcggctcggcgcatcaaggatgcctcccgccgtttccagcggacgtcttcatggtcccacagtatggatacctcaccctgaacaacgggagtcaggcggtaggacgctcttccttttactgcctggagtactttccttctcagatgctgcgtaccggaaacaactttaccttcagctacacctttgaggacgtgcccttccacagcagctacgctcacagccagagtttggaccggctgatgaatcctctgatcgaccagtatctgtattatctgaacaggacacaatcaaatagtggaactcttcagcagtctaggctactgtttagccaagctggacccaccagcatgtcccttcaagctaaaaactggctgcctggaccttgctacagacagcagcgtctgtcaaagcaggcaaacgacaacaacaacagcaactttccctggactgcggctacaaagtatcatctaaatggtcgggactcgttggttaatccaggaccagctatggccagccacaaagacgatgaagaaaagtttttccccatgcatggaaccctgatatttggtaaacaaggaacaaatgctaacgacgcggatttggaacatgtcatgattacagatgaagaagaaatcaggaccaccaatcccgtggctacagagcagtacggaaacgtgtcaaataatttgcaaaactcaaatactggtccaactacagaaaatgtcaatcaccagggagcgttacctggtatggtgtggcaggatcgagacgtgtacctgcagggacccatttgggccaagattcctcacaccgacggacactttcacccttctccactgatgggaggttttggactcaaacacccgcctcctcaaatcatgatcaaaaacactcctgttccagccaatcctcctacaaacttcagcgcggcaaagtttgcttccttcatcacacagtattccacgggacaggtcagcgtggagatcgagtgggagctgcagaaggagaacagcaaacgctggaaccccgagatccagtacacttccaactacaacaaatctgttaatgtggactttactgtggacgctaatggtgtgtattcagagcctcgccccattggcaccagatacctgactcgtaatctgtaa

SEQ ID NO: 1356 - DNA, 2208 bp, Artificial Sequence
  Synthetic Polynucleotide
atggctgccgatggttatcttccagattggctcgaggacactctctctgaaggaataagacagtggtggaagctcaaacctggcccaccaccgccaaagcccgcagggcggcataaggacgacagcaggggtcttgtgcttcctgggtacaagtacctcggacccttcaacggactcgacaagggagagccggtcaacgaggcagacgccgcggccctcgagcacgacaaggcctacgaccggcagctcgacagcggagacaacccgtacctcaagtacaaccacgccggcgcggagtttcaggagcgccttaaagaagatacgtcttttgggggcaacctcggacgagcagtattccaggcgaaaaagagggttcttgaacctctgggcctggttgaggagcctgttaagacggccccgggaaaaaagaggccggtagagcactctcctgtggagccagactcctcctcgggaaccggaaaagcgggccagcagcctgcgaggaagagattgaattttggtcagactggagacgcagactccgtacctgacccccagcctctcggacagccaccagcagcccccacaagtttgggatctactacaatggctacaggcagtggcgcaccaatggcagacaataacgagggtgccgatggagtgggtaattcctcagggaattggcattgcgattcccaatggttgggcgacagagtcatcaccaccagcacccgaacctgggccctgcccacctacaacaaccacctctacaagcaaatctccagccaatcaggagccagcaacgacaaccactactttggctacagcaccccctgggggtattttgacttcaacagattccactgccacttttcaccacgtgactggcaaagactcatcaacaacaactggggattccgacccaagagactcaacttcaagctctttaacattcaagtcaaagaggtcacgcagaatgacggtacgacgacgattgccaataaccttaccagcacggttccggtgtttactgactcggagtaccagctcccgtacgtcctcggctcggcgcatcaaggatgcctcccgccgtttccagcggacgtcttcatggtcccacagtatggatacctcaccctgaacaacgggagtcaggcggtaggacgctcttccttttactgcctggagtactttccttctcagatgcttcgtaccggaaacaactttaccttcagttacacctttgaagacgttcctttccacagcagctacgctcacagtcaaagtctggaccggctgatgaatcctcttatcgaccagtacctgtattatctaaacaaaacacaatcaaatagtggaactcttcagcagtctcggctactgtttagtcaagctggacctaccagcatgtctcttcaagctaaaaactggctgcctggaccttgctacagacaacagcgtctgtcaaagcaggcaaacgacaacaacaacagcaactttccctggactgcggctacaaagtatcatctaaatggccgggactcgttggttaatccaggaccagctatggccagccacaaagacgatgaagaaaagtttttccccatgcatggaaccctgatatttggcaaacaagggacaaatgctaacgacgcggatttggacaatgtcatgattacagatgaagaagaaatccgtaccaccaatcccgtggctacggagcagtacgggactgtgtcaaataatttgcaaaactcaaatactggtccaactactggaactgtcaatcaccaaagagcgttacctggtatggtgtggcaggatcgagacgtgtaccttcagggacccatttgggccaagattcctcacaccgatggacactttcacccttctccgctgatgggaggttttggactcaaacacccgcctcctcagatcatgatcaaaaacactcccgttccagccaatcctcccacaaacttcagttctgccaagtttgcttctttcatcacacagtattccacgggacaggttagcgtggagatcgagtgggagctgcagaaggagaacagcaaacgctggaaccccgagatccagtacacttccaactacaacaagtctgttaatgtggactttactgtggacactaatggtgtgtattcagagcctcgccccattggcaccagatacctgactcgtaatctgtaa

SEQ ID NO: 1357 - DNA, 2208 bp, Artificial Sequence
  Synthetic Polynucleotide
atggctgccgatggttatcttccagattggctcgaggacactctctctgaaggaataagacagtggtggaagctcaaacctggcccaccaccgccaaagcccgcagggcggcataaggacgacagcaggggtcttgtgcttcctgggtacaagtacctcggacccttcaacggactcgacaagggagagccggtcaacgaggcagacgccgcggccctcgagcacgacaaggcctacgaccggcagctcgacagcggagacaacccgtacctcaagtacaaccacgccggcgcggagtttcaggagcgccttaaagaagatacgtcttttgggggcaacctcggacgagcagtattccaggcgaaaaagagggttcttgaacctctgggcctggttgaggagcctgttaagacggccccgggaaaaaagaggccggtagagcactctcctgtggagccagactcctcctcgggaaccggaaaagcgggccagcagcctgcgaggaagagattgaattttggtcagactggagacgcagactccgtacctgacccccagcctctcggacagccaccagcagcccccacaagtttgggatctactacaatggctacaggcagtggcgcaccaatggcagacaataacgagggtgccgatggagtgggtaattcctcagggaattggcattgcgattcccaatggttgggcgacagagtcatcaccaccagcacccgaacctgggccctgcccacctacaacaaccacctctacaagcaaatctccagccaatcaggagccagcaacgacaaccactactttggctacagcaccccctgggggtattttgacttcaacagattccactgccacttttcaccacgtgactggcaaagactcatcaacaacaactggggattccgacccaagagactcaacttcaagctctttaacattcaagtcaaagaggtcacgcagaatgacggtacgacgacgattgccaataaccttaccagcacggttccggtgtttactgactcggagtaccagctcccgtacgtcctcggctcggcgcatcaaggatgcctcccgccgtttccagcggacgtcttcatggtcccacagtatggatacctcaccctgaacaacgggagtcaggcggtaggacgctcttccttttactgcctggagcactttccttctcagatgcttcgtaccggaaacaactttaccttcagttacacctttgaagacgttcctttccacagcagctacgctcacagtcaaagtctggaccggctgatgaatcctcttatcgaccagtacctgtattatctaaacaaaacacaatcaaatagtggaactcttcagcagtctcggctactgtttagtcaagctggacctaccagcatgtctcttcaagctaaaaactggctgcctggaccttgctacagacaacagcgtctgtcaaagcaggcaaacgacaacaacaacagcaactttccctggactgcggctacaaagtatcatctaaatggccgggactcgttggttaatccaggaccagctatggccagccacaaagacgatgaagaaaagtttttccccatgcatggaaccctgatatttggcaaacaagggacaaatgctaacgacgcggatttggacaatgtcatgattacagatgaagaagaaatccgtaccaccaatcccgtggctacggagcagtacgggactgtgtcaaataatttgcaaaactcaaatactggtccaactactggaactgtcaatcaccaaagagcgttacctggtatggtgtggcaggatcgagacgtgtaccttcagggacccatttgggccaagattcctcacaccgatggacactttcacccttctccgctgatgggaggttttggactcaaacacccgcctcctcagatcatgatcaaaaacactcccgttccagccaatcctcccacaaacttcagttctgccaagtttgcttctttcatcacacagtattccacgggacaggttagcgtggagatcgagtgggagctgcagaaggagaacagcaaacgctggaaccccgagatccagtacacttccaactacaacaagtctgttaatgtggactttactgtggacactaatggtgtgtattcagagcctcgccccattggcaccagatacctgactcgtaatctgtaa

SEQ ID NO: 1358 - DNA, 2208 bp, Artificial Sequence
  Synthetic Polynucleotide
atggctgccgatggttatcttccagattggctcgaggacactctctctgaaggaataagacagtggtggaagctcaaacctggcccaccaccgccaaagcccgcagggcggcataaggacgacagcaggggtcttgtgcttcctgggtacaagtacctcggacccttcaacggactcgacaagggagagccggtcaacgaggcagacgccgcggccctcgagcacgacaaggcctacgaccggcagctcgacagcggagacaacccgtacctcaagtacaaccacgccggcgcggagtttcaggagcgccttaaagaagatacgtcttttgggggcaacctcggacgagcagtattccaggcgaaaaagagggttcttgaacctctgggcctggttgaggagcctgttaagacggccccgggaaaaaagaggccggtagagcactctcctgtggagccagactcctcctcgggaaccggaaaagcgggccagcagcctgcgaggaagagattgaattttggtcagactggagacgcagactccgtacctgacccccagcctctcggacagccaccagcagcccccacaagtttgggatctactacaatggctacaggcagtggcgcaccaatggcagacagtaacgagggtgccgatggagtgggtaattcctcagggaattggcattgcgattcccaatggttgggcgacagagtcatcaccaccagcacccgaacctgggccctgcccacctacaacaaccacctctacaagcaaatctccagccaatcaggagccagcaacgacaaccactactttggctacagcaccccctgggggtattttgacttcaacagattccactgccacttttcaccacgtgactggcaaagactcatcaacaacaactggggattccgacccaagagactcaacttcaagctctttaacattcaagtcaaagaggtcacgcagaatgacggtacgacgacgattgccaataaccttaccagcacggttccggtgtttactgactcggagtaccagctcccgtacgtcctcggctcggcgcatcaaggatgcctcccgccgtttccagcggacgtcttcatggtcccacagtatggatacctcaccctgaacaacgggagtcaggcggtaggacgctcttccttttactgcctggagtactttccttctcagatgcttcgtaccggaaacaactttaccttcagttacacctttgaagacgttcctttccacagcagctacgctcacagtcaaagtctggaccggctgatgaatcctcttatcgaccagtacctgtattatctaaacaaaacacaatcaaatagtggaactcttcagcagtctcggctactgtttagtcaagctggacctaccagcatgtctcttcaagctaaaaactggctgcctggaccttgctacagacaacagcgtctgtcaaagcaggcaaacgacaacaacaacagcaactttccctggactgcggctacaaagtatcatctaaatggccgggactcgttggttaatccaggaccagctatggccagccacaaagacgatgaagaaaagtttttccccatgcatggaaccctgatatttggcaaacaagggacaaatgctaacgacgcggatttggacaatgtcatgattacagatgaagaagaaatccgtaccaccaatcccgtggctacggagcagtacgggactgtgtcaaataatttgcaaaactcaaatactggtccaactactggaactgtcaatcaccaaagagcgttacctggtatggtgtggctggatcgagacgtgtaccttcagggacccatttgggccaagattcctcacaccgatggacactttcacccttctccgctgatgggaggttttggactcaaacacccgcctcctcagatcatgatcaaaaacactcccgttccagccaatcctcccacaaacttcagttctgccaagtttgcttctttcatcacacagtattccacgggacaggttagcgtggagatcgagtgggagctgcagaaggagaacagcaaacgctggaaccccgagatccagtacacttccaactacaacaagtctgttaatgtggactttactgtggacactaatggtgtgtattcagagcctcgccccattggcaccagatacctgactcgtaatctgtaa

SEQ ID NO: 1359 - DNA, 2208 bp, Artificial Sequence
  Synthetic Polynucleotide
atggctgccgatggttatcttccagattggctcgaggacactctctctgaaggaataagacagtggtggaggctcaaacctggcccaccaccgccaaagcccgcagggcggcataaggacgacagcaggggtcttgtgcttcctgggtacaagtacctcggacccttcaacggactcgacaagggagagccggtcaacgaggcagacgccgcggccctcgagcacgacaaggcctacgaccggcagctcgacagcggagacaacccgtacctcaagtacaaccacgccggcgcggagtttcaggagcgccttaaagaagatacgtcttttgggggcaacctcggacgagcagtattccaggcgaaaaagagggttcttgaacctctgggcctggttgaggagcctgttaagacggccccgggaaaaaagaggccggtagagcactctcctgtggagccagactcctcctcgggaaccggaaaagcgggccagcagcctgcgaggaagagattgaattttggtcagactggagacgcagactccgtacctgacccccagcctctcggacagccaccagcagcccccacaagtttgggatctactacaatggctacaggcagtggcgcaccaatggcagacaataacgagggtgccgatggagtgggtaattcctcagggaattggcattgcgattcccaatggttgggcgacagagtcatcaccaccagcacccgaacctgggccctgcccacctacaacaaccacctctacaagcaaatctccagccaatcaggagccagcaacgacaaccactactttggctacagcaccccctgggggtattttgacttcaacagattccactgccacttttcaccacgtgactggcaaagactcatcaacaacaactggggattccgacccaagagactcaacttcaagctctttaacattcaagtcaaagaggtcacgcagaatgacggtacgacgacgattgccaataaccttaccagcacggttccggtgtttactgactcggagtaccagctcccgtacgtcctcggctcggcgcatcaaggatgcctcccgccgtttccagcggacgtcttcatggtcccacagtatggatacctcaccctgaacaacgggagtcaggcggtaggacgctcttccttttactgcctggagtactttccttctcagatgcttcgtaccggaaacaactttaccttcagttacacctttgaagacgttcctttccacagcagctacgctcacagtcaaagtctggaccggctgatgaatcctcttatcgaccagtacctgtattatctaaacaaaacacaatcaaatagtggaactcttcagcagtctcggctactgtttagtcaagctggacctaccagcatgtctcttcaagctaaaaactggctgcctggaccttgctacagacaacagcgtctgtcaaagcaggcaaacgacaacaacaacagcaactttccctggactgcggctacaaagtatcatctaaatggccgggactcgttggttaatccaggaccagctatggccagccacaaagacgatgaagaaaagtttttccccatgcatggaaccctgatatttggcaaacaagggacaaatgctaacgacgcggatttggacaatgtcatgattacagatgaagaagaaatccgtaccaccaatcccgtggctacggagcagtacgggactgtgtcaaataatttgcaaaactcaaatactggtccaactactggaactgtcaatcaccaaagagcgttacctggtatggtgtggcaggatcgagacgtgtaccttcagggacccatttgggccaagattcctcacaccgatggacactttcacccttctccgctgatgggaggttttggactcaaacacccgcctcctcagatcatgatcaaaaacactcccgttccagccaatcctcccacaaacttcagttctgccaagtttgcttctttcatcacacagtattccacgggacaggttagcgtggagatcgagtgggagctgcagaaggagaacagcaaacgctggaaccccgagatccagtacacttccaactacaacaagtctgttaatgtggactttactgtggacactaatggtgtgtattcagagcctcgccccattggcaccagatacctgactcgtaatctgtaa

SEQ ID NO: 1360 - DNA, 2208 bp, Artificial Sequence
  Synthetic Polynucleotide
atggctgccgatggttatcttccagattggctcgaggacactctctctgaaggaataagacagtggtggaagctcaaacctggcccaccaccgccaaagcccgcagggcggcataaggacgacagcaggggtcttgtgcttcctgggtacaagtacctcggacccttcaacggactcgacaagggagagccggtcaacgaggcagacgccgcggccctcgagcacgacaaggcctacgaccggcagctcgacagcggagacaacccgtacctcaagtacaaccacgccggcgcggagtttcaggagcgccttaaagaagatacgtcttttgggggcaacctcggacgagcagtattccaggcgaaaaagagggttcttgaacctctgggcctggttgaggagcctgttaagacggccccgggaaaaaagaggccggtagagcactctcctgtggagccagactcctcctcgggaaccggaaaagcgggccagcagcctgcgaggaagagattgaattttggtcagactggagacgcagactccgtacctgacccccagcctctcggacagccaccagcagcccccacaagtttgggatctactacaatggctacaggcagtggcgcaccaatggcagacaataacgagggtgccgatggagtgggtaattcctcagggaattggcattgcgattcccaatggttgggcgacagagtcatcaccaccagcacccgaacctgggccctgcccacctacaacaaccacctctacaagcaaatctccagccaatcaggagccagcaacgacaaccactactttggctacagcaccccctgggggtattttgacttcaacagattccactgccacttttcaccacgtgactggcaaagactcatcaacaacaactggggattccgacccaagagactcaacttcaagctctttaacattcaagtcaaagaggtcacgcagaatgacggtacgacgacgattgccaataaccttaccagcacggttccggtgtttactgactcggagtaccagctcccgtacgtcctcggctcggcgcatcaaggatgcctcccgccgtttccagcggacgtcttcatggtcccacagtatggatacctcaccctgaacaacgggagtcaggcggtaggacgctcttccttttactgcctggagtactttccttctcagatgcttcgtaccggaaacaactttaccttcagttacacctttgaagacgttcctttccacagcagctacgctcacagtcaaagtctggaccggctgatgaatcctcttatcgaccagtacctgtattatctaaacaaaacacaatcaaatagtggaactcttcagcagtctcggctactgtttagtcaagctggacctaccagcatgtctcttcaagctaaaaactggctgcctggaccttgctacagacaacagcgtctgtcaaagcaggcaaacgacaacaacaacagcaactttccctggactgcggctacaaagtatcatctaaatggccgggactcgttggttaatccaggaccagctatggccagccacaaagacgatgaagaaaagtttttccccatgcatggaaccctgatatttggcaaacaagggacaaatgctaacgacgcggatttggacaatgtcatgattacagatgaagaagaaatccgtaccaccaatcccgtggctacggagcagtacgggactgtgtcaaataatttgcaaaactcaaatactggtccaactactggaactgtcaatcaccaaagagcgttacctggtatggtgtggcaggatcgagacgtgtaccttcagggacccatttgggccaagattcctcacaccgatggacactttcacccttctccgctgatgggaggttttggactcaaacacccgcctcctcagatcatgatcaaaaacactcccgttccagccaatcctcccacaaacttcagttctgccaagtttgcttctttcatcacacagtattccacgggacaggttagcgtggagatcgagtgggagctgcagaaggagaacagcaaacgctggaaccccgagatccagtacacttccaactacaacaagtctgttaatgtggaccttactgtggacactaatggtgtgtattcagagcctcgccccattggcaccagatacctgactcgtaatctgtaa

SEQ ID NO: 1361 - DNA, 2208 bp, Artificial Sequence
  Synthetic Polynucleotide
atggctgccgatggttatcttccagattggctcgaggacactctctctgaaggaataagacagtggyggaagctcaaacctggcccaccaccgccaaagcccgcagggcggcataaggacgacagcaggggtcttgtgcttcctgggtacaagtacctcggacccttcaacggactcgacaagggagagccggtcaacgaggcagacgccgcggccctcgagcacgacaaggcctacgaccggcagctcgacagcggagacaacccgtacctcaagtacaaccacgccggcgcggagtttcaggagcgccttaaagaagatacgtcttttgggggcaacctcggacgagcagtattccaggcgaaaaagagggttcttgaacctctgggcctggttgaggagcctgttaagacggccccgggaaaaaagaggccggtagagcactctcctgtggagccagactcctcctcgggaaccggaaaagcgggccagcagcctgcgaggaagagattgaattttggtcagactggagacgcagactccgtacctgacccccagcctctcggacagccaccagcagcccccacaagtttgggatctactacaatggctacaggcagtggcgcaccaatggcagacaataacgagggtgccgatggagtgggtaattcctcagggaattggcattgcgattcccaatggttgggcgacagagtcatcaccaccagcacccgaacctgggccctgcccacctacaacaaccacctctacaagcaaatctccagccaatcaggagccagcaacgacaaccactactttggctacagcaccccctgggggtattttgacttcaacagattccactgccacttttcaccacgtgactggcaaagactcatcaacaacaactggggattccgacccaagagactcaacttcaagctctttaacattcaagtcaaagaggtcacgcagaatgacggtacgacgacgattgccaataaccttaccagcacggttccggtgtttactgactcggagtaccagctcccgtacgtcctcggctcggcgcatcaaggatgcctcccgccgtttccagcggacgtcttcatggtcccacagtatggataccccaccctgaacaacgggagtcaggcggtaggacgctcttccttttactgcctggagtactttccttctcagatgcttcgtaccggaaacaactttaccttcagttacacctttgaagacgttcctttccacagcagctacgctcacagtcaaagtctggaccggctgatgaatcctcttatcgaccagtacctgtattatctaaacaaaacacaatcaaatagtggaactcttcagcagtctcggctactgtttagtcaagctggacctaccagcatgtctcttcaagctaaaaactggctgcctggaccttgctacagacaacagcgtctgtcaaagcaggcaaacgacaacaacaacagcaactttccctgggctgcggctacaaagtatcatctaaatggccgggactcgttggttaatccaggaccagctatggccagccacaaagacgatgaagaaaagtttttccccatgcatggaaccctgatatttggcaaacaagggacaaatgctaacgacgcggatttggacaatgtcatgattacagatgaagaagaaatccgtaccaccaatcccgtggctacggagcagtacgggactgtgtcaaataatttgcaaaactcaaatactggtccaactactggaactgtcaatcaccaaagagcgttacctggtatggtgtggcaggatcgagacgtgtaccttcagggacccatttgggccaagattcctcacaccgatggacactttcacccttctccgctgatgggaggttttggactcaaacacccgcctcctcagatcatgatcaaaaacactcccgttccagccaatcctcccacaaacttcagttctgccaagtttgcttctttcatcacacagtattccacgggacaggttagcgtggagatcgagtgggagctgcagaaggagaacagcaaacgctggaaccccgagatccagtacacttccaactacaacaagtctgttaatgtggactttactgtggacactaatggtgtgtattcagagcctcgccccattggcaccagatacctgactcgtaatctgtaa

SEQ ID NO: 1362 - DNA, 2208 bp, Artificial Sequence
  Synthetic Polynucleotide
atggctgccgatggttatcttccagattggctcgaggacactctctctgaaggaataagacagtggtggaagctcaaacctggcccaccaccaccaaagcccgcagagcggcatcaggacgacagcaggggtcttgtgcttcctgggtacaagtacctcggacccttcaacggactcgacaaaggagagccggtcaacgaggcagacgctgcggccctcgagcacgacaaggcctacgaccggcagctcgacagcggagacaacccgtacctcaagtacaaccacgccgacgcggagtttcaggagcgtcttaaagaagatacgtcttttgggggcaacctcggacgagcagtcttccaggcgaaaaagagggttcttgaacctctgggcctggttgaggaacctgttaagacggctccgggaaaaaagaggccggtagagcactctcctgcggagccagactcctcctcgggaaccggaaaagcgggccagcagcctgcaagaaagagattgaatttcggtcagactggagacgcagactccgtacctgacccccagcctctcggacagccaccagcagcccccacaagtttgggatctactacaatggctacaggcagtggcgcaccaatggcagacaataacgagggtgccgatggagtgggtaattcctcaggaaattggcattgcgattcccaatggctgggcgacagagtcatcaccaccagcacccgaacctgggccctgcccacctacaacaaccacctctacaagcaaatctccagccaatcaggagcatcgaacgacaaccactactttggctacagcaccccttgggggtattttgacttcaacagattccactgtcacttctccccacgtgactggcaaagactcatcaacaacaactggggattccgacccaagagactcaacttcaagctctttaacattcaagtcaaagaggtcacgcagaatgacggtacgacgacgattgccaataaccttaccagcacggttcaggtgtttactgactcggagtaccagctcccgtacgtcctcggctcggcgcatcaaggatgcctcccgccgtttccagcggacgtcttcatggtcccacagtatggatacctcaccctgaacaacgggagtcaggcggtaggacgctcttccttttactgcctggagtactttccttctcagatgctgcgtaccggaaacaactttaccttcagctacacctttgaggacgtgcctttccacagcagctacgctcacagccagagtttggaccggctgatgaatcctctgatcgaccagtatctgtattatctgaacaggacacaatcaaatagtggaactcttcagcagtctaggctactgtttagccaagctggacccaccagcatgtctcttcaagctaaaaactggctgcctggaccttgctacagacagcagcgtctgtcaaagcaggcaaacgacaacaacaacagcaactttccctggactgcggctacaaagtatcatctaaatggtcgggactcgttggttaatccaggaccagctatggccagccacaaagacgatgaagaaaagtttttccccatgcatggaaccctgatatttggtaaacaaggaacaaatgctaacgacgcggatttggaacatgtcatgattacagatgaagaagaaatcaggaccaccaatcccgtggctacagagcagtacggaaacgtgtcaaataatttgcaaaactcaaatactggtccaactacagaaaatgtcaatcaccagggagcgttacctggtatggtgtggcaggatcgagacgtgtacctgcagggacccatttgggccaagattcctcacaccgacggacactttcacccttctccactgatgggaggttttggactcaaacacccgcctcctcaaatcatgatcaaaaacactcctgttccagccaatcctcctacaaacttcagcgcggcaaagtttgcttccttcatcacacagtattccacgggacaggtcagcgtggagatcgagtgggagctgcagaaggagaacagcaaacgctggaaccccgagatccagtacacttccaactacaacaaatctgttaatgtggactttactgtggacactaatggtgtgtattcagagcctcgccccattggcaccagatacctgactcgtaatctgtaa

SEQ ID NO: 1363 - DNA, 2205 bp, Artificial Sequence
  Synthetic Polynucleotide
atggctgccgatggttatcttccagattggctcgaggacactctctctgaaggaataagacagtggtggaagctcaaacctggcccaccaccaccaaagcccgcagagcggcatcaggacgacagcaggggtcttgtgcttcctgggtacaagtacctcggacccttcaacggactcgacaaaggagagccggtcaacgaggcagacgctgcggccctcgagcacgacaaggcctacgaccggcagctcgacagcggagacaacccgtacctcaagtacaaccacgccgacgcggagtttcaggagcgtcttaaagaagatacgtcttttgggggcaacctcggacgagcagtcttccaggcgaaaaagagggttcttgaacctctgggcctggttgaggaacctgttaagacggctccgggaaaaaagaggccggtagagcactctcctgcggagccagactcctcctcgggaaccggaaaagcgggccagcagcctgcaagaaagagattgaatttcggtcagactggagacgcagactccgtacctgacccccagcctctcggacagccaccagcagcccccacaagtttgggatctactacaatggctacaggcagtggcgcaccaatggcagacaataacgagggtgccgatggagtgggtaattcctcaggaaattggcattgcgattcccaatggctgggcgacagagtcatcaccaccagcacccgaacctgggccctgcccacctacaacaaccacctctacaagcaaatctccagccaatcaggagcatcgaacgacaaccactactttggctacagcaccccttgggggtattttgacttcaacagattccactgtcacttctccccacgtgactggcaaagactcatcaacaacaactggggattccgacccaagagactcaacttcaagctctttaacattcaagtcaaagaggtcacgcagaatgacggtacgacgacgattgccaataaccttaccagcacggttcaggtgtttactgactcggagtaccagctcccgtacgtcctcggctcggcgcatcaaggatgcctcccgccgtttccagcggacgtcttcatggtcccacagtatggatacctcaccctgaacaacgggagtcaggcggtaggacgctcttccttttactgcctggagtactttccttctcagatgctgcgtaccggaaacaactttaccttcagctacacctttgaggacgtgcctttccacagcagctacgctcacagccagagtttggaccggctgatgaatcctctgatcgaccagtatctgtattatctgaacaggacacaatcaaatagtggaactcttcagcagtctaggctactgtttagccaagctggacccaccagcatgtctcttcaagctaaaaactggctgcctggaccttgctacagacagcagcgtctgtcaaagcaggcaaacgacaacaacagcaactttccctggactgcggctacaaagtatcatctaaatggtcgggactcgttggttaatccaggaccagctatggccagccacaaagacgatgaagaaaagtttttccccatgcatggaaccctgatatttggtaaacaaggaacaaatgctaacgacgcggatttggaacatgtcatgattacagatgaagaagaaatcaggaccaccaatcccgtggctacagagcagtacggaaacgtgtcaaataatttgcaaaactcaaatactggtccaactacagaaaatgtcaatcaccagggagcgttacctggtatggtgtggcaggatcgagacgtgtacctgcagggacccatttgggccaagattcctcacaccgacggacactttcacccttctccactgatgggaggttttggactcaaacacccgcctcctcaaatcatgatcaaaaacactcctgttccagccaatcctcctacaaacttcagcgcggcaaagtttgcttccttcatcacacagtattccacgggacaggtcagcgtggagatcgagtgggagctgcagaaggagaacagcaaacgctggaaccccgagatccagtacacttccaactacaacaaatctgttaatgtggactttactgtggacactaatggtgtgtattcagagcctcgccccattggcaccagatacctgactcgtaatctgtaa

SEQ ID NO: 1364 - DNA, 2205 bp, Artificial Sequence
  Synthetic Polynucleotide
atggctgccgatggttatcttccagattggctcgaggacactctctctgaaggaataagacagtggtggaagctcaaacctggcccaccaccaaagcccgcagagcggcatcaggacgacagcaggggtcttgtgcttcctgggtacaagtacctcggacccttcaacggactcgacaaaggagagccggtcaacgaggcagacgctgcggccctcgagcacgacaaggcctacgaccggcagctcgacagcggagacaacccgtacctcaagtacaaccacgccgacgcggagtttcaggagcgtcttaaagaagatacgtcttttgggggcaacctcggacgagcagtcttccaggcgaaaaagagggttcttgaacctctgggcctggttgaggaacctgttaagacggctccgggaaaaaagaggccggtagagcactctcctgcggagccagactcctcctcgggaaccggaaaagcgggccagcagcctgcaagaaagagattgaatttcggtcagactggagacgcagactccgtacctgacccccagcctctcggacagccaccagcagcccccacaagtttgggatctactacaatggctacaggcagtggcgcaccaatggcagacaataacgagggtgccgatggagtgggtaattcctcaggaaattggcattgcgattcccaatggctgggcgacagagtcatcaccaccagcacccgaacctgggccctgcccacctacaacaaccacctctacaagcaaatctccagccaatcaggagcatcgaacgacaaccactactttggctacagcaccccttgggggtattttgacttcaacagattccactgtcacttctccccacgtgactggcaaagactcatcaacaacaactggggattccgacccaagagactcaacttcaagctctttaacattcaagtcaaagaggtcacgcagaatgacggtacgacgacgattgccaataaccttaccagcacggttcaggtgtttactgactcggagtaccagctcccgtacgtcctcggctcggcgcatcaaggatgcctcccgccgtttccagcggacgtcttcatggtcccacagtatggatacctcaccctgaacaacgggagtcaggcggtaggacgctcttccttttactgcctggagtactttccttctcagatgctgcgtaccggaaacaactttaccttcagctacacctttgaggacgtgcctttccacagcagctacgctcacagccagagtttggaccggctgatgaatcctctgatcgaccagtatctgtattatctgaacaggacacaatcaaatagtggaactcttcagcagtctaggctactgtttagccaagctggacccaccagcatgtctcttcaagctaaaaactggctgcctggaccttgctacagacagcagcgtctgtcaaagcaggcaaacgacaacaacaacagcaactttccctggactgcggctacaaagtatcatctaaatggtcgggactcgttggttaatccaggaccagctatggccagccacaaagacgatgaagaaaagtttttccccatgcatggaaccctgatatttggtaaacaaggaacaaatgctaacgacgcggatttggaacatgtcatgattacagatgaagaagaaatcaggaccaccaatcccgtggctacagagcagtacggaaacgtgtcaaataatttgcaaaactcaaatactggtccaactacagaaaatgtcaatcaccagggagcgttacctggtatggtgtggcaggatcgagacgtgtacctgcagggacccatttgggccaagattcctcacaccgacggacactttcacccttctccactgatgggaggttttggactcaaacacccgcctcctcaaatcatgatcaaaaacactcctgttccagccaatcctcctacaaacttcagcgcggcaaagtttgcttccttcatcacacagtattccacgggacaggtcagcgtggagatcgagtgggagctgcagaaggagaacagcaaacgctggaaccccgagatccagtacacttccaactacaacaaatctgttaatgtggactttactgtggacactaatggtgtgtattcagagcctcgccccattggcaccagatacctgactcgtaatctgtaa

SEQ ID NO: 1365 - DNA, 2208 bp, Artificial Sequence
  Synthetic Polynucleotide
atggctgccgatggttatcttccagattggctcgaggacactctctctgaaggaataagacagtggtggaagctcaaacctggcccaccaccaccaaagcccgcagagcggcatcaggacgacagcaggggtcttgtgcttcctgggtacaagtacctcggacccttcaacggactcgacaaaggagagccggtcaacgaggcagacgctgcggccctcgagcacgacaaggcctacgaccggcagctcgacagcggagacaacccgtacctcaagtacaaccacgccgacgcggagtttcaggagcgtcttaaagaagatacgtcttttgggggcaacctcggacgagcagtcttccaggcgaaaaagagggttcttgaacctctgggcctggttgaggaacctgttaagacggctccgggaaaaaagaggccggtagagcactctcctgcggagccagactcctcctcgggaaccggaaaagcgggccagcagcctgcaagaaagagattgaatttcggtcagactggagacgcagactccgtacctgacccccagcctctcggacagccaccagcagcccccacaagtttgggatctactacaatggctacaggcagtggcgcaccaatggcagacaataacgagggtgccgatggagtgggtaattcctcaggaaattggcattgcgattcccaatggctgggcgacagagtcatcaccaccagcacccgaacctgggccctgcccacctacaacaaccacctctacaagcaaatctccagccaatcaggagcatcgaacgacaaccactactttggctacagcaccccttgggggtattttgacttcaacagattccactgtcacttctccccacgtgactggcaaagactcatcaacaacaactggggattccgacccaagagactcaacttcaagctctttaacattcaagtcaaagaggtcacgcagaatgacggtacgacgacgattgccaataaccttaccagcacggttcaggtgtttactgactcggagtaccagctcccgtacgtcctcggctcggcgcatcaaggatgcctcccgccgtttccagcggacgtcttcatggtcccacagtatggatacctcaccctgaacaacgggagtcaggcggtaggacgctcttccttttactgcctggagtactttccttctcagatgctgcgtaccggaaacaactttaccttcagctacacctttgaggacgtgcctttccacagcagctacgctcacagccagagtttggaccggctgatgaatcctctgatcgaccagtatctgtattatctgaacaggacacaatcaaatagtggaactcttcagcagtctaggctactgtttagccaagctggacccaccagcatgtctcttcaagctaaaaactggctgcctggaccttgctacagacagcagcgtctgtcaaagcaggcaaacgacaacaacaacagcaactttccctggactgcggctacaaagtatcatctaaatggtcgggactcgttggttaatccaggaccagctatggccagccacaaagacgatgaagaaaagtttttccccatgcatggaaccctgatatttggtaaacaaggaacaaatgctaacgacgcggatttggaacatgtcatgattacagatgaagaagaaatcaggaccaccaatcccgtggctacagagcagtacggaaacgtgtcaaataatttgcaaaactcaaatactggtccaactacagaaaatgtcaatcaccagggagcgttacctggtatggtgtggcaggatcgagacgcgtacctgcagggacccatttgggccaagattcctcacaccgacggacactttcacccttctccactgatgggaggttttggactcaaacacccgcctcctcaaatcatgatcaaaaacactcctgttccagccaatcctcctacaaacttcagcgcggcaaagtttgcttccttcatcacacagtattccacgggacaggtcagcgtggagatcgagtgggagctgcagaaggagaacagcaaacgctggaaccccgagatccagtacacttccaactacaacaaatctgttaatgtggactttactgtggacactaatggtgtgtattcagagcctcgccccattggcaccagatacctgactcgtaatctgtaa

SEQ ID NO: 1366 - DNA, 2208 bp, Artificial Sequence
  Synthetic Polynucleotide
atggctgccgatggttatcttccagattggctcgaggacactctctctgaaggaataagacagtggtggaagctcaaacctggcccaccaccaccaaagcccgcagagcggcatcaggacgacagcaggggtcttgtgcttcctgggtacaagtacctcggacccttcaacggactcgacaaaggagagccggtcaacgaggcagacgctgcggccctcgagcacgacaaggcctacgaccggcagctcgacagcggagacaacccgtacctcaagtacaaccacgccgacgcggagtttcaggagcgtcttaaagaagatacgtcttttgggggcaacctcggacgagcagtcttccaggcgaaaaagagggttcttgaacctctgggcctggttgaggaacctgctaagacggctccgggaaaaaagaggccggtagagcactctcctgcggagccagactcctcctcgggaaccggaaaagcgggccagcagcctgcaagaaagagattgaatttcggtcagactggagacgcagactccgtacctgacccccagcctctcggacagccaccagcagcccccacaagtttgggatctactacaatggctacaggcagtggcgcaccaatggcagacaataacgagggtgccgatggagtgggtaattcctcaggaaattggcattgcgattcccaatggctgggcgacagagtcatcaccaccagcacccgaacctgggccctgcccacctacaacaaccacctctacaagcaaatctccagccaatcaggagcatcgaacgacaaccactactttggctacagcaccccttgggggtattttgacttcaacagattccactgtcacttctccccacgtgactggcaaagactcatcaacaacaactggggattccgacccaagagactcaacttcaagctctttaacattcaagtcaaagaggtcacgcagaatgacggtacgacgacgattgccaataaccttaccagcacggttcaggtgtttactgactcggagtaccagctcccgtacgtcctcggctcggcgcatcaaggatgcctcccgccgtttccagcggacgtcttcatggtcccacagtatggatacctcaccctgaacaacgggagtcaggcggtaggacgctcttccttttactgcctggagtactttccttctcagatgctgcgtaccggaaacaactttaccttcagctacacctttgaggacgtgcctttccacagcagctacgctcacagccagagtttggaccggctgatgaatcctctgatcgaccagtatctgtattatctgaacaggacacaatcaaatagtggaactcttcagcagtctaggctactgtttagccaagctggacccaccagcatgtctcttcaagctaaaaactggctgcctggaccttgctacagacagcagcgtctgtcaaagcaggcaaacgacaacaacaacagcaactttccctggactgcggctacaaagtatcatctaaatggtcgggactcgttggttaatccaggaccagctatggccagccacaaagacgatgaagaaaagtttttccccatgcatggaaccctgatatttggtaaacaaggaacaaatgctaacgacgcggatttggaacatgtcatgattacagatgaagaagaaatcaggaccaccaatcccgtggctacagagcagtacggaaacgtgtcaaataatttgcaaaactcaaatactggtccaactacagaaaatgtcaatcaccagggagcgttacctggtatggtgtggcaggatcgagacgtgtacctgcagggacccatttgggccaagattcctcacaccgacggacactttcacccttctccactgatgggaggttttggactcaaacacccgcctcctcaaatcatgatcaaaaacactcctgttccagccaatcctcctacaaacttcagcgcggcaaagtttgcttccttcatcacacagtattccacgggacaggtcagcgtggagatcgagtgggagctgcagaaggagaacagcaaacgctggaaccccgagatccagtacacttccaactacaacaaatctgttaatgtggactttactgtggacactaatggtgtgtattcagagcctcgccccattggcaccagatacctgactcgtaatctgtaa

SEQ ID NO: 1367 - DNA, 2208 bp, Artificial Sequence
  Synthetic Polynucleotide
atggctgccgatggttatcttccagattggctcgaggacactctctctgaaggaataagacagtggtggaagctcaaacctggcccaccaccaccaaagcccgcagagcggcatcaggacgacagcaggggtcttgtgcttcctgggtacaagtacctcggacccttcaacggactcgacaaaggagagccggtcaacgaggcagacgctgcggccctcgagcacgacaaggcctacgaccggcagctcgacagcggagacaacccgtacctcaagtacaaccacgccgacgcggagtttcaggagcgtcttaaagaagatacgtcttttgggggcaacctcggacgagcagtcttccaggcgaaaaagagggttcttgaacctctgggcctggttgaggaacctgttaagacggctccgggaaaaaagaggccggtagagcactctcctgcggagccagactcctcctcgggaaccggaaaagcgggccagcagcctgcaagaaagagattgaatttcggtcagactggagacgcagactccgtacctgacccccagcctctcggacagccaccagcagcccccacaagtttgggatctactacaatggctacaggcagtggcgcaccaatggcagacaataacgagggtgccgatggagtgggtaattcctcaggaaattggcattgcgattcccaatggctgggcgacagagtcatcaccaccagcacccgaacctgggccctgcccacctacaacaaccacctctacaagcaaatctccagccaatcaggagcatcgaacgacaaccactactttggctacagcaccccttgggggtattttgacttcaacagattccactgtcacttctccccacgtgactggcaaagactcatcaacaacaactggggattccgacccaagagactcaacttcaagctctttaacattcaagtcaaagaggtcacgcagaatgacggtacgacgacgattgccaataaccttaccagcacggttcaggtgtttactgactcggagtaccagctcccgtacgtcctcggctcggcgcatcaaggatgcctcccgccgtttccagcggacgtcttcatggtcccacagtatggatacctcaccctgaacaacgggagtcaggcggtaggacgctcttccttttactgcctggagtactttccttctcagatgctgcgtaccggaaacaactttaccttcagctacacctttgaggacgtgcctttccacagcagctacgctcacagccagagtttggaccggctgatgaatcctctgatcgaccagtatctgtattatctgaacaggacacaatcaaatagtggaactcttcagcagtctaggctactgtttagccaagctggacccaccagcatgtctcttcaagctaaaaactggctgcctggaccttgctacagacagcagcgtctgtcaaagcaggcaaacgacaacaacaacagcaactttccctggactgcggctacaaagtatcatctaaatggtcgggactcgttggttaatccaggaccagctatggccagccacaaagacgatgaagaaaagtttttccccatgcatggaaccctgatatttggtaaacaaggaacaaatgctaacgacgcggatttggaacatgtcatgattacagatgaagaagaaatcaggaccaccaatcccgtggctacagagcagtacggaaacgtgtcaaataatttgcaaaactcaaatactggtccaactacagaaaatgtcaatcaccagggagcgttacctggtatggtgtggcaggatcgagacgtgtacctgcagggacccatttgggccaagattcctcacaccgacggacactttcacccttctccactgatgggaggttttggactcaaacacccgcctcctcaaatcatgatcaaaaacactcctgttccagccaatcctcctacaaacttcagcgcggcaaagtttgcttccttcatcacacagtattccacgggacaggtcagcgtggagatcgagtgggagctgcagaaggagaacagcaaacgctggaaccccgagatccagtacacttccaactacaacaaatctgttaatgtggactttactgtggacactaatggtgcgtattcagagcctcgccccattggcaccagatacctgactcgtaatctgtaa

SEQ ID NO: 1368 - DNA, 2208 bp, Artificial Sequence
  Synthetic Polynucleotide
atggctgccgatggttatcttccagattggctcgaggacactctctctgaaggaataagacagtggtggaagctcaaacctggcccaccaccgccaaagcccgcagagcggcataaggacgacagcaggggtcttgtgcttcctgggtacaagtacctcggacccttcaacggactcgacaagggagagccggtcaacgaggcagacgccgcggccctcgagcacgacaaggcctacgaccggcagctcgacagcggagacaacccgtacctcaagtacaaccacgccgacgcggagtttcaggagcgccttaaagaagatacgtcttttgggggcaacctcggacgagcagtattccaggcgaaaaagagggttcttgaacctctgggcctggttgaggagcctgttaagacggctccgggaaaaaagaggccggtagagcactctcctgtggagccagactcctcctcgggaaccggaaaagcgggccagcagcctgcgagaaagagattgaattttggtcagactggagacgcagactccgtacctgacccccagcctctcggacagccaccagcagcccccacaagtttgggatctactacaatggctacaggcagtggcgcaccaatggcagacaataacgagggtgccgatggagtgggtaattcctcaggaaattggcattgcgattcccaatggtcgggcgacagagtcatcaccaccagcacccgaacctgggccctgcccacctacaacaaccacctctacaagcaaatctccagccaatcaggagccagcaacgacaaccactactttggctacagcaccccctgggggtattttgacttcaacagattccactgccacttttcaccacgtgactggcaaagactcatcaacaacaactggggattccgacccaagagactcaacttcaagctctttaacattcaagtcaaagaggtcacgcagaatgacggtacgacgacgattgccaataaccttaccagcacggttcaggtgtttactgactcggagtaccagctcccgtacgtcctcggctcggcgcatcaaggatgcctcccgccgtttccagcggacgtcttcatggtcccacagtatggatacctcaccctgaacaacgggagtcaggcggtaggacgctcttccttttactgcctggagtactttccttctcagatgcttcgtaccggaaacaactttaccttcagttacacctttgaagacgttcctttccacagcagctacgctcacagtcaaagtctggaccggctgatgaatcctcttatcgaccagtacctgtattatctaaacaaaacacaatcaaatagtggaactcttcagcagtctcggctactgtttagtcaagctggacctaccagcatgtctcttcaagctaaaaactggctgcctggaccttgctacagacaacagcgtctgtcaaagcaggcaaacgacaacaacaacagcaactttccctggactgcggctacaaagtatcatctaaatggccgggactcgttggttaatccaggaccagctatggccagccacaaagacgatgaagaaaagtttttccccatgcatggaaccctgatatttggcaaacaaggaacaaatgctaacgacgcggatttggacaatgtcatgattacagatgaagaagaaatccgtaccaccaatcccgtggctacggagcagtacgggactgtgtcaaataatttgcaaaactcaaatactggtccaactactggaactgtcaatcaccaaggagcgttacctggtatggtgtggcaggatcgagacgtgtaccttcagggacccatttgggccaagattcctcacaccgatggacactttcacccttctccgctgatgggaggttttggactcaaacacccgcctcctcagatcatgatcaaaaacactcccgttccagccaatcctcccacaaacttcagttctgccaagtttgcttctttcatcacacagtattccacgggacaggttagcgtggagatcgagtgggagctgcagaaggagaacagcaaacgctggaaccccgagatccagtacacttccaactacaacaagtctgttaatgtggactttactgtggacactaatggtgtgtattcagagcctcgccccattggcaccagatacctgactcgtaatctgtaa

SEQ ID NO: 1369 - DNA, 2208 bp, Artificial Sequence
  Synthetic Polynucleotide
atggctgccgatggttatcttccagattggctcgaggacgctctctctgaaggaataagacagtggtggaagctcaaacctggcccaccaccgccaaagcccgcagagcggcataaggacgacagcaggggtcttgtgcttcctgggtacaagtacctcggacccttcaacggactcgacaagggagagccggtcaacgaggcagacgccgcggccctcgagcacgacaaggcctacgaccggcagctcgacagcggagacaacccgtacctcaagtacaaccacgccgacgcggagtttcaggagcgccttaaagaagatacgtcttttgggggcaacctcggacgagcagtattccaggcgaaaaagagggttcttgaacctctgggcctggttgaggagcccgttaagacggctccgggaaaaaagaggccggtagagcactctcctgtggagccagactcctcctcgggaaccggaaaagcgggccagcagcctgcgagaaagagattgaattttggtcagactggagacgcagactccgtacctgacccccagcctctcggacagccaccagcagcccccacaagtttgggatctactacaatggctacaggcagtggcgcaccaatggcagacaataacgagggtgccgatggagtgggtaattcctcaggaaattggcattgcgattcccaatggtcgggcgacagagtcatcaccaccagcacccgaacctgggccctgcccacctacaacaaccacctctacaagcaaatctccagccaatcaggagccagcaacgacaaccactactttggctacagcaccccctgggggtattttgacttcaacagattccactgccacttttcaccacgtgactggcaaagactcatcaacaacaactggggattccgacccaagagactcaacttcaagctctttaacattcaagtcaaagaggtcacgcagaatgacagtacgacgacgattgccaataaccttaccagcacggttcaggtgtttactgactcggagtaccagctcccgtacgtcctcggctcggcgcatcaaggatgcctcccgccgtttccagcggacgtcttcatggtcccacagtatggatacctcaccctgaacaacgggagtcaggcggtaggacgctcttccttttactgcctggagtactttccttctcagatgcttcgtaccggaaacaactttaccttcagttacacctttgaagacgttcctttccacagcagctacgctcacagtcaaagcctggaccggctgatgaatcctcttatcgaccagtacctgtattatctaaacaaaacacaatcaaatagtggaactcttcagcagtctcggctactgtttagtcaagctggacctaccagcatgtctcctcaagctaaaaactggctgcctggaccttgctacagacaacagcgtctgtcaaagcaggcaaacgacaacaacaacagcaactttccctggactgcggctacaaagtatcatctaaatggccgggactcgttggttaatccaggaccagctatggccagccacaaagacgatgaagaaaagtttttccccatgcatggaaccctgatatttggcaaacaaggaacaaatgctaacgacgcggatttggacaatgtcatgattacagatgaagaagaaatccgtaccaccaatcccgtggctacggagcagtacgggactgtgtcaaataatttgcaaaactcaaatactggtccaactactggaactgtcaatcaccaaggagcgttacctggtatggtgtggcaggatcgagacgtgtaccttcagggacccatttgggccaagattcctcacaccgatggacactttcacccttctccgctgatgggaggttttggactcaaacacccgcctcctcagatcatgatcaaaaacactcccgttccagccaatcctcccacaaacttcagttctgccaagtttgcttctttcatcacacagtattccacgggacaggttagcgtggagatcgagtgggagctgcagaaggagaacagcaaacgctggaaccccgagatccagtacacttccaactacaacaagtctgttaatgtggactttactgtggacactaatggtgtgtattcagagcctcgccccattggcaccagatacctgactcgtaatctgtaa

SEQ ID NO: 1370 - DNA, 2208 bp, Artificial Sequence
  Synthetic Polynucleotide
atggctgccgatggttatcttccagattggctcgaggacactctctctgaaggaataagacagtggtggaagctcaaacctggcccaccaccgccaaagcccgcagagcggcataaggacgacagcaggggtcttgtgcttcctgggtacaagtacctcggacccttcaacggactcgacaagggagagccggtcaacgaggcaaacgccgcggccctcgagcacgacaaggcctacgaccggcagctcgacagcggagacaacccgtacctcaagtacgaccacgccgacgcggagtttcaggagcgccttaaagaagatacgtcttttgggggcaacctcggacgagcagtattccaggcgaaaaagagggttcttgaacctctgggcctggttgaggagcctgttaagacggctccgggaaaaaagaggtcggtagagcactctcctgtggagccagactcctcctcgggaaccggaaaagcgggccagcagcctgcgagaaagagattgaattttggtcagactggagacgcagactccgtacctgacccccagcctctcggacagccaccagcagcccccacaagtttgggatctactacaatggctacaggcagtggcgcaccaatggcagacaataacgagggtgccgatggagtgggtaattcctcaggaaattggcattgcgattcccaatggtcgggcgacagagtcatcaccaccagcacccgaacctgggccctgcccacctacaacaaccacctctacaagcaaatctccagccaatcaggagccagcaacgacaaccactactttggccacagcaccccctgggggtattttgacttcaacagattccactgccacttttcaccacgtgactggcaaagactcatcaacaacaactggggattccgacccaagagactcaacttcaagctctttaacattcaagtcaaagaggtcacgcagaatgacggtacgacgacgattgccaataaccttaccagcacggttcaggtgtttactgactcggagtaccggctcccgtacgtcctcggctcggcgcatcaaggatgcctcccgccgtttccagcggacgtcttcatggtcccacagtatggatacctcaccctgaacaacgggagtcaggcggtaggacgctcctccttttactgcctggagtactttccttctcagatgcttcgtaccggaaacaactttaccttcagttacacctttgaagacgttcctttccacagcagctacgctcacagtcaaagtctggaccggctgatgaatcctcttatcgaccagtacctgtattatctaaacaaaacacaatcaaatagtggaactcttcagcagtctcggctactgtttagtcaagctggacctaccagcatgtctcttcaagctaaaaactggctgcctggaccttgctacagacaacagcgtctgtcaaagcaggcaaacgacaacaacaacagcaactttccctggactgtggctacaaagtatcatctaaatggccgggactcgttggttaatccaggaccagctatggccagccacaaagacgatgaagaaaagtttttccccatgcatggaaccctgatatttggcaaacaaggaacaaatgctaacgacgcggatttggacaatgtcatgattacagatgaagaagaaatccgtaccaccaatcccgtggctacggagcagtacgggactgtgtcaaataatttgcaaaactcaaatactggtccaactactggaactgtcaatcaccaaggagcgttacctggtatggtgtggcaggatcgagacgtgtaccttcagggacccatttgggccaagattcctcacaccgatggacactttcacccttctccgctgatgggaggttttggactcaaacacccgcctcctcagatcatgatcaaaaacactcccgttccagccaatcctcccacaaacttcagttctgccaagtttgcttctttcatcacacagtattccacgggacaggttagcgtggagatcgagtgggagctgcagaaggagaacagcaaacgctggaaccccgagacccagtacacttccaactacaacaagtctgttaatgtggactttactgtggacactaatggtgtgtattcagagcctcgccccattggcaccagatacctgactcgtaatctgtaa

SEQ ID NO: 1371 - DNA, 2208 bp, Artificial Sequence
  Synthetic Polynucleotide
atggctgccgatggttatcttccagattggctcgaggacactctctctgaaggaataagacagtggtggaagctcaaacctggcccaccaccgccaaagcccgcagagcggcataaggacgacagcaggggtcttgtgcttcctgggtacaagtacctcggacccttcaacggactcgacaagggagagccggtcaacgaggcaaacgccgcggccctcgagcacgacaaggcctacgaccggcagctcgacagcggagacaacccgtacctcaagtacaaccacgccgacgcggagtttcaggagcgccttaaagaagatacgtcttttgggggcaacctcggacgagcagtattccaggcgaaaaagagggttcttgaacctctgggcctggttgaggagcctgttaagacggctccgggaaaaaagaggccggtagagcactctcctgtggagccagactcctcctcgggaaccggaaaagcgggccagcagcctgcgagaaagagattgaattttggtcagactggagacgcagactccgtacctgacccccagcctctcggacagccaccagcagcccccacaagtttgggatctactacaatggctacaggcagtggcgcaccaatggcagacaataacgagggtgccgatggagtgggtaattcctcaggaaattggcattgcgattcccaatggtcgggcgacagagtcatcaccaccagcacccgaacctgggccctgcccacctacaacaaccacctctacaagcaaatctccagccaatcaggagccagcaacgacaaccactactttggctacagcaccccctgggggtattttgacttcaacagattccactgccgcttttcaccacgtgactggcaaagactcatcaacaacaactggggattccgacccaagagactcaacttcaagctccttaacattcaagtcaaagaggtcacgcagaatgacggtacgacgacgattgccaataaccttaccagcacggttcaggtgtttactgactcggagtaccagctcccgtacgtcctcggctcggcgcatcaaggatgcctcccgccgtttccagcggacgtcttcatggtcccacagtatggatacctcaccctgaacaacgggagtcaggcggtaggacgctcttccttttactgcctggagtactttccttctcagatgcttcgtaccggaaacaactttaccttcagttacacctttgaagacgttcctttccacagcagctacgctcacagtcaaagtctggaccggctgatgaatcctcttatcgaccagtacctgtattatctaaacaaaacacaatcaaatagtggaactcttcagcagtctcggctactgtttagtcaagctggacctaccagcatgtctcttcaagctaaaaactggctgcctggaccttgctacagacaacagcgtctgtcaaagcaggcaaacgacaacaacaacagcaactttccctggactgcggctacaaagtatcatctaaatggccgggactcgttggttaatccaggaccagctatggccagccacaaagacgatgaagaaaagtttttccccatgcatggaaccctgatatttggcaaacaaggaacaaatgctaacgacgcggatttggacaatgtcatggttacagatgaagaagaaatccgtaccaccaatcccgtggctacggagcagtacgggactgtgtcaaataatttgcaaaactcaaatactggtccaactactggaactgtcaatcaccaaggagcgttacctggtatggtgtggcaggatcgagacgtgtaccttcagggacccatttgggccaagattcctcacaccgatggacactttcacccttctccgctgatgggaggttttggactcaaacacccgcctcctcagatcatgatcaaaaacactcccgttccagccaatcctcccacaaacttcagttctgccaagtttgcttctttcatcacacagtattccacgggacaggttagcgtggagatcgagtgggagctgcagaaggagaacagcaaacgctggaaccccgagacccagtacacttccaactacaacaagtctgttaatgtggactttactgtggacactaatggtgtgtattcagagcctcgccccattggcaccagatacctgactcgtaatctgtaa

SEQ ID NO: 1372 - DNA, 2208 bp, Artificial Sequence
  Synthetic Polynucleotide
atggctgccgatggttatcttccagattggctcgaggacactctctctgaaggaataagacagtggtggaagctcaaacctggcccaccaccgccaaagcccgcagagcggcataaggacgacagcaggggccttgtgcttcctgggtacaagtacctcggacccttcaacggactcgacaagggagagccggtcaacgaggcagacgccgcggccctcgagcacgacaaggcctacgaccggcagctcgacagcggagacaacccgtacctcaagtacaaccacgccgacgcggagtttcaggagcgccttaaagaagatacgtcttttgggggcaacctcggacgagcagtattccaggcgaaaaagagggttcttgaacctctgggcctggttgaggagcctgttaagacggctccgggaaaaaagaggccggtagagcactctcctgtggagccagactcctcctcgggaaccggaaaagcgggccagcagcctgcgagaaagggattgaattttggtcagactggagacgcagactccgtacctgacccccggcctctcggacagccaccagcagcccccgcaagtttgggatctactacaatggctacaggcagtggcgcaccaatggcagacaataacgagggtgccgatggagtgggtaattcctcaggaaattggcattgcgattcccaatggttgggcgacagagtcatcaccaccagcacccgaacctgggccctgcccacctacaacaaccacctctacaagcaaatctccagccaatcaggagccagcaacgacaaccactactttggctacagcaccccctgggggtattttgacttcaacagattccactgccacttttcaccacgtgactggcaaagactcatcaacaacaactggggattccgacccaagagactcaacttcaagctctttaacattcaagtcaaagaggtcacgcagaatgacggtacgacgacgattgccaataaccttaccagcacggttccggtgtttactgactcggagtaccagctcccgtacgtcctcggctcggcgcatcaaggatgcctcccgccgtttccagcggacgtcttcatggtcccacagtatggatacctcaccctgaacaacgggagtcaggcggtaggacgctcttccttttactgcctggagtactttccttctcagatgcttcgtaccggaaacaactttaccttcagttacacctttgaagacgttcctttccacagcagctacgctcacagtcaaagtctggaccggctgatgaatcctcttatcgaccagtacctgtattatctaaacaaaacacaatcaaatagtggaactcttcagcagtctcggctactgtttagtcaagctggacctaccagcatgtctctccaagctaaaaactggctgcctggaccttactacagacaacagcgtctgtcaaagcaggcaaacgacaacaacaacagcaactttccctggactgcggctacaaagtatcatccaaatggccgggactcgttggttgatccaggaccagctatggccagccacaaagacgatgaagaaaagtttttccccatgcatggaaccctgatatttggcaaacaagggacaaatgctaacgacgcggatttggacaatgtcatgattacagatgaagaagaaatccgtaccaccaatcccgtggctacggggcagtacgggactgtgtcaaataatttgcaaaactcaaatactggtccaactactggaactgtcaatcaccaaggagcgttacctggtatggtgtggcaggatcgagacgtgtaccttcagggacccatttgggccaagattcctcacaccgatggacactttcacccttctccgctgatgggaggttttggactcaaacacccgcctcctcagatcatggtcaaaaacactcccgttccagccaatcctcccacaaacttcagttctgccaagtttgtttctttcatcacacggtattccacgggacaggttagcgtggagatcgagtgggagctgcagaaggagaacagcaaacgctggaaccccgagatccagtacacttccaactacaacaagtctgttaatgtggactttactgtggacactaatggtgtgtattcagagcctcgccccattggcaccagatacctgactcgtaatctgtaa

SEQ ID NO: 1373 - DNA, 2208 bp, Artificial Sequence
  Synthetic Polynucleotide
atggctgccgatggttatcttccagattggctcgaggacactctctctgaaggaataagacagtggtggaagctcaaacctggcccaccaccgccaaagcccgcagagcggcataaggacgacagcaggggtcttgtgcttcctgggtacaagtacctcggacccttcaacggacccgacaagggagagccggtcaacgaggcagacgccgcggccctcgagcacgacaaggcctacgaccggcagctcgacagcggagacaacccgtacctcaagtacaaccacgccgacgcggagtttcaggagcgccttaaagaagatacgtcttttgggggcaacctcggacgagcagtattccaggcgaaaaagagggttcttgaacctctgggcctggttgaggagcctgttaagacggctccgggaaaaaagaggccggtagagcactctcctgtggagccagactcctcctcgggaaccggaaaagcgggccagcagcctgcgagaaagagattgaattttggtcagactggagacgcagactccgtacctgacccccagcctctcggacagccaccagcagcccccacaagtttgggatctactacaatggctacaggcagtggcgcaccaatggcagacaataacgagggtgccgatggagtgggtaattcctcaggaaattggcattgcgattcccaatggtcgggcgacagagtcatcaccaccagcacccgaacctgggccctgcccacctacaacaaccacctctacaagcaaatctccagccaatcaggagccagcaacgacaaccactactttggctacagcaccccctgggggtattttgacttcaacagattccactgccacttttcaccacgtgactggcaaagactcatcaacaacaactggggattccgacccaagagactcaacttcaagctctttaacattcaagtcaaagaggtcacgcagaatgacggtacgacgacgattgccaataaccttaccagcacggttcaggtgtttactgactcggagtaccagctcccgtacgtcctcggctcggcgcatcaaggatgcctcccgccgtttccagcggacgtcttcatggtcccacagtatggatacctcaccctgaacaacgggagtcaggcggtaggacgctcttccttttactgcctggagtactttccttctcagatgcttcgtaccggaaacaactttaccttcagttacacctttgaagacgttcctttccacagcagctacgctcacagtcaaagtctggaccggctgatgaatcctcttatcgaccagtacctgtattatctaaacaaaacacaatcaaatagtggaactcttcagcagtctcggctactgtttagtcaagctggacctaccagcatgtctcttcaagctaaaaactggctgcctggaccttgctacagacaacagcgtctgtcaaagcaggcaaacgacaacaacaacagcaactttccctggactgcggctacaaagtatcatctaaatggccgggactcgttggttaatccaggaccagctatggccagccacaaagacgatgaagaaaagtttttccccatgcatggaaccctgatatttggcaaacaaggaacaaatgctaacgacgcggatttggacaatgtcatgattacagatgaagaagaaatccgtaccaccaatcccgtggctacggagcagtacgggactgtgtcaaataatttgcaaaactcaaatactggtccaactactggaactgtcaatcaccaaggagcgttacctggtatggtgtggcaggatcgagacgtgtaccttcagggacccatttgggccaagattcctcacaccgatggacactttcacccttctccgctgatgggaggttttggactcaaacacccgcctcctcagatcatgatcaaaaacactcccgttccagccaatcctcccacaaacttcagttctgccaagtttgcttctttcatcacacagtattccacgggacaggttagcgtggagatcgagtgggagctgcagaaggagaacagcaaacgctggaaccccgagatccagtacacttccaactacaacaagtctgttaatgtggactttactgtggacactaatggtgtgtattcagagcctcgccccattggcaccagatacctgactcgtaatctgtaa

SEQ ID NO: 1374 - DNA, 2208 bp, Artificial Sequence
  Synthetic Polynucleotide
atggctgccgatggttatcttccagattggctcgaggacactctctctgaaggaataagacagtggtggaagctcaaacctggcccaccaccgccaaagcccgcagagcggcataaggacgacagcaggggtcttgtgcttcctgggtacaagtacctcggacccttcaacggactcgacaagggagagccggtcaacgaggcagacgccgcggccctcgagcacgacaaggcctacgaccggcagctcgacagcggagacaacccgtacctcaagtacaaccacgccgacgcggagtttcaggagcgccttaaagaagatacgtcttttgggggcaacctcggacgagcagtattccaggcgaaaaagagggttcttgaacctctgggcctggttgaggagcctgttaagacggctccgggaaaaaagaggccggtagagcactctcctgtggagccagactcctcctcgggaaccggaaaagcgggccagcagcctgcgagaaagagattgaattttggtcagactggagacgcagactccgtacctgacccccagcctctcggacagccaccagcagcccccacaagtttgggatctactacaatggctacaggcagtggcgcaccaatggcagacaataacgagggtgccgatggagtgggtaattcctcaggaaattggcattgcgattcccaatggtcgggcgacagagtcatcaccaccagcacccgaacctgggccctgcccacctacaacaaccacctctacaagcaaatctccagccaatcaggagccagcaacgacaaccactactttggctacagcaccccctgggggtattttgacttcaacagattccactgccacttttcaccacgtgactggcaaagactcatcaacaacaactggggattccgacccaagagactcaacttcaagctctttaacattcaagtcaaagaggtcacgcagaatgacggtacgacgacgattgccaataaccttaccagcacggttcaggtgtttactgactcggagtaccagctcccgtacgtcctcggctcggcgcatcaaggatgcctcccgccgtttccagcggacgtcttcatggtcccacagtatggatacctcaccctgaacaacgggagtcaggcggtaggacgctcttccttttactgcctggagtactttccttctcagatgcttcgtaccggaaacaactttaccttcagttacacctttgaagacgttcctttccacagcagctacgctcacagtcaaagtctggaccggctgatgaatcctcttatcgaccagtacctgtattatctaaacaaaacacaatcaaatagtggaactcttcagcagtctcggctactgtttagtcaagctggacctaccagcatgtctcttcaagctaaaaactggctgcctggaccttgctacagacaacagcgtctgtcaaagcaggcaaacgacaacaacaacagcaactttccctggactgcggctacaaagtatcatctaaatggccgggactcgttggttaatccaggaccagctatggccagccacaaagacgatgaagaaaagtttttccccatgcatggaaccctgatatttggcaaacaaggaacaaatgctaacgacgcggatttggacaatgtcatgattacagatgaagaagaaatccgtaccaccaatcccgtggctacggagcagtacgggactgtgtcaaataatttgcaaaactcaaatactggtccaactactggaactgtcaatcaccaaggagcgttacctggtatggtgtggcaggatcgagacgtgtaccttcagggacccatttgggccaagattcctcacaccgatggacactttcacccttctccgctgatgggaggttttggactcaaacacccgcctcctcagatcatgatcaaaaacactcccgttccagccaatcctcccacaaacttcagttctgccaagtttgcttctttcatcacacagtattccacgggacaggttagcgtggagatcgagtgggagctgcagaaggagaacagcaaacgctggaaccccgagacccagtacacttccaactacaacaagtctgttaatgtggactttactgtggacactaatggtgtgtattcagagcctcgccccattggcaccagatacctgactcgtaatctgtaa

SEQ ID NO: 1375 - DNA, 2208 bp, Artificial Sequence
  Synthetic Polynucleotide
atggctgccgatggttatcttccagattggctcgaggacactctctctgaaggaataagacagtggtggaagctcaaacctggcccaccaccgccaaagcccgcagagcggcataaggacgacagcaggggccttgtgcttcctgggtacaagtacctcggacccttcaacggactcgacaagggagagccggtcaacgaggcagacgccgcggccctcgagcacgacaaggcctacgaccggcagctcgacagcggagacaacccgtacctcaagtacaaccacgccgacgcggagtttcaggagcgccttaaagaagatacgtcttttgggggcaacctcggacgagcagtattccaggcgaaaaagagggttcttgaacctctgggcctggttgaggagcctgttaagacggctccgggaaaaaagaggccggtagagcactctcctgtggagccagactcctcctcgggaaccggaaaagcgggccagcagcctgcgagaaagggattgaattttggtcagactggagacgcagactccgtacctgacccccggcctctcggacagccaccagcagcccccgcaagtttgggatctactacaatggctacaggcagtggcgcaccaatggcagacaataacgagggtgccgatggagtgggtaattcctcaggaaattggcattgcgattcccaatggttgggcgacagagtcatcaccaccagcacccgaacctgggccctgcccacctacaacaaccacctctacaagcaaatctccagccaatcaggagccagcaacgacaaccactactttggctacagcaccccctgggggtattttgacttcaacagattccactgccacttttcaccacgtgactggcaaagactcatcaacaacaactggggattccgacccaagagactcaacttcaagctctttaacattcaagtcaaagaggtcacgcagaatgacggtacgacgacgattgccaataaccttaccagcacggttccggtgtttactgactcggagtaccagctcccgtacgtcctcggctcggcgcatcaaggatgcctcccgccgtttccagcggacgtcttcatggtcccacagtatggatacctcaccctgaacaacgggagtcaggcggtaggacgctcttccttttactgcctggagtactttccttctcagatgcttcgtaccggaaacaactttaccttcagttacacctttgaagacgttcctttccacagcagctacgctcacagtcaaagtctggaccggctgatgaatcctcttatcgaccagtacctgtattatctaaacaaaacacaatcaaatagtggaactcttcagcagtctcggctactgtttagtcaagctggacctaccagcatgtctctccaagctaaaaactggctgcctggaccttactacagacaacagcgtctgtcaaagcaggcaaacgacaacaacaacagcaactttccctggactgcggctacaaagtatcatccaaatggccgggactcgttggttgatccaggaccagctatggccagccacaaagacgatgaagaaaagtttttccccatgcatggaaccctgatatttggcaaacaagggacaaatgctaacgacgcggatttggacaatgtcatgattacagatgaagaagaaatccgtaccaccaatcccgtggctacggrgcagtacgggactgtgtcaaataatttgcaaaactcaaatactggtccaactactggaactgtcaatcaccaaggagcgttacctggtatggtgtggcaggatcgagacgtgtaccttcagggacccatttgggccaagattcctcacaccgatggacactttcacccttctccgctgatgggaggttttggactcaaacacccgcctcctcagatcatggtcaaaaacactcccgttccagccaatcctcccacaaacttcagttctgccaagtttgcttctttcatcacacggtattccacgggacaggttagcgtggagatcgagtgggagctgcagaaggagaacagcaaacgctggaaccccgagatccagtacacttccaactacaacaagtctgttaatgtggactttactgtggacactaatggtgtgtattcagagcctcgccccattggcaccagatacctgactcgtaatctgtaa

SEQ ID NO: 1376 - DNA, 2208 bp, Artificial Sequence
  Synthetic Polynucleotide
atggctgccgatggttatcttccagattggctcgaggacactctctctgaaggaataagacagtggtggaagctcaaacctggcccaccaccgccaaagcccgcagagcggcataaggacgacagcaggggtcttgtgcttcctgggtacaagtacctcggacccttcaacggactcgacaagggagagccggtcaacgaggcagacgccgcggcccccgagcacgacaaggcctacgaccggcagctcgacagcggagacaacccgtaccccaagtacaaccacgccgacgcggagtttcaggagcgccttaaagaagatacgtcttttgggggcaacctcggacgagcagtattccaggcgaaaaagagggttcttgaacctctgggcctggttgaggagcctgttaagacggctccgggaaaaaagaggccggtagagcactctcctgtggagccagactcctcctcgggaaccggaaaagcgggccagcagcctgcgagaaagagattgaattttggtcagactggagacgcagactccgtacctgacccccagcctctcggacagccaccagcagcccccacaagtttgggatctactacaatggctacaggcagtggcgcaccaatggcagacaataacgagggtgccgatggagtgggtaattcctcaggaaattggcattgcgattcccaatggtcgggcgacagagtcatcaccaccagcacccgaacctgggccctgcccacctacaacaaccacctctacaagcaaatctccagccaatcaggagccagcaacgacaaccactactttggctacagcaccccctgggggtattttgacttcaacagattccactgccacttttcaccacgtgactggcaaagactcatcaacaacaactggggattccgacccaagagactcaacttcaagctctttaacattcaagtcaaagaggtcacgcagaatgacggtacgacgacgattgccaataaccttaccagcacggttcaggtgtttactgactcggagtaccagctcccgtacgtcctcggctcggcgcatcaaggatgcctcccgccgtttccagcggacgtcttcatggtcccacagtatggatacctcaccctgaacaacgggagtcaggcggtaggacgctcttccttttactgcctggagtactttccttctcagatgcttcgtaccggaaacaactttaccttcagttacacctttgaagacgttcctttccacagcagctacgctcacagtcaaagtctggaccggctgatgaatcctcttatcgaccagtacctgtattatctaaacaaaacacaatcaaatagtggaactcttcagcagtctcggctactgtttagtcaagctggacctaccagcatgtctcttcaagctaaaaactggctgcctggaccttgctacagacaacagcgtctgtcaaagcaggcaaacgacaacaacaacagcaactttccctggactgcggctacaaagtatcatctaaatggccgggactcgttggttaatccaggaccagctatggccagccacaaagacgatgaagaaaagtttttccccatgcatggaaccctgatatttggcaaacaaggaacaaatgctaacgacgcggatttggacaatgtcatgattacagatgaagaagaaatccgtaccaccaatcccgtggctacggagcagtacgggactgtgtcaaataatttgcaaaactcaaatactggtccaactactggaactgtcaatcaccaaggagcgttacctggtatggtgtggcaggatcgagacgtgtaccttcagggacccatttgggccaagattcctcacaccgatggacactttcacccttctccgctgatgggaggttttggactcaaacacccgcctcctcagatcatgatcaaaaacactcccgttccagccaatcctcccacaaacttcagttctgccaagtttgcttctttcatcacacagtattccacgggacaggttagcgtggagatcgagtgggagctgcagaaggagaacagcaaacgctggaaccccgagatccagtacacttccaactacaacaagtctgttaatgtggactttactgtggacactaatggtgtgtattcagagcctcgccccattggcaccagatacctgactcgtaatctgtaa

SEQ ID NO: 1377 - DNA, 2208 bp, Artificial Sequence
  Synthetic Polynucleotide
atggctgccgatggttatcttccagattggctcgaggacactctctctgaaggaataagacagtggtggaagctcaaacctggcccaccaccgccaaagcccgcagagcggcataaggacgacagcaggggtcttgtgcttcctgggtataagtacctcggacccttcaacggactcgacaagggagagccggtcaacgaggcagacgccgcggccctcgagcacgacaaggcctacgaccggcagctcgacagcggagacaacccgtacctcaagtacaaccacgccgacgcggagtttcaggagcgccttaaagaagatacgtcttttgggggcaacctcggacgagcagtattccaggcgaaaaagagggttcttgaacctctgggcctggttgtggagcctgttaagacggctccgggaaaaaagaggccggtagagcactctcctgtggagccagactcctcctcgggaaccggaaaagcgggccagcagcctgcgagaaagagattgaattttggtcagactggagacgcagactccgtacctgacccccagcctctcggacagccaccagcagcccccacaagtttgggatctactacaatggctacaggcagtggcgcaccaatggcagacaataacgagggtgccgatggagtgggtaattcctcaggaaattggcattgcgattcccaatggtcgggcgacagagtcatcaccaccagcacccgaacctgggccctgcccacctacaacaaccacctctacaagcaaatctccagccgatcaggagccagcaacgacaaccactactttggctacagcaccccctgggggtattttgacttcaacggattccactgccacttttcaccacgtgactggcaaagactcatcaacaacaactggggattccgacccaagagactcaacttcaagctctttaacattcaagtcaaagaggtcacgcagaatgacggtacgacgacgattgccaataaccttaccagcacggttcaggtgtttactgactcggagtaccagctcccgcacgtcctcggctcggcgcatcaaggatgcctcccgccgtttccagcggacgtcttcatggtcccacagtatggatacctcaccctgaacaacgggagtcaggcggtaggacgctcttccttttactgcccggagtactttccttctcagatgcttcgtaccggaaacaactttaccttcagttacacctttgaagacgttcctttccacagcagctacgctcacagtcaaagtctggaccggctgatgaatcctcttatcgaccagtacctgtattatctaaacaaaacacaatcaaatagtggaactcttcagcagtctcggctactgtttagtcaagctggacctaccagcatgtctcttcaagctaaaaactggctgcctggaccttgctacagacaacagcgtctgtcaaagcaggcaaacggcaacaacaacagcaactttccctggactgcggctacaaagtatcatctaaatggccgggactcgttggttaatccaggaccagctatggccagccacaaagacgatgaagaaaagtttttccccatgcatggaaccctgatatttggcaaacaaggaacaaatgctaacgacgcggatttggacaatgtcatgattacagatgaagaagaaatccgtaccaccaatcccgtggctacggagcagtacgggactgtgtcaaataatttgcaaaactcaaatactggtccaactactggaactgtcaatcaccaaggagcgttacctggtatggtgtggcaggatcgagacgtgtaccttcagggacccatttgggccaagattcctcacaccgatggacactttcacccttctccgctgatgggaggttttggactcaaacacccgcctcctcagatcatgatcaaaaacactcccgttccagccaatcctcccacaaacttcagttctgccaagtttgcttctttcatcacacagtattccacgggacaggttagcgtggagatcgagtgggagctgcagaaggagaacagcaaacgctggaaccccgagatccagtacacttccaactacaacaagtctgttaatgtggactttactgtggacactaatggtgtgtattcagagcctcgccccattggcaccagatacctgactcgtaatctgtaa

SEQ ID NO: 1378 - DNA, 2208 bp, Artificial Sequence
  Synthetic Polynucleotide
atggctgccgatggttatcttccagattggctcgaggacactctctctgaaggaataagacagtggtggaagctcaaacctggcccaccgccgccaaagcccgcagagcggcataaggacgacagcaggggtcttgtgcttcctgggtacaagtacctcggacccttcaacggactcgacaagggagagccggtcaacgaggcagacgccgcggccctcgagcacgacaaggcctacgaccggcagctcgacagcggagacaacccgtacctcaagtacaaccacgccgacgcggagtttcaggagcgccttaaagaagatacgtcttttgggggcaacctcggacgagcagtattccaggcgaaaaagagggttcttgaacctctgggcctggttgaggagcctgttaagacggttccgggaaaaaagaggccggtagagcactctcctgtggagccagactcctcctcgggaaccggaaaagcgggccagcagcctgcgagaaagagattgaattttggtcagactggagacgcagactccgtacctgacccccagcctctcggacagccaccagcagcccccacaagtttgggatctactacaatggctacaggcagtggcgcaccaatggcagacaataacgagggtgccgatggagtgggtaattcctcaggaaattggcattgcgattcccaatggtcgggcgacagagtcatcaccaccagcacccgaacctgggccctgcccacctacaacaaccacccctacaagcaaatctccagccaatcaggagccagcaacgacaaccactactttggctacagcaccccctgggggtattttgacttcaacagattccactgccacttttcaccacgtgactggcaaagactcatcaacaacaactggggattccgacccaagagactcaacttcaagctctttaacattcaagtcaaagaggtcacgcagaatgacggtacgacgacgattgccaataaccttaccagcacggttcaggtgtttactgactcggagtaccagctcccgtacgtcctcggctcggcgcatcaaggacgcctcccgccgtttccagcggacgtcttcatggtcccacagtatggatacctcaccctgaacaacgggagtcaggcggtaggacgctcttccttttactgcctggagtactttccttctcagatgcttcgtaccggaaacaactttaccttcagttacacctttgaagacgttcctttccacagcagctacgctcacagtcaaagtctggaccggctgatgaatcctcttatcgaccagtacctgtattatctaaacaaaacacaatcaaatagtggaactcttcagcagtctcggctactgtttagtcaagctggacctactagcatgtctcttcaagctaaaaactggctgcctggaccttgctacagacaacagcgtctgtcaaagcaggcagacgacaacaacaacagcaactttccctggactgcggctacaaagtatcatctaaatggccgggactcgttggttaatccaggaccagctatggccagccacaaagacgatgaagaaaagtttttccccatgcatggaaccctgatatttggcaaacaaggaacaaatgctaacgacgcggatttggacaatgtcatgattacagatgaagaagaaatccgtaccaccaatcccgtggctacggagcagtacgggactgtgtcaaataatttgcaaaactcaaatactggtccaactactggaactgtcaatcaccaaggagcgttacctggtatggtgtggcaggatcgagacgtgtaccttcagggacccatttgggccaagattcctcacaccgatggacactttcacccttctccgctgatgggaggttttggactcaaacacccgcctcctcagatcatgatcaaaaacactcccgttccagccaatccccccacaaacttcagttctgccaagtttgcttctttcatcacacagtattccacgggacaggttagcgtggagatcgagtgggagctgcagaaggagaacagcaaacgctggaaccccgagatccagtacacttccaactacaacaagtctgttaatgtggactttactgtggacgctaatggtgtgtattcagagcctcgccccattggcaccagatacctgactcgtaatctgtaa

SEQ ID NO: 1379 - DNA, 2208 bp, Artificial Sequence
  Synthetic Polynucleotide
atggctgccgatggttatcttccagattggctcgaggacactctctctgaaggaataagacagtggtggaagctcaaacctggcccaccaccgccaaagcccgcagagcggcataaggacgacagcaggggtcttgtgctttctgggtacaagtacctcggacccttcaacggactcgacaagggagagccggtcaacgaggcagacgccgcggccctcgagcacgacaaggcctacgaccggcagctcgacagcggagacaacccgtacctcaagtacaaccacgccgacgcggagtttcaggagcgccttaaagaagatacgtcttttgggggcaacctcggacgagcagtattccaggcgaaaaagagggttcttgaacctctgggcctggttgaggagcctgttaagacggctccgggaaaaaagaggccggtagagcactctcctgtggagccagactcctcctcgggaaccggaaaagcgggccagcagcctgcgagaaagagattgaattttggtcagactggagacgcagactccgtacctgacccccagcctctcggacagccaccagcagcccccacaagtttgggatctactacaatggctacaggcagtggcgcaccaatggcagacaataacgagggtgccgatggagtgggtaattcctcaggaaattggcattgcgattcccaatggtcgggcgacagagtcatcaccaccagcacccgaacctgggccctgcccacctacaacaaccacctctacaagcaaatctccagccaatcaggagccagcaacgacaaccactactttggctacagcaccccctgggggtattttgacttcaacagattccactgccacttttcaccacgtgactggcaaagactcatcaacaacaactggggattccgacccaagagactcaacttcaagctctttaacattcaagtcaaagaggtcacgcagaatgacggtacgacgacgattgccaataaccttaccagcacggttcaggtgtttactgactcggagtaccagctcccgtacgtcctcggctcggcgcatcaaggatgcctcccgccgtttccagcggacgtcttcatggtcccacagtatggatacctcaccctgaacaacgggagtcaggcggtaggacgctcttccttttactgcctggagtactttccttctcagatgcttcgtaccggaaacaactttaccttcagttacacctttgaagacgttcctttccacagcagctacgctcacagtcaaagtctggaccggctgatgaatcctcttatcgaccagtacctgtattatctaaacaaaacacaatcaaatagtggaactcttcagcagtctcggctactgtttagtcaagctggacctaccagcatgtctcttcaagctaaaaactggctgcctggaccttgctacagacaacagcgtctgtcaaagcaggcaaacgacaacaacaacagcaactttccctggactgcggctacaaagtatcatctaaatggccgggactcgttggttaatccaggaccagctatggccagccacaaagacgatgaagaaaagtttttccccatgcatggaaccctgatatttggcaaacaaggaacaaatgctaacgacgcggatttggacaatgtcatgattacagatgaagaagaaatccgtaccaccaatcccgtggctacggagcagtacgggactgtgtcaaataatttgcaaaactcaaatactggtccaactactggaactgtcaatcaccaaggagcgttacctggtatggtgtggcaggatcgagacgtgtaccttcagggacccatttgggccaagattcctcacaccgatggacactttcacccttctccgctgatgggaggttttggactcaaacacccgcctcctcagatcatgatcaaaaacactcccgttccagccaatccccccacaaacttcagttctgccaagtttgcttctttcatcacacagtattccacgggacaggttagcgtggagatcgagtgggagctgcagaaggagaacagcaaacgctggaaccccgagatccagtacacttccaactacaacaagtctgttaatgtggactttactgtggacactaatggtgtgtattcagagcctcgccccattggcaccagatacctgactcgtaatctgtaa

SEQ ID NO: 1380 - DNA, 2208 bp, Artificial Sequence
  Synthetic Polynucleotide
atggctgccgatggttatcttccagattggctcgaggacactctctctgaaggaataagacagtggtggaagctcaaacctggcccaccaccgccaaagcccgcagagcggcataaggacgacagcaggggtcttgtgcttcctgggtacaagtacctcggacccttcaacggactcgacaagggagagccggtcaacgaggcagacgccgcggccctcgagcacgacaaggcctacgaccggcagctcgacagcggagacaacccgtacctcaagtacaaccacgccgacgcggagtttcaggagcgccttaaagaagatacgtcttttgggggcaacctcggacgagcagtattccaggcgaaaaagagggttcttgaacctctgggcctggttgaggagcctgttaagacggctccgggaaaaaagaggccggtagagcactctcctgtggagccagactcctcctcgggaaccggaaaagcgggccagcagcctgcgagaaagagattgaattttggtcagactggagacgcagactccgtacctgacccccagcctctcggacagccaccagcagcccccacaagtttgggatctactacaatggctacaggcagtggcgcaccaatggcagacaataacgagggtgccgatggagtgggtaattcctcaggaaattggcattgcgattcccaatggtcgggcgacagagtcatcaccaccagcacccgaacctgggccctgcccacctacaacaaccacctctacaagcaaatctccagccaatcaggagccagcaacgacaaccactactttggctacagcaccccctgggggtattttgacttcaacagattccactgccacttttcaccacgtgactggcaaagactcatcaacaacaactggggattccgacccaagagactcaacttcaagctctttaacattcaagtcaaagaggtcacgcagaatgacggtacgacgacgattgccaataaccttaccagcacggttcaggtgtttactgactcggagtaccagctcccgtacgtcctcggctcggcgcatcaaggatgcctcccgccgtttccagcggacgtcttcatggtcccacagtatggatacctcaccctgaacaacgggagtcaggcggtaggacgctcctccttttactgcctggagtactttccttctcagatgcttcgtaccggaaacaactttaccttcagttacacctttgaagacgttcctttccacagcagctgcgctcacagtcaaagtctggaccggctgatgaatcctcttatcgaccagtacctgtattatctaaacaaaacacaatcaaatagtggaactcttcagcagtctcggctactgtttagtcaagctggacctaccagcatgtctcttcaagctaaaaactggctgcctggaccttgctacagacaacagcgtctgtcaaagcaggcaaacgacaacaacaacagcaactttccctggactgcggctacaaagtatcatctaaatggccgggactcgttggttaatccaggaccagctatggccagccacaaagacgatgaagaaaagtttttccccatgcatggaaccctgatatttggcaaacaaggaacaaatgctaacgacgcggatttggacaatgtcatgattacagatgaagaagaaatccgtaccaccaatcccgtggctacggagcagtacgggactgtgtcaaataatttgcaaaactcaaatactggtccaactactggaactgtcaatcaccaaggagcgttacctggtatggtgtggcaggatcgagacgtgtaccttcagggacccatttgggccaagattcctcacaccgatggacactttcacccttctccgctgatgggaggttttggactcaaacacccgcctcctcagatcatgatcaaaaacactcccgttccagccaatcctcccacaaacttcagttctgccaagtttgcttctttcatcacacagtattccacgggacaggttagcgtggagatcgagtgggagctgcagaaggagaacagcaaacgctggaaccccgagatccagtacacttccaactacaacaagtctgttaatgtggactttactgtggacactaatggtgtgtattcagagcctcgccccattggcaccagatacctgactcgtaatctgtaa

SEQ ID NO: 1381 - DNA, 2208 bp, Artificial Sequence
  Synthetic Polynucleotide
atggctgccgatggttatcttccagattggctcgaggacactctctctgaaggaataagacagtggtggaagctcaaacctggcccaccaccgccaaagcccgcagagcggcataaggacgacagcaggggtcttgtgcttcctgggtacaagtacctcggacccttcaacggactcgacaagggagagccggtcaacgaggcagacgccgcggccctcgagcacgacaaggcctacgaccggcagctcgacagcggagacaacccgtacctcaagtacaaccacgccgacgcggagtttcaggagcgccttaaagaagatacgtcttttgggggcaacctcggacgagcagtattccaggcgaaaaagagggttcttgaacctctgggcctggttgaggagcctgttaagacggctccgggaaaaaagaggccggtagagcactctcctgtggagccagactcctcctcgggaaccggaaaagcgggccagcagcctgcgagaaagagattgaattttggtcagactggagacgcagactccgtacctgacccccagcctctcggacagccaccagcagcccccacaagtttgggatctactacaatggctacaggcagtggcgcaccaatggcagacaataacgagggtgccgatggagtgggtaattcctcaggaaattggcattgcgattcccaatggtcgggcgacagagtcatcaccaccagcacccgaacctgggccctgcccacctacaacaaccacctctacaagcaaatctccagccaatcaggagccagcaacgacaaccactactttggctacagcaccccctgggggtattttgacttcaacagattccactgccacttttcaccacgtgactggcaaagactcatcaacaacaactggggattccgacccaagagactcaacttcaagctctttaacattcaagtcaaagaggtcacgcagaatgacggtacgacgacgattgccaataaccttaccagcacggttccggtgtttactgactcggagtaccagctcccgtacgtcctcggctcggcgcatcaaggatgcctcccgccgtttccagcggacgtcttcatggtcccacagtatggatacctcaccctgaacaacgggagtcaggcggtaggacgctcttccttttactgcctggagtactttccttctcagatgcttcgtaccggaaacaactttaccttcagttacacctttgaagacgttcctttccacagcagctacgctcacagtcaaagtctggaccggctgatgaatcctcttatcgaccagtacctgtattatctaaacaaaacacaatcaaatagtggaactcttcagcagtctcggctactgtttagtcaagctggacctaccagcatgtctctccaagctaaaaactggctgcctggaccttactacagacaacagcgtctgtcaaagcaggcaaacgacaacaacaacagcaactttccctggactgcggctacaaagtatcatccaaatggccgggactcgttggttgatccaggaccagctatggccagccacaaagacgatgaagaaaagtttttccccatgcatggaaccctgatatttggcaaacaagggacaaatgctaacgacgcggatttggacaatgtcatgattacagatgaagaagaaatccgtaccaccaatcccgtggctacggggcagtacgggactgtgtcaaataatttgcaaaactcaaatactggtccaactactggaactgtcaatcaccaaggagcgttacctggtatggtgtggcaggatcgagacgtgtaccttcagggacccatttgggccaagattcctcacaccgatggacactttcacccttctccgctgatgggaggttttggactcaaacacccgcctcctcagatcatggtcaaaaacactcccgttccagccaatcctcccacaaacttcagttctgccaagtttgcttctttcatcacacggtattccacgggacaggttagcgtggagatcgagtgggagctgcagaaggagaacagcaaacgctggaaccccgagatccagtacacttccaactacaacaagtctgttaatgtggactttactgtggacactaatggtgtgtattcagagcctcgccccattggcaccagatacctgactcgtaatctgtaa

SEQ ID NO: 1382 - DNA, 2208 bp, Artificial Sequence
  Synthetic Polynucleotide
atggctgccgatggttatcttccagattggctcgaggacactctctctgaaggaataagacagtggtggaagctcaaacctggcccaccaccgccaaagcccgcagagcggcataaggacgacagcaggggtcttgtgcttcctgggtacaagtacctcggacccttcaacggacccgacaagggagagccggtcaacgaggcagacgccgcggccctcgagcacgacaaggcctacgaccggcagctcgacagcggagacaacccgtacctcaagtacaaccacgccgacgcggagtttcaggagcgccttaaagaagatacgtcttttgggggcaacctcggacgagcagtattccaggcgaaaaagagggttcttgaacctctgggcctggttgaggagcctgttaagacggctccgggaaaaaagaggccggtagagcactctcctgtggagccagactcctcctcgggaaccggaaaagcgggccagcagcctgcgagaaagagattgaattttggtcagactggagacgcagactccgtacctgacccccagcctctcggacagccaccagcagcccccacaagtttgggatctactacaatggctacaggcagtggcgcaccaatggcagacaataacgagggtgccgatggagtgggtaattcctcaggaaattggcattgcgattcccaatggtcgggcgacagagtcatcaccaccagcacccgaacctgggccctgcccacctacaacaaccacctctacaagcaaatctccagccaatcaggagccagcaacgacaaccactactttggctacagcaccccctgggggtattttgacttcaacagattccactgccacttttcaccacgtgactggcaaagactcatcaacaacaactggggattccgacccaagagactcaacttcaggctctttaacattcaagtcaaagaggtcacgcagaatgacggtacgacgacgattgccaataaccttaccagcacggttcaggtgtttactgactcggagtaccagctcccgtacgtcctcggctcggcgcatcaaggatgcctcccgccgtttccagcggacgtcttcatggtcccacagtatggatacctcaccctgaacaacgggagtcaggcggtaggacgctcttccttttactgcctggagtactttccttctcagatgcttcgtaccggaaacaactttaccttcagttacacctttgaagacgttcctttccacagcagctacgctcacagtcaaagtctggaccggctgatgaatcctcttatcgaccagtacctgtattatctaaacaaaacacaatcaaatagtggaactcttcagcagtctcggctactgtttagtcaagctggacctaccagcatgtctcttcaagctaaaaactggctgcctggaccttgctacagacaacagcgtctgtcaaagcaggcaaacgacaacaacaacagcaactttccctggactgcggctacaaagtatcatctaaatggccgggactcgttggttaatccaggaccagctatggccagccacaaagacgatgaagaaaagtttttccccatgcatggaaccctgatatttggcaaacaaggaacaaatgctaacgacgcggatttggacaatgtcatgattacagatgaagaagaaatccgtaccaccaatcccgtggctacggagcagtacgggactgtgtcaaataatttgcaaaactcaaatactggtccaactactggaactgtcaatcaccaaggagcgttacctggtatggtgtggcaggatcgagacgtgtaccttcagggacccatttgggccaagattcctcacaccgatggacactttcacccttctccgctgatgggaggttttggactcaaacacccgcctcctcagatcatgatcaaaaacactcccgttccagccaatccccccacaaacttcagttctgccaagtttgcttctttcatcacacagtattccacgggacaggttagcgtggagatcgagtgggagctgcagaaggagaacagcaaacgctggaaccccgagatccagtacacttccaactacaacaagtctgttaatgtggactttactgtggacactaatggtgtgtattcagagcctcgccccattggcaccagatacctgactcgtaatctgtaa

SEQ ID NO: 1383 - DNA, 2208 bp, Artificial Sequence
  Synthetic Polynucleotide
atggctgccgatggttatcttccagattggctcgaggacactctctctgaaggaataagacagtggtggaagctcaaacctggcccaccaccgccaaagcccgcagagcggcataaggacgacagcaggggtcttgtgcttcctgggtacaagtacctcggacccttcaacggacccgacaagggagagccggtcaacgaggcagacgccgcggccctcgagcacgacaaggcctacgaccggcagctcgacagcggagacaacccgtacctcaagtacaaccacgccgacgcggagtttcaggagcgccttaaagaagatacgtcttttgggggcaacctcggacgagcagtattccaggcgaaaaagagggttcttgaacctctgggcctggttgaggagcctgttaagacggctccgggaaaaaagaggccggtagagcactctcctgtggagccagactcctcctcgggaaccggaaaagcgggccagcagcctgcgagaaagagattgaattttggtcagactggagacgcagactccgtacctgacccccagcctctcggacagccaccagcagcccccacaagtttgggatctactacaatggctacaggcagtggcgcaccaatggcagacaataacgagggtgccgatggagtgggtaattcctcaggaaattggcattgcgattcccaatggtcgggcgacagagtcatcaccaccagcacccgaacctgggccctgcccacctacaacaaccacctctacaagcaaatctccagccaatcaggagccagcaacgacaaccactactttggctacagcaccccctgggggtattttgacttcaacagattccactgccacttttcaccacgtgactggcaaagactcatcaacaacaactggggattccgacccaagagactcaacttcaggctctttaacattcaagtcaaagaggtcacgcagaatgacggtacgacgacgattgccaataaccttaccagcacggttcaggtgtttactgactcggagtaccagctcccgtacgtcctcggctcggcgcatcaaggatgcctcccgccgtttccagcggacgtcttcatggtcccacagtatggatacctcaccctgaacaacgggggtcaggcggtaggacgctcttccttttactgcctggagtactttccttctcagatgcttcgtaccggagacaactttaccttcagttacacctttgaagacgttcctttccacagcagctacgctcacagtcaaagtctggaccggctgatgaatcctcttatcgaccagtacctgtattatctaaacaaaacacaatcaaatagtggaactcttcagcagtctcggctactgtttagtcaagctggacctaccagcatgtctcttcaagctaaaaactggctgcctggaccttgctacagacaacagcgtctgtcaaagcaggcaaacgacaacaacaacagcaactttccctggactgcggctacaaagtatcatctaaatggccgggactcgttggttaatccaggaccagctatggccagccacaaagacgatgaagaaaagtttttccccatgcatggaaccctgatatttggcaaacaaggaacaaatgctaacgacgcggatttggacaatgtcatgattacagatgaagaagaaatccgtaccaccaatcccgtggctacggagcagtacgggactgtgtcaaataatttgcaaaactcaaatactggtccaactactggaactgtcaatcaccaaggagcgttacctggtatggtgtggcaggatcgagacgtgtaccttcagggacccatttgggccaagattcctcacaccgatggacactttcacccttctccgctgatgggaggttttggactcaaacacccgcctcctcagatcatgatcaaaaacactcccgttccagccaatcctcccacaaacttcagttctgccaagtttgcttctttcatcacacagtattccacgggacaggttagcgtggagatcgagtgggagctgcagaaggagaacagcaaacgctggaaccccgagatccagtacacttccaactacaacaagtctgttaatgtggactttactgtggacactaatggtgtgtattcagagcctcgccccattggcaccagatacctgactcgtaatctgtaa

SEQ ID NO: 1384 - DNA, 2208 bp, Artificial Sequence
  Synthetic Polynucleotide
atggctgccgatggttatcttccagattggctcgaggacactctctctgaaggaataagacagtggtggaagctcaaacctggcccaccaccgccaaagcccgcagagcggcataaggacgacagcaggggtcttgtgcttcctgggtacaagtacctcggacccttcaacggactcgacaagggagagccggtcaacgaggcagacgccgcggccctcgagcacgacaaggcctacgaccggcagctcgacagcggagacaacccgtacctcaagtacaaccacgccgacgcggagtttcaggagcgccttaaagaagatacgtcttttgggggcaacctcggacgagcagtattccaggcgaaaaagagggttcttgaacctctgggcctggttgaggagcctgttaagacggctccgggaaaaaagaggccggtagagcactctcctgtggagccagactcctcctcgggaaccggaaaagcgggccagcagcctgcgagaaagagattgaattttggtcagactggagacgcagactccgtacctgacccccagcctctcggacagccaccagcagcccccacaagtttgggatctactacaatggctacaggcagtggcgcaccaatggcagacaataacgagggtgccgatggagtgggtaattcctcaggaaattggcattgcgattcccaatggtcgggcgacagagtcatcaccaccagcacccgaacctgggccctgcccacctacaacaaccacctctacaagcaaatctccagccaatcaggagccagcaacgacaaccactactttggctacagcaccccctgggggtattttgacttcaacagattccactgccacttttcaccacgtgactggcaaagactcatcaacaacaactggggattccgacccaagagactcaacttcaagctctttaacattcaagtcaaagaggtcacgcagaatgacggtacgacgacgattgccaataaccttaccagcacggttcaggtgtttactgactcggagtaccagctcccgtacgtcctcggctcggcgcatcaaggatgcctcccgccgtttccagcggacgtcttcatggtcccacagtatggatacctcaccctgaacaacgggagtcaggcggtaggacgctcttccttttactgcctggagtactttccttctcagatgcttcgtaccggaaacaactttaccttcagttacacctttgaagacgttcctttccacagcagttacgctcacagtcaaagtctggaccggctgatgaatcctcttatcgaccagtacctgtattatctaaacaaaacacaatcaaatagtggaactcttcagcagtctcggctactgtttagtcaagctggacctaccagcatgtctcttcaagctaaaaactggctgcctggaccttgctacagacaacagcgtctgtcaaagcaggcaaacgacaacaacaacagcaactttccctggactgcggctacaaagtatcatctaaatggccgggactcgttggttaatccaggaccagctatggccagccacaaagacgatgaagaaaagtttttccccatgcatggaaccctgatatttggcaaacaaggaacaaatgctaacgacgcggatttggacaatgccatgattacagatgaagaagaaatccgtaccaccaatcccgtggctacggagcagtacgggactgtgtcaaataatttgcaaaactcaaatactggtccaactactggaactgtcaatcaccaaggagcgttacctggtatggtgtggcaggatcgagacgtgtaccttcagggacccatttgggccaagattcctcacaccgatggacactttcacccttctccgctgatgggaggttttggactcaaacacccgcctcctcagatcatgatcaaaaacactcccgttccagccaatcctcccacaaacttcagttctgccaagtttgcttctttcatcacacagtattccacgggacaggttagcgtggagatcgagtgggagctgcagaaggagaacagcaaacgctggaaccccgagatccagtacacttccaactacaacaagtctgttaatgtggactttactgtggacactaatggtgtgtattcagagcctcgccccattggcaccagatacctgactcgtaatctgtaa

SEQ ID NO: 1385 - DNA, 2208 bp, Artificial Sequence
  Synthetic Polynucleotide
atggctgccgatggttatcttccagattggctcgaggacactctctctgaaggaataagacagtggtggaagctcaaacctggcccaccaccgccaaagcccgcagagcggcataaggacgacagcaggggtcttgtgcttcctgggtacaagtacctcggacccttcaacggactcgacaagggagagccggtcaacgaggcaaacgccgcggccctcgagcacgacaaggcctacgaccggcagctcgacagcggagacaacccgtacctcaagtacaaccacgccgacgcggagtttcaggagcgccttaaagaagatacgtcttttgggggcaacctcggacgagcagtattccaggcgaaaaagagggttcttgaacctctgggcctggttgaggagcctgttaagacggctccgggaaaaaagaggccggtagagcactctcctgtggagccagactcctcctcgggaaccggaaaagcgggccagcagcctgcgagaaagagattgaattttggtcagactggagacgcagactccgtacctgacccccagcctctcggacagccaccagcagcccccacaagtttgggatctactacaatggctacaggcagtggcgcaccaatggcagacaataacgagggtgccgatggagtgggtaattcctcaggaaattggcattgcgattcccaatggtcgggcgacagagtcatcaccaccagcacccgaacctgggccctgcccacctacaacaaccacctctacaagcaaatctccagccaatcaggagccagcaacgacaaccactactttggctacagcaccccctgggggtattttgacttcaacagattccactgccacttttcaccacgtgactggcaaagactcatcaacaacaactggggattccgacccaagagactcaacttcaagctctttaacattcaagtcaaagaggtcacgcagaatgacggtacgacgacgattgccaataaccttaccagcacggttcaggtgtttactgactcggagtaccagctcccgtacgtcctcggctcggcgcatcaaggatgcctcccgccgtttccagcggacgtcttcatggtcccacagtatggatacctcaccctgaacaacgggagtcaggcggtaggacgctcttccttttactgcctggagtactttccttctcagatgcttcgtaccggaaacaactttaccttcagttacacctttgaagacgttcctttccacagcagctacgctcacagtcaaagtctggaccggctgatgaatcctcttatcgaccagtacctgtattatctaaacaaaacacaatcaaatagtggaactcttcagcagtctcggctactgtttagtcaagctggacctaccagcatgtctcttcaagctaaaaactggctgcctggaccttgctacagacaacagcgtctgtcaaagcaggcaaacgacaacaacaacagcaactttccctggactgcggctacaaagtatcatctaaatggccgggactcgttggttaatccaggaccagctatggccagccacaaagacgatgaagaaaagtttttccccatgcatggaaccctgatatttggcaaacaaggaacaaatgctaacgacgcggatttggacaatgtcatgattacagatgaagaagaaatccgtaccaccaatcccgtggctacggagcagtacgggactgtgtcaaataatttgcaaaactcaaatactggtccaactactggaactgtcaatcaccaaggagcgttacctggtatggtgtggcaggatcgagacgtgtaccttcagggacccatttgggccaagattcctcacaccgatggacactttcacccttctccgctgatgggaggttttggactcaaacacccgcctcctcagatcatgatcaaaaacactcccgttccagccaatcctcccacaaacttcagttctgccaagtttgcttctttcatcacacagtattccacgggacaggttagcgtggagatcgagtgggagctgcagaaggagaacagcaaacgctggaaccccgagacccagtacacttccaactacaacaagtctgttaatgtggactttactgtggacactaatggtgtgtattcagagcctcgccccattggcaccagatacctgactcgtaatctgtaa

SEQ ID NO: 1386 - DNA, 2208 bp, Artificial Sequence
  Synthetic Polynucleotide
atggctgccgatggttatcttccagattggctcgaggacactctctctgaaggaataagacagtggtggaagctcaaacctggcccaccaccgccaaagcccgcagagcggcataaggacgacagcaggggtcttgtgcttcctgggtacaagtacctcggacccttcaacggacccgacaagggagagccggtcaacgaggcagacgccgcggccctcgagcacgacaaggcctacgaccggcagctcgacagcggagacaacccgtacctcaagtacaaccacgccgacgcggagtttcaggagcgccttaaagaagatacgtcttttgggggcaacctcggacgagcagtattccaggcgaaaaagagggttcttgaacctctgggcctggttgaggagcctgttaagacggctccgggaaaaaagaggccggtagagcactctcctgtggagccagactcctcctcgggaaccggaaaagcgggccagcagcctgcgagaaagagattgaattttggtcagactggagacgcagactccgtacctgacccccagcctctcggacagccaccagcagcccccacaagtttgggatctactacaatggctacaggcagtggcgcaccaatggcagacaataacgagggtgccgatggagtgggtaattcctcaggaaattggcattgcgattcccaatggtcgggcgacagagtcatcaccaccagcacccgaacctgggccctgcccacctacaacaaccacctctacaagcaaatctccagccaatcaggagccagcaacgacaaccactactttggctacagcaccccctgggggtattttgacttcaacagattccactgccacttttcaccacgtgactggcaaagactcatcaacaacaactggggattccgacccaagagactcaacttcaggctctttaacattcaagtcaaagaggtcacgcagaatgacggtacgacgacgattgccaataaccttaccagcacggttcaggtgtttactgactcggagtaccagctcccgtacgtcctcggctcggcgcatcaaggatgcctcccgccgtttccagcggacgtcttcatggtcccacagtatggatacctcaccctgaacaacgggagtcaggcggtaggacgctcttccttttactgcctggagtactttccttctcagatgcttcgtaccggagacaactttaccttcagttacacctttgaagacgttcctttccacagcagctacgctcacagtcaaagtctggaccggctgatgaatcctcttatcgaccagtacctgtattatctaaacaaaacacaatcaaatagtggaactcttcagcagtctcggctactgtttagtcaagctggacctaccagcatgtctcttcaagctaaaaactggctgcctggaccttgctacagacaacagcgtctgtcaaagcaggcaaacgacaacaacaacagcaactttccctggactgcggctacaaagtatcatctaaatggccgggactcgttggttaatccaggaccagctatggccagccacaaagacgatgaagaaaagtttttccccatgcatggaaccctgatatttggcaaacaaggaacaaatgctaacgacgcggatttggacaatgtcatgattacagatgaagaagaaatccgtaccaccaatcccgtggctacggagcagtacgggactgtgtcaaataatttgcaaaactcaaatactggtccaactactggaactgtcaatcaccaaggagcgttacctggtatggtgtggcaggatcgagacgtgtaccttcagggacccatttgggccaagattcctcacaccgatggacactttcacccttctccgctgatgggaggttttggactcaaacacccgcctcctcagatcatgatcaaaaacactcccgttccagccaatcctcccacaaacttcagttctgccaagtttgcttctttcatcacacagtattccacgggacaggttagcgtggagatcgagtgggagctgcagaaggagaacagcaaacgctggaaccccgagatccagtacacttccaactacaacaagtctgttaatgtggactttactgtggacactaatggtgtgtattcagagcctcgccccattggcaccagatacctgactcgtaatctgtaa

SEQ ID NO: 1387 - DNA, 2208 bp, Artificial Sequence
  Synthetic Polynucleotide
atggctgccgatggttatcttccagattggctcgaggacactctctctgaaggaataagacagtggtggaagctcaaacctggcccaccaccgccaaagcccgcagagcggcataaggacgacagcaggggccttgtgcttcctgggtacaagtacctcggacccttcaacggactcgacaagggagagccggtcaacgaggcagacgccgcggccctcgagcacgacaaggcctacgaccggcagctcgacagcggagacaacccgtacctcaagtacaaccacgccgacgcggagtttcaggagcgccttaaagaagatacgtcttttgggggcaacctcggacgagcagtattccaggcgaaaaagagggttcttgaacctctgggcctggttgaggagcctgttaagacggctccgggaaaaaagaggccggtagagcactctcctgtggagccagactcctcctcgggaaccggaaaagcgggccagcagcctgcgagaaagggattgaattttggtcagactggagacgcagactccgtacctgacccccggcctctcggacagccaccagcagcccccgcaagtttgggatctactacaatggctacaggcagtggcgcaccaatggcagacaataacgagggtgccgatggagtgggtaattcctcaggaaattggcattgcgattcccaatggttgggcgacagagtcatcaccaccagcacccgaacctgggccctgcccacctacaacaaccacctctacaagcaaatctccagccaatcaggagccagcaacgacaaccactactttggctacagcaccccctgggggtattttgacttcaacagattccactgccacttttcaccacgtgactggcaaagactcatcaacaacaactggggattccgacccaagagactcaacttcaagctctttaacattcaagtcaaagaggtcacgcagaatgacggtacgacgacgattgccaataaccttaccagcacggttccggtgtttactgactcggagtaccagctcccgtacgtcctcggctcggcgcatcaaggatgcctcccgccgtttccagcggacgtcttcatggtcccacagtatggatacctcaccctgaacaacgggagtcaggcggtaggacgctcttccttttactgcctggagtactttccttctcagatgcttcgtaccggaaacaactttaccttcagttacacctttgaagacgttcctttccacagcagctacgctcacagtcaaagtctggaccggctgatgaatcctcttatcgaccagtacctgtattatctaaacaaaacacaatcaaatagtggaactcttcagcagtctcggctactgtttagtcaagctggacctaccagcatgtctctccaagctaaaaactggctgcctggaccttactacagacaacagcgtctgtcaaagcaggcaaacgacaacaacaacagcaactttccctggactgcggctacaaagtatcatccaaatggccgggactcgttggttgatccaggaccagctatggccagccacaaagacgatgaagaaaagtttttccccatgcatggaaccctgatatttggcaaacaagggacaaatgctaacgacgcggatttggacaatgtcatgattacagatgaagaagaaatccgtaccaccaatcccgtggctacggggcagtacgggactgtgtcaaataatttgcaaaactcaaatactggtccaactactggaactgtcaatcaccaaggagcgttacctggtatggtgtggcaggatcgagacgtgtaccttcagggacccatttgggccaagattcctcacaccgatggacactttcacccttctccgctgatgggaggttttggactcaaacacccgcctcctcagatcatggtcaaaaacactcccgttccagccaatcctcccacaaacttcagttctgccaagtttgcttctttcatcacacggtattccacgggacaggttagcgtggagatcgagtgggagctgcagaaggagaacagcaaacgctggaaccccgagatccagtacacttccaactacaacaagtctgttaatgtggactttactgtggacactaatggtgtgtattcagagcctcgccccattggcaccagatacctgactcgtaatctgtaa

SEQ ID NO: 1388 - DNA, 2208 bp, Artificial Sequence
  Synthetic Polynucleotide
atggctgccgatggttatcttccagattggctcgaggacactctctctgaaggaataagacagtggtggaagctcaaacctggcccaccgccgccaaagcccgcagagcggcataaggacgacagcaggggtcttgtgcttcctgggtacaagtacctcggacccttcaacggactcgacaagggagagccggtcaacgaggcagacgccgcggccctcgagcacgacaaggcctacgaccggcagctcgacagcggagacaacccgtacctcaagtacaaccacgccgacgcggagtttcaggagcgccttaaagaagatacgtcttttgggggcaacctcggacgagcagtattccaggcgaaaaagagggttcttgaacctctgggcctggttgaggagcctgttaagacggttccgggaaaaaagaggccggtagagcactctcctgtggagccagactcctcctcgggaaccggaaaagcgggccagcagcctgcgagaaagagattgaattttggtcagactggagacgcagactccgtacctgacccccagcctctcggacagccaccagcagcccccacaagtttgggatctactacaatggctacaggcagtggcgcaccaatggcagacaataacgagggtgccgatggagtgggtaattcctcaggaaattggcattgcgattcccaatggtcgggcgacagagtcatcaccaccagcacccgaacctgggccctgcccacctacaacaaccacccctacaagcaaatctccagccaatcaggagccagcaacgacaaccactactttggctacagcaccccctgggggtattttgacttcaacagattccactgccacttttcaccacgtgactggcaaagactcatcaacaacaactggggattccgacccaagagactcaacttcaagctctttaacattcaagtcaaagaggtcacgcagaatgacggtacgacgacgattgccaataaccttaccagcacggttcaggtgtttactgactcggagtaccagctcccgtacgtcctcggctcggcgcatcaaggacgcctcccgccgtttccagcggacgtcttcatggtcccacagtatggatacctcaccctgaacaacgggagtcaggcggtaggacgctcttccttttactgcctggagtactttccttctcagatgcttcgtaccggaaacaactttaccttcagttacacctttgaagacgttcctttccacagcagctacgctcacagtcaaagtctggaccggctgatgaatcctcttatcgaccagtacctgtattatctaaacaaaacacaatcaaatagtggaactcttcagcagtctcggctactgtttagtcaagctggacctaccagcatgtctcttcaagctaaaaactggctgcctggaccttgctacagacaacagcgtctgtcaaagcaggcagacgacaacaacaacagcaactttccctggactgcggctacaaagtatcatctaaatggccgggactcgttggttaatccaggaccagctatggccagccacaaagacgatgaagaaaagtttttccccatgcatggaaccctgatatttggcaaacaaggaacaaatgctaacgacgcggatttggacaatgtcatgattacagatgaagaagaaatccgtaccaccaatcccgtggctacggagcagtacgggactgtgtcaaataatttgcaaaactcaaatactggtccaactactggaactgtcaatcaccaaggagcgttacctggtatggtgtggcaggatcgagacgtgtaccttcagggacccatttgggccaagattcctcacaccgatggacactttcacccttctccgctgatgggaggttttggactcaaacacccgcctcctcagatcatgatcaaaaacactcccgttccagccaatccccccacaaacttcagttctgccaagtttgcttctttcatcacacagtattccacgggacaggttagcgtggagatcgagtgggagctgcagaaggagaacagcaaacgctggaaccccgagatccagtacacttccaactacaacaagtctgttaatgtggactttactgtggacactaatggtgtgtattcagagcctcgccccattggcaccagatacctgactcgtaatctgtaa

SEQ ID NO: 1389 - DNA, 2208 bp, Artificial Sequence
  Synthetic Polynucleotide
atggctgccgatggttatcttccagattggctcgaggacactctctctgaaggaataagacagtggtggaagctcaaacctggcccaccaccaccaaagcccgcagagcggcataaggacgacagcaggggtcttgtgcttcctgggtacaagtacctcggacccttcaacggactcgacaaaggagagccggtcaacgaggcagacgccgcggccctcgagcacgacaaggcctacgaccggcagctcgacagcggagacaacccgtacctcaagtacaaccacgccgacgcggagtttcaggagcgtcttaaagaagatacgtcttttgggggcaacctcggacgagcagtcttccaggcaaaaaagagggttcttgaacctctgggcctggttgaggaacctgttaagacggctccgggaaaaaagaggccggtagagcaatctcctgcggagccagactcctcctcgggaaccggaaaggcgggcaaccagcctgcaagaaagagattgaattttggtcagactggagacgcagactccgtacctgacccccagcctctcggacagccaccagcagccccctctggtctgggatctactacaatggctacaggcagtggcgcaccaatggcagacaataacgagggtgccgatggagtgggtaattcctcaggaaattggcattgcgattcccaatggttgggcgacagagtcatcaccaccagcacccgaacctgggccctgcccacctacaacaatcacctctacaagcaaatctccagccaatcaggagccagcaacgacaaccactactttggctacagcaccccctgggggtattttgacttcaacagattccactgccacttttcaccacgtgactggcaaagactcatcaacaacaactggggattccgacccaaaagactcaacttcaagctctttaacattcaagtcaaagaggtcacgcagaatgacggtacgacgacgattgccaataaccttaccagcacggttcaggtgtttactgactcggagtaccagctcccgtacgtcctcggctcggcgcatcaaggatgcctcccgccgtttccagcggacgtcttcatggtcccacagtatggatacctcaccctgaacaacgggagtcaggcggtaggacgctcttccttttactgcctggagtactttccttctcagatgcttcgtaccggaaacaactttaccttcagttacacctttgaagacgttcctttccacagcagctacgctcacagtcaaagtctggaccggctgatgaatcctctgatagaccagtacctgtattatctaaacaaaacacaatcaaatagtggaactcttcagcagtctcggctactgtttagtcaagctggacccaccagcatgtctcttcaagctaaaaactggctgcctggaccttgctacagacaacagcgtctgtcaaagcaggcaaacgacaacaacaacagcaactttccctggactgcggctacaaagtatcatctaaatggccgggactcgttggttaatccaggaccagctatggccagccacaaagacgatgaagaaaagtttttccccatgcatggaaccctgatatttggtaaacaaggaacaaatgctaacgacgcggatttggacaatgtcatgattacagatgaagaagaaatccgcaccaccaatcccgtggctacggagcagtacgggactgtgtcaaataatttgcaaaactcaaatactggtccaactactggaactgtcaatcaccaaggagcgttacctggtatggtgtggcaggatcgagacgtgtaccttcagggacccatttgggccaagattcctcacaccgatggacactttcatccttctccactgatgggaggttttggactcaaacacccgcctcctcagatcatgatcaaaaacactcccgttccagccaatcctcctacaaacttcagttctgccaagtttgcttctttcatcacacagtattccacggggcaggtcagcgtggagatagagtgggagctgcagaaggagaacagcaaacgctggaaccccgagatccagtatacttccaactacaacaagtctgttaatgtggactttactgtggacactaatggtgtgtattcagagcctcgccccattggcaccagatacctgactcgtaatctgtaa

SEQ ID NO: 1390 - DNA, 2205 bp, Artificial Sequence
  Synthetic Polynucleotide
atggctgccgatggttatcttccagattggctcgaggacactctctctgaaggaataagacagtggtggaagctcaaacctggcccaccaccaaagcccgcagagcggcataaggacgacagcaggggtcttgtgcttcctgggtacaagtacctcggacccttcaacggactcgacaaaggagagccggtcaacgaggcagacgccgcggccctcgagcacgacaaggcctacgaccggcagctcgacagcggagacaacccgtacctcaagtacaaccacgccgacgcggagtttcaggagcgtcttaaagaagatacgtcttttgggggcaacctcggacgagcagtcttccaggcaaaaaagagggttcttgaacctctgggcctggttgaggaacctgttaagacggctccgggaaaaaagaggccggtagagcaatctcctgcggagccagactcctcctcgggaaccggaaaggcgggcaaccagcctgcaagaaagagattgaattttggtcagactggagacgcagactccgtacctgacccccagcctctcggacagccaccagcagccccctctggtctgggatctactacaatggctacaggcagtggcgcaccaatggcagacaataacgagggtgccgatggagtgggtaattcctcaggaaattggcattgcgattcccaatggttgggcgacagagtcatcaccaccagcacccgaacctgggccctgcccacctacaacaatcacctctacaagcaaatctccagccaatcaggagccagcaacgacaaccactactttggctacagcaccccctgggggtattttgacttcaacagattccactgccacttttcaccacgtgactggcaaagactcatcaacaacaactggggattccgacccaaaagactcaacttcaagctctttaacattcaagtcaaagaggtcacgcagaatgacggtacgacgacgattgccaataaccttaccagcacggttcaggtgtttactgactcggagtaccagctcccgtacgtcctcggctcggcgcatcaaggatgcctcccgccgtttccagcggacgtcttcatggtcccacagtatggatacctcaccctgaacaacgggagtcaggcggtaggacgctcttccttttactgcctggagtactttccttctcagatgcttcgtaccggaaacaactttaccttcagttacacctttgaagacgttcctttccacagcagctacgctcacagtcaaagtctggaccggctgatgaatcctctgatagaccagtacctgtattatctaaacaaaacacaatcaaatagtggaactcttcagcagtctcggctactgtttagtcaagctggacccaccagcatgtctcttcaagctaaaaactggctgcctggaccttgctacagacaacagcgtctgtcaaagcaggcaaacgacaacaacaacagcaactttccctggactgcggctacaaagtatcatctaaatggccgggactcgttggttaatccaggaccagctatggccagccacaaagacgatgaagaaaagtttttccccatgcatggaaccctgatatttggtaaacaaggaacaaatgctaacgacgcggatttggacaatgtcatgattacagatgaagaagaaatccgcaccaccaatcccgtggctacggagcagtacgggactgtgtcaaataatttgcaaaactcaaatactggtccaactactggaactgtcaatcaccaaggagcgttacctggtatggtgtggcaggatcgagacgtgtaccttcagggacccatttgggccaagattcctcacaccgatggacactttcatccttctccactgatgggaggttttggactcaaacacccgcctcctcagatcatgatcaaaaacactcccgttccagccaatcctcctacaaacttcagttctgccaagtttgcttctttcatcacacagtattccacggggcaggtcagcgtggagatagagtgggagctgcagaaggagaacagcaaacgctggaaccccgagatccagtatacttccaactacaacaagtctgttaatgtggactttactgtggacactaatggtgtgtattcagagcctcgccccattggcaccagatacctgactcgtaatctgtaa

SEQ ID NO: 1391 - DNA, 2208 bp, Artificial Sequence
  Synthetic Polynucleotide
atggctgccgatggttatcttccagattggctcgaggacactctctctgaaggaataagacagtggtggaagctcaaacctggcccaccaccaccaaagcccgcagagcggcataaggacgacagcaggggtcttgtgcttcctgggtacaagtacctcggacccttcaacggactcgacaaaggagagccggtcaacgaggcagacgccgcggccctcgagcacgacaaggcctacgaccggcagctcgacagcggagacaacccgtacctcaagtacaaccacgccgacgcggagtttcaggagcgtcttaaagaagatacgtcttttgggggcaacctcggacgagcagtcttccaggcaaaaaagagggttcttgaacctctgggcctggttgaggaacctgttaagacggctccgggaaaaaagaggccggtagagcaatctcctgcggagccagactcctcctcgggaaccggaaaggcgggcaaccagcctgcaagaaagagattgaattttggtcagactggagacgcagactccgtacctgacccccagcctctcggacagccaccagcagccccctctggtctgggatctactacaatggctacaggcagtggcgcaccaatggcagacaataacgagggtgccgatggagtgggtaattcctcaggaaattggcattgcgattcccaatggttgggcgacagagtcatcaccaccagcacccgaacctgggccctgcccacctacaacaatcacctctacaagcaaatctccagccaatcaggagccagcaacgacaaccactactttggctacagcaccccctgggggtattttgacttcaacagattccaccgccacttttcaccacgtgactggcaaagactcatcaacaacaactggggattccgacccaaaagactcaacttcaagctctttaacattcaagtcaaagaggtcacgcagaatgacggtacgacgacgattgccaataaccttaccagcacggttcaggtgtttactgactcggagtaccagctcccgtacgtcctcggctcggcgcatcaaggatgcctcccgccgtttccagcggacgtcttcatggtcccacagtatggatacctcaccctgaacaacgggagtcaggcggtaggacgctcttccttttactgcctggagtactttccttctcagatgcttcgtaccggaaacaactttaccttcagttacacctttgaagacgttcctttccacagcagctacgctcacagtcaaagtctggaccggctgatgaatcctctgatagaccagtacctgtattatctaaacaaaacacaatcaaatagtggaactcttcagcagtctcggctactgtttagtcaagctggacccaccagcatgtctcttcaagctaaaaactggctgcctggaccttgctacagacaacagcgtctgtcaaagcaggcaaacgacaacaacaacagcaactttccctggactgcggctacaaagtatcatctaaatggccgggactcgttggttaatccaggaccagctatggccagccacaaagacgatgaagaaaagtttttccccatgcatggaaccctgatatttggtaaacaaggaacaaatgctaacgacgcggatttggacaatgtcatgattacagatgaagaagaaatccgcaccaccaatcccgtggctacggagcagtacgggactgtgtcaaataatttgcaaaactcaaatactggtccaactactggaactgtcaatcaccaaggagcgttacctggtatggtgtggcaggatcgagacgtgtaccttcagggacccatttgggccaagattcctcacaccgatggacactttcatccttctccactgatgggaggttttggactcaaacacccgcctcctcagatcatgatcaaaaacactcccgttccagccaatcctcctacaaacttcagttctgccaagtttgcttctttcatcacacagtattccacggggcaggtcagcgtggagatagagtgggagctgcagaaggagaacagcaaacgctggaaccccgagatccagtatacttccaactacaacaagtctgttaatgtggactttactgtggacactaatggtgtgtattcagagcctcgccccattggcaccagatacctgactcgtaatctgtaa

SEQ ID NO: 1392 - DNA, 2205 bp, Artificial Sequence
  Synthetic Polynucleotide
atggctgccgatggttatcttccagattggctcgaggacactctctctgaaggaataagacagtggtggaagctcaaacctggcccaccaccaccaaagcccgcagagcggcataaggacgacagcaggggtcttgtgcttcctgggtacaagtacctcggacccttcaacggactcgacaaaggagagccggtcaacgaggcagacgccgcggccctcgagcacgacaaggcctacgaccggcagctcgacagcggagacaacccgtacctcaagtacaaccacgccgacgcggagtttcaggagcgtcttaaagaagatacgtcttttgggggcaacctcggacgagcagtcttccaggcaaaaaagagggttcttgaacctctgggcctggttgaggaacctgttaagacggctccgggaaaaaagaggccggtagagcaatctcctgcggagccagactcctcctcgggaaccggaaaggcgggcaaccagcctgcaagaaagagattgaattttggtcagactggagacgcagactccgtacctgacccccagcctctcggacagccaccagcagccccctctggtctgggatctactacaatggctacaggcagtggcgcaccaatggcagacaataacgagggtgccgatggagtgggtaattcctcaggaaattggcattgcgattcccaatggttgggcgacagagtcatcaccaccagcacccgaacctgggccctgcccacctacaacaatcacctctacaagcaaatctccagccaatcaggagccagcaacgacaaccactactttggctacagcaccccctgggggtattttgacttcaacagattccactgccacttttcaccacgtgactggcaaagactcatcaacaacaactggggattccgacccaaaagactcaacttcaagctctttaacattcaagtcaaagaggtcacgcagaatgacggtacgacgacgattgccaataaccttaccagcacggttcaggtgtttactgactcggagtaccagctcccgtacgtcctcggctcggcgcatcaaggatgcctcccgccgtttccagcggacgtcttcatggtcccacagtatggatacctcaccctgaacaacgggagtcaggcggtaggacgctcttccttttactgcctggagtactttccttctcagatgcttcgtaccggaaacaactttaccttcagttacacctttgaagacgttcctttccacagcagctacgctcacagtcaaagtctggaccggctgatgaatcctctgatagaccagtacctgtattatctaaacaaaacacaatcaaatagtggaactcttcagcagtctcggctactgtttagtcaagctggacccaccagcatgtctcttcaagctaaaaactggctgcctggaccttgctacagacaacagcgtctgtcaaagcaggcaaacgacaacaacagcaactttccctggactgcggctacaaagtatcatctaaatggccgggactcgttggttaatccaggaccagctatggccagccacaaagacgatgaagaaaagtttttccccatgcatggaaccctgatatttggtaaacaaggaacaaatgctaacgacgcggatttggacaatgtcatgattacagatgaagaagaaatccgcaccaccaatcccgtggctacggagcagtacgggactgtgtcaaataatttgcaaaactcaaatactggtccaactactggaactgtcaatcaccaaggagcgttacctggtatggtgtggcaggatcgagacgtgtaccttcagggacccatttgggccaagattcctcacaccgatggacactttcatccttctccactgatgggaggttttggactcaaacacccgcctcctcagatcatgatcaaaaacactcccgttccagccaatcctcctacaaacttcagttctgccaagtttgcttctttcatcacacagtattccacggggcaggtcagcgtggagatagagtgggagctgcagaaggagaacagcaaacgctggaaccccgagatccagtatacttccaactacaacaagtctgttaatgtggactttactgtggacactaatggtgtgtattcagagcctcgccccattggcaccagatacctgactcgtaatctgtaa

SEQ ID NO: 1393 - DNA, 2208 bp, Artificial Sequence
  Synthetic Polynucleotide
atggctgccgatggttatcttccagattggctcgaggacactctctctgaaggaataagacagtggtggaagctcaaacctggcccaccaccaccaaggcccgcagagcggcatcaggacgacagcaggggtcttgtgcttcctgggtacaagtacctcggacccttcaacggactcgacaaaggagagccggtcaacgaggcagacgctgcggccctcgagcacgacaaggcctacgaccggcagctcgacagcggagacaacccgtacctcaagtacaaccacgccgacgcggagtttcaggagcgtcttaaagaagatacgtcttttgggggcaacctcggacgagcagtcttccaggcgaaaaagagggttcttgaacctctgggcctggttgaggaacctgttaagacggctccgggaaaaaagaggccggtagagcactctcctgcggagccagactcctcctcgggaaccggaaaagcgggccagcagcctgcaagaaagagattgaatttcggtcagactggagacgcagactccgtacctgacccccagcctctcgggcagccaccagcagcccccacaagtttgggatctactacaatggctacaggcagtggcgcaccaatggcagacaataacgagggtgccgatggagtgggtaattcctcaggaaattggcattgcgattcccaatggctgggcgacagagtcatcaccaccagcacccgaacctgggccctgcccacctacaacaaccacctctacaagcaaatctccagccaatcaggagcatcgaacgacaaccactactttggctacagcaccccttgggggtattttgacttcaacagattccactgtcacttctccccacgtgaccggcaaagactcatcaacaacaactggggattccgacccaagagactcaacttcaagctctttaacattcaagtcaaagaggtcacgcagaatgacggtacgacgacgattgccaataaccttaccagcacggttcaggtgtttactgactcggagtaccagctcccgtacgtcctcggctcggcgcatcaaggatgcctcccgccgtttccagcggacgtcttcatggtcccacagtatggatacctcaccctgaacaacgggagtcaggcggtaggacgctcttccttttactgcctggagtactttccttctcagatgctgcgtaccggaaacaactttaccttcagctacacctttgaggacgtgcccttccacagcagctacgctcacagccagagtttggaccggctgatgaatcctctgatcgaccagtatctgtattatctgaacaggacacaatcaaatagtggaactcttcagcagtctaggctactgtttagccaagctggacctaccagcatgtcccttcaagctaaaaactggctgcctggaccttgctacagacagcagcgtctgtcaaagcaggcaaacgacaacaacaacagcaactttccctggactgcggctacaaagtatcatctaaatggtcgggactcgttggttaatccaggaccagctatggccagccacaaagacgatgaagaaaagtttttccccatgcatggaaccctgatatttggtaaacaaggaacaaatgctaacgacgcggatttggaacatgtcatgattacagatgaagaagaaatcaggaccaccaatcccgtggctacagagcagtacggaaacgtgtcaaataatttgcaaaactcaaatactggtccaactacagaaaatgtcaatcaccagggagcgttacctggtatggtgtggcaggatcgagacgtgtacctgcagggacccatttgggccaagattcctcacaccgacggacactttcacccttctccactgatgggaggttttggactcaaacacccgcctcctcaaatcatgatcaaaaacactcctgttccagccaatcctcctacaaacttcagcgcggcaaagtttgcttccttcatcacacagtattccacgggacaggtcagcgtggagatcgagtgggagctgcagaaggagaacagcaaacgctggaaccccgagatccagtacacttccaactacaacaaatctgttaatgtggactttactgtggacgctaatggtgtgtattcagagcctcgccccattggcaccagatacctgactcgtaatctgtaa

SEQ ID NO: 1394 - DNA, 2208 bp, Artificial Sequence
  Synthetic Polynucleotide
atggctgccgatggttatcttccagattggctcgaggacactctctctgaaggaataagacagtggtggaagctcaaacctggcccaccaccaccaaggcccgcagagcggcatcaggacgacagcaggggtcttgtgcttcctgggtacaagtacctcggacccttcaacggactcgacaaaggagagccggtcaacgaggcagacgctgcggccctcgagcacgacaaggcctacgaccggcagctcgacagcggagacaacccgtacctcaagtacaaccacgccgacgcggagtttcaggagcgtcttaaagaagatacgtcttttgggggcaacctcggacgagcagtcttccaggcgaaaaagagggttcttgaacctctgggcctggttgaggaacctgttaagacggctccgggaaaaaagaggccggtagagcactctcctgcggagccagactcctcctcgggaaccggaaaagcgggccagcagcctgcaagaaagagattgaatttcggtcagactggagacgcagactccgtacctgacccccagcctctcggacagccaccagcagcccccacaagtttgggatctactacaatggctacaggcagtggcgcaccaatggcagacaataacgagggtgccgatggagtgggtaattcctcaggaaattggcattgcgattcccaatggctgggcgacagagtcatcaccaccagcacccgaacctgggccctgcccacctacaacaaccacctctacaagcaaatctccagccaatcaggagcatcgaacgacaaccactactttggctacagcaccccttgggggtattttgacttcaacagattccactgtcacttctccccacgtgactggcaaagactcatcaacaacaactggggattccgacccaagagactcaacttcaagctctttaacattcaagtcaaagaggtcacgcagaatgacggtacgacgacgattgccaataaccttaccagcacggttcaggtgtttactgactcggagtaccagctcccgtacgtcctcggctcggcgcatcaaggatgcctcccgccgtttccagcggacgtcttcatggtcccacagtatggatacctcaccctgaacaacgggagtcaggcggtaggacgctcttccttttactgcctggagtactttccttctcagatgctgcgtaccggaaacaactttaccttcagctacacctttgaggacgtgcccttccacagcagctacgctcacagccagagtttggaccggctgatgaatcctctgatcgaccagtatctgtattatctgaacaggacacaatcaaatagtggaactcttcagcagtctaggctactgtttagccaagctggacccaccagcatgtcccttcaagctaaaaactggctgcctggaccttgctacagacagcagcgtctgtcaaagcaggcaaacgacaacaacaacagcaactttccctggactgcggctacaaagtatcgtctaaatggtcgggactcgttggttaatccaggaccagctatggccagccacaaagacgatgaagaaaagtttttccccatgcatggaaccctgatatttggtaaacaaggaacaaatgctaacgacgcggatttggaacatgtcatgattacagatgaagaagaaatcaggaccaccaatcccgtggctacagagcagtacggaaacgtgtcaaataatttgcaaaactcaaatactggtccaactacagaaaatgtcaatcaccagggagcgttacctggtatggtgtggcaggatcgagacgtgtacctgcagggacccatttgggccaagattcctcacaccgacggacactttcacccttctccactgatgggaggttttggactcaaacacccgcctcctcaaatcatgatcaaaaacactcctgttccagccaatcctcctacaaacttcagcgcggcaaagtttgcttccttcatcacacagtattccacgggacaggtcagcgtggagatcgagtgggagctgcagaaggagaacagcaaacgctggaaccccgagatccagtacacttccaactacaacaaatctgttaatgtggactttactgtggacgctaatggtgtgtattcagagcctcgccccattggcaccagatacctgactcgtaatctgtaa

SEQ ID NO: 1395 - DNA, 2208 bp, Artificial Sequence
  Synthetic Polynucleotide
atggctgccgatggttatcttccagattggctcgaggacactctctctgaaggaataagacagtggtggaagctcaaacctggcccaccaccaccaaggcccgcagagcggcatcaggacgacagcaggggtcttgtgcttcctgggtacaagtacctcggacccttcaacggactcgacaaaggagagccggtcaacgaggcagacgctgcggccctcgagcacgacaaggcctacgaccggcagctcgacagcggagacaacccgtacctcaagtacaaccacgccgacgcggagtttcaggagcgtcttaaagaagatacgtcttttgggggcaacctcggacgagcagtcttccaggcgaaaaagagggttcttgaacctctgggcctggttgaggaacctgttaagacggctccgggaaaaaagaggccggtagagcactctcctgcggagccagactcctcctcgggaaccggaaaagcgggccagcagcctgcaagaaagagattgaatttcggtcagactggagacgcagactccgtacctgacccccagcctctcgggcagccaccagcagcccccacaagtttgggatctactacaatggctacaggcagtggcgcaccaatggcagacaataacgagggtgccgatggagtgggtaattcctcaggaaattggcattgcgattcccaatggctgggcgtcagagtcatcaccaccagcacccgaacctgggccctgcccacctacaacaaccacctctacaagcaaatctccagccaatcaggagcatcgaacgacaatcactactttggctacagcaccccttgggggtattttgacttcaacagattccactgtcacttctccccacgtgaccggcaaagactcatcaacaacaactggggattccgacccaagagactcaacttcaagctctttaacattcaagtcaaagaggtcacgcagaatgacggtacgacgacgattgccaataaccttaccagcacggttcaggtgtttactgactcggagtaccagctcccgtacgtcctcggctcggcgcatcaaggatgcctcccgccgtttccagcggacgtcttcatggtcccacagtatggatacctcaccctgaacaacgggagtcaggcggtaggacgctcttccttttactgcctggagtactttccttctcagatgctgcgtaccggaaacaactttaccttcagctacacctttgaggacgtgcccttccacagcagctacgctcacagccagagtttggaccggctgatgaatcctctgatcgaccagtatctgtattatctgaacaggacacaatcaaatagtggaactcttcagcagtctaggctactgtttagccaagctggacctaccagcatgtcccttcaagctaaaaactggctgcctggaccttgctacagacagcagcgtctgtcaaagcaggcaaacgacaacaacaacagcaactttccctggactgcggctacaaagtatcatctaaatggtcgggactcgttggttaatccaggaccagctatggccagccacaaagacgatgaagaaaagtttttccccatgcatggaaccctgatatttggtaaacaaggaacaaatgctaacgacgcggatttggaacatgtcatgattacagatgaagaagaaatcaggaccaccaatcccgtggctacagagcagtacggaaacgtgtcaaataatttgcaaaactcaaatactggtccaactacagaaaatgtcaatcaccagggagcgttacctggtatggtgtggcaggatcgagacgtgtacctgcagggacccatttgggccaagattcctcacaccgacggacactttcacccttctccactgatgggaggttttggactcaaacacccgcctcctcaaatcatgatcaaaaacactcctgttccagccaatcctcctacaaacttcagcgcggcaaagtttgcttccttcatcacacagtattccacgggacaggtcagcgtggagatcgagtgggagctgcagaaggagaacagcaaacgctggaaccccgagatccagtacacttccaactacaacaaatctgttaatgtggactttactgtggacgctaatggtgtgtattcagagcctcgccccattggcaccagatacctgactcgtaatctgtaa

SEQ ID NO: 1396 - DNA, 2208 bp, Artificial Sequence
  Synthetic Polynucleotide
atggctgccgatggttatcttccagattggctcgaggacactctctctgaaggaataagacagtggtggaagctcaaacctggcccaccaccaccaaggcccgcagagcggcatcaggacgacagcaggggtcttgtgcttcctgggtacaagtacctcggacccttcaacggactcgacaaaggagagccggtcaacgaggcagacgctgcggccctcgagcacgacaaggcctacgaccggcagctcgacagcggagacaacccgtacctcaagtacaaccacgccgacgcggagtttcaggagcgtcttaaagaagatacgtcttttgggggcaacctcggacgagcagtcttccaggcgaaaaagagggttcttgaacctctgggcctggttgaggaacctgttaagacggctccgggaaaaaagaggccggtagagcactctcctgcggagccagactcctcctcgggaaccggaaaagcgggccagcagcctgcaagaaagagattgaatttcggtcagactggagacgcagactccgtacctgacccccagcctctcggacagccaccagcagcccccacaagtttgggatctactacaatggctataggcagtggcgcaccaatggcagacaataacgagggtgccgatggagtgggtaattcctcaggaaattggcattgcgattcccaatggctgggcgacagagtcatcaccaccagcacccgaacctgggccctgcccacctacaacaaccacctctacaagcaaatctccagccaatcaggagcatcgaacgacaaccactactttggctacagcaccccttgggggtattttgacttcaacagattccactgtcacttctccccacgtgactggcaaagactcatcaacaacaactggggattccgacccaagagactcaacttcaagctctttaacattcaagtcaaagaggtcacgcagaatgacggtacgacgacgattgccaataaccttaccagcacggttcaggtgtttactgactcggagtaccagctcccgtacgtcctcggctcggcgcatcaaggatgcctcccgccgtttccagcggacgtcttcatggtcccacagtatggatacctcaccctgaacaacgggagtcaggcggtaggacgctcttccttttactgcctggagtactttccttctcagatgctgcgtaccggaaacaactttaccttcagctacacctttgaggacgtgcccttccacagcagctacgctcacagccagagtttggaccggctgatgaatcctctgatcgaccagtatctgtattatctgaacaggacacaatcaaatagtggaactcttcagcagtctaggctactgtttagccaagctggacccaccagcatgtcccttcaagctaaaaactggctgcctggaccttgctacagacagcagcgtctgtcaaagcaggcaaacgacaacaacaacagcaactttccctggactgctgctacaaagtatcatctaaatggtcgggactcgttggttaatccaggaccagctatggccagccacaaagacgatgaagaaaagtttttccccatgcatggaaccctgatatttggtaaacaaggaacaaatgctaacgacgcggatttggaacatgtcatgattacagatgaagaagaaatcaggaccaccaatcccgtggctacagagcagtacggaaacgtgtcaaataatttgcaaaactcaaatactggtccaactacagaaaatgtcaatcaccagggagcgttacctggtatggtgtggcaggatcgagacgtgtacctgcagggacccatttgggccaagattcctcacaccgacggacactttcacccttctccactgatgggaggttttggactcaaacacccgcctcctcaaatcatgatcaaaaacactcctgttccagccaatcctcctacaaacttcagcgcggcaaagtttgcttccttcatcacacagtattccacgggacaggtcagcgtggagatcgagtgggagctgcagaaggagaacagcaaacgctggaaccccgagatccagtacacttccaactacaacaaatctgttaatgtggactttactgtggacgctaatggtgtgtattcagagcctcgccccattggcaccagatacctgactcgtaatctgtaa

SEQ ID NO: 1397 - DNA, 2208 bp, Artificial Sequence
  Synthetic Polynucleotide
atggctgccgatggttatcttccagattggctcgaggacactctctctgaaggaataagacagtggtggaagctcaaacctggcccaccaccaccaaggcccgcagagcggcatcaggacgacagcaggggtcttgtgcttcctgggtacaagtacctcggacccttcaacggactcgacaaaggagagccggtcaacgaggcagacgctgcggccctcgagcacgacaaggcctacgaccggcagctcgacagcggagacaacccgtacctcaagtacaaccacgccgacgcggagtttcaggagcgtcttaaagaagatacgtcttttgggggcaacctcggacgagcagtcttccaggcgaaaaagagggttcttgaacctctgggcctggttgaggaacctgttaagacggctccgggaaaaaagaggccggtagagcactctcctgcggagccagactcctcctcgggaaccggaaaagcgggccagcagcctgcaagaaagagattgaatttcggtcagactggagacgcagactccgtacctgacccccagcctctcggacagccaccagcagcccccacaagtttgggatctactacaatggctacaggcagtggcgcaccaatggcagacaataacgagggtgccgatggagtgggtaattcctcaggaaattggcattgcgattcccaatggctgggcgacagagtcatcaccaccagcacccgaacctgggccctgcctacctacaacaaccacctctacaagcaaatctccagccaatcaggagcatcgaacgacaaccactactttggctacagcaccccttgggggtatcttgacttcaacagattccactgtcacttctccccacgtgactggcaaagactcatcaacaacaactggggattccgacccaagagactcaacttcaagctctttaacattcaagtcaaagaggtcacgcagaatgacggtacgacgacgattgccaacaaccttaccagcacggttcaggtgtttactgactcggagtaccagctcccgtacgtcctcggctcggcgcatcaaggatgcctcccgccgtttccagcggacgtcttcatggtcccacagtatggatacctcaccctgaacaacgggagtcaggcggtaggacgctcttccttttactgcctggagtactttccttctcagatgctgcgtaccggaaacaactttaccttcagctacacctttgaggacgtgcccttccacagcagctacgctcacagccagagtttggaccggctgatgaatcctctgatcgaccagtatctgtattatctgaacaggacacaatcaaatagtggaactcttcagcagtctaggctactgtttagccaagctggacccaccagcatgtcccttcaagctaaaaactggctgcctggaccttgctacagacagcagcgtctgtcaaagcaggcaaacgacaacaacaacagcaactttccctggactgcggctacaaagtatcatctaaatggtcgggactcgttggttaatccaggaccagctatggccagccacaaagacgatgaagaaaagtttttccccatgcatggaaccctgatatttggtaaacaaggaacaaatgctaacgacgcggatttggaacatgtcatgattacagatgaagaagaaatcaggaccaccaatcccgtggctacagagcagtacggaaacgtgtcaaataatttgcaaaactcaaatactggtccaactacagaaaatgtcaatcaccagggagcgttacctggtatggtgtggcaggatcgagacgtgtacctgcagggacccatttgggccaagattcctcacaccgacggacactttcacccttctccactgatgggaggttttggactcaaacacccgcctcctcaaatcatgatcaaaaacactcctgttccagccaatcctcctacaaacttcagcgcggcaaagtttgcttccttcatcacacagtattccacgggacaggtcagcgtggagatcgagtgggagctgcagaaggagaacagcaaacgctggaaccccgagatccagtacacttccaactacaacaaatctgttaatgtggactttactgtggacgctaatggtgtgtattcagagcctcgccccattggcaccagatacctgactcgtaatctgtaa

SEQ ID NO: 1398 - DNA, 2208 bp, Artificial Sequence
  Synthetic Polynucleotide
atggctgccgatggttatcttccagattggctcgaggacactctctctgaaggaataagacagtggtggaagctcaaacctggcccaccaccgccaaagcccgcagagcggcataaggacgacagcaggggtcttgtgcttcctgggtacaagtacctcggacccttcaacggactcgacaagggagagccggtcaacgaggcagacgccgcggccctcgagcacgacaaggcctacgaccggcagctcgacagcggagacaacccgtacctcaagtacaaccacgccgacgcggagtttcaggagcgccttaaagaagatacgtcttttgggggcaacctcggacgagcagtattccaggcgaaaaagagggttcttgaacctctgggcctggttgaggagcctgttaagacggctccgggaaaaaagaggccggtagagcactctcctgtggagccagactcctcctcgggaaccggaaaagcgggccagcagcctgcgagaaagagattgaattttggtcagactggagacgcagactccgtacctgacccccagcctctcggacagccaccagcagcccccacaagtttgggatctactacaatggctacaggcagtggcgcaccaatggcagacaataacgagggtgccgatggagtgggtaattcctcaggaaattggcattgcgattcccaatggttgggcgacagagtcatcaccaccagcacccgaacctgggccctgcccacctacaacaaccacctctacaagcaaatctccagccaatcaggagcagcgaacgacaaccactactttggctacagcaccccctgggggtattttgacttcaacagattccactgccacttttcaccacgtgactggcaaagactcatcaacaacaactggggattccgacccaagagactcaacttcaagctctttaacattcaagtcaaagaggtcacgcagaatgacggtacgacgacgattgccaataaccttaccagcacggttcaggtgtttactgactcggagtaccagctcccgtacgtcctcggctcggcgcatcaaggatgcctcccgccgtttccagcggacgtcttcatggtcccacagtatggatacctcaccctgaacaacgggagtcaggcggtaggacgctcttccttttactgcctggagtactttccttctcagatgcttcgtaccggaaacaactttaccttcagttacacctttgaagacgttcctttccacagcagctacgctcacagtcaaagtctggaccggctgatgaatcctcttatcgaccagtacctgtattatctaaacaaaacacaatcaaatagtggaactcttcagcagtctcggctactgtttagtcaagctggacctaccagcatgtctcttcaagctaaaaactggctgcctggaccttgctacagacaacagcgtctgtcaaagcaggcaaacgacaacaacaacagcaactttccctggactgcggctacaaagtatcatctaaatggccgggactcgttggttaatccaggaccagctatggccagccacaaagacgatgaagaaaagtttttccccatgcatggaaccctgatatttggcaaacaaggaacaaatgctaacgacgcggatttggacaatgtcatgattacagatgaagaagaaatccgtaccaccaatcccgtggctacggagcagtacgggactgtgtcaaataatttgcaaaactcaaatactggtccaactactggaactgtcaatcaccaaggagcgttacctggtatggtgtggcaggatcgagacgtgtaccttcagggacccatttgggccaagattcctcacaccgatggacactttcacccttctccgctgatgggaggttttggactcaaacacccgcctcctcagatcatgatcaaaaacactcccgttccagccaatcctcccacaaacttcagttctgccaagtttgcttctttcatcacacagtattccacgggacaggttagcgtggagatcgagtgggagctgcagaaggagaacagcaaacgctggaaccccgagatccagtacacttccaactacaacaagtctgttaatgtggactttactgtggacactaatggtgtgtattcagagcctcgccccattggcaccagatacctgactcgtaatctgtaa

SEQ ID NO: 1399 - DNA, 2208 bp, Artificial Sequence
  Synthetic Polynucleotide
atggctgccgatggttatcttccagattggctcgaggacactctctctgaaggaataagacagtggtggaagctcaaacctggcccaccaccaccaaggcccgcagagcggcatcaggacgacagcaggggtcttgtgcttcctgggtacaagtacctcggacccttcaacggactcgacaaaggagagccggtcaacgaggcagacgctgcggccctcgagcacgacaaggcctacgaccggcagctcgacagcggagacaacccgtacctcaagtacaaccacgccgacgcggagtttcaggagcgtcttaaagaagatacgtcttttgggggcaacctcggacgagcagtcttccaggcgaaaaagagggttcttgaacctctgggcctggttgaggaacctgttaagacggctccgggaaaaaagaggccggtagagcactctcctgcggagccagactcctcctcgggaaccggaaaagcgggccagcagcctgcaagaaagagattgaatttcggtcagactggagacgcagactccgtacctgacccccagcctctcggacagccaccagcagcccccacaagtttgggatctactacaatggctacaggcagtggcgcaccaatggcagacaataacgagggtgccgatggagtgggtaattcctcaggaaattggcattgcgattcccaatggctgggcgacagagtcatcaccaccagcacccgaacctgggccctgcccacctacaacaaccacctctacaagcaaatctccagccaatcaggagcatcgaacgacaaccactactttggctacagcaccccttgggggtattttgacttcaacagattccactgtcacttctccccacgtgactggcaaagactcatcaacaacaactggggattccgacccaagagactcaacttcaagctctttaacattcaagtcaaagaggtcacgcagaatgacggtacgacgacgattgccaataaccttaccagcacggttcaggtgtttactgactcggagtaccagctcccgtacgtcctcggctcggcgcatcaaggatgcctcccgccgtttccagcggacgtcttcatggtcccacagtatgggtacctcaccctgaacaacgggagtcaggcggtaggacgctcttccttttactgcctggagtactttccttctcagatgctgcgtaccggaaacaactttaccttcagctacacctttgaggacgtgcccttccacagcagctacgctcacagccagagtttggaccggctgatgaatcctctgatcgaccagtatctgtattatctgaacaggacacaatcaaatagtggaactcttcagcagtctaggctactgtttagccaagctggacccaccagcatgtcccttcaagctaaagactggctgcctggaccttgctacagacagcagcgtctgtcaaagcaggcaaacgacaacaacaacagcaactttccctggactgcggctacaaagtatcatctaaatggtcgggactcgttggttaatccaggaccagctatggccagccacaaagacgatgaagaaaagtttttccccatgcatggaaccctgatatttggtaaacaaggaacaaatgctaacgacgcggatttggaacatgtcatgattacagatgaagaagaaatcaggaccaccaatcccgtggctacagagcagtacggaaacgtgtcaaataatttgcaaaactcaaatactggtccaactacagaaaatgtcaatcaccagggagcgttacctggtatggtgtggcaggatcgagacgtgtacctgcagggacccatttgggccaagattcctcacaccgacggacactttcacccttctccaccgatgggaggttttggactcaaacacccgcctcctcaaatcatgatcaaaaacactcctgttccagccaatcctcctacaaacttcagcgcggcaaagtttgcttccttcatcacacagtattccacgggactggtcagcgtggagatcgagtgggagctgcagaaggagaacagcaaacgctggaaccccgagatccagtacacttccaactacaacaaatctgttaatgtggactttactgtggacgctaatggtgtgtattcagagcctcgccccattggcaccagatacctgactcgtaatctgtaa

SEQ ID NO: 1400 - DNA, 2208 bp, Artificial Sequence
  Synthetic Polynucleotide
atggctgccgatggttatcttccagattggctcgaggacactctctctgaaggaataagacagtggtggaagctcaaacctggcccaccaccgccaaagcccgcagagcggcataaggacgacagcaggggtcttgtgcttcctgggtacaagtacctcggacccttcaacggactcgacaagggggagccggtcaacgaggcagacgccgcggccctcgagcacgacaaggcctacgaccggcagctcgacagcggagacaacccgtacctcaagtacaaccacgccgacgcggagtttcaggagcgtcttaaagaagatacgtcttttgggggcaacctcggacgagcagtcttccaggcgaaaaagagggttcttgaacctctgggcctggttgaggaacctgttaagacggctccgggaaaaaagaggccggtagagcactctcctgtggagccagactcctcctcgggaaccggaaaggcgggccagcagcctgcaagaaaaagattgaatttcggtcagactggagacgcagactccgtacctgacccccagcctctcggacagccaccagcagccccctctggtctgggaactaatacgatggctacaggcagtggcgcaccaatggcagacaataacgagggcgccgacggagtgggtaattcctcgggaaattggcattgcgattccacatggatgggcgacagagtcatcaccaccagcacccgcacctgggctctgcccacctacaacaaccatctgtacaagcaaatttccagccaatcaggagcatcgaacgacaaccactactttggctacagcaccccctgggggtattttgacttcaacagattccactgccacttttcgccacgtgactggcaaagactcatcaacaacaactggggattccggcccaagagactcagcttcaagctctttaacattcaagtcaaggaggtcacgcagaatgacggtacgacgacgattgccaataaccttaccagcacggttcaggtctttactgactcggagtaccagctcccgtacgtcctcggctcggcgcatcaaggatgcctcccgccgttcccagcagacgtcttcatggtgccacagtatggatacctcaccctgaacaacgggagtcaggcggtaggacgctcttcattttactgcctggagtacttcccttctcagatgcttcgcacgggaaacaactttaccttcagctacacctttgaggacgtgccttttcacagcagctacgctcacagccaaagtctggaccgtctcatgaatcctctcatcgaccaatacctgtattacttgagcaaaacaaacgctccaagcggaactcaccagatgtccaggcttcagttttctcaggccggagcgagtgacatgtcgggaccagctagaaactggcttcctggaccctgttaccgccagcagcgagtatcaaagcaggctgcggacaacaacaacagtgacttaccgtggactggagctaccaagtaccacctcaatggaagagactctctggtgaacccgggcccagctatggccagccacaaggatgatgaagaaaaatttttcctcatgagcggggttctcatcttcgggaaacaaggctcaaatgaaaacaatgtggacattgaaaaggttatgattacagacgaagaggaaatcaggaccaccaatcccgtggctacggagcagtatggttctgtatctaccaaccttcaaagcgcaaacacaagtccagctacctcagatgtcaatcaccaaggcgttcttcctggcatggtctggcaggacagagatgtgtacctgcaggggcccatctgggcaaagattcctcacacggacggacactttcacccttctcccctcatgggcggatttggattgaagcaccctcccccacagattctcatcaagaataccccggtacctgcgaatccttcgaccaccttcagtgcggcaaagtttgcttccttcatcacacagtattccacgggacaggtcagcgtggagatagagtgggagctgcagaaggagaacagcaaacgctggaaccccgagatccagtatacttccaactacaacaaatctgttaatgtggactttactgtggacactaatggtgtgtattcagagcctcgccccattggcaccagatacctgactcgtaatctgtaa

SEQ ID NO: 1401 - DNA, 2208 bp, Artificial Sequence
  Synthetic Polynucleotide
atggctgccgatggttatcttccagattggctcgaggacactctctctgaaggaataagacagtggtggaagctcaaacctggcccaccaccaccaaggcccgcagagcggcatcaggacgacagcaggggtcttgtgcttcctgggtacaagtacctcggacccttcaacggactcgacaaaggagagccggtcaacgaggcagacgctgcggccctcgagcacgacaaggcctacgaccggcagctcgacagcggagacaacccgtacctcaagtacaaccacgccgacgcggagtttcaggagcgtcttaaagaagatacgtcttttgggggcaacctcggacgagcagtcttccaggcgaaaaagagggttcttgaacctctgggcctggttgaggaacctgttaagacggctccgggaaaaaagaggccggtagagcactctcctgcggagccagactcctcctcgggaaccggaaaagcgggccagcagcctgcaagaaagagattgaatttcggtcagactggagacgcagactccgtacctgacccccagcctctcggacagccaccagcagcccccacaagtttgggatctactacaatggctacaggcagtggcgcaccaatggcagacaataacgagggtgccgatggagtgggtaattcctcaggaaattggcattgcgattcccaatggctgggcgacagagtcatcaccaccagcacccgaacctgggccctgcccacctacaacaaccacctctacaagcaaatctccagccaatcaggagcatcgaacgacaaccactactttggctacagcaccccttgggggtattttgacttcaacagattccactgtcacttctccccacgtgactggcaaagactcatcaacaacaactggggattccgacccaagagactcaacttcaagctctttaacattcaagtcaaagaggtcacgcagaatgacggtacgacgacgattgccaataaccttaccagcacggttcaggtgtttactgactcggagtaccagctcccgtacgtcctcggctcggcgcatcaaggatgcctcccgccgtttccagcggacgtcttcatggtcccacagtatgggtacctcaccctgaacaacgggagtcaggcggtaggacgctcttccttttactgcctggagtactttccttctcagatgctgcgtaccggaaacaactttaccttcagctacacctttgaggacgtgtccttccacagcagctacgctcacagccagagtttggaccggctgatgaatcctctgatcgaccagtatctgtattatctgaacaggacacaatcaaatagtggaactcttcagcagtctaggctactgtttagccaagctggacccaccagcatgtcccttcaagctaaaaactggctgcctggaccttgctacagacagcagcgtctgtcaaagcaggcaaacgacaacaacaacagcaactttccctggactgcggctacaaagtatcatctaaatggtcgggactcgttggttaatccaggaccagctatggccagccacaaagacgatgaagaaaagtttttccccatgcatggaaccctgatatttggtaaacaaggaacaaatgctaacgacgcggatttggaacatgtcatgattacagatgaagaagaaatcaggaccaccaatcccgtggctacagagcagtacggaaacgtgtcaaataatttgcaaaactcaaatactggtccaactacagaaaatgtcaatcaccagggagcgttacctggtatggtgtggcaggatcgagacgtgtacctgcagggacccatttgggccaagattcctcacaccgacggacactttcacccttctccactgatgggaggttttggactcaaacacccgcctcctcaaatcatgatcaaaaacactcctgttccagccaatcctcctacaaacttcagcgcggcaaagtttgcttccttcatcacacagtattccacgggacaggtcagcgtggagatcgagtgggagctgcagaaggagaacagcaaacgctggaaccccgagatccagtacacttccaactacaacaaatctgttaatgtggactttactgtggacgctaatggtgtgtattcagagcctcgccccattggcaccagatacctgactcgtaatctgtaa

SEQ ID NO: 1402 - DNA, 2208 bp, Artificial Sequence
  Synthetic Polynucleotide
atggctgccgatggttatcttccagattggctcgaggacactctctctgaaggaataagacagtggtggaagctcaaacctggcccaccaccaccaaggcccgcagagcggcatcaggacgacagcaggggtcttgtgcttcctgggtacaagtacctcggacccttcaacggactcgacaaaggagagccggtcaacgaggcagacgctgcggccctcgagcacgacaaggcctacgaccggcagctcgacagcggagacaacccgtacctcaagtacaaccacgccgacgcggagtttcaggagcgtcttaaagaagatacgtcttttgggggcaacctcggacgagcagtcttccaggcgaaaaagagggttcttgaacctctgggcctggttgaggaacctgttaagacggctccgggaaaaaagaggccggtagagcactctcctgcggagccagactcctcctcgggaaccggaaaagcgggccagcagcctgcaagaaagagattgaatttcggtcagactggagacgcagactccgtacctgacccccagcctctcggacagccaccagcagcccccacaagtttgggatctactacaatggctacaggcagtggcgcaccaatggcagacaataacgagggtgccgatggagtgggtaattcctcaggaaattggcattgcgattcccaatggctgggcgacagagtcatcaccaccagcacccgaacctgggccctgcccacctacaacaaccacctctacaagcaaatctccagccaatcaggagcatcgaacgacaaccactactttggctacagcaccccttgggggtattttgacttcaacagattccactgtcacttctccccacgtgactggcaaagactcatcaacaacaactggggattccgacccaagagactcaacttcaagctctttaacattcaagtcaaagaggtcacgcagaatgacggtacgacgacgattgccaataaccttaccagcacggttcaggtgtttactgactcggagtaccagctcccgtacgtcctcggctcggcgcatcaaggatgcctcccgccgtttccagcggacgtcttcatggtcccacagtatggatacctcaccctgaacaacgggagtcaggcggtaggacgctcttccttttactgcctggagtactttccttctcagatgctgcgtaccggaaacaactttaccttcagctacacctttgaggacgtgcccttccacagcagctacgctcacagccagagtttggaccggctgatgaatcctctgatcgaccagtatctgtattatctgaacaggacacaatcaaatagtggaactcttcagcagtctaggctactgtttagccaagctggacccaccagcatgtcccttcaagctaaaaactggctgcctggaccttgctacagacagcagcgtctgtcaaagcaggcaaacgacaacaacaacagcaactttccctggactgcggctacaaagtatcatctaaatggtcgggactcgttggttaatccaggaccagctatggccagccacaaagacgatgaagaaaagtttttccccatgcatggaaccctgatatttggtaaacaaggaacaaatgctaacgacgcggatttggaacatgtcatgattacagatgaagaagaaatcaggaccaccaatcccgtggctacagagcagtacggaaacgtgtcaaataatttgcaaaactcaaatactggcccaactacagaaaatgtcaatcaccagggagcgttacttggtatggtgtggcaggatcgagacgtgtacctgcagggacccatttgggccaagattcctcacaccgacggacactttcacccttctccactgatgggaggttttggactcaaacacccgcctcctcaaatcatgatcaaaaacactcctgttccagccaatcctcctacaaacttcagcgcggcaaagtttgcttccttcatcacacagtattccacgggacaggtcagcgtggagatcgagtgggagctgcagaaggagaacagcaaacgctggaaccccgagatccagtacacttccaactacaacaaatctgttaatgtggactttactgtggacgctaatggtgtgtattcagagcctcgccccattggcaccagatacctgactcgtaatctgtaa

SEQ ID NO: 1403 - DNA, 2208 bp, Artificial Sequence
  Synthetic Polynucleotide
atggctgccgatggttatcttccagattggctcgaggacactctctctgaaggaataagacagtggtggaagctcaaacctggcccaccaccaccaaggcccgcagagcggcatcaggacgacagcaggggtcttgtgcttcctgggtacaagtacctcggacccttcaacggactcgacaaaggagagccggtcaacgaggcagacgctgcggccctcgagcacgacaaggcctacgaccggcagctcgacagcggagacaacccgtacctcaagtacaaccacgccgacgcggagtttcaggagcgtcttaaagaagatacgtcttttgggggcaacctcggacgagcagtcttccaggcgaaaaagagggttcttgaacctctgggcctggttgaggaacctgttaagacggctccgggaaaaaagaggccggtagagcactctcctgcggagccagactcctcctcgggaaccggaaaagcgggccagcagcctgcaagaaagagattgaatttcggtcagactggagacgcagactccgtacctgacccccagcctctcggacagccaccagcagcccccacaagtttgggatctactacaatggctacaggcagtggcgcaccaatggcagacaataacgagggtgccgatggagtgggtaattcctcaggaaattggcattgcgattcccaatggctgggcgacagagtcatcaccaccagcacccgaacctgggccctgcccacctacaacaaccacctctacaagcaaatctccagccaatcaggagcatcgaacgacaaccactactttggctacagcaccccttgggggtattttgacttcaacagattccactgtcacttctccccacgtgactggcaaagactcatcaacaacaactggggattccgacccaagagactcaacttcaagctctttaacattcaagtcaaagaggtcacgcagaatgacggtacggcgacgattgccaataaccttaccagcacggttcaggtgtttactgactcggagtaccagctcccgtacgtcctcggctcggcgcatcaaggatgcctcccgccgtttccagcggacgtcttcatggtcccacagtatggatacctcaccctgaacaacgggagtcaggcggtaggacgctcttccttttactgcctggagtactttccttctcagatgctgcgtaccggaaacaactttaccttcagctacacctttgaggacgtgcccttccacagcagctacgctcacagccagagtttggaccggctgatgaatcctctgatcgaccagtatctgtattatctgaacaggacacaatcaaatagtggaactcttcagcagtctaggctactgtttagccaagctggacccaccagcatgtcccttcaagctaaaaactggctgcctggaccttgctacagacagcagcgtctgtcaaagcaggcaaacgacaacaacaacagcaactttccctggactgcggctacaaagtatcatctaaatggtcgggactcgttggttaatccaggaccagctatggccagccacaaagacgatgaagaaaagtttttccccatgcatggaaccctgatatttggtaaacaaggaacaaatgctaacgacgcggatttggaacatgtcatgattacagatgaagaagaaatcaggaccaccaatcccgtggctacagagcagtacggaaacgtgtcaaataatttgcaaaactcaaatactggtccaactacagaaaatgtcaatcaccagggagcgttacctggtatggtgtggcaggatcgagacgtgtacctgcagggacccatttgggccaagattcctcacaccgacggacactttcacccttctccactgatgggaggttttggactcaaacacccgcctcctcaaatcatgatcaaaaacactcctgttccagccaatcctcctacaaacttcagcgcggcaaagtttgcttccttcatcacacagtattccacgggacaggtcagcgtggagatcgagtgggagctgcagaaggagaacagcaaacgctggaaccccgagatccagtacacttccaactacaacaaatctgttaatgtggactttactgtggacgctaatggtgtgtattcagagcctcgccccattggcaccagatacctgactcgtaatctgtaa

SEQ ID NO: 1404 - DNA, 2208 bp, Artificial Sequence
  Synthetic Polynucleotide
atggctgccgatggttatcttccagattggctcgaggacactctctctgaaggaataagacagtggtggaagctcaaacctggcccaccaccgccaaagcccgcagagcggcataaggacgacagcaggggtcttgtgcttcctgggtacaagtacctcggacccttcaacggactcgacaagggagagccggtcaacgaggcagacgccgcggccctcgagcacgacaaggcctacgaccggcagctcgacagcggagacaacccgtacctcaagtacaaccacgccgacgcggagtttcaggagcgccttaaagaagatacgtcttttgggggcaacctcggacgagcagtattccaggcgaaaaagagggttcttgaacctctgggcctggttgaggagcctgttaagacggctccgggaaaaaagaggccggtagagcactctcctgtggagccagactcctcctcgggaaccggaaaagcgggccagcagcctgcgagaaagagattgaattttggtcagactggagacgcagactccgtacctgacccccagcctctcggacagccaccagcagcccccacaagtttgggatctactacaatggctacaggcagtggcgcaccaatggcagacaataacgagggtgccgatggagtgggtaattcctcaggaaattggcattgcgattcccaatggttgggcgacagagtcatcaccaccagcacccgaacctgggccctgcccacctacaacaaccacctctacaagcaaatctccagccaatcaggagccagcaacgacaaccactactttggctacagcaccccctgggggtattttgacttcaacagattccactgccacttttcaccacgtgactggcaaagactcatcaacaacaactggggattccgacccaagagactcaacttcaagctctttaacattcaagtcaaagaggtcacgcagaatgacggtacgacgacgattgccaataaccttaccagcacggttcaggtgtttactgactcggagtaccagctcccgtacgtcctcggctcggcgcatcaaggatgcctcccgccgtttccagcggacgtcttcatggtcccacagtatggatacctcaccctgaacaacgggagtcaggcggtaggacgctcttccttttactgcctggagtactttccttctcagatgcttcgtaccggaaacaactttaccttcagttacacctttgaagacgttcctttccacagcagctacgctcacagtcaaagtctggaccggctgatgaatcctcttatcgaccagtacctgtattatctaaacaaaacacaatcaaatagtggaactcttcagcagtctcggctactgtttagtcaagctggacctaccagcatgtctcttcaagctaaaaactggctgcctggaccttgctacagacaacagcgtctgtcaaagcaggcaaacgacaacaacaacagcaactttccctggactgcggctacaaagtatcatctaaatggccgggactcgttggttaatccaggaccagctatggccagccacaaagacgatgaagaaaagtttttccccatgcatggaaccctgatatttggcaaacaaggaacaaatgctaacgacgcggatttggacaatgtcatgattacagatgaagaagaaatccgtaccaccaatcccgtggctacggagcagtacgggactgtgtcaaataatttgcaaaactcaaatactggtccaactactggaactgtcaatcaccaaggagcgttacctggtatggtgtggcaggatcgagacgtgtaccttcagggacccatttgggccaagattcctcacaccgatggacactttcacccttctccgctgatgggaggttttggactcaaacacccgcctcctcagatcatgatcaaaaacactcccgttccagccaatcctcccacaaacttcagttctgccaagtttgcttctttcatcacacagtattccacgggacaggttagcgtggagatcgagtgggagctgcagaaggagaacagcaaacgctggaaccccgagatccagtacacttccaactacaacaagtctgttaatgtggactttactgtggacactaatggtgtgtattcagagcctcgccccattggcaccagatacctgactcgtaatctgtaa

SEQ ID NO: 1405 - DNA, 2208 bp, Artificial Sequence
  Synthetic Polynucleotide
atggctgccgatggttatcttccagattggctcgaggacactctctctgaaggaataagacagtggtggaagctcaaacctggcccaccaccgccaaagcccgcagagcggcataaggacgacagcaggggtcttgtgcttcctgggtacaagtacctcggacccttcaacggactcgacaagggagagccggtcaacgaggcagacgccgcggccctcgagcacgacaaggcctacgaccggcagctcgacagcggagacaacccgtacctcaagtacaaccacgccgacgcggagtttcaggagcgccttaaagaagatacgtcttttgggggcaacctcggacgagcagtattccaggcgaaaaagagggttcttgaacctctgggcctggttgaggagcctgttaagacggctccgggaaaaaagaggccggtagagcactctcctgtggagccagactcctcctcgggaaccggaaaagcgggccagcagcctgcgagaaagagattgaattttggtcagactggagacgcagactccgtacctgacccccagcctctcggacagccaccagcagcccccacaagtttgggatctactacaatggctacaggcagtggcgcaccaatggcagacaataacgagggtgccgatggagtgggtaattcctcaggaaattggcattgcgattcccaatggttgggcgacagagtcatcaccaccagcacccgaacctgggccctgcccacctacaacaaccacctctacaagcaaatctccagccaatcaggagccagcaacgacaaccactactttggctacagcaccccctgggggtattttgacttcaacagattccactgccacttttcaccacgtgactggcaaagactcatcaacaacaactggggattccgacccaagagactcaacttcaagctctttaacattcaagtcaaagaggtcacgcagaatgacggtacgacgacgattgccaataaccttaccagcacggttcaggtgtttactgactcggagtaccagctcccgtacgtcctcggctcggcgcatcaaggatgcctcccgccgtttccagcggacgtcttcatggtcccacagtatggatacctcaccctgaacaacgggagtcaggcggtaggacgctcttccttttactgcctggagtactttccttctcagatgcttcgtaccggaaacaactttaccttcagttacacctttgaagacgttcctttccacagcagctacgctcacagtcaaagtctggaccggctgatgaatcctcttatcgaccagtacctgtattatctaaacaaaacacaatcaaatagtggaactcttcagcagtctcggctactgtttagtcaagctggacctaccagcatgtctcttcaagctaaaaactggctgcctggaccttgctacagacaacagcgtctgtcaaagcaggcaaacgacaacaacaacagcaactttccctgggctgcggctacaaagtatcatctaaatggccgggactcgttggttaatccaggaccagctatggccagccacaaagacgatgaagaaaagtttttccccatgcatggaaccctgatatttggcaaacaaggaacaaatgctaacgacgcggatttggacaatgtcatgattacagatgaagaagaaatccgtaccaccaatcccgtggctacggagcagtacgggactgtgtcaaataatttgcaaaactcaaatactggtccaactactggaactgtcaatcaccaaggagcgttacctggtatggtgtggcaggatcgagacgtgtaccttcagggacccatttgggccaagattcctcacaccgatggacactttcacccttctccgctgatgggaggttttggactcaaacacccgcctcctcagatcatgatcaaaaacactcccgttccagccaatcctcccacaaacttcagttctgccaagtttgcttctttcatcacacagtattccacgggacaggttagcgtggagatcgagtgggagctgcagaaggagaacagcaaacgctggaaccccgagatccagtacacttccaactacaacaagtctgttaatgtggactttactgtggacactaatggtgtgtattcagagcctcgccccattggcaccagatacctgactcgtaatctgtaa

SEQ ID NO: 1406 - DNA, 2208 bp, Artificial Sequence
  Synthetic Polynucleotide
atggctgccgatggttatcttccagattggctcgaggacactctctctgaaggaataagacagtggtggaagctcaaacctggcccaccaccgccaaagcccgcagagcggcataaggacgacagcaggggtcttgtgcttcctgggtacaagtacctcggacccttcaacggactcgacaagggagagccggtcaacgaggcagacgccgcggccctcgagcacgacaaggcctacgaccggcagctcgacagcggagacaacccgtacctcaagtacaaccacgccgacgcggagtttcaggagcgccttaaagaagatacgtcttttgggggcaacctcggacgagcagtattccaggcgaaaaagagggttcttgaacctctgggcctggttgaggagcctgttaagacggctccgggaaaaaagaggccggtagagcactctcctgtggagccagactcctcctcgggaaccggaaaagcgggccagcagcctgcgagaaagagattgaattttggtcagactggagacgcagactccgtacctgacccccagcctctcggacagccaccagcagcccccacaagtttgggatctactacaatggctacaggcagtggcgcaccaatggcagacaataacgagggtgccgatggagtgggtaattcctcaggaaattggcattgcgattcccaatggttgggcgacagagtcatcaccaccagcacccgaacctgggccctgcccacctacaacaaccacctctacaagcaaatctccagccaatcaggagccagcaacgacaaccactactttggctacagcaccccctgggggtattttgacttcaacagattccactgccacttttcaccacgtgactggcaaagactcatcaacaacaactggggattccgacccaagagactcaacttcaagctctttaacattcaagtcaaagaggtcacgcagaatgacggtacgacgacgattgccaataaccttaccagcacggttcaggtgtttactgactcggagtaccagctcccgtacgtcctcggctcggcgcatcaaggatgcctcccgccgtttccagcggacgtcttcatggtcccacagtatggatacctcaccctgaacaacgggagtcaggcggtaggacgctcttccttttactgcctggagtactttccttctcagatgcttcgtaccggaaacaactttaccctcagttacacctttgaagacgttcctttccacagcagctacgctcacagtcaaagtctggaccggctgatgaatcctcttatcgaccagtacctgtattatctaaacaaaacacaatcaaatagtggaactcttcagcagtctcggctactgtttagtcaagctggacctaccagcatgtctcttcaagctaaaaactggctgcctggaccttgctacagacaacagcgtctgtcaaagcaggcaaacgacaacaacaacagcaactttccctggactgcggctacaaagtatcatctaaatggccgggactcgttggttaatccaggaccagctatggccagccacaaagacgatgaagaaaagtttttccccatgcatggaaccctgatatttggcaaacaaggaacaaatgctaacgacgcggatttggacaatgtcatgattacagatgaagaagaaatccgtaccaccaatcccgtggctacggagcagtacgggactgtgtcaaataatttgcaaaactcaaatactggtccaactactggaactgtcaatcaccaaggagcgttacctggtatggtgtggcaggatcgagacgtgtaccttcagggacccatttgggccaagattcctcacaccgatggacactttcacccttctccgctgatgggaggttttggactcaaacacccgcctcctcagatcatgatcaaaaacactcccgttccagccaatcctcccacaaacttcagttctgccaagtttgcttctttcatcacacagtattccacgggacaggttagcgtggagatcgagtgggagctgcagaaggagaacagcaaacgctggaaccccgagatccagtacacttccaactacaacaagtctgttaatgtggactttactgtggacactaatggtgtgtattcagagcctcgccccattggcaccagatacctgactcgtaatctgtaa

SEQ ID NO: 1407 - DNA, 2208 bp, Artificial Sequence
  Synthetic Polynucleotide
atggctgccgatggttatcttccagattggctcgaggacactctctctgaaggaataagacagtggtggaagctcaaacctggcccaccaccgccaaagcccgcagagcggcataaggacgacagcaggggtcttgtgcttcctgggtacaagtacctcggacccttcaacggactcgacaagggagagccggtcaacgaggcagacgccgcggccctcgagcacgacaaggcctacgaccggcagctcgacagcggagacaacccgtacctcaagtacaaccacgccgacgcggagtttcaggagcgccttaaagaagatacgtcttttgggggcaacctcggacgagcagtattccaggcgaaaaggagggttcttgaacctctgggcctggttgaggagcctgttaagacggctccgggaaaaaagaggccggtagagcactctcctgtggagccagactcctcctcgggaaccggaaaagcgggccagcagcctgcgagaaagagattgaattttggtcagactggagacgcagactccgtacctgacccccagcctctcggacagccaccagcagcccccacaagtttgggatctactacaatggctacaggcagtggcgcaccaatggcagacaataacgagggtgccgatggagtgggtaattcctcaggaaattggcattgcgattcccaatggttgggcgacagagtcatcaccaccagcacccgaacctgggccctgcccacctacaacaaccacctctacaagcaaatctccagccaatcaggagccagcaacgacaaccactactttggctacagcaccccctgggggtattttgacttcaacagattccactgccacttttcaccacgtgactggcaaagactcatcaacaacaactggggattccgacccaagagactcaacttcaagctctttaacattcaagtcaaagaggtcacgcagaatgacggtacgacgacgattgccaataaccttaccagcacggttcaggtgtttactgactcggagtaccagctcccgtacgtcctcggctcggcgcatcaaggatgcctcccgccgtttccagcggacgtcttcatggtcccacagtatggatacctcaccctgaacaacgggagtcaggcggtaggacgctcttccttttactgcctggagtactttccttctcagatgcttcgtaccggaaacaactttaccttcagttacacctttgaagacgttcctttccacagcagctacgctcacagtcaaagtctggaccggctgatgaatcctcttatcgaccagtacctgtattatctaaacaaaacacaatcaaatagtggaactcttcagcagtctcggctactgtttagtcaagctggacctaccagcatgtctcttcaagctaaaaactggctgcctggaccttgctacagacaacagcgtctgtcaaagcaggcaaacgacaacaacaacagcaactttccctggactgcggctacaaagtatcatctaaatggccgggactcgttggttaatccaggaccagctatggccagccacaaagacgatgaagaaaagtttttccccatgcatggaaccctgatatttggcaaacaaggaacaaatgctaacgacgcggatttggacaatgtcatgattacagatgaagaagaaatccgtaccaccaatcccgtggctacggagcagtacgggactgtgtcaaataatttgcaaaactcaaatactggtccaactactggaactgtcaatcaccaaggagcgttacctggtatggtgtggcaggatcgagacgtgtaccttcagggacccatttgggccaagattcctcacaccgatggacactttcacccttctccgctgatgggaggttttggactcaaacacccgcctcctcagatcatgatcaaaaacactcccgttccagccaatcctcccacaaacttcagttctgccaagtttgcttctttcatcacacagtattccacgggacaggttagcgtggagatcgagtgggagctgcagaaggagaacagcaaacgctggaaccccgagatccagtacacttccaactacaacaagtctgttaatgtggactttactgtggacactaatggtgtgtattcagagcctcgccccattggcaccagatacctgactcgtaatctgtaa

SEQ ID NO: 1408 - DNA, 2208 bp, Artificial Sequence
  Synthetic Polynucleotide
atggctgccgatggttatcttccagattggctcgaggacactctctctgaaggaataagacagtggtggaagctcaaacctggcccaccaccgccaaagcccgcagagcggcataaggacgacagcaggggtcttgtgcttcctgggtacaagtacctcggacccttcaacggactcgacaagggagagccggtcaacgaggcagacgccgcggccctcgagcacgacaaggcctacgaccggcagctcgacagcggagacaacccgtacctcaagtacaaccacgccgacgcggagtttcaggagcgccttaaagaagatacgtcttttgggggcaacctcggacgagcagtattccaggcgaaaaagagggttcttgaacctctgggcctggttgaggagcctgttaagacggctccgggaaaaaagaggccggtagagcactctcctgtggagccagactcctcctcgggaaccggaaaagcgggccagcagcctgcgagaaagagattgaattttggtcagactggagacgcagactccgtacctgacccccagcctctcggacagccaccagcagcccccacaagtttgggatctactacaatggctacaggcagtggcgcaccaatggcagacaataacgagggtgccgatggagtgggtaattcctcaggaaattggcattgcgattcccaatggttgggcggcagagtcatcaccaccagcacccgaacctgggccctgcccacctacaacaaccacctctacaagcaaatctccagccaatcaggagccagcaacgacaaccactactttggctacagcaccccctgggggtattttgacttcaacagattccactgccacttttcaccacgtgactggcaaagactcatcaacaacaactggggattccgacccaagagactcaacttcaagctctttaacattcaagtcaaagaggtcacgcagaatgacggtacgacgacgattgccaataaccttaccagcacggttcaggtgtttactgactcggagtaccagctcccgtacgtcctcggctcggcgcatcaaggatgcctcccgccgtttccagcggacgtcttcatggtcccacagtatggatacctcaccctgaacaacgggagtcaggcggtaggacgctcttccttttactgcctggagtactttccttctcagatgcttcgtaccggaaacaactttaccttcagttacacctttgaagacgttcctttccacagcagctacgctcacagtcaaagtctggaccggctgatgaatcctcttatcgaccagtacctgtattatctaaacaaaacacaatcaaatagtggaactcttcagcagtctcggctactgtttagtcaagctggacctaccagcatgtctcttcaagctaaaaactggctgcctggaccttgctacagacaacagcgtctgtcaaagcaggcaaacgacaacaacaacagcaactttccctggactgcggctacaaagtatcatctaaatggccgggactcgttggttaatccaggaccagctatggccagccacaaagacgatgaagaaaagtttttccccatgcatggaaccctgatatttggcaaacaaggaacaaatgctaacgacgcggatttggacaatgtcatgattacagatgaagaagaaatccgtaccaccaatcccgtggctacggagcagtacgggactgtgtcaaataatttgcaaaactcaaatactggtccaactactggaactgtcaatcaccaaggagcgttacctggtatggtgtggcaggatcgagacgtgtaccttcagggacccatttgggccaagattcctcacaccgatggacactttcacccttctccgctgatgggaggttttggactcaaacacccgcctcctcagatcatgatcaaaaacactcccgttccagccaatcctcccacaaacttcagttctgccaagtttgcttctttcatcacacagtattccacgggacaggttagcgtggagatcgagtgggagctgcagaaggagaacagcaaacgctggaaccccgagatccagtacacttccaactacaacaagtctgttaatgtggactttactgtggacactaatggtgtgtattcagagcctcgccccattggcaccagatacctgactcgtaatctgtaa

SEQ ID NO: 1409 - DNA, 2205 bp, Artificial Sequence
  Synthetic Polynucleotide
atggctgccgatggttatcttccagattggctcgaggacactctctctgaaggaataagacagtggtggaagctcaaacctggcccaccaccgccaaagcccgcagagcggcataaggacgacagcaggggtcttgtgcttcctgggtacaagtacctcggacccttcaacggactcgacaagggagagccggtcaacgaggcagacgccgcggccctcgagcacgacaaggcctacgaccggcagctcgacagcggagacaacccgtacctcaagtacaaccacgccgacgcggagtttcaggagcgccttaaagaagatacgtcttttgggggcaacctcggacgagcagtattccaggcgaaaaagagggttcttgaacctctgggcctggttgaggagcctgttaagacggctccgggaaaaaagaggccggtagagcactctcctgtggagccagactcctcctcgggaaccggaaaagcgggccagcagcctgcgagaaagagattgaattttggtcagactggagacgcagactccgtacctgacccccagcctctcggacagccaccagcagcccccacaagtttgggatctactacaatggctacaggcagtggcgcaccaatggcagacaataacgagggtgccgatggagtgggtaattcctcaggaaattggcattgcgattcccaatggttgggcgacagagtcatcaccaccagcacccgaacctgggccctgcccacctacaacaaccacctctacaagcaaatctccagccaatcaggagccagcaacgacaaccactactttggctacagcaccccctgggggtattttgacttcaacagattccactgccacttttcaccacgtgactggcaaagactcatcaacaacaactggggattccgacccaagagactcaacttcaagctctttaacattcaagtcaaagaggtcacgcagaatgacggtacgacgacgattgccaataaccttaccagcacggttcaggtgtttactgactcggagtaccagctcccgtacgtcctcggctcggcgcatcaaggatgcctcccgccgtttccagcggacgtcttcatggtcccacagtatggatacctcaccctgaacaacgggagtcaggcggtaggacgctcttccttttactgcctggagtactttccttctcagatgcttcgtaccggaaacaactttaccttcagttacacctttgaagacgttcctttccacagcagctacgctcacagtcaaagtctggaccggctgatgaatcctcttatcgaccagtacctgtattatctaaacaaaacacaatcaaatagtggaactcttcagcagtctcggctactgtttagtcaagctggacctaccagcatgtctcttcaagctaaaaactggctgcctggaccttgctacagacaacagcgtctgtcaaagcaggcaaacgacaacaacagcaactttccctggactgcggctacaaagtatcatctaaatggccgggactcgttggttaatccaggaccagctatggccagccacaaagacgatgaagaaaagtttttccccatgcatggaaccctgatatttggcaaacaaggaacaaatgctaacgacgcggatttggacaatgtcatgattacagatgaagaagaaatccgtaccaccaatcccgtggctacggagcagtacgggactgtgtcaaataatttgcaaaactcaaatactggtccaactactggaactgtcaatcaccaaggagcgttacctggtatggtgtggcaggatcgagacgtgtaccttcagggacccatttgggccaagattcctcacaccgatggacactttcacccttctccgctgatgggaggttttggactcaaacacccgcctcctcagatcatgatcaaaaacactcccgttccagccaatcctcccacaaacttcagttctgccaagtttgcttctttcatcacacagtattccacgggacaggttagcgtggagatcgagtgggagctgcagaaggagaacagcaaacgctggaaccccgagatccagtacacttccaactacaacaagtctgttaatgtggactttactgtggacactaatggtgtgtattcagagcctcgccccattggcaccagatacctgactcgtaatctgtaa

SEQ ID NO: 1410 - DNA, 2208 bp, Artificial Sequence
  Synthetic Polynucleotide
atggctgccgatggttatcttccagattggctcgaggacactctctctgaaggaataagacagtggtggaagctcaaacctggcccaccaccgccaaagcccgcagagcggcataaggacgacagcaggggtcttgtgcttcctgggtacaagtacctcggacccttcaacggactcgacaagggagagccggtcaacgaggcagacgccgcggccctcgagcacgacaaggcctacgaccggcagctcgacagcggagacaacccgtacctcaagtacaaccacgccgacgcggagtttcaggagcgccttaaagaagatacgtcttttgggggcaacctcggacgagcagtattccaggcgaaaaagagggttcttgaacctctgggcctggttgaggagcctgttaagacggctccgggaaaaaagaggccggtagagcactctcctgtggagccagactcctcctcgggaaccggaaaagcgggccagcagcctgcgagaaagagattgaattttggtcagactggagacgcagactccgtacctgacccccagcctctcggacagccaccagcagcccccacaagtttgggatctactacaatggctacaggcagtggcgcaccaatggcagacaataacgagggtgccgatggagtgggtaattcctcaggaaattggcattgcgattcccaatggttgggcgacagagtcatcaccaccagcacccgaacctgggccctgcccacctacaacaaccacctctacaagcaaatctccagccaatcaggagccagcaacgacaaccactactttggctacagcaccccctgggggtattttgacttcaacagattccactgccacttttcaccacgtgactggcaaagactcatcaacaacaactggggattccgacccaagagactcaacttcaagctctttaacattcaagtcaaagaggtcacgcagaatgacggtacgacgacgattgccaataaccttaccagcacggttcaggtgtttactgactcggagtaccagctcccgtacgtcctcggctcggcgcatcaaggatgcctcccgccgtttccagcggacgtcttcatggtcccacagtatggatacctcaccctgaacaacgggagtcaggcggtaggacgctcttccttttactgcctggagtactttccttctcagatgcttcgtaccggaaacaactttaccttcagttacacctttgaagacgttcctttccacagcagctacgctcacagtcaaagtctggaccggctgatgaatcctcttatcgaccagtacctgtattatctaaacaaaacacaatcaaatagtggaactcttcagcagcctcggctactgtttagtcaagctggacctaccagcatgtctcttcaagctaaaaactggctgcctggaccttgctacagacaacagcgtctgtcaaagcaggcaaacgacaacaacaacagcaactttccctggactgcggctacaaagtatcatctaaatggccgggactcgttggttaatccaggaccagctatggccagccacaaagacgatgaagaaaagtttttccccatgcatggaaccctgatatttggcaaacaaggaacaaatgctaacgacgcggatttggacaatgtcatgattacagatgaagaagaaatccgtaccaccaatcccgtggctacggagcagtacgggactgtgtcaaataatttgcaaaactcaaatactggtccaactactggaactgtcaatcaccaaggagcgttacctggtatggtgtggcaggatcgagacgtgtaccttcagggacccatttgggccaagattcctcacaccgatggacactttcacccttctccgctgatgggaggttttggactcaaacacccgcctcctcagatcatgatcaaaaacactcccgttccagccaatcctcccacaaacttcagttctgccaagtttgcttctttcatcacacagtattccacgggacaggttagcgtggagatcgagtgggagctgcagaaggagaacagcaaacgctggaaccccgagatccagtacacttccaactacaacaagtctgttaatgtggactttactgtggacactaatggtgtgtattcagagcctcgccccattggcaccagatacctgactcgtaatctgtaa

SEQ ID NO: 1411 - DNA, 2205 bp, Artificial Sequence
  Synthetic Polynucleotide
atggctgccgatggttatcttccagattggctcgaggacactctctctgaaggaataagacagtggtggaagctcaaacctggcccaccaccgccaaagcccgcagagcggcataaggacgacagcaggggtcttgtgcttcctgggtacaagtacctcggacccttcaacggactcgacaagggagagccggtcaacgaggcagacgccgcggccctcgagcacgacaaggcctacgaccggcagctcgacagcggagacaacccgtacctcaagtacaaccacgccgacgcggagtttcaggagcgccttaaagaagatacgtcttttgggggcaacctcggacgagcagtattccaggcgaaaaagagggttcttgaacctctgggcctggttgaggagcctgttaagacggctccgggaaaaaagaggccggtagagcactctcctgtggagccagactcctcctcgggaaccggaaaagcgggccagcagcctgcgagaaagagattgaattttggtcagactggagacgcagactccgtacctgacccccagcctctcggacagccaccagcagcccccacaagtttgggatctactacaatggctacaggcagtggcgcaccaatggcagacaataacgagggtgccgatggagtgggtaattcctcaggaaattggcattgcgattcccaatggttgggcgacagagtcatcaccaccagcacccgaacctgggccctgcccacctacaacaaccacctctacaagcaaatctccagccaatcaggagccagcaacgacaaccactactttggctacagcaccccctgggggtattttgacttcaacagattccactgccacttttcaccacgtgactggcaaagactcatcaacaacaactggggattccgacccaagagactcaacttcaagctctttaacattcaagtcaaagaggtcacgcagaatgacggtacgacgacgattgccaataaccttaccagcacggttcaggtgtttactgactcggagtaccagctcccgtacgtcctcggctcggcgcatcaaggatgcctcccgccgtttccagcggacgtcttcatggtcccacagtatggatacctcaccctgaacaacgggagtcaggcggtaggacgctcttccttttactgcctggagtactttccttctcagatgcttcgtaccggaaacaactttaccttcagttgcacctttgaagacgttcctttccacagcagctacgctcacagtcaaagtctggaccggctgatgaatcctcttatcgaccagtacctgtattatctaaacaaaacacaatcaaatagtggaactcttcagcagtctcggctactgtttagtcaagctggacctaccagcatgtctcttcaagctaaaaactggctgcctggaccttgctacagacaacagcgtctgtcaaagcaggcaaacgacaacaacagcaactttccctggactgcggctacaaagtatcatctaaatggccgggactcgttggttaatccaggaccagctatggccagccacaaagacgatgaagaaaagtttttccccatgcatggaaccctgatatttggcaaacaaggaacaaatgctaacgacgcggatttggacaatgtcatgattacagatgaagaagaaatccgtaccaccaatcccgtggctacggagcagtacgggactgtgtcaaataatttgcaaaactcaaatactggtccaactactggaactgtcaatcaccaaggagcgttacctggtatggtgtggcaggatcgagacgtgtaccttcagggacccatttgggccaagattcctcacaccgatggacactttcacccttctccgctgatgggaggttttggactcaaacacccgcctcctcagatcatgatcaaaaacactcccgttccagccaatcctcccacaaacttcagttctgccaagtttgcttctttcatcacacagtattccacgggacaggttagcgtggagatcgagtgggagctgcagaaggagaacagcaaacgctggaaccccgagatccagtacacttccaactacaacaagtctgttaatgtggactttactgtggacactaatggtgtgtattcagagcctcgccccattggcaccagatacctgactcgtaatctgtaa

SEQ ID NO: 1412 - DNA, 2208 bp, Artificial Sequence
  Synthetic Polynucleotide
atggctgccgatggttatcttccagattggctcgaggacactctctctgaaggaataagacagtggtggaagctcaaacctggcccaccaccgccaaagcccgcagagcggcataaggacgacagcaggggtcttgtgcttcctgggtacaagtacctcggacccttcaacggactcgacaagggagagccggtcaacgaggcagacgccgcggccctcgagcacgacaaggcctacgaccggcagctcgacagcggagacaacccgtacctcaagtacaaccacgccgacgcggagtttcaggagcgccttaaagaagatacgtcttttgggggcaacctcggacgagcagtattccaggcgaaaaagagggttcttgaacctctgggcctggttgaggagcctgttaagacggctccgggaaaaaagaggccggtagagcactctcctgtggagccagactcctcctcgggaaccggaaaagcgggccagcagcctgcgagaaagagattgaattttggtcagactggagacgcagactccgtacctgacccccagcctctcggacagccaccagcagcccccacaagtttgggatctactacaatggctacaggcagtggcgcaccaatggcagacaataacgagggtgccgatggagtgggtaattcctcaggaaattggcattgcgattcccaatggttgggcgacagagtcatcaccaccagcacccgaacctgggccctgcccacctacaacaaccacctctacaagcaaatctccagccaatcaggagccagcaacgacaaccactactttggctacagcaccccctgggggtattttgacttcaacagattccactgccacttttcaccacgtgactggcaaagactcatcaacaacaactggggattccgacccaagagactcaacttcaagctctttaacattcaagtcaaagaggtcacgcagaatgacggtacgacgacgattgccaataaccttaccagcacggttcaggtgtttactgactcggagtaccagctcccgtacgtcctcggctcggcgcatcaaggatgcctcccgccgtttccagcggacgtcttcatggtcccacagtatggatacctcaccctgaacaacgggagtcaggcggtaggacgctcttccttttactgcctggagtactttccttctcagatgcttcgtaccggaaacaactttaccttcagttgcacctttgaagacgttcctttccacagcagctacgctcacagtcaaagtctggaccggctgatgaatcctcttatcgaccagtacctgtattatctaaacaaaacacaatcaaatagtggaactcttcagcagtctcggctactgtttagtcaagctggacctaccagcatgtctcttcaagctaaaaactggctgcctggaccttgctacagacaacagcgtctgtcaaagcaggcaaacgacaacaacaacagcaactttccctggactgcggctacaaagtatcatctaaatggccgggactcgttggttaatccaggaccagctatggccagccacaaagacgatgaagaaaagtttttccccatgcatggaaccctgatatttggcaaacaaggaacaaatgctaacgacgcggatttggacaatgtcatgattacagatgaagaagaaatccgtaccaccaatcccgtggctacggagcagtacgggactgtgtcaaataatttgcaaaactcaaatactggtccaactactggaactgtcaatcaccaaggagcgttacctggtatggtgtggcaggatcgagacgtgtaccttcagggacccatttgggccaagattcctcacaccgatggacactttcacccttctccgctgatgggaggttttggactcaaacacccgcctcctcagatcatgatcaaaaacactcccgttccagccaatcctcccacaaacttcagttctgccaagtttgcttctttcatcacacagtattccacgggacaggttagcgtggagatcgagtgggagctgcagaaggagaacagcaaacgctggaaccccgagatccagtacacttccaactacaacaagtctgttaatgtggactttagtgtggacactaatggtgtgtattcagagcctcgccccattggcaccagatacctgactcgtaatctgtaa

SEQ ID NO: 1413 - DNA, 2208 bp, Artificial Sequence
  Synthetic Polynucleotide
atggctgccgatggttatcttccagattggctcgaggacactctctctgaaggaataagacagtggtggaagctcaaacctggcccaccaccgccaaagcccgcagagcggcataaggacgacagcaggggtcttgtgcttcctgggtacaagtacctcggacccttcaacggactcgacaagggagagccggtcaacgaggcagacgccgcggccctcgagcacgacaaggcctacgaccggcagctcgacagcggagacaacccgtacctcaagtacaaccacgccgacgcggagtttcaggagcgccttaaagaagatacgtcttttgggggcaacctcggacgagcagtattccaggcgaaaaagagggttcttgaacctctgggcctggttgaggagcctgttaagacggctccgggaaaaaagaggccggtagagcactctcctgtggagccagactcctcctcgggaaccggaaaagcgggccagcagcctgcgagaaagagattgaattttggtcagactggagacgcagactccgtacctgacccccagcctctcggacagccaccagcagcccccacaagtttgggatctactacaatggctacaggcagtggcgcaccaatggcagacaataacgagggtgccgatggagtgggtaattcctcaggaaattggcattgcgattcccaatggttgggcgacagagtcatcaccaccagcacccgaacctgggccctgcccacctacaacaaccacctctacaagcaaatctccagccaatcaggagccagcaacgacaaccactactttggctacagcaccccctgggggtattttgacttcaacagattccactgccacttttcaccacgtgactggcaaagactcatcaacaacaactggggattccgacccaagagactcaacttcaagctctttaacattcaagtcaaagaggtcacgcagaatgacggtacgacgacgattgccaataaccttaccagcacggttcaggtgtttactgactcggagtaccagctcccgtacgtcctcggctcggcgcatcaaggatgcctcccgccgtttccagcggacgtcttcatggtcccacagtatggatacctcaccctgaacaacgggagtcaggcggtaggacgctcttccttttactgcctggagtactttccttctcagatgcttcgtaccggaaacaactttaccttcagttgcacctttgaagacgttcctttccacagcagctacgctcacagtcaaagtctggaccggctgatgaatcctcttatcgaccagtacctgtattatctaaacaaaacacaatcaaatagtggaactcttcagcagtctcggctactgtttagtcaagctggacctaccagcatgtctcttcaagctaaaaactggctgcctggaccttgctacagacaacagcgtctgtcaaagcaggcaaacgacaacaacaacagcaactttccctggactgcggctacaaagtatcatctaaatggccgggactcgttggttaatccaggaccagctatggccagccacaaagacgatgaagaaaagtttttccccatgcatggaaccctgatatttggcaaacaaggaacaaatgctaacgacgcggatttggacaatgtcatgattacagatgaagaagaaatccgtaccaccaatcccgtggctacggagcagtacgggactgtgtcaaataatttgcaaaactcaaatactggtccaactactggaactgtcaatcaccaaggagcgttacctggtatggtgtggcaggatcgagacgtgtaccttcagggacccatttgggccaagattcctcacaccgatggacactttcacccttctccgctgatgggaggttttggactcaaacacccgcctcctcagatcatgatcaaaaacactcccgttccagccaatcctcccacaaacttcagttctgccaagtttgcttctttcatcacacagtattccacgggacaggttagcgtggagatcgagtgggagctgcagaaggagaacagcaaacgctggaaccccgagatccagtacacttccaactacaacaagtctgttaatgtggactttactgtggacactaatggtgtgtattcagagcctcgccccattggcaccagatacctgactcgtaatctgtaa

SEQ ID NO: 1414 - DNA, 2208 bp, Artificial Sequence
  Synthetic Polynucleotide
atggctgccgatggttatcttccagattggctcgaggacactctctctgaaggaataagacagtggtggaagctcaaacctggcccaccaccgccaaagcccgcagagcggcataaggacgacagcaggggtcttgtgcttcctgggtacaagtacctcggacccttcaacggactcgacaagggagagccggtcaacgaggcagacgccgcggccctcgagcacgacaaggcctacgaccggcagctcgacagcggagacaacccgtacctcaagtacaaccacgccgacgcggagtttcaggagcgccttaaagaagatacgtcttttgggggcaacctcggacgagcagtattccaggcgaaaaagagggttcttgaacctctgggcctggttgaggagcctgttaagacggctccgggaaaaaagaggccggtagagcactctcctgtggagccagactcctcctcgggaaccggaaaagcgggccagcagcctgcgagaaagagattgaattttggtcagactggagacgcagactccgtacctgacccccagcctctcggacagccaccagcagcccccacaagtttgggatctactacaatggctacaggcagtggcgcaccaatggcagacaataacgagggtgccgatggagtgggtaattcctcaggaaattggcattgcgattcccaatggttgggcgacagagtcatcaccaccagcacccgaacctgggccctgcccacctacaacaaccacctctacaagcaaatctccagccaatcaggagccagcaacgacaaccactactttggctacagcaccccctgggggtattttgacttcaacagattccactgccacttttcaccacgtgactggcaaagactcatcaacaacaactggggattccgacccaagagactcaacttcaagctctttaacattcaagtcaaagaggtcacgcagaatgacggtacgacgacgattgccaataaccttaccagcacggttcaggtgtttactgactcggagtaccagctcccgtacgtcctcggctcggcgcatcaaggatgcctcccgccgtttccagcggacgtcttcatggtcccacagtatggatacctcaccctgaacaacgggagtcaggcggtaggacgctcttccttttactgcctggagtactttccttctcagatgcttcgtaccggaaacaactttaccttcagttacacctttgaagacgttcctttccacagcagctacgctcacagtcaaagtctggaccggctgatgaatcctcttatcgaccagtacctgtattatctaaacaaaacacaatcaaatagtggaactcttcagcagtctcggctactgtttagtcaagctggacctaccagcatgtctcttcaagctaaaaactggctgcctggaccttgctacagacaacagcgtctgtcaaagcaggcaaacgacaacaacaacagcaactttccctggactgcggctacaaagtatcatctaaatggccgggactcgttggttaatccaggaccagctatggccagccacaaagacgatgaagaaaagtttttccccatgcatggaaccctgatatttggcaaacaaggaacaaatgctaacgacgcggatttggacaatgtcatgattacagatgaagaagaaatccgtaccaccaatcccgtggctacggagcagtacgggactgtgtcaaataatttgcaaaactcaaatactggtccaactactggaactgtcaatcaccaaggagcgttacctggtatggtgtggcaggatcgagacgtgtaccttcagggacccatttgggccaagattcctcacaccgatggacactttcacccttctccgctgatgggaggttttggactcaaacacccgcctcctcagatcatgatcaaaaacactcccgttccagccaatcctcccacaaacttcagttctgccaagtttgcttctttcatcacacagtattccacgggacaggttagcgtggagatcgagtgggagctgcagaaggagaacagcaaacgctggaaccccgagatccagtacacttccaactacaacaagtctgttaatgtggactttagtgtggacactaatggtgtgtattcagagcctcgccccattggcaccagatacctgactcgtaatctgtaa

SEQ ID NO: 1415 - DNA, 2208 bp, Artificial Sequence
  Synthetic Polynucleotide
atggctgccgatggttatcttccagattggctcgaggacactctctctgaaggaataagacagtggtggaagctcaaacctggcccaccaccgccaaagcccgcagagcggcataaggacgacagcaggggtcttgtgcttcctgggtacaagtacctcggacccttcaacggactcgacaagggagagccggtcaacgaggcagacgccgcggccctcgagcacgacaaggcctacgaccggcagctcgacagcggagacaacccgtacctcaagtacaaccacgccgacgcggagtttcaggagcgccttaaagaagatacgtcttttgggggcaacctcggacgagcagtattccaggcgaaaaagagggttcttgaacctctgggcctggttgaggagcctgttaagacggctccgggaaaaaagaggccggtagagcactctcctgtggagccagactcctcctcgggaaccggaaaagcgggccagcagcctgcgagaaagagattgaattttggtcagactggagacgcagactccgtacctgacccccagcctctcggacagccaccagcagcccccacaagtttgggatctactacaatggctacaggcagtggcgcaccaatggcagacaataacgagggtgccgatggagtgggtaattcctcaggaaattggcattgcgattcccaatggttgggcgacagagtcatcaccaccagcacccgaacctgggccctgcccacctacaacaaccacctctacaagcaaatctccagccaatcaggagccagcaacgacaaccactactttggctacagcaccccctgggggtattttgacttcaacagattccactgccacttttcaccacgtgactggcaaagactcatcaacaacaactggggattccgacccaagagactcaacttcaagctctttaacattcaagtcaaagaggtcacgcagaatgacggtacgacgacgattgccaataaccttaccagcacggttcaggtgtttactgactcggagtaccagctcccgtacgtccccggctcggcgcatcaaggatgcctcccgccgtttccagcggacgtcttcatggtcccacagtatggatacctcaccctgaacaacgggagtcaggcggtaggacgctcttccttttactgcctggagtactttccttctcagatgcttcgtaccggaaacaactttaccttcagttgcacctttgaagacgttcctttccacagcagctacgctcacagtcaaagtctggaccggctgatgaatcctcttatcgaccagtacctgtattatctaaacaaaacacaatcaaatagtggaactcttcagcagcctcggctactgtttagtcaagctggacctaccagcatgtctcttcaagctaaaaactggctgcctggaccttgctacagacaacagcgtctgtcaaagcaggcaaacgacaacaacaacagcaactttccctggactgcggctacaaagtatcatctaaatggccgggactcgttggttaatccaggaccagctatggccagccacaaagacgatgaagaaaagtttttccccatgcatggaaccctgatatttggcaaacaaggaacaaatgctaacgacgcggatttggacaatgtcatgattacagatgaagaagaaatccgtaccaccaatcccgtggctacggagcagtacgggactgtgtcaaataatttgcaaaactcaaatactggtccaactactggaactgtcaatcaccaaggagcgttacctggtatggtgtggcaggatcgagacgtgtaccttcagggacccatttgggccaagattcctcacaccgatggacactttcacccttctccgctgatgggaggttttggactcaaacacccgcctcctcagatcatgatcaaaaacactcccgttccagccaatcctcccacaaacttcagttctgccaagtttgcttctttcatcacacagtattccacgggacaggttagcgtggagatcgagtgggagctgcagaaggagaacagcaaacgctggaaccccgagatccagtacacttccaactacaacaagtctgttaatgtggactttactgtggacactaatggtgtgtattcagagcctcgccccattggcaccagatacctgactcgtaatctgtaa

SEQ ID NO: 1416 - DNA, 2208 bp, Artificial Sequence
  Synthetic Polynucleotide
atggctgccgatggttatcttccagattggctcgaggacactctctctgaaggaataagacagtggtggaagctcaaacctggcccaccaccgccaaagcccgcagagcggcataaggacgacagcaggggtcttgtgcttcctgggtacaagtacctcggacccttcaacggactcgacaagggagagccggtcaacgaggcagacgccgcggccctcgagcacgacaaggcctacgaccggcagctcgacagcggagacaacccgtacctcaagtacaaccacgccgacgcggagtttcaggagcgccttaaagaagatacgtcttttgggggcaacctcggacgagcagtattccaggcgaaaaagagggttcttgaacctctgggcctggttgaggagcctgttaagacggctccgggaaaaaagaggccggtagagcactctcctgtggagccagactcctcctcgggaaccggaaaagcgggccagcagcctgcgagaaagagattgaattttggtcagactggagacgcagactccgtacctgacccccagcctctcggacagccaccagcagcccccacaagtttgggatctactacaatggctacaggcagtggcgcaccaatggcagacaataacgagggtgccgatggagtgggtaattcctcaggaaattggcattgcgattcccaatggttgggcgacagagtcatcaccaccagcacccgaacctgggccctgcccacctacaacaaccacctctacaagcaaatctccagccaatcaggagccagcaacgacaaccactactttggctacagcaccccctgggggtattttgacttcaacagattccactgccacttttcaccacgtgactggcaaagactcatcgacaacaactggggattccgacccaagagactcaacttcaagctctttaacattcaagtcaaagaggtcacgcagaatgacggtacgacgacgattgccaataaccttaccagcacggttcaggtgtttactgactcggagtaccagctcccgtacgtcctcggctcggcgcatcaaggatgcctcccgccgttttcagcggacgtcttcatggtcccacagtatggatacctcaccctgaacaacgggagtcaggcggtaggacgctcttccttttactgcctggagtactttccttctcagatgcttcgtaccggaaacaactttaccttcagttacacctttgaagacgttcctttccacagcagctacgctcacagtcaaagtctggaccggctgatgaatcctcttatcgaccagtacctgtattatctaaacaaaacacaatcaaatagtggaactcttcagcagtctcggctactgtttagtcaagctggacctaccagcatgtctcttcaagctaaaaactggctgcctggaccttgctacagacaacagcgtctgtcaaagcaggcaaacgacaacaacaacagcaactttccctggactgcggctacaaagtatcatctaaatggccgggactcgttggttaatccaggaccagctatggccagccacaaagacgatgaagaaaagtttttccccatgcatggaaccctgatatttggcaaacaaggaacaaatgctaacgacgcggatttggacaatgtcatgattacagatgaagaagaaatccgtaccaccaatcccgtggctacggagcagtacgggactgtgtcaaataatttgcaaaactcaaatactggtccaactactggaactgtcaatcaccaaggagcgttacctggtatggtgtggcaggatcgagacgtgtaccttcagggacccatttgggccaagattcctcacaccgatggacactttcacccttctccgctgatgggaggttttggactcaaacacccgcctcctcagatcatgatcaaaaacactcccgttccagccaatcctcccgcaaacttcagttctgccaagtttgcttctttcatcacacagtattccacgggacaggttagcgtggagatcgagtgggagctgcagaaggagaacagcaaacgctggaaccccgagatccagtacacttccaactacaacaagtctgttaatgtggactttactgtggacactaatggtgtgtattcagagcctcgccccattggcaccagatacctgactcgtaatctgtaa

SEQ ID NO: 1417 - DNA, 2208 bp, Artificial Sequence
  Synthetic Polynucleotide
atggctgccgatggttatcttccagattggctcgaggacactctctctgaaggaataagacagtggtggaagctcaaacctggcccaccaccgccaaagcccgcagagcggcataaggacgacagcaggggtcttgtgcttcctgggtacaagtacctcggacccttcaacggactcgacaagggagagccggtcaacgaggcagacgccgcggccctcgagcacgacaaggcctacgaccggcagctcgacagcggagacaacccgtacctcaagtacaaccacgccgacgcggagtttcaggagcgccttaaagaagatacgtcttttgggggcaacctcggacgagcagtattccaggcgaaaaagagggttcttgaacctctgggcctggttgaggagcctgttaagacggctccgggaaaaaagaggccggtagagcactctcctgtggagccagactcctcctcgggaaccggaaaagcgggccagcagcctgcgagaaagagattgaattttggtcagactggagacgcagactccgtacctgacccccagcctctcggacagccaccagcagcccccacaagtttgggatctactacaatggctacaggcagtggcgcaccaatggcagacaataacgagggtgccgatggagtgggtaattcctcaggaaattggcattgcgattcccaatggttgggcgacagagtcatcaccaccagcacccgaacctgggccctgcccacctacaacaaccacctctacaagcaaatctccagccaatcaggagccagcaacgacaaccactactttggctacagcaccccctgggggtattttgacttcaacagattccactgccacttttcaccacgtgactggcaaagactcatcaacaacaactggggattccgacccaagagactcaacttcaagctctttaacattcaagtcaaagaggtcacgcagaatgacggtacgacgacgattgccaataaccttaccggcacggttcaggtgtttactgactcggagtaccagctcccgtacgtcctcggctcggcgcatcaaggatgcctcccgccgtttccagcggacgtcttcatggtcccacagtatggatacctcaccctgaacaacgggagtcaggcggtaggacgctcttccttttactgcctggagtactttccttctcagatgcttcgtaccggaaacaactttaccttcagttacacctttgaagacgttcctttccacagcagctacgctcacagtcaaagtctggaccggctgatgaatcctcttatcgaccagtacctgtattatctaaacaaaacacaatcaaatagtggaactcttcagcagtctcggctactgtttagtcaagctggacctaccagcatgtctcttcaagctaaaaactggctgcctggaccttgctacagacaacagcgtctgtcaaagcaggcaaacgacaacaacaacagcaactttccctggactgcggctacaaagtatcatctaaatggccgggactcgttggttaatccaggaccagctatggccagccacaaagacgatgaagaaaagtttttccccatgcatggaaccctgatatttggcaaacaaggaacaaatgctaacgacgcggatttggacaatgtcatgattacagatgaagaagaaatccgtaccaccaatcccgtggctacggagcagtacgggactgtgtcaaataatttgcaaaactcaaatactggtccaactactggaactgtcaatcaccaaggagcgttacctggtatggtgtggcaggatcgagacgtgtaccttcagggacccatttgggccaagattcctcacaccgatggacactttcacccttctccgctgatgggaggttttggactcaaacacccgcctcctcagatcatgatcaaaaacactcccgttccagccaatcctcccacaaacttcagttctgccaagtttgcttctttcatcacacagtattccacgggacaggttagcgtggagatcgagtgggagctgcagaaggagaacagcaaacgctggaaccccgagatccagtacacttccaactacaacaagtctgttaatgtggactttactgtggacactaatggtgtgtattcagagcctcgccccattggcaccagatacctgactcgtaatctgtaa

SEQ ID NO: 1418 - DNA, 2208 bp, Artificial Sequence
  Synthetic Polynucleotide
atggctgccgatggttatcttccagattggctcgaggacactctctctgaaggaataagacagtggtggaagctcaaacctggcccaccaccgccaaagcccgcagagcggcataaggacgacagcaggggtcttgtgcttcctgggtacaagtacctcggacccttcaacggactcgacaagggagagccggtcaacgaggcagacgccgcggccctcgagcacgacaaggcctacgaccggcagctcgacagcggagacaacccgtacctcaagtacaaccacgccgacgcggagtttcaggagcgccttaaagaagatacgtcttttgggggcaacctcggacgagcagtattccaggcgaaaaagagggttcttgaacctctgggcctggctgaggagcctgttaagacggctccgggaaaaaagaggccggtagagcactctcctgtggagccagactcctcctcgggaaccggaaaagcgggccagcagcctgcgagaaagagattgaattttggtcagactggagacgcagactccgtacctgacccccagcctctcggacagccaccagcagcccccacaagtttgggatctactacaatggctacaggcagtggcgcaccaatggcagacaataacgagggtgccgatggagtgggtaattcctcaggaaattggcattgcgattcccaatggttgggcgacagagtcatcaccaccagcacccgaacctgggccctgcccacctacaacaaccacctctacaagcaaatctccagccaatcaggagccagcaacgacaaccactactttggctacagcaccccctgggggtattttgacttcaacagattccactgccacttttcaccacgtgactggcaaagactcatcaacaacaactggggattccgacccaagagactcaacttcaagctctttaacattcaagtcaaagaggtcacgcagaatgacggtacgacgacgattgccaataaccttaccagcacggttcaggtgtttactgactcggagtaccagctcccgtacgtcctcggctcggcgcatcaaggatgcctcccgccgtttccagcggacgtcttcatggtcccacagtatggatacctcaccctgaacaacgggagtcaggcggtaggacgctcttccttttactgcctggagtactttccttctcagatgcttcgtaccggaaacaactttaccttcagttacacctttgaagacgttcctttccacagcagctacgctcacagtcaaagtctggaccggctgatgaatcctcttatcgaccagtacctgtattatctaaacaaaacacaatcaaatagtggaactcttcagcagtctcggctactgtttagtcaagctggacctaccagcatgtctcttcaagctaaaaactggctgcctggaccttgctacagacaacagcgtctgtcaaagcaggcaaacgacaacaacaacagcaactttccctggactgcggctacaaagtatcatctaaatggccgggactcgttggttaatccaggaccagctatggccagccacaaagacgatgaagaaaagtttttccccatgcatggaaccctgatatttggcaaacaaggaacaaatgctaacgacgcggatttggacaatgtcatgattacagatgaagaagaaatccgtaccaccaatcccgtggctacggagcagtacgggactgtgtcaaataatttgcaaaactcaaatactggtccaactactggaactgtcaatcaccaaggagcgttacctggtatggtgtggcaggatcgagacgtgtaccttcagggacccatttgggccaagattcctcacaccgatggacactttcacccttctccgctgatgggaggttttggactcaaacacccgcctcctcagatcatgatcaaaaacactcccgttccagccaatcctcccacaaacttcagttctgccaagtttgcttctttcatcacacagtattccacgggacaggttagcgtggagatcgagtgggagctgcagaaggagaacagcaaacgctggaaccccgagatccagtacacttccaactacaacaagtctgttaatgtggactttactgtggacactaatggtgtgtattcagagcctcgccccattggcaccagatacctgactcgtaatctgtaa

SEQ ID NO: 1419 - DNA, 2208 bp, Artificial Sequence; identical to SEQ ID NO: 1348
  Synthetic Polynucleotide

SEQ ID NO: 1420 - DNA, 2208 bp, Artificial Sequence
  Synthetic Polynucleotide
atggctgccgatggttatcttccagattggctcgaggacactctctctgaaggaataagacagtggtggaagctcaaacctggcccaccaccaccaaggcccgcagagcggcatcaggacgacagcaggggtcttgtgcttcctgggtacaagtacctcggacccttcaacggactcgacaaaggagagccggtcaacgaggcagacgctgcggccctcgagcacgacaaggcctacgaccggcagctcgacagcggagacaacccgtacctcaagtacaaccacgccgacgcggagtttcaggagcgtcttaaagaagatacgtcttttgggggcaacctcggacgagcagtcttccaggcgaaaaagagggttcttgaacctctgggcctggttgaggaacctgttaagacggctccgggaaaaaagaggccggtagagcactctcctgcggagccagactcctcctcgggaaccggaaaagcgggccagcagcctgcaagaaagagattgaatttcggtcagactggagacgcagactccgtacctgacccccagcctctcggacagccaccagcagcccccacaagtttgggatctactacaatggctacaggcagtggcgcaccaatggcagacaataacgagggtgccgatggagtgggtaattcctcaggaaattggcattgcgattcccaatggctgggcgacagagtcatcaccaccagcacccgaacctgggccctgcccacctacaacaaccacctctacaagcaaatctccagccaatcaggagcatcgaacgacaaccactactttggctacagcaccccttgggggtattttgacttcaacagattccactgtcacttctccccacgtgactggcaaagactcatcaacaacaactggggattccgacccaagagactcaacttcaagctctttaacattcaagtcaaagaggtcacgcagaatgacggtacgacgacgattgccaataaccttaccagcacggttcaggtgtttactgactcggagtaccagctcccgtacgtcctcggctcggcgcatcaaggatgcctcccgccgtttccagcggacgtcttcatggtcccacagtatggatacctcaccctgaacaacgggagtcaggcggtaggacgctcttccttttactgcctggagtactttccttctcagatgctgcgtaccggaaacaactttaccttcagctacacctttgaggacgtgcccttccacagcagctacgctcacagccagagtttggaccggctgatgaatcctctgatcgaccagtatctgtattatctgaacaggacacaatcaaatagtggaactcttcagcagtctaggctactgtttagccaagctggacccaccagcatgtcccttcaagctaaaaactggctgcctggaccttgctacagacagcagcgtctgtcaaagcaggcaaacgacaacaacaacagcaactttccctggactgcggctacaaagtatcatctaaatggtcgggactcgttggttaatccaggaccagctatggccagccacaaagacgatgaagaaaagtttttccccatgcatggaaccctgatatttggtaaacaaggaacaaatgctaacgacgcggatttggaacatgtcatgattacaggtgaagaagaaatcaggaccaccaatcccgtggctacagagcagtacggaaacgtgtcaaataatttgcaaaactcaaatactggtccaactacagaaaatgtcaatcaccagggagcgttacctggtatggtgtggcaggatcgagacgtgtacctgcagggacccatttgggccaagattcctcacaccgacggacactttcacccttctccactgatgggaggttttggactcaaacacccgcctcctcaaatcatgatcaaaaacactcctgttccagccaatcctcctacaaacttcagcgcggcaaagtttgcttccttcatcacacagtattccacgggacaggtcagcgtggagatcgagtgggagctgcagaaggagaacagcaaacgctggaaccccgagatccagtacacttccaactacaacaaatctgttaatgtggactttactgtggacgctaatggtgtgtattcagagcctcgccccattggcaccagatacctgactcgtaatctgtaa

SEQ ID NO: 1421 - DNA, 2208 bp, Artificial Sequence
  Synthetic Polynucleotide
atggctgccgatggttatcttccagattggctcgaggacactctctctgaaggaataagacagtggtggaagctcaaacctggcccaccaccaccaaggcccgcagagcggcatcaggacgacagcaggggtcttgtgcttcctgggtacaagtacctcggacccttcaacggactcgacaaaggagagccggtcaacgaggcagacgctgcggccctcgagcacgacaaggcctacgaccggcagctcgacagcggagacaacccgtacctcaagtacaaccacgccgacgcggagtttcaggagcgtcttaaagaagatacgtcttttgggggcaacctcggacgagcagtcttccaggcgaaaaagagggttcttgaacctctgggcctggttgaggaacctgttaagacggctccgggaaaaaagaggccggtagagcactctcctgcggagccagactcctcctcgggaaccggaaaagcgggccagcagcctgcaagaaagagattgaatttcggtcagactggagacgcagactccgtacctgacccccagcctctcggacagccaccagcagcccccacaagtttgggatctactacaatggctacaggcagtggcgcaccaatggcagacaataacgagggtgccgatggagtgggtaattcctcaggaaattggcattgcgattcccaatggctgggcgacagagtcatcaccaccagcacccgaacctgggccctgcccacctacaacaaccacctctacaagcaaatctccagccaatcaggagcatcgaacgacaaccactactttggctacagcaccccyttggggtattttgacttcaacagattccactgtcacttctccccacgtgactggcaaagactcatcaacaacaactggggattccgacccaagagactcaacttcaagctctttaacattcaagtcaaagaggtcacgcagaatgacggtacgacgacgattgccaataaccttaccagcacggttcaggtgtttactgactcggagtaccagctcccgtacgtcctcggctcggcgcatcaaggatgcctcccgccgtttccagcggacgtcttcatggtcccacagtatggatacctcaccctgaacaacgggagtcaggcggtaggacgctcttccttttactgcctggagtactttccttctcagatgctgcgtaccggaaacaactttaccttcagctacacctttgaggacgtgcccttccacagcagctacgctcacagccagagtttggaccggctgatgaatcctctgatcgaccagtatctgtattatctgaacaggacacaatcaaatagtggaactcttcagcagtctaggctactgtttagccaagctggacccaccagcatgtcccttcaagctaaaaactggctgcctggaccttgctacagacagcagcgtctgtcaaagcaggcaaacgacaacaacaacagcaactttccctggactgcggctacaaagtatcatctaaatggtcgggactcgttggttaatccaggaccagctatggccagccacaaagacgatgaagaaaagtttttccccatgcatggaaccctgatatttggtaaacaaggaacaaatgctaacgacacggatttggaacatgtcatgattacagatgaagaagaaatcaggaccaccaatcccgtggctacagagcagtacggaaacgtgtcaaataatttgcaaaactcaaatactggtccaactacagaaaatgtcaatcaccagggagcgttacctggtatggtgtggcaggatcgagacgtgtacctgcagggacccatttgggccaagattcctcacaccgacggacactttcacccttctccactgatgggaggttttggactcaaacacccgcctcctcaaatcatgatcaaaaacactcctgttccagccaatcctcctacaaacttcagcgcggcaaagtttgcttccttcatcacacagtattccacgggacaggtcagcgtggagatcgagtgggagctgcagaaggagaacagcaaacgctggaaccccgagatccagtacacttccaactacaacaaatctgttaatgtggactttactgtggacgctaatggtgtgtattcagagcctcgccccattggcaccagatacctgactcgtaatctgtaa

SEQ ID NO: 1422 - DNA, 2208 bp, Artificial Sequence
  Synthetic Polynucleotide
atggctgccgatggttatcttccagattggctcgaggacactctctctgaaggaataagacagtggtggaagctcaaacctggcccaccaccaccaaggcccgcagagcggcatcaggacgacagcaggggtcttgtgcttcctgggtacaagtacctcggacccttcaacggactcgacaaaggagagccggtcaacgaggcagacgctgcggccctcgagcacgacaaggcctacgaccggcagctcgacagcggagacaacccgtacctcaagtacaaccacgccgacgcggagtttcaggagcgtcttaaagaagatacgtcttttgggggcaacctcggacgagcagtcttccaggcgaaaaagagggttcttgaacctctgggcctggttgaggaacctgttaagacggctccgggaaaaaagaggccggtagagcactctcctgcggagccagactcctcctcgggaaccggaaaagcgggccagcagcctgcaagaaagagattgaatttcggtcagactggagacgcagactccgtacctgacccccagcctctcggacagccaccagcagcccccacaagtttgggatctactacaatggctacaggcagtggcgcaccaatggcagacaataacgagggtgccgatggagtgggtaattcctcaggaaattggcattgcgattcccaatggctgggcgacagagtcatcaccaccagcacccgaacctgggccctgcccacctacaacaaccacctctacaagcaaatctccagccaatcaggagcatcgaacgacaaccactactttggctacagcaccccttgggggtattttgacttcaacagattccactgtcacttctccccacgtgactggcaaagactcatcaacaacaactggggattccgacccaagagactcaacttcaagctctttaacattcaagtcaaagaggtcacgcagaatgacggtacgacgacgattgccaataaccttaccagcacggttcaggtgtttactgactcggagtaccagctcccgtacgtcctcggctcggcgcatcaaggatgcctcccgccgtttccagcggacgtcttcatggtcccacagtatggatacctcaccctgaacaacgggagtcaggcggtaggacgctcttccttttactgcctggagtactttccttctcagatgctgcgtaccggaaacaactttaccttcagctacacctttgaggacgtgcccttccacagcagctacgctcacagccagagtttggaccggctgatgaatcctctgatcgaccagtatctgtattatctgaacaggacacaatcaaatagtggaactcttcagcagtctaggctactgtttagccaagctggacccaccagcatgtcccttcaagctaaaaactggctgcctggaccttgctacagacagcagcgtctgtcaaagcaggcaaacgacaacaacaacagcaactttccctggactgcggctacaaagtatcatctaaatggtcgggactcgttggttaatccaggaccagctatggccagccacaaagacgatgaagaaaagtttttccccatgcatggaaccctgatatttggtaaacaaggaacaaatgctaacgacgcggatttggaacgtgtcatgattacagatgaagaagaaatcaggaccaccaatcccgtggctacagagcagtacggaaacgtgtcaaataatttgcaaaactcaaatactggtccaactacagaaaatgtcaatcaccagggagcgttacctggtatggtgtggcaggatcgagacgtgtacctgcagggacccatttgggccaagattcctcacgccgacggacactttcacccttctccactgatgggaggttttggactcaaacacccgcctcctcaaatcatgatcaaaaacactcctgttccagccaatcctcctacaaacttcagcgcggcaaagtttgcttccttcatcacacagtattccacgggacaggtcagcgtggagatcgagtgggagctgcagaaggagaacagcaaacgctggaaccccgagatccagtacacttccaactacaacaaatctgttaatgtggactttactgtggacgctaatggtgtgtattcagagcctcgccccattggcaccagatacctgactcgtaatctgtaa

SEQ ID NO: 1423 - DNA, 2208 bp, Artificial Sequence
  Synthetic Polynucleotide
atggctgccgatggttatcttccagattggctcgaggacactctctctgaaggaataagacagtggtggaagctcaaacctggcccaccaccaccaaggcccgcagagcggcatcaggacgacagcaggggtcttgtgcttcctgggtacaagtacctcggacccttcaacggactcgacaaaggagagccggtcaacgaggcagacgctgcggccctcgagcacgacaaggcctacgaccggcagctcgacagcggagacaacccgtacctcaagtacaaccacgccgacgcggagtttcaggagcgtcttaaagaagatacgtcttttgggggcaacctcggacgagcagtcttccaggcgaaaaagagggttcttgaacctctgggcctggttgaggaacctgttaagacggctccgggaaaaaagaggccggtagagcactctcctgcggagccagactcctcctcgggaaccggaaaagcgggccagcagcctgcaagaaagagattgaatttcggtcagactggagacgcagactccgtacctgacccccagcctctcggacagccaccagcagcccccacaagtttgggatctactacaatggcaacaggcagtggcgcaccaatggcagacaataacgagggtgccgatggagtgggtaattcctcaggaaattggcattgcgattcccaatggctgggcgacagagtcatcaccaccagcacccgaacctgggccctgcccacctacaacaaccacctctacaagcaaatctccagccaatcaggagcatcgaacgacaaccactactttggctacagcaccccttgggggtattttgacttcaacagattccactgtcacttctccccacgtgactggcaaagactcatcaacaacaactggggattccgacccaagagactcaacttcaagctctttaacattcaagtcaaagaggtcacgcagaatgacggtacgacgacgattgccaataaccttaccagcacggttcaggtgtttactgactcggagtaccagctcccgtacgtcctcggctcggcgcatcaaggatgcctcccgccgtttccagcggacgtcttcatggtcccacagtatggatacctcaccctgaacaacgggagtcaggcggtaggacgctcttccttttactgcctggagtactttccttctcagatgctgcgtaccggaaacaactttaccttcagctacacctttgaggacgtgcccttccacagcagctacgctcacagccagagtttggaccggctgatgaatcctctgatcgaccagtatctgtattatctgaacaggacacaatcaaatagtggaactcttcagcagtctaggctactgtttagccaagctggacccaccagcatgtcccttcaagctaaaaactggctgcctggaccttgctacagacagcagcgtctgtcaaagcaggcaaacgacaacaacaacagcaactttccctggactgcggctacaaagtatcatctaaatggtcgggactcgttggttaatccaggaccagctatggccagccacaaagacgatgaagaaaagtttttccccatgcatggaaccctgatatttggtaaacaaggaacaaatgctaacgacgcggatttggaacatgtcatgattacagatgaagaagaaatcaggaccaccaatcccgtggctacagagcagtacggaaacgtgtcaaataatttgcaaaactcaaatactggtccaactacagaaaatgtcaatcaccagggagcgttacctggtatggtgtggcaggatcgagacgtgtacctgcagggacccatttgggccaagattcctcacaccgacggacactttcacccttctccactgatgggaggttttggactcaaacacccgcctcctcaaatcatgatcaaaaacactcctgttccagccaatcctcctacaaacttcagcgcggcaaagtttgcttccttcatcacacggtattccacgggacaggtcagcgcggagatcgagtgggagctgcagaaggagaacagcaaacgctggaaccccgagatccagtacacttccaactacaacaaatctgttaatgtggactttactgtggacgctaatggtgtgtattcagagcctcgccccattggcaccagatacctgactcgtaatctgtaa

SEQ ID NO: 1424 - DNA, 2208 bp, Artificial Sequence
  Synthetic Polynucleotide
atggctgccgatggttatcttccagattggctcgaggacattctctctgaaggaataagacagtggtggaagctcaaacctggcccaccaccaccaaagcccgcagagcggcataaggacgacagcaggggtcttgtgcttcctgggtacaagtacctcggacccttcaacggactcgacaaaggagagccggtcaacgaggcagacgccgcggccctcgagcacgacaaggcctacgaccggcagctcgacagcggagacaacccgtacctcaagtacaaccacgccgacgcggagtttcaggagcgtcttaaagaagatacgtcttttgggggcaacctcggacgagcagtcttccaggcaaaaaagagggttcttgaacctctgggcctggttgaggaacctgttaagacggctccgggaaaaaagaggccggtagagcaatctcctgcggagccagactcctcctcgggaaccggaaaggcgggcaaccagcctgcaagaaagagattgaattttggtcagactggagacgcagactccgtacctgacccccagcctctcggacagccaccagcagccccctctggtctgggatctactacaatggctacaggcagtggcgcaccaatggcagacaataacgagggtgccgatggagtgggtaattcctcaggaaattggcattgcgattcccaatggttgggcgacagagtcatcaccaccagcacccgaacctgggccctgcccacctacaacaatcacctctacaagcaaatctccagccaatcaggagcagcgaacgacaaccactactttggctacagcaccccctgggggtattttgacttcaacagattccactgccacttttcaccacgtgactggcaaagactcatcaacaacaactggggattccgacccaaaagactcaacttcaagctctttaacattcaagtcaaagaggtcacgcagaatgacggtacgacgacgattgccaataaccttaccagcacggttcaggtgtttactgactcggagtaccagctcccgtacgtcctcggctcggcgcatcaaggatgcctcccgccgtttccagcggacgtcttcatggtcccacagtatggatacctcaccctgaacaacgggagtcaggcggtaggacgctcttccttttactgcctggagtactttccttctcagatgcttcgtaccggaaacaactttaccttcagttacacctttgaagacgttcctttccacagcagctacgctcacagtcaaagtctggaccggctgatgaatcctctgatagaccagtacctgcattatctaaacaaaacacaatcaaatagtggaactcttcagcagtctcggctactgtttagtcaagctggacccaccagcatgtctcttcaagctaaaaactggctgcctggaccttgctacagacaacagcgtctgtcaaagcaggcaaacgacaacaacaacagcaactttccctggactgcggctacaaagtatcatctaaatggccgggactcgttggttaatccaggaccagctatggccagccacaaagacgatgaagaaaagtttttccccatgcatggaaccctgatatttggtaaacaaggaacaaatgctaacgacgcggatttggacaatgtcatgattacagatgaagaagaaatccgcaccaccaatcccgtggctacggagcagtacgggactgtgtcaaataatttgcaaaactcaaatactggtccaactactggaactgtcaatcaccaaggagcgttacctggtatggtgtggcaggatcgagacgtgtaccttcagggacccatttgggccaagattcctcacaccgatggacactttcatccttctccactgatgggaggttttggactcaaacacccgcctcctcagatcatgatcaaaaacactcccgttccagccaatcctcctacaaacttcagttctgccaagtttgcttctttcatcacacagtattccacggggcaggtcagcgtggagatagagtgggagctgcagaaggagaacagcaaacgctggaaccccgagatccagtatacttccaactacaacaagtctgttaatgtggactttactgtggacactaatggtgtgtattcagagcctcgccccattggcaccagatacctgactcgtaatctgtaa

SEQ ID NO: 1425 - DNA, 2208 bp, Artificial Sequence
  Synthetic Polynucleotide
atggctgccgatggttatcttccagattggctcgaggacactctctctgaaggaataagacagtggtggaagctcaaacctggcccaccaccaccaaggcccgcagagcggcatcaggacgacagcaggggtcttgtgcttcctgggtacaagtacctcggacccttcaacggactcgacaaaggagagccggtcaacgaggcagacgctgcggccctcgagcacgacaaggcctacgaccggcagctcgacagcggagacaacccgtacctcaagtacaaccacgccgacgcggagtttcaggagcgtcttaaagaagatacgtcttttgggggcaacctcggacgagcagtcttccaggcgaaaaagagggttcttgaacctctgggcctggttgaggaacctgttaagacggctccgggaaaaaagaggccggtagagcactctcctgcggagccagactcctcctcgggaaccggaaaagcgggccagcagcctgcaagaaagagattgaatttcggtcagactggagacgcagactccgtacctgacccccagcctctcggacagccaccagcagcccccacaagtttgggatctactacaatggctacaggcagtggcgcaccaatggcagacaataacgagggtgccgatggagtgggtaattcctcaggaaattggcattgcgattcccaatggctgggcgacagagtcatcaccaccagcacccgaacctgggccctgcccacctacaacaaccacctctacaagcaaatctccagccaatcaggagcatcgaacgacaaccactactttggctacagcaccccttgggggtattttgacttcaacagattccactgtcacttctccccacgtgactggcaaagactcatcaacaacaactggggattccgacccaagagactcaacttcaagctctttaacattcaagtcaaagaggtcacgcagaatgacggtacgacgacgattgccaataaccttaccagcacggttcaggtgtttactgactcggagtaccagctcccgtacgtcctcggctcggcgcatcaaggatgcctcccgccgtttccagcggacgtcttcatggtcccacagtatggatacctcaccctgaacaacgggagtcaggcggtaggacgctcttccttttactgcctggagtactttccttctcagatgctgcgtaccggaaacaactttaccttcagctacacctttgaggacgtgcccttccacagcagctacgctcacagccagagtttggaccggctgatgaatcctctgatcgaccagtatctgtattatctgaacaggacacaatcaaatagtggaactcttcagcagtctaggctactgtttagccaagctggacccaccagcatgtcccttcaagctaaaaactggctgcctggaccttgctacagacagcagcgtctgtcaaagcaggcaaacgacaacaacaacagcaactttccctggactgcggctacaaagtatcatctaaatggtcgggactcgttggttaatccaggaccagctatggccagccacaaagacgatgaagaaaagtttttccccatgcatggaaccctgatatttggtaaacaaggaacaaatgctaacgacgcggatttggaacatgtcatgattacagatgaagaagaaatcaggaccaccaatcccgtggctacagagcagtacggaaacgtgtcaaataatttgcaaaactcaaatactggtccgactacagaaaatgtcaatcgccagggagcgttacctggtatggtgtggcaggatcgagacgtgtacctgcagggacccatttgggccaagattcctcacaccgacggacactttcacccttctccactgatgggaggttttggactcaaacacccgcctcctcaaatcatgatcaaaaacactcctgttccagccaatcctcctacaaacttcagcgcggcaaagtttgcttccttcatcacacagtattccacgggacaggtcagcgtggagatcgagtgggagctgcagaaggagaacagcaaacgctggaaccccgagatccagtacacttccaactacaacaaatctgttaatgtggactttactgtggacgctaatggtgtgtattcagagcctcgccccattggcaccagatacctgactcgtaatctgtaa

SEQ ID NO: 1426 - DNA, 2208 bp, Artificial Sequence
  Synthetic Polynucleotide
atggctgccgatggttatcttccagattggctcgaggacactctctctgaaggaataagacagtggtggaagctcaaacctggcccaccaccaccaaggcccgcagagcggcatcaggacgacagcaggggtcttgtgcttcctgggtacaagtacctcggacccttcaacggactcgacaaaggagagccggtcaacgaggcagacgctgcggccctcgagcacgacaaggcctacgaccggcagctcgacagcggagacaacccgtacctcaagtacaaccacgccgacgcggagtttcaggagcgtcttaaagaagatacgtcttttgggggcaacctcggacgagcagtcttccaggcgaaaaagagggttcttgaacctctgggcctggttgaggaacctgttaagacggctccgggaaaaaagaggccggtagagcactctcctgcggagccagactcctcctcgggaaccggaaaagcgggccagcagcctgcaagaaagagattgaatttcggtcagactggagacgcagactccgtacctgacccccagcctctcggacagccaccagcagcccccacaagtttgggatctactacaatggctacaggcagtggcgcaccaatggcagacaataacgagggtgccgatggagtgggtaattcctcaggaaattggcattgcgattcccaatggctgggcgacagagtcatcaccaccagcacccgaacctgggccctgcccacctacaacaaccacctctacaagcaaatctccagccaatcaggagcatcgaacgacaaccactactttggctacagcaccccttgggggtattttgacttcaacagattccactgtcacttctccccacgtgactggcaaagactcatcaacaacaactggggattccgacccaagagactcaacttcaagctctttaacattcaagtcaaagaggtcacgcagaatgacggtacgacgacgattgccaataaccttaccagcacggttcaggtgtttactgactcggagtaccagctcccgtacgtcctcggctcggcgcatcaaggatgcctcccgccgtttccagcggacgtcttcatggtcccacagtatggatacctcaccctgaacaacgggagtcaggcggtaggacgctcttccttttactgcctggagtactttccttctcagatgctgcgtaccggaaacaactttaccttcagctacacctttgaggacgtgcccttccacagcagctacgctcacagccagagtttggaccggctgatgaatcctctgatcgaccagtatctgtattatctgaacaggacacaatcaaatagtggaactcttcagcagtctaggctactgtttagccaagctgcacccaccagcatgtcccttcaagctaaaaactggctgcctggaccttgctacagacagcagcgtctgtcaaagcaggcaaacgacaacaacaacagcaactttccctggactgcggctacaaagtatcatctaaatggtcgggactcgttggttaatccaggaccagctatggccagccacaaagacgatgaagaaaagtttttccccatgcatggaaccctgatatttggtaaacaaggaacaaatgctaacgacacggatttggaacatgtcatgattacagatgaagaagaaatcaggaccaccaatcccgtggctacagagcagtacggaaacgtgtcaaataatttgcaaaactcaaatactggtccaactacagaaaatgtcaatcaccagggagcgttacctggtatggtgtggcaggatcgagacgtgtacctgcagggacccatttgggccaagattcctcacaccgacggacactttcacccttctccactgatgggaggttttggactcaaacacccgcctcctcaaatcatgatcaaaaacactcctgttccagccaatcctcctacaaacttcagcgcggcaaagtttgcttccttcatcacacagtattccacgggacaggtcagcgtggagatcgagtgggagctgcagaaggagaacagcaaacgctggaaccccgagatccagtacacttccaactacaacaaatctgttaatgtggactttactgtggacgctaatggtgtgtattcagagcctcgccccattggcaccagatacctgactcgtaatctgtaa

SEQ ID NO: 1427 - DNA, 2208 bp, Artificial Sequence
  Synthetic Polynucleotide
atggctgccgatggttatcttccagattggctcgaggacattctctctgaaggaataagacagtggtggaagctcaaacctggcccaccaccaccaaagcccgcagagcggcataaggacgacagcaggggtcttgtgcttcctgggtacaagtacctcggacccttcaacggactcgacaaaggagagccggtcaacgaggcagacgccgcggccctcgagcacgacaaggcctacgaccggcagctcgacagcggagacaacccgtacctcaagtacaaccacgccgacgcggagtttcaggagcgtcttaaagaagatacgtcttttgggggcaacctcggacgagcagtcttccaggcaaaaaagagggttcttgaacctctgggcctggttgaggaacctgttaagacggctccgggaaaaaagaggccggtagagcaatctcctgcggagccagactcctcctcgggaaccggaaaggcgggcaaccagcctgcaagaaagagattgaattttggtcagactggagacgcagactccgtacctgacccccagcctctcggacagccaccagcagccccctctggtctgggatctactacaatggctacaggcagtggcgcaccaatggcagacaataacgagggtgccgatggagtgggtaattcctcaggaaattggcattgcgattcccaatggttgggcgacagagtcatcaccaccagcacccgaacctgggccctgcccacctacaacaatcacctctacaagcaaatctccagccaatcaggagcagcgaacgacaaccactactttggctacagcaccccctgggggtattttgacttcaacagattccactgccacttttcaccacgtgactggcaaagactcatcaacaacaactggggattccgacccaaaagactcaacttcaagctctttaacattcaagtcaaagaggtcacgcagaatgacggtacgacgacgattgccaataaccttaccagcacggttcaggtgtttactgactcggagtaccagctcccgtacgtcctcggctcggcgcatcaaggatgcctcccgccgtttccagcggacgtcttcatggtcccacagtatggatacctcaccctgaacaacgggagtcaggcggtaggacgctcttccttttactgcctggagtactttccttctcagatgcttcgtaccggaaacaactttaccttcagttacacctttgaagacgttcctttccacagcagctacgctcacagtcaaagtctggaccggctgatgaatcctctgatagaccagtacctgtattatctaaacaaaacacaatcaaatagtggaactcttcagcagtctcggctactgtttagtcaagctggacccaccagcatgtctcttcaagctaaaaactggctgcctggaccttgctacagacaacagcgtctgtcaaagcaggcaaacgacaacaacaacagcaactttccctggactgcggctacaaagtatcatctaaatggccgggactcgttggttaatccaggaccagctatggccagccacaaagacgatgaagaaaagtttttccccatgcatggaaccctgatatttggtaaacaaggaacaaatgctaacgacgcggatttggacaatgtcatgattacagatgaagaagaaatccgcaccaccaatcccgtggctacggagcagtacgggactgtgtcaaataatttgcaaaactcaaatactggtccaactactggaactgtcaatcaccaaggagcgttacctggtatggtgtggcaggatcgagacgtgtaccttcagggacccatttgggccaagattcctcacaccgatggacactttcatccttctccactgatgggaggttttggactcaaacacccgcctcctcagatcatgatcaaaaacactcccgttccagccaatcctcctacaaacttcagttctgccaagtttgcttctttcgtcacacagtattccacggggcaggtcagcgtggagatagagtgggagctgcagaaggagaacagcaaacgctggaaccccgagatccagtatacttccaactacaacaagtctgttaatgtggactttactgtggacactaatggtgtgtattcagagcctcgccccattggcaccagatacctgactcgtaatctgtaa

SEQ ID NO: 1428 - DNA, 2208 bp, Artificial Sequence
  Synthetic Polynucleotide
atggctgccgatggttatcttccagattggctcgaggacactctctctgaaggaataagacagtggtggaagctcaaacctggcccaccaccaccaaggcccgcagagcggcatcaggacgacagcaggggtcttgtgcttcctgggtacaagtacctcggacccttcaacggactcgacaaaggagagccggtcaacgaggcagacgctgcggccctcgagcacgacaaggcctacgaccggcagctcgacagcggagacaacccgtacctcaagtacaaccacgccgacgcggagtttcaggagcgtcttaaagaagatacgtcttttgggggcaacctcggacgagcagtcttccaggcgaaaaagagggttcttgaacctctgggcctggttgaggaacctgttaagacggctccgggaaaaaagaggccggtagagcactctcctgcggagccagactcctcctcgggaaccggaaaagcgggccagcagcctgcaagaaagagattgaatttcggtcagactggagacgcagactccgtacctgacccccagcctctcggacagccaccagcagcccccacaagtttgggatctactacaatggctacaggcagtggcgcaccaatggcagacaataacgagggtgccgatggagtgggtaattcctcaggaaattggcattgcgattcccaatggctgggcgacagagtcatcaccaccagcacccgaacctgggccctgcccacctacaacaaccacctctacaagcaaatctccagccaatcaggagcatcgaacgacaaccactactttggctacagcaccccttgggggtattttgacttcaacagattccactgtcacttctccccacgtgactggcaaagactcatcaacaacaactggggattccgacccaagagactcaacttcaagctctttaacattcaagtcaaagaggtcacgcagaatgacggtacgacgacgattgccaataaccttaccagcacggttcaggtgtttactgactcggagtaccagctcccgtacgccctcggctcggcgcatcaaggatgcctcccgccgtttccagcggacgtcttcatggtcccacagtatggatacctcaccctgaacaacgggagtcaggcggtaggacgctcttccttttactgcctggagtactttccttctcagatgctgcgtaccggaaacaactttaccttcagctacacctttgaggacgtgcccttccatagcagctacgctcacagccagagtttggaccggctgatgaatcctctgatcgaccagtatctgtattatctgaacaggacacaatcaaatagtggaactcttcagcagtctaggctactgtttagccaagctggacccaccagcatgtcccttcaagctaaaaactggctgcctggaccttgctacagacagcagcgtctgtcaaagcaggcaaacgacaacaacaacagcaactttccctggactgcggctacaaagtatcatctaaatggtcgggactcgttggttaatccaggaccagctatggccagccacaaagacgatgaagaaaagtttttccccatgcatggaaccctgatatttggtaaacaaggaacaaatgctaacgacacggatttggaacatgtcatgattacagatgaagaagaaatcaggaccaccaatcccgtggctacagagcagtacggaaacgtgtcaaataatttgcaaaactcaaatactggtccaactacagaaaatgtcaatcaccagggagcgttacctggtatggtgtggcaggatcgagacgtgtacctgcagggacccatttgggccaagattcctcacaccgacggacactttcacccttctccactgatgggaggttttggactcaaacacccgcctcctcaaatcatgatcaaaaacactcctgttccagccaatcctcctacaaacttcagcgcggcaaagtttgcttccttcatcacacagtattccacgggacaggtcagcgtggagatcgagtgggagctgcagaaggagaacagcaaacgctggaaccccgagatccagtacacttccaactacaacaaatctgttaatgtggactttactgtggacgctaatggtgtgtattcagagcctcgccccattggcaccagatacctgactcgtaatctgtaa

SEQ ID NO: 1429 - DNA, 2208 bp, Artificial Sequence
  Synthetic Polynucleotide
atggctgccgatggttatcttccagattggctcgaggacattctctctgaaggaataagacagtggtggaagctcaaacctggcccaccaccaccaaagcccgcagagcggcataaggacgacagcaggggtcttgtgcttcctgggtacaagtacctcggacccttcaacggactcgacaaaggagagccggtcaacgaggcagacgccgcggccctcgagcacgacaaggcctacgaccggcagctcgacagcggagacaacccgtacctcaagtacaaccacgccgacgcggagtttcaggagcgtcttaaagaagatacgtcttttgggggcaacctcggacgagcagtcttccaggcaaaaaagagggttcttgaacctctgggcctggttgaggaacctgttaagacggctccgggaaaaaagaggccggtagagcaatctcctgcggagccagactcctcctcgggaaccggaaaggcgggcaaccagcctgcaagaaagagattgaattttggtcagactggagacgcagactccgtacctgacccccagcctctcggacagccaccagcagccccctctggtctgggatctactacaatggctacaggcagtggcgcaccaatggcagacaataacgagggtgccgatggggtgggtaattcctcaggaaattggcattgcgattcccaatggttgggcgacagagtcatcaccaccagcacccgaacctgggccctgcccacctacaacaatcacctctacaagcaaatctccagccaatcaggagcagcgaacgacaaccactactttggctacagcaccccctgggggtattttgacttcaacagattccactgccacttttcaccacgtgactggcaaagactcatcaacaacaactggggattccgacccaaaagactcaacttcaagctctttagcattcaagtcaaagaggtcacgcagaatgacggtacgacgacgattgccaataaccttaccagcacggttcaggtgtttactgactcggagtaccagctcccgtacgtcctcggctcggcgcatcaaggatgcctcccgccgtttccagcggacgtcttcatggtcccacagtatggatacctcaccctgaacaacgggagtcaggcggtaggacgctcttccttttactgcctggagtactttccttctcagatgcttcgtaccggaaacaactttaccttcagttacacctttgaagacgttcctttccacagcagctacgctcacagtcaaagtctggaccggctgatgaatcctctgatagaccagtacctgtattatctaaacaaaacacaatcaaatagtggaactcttcagcagtctcggctactgtttagtcaagctggacccaccagcatgtctcttcaagctaaaaactggctgcctggaccttgctacagacaacagcgtctgtcaaagcaggcaaacgacaacaacaacagcaactttccctggactgcggctacaaagtatcatctaaatggccgggactcgttggttaatccaggaccagctatggccagccacaaagacgatgaagaaaagtttttccccatgcatggaaccctgatatttggtaaacaaggaacaaatgctaacgacgcggatttggacaatgtcatgattacagatgaagaagaaatccgcaccaccaatcccgtggctacggagcagtacgggactgtgtcaaataatttgcaaaactcaaatactggtccaactactggaactgtcaatcaccaaggagcgttacctggtatggtgtggcaggatcgagacgtgtaccttcagggacccatttgggccaagattcctcacaccgatggacactttcatccttctccactgatgggaggttttggactcaaacacccgcctcctcagatcatgatcaaaaacactcccgttccagccaatcctcctacaaacttcagttctgccaagtttgcttctttcatcacacagtattccacggggcaggtcagcgtggagatagagtgggagctgcagaaggagaacagcaaacgctggaaccccgagatccagtatacttccaactacaacaagtctgttaatgtggactttactgtggacactaatggtgtgtattcagagcctcgccccattggcaccagatacctgactcgtaatctgtaa

SEQ ID NO: 1430 - DNA, 2208 bp, Artificial Sequence
  Synthetic Polynucleotide
atggctgccgatggttatcttccagattggctcgaggacactctctctgaaggaataagacagtggtggaagctcaaacctggcccaccaccaccaaggcccgcagagcggcatcaggacgacagcaggggtcttgtgcttcctgggtacaagtacctcggacccttcaacggactcgacaaaggagagccggtcaacgaggcagacgctgcggccctcgagcacgacaaggcctacgaccggcagctcgacagcggagacaacccgtacctcaagtacaaccacgccgacgcggagtttcaggagcgtcttaaagaagatacgtcttttgggggcaacctcggacgagcagtcttccaggcgaaaaagagggttcttgagcctctgggcctggttgaggaacctgttaagacggctccgggaaaaaagaggccggtagagcactctcctgcggagccagactcctcctcgggaaccggaaaagcgggccagcagcctgcaagaaagagattgaatttcggtcagactggagacgcagactccgtacctgacccccagcctctcggacagccaccagcagcccccacaagtttgggatctactacaatggctacaggcagtggcgcaccaatggcagacaataacgagggtgccgatggagtgggtaattcctcaggaaattggcattgcgattcccaatggctgggcgacagagtcatcaccaccagcacccgaacctgggccctgcccacctacaacaaccacctctacaagcaaatctccagccaatcaggagcatcgaacgacaaccactaccttggctacagcaccccttgggggtattttgacttcaacagattccactgtcacttctccccacgtgactggcaaagactcatcaacaacaactggggattccgacccaagagactcaacttcaagctctttaacattcaagtcaaagaggtcacgcagaatgacggtacgacgacgattgccaataaccttaccagcacggttcaggtgtttactgactcggagtaccagctcccgtacgtcctcggctcggcgcatcaaggatgcctcccgccgtttccagcggacgtcttcatggtcccacagtatggatacctcaccctgaacaacgggagtcaggcggtaggacgctcttccttttactgcctggagtactttccttctcagatgctgcgtaccggaaacaactttaccttcagctacacctttgaggacgtgcccttccacagcagctacgctcacagccagagtttggaccggctgatgaatcctctgatcgaccagtatctgtattatctgaacaggacacaatcaaatagtggaactcttcagcagtctaggctactgtttagccaagctgcacccaccagcatgtcccttcaagctaaaaactggctgcctggaccttgctacagacagcagcgtctgtcaaagcaggcaaacgacaacaacaacagcaactttccctggactgcggctacaaagtatcctctaaatggtcgggactcgttggttaatccaggaccagctatggccagccacaaagacgatgaagaaaagtttttccccatgcatggaaccctgatatttggtaaacaaggaacaaatgctaacgacacggatttggaacatgtcatgattacagatgaagaagaaatcaggaccaccaatcccgtggctacagagcagtacggaaacgtgtcaaataatttgcaaaactcaaatactggtccaactacagaaaatgtcaatcaccagggagcgttacctggtatggtgtggcaggatcgagacgtgtacctgcagggacccatttgggccaagattcctcacaccgacggacactttcacccttctccactgatgggaggttttggactcaaacacccgcctcctcaaatcatgatcaaaaacactcctgttccagccaatcctcctacaaacttcagcgcggcaaagtttgcttccttcatcacacagtattccacgggacaggtcagcgtggagatcgagtgggagctgcagaaggagaacagcaaacgctggaaccccgagatccagtacacttccaactacaacaaatctgttaatgtggactttactgtggacgctaatggtgtgtattcagagcctcgccccattggcaccagatacctgactcgtaatctgtaa

SEQ ID NO: 1431 - DNA, 2208 bp, Artificial Sequence
  Synthetic Polynucleotide
atggctgccgatggttatcttccagattggctcgaggacattctctctgaaggaataagacagtggtggaagctcaaacctggcccaccaccaccaaagcccgcagagcggcataaggacgacagcaggggtcttgtgcttcctgggtacaagtacctcggacccttcaacggactcgacaaaggagagccggtcaacgaggcagacgccgcggccctcgagcacgacaaggcctacgaccggcagctcgacagcggagacaacccgtacctcaagtacaaccacgccgacgcggagtttcaggagcgtcttaaagaagatacgtcttttgggggcaacctcggacgagcagtcttccaggcaaaaaagagggttcttgaacctctgggcctggttgaggaacctgttaagacggctccgggaaaaaagaggccggtagagcaatctcctgcggagccagactcctcctcgggaaccggaaaggcgggcaaccagcctgcaagaaagagattgaattttggtcagactggagacgcagactccgtacctgacccccagcctctcggacagccaccagcagccccctctggtctgggatctactacaatggctacaggcagtggcgcaccaatggcagacaataacgagggtgccgatggagtgggtaattcctcaggaaattggcattgcgattcccaatggttgggcgacagagtcatcaccaccagcacccgaacctgggccctgcccacctacaacaatcacctctacaagcaaatctccagccaatcaggagcagcgaacgacaaccactactttggctacagcaccccctgggggtattttgacttcaacagattccactgccacttttcaccacgtgactggcaaagactcatcaacaacaactggggattccgacccaaaagactcaacttcaagctctttaacattcaagtcaaagaggtcacgcagaatgacggtacgacgacgattgccaataaccttaccagcacggttcaggtgtttactgactcggagtaccagctcccgtacgtcctcggctcggcgcatcaaggatgcctcccgccgtttccagcggacgtcttcatggtcccacagtatggatacctcaccctgaacaacgggagtcaggcggtaggacgctcttccttttactgcctggagtactttccttctcagatgcttcgtaccggaaacaactttaccttcagttacgcctttgaagacgttcctttccacagcagctacgctcacagtcaaagtctggaccggctgatgaatcctctgatagaccagtacctgtattatctaaacaaaacacaatcaaatagtggaactcttcagcagtctcggctactgtttagtcaagctggacccaccagcatgtctcttcaagctaaaaactggctgcctggaccttgctacagacaacagcgtctgtcaaagcaggcaaacgacaacaacaacagcaactttccctggactgcggctacaaagtatcatctaaatggccgggactcgttggttaatccaggaccagctatggccagccacaaagacgatgaagaaaagtttttccccatgcatggaaccctgatatttggtaaacaaggaacaaatgctaacgacgcggatttggacaatgtcatgattacagatgaagaagaaatccgcaccaccaatcccgtggctacggagcagtacgggactgtgtcaaataatttgcaaaactcaaatactggtccaactactggaactgtcaatcaccaaggagcgttacctggtatggtgtggcaggatcgagacgtgtaccttcagggacccatttgggccaagattcctcacaccgatggacactttcatccttctccactgatgggaggttttggactcaaacacccgcctcctcagatcatgatcaaaaacactcccgttccagccaatcctcctacaaacttcagttctgccaagtttgctcctttcatcacacagtattccacggggcaggtcagcgtggagatagagtgggagctgcagaaggagaacagcaaacgctggaaccccgagatccagtatacttccaactacaacaagtctgttaatgtggactttactgtggacactaatggtgtgtattcagagcctcgccccattggcaccagatacctgactcgtaatctgtaa

SEQ ID NO: 1432 - DNA, 2208 bp, Artificial Sequence
  Synthetic Polynucleotide
atggctgccgatggttatcttccagattggctcgaggacactctctctgaaggaataagacagtggtggaagctcaaacctggcccaccaccaccaaggcccgcagagcggcatcaggacgacagcaggggtcttgtgcttcctgggtacaagtacctcggacccttcaacggactcgacaaaggagagccggtcaacgaggcagacgctgcggccctcgagcacgacaaggcctacgaccggcagctcgacagcggagacaacccgtacctcaagtacaaccacgccgacgcggagtttcaggagcgtcttaaagaagatacgtcttttgggggcaacctcggacgagcagtcttccaggcgaaaaagagggttcttgaacctctgggcctggttgaggaacctgttaagacggctccgggaaaaaagaggccggtagagcactctcctgcggagccagactcctcctcgggaaccggaaaagcgggccagcagcctgcaagaaagagattgaatttcggtcagactggagacgcagactccgtacctgacccccagcctctcggacagccaccagcagcccccacaagtttgggatctactacaatggctacaggcagtggcgcaccaatggcagacaataacgagggtgccgatggagtgggtaattcctcaggaaattggcattgcgattcccaatggctgggcgacagagtcatcaccaccagcacccgaacctgggccctgcccacctacaacaaccacctctacaagcaaatctccagccaatcaggagcatcgaacgacaaccactactttggctacagcaccccttgggggtattttgacttcaacagattccactgtcacttctccccacgtgactggcaaagactcatcaacaacaactggggattccgacccaagagactcaacttcaagctctttaacattcaagtcaaagaggtcacgcagaatgacggtacgacgacgattgccaataaccttaccagcacggttcaggtgtttactgactcggagtaccagctcccgtacgtcctcggctcggcgcatcaaggatgcctcccgccgtttccagcggacgtcttcatggtcccacagtatggatacctcaccctgaacaacgggagtcaggcggtaggacgctcttccttttactgcctggagtactttccttctcagatgctgcgtaccggaaacaactttaccttcagctacacctttgaggacgtgcccttccacagcagctacgctcacagccagagtttggaccggctgatgaatcctctgatcgaccagtatctgtattatctgaacaggacacaatcaaatagtggaactcttcagcagtctaggctactgtttagccaagctggacccaccagcatgtcccttcaagctaaaaactggctgcctggaccttgctacagacagcagcgtctgtcaaagcaggcaaacgacaacaacaacagcaactttccctggactgcggctacaaagtatcatctaaatggtcgggactcgttggttaatccaggaccagctatggccagccacaaagacgatgaagaaaagtttttccccatgcatggaaccctgatatttggtaaacaaggaacaaatgctaacgacgcggatttggaacatgtcatgattacagatgaagaagaaatcaggaccaccaatcccgtggctacagagcagtacggaaacgtgtcaaataatttgcaaaactcaaatactggtccaactacagaaaatgtcaatcaccagggagcgttacctggtatggtgtggcaggatcgagacgtgtacctgcagggacccatttgggccaagattcctcacaccgacggacactttcacccttctccactgatgggaggttttggactcaaacacccgcctcctcaaatcatgatcaaaaacactcctgttccagccaatcctcctacaaacttcagcgcggcaaagtttgcttccttcatcacacggtattccacgggacaggtcagcgtggagatcgagtgggagctgcagaaggagaacagcaaacgctggaaccccgagatccagtacacttccaactacaacaaatctgttaatgtggactttactgtggacgctaatggtgtgtattcagagcctcgccccattggcaccagatacctgactcgtaatctgtaa

SEQ ID NO: 1433 - DNA, 2208 bp, Artificial Sequence
  Synthetic Polynucleotide
atggctgccgatggttatcttccagattggctcgaggacactctctctgaaggaataagacagtggtggaagctcaaacctggcccaccaccaccaaggcccgcagagcggcatcaggacgacagcaggggtcttgtgcttcctgggtacaagtacctcggacccttcaacggactcgacaaaggagagccggtcaacgaggcagacgctgcggccctcgagcacgacaaggcctacgaccggcagctcgacagcggagacaacccgtacctcaagtacaaccgcgccgacgcggagtttcaggagcgtcttaaagaagatacgtcttttgggggcaacctcggacgagcagtcttccaggcgaaaaagagggttcttgaacctctgggcctggttgaggaacctgttaagacggctccgggaaaaaagaggccggtagagcactctcctgcggagccagactcctcctcgggaaccggaaaagcgggccagcagcctgcaagaaagagattgaatttcggtcagactggagacgcagactccgtacctgacccccagcctctcggacagccaccagcagcccccacaagtttgggatctactacaatggctacaggcagtggcgcaccaatggcagacaataacgagggtgccgatggagtgggtaattcctcaggaaattggcattgcgattcccaatggctgggcgacagagtcatcaccaccagcacccgaacctgggccctgcccacctacaacaaccacctctacaagcaaatctccagccaatcaggagcatcgaacgacaaccactactttggctacagcaccccttgggggtattttgacttcaacagattccactgtcacttctccccacgtgactggcaaagactcatcaacaacaactggggattccgacccaagagactcaacttcaagctctttaacattcaagtcaaagaggtcacgcagaatgacggtacgacgacgattgccaataaccttaccagcacggttcaggtgtttactgactcggagtaccagctcccgtacgtcctcggctcggcgcatcaaggatgcctcccgccgtttccagcggacgtcttcatggtcccacagtatggatacctcaccctgaacaacgggagtcaggcggtaggacgctcttccttttactgcctggagtactttccttctcagatgctgcgtaccggaaacaactttaccttcagctacacctttgaggacgtgcccttccacagcagctacgctcacagccagagtttggaccggctgatgaatcctctgatcgaccagtatctgtattatctgaacaggacacaatcaaatagtggaactcttcagcagtctaggctactgtttagccaagctggacccaccagcatgtcccttcaagctaaaaactggctgcctggaccttgctacagacagcagcgtctgtcaaagcaggcaaacgacaacaacaacagcaactttccctggactgcggctacaaagtatcatctaaatggtcgggactcgttggttaatccaggaccagctatggccagccacaaagacgatgaagaaaagtttttccccatgcatggaaccctgatatttggtaaacaaggaacaaatgctaacgacacggatttggaacatgtcatgattacagatgaagaagaaatcaggaccaccaatcccgtggctacagagcagtacggaaacgtgtcaaataatttgcaaaactcaaatactggtccaactacagaaaatgtcaatcaccagggagcgttacctggtatggtgtggcaggatcgagacgtgtacctgcagggacccatttgggccaagattcctcacaccgacggacactttcacccttctccactgatgggaggttttggactcaaacacccgcctcctcaaatcatgatcaaaaacactcctgttccagccaatcctcctacaaacttcagcgcggcaaagtttgcttccttcatcacacagtattccacgggacaggtcagcgtggagatcgagtgggagctgcagaaggagaacagcaaacgctggaaccccgagatccagtacacttccaactacaacaaatctgttaatgtggactttactgtggacgctaatggtgtgtattcagagcctcgccccattggcaccagatacctgactcgtaatctgtaa

SEQ ID NO: 1434 - DNA, 2208 bp, Artificial Sequence
  Synthetic Polynucleotide
atggctgccgatggttatcttccagattggctcgaggacactctctctgaaggaataagacagtggtggaagctcaaacctggcccaccaccaccaaggcccgcagagcggcatcaggacgacagcaggggtcttgtgcttcctgggtacaagtacctcggacccttcaacggactcgacaaaggagagccggtcaacgaggcagacgctgcggccctcgagcacgacaaggcctacgaccggcagctcgacagcggagacaacccgtacctcaagtacaaccacgccgacgcggagtttcaggagcgtcttaaagaagatacgtcttttgggggcaacctcggacgagcagtcttccaggcgaaaaagagggttcttgaacctctgggcctggttgaggaacctgttaagacggctccgggaaaaaagaggccggtagagcactctcctgcggagccagactcctcctcgggaaccggaaaagcgggccagcagcctgcaagaaagagattgaatttcggtcagactggagacgcagactccgtacctgacccccagcctctcggacagccaccagcagcccccacaagtttgggatctactacaatggctacaggcagtggcgcaccaatggcagacaataacgagggtgccgatggagtgggtaattcctcaggaaattggcattgcgattcccaatggctgggcgacagagtcatcaccaccagcacccgaacctgggccctgcccacctacaacaaccacctctacaagcaaatctccagccaatcaggagcatcgaacgacaaccactactttggctacagcaccccttgggggtattttgacttcaacagattccactgtcacttctccccacgtgactggcaaagactcatcaacaacaactggggattccgacccaagagactcaacttcaagctctttaacattcaagtcaaagaggtcacgcagaatgacggtacgacgacgattgccaataaccttaccagcacggttcaggtgtttactgactcggagtaccagctcccgtacgtcctcggctcggcgcatcaaggatgcctcccgccgtttccagcggacgtcttcatggtcccacagtatggatacctcaccctgaacaacgggagtcaggcggtaggacgctcttccttttactgcctggagtactttccttctcagatgctgcgtaccggaaacaactttaccttcagctacacctttgaggacgtgcccttccacagcagctacgctcacagccagagtttggaccggctgatgaatcctctgatcgaccagtatctgtattatctgaacaggacacaatcaaatagtggaactcttcagcagtctaggctactgtttagccaagctggacccaccagcatgtcccttcaagctaaaaactggctgcctggaccttgctacagacagcagcgtctgtcaaagcaggcaaacgacaacaacaacagcaactttccctggactgcggctacaaagtatcatctaaatggtcgggactcgttggttaatccaggaccagctatggccagccacaaagacgatgaagaaaagtttttccccatgcatggaaccctgatatttggtaaacaaggaacaaatgctaacgacgcggatttggaacatgtcatgattacagatgaagaagaaatcaggaccaccaatcccgtggctacagagcagtacggaaacgtgtcaaataatttgcaaaactcaaatactggtccaactacagaaaatgtcaatcaccagggagcgttacctggtatggtgtggcaggatcgagacgtgtacctgcagggacccatttgggccaagattcctcacaccgacggacacyttcacccttctccactgatgggaggttttggactcaaacacccgcctcctcaaatcatgatcaaaaacactcctgttccagccaatcctcctacaaacttcagcgcggcaaagtttgcttccttcatcacacagtattccacgggacaggtcagcgtggagatcgagtgggagctgcagaaggagaacagcaaacgctggaaccccgagatccagtacacttccaactacaacaaatctgttaatgtggactttactgtggacgctaatggtgtgtattcagagcctcgccccattggcaccagatacctgactcgtaatctgtaa

SEQ ID NO: 1435 - DNA, 2208 bp, Artificial Sequence
  Synthetic Polynucleotide
atggctgccgatggttatcttccagattggctcgaggacactctctctgaaggaataagacagtggtggaagctcaaacctggcccaccaccaccaaggcccgcagagcggcatcaggacgacagcaggggtcttgtgcttcctgggtacaagtacctcggacccttcaacggactcgacaaaggagagccggtcaacgaggcagacgctgcggccctcgagcacgacaaggcctacgaccggcagctcgacagcggagacaacccgtacctcaagtacaaccacgccgacgcggagtttcaggagcgtcttaaagaagatacgtcttttgggggcaacctcggacgagcagtcttccaggcgaaaaagagggttcttgaacctctgggcctggttgaggaacctgttaagacggctccgggaaaaaagaggccggcagagcactctcctgcggagccagactcctcctcgggaaccggaaaagcgggccagcagcctgcaagaaagagattgaatttcggtcagactggagacgcagactccgtacctgacccccagcctctcggacagccaccagcagcccccacaagtttgggatctactacaatggctacaggcagtggcgcaccaatggcagacaataacgagggtgccgatggagtgggtaattcctcaggaaattggcattgcgattcccaatggctgggcgacagagtcatcaccaccagcacccgaacctgggccctgcccacctacaacaaccacctctacaagcaaatctccagccaatcaggagcatcgaacgacaaccactactttggctacagcaccccttgggggtattttgacttcaacagattccactgtcacttctccccacgtgactggcaaagactcatcaacaacaactggggattccgacccaagagactcaacttcaagctctttaacattcaagtcaaagaggtcacgcagaatgacggtacgacgacgattgccaataaccttaccagcacggttcaggtgtttactgactcggagtaccagctcccgtacgtcctcggctcggcgcatcaaggatgcctcccgccgtttccagcggacgtcttcatggtcccacagtatggatacctcaccctgaacaacgggagtcaggcggtaggacgctcttccttttactgcctggagtactttccttctcagatgctgcgtaccggaaacaactttaccttcagctacacctttgaggacgtgcccttccacagcagctacgctcacagccagagtttggaccggctgatgaatcctctgatcgaccagtatctgtattatctgaacaggacacaatcaaatagtggaactcttcagcagtctaggctactgtttagccaagctggacccaccagcatgtcccttcaagctaaaaactggctgcctggaccttgctacagacagcagcgtctgtcaaagcaggcaaacgacaacaacaacagcaactttccctggactgcggctacaaagtatcatctaaatggtcgggactcgttggttaatccaggaccagctatggccagccacaaagacgatgaagaaaagtttttccccatgcatggaaccctgatatttggtaaacaaggaacaaatgctaacgacgcggatttggaacatgtcatgattacagatgaagaagaaatcaggaccaccaatcccgtggctacagagcagtacggaaacgtgtcaaataatttgcaaaactcaaatactggtccaactacagaaaatgtcaatcaccagggagcgttacctggtatggtgtggcaggatcgagacgtgtacctgcagggacccatttgggccaagattcctcacaccgacggacactttcacccttctccactgatgggaggttttggactcaaacacccgcctcctcaaatcatgatcaaaaacactcctgttccagccaatcctcctacaaacttcagcgcggcaaagtttgcttccttcatcacacagtattccacgggacaggtcagcgtggagatcgagtgggagctgcagaaggagaacagcaaacgctggaaccccgagatccagtacacttccaactacaacaaatctgttaatgtggactttactgtggacgctaatggtgtgtattcagagcctcgccccattggcaccagatacctgactcgtaatctgtaa

SEQ ID NO: 1436 - DNA, 2208 bp, Artificial Sequence
  Synthetic Polynucleotide
atggctgccgatggttatcttccagattggctcgaggacactctctctgaaggaataagacagtggtggaagctcaaacctggcccaccaccaccaaggcccgcagagcggcatcaggacgacagcaggggtcttgtgcttcctgggtacaagtacctcggacccttcaacggactcgacaaaggagagccggtcaacgaggcagacgctgcggccctcgagcacgacaaggcctacgaccggcagctcgacagcggagacaacccgtacctcaagtacaaccacgccgacgcggagtttcaggagcgtcttaaagaagatacgtcttttgggggcaacctcggacgagcagtcttccaggcgaaaaagagggttcttgaacctctgggcctggttgaggaacctgttaagacggctccgggaaaaaagaggccggtagagcactctcctgcggagccagactcctcctcgggaaccggaaaagcgggccagcagcctgcaagaaagagattgaatttcggtcagactggagacgcagactccgtacctgacccccagcctctcggacagccaccagcagcccccacaagtttgggatctactacaatggctacaggcagtggcgcaccaatggcagacaataacgagggtgccgatggagtgggtaattcctcaggaaattggcattgcgattcccaatggctgggcgacagagtcatcaccaccagcacccgaacctgggccctgcccacctacaacaaccacctctacaagcaaatctccagccaatcaggagcatcgaacgacaaccactactttggctacagcaccccttgggggtattttgacttcaacagattccactgtcacttctccccacgtgactggcaaagactcatcaacaacaactggggattccgacccaagagactcaacttcaagctctttaacattcaagtcaaagaggtcacgcagaatgacggtacgacgacgattgccaataaccttaccagcacggttcaggtgtttactgactcggagtaccagctcccgtacgtcctcggctcggcgcatcaaggatgcctcccgccgtttccagcggacgtcttcatggtcccacagtatggatacctcaccctgaacaacgggagtcaggcggtaggacgctcttccttttactgcctggagtactttccttctcagatgctgcgtaccggaaacaactttaccttcagctacacctttgaggacgtgcccttccacagcagctacgctcacagccagagtttggaccggctgatgaatcctctgatcgaccagtatctgtattatctgaacaggacacaatcaaatagtggaactcttcagcagcctaggctactgtttagccaagctggacccaccagcatgtcccttcaagctaaaaactggctgcctggaccttgctacagacagcagcgtctgtcaaagcaggcaaacgacaacaacaacagcaactttccctggactgcggctacaaagtatcatctaaatggtcgggactcgttggttaatccaggaccagctatggccagccacaaagacgatgaagaaaagtttttccccatgcatggaaccctgatatttggtaaacaaggaacaaatgctaacgacgcggatttggaacatgtcatgattacagatgaagaagaaatcaggaccaccaatcccgtggctacagagcagtacggaaacgtgtcaaataatttgcaaaactcaaatactggtccgactacagaaaatgtcaatcaccagggagcgttacctggtatggtgtggcaggatcgagacgtgtacctgcagggacccatttgggccaagattcctcacaccgacggacactttcacccttctccactgatgggaggttttggactcaaacacccgcctcctcaaatcatgatcaaaaacactcctgttccagccaatcctcctacaaacttcagcgcggcaaagtttgcttccttcatcacacagtattccacgggacaggtcagcgtggagatcgagtgggagctgcagaaggagaacagcaaacgctggaaccccgagatccagtacacttccaactacaacaaatctgttaatgtggactttactgtggacgctaatggtgtgtattcagagcctcgccccattggcaccagatacctgactcgtaatctgtaa

SEQ ID NO: 1437 - DNA, 2208 bp, Artificial Sequence
  Synthetic Polynucleotide
atggctgccgatggttatcttccagattggctcgaggacactctctctgaaggaataagacagtggtggaagctcaaacctggcccaccaccaccaaggcccgcagagcggcatcaggacgacagcaggggtcttgtgcttcctgggtacaagtacctcggacccttcaacggactcgacaaaggagagccggtcaacgaggcagacgctgcggccctcgagcacgacaaggcctacgaccggcagctcgacagcggagacaacccgtacctcaagtacaaccacgccgacgcggagtttcaggagcgtcttaaagaagatacgtcttttgggggcaacctcggacgagcagtcttccaggcgaaaaagagggttcttgaacctctgggcctggttgaggaacctgttaagacggctccgggaaaaaagaggccggtagagcactctcctgcggagccagactcctcctcgggaaccggaaaagcgggccagcagcctgcaagaaagagattgaatttcggtcagactggagacgcagactccgtacctgacccccagcctctcggacagccaccagcagcccccacaagtttgggatctactacaatggctacaggcagtggcgcaccaatggcagacaataacgagggtgccgatggagtgggtaattcctcaggaaattggcattgcgattcccaatggctgggcgacagagtcatcaccaccagcacccgaacctgggccctgcccacctacaacaaccacctctacaagcaaatctccagccaatcaggagcatcgaacgacaaccactactttggctacagcaccccttgggggtattttgacttcaacagattccactgtcacttctccccacgtgactggcaaagactcatcaacaacaactggggattccgacccaagagactcaacttcaagctctttaacattcaagtcaaagaggtcacgcagaatgacggtacgacgacgattgccaataaccttaccagcacggttcaggtgtttactgactcggagtaccagctcccgtacgtcctcggctcggcgcatcaaggatgcctcccgccgtttccagcggacgtcttcatggtcccacagtatggatacctcaccctgaacaacgggagtcaggcggtaggacgctcttccttttactgcctggagtactttccttctcagatgctgcgtaccggaaacaactttaccttcagctacacctttgaggacgtgcccttccacagcagctacgctcacagccagagtttggaccggctgatgaatcctctgatcgaccagtatctgtattatctgaacaggacacaatcaaatagtggaactcttcagcagtctaggctactgtttagccaagctggacccaccagcatgtcccttcaagctaaaaactggctgcctggaccttgctacagacagcagcgtctgtcaaagcaggcaaacgacaacaacaacagcaactttccctggactgcggctacaaagtatcatctaaatggtcgggactcgttggttaatccaggaccagctatggccagccacaaagacgatgaagaaaagtttttccccatgcatggaaccctgatatttggtaaacaaggaacaaatgctaacgacrcggatttggaacatgtcatgattacagatgaagaagaaatcaggaccaccaatcccgtggctacagagcagtacggaaacgtgtcaaataatttgcaaaactcaaatactggtccaactacagaaaatgtcaatcaccagggagcgttacctggtatggtgtggcaggatcgagacgtgtacctgcagggacccatttgggccaagattcctcacaccgacggacactttcacccttctccactgatgggaggttttggactcaaacacccgcctcctcaaatcatgatcaaaaacactcctgttccagccaatcctcctacaaacttcagcgcggcaaagtttgcttccttcatcacacagtattccacgggacaggtcagcgtggagatcgagtgggagctgcagaaggagaacagcaaacgctggaaccccgagacccagtacacttccaactacaacaaatctgttaatgtggactttactgtggacgctaatggtgtgtattcagagcctcgccccattggcaccagatacctgactcgtaatctgtaa

SEQ ID NO: 1438 - DNA, 2208 bp, Artificial Sequence
  Synthetic Polynucleotide
atggctgccgatggttatcttccagattggctcgaggacactctctctgaaggaataagacagtggtggaagctcaaacctggcccaccactaccaaggcccgcagagcggcatcaggacgacagcaggggtcttgtgcttcctgggtacaagtacctcggacccttcaacggactcgacaaaggagagccggtcaacgaggcagacgctgcggccctcgagcacgacaaggcctacgaccggcagctcgacagcggagacaacccgtacctcaagtacaaccacgccgacgcggagtttcaggagcgtcttaaagaagatacgtcttttgggggcaacctcggacgagcagtcttccaggcgaaaaagagggttcttgaacctctgggcctggttgaggaacctgttaagacggctccgggaaaaaagaggccggtagagcactctcctgcggagccagactcctcctcgggaaccggaaaagcgggccagcagcctgcaagaaagagattgaatttcggtcagactggagacgcagactccgtacctgacccccagcctctcggacagccaccagcagcccccacaagtttgggatctactacaatggctacaggcagtggcgcaccaatggcagacaataacgagggtgccgatggagtgggtaattcctcaggaaattggcattgcgattcccaatggctgggcgacagagtcatcaccaccagcacccgaacctgggccctgcccacctacaacaaccacctctacaagcaaatctccagccaatcaggagcatcgaacgacaaccactactttggctacagcaccccttgggggtattttgacttcaacagattccactgtcacttctccccacgtgactggcaaagactcatcaacaacaactggggattccgacccaagagactcaacttcaagctctttaacattcaagtcaaagaggtcacgcagaatgacggtacgacgacgattgccaataaccttaccagcacggttcaggtgtttactgactcggagtaccggctcccgtacgtcctcggctcggcgcatcaaggatgcctcccgccgtttccagcggacgtcttcatggtcccacagtatggatacctcaccctgaacaacgggagtcaggcggtaggacgctcttccttttactgcctggagtactttccttctcagatgctgcgtaccggaaacaactttaccttcagctacacctttgaggacgtgcccttccacagcagctacgctcacagccagagtttggaccggctgatgaatcctctgatcgaccagtatctgtattatctgaacaggacacaatcaaatagtggaactcttcagcagtctaggctactgtttagccaagctggacccaccagcatgtcccttcaagctaaaaactggctgcctggaccttgctacagacagcagcgtctgtcaaagcaggcaaacgacaacaacaacagcaactttccctggactgcggctacaaagtatcatctaaatggtcgggactcgttggttaatccgggaccagctatggccagccacaaagacgatgaagaaaagtttttccccatgcatggaaccctgatatttggtaaacaaggaacaaatgctaacgacgcggatttggaacatgtcatgattacagatgaagaagaaatcaggaccaccaatcccgtggctacagagcagtacggaaacgtgtcaaataatttgcaaaactcaaatactggtccaactacagaaaatgtcaatcaccagggagcgttacctggtatggtgtggcaggatcgagacgtgtacctgcagggacccatttgggccaagattcctcacaccgacggacactttcacccttctccactgatgggaggttttggactcaaacacccgcctcctcaaatcatgatcaaaaacactcctgttccagccaatcctcctacaaacttcagcgcggcaaagtttgcttccttcatcacacagtattccacgggacaggtcagcgtggagatcgagtgggagctgcagaaggagaacagcaaacgctggaaccccgagatccagtacacttccaactacaacaaatctgttaatgtggactttactgtggacgctaatggtgtgtattcagagcctcgccccattggcaccagatacctgactcgtaatctgtaa

SEQ ID NO: 1439 - DNA, 2208 bp, Artificial Sequence
  Synthetic Polynucleotide
atggctgccgatggttatcttccagattggctcgaggacactctctctgaaggaataagacagtggtggaagctcaaacctggcccaccaccaccaaggcccgcagagcggcatcaggacgacagcaggggtcttgtgcttcctgggtacaagtacctcggacccttcaacggactcgacaaaggagagccggtcaacgaggcagacgctgcggccctcgagcacgacaaggcctacgaccggcagctcgacagcggagacaacccgtacctcaagtacaaccacgccgacgcggagtttcaggagcgtcttaaagaagatacgtcttttgggggcaacctcggacgagcagtcttccaggcgaaaaagagggttcttgaacctctgggcctggttgaggaacctgttaagacggctccgggaaaaaagaggccggtagagcactctcctgcggagccagactcctcctcgggaaccggaaaagcgggccagcagcctgcaagaaagagattgaatttcggtcagactggagacgcagactccgtacctgacccccagcctctcggacagccaccagcagcccccacaagtttgggatctactacaatggctacaggcagtggcgcaccaatggcagacaataacgagggtgccgatggagtgggtaattcctcaggaaattggcattgcgattcccaatggctgggcgacagagtcatcaccaccagcacccgaacctgggccctgcccacctacaacaaccacctctacaagcaaatctccagccaatcaggagcatcgaacgacaaccactactttggctacagcaccccttgggggtattttgacttcaacagattccactgtcacttctccccacgtgactggcaaagactcatcaacaacaactggggattccgacccaagagactcaacttcaagctctttaacattcaagtcaaagaggtcacgcagaatgacggtacgacgacgattgccaataaccttaccagcacggttcaggtgtttactgactcggagtaccagctcccgtacgtcctcggctcggcgcatcaaggatgcctcccgccgtttccagcggacgtcttcatggtcccacagtatggatacctcaccctgaacaacgggagtcaggcggtaggacgctcttccttttactgcctggagtactttccttctcagatgctgcgtaccggaaacaactttaccttcagctacacctttgaggacgtgcccttccacagcagctacgctcacagccagagtttggaccggctgatgaatcctctgaccgaccagtatctgtattatctgaacaggacacaatcaaatagtggaactcttcagcagtctaggctactgtttagccaagctggacccaccagcatgtcccttcaagctaaaaactggctgcctggaccttgctacagacagcagcgtctgtcaaagcaggcaaacgacaacaacaacagcaactttccctggactgcggctacaaagtatcatctaaatggtcgggactcgttggttaatccaggaccagctatggccagccacaaagacgatgaagaaaagtttttccccatgcatggaaccctgatatttggtaaacaaggaacaaatgctaacgacacggatttggaacatgtcatgattacagatgaagaagaaatcaggaccaccaatcccgtggctacagagcagtacggaaacgtgtcaaataatttgcaaaactcaaatactggtccaactacagaaaatgtcaatcaccagggagcgttacctggtatggtgtggcaggatcgagacgtgtacctgcagggacccatttgggccaagattcctcacaccgacggacactttcacccttctccactgatgggaggttttggactcaaacacccgcctcctcaaatcatgatcaaaaacactcctgttccagccaatcctcctacaaacttcagcgcggcaaagtttgcttccttcatcacacagtattccacgggacaggtcagcgtggagatcgagtgggagctgcagaaggagaacagcaaacgctggaaccccgagatccagtacacttccaactacaacaaatctgttaatgtggactttactgtggacgctaatggtgtgtattcagagcctcgccccattggcaccagatacctgactcgtaatctgtaa

SEQ ID NO: 1440 - DNA, 2208 bp, Artificial Sequence
  Synthetic Polynucleotide
atggctgccgatggttatcttccagattggctcgaggacactctctctgaaggaataagacagtggtggaagctcaaacctggcccaccaccaccaaggcccgcagagcggcatcaggacgacagcaggggtcttgtgcttcctgggtacaagtacctcggacccttcaacggactcgacaaaggagagccggtcaacgaggcagacgctgcggccctcgagcacgacaaggcctacgaccggcagctcgacagcggagacaacccgtacctcaagtacaaccacgccgacgcggagtttcaggagcgtcttaaagaagatacgtcttttgggggcaacctcggacgagcagtcttccaggcgaaaaagagggttcttgaacctctgggcctggttgaggaacctgttaagacggctccgggaaaaaagaggccggtagagcactctcctgcggagccagactcctcctcgggaaccggaaaagcgggccagcagcctgcaagaaagagattgaatttcggtcagactggagacgcagactccgtacctgacccccagcctctcggacagccaccagcagcccccacaagtttgggatctactacaatggctacaggcagtggcgcaccaatggcagacaataacgagggtgccgatggagtgggtaattcctcaggaaattggcattgcgattcccaatggctgggcgacagagtcatcaccaccagcacccgaacctgggccctgcccacctacaacaaccacctctacaggcaaatctccagccaatcaggagcatcgaacgacaaccactactttggctacagcaccccttgggggtattttgacttcaacagattccactgtcacttctccccacgtgactggcaaagactcatcaacaacaactggggattccgacccaagagactcaacttcaagctctttaacattcaagtcaaagaggtcacgcagaatgacggtacgacgacgattgccaataaccttaccagcacggttcaggtgtttactgactcggagtaccagctcccgtacgtcctcggctcggcgcatcaaggatgcctcccgccgtttccagcggacgtcttcatggtcccacagtatggatacctcaccctgaacaacgggagtcaggcggtaggacgctcttccttttactgcctgaagtactttccttctcagatgctgcgtaccggaaacaactttaccttcagctacacctttgaggacgtgcccttccacagcagctacgctcacagccagagtttggaccggctgatgaatcctctgatcgaccagtatctgtattatctgaacaggacacaatcaaatagtggaactcttcagcagtctaggctactgtttagccaagctggacccaccagcatgtcccttcaagctaaaaactggctgcctggaccttgctacagacagcagcgtctgtcaaagcaggcaaacgacaacaacaacagcaactttccctggactgcggctacaaagtatcatctaaatggtcgggactcgttggttaatccaggaccagctatggccagccacaaagacgatgaagaaaagtttttccccctgcatggaaccctgatatttggtaaacaaggaacaaatgctaacgacacggatttggaacatgtcatgattacagatgaagaagaaatcaggaccaccaatcccgtggctacagagcagtacggaaacgtgtcaaataatttgcaaaactcaaatactggtccaactacagaaaatgtcaatcaccagggagcgttacctggtatggtgtggcaggatcgagacgtgtacctgcagggacccatttgggccaagattcctcacaccgacggacactttcacccttctccactgatgggaggttttggactcaaacacccgcctcctcaaatcatgatcaaaaacactcctgttccagccaatcctcctacaaacttcagcgcggcaaagtttgcttccttcatcacacagtattccacgggacaggtcagcgtggagatcgagtgggagctgcagaaggagaacagcaaacgctggaaccccgagatccagtacacttccaactacaacaaatctgttaatgtggactttactgtggacgctaatggtgtgtattcagagcctcgccccattggcaccagatacctgactcgtaatctgtaa

SEQ ID NO: 1441 - DNA, 2208 bp, Artificial Sequence
  Synthetic Polynucleotide
atggctgccgatggttatcttccagattggctcgaggacactctctctgaaggaataagacagtggtggaagctcaaacctggcccaccaccaccaaggcccgcagagcggcatcaggacgacagcaggggtcttgtgcttcctgggtacaagtacctcggacccttcaacggactcgacaaaggagagccggtcaacgaggcagacgctgcggccctcgagcacgacaaggcctacgaccggcagctcgacagcggagacaacccgtacctcaagtacaaccacgccgacgcggagtttcaggagcgtcttaaagaagatacgtcttttgggggcaacctcggacgagcagtcttccaggcgaaaaagagggttcttgaacctctgggcctggttgaggaacctgttaagacggctccgggaaaaaagaggccggtagagcactctcctgcggagccagactcctcctcgggaaccggaaaagcgggccagcagcctgcaagaaagagattgaatttcggtcagactggagacgcagactccgtacctgacccccagcctctcggacagccaccagcagcccccacaagtttgggatctactacaatggctacaggcagtggcgcaccaatggcagacaataacgagggtgccgatggagtgggtaattcctcaggaaattggcattgcgattcccaatggctgggcgacagagtcatcaccaccagcacccgaacctgggccctgcccacctacaacaaccacctctacaggcaaatctccagccaatcaggagcatcgaacgacaaccactactttggctacagcaccccttgggggtattttgacttcaacagattccactgtcacttctccccacgtgactggcaaagactcatcaacaacaactggggattccgacccaagagactcaacttcaagctctttaacattcaagtcaaagaggtcacgcagaatgacggtacgacgacgattgccaataaccttaccagcacggttcaggtgtttactgactcggagtaccagctcccgtacgtcctcggctcggcgcatcaaggatgcctcccgccgtttccagcggacgtcttcatggtcccacagtatggatacctcaccctgaacaacgggagtcaggcggtaggacgctcttccttttactgcctggagtactttccttctcagatgctgcgtaccggaaacaactttaccttcagctacacctttgaggacgtgcccttccacagcagctacgctcacagccagagtttggaccggctgatgaatcctctgatcgaccagtatctgtattatctgaacaggacacaatcaaatagtggaactcttcagcagtctaggctactgtttagccaagctggacccaccagcatgtcccttcaagctaaaaactggctgcctggaccttgctacagacagcagcgtctgtcaaagcaggcaaacgacaacaacaacagcaactttccctggactgcggctacaaagtatcatctaaatggtcgggactcgttggttaatccaggaccagctatggccagccacaaagacgatgaagaaaagtttttccccatgcatggaaccctgatatttggtaaacaaggaacaaatgctaacgacacggatttggaacatgtcatgattacagatgaagaagaaatcaggaccaccaatcccgtggctacagagcagtacggaaacgtgtcaaataatttgcaaaactcaaatactggtccaactacagaaaatgtcaatcaccagggagcgttacctggtatggtgtggcaggatcgagacgtgtacctgcagggacccatttgggccaagattcctcacaccgacggacactttcacccttctccactgatgggaggttttggactcaaacacccgcctcctcaaatcatgatcaaaaacactcctgttccagccaatcctcctacaaacttcagcgcggcaaagtttgcttccttcatcacacagtattccacgggacaggtcagcgtggagatcgagtgggtgctgcagaaggagaacagcaaacgctggaaccccgagatccagtacacttccaactacaacaaatctgttaatgtggactttactgtggacgctaatggtgtgtattcagagcctcgccccattggcaccagatacctgactcgtaatctgtaa

SEQ ID NO: 1442 - DNA, 2208 bp, Artificial Sequence
  Synthetic Polynucleotide
atggctgccgatggttatcttccagattggctcgaggacactctctctgaaggaataagacagtggtggaagctcaaacctggcccaccaccaccaaggcccgcagagcggcatcaggacgacagcaggggtcttgtgcttcctgggtacaagtacctcggacccttcaacggactcgacaaaggagagccggtcaacgaggcagacgctgcggccctcgagcacgacaaggcctacgaccggcagctcgacagcggagacaacccgtacctcaagtacaaccacgccgacgcggagtttcaggagcgtcttaaagaagatacgtcttttgggggcaacctcggacgagcagtcttccaggcgaaaaagagggttcttgaacctctgggcctggttgaggaacctgttaagacggctccgggaaaaaagaggccggtagagcactctcctgcggagccagactcctcctcgggaaccggaaaagcgggccagcagcctgcaagaaagagattgaatttcggtcagactggagacgcagactccgtacctgacccccagcctctcggacagccaccagcagcccccacaagtttgggatctactacaatggctacaggcagtggcgcaccaatggcagacaataacgagggtgccgatggagtgggtaattcctcaggaaattggcattgcgattcccaatggctgggcgacagagtcatcaccaccagcacccgaacctgggccctgcccacctacaacaaccacctctacaagcaaatctccagccaatcaggagcatcgaacgacaaccactactttggctacagcaccccttgggggtattttgacttcaacagattccactgtcacttctccccacgtgactggcaaagactcatcaacaacaactggggattccgacccaagagactcaacttcaagctctttaacattcaagtcaaagaggtcacgcagaatgacggtacgacgacgattgccaataaccttatcagcacggttcaggtgtttactgactcggagtaccagctcccgtacgtcctcggctcggcgcatcaaggatgcctcccgccgtttccagcggacgtcttcatggtcccacagtatggatacctcaccctgaacaacgggagtcaggcggtaggacgctcttccttttactgcctggagtactttccttctcagatgctgcgtaccggaaacaactttaccttcagctacacctttgaggacgtgcccttccacagcagctacgctcacagccagagtttggaccggctgatgaatcctctgatcgaccagtatctgtattatctgaacaggacacaatcaaatagtggaactcttcagcagtctaggctactgtttagccaagctggacccaccagcatgtcccttcaagctaaaaactggctgcctggaccttgctacagacagcagcgtctgtcaaagcaggcaaacgacaacaacaacagcaactttccctggactgcggctacaaagtatcatctaaatggtcgggactcgttggttaatccaggaccagctatggccagccacaaagacgatgaagaaaagtttttccccatgcatggaaccctgatatttggtaaacaaggaacaaatgctaacgacgcggatttggaacatgtcatgattacagatgaagaagaaatcaggaccaccaatcccgtggctacagagcagtacggaaacgtgtcaaataatttgcaaaactcaaatactggtccaactacagaaaatgtcaatcaccagggagcgttacctggtatggtgtggcaggatcgagacgtgtacctgcagggacccatttgggccaagattcctcacaccgacggacactttcacccttctccactgatgggaggttttggactcaaacacccgcctcctcaaatcatgatcaaaaacactcctgttccagccaatcctcctacaaacttcagcgcggcaaagtttgcttccttcatcacacagtattccacgggacaggtcagcgtggagatcgagtgggagctgcagaaggagaacagcaaacgctggaaccccgagatccagtacacttccaactacaacaaatctgttaatgtggactttactgtggacgctaatggtgtgtattcagagcctcgccccattggcaccagatacctgactcgtaatctgtaa

SEQ ID NO: 1443 - DNA, 2205 bp, Artificial Sequence
  Synthetic Polynucleotide
atggctgccgatggttatcttccagattggctcgaggacattctctctgaaggaataagacagtggtggaagctcaaacctggcccaccaccaccaaagcccgcagagcggcataaggacgacagcaggggtcttgtgcttcctgggtacaagtacctcggacccttcaacggactcgacaaaggagagccggtcaacgaggcagacgccgcggccctcgagcacgacaaggcctacgaccggcagctcgacagcggagacaacccgtacctcaagtacaaccacgccgacgcggagtttcaggagcgtcttaaagaagatacgtcttttgggggcaacctcggacgagcagtcttccaggcaaaaaagagggttcttgaacctctgggcctggttgaggaacctgttaagacggctccgggaaaaaagaggccggtagagcaatctcctgcggagccagactcctcctcgggaaccggaaaggcgggcaaccagcctgcaagaaagagattgaattttggtcagactggagacgcagactccgtacctgacccccagcctctcggacagccaccagcagccccctctggtctgggatctactacaatggctacaggcagtggcgcaccaatggcagacaataacgagggtgccgatggagtgggtaattcctcaggaaattggcattgcgattcccaatggttgggcgacagagtcatcaccaccagcacccgaacctgggccctgcccacctacaacaatcacctctacaagcaaatctccagccaatcaggagcagcgaacgacaaccactactttggctacagcaccccctgggggtattttgacttcaacagattccactgccacttttcaccacgtgactggcaaagactcatcaacaacaactggggattccgacccaaaagactcaacttcaagctctttaacattcaagtcaaagaggtcacgcagaatgacggtacgacgacgattgccaataaccttaccagcacggttcaggtgtttactgactcggagtaccagctcccgtacgtcctcggctcggcgcatcaaggatgcctcccgccgtttccagcggacgtcttcatggtcccacagtatggatacctcaccctgaacaacgggagtcaggcggtaggacgctcttccttttactgcctggagtactttccttctcagatgcttcgtaccggaaacaactttaccttcagttacacctttgaagacgttcctttccacagcagctacgctcacagtcaaagtctggaccggctgatgaatcctctgatagaccagtacctgtattatctaaacaaaacacaatcaaatagtggaactcttcagcagtctcggctactgtttagtcaagctggacccaccagcatgtctcttcaagctaaaaactggctgcctggaccttgctacagacaacagcgtctgtcaaagcaggcaaacgacaacaacagcaactttccctggactgcggctacaaagtatcatctaaatggccgggactcgttggttaatccaggaccagctatggccagccacaaagacgatgaagaaaagtttttccccatgcatggaaccctgatatttggtaaacaaggaacaaatgctaacgacgcggatttggacaatgtcatgattacagatgaagaagaaatccgcaccaccaatcccgtggctacggagcagtacgggactgtgtcaaataatttgcaaaactcaaatactggtccaactactggaactgtcaatcaccaaggagcgttacctggtatggtgtggcaggatcgagacgtgtaccttcagggacccatttgggccaagattcctcacaccgatggacactttcatccttctccactgatgggaggttttggactcaaacacccgcctcctcagatcatgatcaaaaacactcccgttccagccaatcctcctacaaacttcagttctgccaagtttgcttctttcatcacacagtattccacggggcaggtcagcgtggagatagagtgggagctgcagaaggagaacagcaaacgctggaaccccgagatccagtatacttccaactacaacaagtctgttaatgtggactttactgtggacactaatggtgtgtattcagagcctcgccccattggcaccagatacctgactcgtaatctgtaa

SEQ ID NO: 1444 - DNA, 2208 bp, Artificial Sequence
  Synthetic Polynucleotide
atggctgccgatggttatcttccagattggctcgaggacattctctctgaaggaataagacagtggtggaagctcaaacctggcccaccaccaccaaagcccgcagagcggcataaggacgacagcaggggtcttgtgcttcctgggtacaagtacctcggacccttcaacggactcgacaaaggagagccggtcaacgaggcagacgccgcggccctcgagcacgacaaggcctacgaccggcagctcgacagcggagacaacccgtacctcaagtacaaccacgccgacgcggagtttcaggagcgtcttaaagaagatacgtcttttgggggcaacctcggacgagcagtcttccaggcaaaaaagagggttcttgaacctctgggcctggttgaggaacctgttaagacggctccgggaaaaaagaggccggtagagcaatctcctgcggagccagactcctcctcgggaaccggaaaggcgggcaaccagcctgcaagaaagagattgaattttggtcagactggagacgcagactccgtacctgacccccagcctctcggacagccaccagcagccccctctggtctgggatctactacaatggctacaggcagtggcgcaccaatggcagacaataacgagggtgccgatggagtgggtaattcctcaggaaattggcattgcgattcccaatggttgggcgacagagtcatcaccaccagcacccgaacctgggccctgcccacctacaacaatcacctctacaagcaaatctccagccaatcaggagcagcgaacgacagccactactttggctacagcaccccctgggggtattttgacttcaacagattccactgccacttttcaccacgtgactggcaaagactcatcaacaacaactggggattccgacccaaaagactcaacttcaagctctttaacattcaagtcaaagaggtcacgcagaatgacggtacgacgacgattgccaataaccttaccagcacggttcaggtgtttactgactcggagtaccagctcccgtacgtcctcggctcggcgcatcaaggatgcctcccgccgtttccagcggacgtcttcatggtcccacagtatggatacctcaccctgaacaacgggagtcaggcggtaggacgctcttccttttactgcctggagtactttccttctcagatgcttcgtaccggaaacaactttaccttcagttacacctttgaagacgttcctttccacagcagctacgctcacagtcaaagtctggaccggctgatgaatcctctgatagaccagtacctgtattatctaaacaaaacacaatcaaatagtggaactcttcagcagtctcggctactgtttagtcaagctggacccaccagcatgtctcttcaagctaaaaactggctgcctggaccttgctacagacaacagcgtctgtcaaagcaggcaaacgacaacaacaacagcaactttccctggactgcggctacaaagtatcatctaaatggccgggactcgttggttaatccaggaccagctatggccagccacaaagacgatgaagaaaagtttttccccatgcatggaaccctgatatttggtaaacaaggaacaaatgctaacgacgcggatttggacaatgtcatgattacagatgaagaagaaatccgcaccaccaatcccgtggctacggagcagtacgggactgtgtcaaataatttgcaaaactcaaatactggtccaactactggaactgtcaatcaccaaggagcgttacctggtatggtgtggcaggatcgagacgtgtaccttcagggacccatttgggccaagattcctcacaccgatggacactttcatccttctccactgatgggaggttttggactcaaacacccgcctcctcagatcatgatcaaaaacactcccgttccagccaatcctcctacaaacttcagttctgccaagtttgcttctttcatcacacagtattccacggggcaggtcagcgtggagatagagtgggagctgcagaaggagaacagcaaacgctggaaccccgagatccagtatacttccaactacaacaagtctgttaatgtggactttactgtggacactaatggtgtgtattcagagcctcgccccattggcaccagatacctgactcgtaatctgtaa

SEQ ID NO: 1445 - DNA, 2208 bp, Artificial Sequence
  Synthetic Polynucleotide
atggctgccgatggttatcttccagattggctcgaggacactctctctgaaggaataagacagtggtggaagctcaaacctggcccaccaccaccaaggcccgcagagcggcatcaggacgacagcaggggtcttgtgcttcctgggtacaagtacctcggacccttcaacggactcgacaaaggagagccggtcaacgaggcagacgctgcggccctcgagcacgacaaggcctacgaccggcagctcgacagcggagacaacccgtacctcaagtacaaccacgccgacgcggagtttcaggagcgtcttaaagaagatacgtcttttgggggcaacctcggacgagcagtcttccaggcgaaaaagagggttcttgaacctctgggcctggttgaggaacctgttaagacggctccgggaaaaaagaggccggtagagcactctcctgcggagccagactcctcctcgggaaccggaaaagcgggccagcagcctgcaagaaagagattgaatttcggtcagactggagacgcagactccgtacctgacccccagcctctcggacagccaccagcagcccccacaagtttgggatctactacaatggctacaggcagtggcgcaccaatggcagacaataacgagggtgccgatggagtgggtaattcctcaggaaattggcattgcgattcccaatggctgggcgacagagtcatcaccaccagcacccgaacctgggccctgcccacctacaacaaccacctctacaagcaaatctccagccaatcaggagcatcgaacgacaaccactactttggctacagcaccccttgggggtattttgacttcaacagattccactgtcacttctccccacgtgactggcaaagactcatcaacaacaactggggattccgacccaagagactcaacttcaagctctttaacattcaagtcaaagaggtcacgcagaatgacggtacgacgacgattgccaataaccttaccagcacggttcaggtgtttactgactcggagtaccagctcccgtacgtcctcggctcggcgcatcaaggatgcctcccgccgtttccagcggacgtcttcatggtcccacagtatggatacctcaccctgaacaacgggagtcaggcggtaggacgctcttccttttactgcctggagtactttccttctcagatgctgcgtaccggaaacaactttaccttcagctacacctttgaggacgtgcccttccacagcagctacgctcacagccagagtttggaccggctgatgaatcctctgatcgaccagtatctgtattatctgaacaggacacaatcaaatagtggaactcttcagcagtctaggctactgtttagccaagctggacccaccagcatgtcccttcaagctaaaaactggctgcctggaccttgctacagacagcagcgtctgtcaaagcaggcaaacgacaacaacaacagcaactttccctggactgcggctacaaagtatcatctaaatggtcgggactcgttggttaatccaggaccagctatggccagccacaaagacgatgaagaaaagtttttccccatgcatggaaccctgatatttggtaaacaaggaacaaatgctaacgacacggatttggaacatgtcatgattacagatgaagaagaaatcaggaccaccaatcccgtggctacagagcagtacggaaacgtgtcaaataatttgcaaaactcaaatactggtccaactacagaaaatgtcaatcaccagggagcgttacctggtatggtgtggcaggatcgagacgtgtacctgcagggacccatttgggccaagattcctcacaccgacggacactttcacccttctccactgatgggaggttttgggctcaaacacccgcctcctcaaatcatgatcaaaaacactcctgttccagccaatcctcctacaaacttcagcgcggcaaagtttgcttccttcatcacacagtattccacgggacaggtcagcgtggagatcgagtgggagctgcagaaggagaacagcaaacgctggaaccccgagatccagtacacttccaactacaacaaatctgttaatgtggactttactgtggacgctaatggtgtgtattcagagcctcgccccattggcaccagatacctgactcgtaatctgtaa

SEQ ID NO: 1446 - DNA, 2205 bp, Artificial Sequence
  Synthetic Polynucleotide
atggctgccgatggttatcttccagattggctcgaggacattctctctgaaggaataagacagtggtggaagctcaaacctggcccaccaccaaagcccgcagagcggcataaggacgacagcaggggtcttgtgcttcctgggtacaagtacctcggacccttcaacggactcgacaaaggagagccggtcaacgaggcagacgccgcggccctcgagcacgacaaggcctacgaccggcagctcgacagcggagacaacccgtacctcaagtacaaccacgccgacgcggagtttcaggagcgtcttaaagaagatacgtcttttgggggcaacctcggacgagcagtcttccaggcaaaaaagagggttcttgaacctctgggcctggttgaggaacctgttaagacggctccgggaaaaaagaggccggtagagcaatctcctgcggagccagactcctcctcgggaaccggaaaggcgggcaaccagcctgcaagaaagagattgaattttggtcagactggagacgcagactccgtacctgacccccagcctctcggacagccaccagcagccccctctggtctgggatctactacaatggctacaggcagtggcgcaccaatggcagacaataacgagggtgccgatggagtgggtaattcctcaggaaattggcattgcgattcccaatggttgggcgacagagtcatcaccaccagcacccgaacctgggccctgcccacctacaacaatcacctctacaagcaaatctccagccaatcaggagcagcgaacgacaaccactactttggctacagcaccccctgggggtattttgacttcaacagattccactgccacttttcaccacgtgactggcaaagactcatcaacaacaactggggattccgacccaaaagactcaacttcaagctctttaacattcaagtcaaagaggtcacgcagaatgacggtacgacgacgattgccaataaccttaccagcacggttcaggtgtttactgactcggagtaccagctcccgtacgtcctcggctcggcgcatcaaggatgcctcccgccgtttccagcggacgtcttcatggtcccacagtatggatacctcaccctgaacaacgggagtcaggcggtaggacgctcttccttttactgcctggagtactttccttctcagatgcttcgtaccggaaacaactttaccttcagttacacctttgaagacgttcctttccacagcagctacgctcacagtcaaagtctggaccggctgatgaatcctctgatagaccagtacctgtattatctaaacaaaacacaatcaaatagtggaactcttcagcagtctcggctactgtttagtcaagctggacccaccagcatgtctcttcaagctaaaaactggctgcctggaccttgctacagacaacagcgtctgtcaaagcaggcaaacgacaacaacaacagcaactttccctggactgcggctacaaagtatcatctaaatggccgggactcgttggttaatccaggaccagctatggccagccacaaagacgatgaagaaaagtttttccccatgcatggaaccctgatatttggtaaacaaggaacaaatgctaacgacgcggatttggacaatgtcatgattacagatgaagaagaaatccgcaccaccaatcccgtggctacggagcagtacgggactgtgtcaaataatttgcaaaactcaaatactggtccaactactggaactgtcaatcaccaaggagcgttacctggtatggtgtggcaggatcgagacgtgtaccttcagggacccatttgggccaagattcctcacaccgatggacactttcatccttctccactgatgggaggttttggactcaaacacccgcctcctcagatcatgatcaaaaacactcccgttccagccaatcctcctacaaacttcagttctgccaagtttgcttctttcatcacacagtattccacggggcaggtcagcgtggagatagagtgggagctgcagaaggagaacagcaaacgctggaaccccgagatccagtatacttccaactacaacaagtctgttaatgtggactttactgtggacactaatggtgtgtattcagagcctcgccccattggcaccagatacctgactcgtaatctgtaa

SEQ ID NO: 1447 - DNA, 2208 bp, Artificial Sequence
  Synthetic Polynucleotide
atggctgccgatggttatcttccagattggctcgaggacactctctctgaaggaataagacagtggtggaagctcaaacctggcccaccaccaccaaggcccgcagagcggcatcaggacgacagcaggggtcttgtgcttcctgggtacaagtacctcggacccttcaacggactcgacaaaggagagccggtcaacgaggcagacgctgcggccctcgagcacgacaaggcctacgaccggcagctcgacagcggagacaacccgtacctcaagtacaaccacgccgacgcggagtttcaggagcgtcttaaagaagatacgtcttttgggggcaacctcggacgagcagtcttccaggcgaaaaagagggttcttgaacctctgggcctggttgaggaacctgttaagacggctccgggaaaaaagaggccggtagagcactctcctgcggagccagactcctcctcgggaaccggaaaagcgggccagcagcctgcaagaaagagattgaatttcggtcagactggagacgcagactccgtacctgacccccagcctctcggacagccaccagcagcccccacaagtttgggatctactacaatggctacaggcagtggcgcaccaatggcagacaataacgagggtgccgatggagtgggtaattcctcaggaaattggcattgcgattcccaatggctgggcgacagagtcatcaccaccagcacccgaacctgggccctgcccacctacaacaaccacctctacaagcaaatctccagccaatcaggagcatcgaacgacaaccactactttggctacagcaccccttgggggtattttgacttcaacagattccactgtcacttctccccacgtgactggcaaagactcatcaacaacaactggggattccgacccaagagactcaacttcaagctctttaacattcaagtcaaagaggtcacgcagaatgacggtacgacgacgattgccaataaccttaccagcacggttcaggtgtttactgactcggagtaccagctcccgtacgtcctcggctcggcgcatcaaggatgcctcccgccgtttccagcggacgtcttcatggtcccacagtatggatacctcaccctgaacaacgggagtcaggcggtaggacgctcttccttttactgcctggagtactttccttctcagatgctgcgtaccggaaacaactttaccttcagctacacctttggggacgtgcccttccacagcagctacgctcacagccagagtttggaccggctgatgaatcctctgatcgaccagtatctgtattatctgaacaggacacaatcaaatagtggaactcttcagcagtctaggctactgtttagccaagctggacccaccagcatgtcccttcaagctaaaaactggctgcctggaccttgctacagacagcagcgtctgtcaaagcaggcaaacgacaacaacaacagcaactttccctggactgcggctacaaagtatcatctaaatggtcgggactcgttggttaatccaggaccagctatggccagccacaaagacgatgaagaaaagtttttccccatgcatggaaccctgatatttggtaaacaaggaacaaatgctaacgacgcggatttggaacatgtcatgattacagatgaagaagaaatcaggaccaccaatcccgtggctacagagcagtacggaaacgtgtcaaataatttgcaaaactcaaatactggtccaactacagaaaatgtcaatcaccagggagcgttacctggtatggtgtggcaggatcgagacgtgtacctgcagggacccatttgggccaagattcctcacaccgacggacactttcacccttctccactgatgggaggttttggactcaaacacccgcctcctcaaatcatgatcaaaaacactcctgttccagccaatcctcctacaaacttcagcgcggcaaagtttgcttccttcatcacacagtattccacgggacaggtcagcgtggagatcgagtgggagctgcagaaggagaacagcaaacgctggaaccccgagatccagtacacttccaactacaacaaatctgttaatgtggactttactgtggacgctaatggtgtgtattcagagcctcgccccattggcaccagatacctgactcgtaatctgtaa

SEQ ID NO: 1448 - DNA, 2208 bp, Artificial Sequence
  Synthetic Polynucleotide
atggctgccgatggttatcttccagattggctcgaggacactctctctgaaggaataagacagtggtggaagctcaaacctggcccaccaccaccaaggcccgcagagcggcatcaggacgacagcaggggtcttgtgcttcctgggtacaagtacctcggacccttcaacggactcgacaaaggagagccggtcaacgaggcagacgctgcggccctcgagcacgacaaggcctacgaccggcagctcgacagcggagacaacccgtacctcaagtacaaccacgccgacgcggagtttcaggagcgtcttaaagaagatacgtcttttgggggcaacctcggacgagcagtcttccaggcgaaaaagagggttcttgaacctctgggcctggttgaggaacctgttaagacggctccgggaaaaaagaggccggtagagcactctcctgcggagccagactcctcctcgggaaccggaaaagcgggccagcagcctgcaagaaagagattgaatttcggtcagactggagacgcagactccgtacctgacccccagcctctcggacagccaccagcagcccccacaagtttgggatctactacaatggctacaggcagtggcgcaccaatggcagacaataacgagggtgccgatggagtgggtaattcctcaggaaattggcattgcgattcccaatggctgggcgacagagtcatcaccaccagcacccgaacctgggccctgcccacctacaacaaccacctctacaagcaaatctccagccaatcaggagcatcgaacgacagccactactttggctacagcaccccttgggggtattttgacttcaacagattccactgtcacttctccccacgtgactggcaaagactcatcaacaacaactggggattccgacccaagagactcaacttcaagctctttaacattcaagtcaaagaggtcacgcagaatgacggtacgacgacgattgccaataaccttaccagcacggttcaggtgtttactgactcggagtaccagctcccgtacgtcctcggctcggcgcatcaaggatgcctcccgccgtttccagcggacgtcttcatggtcccacagtatggatacctcaccctgaacaacgggagtcaggcggtaggacgctcttccttttactgcctggagtactttccttctcagatgctgcgtaccggaaacaactttaccttcagctacacctttgaggacgtgcccttccacagcagctacgctcacagccagagtttggaccggctgatgaatcctctgatcgaccagtatctgtattatctgaacaggacacaatcaaatagtggaactcttcagcagtctaggctactgtttagccaagctggacccaccagcatgtcccttcaagctaaaaactggctgcctggaccttgctacagacagcagcgtctgtcaaagcaggcaaacgacaacaacaacagcaactttccctggactgcggctacaaagtatcatctaaatggtcgggactcgttggttaatccaggaccagctatggccagccacaaagacgatgaagaaaagtttttccccatgcatggaaccctgatatttggtaaacaaggaacaaatgctaacgacgcggatttggaacatgtcatgattacagatgaagaagaaatcaggaccaccaatcccgtggctacagagcagtacggaaacgtgtcaaataatttgcaaaactcaaatactggtccaactacagaaaatgtcaatcaccagggagcgttacctggtatggtgtggcaggatcgagacgtgtacctgcagggacccatttgggccaagattcctcacaccgacggacactttcacccttctccactgatgggaggttttggactcaaacacccgcctcctcaaatcatgatcaaaaacactcctgttccagccaatcctcctacaaacttcagcgcggcaaagtttgcttccttcatcacacagtattccacgggacaggtcagcgtggagatcgagtgggagctgcagaaggagaacagcaaacgctggaaccccgagatccagtacacttccaactacaacaaatctgttaatgtggactttactgtggacgctaatggtgtgtattcagagcctcgccccattggcaccagatacctgactcgtaatctgtaa

SEQ ID NO: 1449 - DNA, 2208 bp, Artificial Sequence
  Synthetic Polynucleotide
atggctgccgatggttatcttccagattggctcgaggacactctctctgaaggaataagacagtggtggaagctcaaacctggcccaccaccaccaaggcccgcagagcggcatcaggacgacagcaggggtcttgtgcttcctgggtacaagtacctcggacccttcaacggactcgacaaaggagagccggtcaacgaggcagacgctgcggccctcgagcacgacaaggcctacgaccggcagctcgacagcggagacaacccgtacctcaagtacaaccacgccgacgcggagtttcaggagcgtcttaaagaagatacgtcttttgggggcaacctcggacgagcagtcttccaggcgaaaaagagggttcttgaacctctgggcctggttgaggaacctgttaagacggctccgggaaaaaagaggccggtagagcactctcctgcggagccagactcctcctcgggaaccggaaaagcgggccagcagcctgcaagaaagagattgaatttcggtcagactggagacgcagactccgtacctgacccccagcctctcggacagccaccagcagcccccacaagtttgggatctactacaatggctacaggcagtggcgcaccaatggcagacaataacgagggtgccgatggagtgggtaattcctcaggaaattggcattgcgattcccaatggctgggcgacagagtcatcaccaccagcacccgaacctgggccctgcccacctacaacaaccacctctacaagcaaatctccagccaatcaggagcatcgaacgacaaccactactttggctacagcaccccttgggggtattttgacttcaacagattccactgtcacttctccccacgtgactggcaaagactcatcaacaacaactggggattccgacccaagagactcaacttcaagctctttaacattcaagtcaaagaggtcacgcagaatgacggtacgacgacgattgccaataaccttaccagcacgattcaggtgtttactgactcggagtaccagctcccgtacgtcctcggctcggcgcatcaaggatgcctcccgccgtttccagcggacgtcttcatggtcccacagtatggatacctcaccctgaacaacgggagtcaggcggtaggacgctcttccttttactgcctggagtactttccttctcagatgctgcgtaccggaaacaactttaccttcagctacacctttgaggacgtgcccttccacagcagctacgctcacagccagagtttggaccggctgatgaatcctctgatcgaccagtatctgtattatctgaacaggacacaatcaaatagtggaactcttcagcagtctaggctactgtttagccaagctggacccaccagcatgtcccttcaagctaaaaactggctgcctggaccttgctacagacagcagcgtctgtcaaagcaggcaaacgacaacaacaacagcaactttccctggactgcggctacaaagtatcatctaaatggtcgggactcgttggttaatccaggaccagctatggccagccacaaagacgatgaagaaaagtttttccccatgcatggaaccctgatatttggtaaacaaggaacaaatgctaacgacgcggatttggaacatgtcatgattacagatgaagaagaaatcaggaccaccaatcccgtggctacagagcagtacggaaacgtgtcaaataatttgcaaaactcaaatactggtccaactacagaaaatgtcaatcaccagggagcgttacctggtatggtgtggcaggatcgagacgtgtacctgcagggacccatttgggccaagattcctcacaccgacggacactttcacccttctccactgatgggaggttttggactcaaacacccgcctcctcaaatcatgatcaaaaacactcctgttccagccaatccccctacaaacttcagcgcggcaaagtttgcttccttcatcacacagtattccacgggacaggtcagcgtggagatcgagtgggagctgcagaaggagaacagcaaacgctggaaccccgagatccagtacacttccaactacaacaaatctgttaatgtggactttactgtggacgctaatggtgtgtattcagagcctcgccccattggcaccagacacctgactcgtaatctgtaa

SEQ ID NO: 1450 - DNA, 2208 bp, Artificial Sequence
  Synthetic Polynucleotide
atggctgccgatggttatcttccagattggctcgaggacactctctctgaaggaataagacagtggtggaagctcaaacctggcccaccaccaccaaggcccgcagagcggcatcaggacgacagcaggggtcttgtgcttcctgggtacaagtacctcggacccttcaacggactcgacaaaggagagccggtcaacgaggcagacgctgcggccctcgagcacgacaaggcctacgaccggcagctcgacagcggagacaacccgtacctcaagtacaaccacgccgacgcggagtttcaggagcgtcttaaagaagatacgtcttttgggggcaacctcggacgagcagtcttccaggcgaaaaagagggttcttgaacctctgggcctggttgaggaacctgttaagacggctccgggaaaaaagaggccggtagagcactctcctgcggagccagactcctcctcgggaaccggaaaagcgggccagcagcctgcaagaaagagattgaatttcggtcagactggagacgcagactccgtacctgacccccagcctctcggacagccaccagcagcccccacaagtttgggatctactacaatggctacaggcagtggcgcaccaatggcagacaataacgagggtgccgatggagtgggtaattcctcaggaaattggcattgcgattcccaatggctgggcgacagagtcatcaccaccagcacccgaacctgggccctgcccacctacaacaaccacctctacaagcaaatctccagccaatcaggagcatcgaacgacaaccactactttggctacagcaccccttgggggtattttgacttcaacagattccactgtcacttctccccacgtgactggcaaagactcatcaacaacaactggggattccgacccaagagactcaacttcaagctctttaacattcaagtcaaagaggtcacgcagaatgacggtacgacgacgattgccaataaccttaccagcacggttcaggtgtttactgactcggagtaccagctcccgtacgtcctcggctcggcgcatcaaggatgcctcccgccgtttccagcggacgtcttcatggtcccacagtatggatacctcaccctgaacaacgggagtcaggcggtaggacgctcttccttttactgcctggagtactttccttctcagatgctgcgtaccggaaacaactttaccttcagctacacctttgaggacgtgcccttccacagcagctacgctcacagccagagtttggaccggctgatgaatcctctgatcgaccagtatctgtattatctgaacaggacacaatcaaatagtggaactcttcagcagtctgggctactgtttagccaagctggacccaccagcatgtcccttcaagctaaaaactggctgcctggaccttgctacagacagcagcgtctgtcaaagcaggcaaacgacaacaacaacagcaactttccctggactgcggctacaaagtatcatctaaatggtcgggactcgttggttaatccaggaccagctatggccagccacaaagacgatgaagaaaagtttttccccatgcatggaaccctgatatttggtaaacaaggaacaaatgctaacgacacggatttggaacatgtcatgattacagatgaagaagaaatcaggaccaccaatcccgtggctacagagcagtacggaaacgtgtcaaataatttgcaaaactcaaatactggtccaactacagaaaatgtcaatcaccagggagcgttacctggtatggtgtggcaggatcgagacgtgtacctgcagggacccatttgggccaagattcctcacaccgacggacactttcacccttctccactgatgggaggttttggactcaaacacccgcctcctcaaatcatgatcaaaaacactcctgttccagccaatcctcctacaaacttcagcgcggcaaagtttgcttccttcatcacacagtattccacgggacaggtcagcgtggagatcgagtgggagctgcagaaggagaacagcaaacgctggaaccccgagatccagtacacttccaactacaacaaatctgttaatgtggactttactgtggacgctaatggtgtgtattcagagcctcgccccattggcaccagatacctgactcgtaatctgtaa

SEQ ID NO: 1451 - DNA, 2208 bp, Artificial Sequence
  Synthetic Polynucleotide
atggctgccgatggttatcttccagattggctcgaggacactctctctgaaggaataagacagtggtggaagctcaaacctggcccaccaccaccaaggcccgcagagcggcatcaggacgacagcaggggtcttgtgcttcctgggtacaagtacctcggacccttcaacggactcgacaaaggagagccggtcaacgaggcagacgctgcggccctcgagcacgacaaggcctacgaccggcagctcgacagcggagacaacccgtacctcaagtacaaccacgccgacgcggagtttcaggagcgtcctaaagaagatacgtcttttgggggcaacctcggacgagcagtcttccaggcgaaaaagagggttcttgaacctctgggcctggttgaggaacctgttaagacggctccgggaaaaaagaggccggtagagcactctcctgcggagccagactcctcctcgggaaccggaaaagcgggccagcagcctgcaagaaagagattgaatttcggtcagactggagacgcagactccgtacctgacccccagcctctcggacagccaccagcagcccccacaagtttgggatctactacaatggctacaggcagtggcgcaccaatggcagacaataacgagggtgccgatggagtgggtaattcctcaggaaattggcattgcgattcccaatggctgggcgacagagtcatcaccaccagcacccgaacctgggccctgcccacctacaacaaccacctctacaagcaaatctccagccaatcaggagcatcgaacgacaaccactactttggctacagcaccccttgggggtattttgacttcaacagattccactgtcacttctccccacgtgactggcaaagactcattaacaacaactggggattccgacccaagagactcaacttcaagctctttaacattcaagtcaaagaggtcacgcagaatgacggtacgacgacgattgccaataaccttaccagcacggttcaggtgtttactgactcggagtaccagctcccgtacgtcctcggctcggcgcatcaaggatgcctcccgccgtttccagcggacgtcttcatggtcccacagtatggatacctcaccctgaacaacgggagtcaggcggtaggacgctcttccttttactgcctggagtactttccttctcagatgctgcgtaccggaaacaactttaccttcagctacacctttgaggacgtgcccttccacagcagctacgctcacagccagagtttggaccggctgatgaatcctctgatcgaccagtatctgtattatctgaacaggacacaatcaaatagtggaactcttcagcagtctaggctactgtttagccaagctggacccaccagcatgtcccttcaagctaaaaactggctgcctggaccttgctacagacagcagcgtctgtcaaagcaggcaaacgacaacaacaacagcaactttccctggactgcggctacaaagtatcatctaaatggtcgggactcgttggttaatccaggaccagctatggccagccacaaagacgatgaagaaaagtttttccccatgcatggaaccctgatatttggtaaacaaggaacaaatgctaacgacgcggatttggaacatgtcatgattacagatgaagaagaaatcaggaccaccaatcccgtggctacagagcagtacggaaacgtgtcaaataatttgcaaaactcaaatactggtccaactacagaaaatgtcaatcaccagggagcgttacctggtatggtgtggcaggatcgagacgtgtacctgcagggacccatttgggccaagattcctcacaccgacggacactttcacccttctccactgatgggaggttttggactcaaacacccgcctcctcaaatcatgatcaaaaacactcctgttccagccaatcctcctacaaacttcagcgcggcaaagtttgcttccttcatcacacggtattccacgggacaggtcagcgtggagatcgagtgggagctgcagaaggagaacagcaaacgctggaaccccgagatccagtacacttccaactacaacaaatctgttaatgtggactttactgtggacgctaatggtgtgtattcagagcctcgccccattggcaccagatacctgactcgtaatctgtaa

SEQ ID NO: 1452 - DNA, 2208 bp, Artificial Sequence
  Synthetic Polynucleotide
atggctgccgatggttatcttccagattggctcgaggacactctctctgaaggaataagacagtggtggaagctcaaacctggcccaccaccgccaaagcccgcagagcggcataaggacgacagcaggggtcttgtgcttcctgggtacaagtacctcggacccttcaacggactcgacaagggagagccggtcaacgaggcagacgccgcggccctcgagcacgacaaggcctacgaccggcagctcgacagcggagacaacccgtacctcaagtacaaccacgccgacgcggagcttcaggagcgccttaaagaagatacgtcttttgggggcaacctcggacgagcagtattccaggcgaaaaagagggttcttgaacctctgggcctggttgaggagcctgttaagacggctccgggaaaaaagaggccggtagagcactctcctgtggagccagactcctcctcgggaaccggaaaagcgggccagcagcctgcgagaaagagattgaattttggtcagactggagacgcagactccgtacctgacccccagcctctcggacagccaccagcagcccccacaagtttgggatctactacaatggctacaggcagtggcgcaccaatggcagacaataacgagggtgccgatggagtgggtaattcctcaggaaattggcattgcgattcccaatggtcgggcgacagagtcatcaccaccagcacccgaacctgggccctgcccacctacaacaaccacctctacaagcaaatctccagccaatcaggagccagcaacgacaaccactactttggctacagcaccccctgggggtattttgacttcaacagattccactgccacttttcaccacgtgactggcaaagactcatcaacaacaactggggattccgacccaagagactcaacttcaagctctttaacattcaagtcaaaggggtcacgcagaatgacggtacgacgacgattgccaataaccttaccagcacggttcaggtgtttactgactcggagtaccagctcccgtacgtcctcggctcggcgcatcaaggatgcctcccgccgtttccagcggacgtcttcatggtcccacagtatggatacctcaccctgaacaacgggagtcaggcggtaggacgctcttccttttactgcctggagtactttccttctcagatgcttcgtaccggaaacaactttaccttcagttacacctttgaagacgttcctttccacagcagctacgctcacagtcaaagtctggaccggctgatgaatcctcttatcgaccagtacctgtattatctaaacaaaacacaatcaaatagtggaactcttcagcagtctcggctactgtttagtcaagctggacctaccagcatgtctcttcaagctaaaaactggctgcctggaccttgctacagacaacagcgtctgtcaaagcaggcaaacgacaacaacaacagcaactttccctggactgcggctacaaagtatcatctaaatggccgggactcgttggttaatccaggaccagctatggccagccacaaagacgatgaagaaaagtttttccccatgcatggaaccctgatatttggcaaacaaggaacaaatgctaacgacgcggatttggacaatgtcatgattacagatgaagaagaaatccgtaccaccaatcccgtggctacggagcagtacgggactgtgtcaaataatttgcaaaactcaaatactggtccaactactggaactgtcaatcaccaaggagcgttacctggtatggtgtggcaggatcgagacgtgtaccttcagggacccatttgggccaagattcctcacaccgatggacactttcacccttctccgctgatgggaggttttggactcaaacacccgcctcctcagatcatgatcaaaaacactcccgttccagccaatcctcccacaaacttcagttctgccaagtttgcttctttcatcacacagtattccacgggacaggttagcgtggagatcgagtgggagctgcagaaggagaacagcaaacgctggaaccccgagatccagtacacttccaactacaacaagtctgttaatgtggactttactgtggacactaatggtgtgtattcagagcctcgccccattggcaccagatacctgactcgtaatctgtaa

SEQ ID NO: 1453 - DNA, 2208 bp, Artificial Sequence
  Synthetic Polynucleotide
atggctgccgatggttatcttccagattggctcgaggacattctctctgaaggaataagacagtggtggaagctcaaacctggcccaccaccaccaaagcccgcagagcggcataaggacgacagcaggggtcttgtgcttcctgggtacaagtacctcggacccttcaacggactcgacaaaggagagccggtcaacgaggcagacgccgcggccctcgagcacgacaaggcctacgaccggcagctcgacagcggagacaacccgtacctcaagtacaaccacgccgacgcggagtttcaggagcgtcttaaagaagatacgtcttttgggggcaacctcggacgagcagtcttccaggcaaaaaagagggttcttgaacctctgggcctggttgaggaacctgttaagacggctccgggaaaaaagaggccggtagagcaatctcctgcggagccagactcctcctcgggaaccggaaaggcgggcaaccagcctgcaagaaagagattgaattttggtcagactggagacgcagactccgtacctgacccccagcctctcggacatccaccagcagccccctctggtctgggatctactacaatggctacaggcagtggcgcaccaatggcagacaataacgagggtgccgatggagtgggtaattcctcaggaaattggcattgcgattcccaatggttgggcgacagagtcatcaccaccagcacccgaacctgggccctgcccacctacaacaatcacctctacaagcaaatctccagccaatcaggagccagcaacgacaaccactactttggctacagcaccccctgggggtattttgacttcaacagattccactgccacttttcaccacgtgactggcaaagactcatcaacaacaactggggattccgacccaaaagactcaacttcaagctctttaacattcaagtcaaagaggtcacgcagaatgacggtacgacgacgattgccaataaccttaccagcacggttcaggtgtttactgactcggagtaccagctcccgtacgtcctcggctcggcgcatcaaggatgcctcccgccgtttccagcggacgtcttcatggtcccacagtatggatacctcaccctgaacaacgggagtcaggcggtaggacgctcttccttttactgcctggagtactttccttctcagatgcttcgtaccggaaacaactttaccttcagttacacctttgaagacgttcctttccacagcagctacgctcacagtcaaagtctggaccggctgatgaatcctctgatagaccagtacctgtattatctaaacaaaacacaatcaaatagtggaactcttcagcagtctcggctactgtttagtcaagctggacccaccagcatgtctcttcaagctaaaaactggctgcctggaccttgctacagacaacagcgtctgtcaaagcaggcaaacgacaacaacaacagcaactttccctggactgcggctacaaagtatcatctaaatggccgggactcgttggttaatccaggaccagctatggccagccacaaagacgatgaagaaaagtttttccccatgcatggaaccctgatatttggtaaacaaggaacaaatgctaacgacgcggatttggacaatgtcatgattacagatgaagaagaaatccgcaccaccaatcccgtggctacggagcagtacgggactgtgtcaaataatttgcaaaactcaaatactggtccaactactggaactgtcaatcaccaaggagcgttacctggtatggtgtggcaggatcgagacgtgtaccttcagggacccatttgggccaagattcctcacaccgatggacactttcatccttctccactgatgggaggttttggactcaaacacccgcctcctcagatcatgatcaaaaacactcccgttccagccaatcctcctacaaacttcagttctgccaagtttgcttctttcatcacacagtattccacggggcaggtcagcgtggagatagagtgggagctgcagaaggagaacagcaaacgctggaaccccgagatccagtatacttccaactacaacaagtctgttaatgtggactttactgtggacactaatggtgtgtattcagagcctcgccccattggcaccagatacctgactcgtaatctgtaa

SEQ ID NO: 1454 - DNA, 2208 bp, Artificial Sequence
  Synthetic Polynucleotide
atggctgccgatggttatcttccagattggctcgaggacattctctctgaaggaataagacagtggtggaagctcaaacctggcccaccaccaccaaagcccgcagagcggcataaggacgacagcaggggtcttgtgcttcctgggtacaagtacctcggacccttcaacggactcgacaaaggagagccggtcaacgaggcagacgccgcggccctcgagcacgacaaggcctacgaccggcagctcgacagcggagacaacccgtacctcaagtacaaccacgccgacgcggagtttcaggagcgtcttaaagaagatacgtcttttgggggcaacctcggacgagcagtcttccaggcaaaaaagagggttcttgaacctctgggcctggttgaggaacctgttaagacggctccgggaaaaaagaggccggtagagcaatctcctgcggagccagactcctcctcgggaaccggaaaggcgggcaaccagcctgcaagaaagagattgaattttggtcagactggagacgcagactccgtacctgacccccagcctctcggacagccaccagcagccccctctggtctgggatctactacaatggctacaggcagtggcgcaccaatggcagacaataacgagggtgccgatggagtgggtaattcctcaggaaattggcattgcgattcccaatggttgggcgacagagtcatcaccaccagcacccgaacctgggccctgcccacctacaacaatcacctctacaagcaaatctccagccaatcaggagccagcaacgacaaccactactttggctacagcaccccctgggggtattttgacttcaacagattccactgccacttttcaccacgtgactggcaaagactcatcaacaacaactggggattccgacccaaaagactcaacttcaagctctttaacattcaagtcaaagaggtcacgcagaatgacggtacgacgacgattgccaataaccttaccagcacggttcaggtgtttactgactcggagtaccagctcccgtacgtcctcggctcggcgcatcaaggatgcctcccgccgtttccagcggacgtcttcatggtcccacagtatggatacctcaccctgaacaacgggagtcaggcggtaggacgctcttccttttactgcctggagtactttccttctcagatgcttcgtaccggaaacaactttaccttcagttacacctttgaagacgttcctttccacagcagctacgctcacagtcaaagtctggaccggctgatgaatcctctgatagaccagtacctgtattatctaaacaaaacacaatcaaatagtggaactcttcagcagtctcggctactgtttagtcaagctggacccaccagcatgtctcttcaagctaaaaactggctgcctggaccttgctacagacaacagcgtctgtcaaagcaggtaaacgacaacaacaacagcaactttccctggactgcggctacaaagtatcatctaaatggccgggactcgttggttaatccaggaccagctatggccagccacaaagacgatgaagaaaagtttttccccatgcatggaaccctgatatttggtaaacaaggaacaaatgctaacgacgcggatttggacaatgtcatgattacagatgaagaagaaatccgcaccaccaatcccgtggctacggagcagtacgggactgtgtcaaataatttgcaaaactcaaatactggtccaactactggaactgtcaatcaccaaggagcgttacctggtatggtgtggcaggatcgagacgtgtaccttcagggacccatttgggccaagattcctcacaccgatggacactttcatccttctccactgatgggaggttttggactcaaacacccgcctcctcagatcatgatcaaaaacactcccgttccagccaatcctcctacaaacttcagttctgccaagtttgcttctttcatcacacagtattccacggggcaggtcagcgtggagatagagtgggagctgcagaaggagaacagcaaacgctggaaccccgagatccagtatacttccaactacaacaagtctgttaatgtggactttactgtggacactaatggtgtgtattcagagcctcgccccattggcaccagatacctgactcgtaatctgtaa

SEQ ID NO: 1455 - DNA, 2208 bp, Artificial Sequence
  Synthetic Polynucleotide
atggctgccgatggttatcttccagattggctcgaggacattctctctgaaggaataagacagtggtggaagctcaaacctggcccaccaccaccaaagcccgcagagcggcataaggacgacagcaggggtcttgtgcttcctgggtacaagtacctcggacccttcaacggactcgacaaaggagagccggtcaacgaggcagacgccgcggccctcgagcacgacaaggcctacgaccggcagctcgacagcggagacaacccgtacctcaagtacaaccacgccgacgcggagtttcaggagcgtcttaaagaagatacgtcttttgggggcaacctcggacgagcagtcttccaggcaaaaaagagggttcttgaacctctgggcctggttgaggaacctgttaagacggctccgggaaaaaagaggccggtagagcaatctcctgcggagccagactcctcctcgggagccggaaaggcgggcaaccagcctgcaagaaagagattgaattttggtcagactggagacgcagactccgtacctgacccccagcctctcggacagccaccagcagccccctctggtctgggatctactacaatggctacaggcagtggcgcaccaatggcagacaataacgagggtgccgatggagtgggtaattcctcaggaaattggcattgcgattcccaatggttgggcgacagagtcatcaccaccagcacccgaacctgggccctgcccacctacaacaatcacctctacaagcaaatctccagccaatcaggagccagcaacgacaaccactactttggctacagcaccccctgggggtattttgacttcaacagattccactgccacttttcaccacgtgactggcaaagactcatcaacaacaactggggattccgacccaaaagactcaacttcaagctctttaacattcaagtcaaagaggtcacgcagaatgacggtacgacgacgattgccaataaccttaccagcacggttcaggtgtttactgactcggagtaccagctcccgtacgtcctcggctcggcgcatcaaggatgcctcccgccgtttccagcggacgtcttcatggtcccacagtatggatacctcaccctgaacaacgggagtcaggcggtaggacgctcttccttttactgcctggagtactttccttctcagatgcttcgtaccggaaacaactttaccttcagttacacctttgaagacgttcctttccacagcagctacgctcacagtcaaagtctggaccggctgatgaatcctctgatagaccagtacctgtattatctaaccaaaacacaatcaaatagtggaactcttcagcagtctcggctactgtttagtcaagctggacccaccagcatgtctcttcaagctaaaaactggctgcctggaccttgctacagacaacagcgtctgtcaaagcaggcaaacgacaacaacaacagcaactttccctggactgcggctacaaagtatcatctaaatggccgggactcgttggttaatccaggaccagctatggccagccacaaagacgatgaagaaaagtttttccccatgcatggaaccctgatatttggtaaacaaggaacaaatgctaacgacgcggatttggacaatgtcatgattacagatgaagaagaaatccgcaccaccaatcccgtggctacggagcagtacgggactgtgtcaaataatttgcaaaactcaaatactggtccaactactggaactgtcgatcaccaaggagcgttacctggtatggtgtggcaggatcgagacgtgtaccttcagggacccatttgggccaagattcctcacaccgatggacactttcatccttctccactgatgggaggttttggactcaaacacccgcctcctcagatcatgatcaaaaacactcccgttccagccaatcctcctacaaacttcagttctgccaagtttgcttctttcatcacacagtattccacggggcaggtcagcgtggagatagagtgggagctgcagaaggagaacagcaaacgctggaaccccgagatccagtatacttccaactacaacaagtctgttaatgtggactttactgtggacactaatggtgtgtattcagagcctcgccccattggcaccagatacctgactcgtaatctgtaa

SEQ ID NO: 1456 - DNA, 2208 bp, Artificial Sequence
  Synthetic Polynucleotide
atggctgccgatggttatcttccagattggctcgaggacattctctctgaaggaataagacagtggtggaagctcaaacctggcccaccaccaccaaagcccgcagagcggcataaggacgacagcaggggtcttgtgcttcctgggtacaagtacctcggacccttcaacggactcgacaaaggagagccggtcaacgaggcagacgccgcggccctcgagcacgacaaggcctacgaccggcagctcgacagcggagacaacccgtacctcaagtacaaccacgccgacgcggagtttcaggagcgtcttaaagaagatacgtcttttgggggcaacctcggacgagcagtcttccaggcaaaaaagagggttcttgaacctctgggcctggttgaggaacctgttaagacggctccgggaaaaaagaggccggtagagcaatctcctgcggagccagactcctcctcgggaaccggaaaggcgggcaaccagcctgcaagaaagagattgaattttggtcagactggagacgcagactccgtacctgacccccagcctctcggacagccaccagcagccccctctggtctgggatctactacaatggctacaggcagtggcgcaccaatggcagacaataacgagggtgccgatggagtgggtaattcctcaggaaattggcattgcgattcccaatggttgggcgacagagtcatcaccaccagcacccgaacctgggccctgcccacctacaacaatcacctctacaagcaaatctccagccaatcaggagccagcaacgacaaccactactttggctacagcaccccctgggggtattttgacttcaacagattccactgccacttttcaccacgtgactggcaaagactcatcaacaacaactggggattccgacccaaaagactcaacttcaagctctttaacattcaagtcaaagaggtcacgcagaatgacggtacgacgacgattgccaataaccttaccagcacggttcaggtgtttactgactcggagtaccagctcccgtacgtcctcggctcggcgcatcaaggatgcctcccgccgtttccagcggacgtcttcatggtcccacagtatggatacctcaccctgaacaacgggagtcaggcggtaggacgctcttccttttactgcctggagtactttccttctcagatgcttcgtaccggaaacaactttaccttcagttacacctttgaagacgttcctttccacagcagctacgctcacagtcaaagtctggaccggctgatgaatcctctgatagaccagtacctgtattatctaaacaaaacacaatcaaatagtggaactcttcagcagtctcggctactgcttagtcaagctggacccaccagcatgtctcttcaagctaaaaactggctgcctggaccttgctacagacaacagcgtctgtcaaagcaggcaaacgacaacaacaacagcaactttccctggactgcggctacaaagtatcatctaaatggccgggactcgttggttaatccaggaccagctatggccagccacaaagacgatgaagaaaagtttttccccatgcatggaaccctgatatttggtaaacaaggaacaaatgctaacgacgcggatttggacaatgtcatgattacagatgaagaagaaatccgcaccaccaatcccgtggctacggagcagtacgggactgtgtcaaataatttgcaaaactcaaatactggtccaactactggaactgtcaatcaccaaggagcgttacctggtatggtgtggcaggatcgagacgtgtaccttcagggacccatttgggccaagattcctcacaccgatggacactttcatccttctccactgatgggaggttttggactcaaacacccgcctcctcagatcatgatcaaaaacactcccgttccagccaatcctcctacaaacttcagttctgccaagtttgcttctttcatcacacagtattccacggggcaggtcagcgtggagatagagtgggagctgcagaaggagaacagcaaacgctggaaccccgagatccagtatacttccaactacaacaagtctgttaatgtggactttactgtggacactaatggtgtgtattcagagcctcgccccattggcaccagatacctgactcgtaatctgtaa

SEQ ID NO: 1457 - DNA, 2208 bp, Artificial Sequence
  Synthetic Polynucleotide
atggctgccgatggttatcttccagattggctcgaggacactctctctgaaggaataagacagtggtggaagctcaaacctggcccaccaccgccaaagcccgcagagcggcataaggacgacagcaggggtcttgtgcttcctgggtacaagtacctcggacccttcaacggactcgacaagggagagccggtcaacgaggcagacgccgcggccctcgagcacgacaaggcctacgaccggcagctcgacagcggagacaacccgtacctcaagtacaaccacgccgacgcggagtttcaggagcgccttaaagaagatacgtcttttgggggcaacctcggacgagcagtattccaggcgaaaaagagggttcttgaacctctgggcctggttgaggagcctgttaagacggctccgggaaaaaagaggccggtagagcactctcctgtggagccagactcctcctcgggaaccggaaaagcgggccagcagcctgcgagaaagagattgaattttggtcagactggagacgcagactccgtacctgacccccagcctctcggacagccaccagcagcccccacaagtttgggatctactacaatggctacaggcagtggcgcaccaatggcagacaataacgagggtgccgatggagtggataattcctcaggaaattggcattgcgattcccaatggtcgggcgacagagtcatcaccaccagcacccgaacctgggccctgcccacctacaacaaccacctctacaagcaaatctccagccaatcaggagccagcaacgacaaccactactttggctacagcaccccctgggggtattttgacttcaacagattccactgccacttttcaccacgtgactggcaaagactcatcaacaacaactggggattccgacccaagagactcaacttcaagctctttaacattcaagtcaaagaggtcacgcagaatgacggtacgacgacgattgccaataaccttaccagcacggttcaggtgtctactgactcggagtaccagctcccgtacgtcctcggctcggcgcatcaaggatgcctcccgccgtttccagcggacgtcttcatggtcccacagtatggatacctcaccctgaacaacgggagtcaggcggtaggacgctcttccttttactgcctggagtactttccttctcagatgcttcgtaccggaaacaactttaccttcagttacacctttgaagacgttcctttccacagcagctacgctcacagtcaaagtctggaccggctgatgaatcctcttatcgaccagtacctgtattatctaaacaaaacacaatcaaatagtggaactcttcagcagtctcggctactgtttagtcaagctggacctaccagcatgtctcttcaagctaaaaactggctgcctggaccttgctacagacaacagcgtctgtcaaagcaggcaaacgacaacaacaacagcaactttccctggactgcggctacaaagtatcatctaaatggccgggactcgttggttaatccaggaccagctatggccagccacaaagacgatgaagaaaagtttttccccatgcatggaaccctgatatttggcaaacaaggaacaaatgctaacgacgcggatttggacaatgtcatgattacagatgaagaagaaatccgtaccaccaatcccgtggctacggagcagtacgggactgtgtcaaataatttgcaaaactcaaatactggtccaactactggaactgtcaatcaccaaggagcgttacctggtatggtgtggcaggatcgagacgtgtaccttcagggacccatttgggccaagattcctcacaccgatggacactttcacccttctccgctgatgggaggttttggactcaaacacccgcctcctcagatcatgatcaaaaacactcccgttccagccaatcctcccacaaacttcagttctgccaagtttgcttctttcatcacacagtattccacgggacaggttagcgtggagatcgagtgggagctgcagaaggagaacagcaaacgctggaaccccgagatccagtacacttccaactacaacaagtctgttaatgtggactttactgtggacactaatggtgtgtattcagagcctcgccccattggcaccagatacctgactcgtaatctgtaa

SEQ ID NO: 1458 - DNA, 2208 bp, Artificial Sequence
  Synthetic Polynucleotide
atggctgccgatggttatcttccagattggctcgaggacactctctctgaaggaataagacagtggtggaagctcaaacctggcccaccaccgccaaagcccgcagagcggcataaggacgacagcaggggtcttgtgcttcctgggtacaagtacctcggacccttcaacggactcgacaagggagagccggtcaacgaggcagacgccgcggccctcgagcacgacaaggcctacgaccggcagctcgacagcggagacaacccgtacctcaagtacaaccacgccgacgcggagtttcaggagcgccttaaagaagatacgtcttttgggggcaacctcggacgagcagtattccaggcgaaaaagagggttcttgaacctctgggcctggttgaggagcctgttaagacggctccgggaaaaaagaggccggtagagcactctcctgtggagccagactcctcctcgggaaccggaaaagcgggccagcagcctgcgagaaagagattgaattttggtcagactggagacgcagactccgtacctgacccccagcctctcggacagccaccagcagcccccacaagtttgggatctactacaatggctacaggcagtggcgcaccaatggcagacaataacgagggtgccgatggagtgggtaattcctcaggaaattggcattgcgattcccaatggtcgggcgacagagtcatcaccaccagcacccgaacctgggccctgcccacctacaacaaccacctctacaagcaaatctccagccaatcaggagccagcaacgacaaccactactttggctacagcaccccctgggggtattttgacttcaacagattccactgccacttttcaccacgtgactggcaaagactcatcaacaacaactggggattccgacccaagagactcaacttcaagctctttaacattcaagtcaaagaggtcacgcagaatgacggtacgacgacgattgccaataaccttaccagcacggttcaggtgtttactgactcggagtaccagctcccgtacgtcctcggctcggcgcatcaaggatgcctcccgccgtttccggcggacgtcttcatggtcccacagtatggatacctcaccctgaacaacgggagtcaggcggtaggacgctcttccttttactgcctggagtactttccttctcagatgcttcgtaccggaaacaactttaccttcagttacacctttgaagacgttcctttccacagcagctacgctcacagtcaaagtctggaccggctgatgaatcctcttatcgaccagtacctgtattatctaaacaaaacacaatcaaatagtggaactcttcagcagtctcggctactgtttagtcaagctggacctaccagcatgtctcttcaagctaaaaactggctgcctggaccttgctgcagacaacagcgtctgtcaaagcaggcaaacgacaacaacaacagcaactttccctggactgcggctacaaagtatcatctaaatggccgggactcgttggttaatccaggaccagctatggccagccacaaagacgatgaagaaaagtttttccccatgcatggaaccctgatatttggcaaacaaggaacaaatgctaacgacgcggatttggacaatgtcatgattacagatgaagaagaaatccgtaccaccaatcccgtggctacggagcagtacgggactgtgtcaaataatttgcaaaactcaaatactggtccaactactggaactgtcaatcaccaaggagcgttacctggtatggtgtggcaggatcgagacgtgtaccttcagggacccatttgggccaagattcctcacaccgatggacactttcacccttctccgctgatgggaggttttggactcaaacacccgcctcctcagatcatgatcaaaaacactcccgttccagccaatcctcccacaaacttcagttctgccaagtttgcttctttcatcacacagtattccacgggacaggttagcgtggagatcgagtgggagctgcagaaggagaacagcaaacgctggaaccccgagatccagtacacttccaactacaacaagtctgttaatgtggactttactgtggacactaatggtgtgtattcagagcctcgccccattggcaccagatacctgactcgtaatctgtaa

SEQ ID NO: 1459 - DNA, 2208 bp, Artificial Sequence
  Synthetic Polynucleotide
atggctgccgatggttatcttccagattggctcgaggacattctctctgaaggaataagacagtggtggaagctcaaacctggcccaccaccaccaaagcccgcagagcggcataaggacgacagcaggggtctcgtgcttcctgggtacaagtacctcggacccttcaacggactcgacaaaggagagccggtcaacgaggcagacgccgcggccctcgagcacgacaaggcctacgaccggcagctcgacagcggagacaacccgtacctcaagtacaaccacgccgacgcggagtttcaggagcgtcttaaagaagatacgtcttttgggggcaacctcggacgagcagtcttccaggcaaaaaagagggttcttgaacctctgggcctggttgaggaacctgttaagacggctccgggaaaaaagaggccggtagagcaatctcctgcggagccagactcctcctcgggaaccggaaaggcgggcaaccagcctgcaagaaagagattgaattttggtcagactggagacgcagactccgtacctgacccccagcctctcggacagccaccagcagccccctctggtctgggatctactacaatggctacaggcagtggcgcaccaatggcagacaataacgagggtgccgatggagtgggtaattcctcaggaaattggcattgcgattcccaatggttgggcgacagagtcatcaccaccagcacccgaacctgggccctgcccacctacaacaatcacctctacaagcaaatctccagccaatcaggagccagcaacgacaaccactactttggctacagcaccccctgggggtattttgacttcaacagattccactgccacttttcaccacgtgactggcaaagactcatcaacaacaactggggattccgacccaaaagactcaacttcaagctctttaacattcaagtcaaagaggtcacgcagaatgacggtacgacgacgattgccaataaccttaccagcacggttcaggtgtttactgactcggagtaccagctcccgtacgtcctcggctcggcgcatcaaggatgcctcccgccgtttccagcggacgtcttcatggtcccacagtatggatacctcaccctgaacaacgggagtcaggcggtaggacgctcttccttttactgcctggagtactttccttctcagatgcttcgtaccggaaacaactttaccttcagttacacctttgaagacgttcctttccacagcagctacgctcacagtcaaagtctggaccggctgatgaatcctctgatagaccagtacctgtattatctaaacaaaacacaatcaaatagtggaactcttcagcagtctcggctactgtttagtcaagctggacccaccagcatgtctcttcaagctaaaaactggctgcctggaccttgctacagacaacagcgtctgtcaaagcaggcaaacgacaacaacaacagcaactttccctggactgcggctacaaagtatcatctaaatggccgggactcgttggttaatccaggaccagctatggccagccacaaagacgatgaagaaaagtttttccccatgcatggaaccctgatatttggtaaacaaggaacaaatgctaacgacgcggatttggacaatgtcatgattacagatgaagaagaaatccgcaccaccaatcccgtggctacggagcagtacgggactgtgtcaaataatttgcaaaactcaaatactggtccaactactggaactgtcaatcaccaaggagcgttacctggtatggtgtggcaggatcgagacgtgtaccttcagggacccatttgggccaagattcctcacaccgatggacactttcatccttctccactgatgggaggttttggactcaaacacccgcctcctcagatcatgatcaaaaacactcccgttccagccaatcctcctacaaacttcagttctgccaagtttgcttctttcatcacacagtattccacggggcaggtcagcgtggagatagagcgggagctgcagaaggagaacagcaaacgctggaaccccgagatccagtatacttccaactacaacaagtctgttaatgtggactttactgtggacactaatggtgtgtattcagagcctcgccccattggcaccagatacctgactcgtaatctgtaa

SEQ ID NO: 1460 - DNA, 2208 bp, Artificial Sequence
  Synthetic Polynucleotide
atggctgccgatggttatcttccagattggctcgaggacattctctctgaaggagtaagacagtggtggaagctcaaacctggcccaccaccaccaaagcccgcagagcggcataaggacgacagcaggggtcttgtgcttcctgggtacaagtacctcggacccttcaacggactcgacaaaggagagccggtcaacgaggcagacgccgcggccctcgagcacgacaaggcctacgaccggcagctcgacagcggagacaacccgtacctcaagtacaaccacgccgacgcagagtttcaggagcgtcttaaagaagatacgtcttttgggggcaacctcggacgagcagtcttccaggcaaaaaagagggttcttgaacctctgggcctggttgaggaacctgttaagacggctccgggaaaaaagaggccggtagagcaatctcctgcggagccagactcctcctcgggaaccggaaaggcgggcaaccagcctgcaagaaagagattgaattttggtcagactggagacgcagactccgtacctgacccccagcctctcggacagccaccagcagccccctctggtctgggatctactacaatggctacaggcagtggcgcaccaatggcagacaataacgagggtgccgatggagtgggtaattcctcaggaaattggcattgcgattcccaatggttgggcgacagagtcatcaccaccagcacccgaacctgggccctgcccacctacaacaatcacctctacaagcaaatctccagccaatcaggagccagcaacgacaaccactactttggctacagcaccccctgggggtattttgacttcaacagattccactgccacttttcaccacgtgactggcaaagactcatcaacaacaactggggattccgacccaaaagactcaacttcaagctctttaacattcaagtcaaagaggtcacgcagaatgacggtacgacgacgattgccaataaccttaccagcacggttcaggtgtttactgactcggagtaccagctcccgtacgtcctcggctcggcgcatcaaggatgcctcccgccgtttccagcggacgtcttcatggtcccacagtatggatacctcaccctgaacaacgggagtcaggcggtaggacgctcttccttttactgcctggagtactttccttctcagatgcttcgtaccggaaacaactttaccttcagttacacctttgaagacgttcctttccacagcagctacgctcacagtcaaagtctggaccggctgatgaatcctctgatagaccagtacctgtattatctaaacaaaacacaatcaaatagtggaactcttcagcagtctcggctactgtttagtcaagctggacccaccagcatgtctcttcaagctaaaaactggctgcctggaccttgctacagacaacagcgtctgtcaaagcaggcaaacgacaacaacaacagcaactttccctggactgcggctacaaagtatcatctaaatggccgggactcgttggttaatccaggaccagctatggccagccacaaagacgatgaagaaaagtttttccccatgcatggaaccctgatatttggtaaacaaggaacaaatgctaacgacgcggatttggacaatgtcatgattacagatgaagaagaaatccgcaccaccaatcccgtggctacggagcagtacgggactgtgtcaaataatttgcaaaactcaaatactggtccaactactggaactgtcaatcaccaaggagcgttacctggtatggtgtggcaggatcgagacgtgtaccttcagggacccatttgggccaagattcctcacaccgatggacactttcatccttctccactgatgggaggttttggactcaaacacccgcctcctcagatcatgatcaaaaacactcccgttccagccaatcctcctacaaacttcagttctgccaagtttgcttctttcatcacacagtattccacggggcaggtcagcgtggagatagagtgggagctgcagaaggagaacagcaaacgctggaaccccgagatccagtatacttccaactacaacaagtctgttaatgtggactttactgtggacactaatggtgtgtattcagagcctcgccccattggcaccagatacctgactcgtaatctgtaa

SEQ ID NO: 1461 - DNA, 2208 bp, Artificial Sequence
  Synthetic Polynucleotide
atggctgccgatggttatcttccagattggctcgaggacactctctctgaaggaataagacagtggtggaagctcaaacctggcccaccaccgccaaagcccgcagagcggcataaggacgacagcaggggtcttgtgcttcctgggtacaagtacctcggacccttcaacggactcgacaagggagagccggtcaacgaggcagacgccgcggccctcgagcacgacaaggcctacgaccggcagctcgacagcggagacaacccgtacctcaagtacaaccacgccgacgcggagtttcaggagcgccttaaagaagatacgtcttttgggggcaacctcggacgagcagtattccaggcgaaaaagagggttcttgaacctctgggcctggttgaggagcctgttaagacggctccgggaaaaaagaggccggtagagcactctcctgtggagccagactcctcctcgggaaccggaaaagcgggccagcagcctgcgagaaagagattgaattttggtcagactggagacgcagactccgtacctgacccccagcctctcggacagccaccagcagcccccacaagtttgggatctactacaatggctacaggcagtggcgcaccaatggcagacaataacgagggtgccgatggagtgggtaattcctcaggaaattggcattgcgattcccaatggtcgggcgacagagtcatcaccaccagcacccgaacctgggccctgcccacctacaacaaccacctctacaagcaaatctccagccaatcaggagccagcaacgacaaccactactttggctacagcaccccctgggggtattttgacttcaacagattccactgccacttttcaccacgtgactggcaaagactcatcaacaacaactggggattccgacccaagagactcaacttcaagctctttaacattcaagtcaaagaggtcacgcagaatgacggtacgacgacgattgccaataaccttaccagcacggttcaggtgtctactgactcggagtaccagctcccgtacgtcctcggctcggcgcatcaaggatgcctcccgccgtttccagcggacgtcttcatggtcccacagtatggatacctcaccctgaacaacgggagtcaggcggtaggacgctcttccttttactgcctggagtactttccttctcagatgcttcgtaccggaaacaactttaccttcagttacacctttgaagacgttcctttccacagcagctacgctcacagtcaaagtctggaccggctgatgaatcctcttatcgaccagtacctgtattatctaaacaaaacacaatcaaatagtggaactcttcagcagtctcggctactgtttagtcaagctggacctaccagcatgtctcttcaagctaaaaactggctgcctggaccttgctacagacaacagcgtctgtcaaagcaggcaaacgacaacaacaacagcaactttccctggactgcggctacaaagtatcatctaaatggccgggactcgttggttaatccaggaccagctatggccagccacaaagacgatgaagaaaagtttttccccatgcatggaaccctgatatttggcaaacaaggaacaaatgctaacgacgcggatttggacaatgtcatgattacagatgaagaagaaatccgtaccaccaatcccgtggctacggagcagtacgggactgtgtcaaataatttgcaaaactcaaatactggtccaactactggaactgtcaatcaccaaggagcgttacctggtatggtgtggcaggatcgagacgtgtaccttcagggacccatttgggccaagattcctcacaccgatggacactttcacccttctccgctgatgggaggttttggactcaaacacccgcctcctcagatcatgatcaaaaacactcccgttccagccaatcctcccacaaacttcagttctgccaagtttgcttctttcatcacacagtattccacgggacaggttagcgtggagatcgagtgggagctgcagaaggagaacagcaaacgctggaaccccgagatccagtacacttccaactacaacaagtctgttaatgtggactttactgtggacactaatggtgtgtattcagagcctcgccccattggcaccagatacctgactcgtaatctgtaa

SEQ ID NO: 1462 - DNA, 2208 bp, Artificial Sequence
  Synthetic Polynucleotide
atggctgccgatggttatcttccagattggctcgaggacattctctctgaaggaataagacagtggtggaagctcaaacctggcccaccaccaccaaagcccgcagagcggcataaggacgacagcaggggtcttgtgcttcctgggtacaagtacctcggacccttcaacggactcgacaaaggagagccggtcaacgaggcagacgccgcggccctcgagcacgacaaggcctacgaccggcagctcgacagcggagacaacccgtacctcaagtacaaccacgccgacgcggagtttcaggagcgtcttaaagaagatacgtcttttgggggcaacctcggacgagcagtcttccaggcaaaaaagagggttcttgaacctctgggcctggttgaggaacctgttaagacggctccgggaaaaaagaggccggtagagcaatctcctgcggagccagactcctcctcgggaaccggaaaggcgggcaaccagcctgcaagaaagagattgaattttggtcagactggagacgcagactccgtacctgacccccagcctctcggacagccaccagcagccccctctggtctgggatctactacaatggctacaggcagtggcgcaccaatggcagacaataacgagggtgccgatggagtgggtaattcctcaggaaattggcattgcgattcccaatggttgggcgacagagtcatcaccaccagcacccgaacctgggccctgcccacctacaacaatcacctctacaagcaaatctccagccaatcaggagccagcaacgacaaccactactttggctacagcaccccctgggggtattttgacttcaacagattccactgccacttttcaccacgtgactggcaaagactcatcaacaacaactggggattccgacccaaaagactcaacttcaagctctttaacattcaagtcaaagaggtcacgcagaatgacggtacgacgacgattgccaataaccttaccagcacggttcaggtgtttactgactcggagtaccagctcccgtacgtcctcggctcggcgcatcaaggatgcctcccgccgtttccagcggacgtcttcatggtcccacagtatggatacctcaccctgaacaacgggagtcaggcggtaggacgctcttccttttactgcctggagtactttccttctcagatgcttcgtaccggaaacaactttaccttcagttacacctttgaagacgttcctttccacagcagctacgctcacagtcaaagtctggaccggctgatgaatcctctgatagaccagtacctgtattatctaaacaaaacacaatcaaatagtggaactcttcagcagtctcggctactgtttagtcaagctggacccaccagcatgtctcttcaagctaaaaactggctgcctggaccttgctacagacaacagcgtctgtcaaagcaggcaaacgacaacaacaacagcaactttccctggactgcggctacaaagtatcatctaaatggccgggactcgttggttaatccaggaccagctatggccagccacaaagacgatgaagaaaagtttttccccatgcatggaaccctgatatttggtaaacaaggaacaaatgctaacgacgcggatttggacaatgtcatgattacagatgaagaagaaatccgcaccaccaatcccgtggctacggagcagtacgggactgtgtcaaataatttgcaaaactcaaatactggtccaactactggaactgtcaatcaccaaggagcgttacctggtatggtgtggcaggatcgagacgtgtaccttcagggacccatttgggccaagattcctcacaccgatggacactttcatccttctccactgatgggaggttttggactcaaacacccgcctcctcagatcatgatcaaaaacactcccgttccagtcaatcctcctacaaacttcagttctgccaagtttgcttctttcatcacacagtattccacggggcaggtcagcgtggagatagagtgggagctgcagaaggagaacagcaaacgctggaaccccgagatccagtatacttccaactacaacaagtctgttaatgtggactttactgtggacactaatggtgtgtattcagagcctcgccccattggcaccagatacctgactcgtaatctgtaa

SEQ ID NO: 1463 - DNA, 2208 bp, Artificial Sequence
  Synthetic Polynucleotide
atggctgccgatggttatcttccagattggctcgaggacactctctctgaaggaataagacagtggtggaagctcaaacctggcccaccaccgccaaagcccgcagagcggcataaggacgacagcaggggtcttgtgcttcctgggtacaagtacctcggacccttcaacggactcgacaaaggagagccggtcaacgaggcagacgccgcggccctcgagcacgacaaggcctacgaccggcagctcgacagcggagacaacccgtacctcaagtacaaccacgccgacgcggagtttcaggagcgccttaaagaagatacgtcttttgggggcaacctcgcaagagcagtattccaggcgaaaaagagggttcttgaacctctgggcctggttgaggagcctgttaagacggctccgggaaaaaagaggccggtagagcactctcctgcggagccagattcctcctccggaactggaaagtcgggccaacagcctgcaagaaagagattgaattttggtcagactggagacgcagactccgtacctgacccccagcctctcggacagccaccagcagccccctctggtctgggatctactacaatggctacaggcagtggcgcaccaatggcagacaataacgagggtgccgatggagtgggtaattcctcaggaaattggcattgcgattcccaatggttgggcgacagagtcatcaccaccagcacccgaacctgggccctgcccacctacaacaatcacctctacaagcaaatctccagccaatcaggagccagcaacgacaaccactactttggctacagcaccccctgggggtattttgacttcaacagattccactgccacttttcaccacgtgactggcaaagactcatcaacaacaactggggattccgacccaaaagactcaacttcaagctctttaacattcaagtcaaagaggtcacgcagaatgacggtacgacgacgattgccaataaccttaccagcacggttcaggtgtttactgactcggagtaccagctcccgtacgtcctcggctcggcgcatcaaggatgcctcccgccgtttccagcggacgtcttcatggtcccacagtatggatacctcaccctgaacaacgggagtcaggcggtaggacgctcttccttttactgcctggagtactttccttctcagatgcttcgtaccggaaacaactttaccttcagttacacctttgaagacgttcctttccacagcagctacgctcacagtcaaagtctggaccggctgatgaatcctctgatagaccagtacctgtattatctaaacaaaacacaatcaaatagtggaactcttcagcagtctcggctactgtttagtcaagctggacccaccagcatgtctcttcaagctaaaaactggctgcctggaccttgctacagacaacagcgtctgtcaaagcaggcaaacgacaacaacaacagcaactttccctggactgcggctacaaagtatcatctaaatggccgggactcgttggttaatccaggaccagctatggccagccacaaagacgatgaagaaaagtttttccccatgcatggaaccctgatatttggtaaacaaggaacaaatgctaacgacgcggatttggacaatgtcatgattacagatgaagaagaaatccgcaccaccaatcccgtggctacggagcagtacgggactgtgtcaaataatttgcaaaactcaaatactggtccaactactggaactgtcaatcaccaaggagcgttacctggtatggtgtggcaggatcgagacgtgtaccttcagggacccatttgggccaagattcctcacaccgatggacactttcatccttctccactgatgggaggttttggactcaaacacccgcctcctcagatcatgatcaaaaacactcccgttccagccaatcctcctacaaacttcagttctgccaagtttgcttctttcatcacacagtattccacggggcaggtcagcgtggagatagagtgggagctgcagaaggagaacagcaaacgctggaaccccgagatccagtatacttccaactacaacaagtctgttaatgtggactttactgtggacactaatggtgtgtattcagagcctcgccccattggcaccagatacctgactcgtaatctgtaa

SEQ ID NO: 1464 - DNA, 2208 bp, Artificial Sequence
  Synthetic Polynucleotide
atggctgccgatggttatcttccagattggctcgaggacattctctctgaaggaataagacagtggtggaagctcaaacctggcccaccaccaccaaagcccgcagagcggcataaggacgacagcaggggtcttgtgcttcctgggtacaagtacctcggacccttcaacggactcgacaaaggagagccggtcaacgaggcagacgccgcggccctcgagcacgacaaggcctacgaccggcagctcgacagcggagacaacccgtacctcaagtacaaccacgccgacgcggagtttcaggagcgtcttaaagaagatacgtcttttgggggcaacctcggacgagcagtcttccaggcaaaaaagagggttcttgaacctctgggcctggttgaggaacctgttaagacggctccgggaaaaaagaggccggtagagcaatctcctgcggagccagactcctcctcgggaaccggaaaggcgggcaaccagcctgcaagaaagagattgaattttggtcagactggagacgcagactccgtacctgacccccagcctctcggacagccaccagcagccccctctggtctgggatctactacaatggctacaggcagtggcgcaccaatggcagacaataacgagggtgccgatggagtgggtaattcctcaggaaattggcattgcgattcccaatggttgggcgacagagtcatcaccaccagcacccgaacctgggccctgcccacctacaacaatcacctctacaagcaaatctccagccaatcaggagccagcaacgacaaccactactttggctacagcaccccctgggggtattttgacttcaacagattccactgccacttttcaccacgtgactggcaaagactcatcaacaacaactggggattccgacccaaaagactcaacttcaagctctttaacattcaagtcaaagaggtcacgcagaatgacggtacgacgacgattgccaataaccttaccagcacggttcaggtgtttactgactcggagtaccagctcccgtacgtcctcggctcggcgcatcaaggatgcctcccgccgtttccagcggacgtcttcatggtcccacagtatggatacctcaccctgaacaacgggagtcaggcggtaggacgctcttccttttactgcctggagtactttccttctcagatgcttcgtaccggaaacaactttaccttcagttacacctttgaagacgttcctttccacagcagctacgctcacagtcaaagtctggaccggctgatgaatcctctgatagaccagtacctgtattatctaaacaaaacacaatcaaatagtggaactcttcagcagtctcggctactgtttagtcaagctggacccaccagcatgtctcttcaagctaaaaactggctgcctggaccttgctacagacaacagcgtctgtcaaagcaggcaaacgacaacaacaacagcaactttccctggactgcggctacaaagtatcatctaaatggccgggactcgttggttaatccaggaccagctatggccagccacaaagacgatgaagaaaagtttttccccatgcatggaaccctgatatttggtaaacaaggaacaaatgctaacgacgcggatttggacaatgtcatgattacagatgaagaagaaatccgcaccaccaatcccgtggctacggagcagtacgggactgtgtcaaataatttgcaaaactcaaatactggtccaactactggaactgtcaatcaccaaggagcgttacctggtatggtgtggcaggatcgagacgtgtaccttcagggacccatttgggccaagattcctcacaccgatggacactttcatccttccccactgatgggaggttttggactcaaacacccgcctcctcagatcatgatcaaaaacactcccgttccagccaatcctcctacaaacttcagttctgccaagtttgcttctttcatcacacagtattccacggggcaggtcagcgtggggatagagtgggagctgcagaaggagaacagcaaacgctggaaccccgagatccagtatacttccaactacaacaagtctgttaatgtggactttactgtggacactaatggtgtgtattcagagcctcgccccattggcaccagatacctgactcgtaatctgtaa

SEQ ID NO: 1465 - DNA, 2205 bp, Artificial Sequence
  Synthetic Polynucleotide
atggctgccgatggttatcttccagattggctcgaggacattctctctgaaggaataagacagtggtggaagctcaaacctggcccaccaccaccaaagcccgcagagcggcataaggacgacagcaggggtcttgtgcttcctgggtacaagtacctcggacccttcaacggactcgacaaaggagagccggtcaacgaggcagacgccgcggccctcgagcacgacaaggcctacgaccggcagctcgacagcggagacaacccgtacctcaagtacaaccacgccgacgcggagtttcaggagcgtcttaaagaagatacgtcttttgggggcaacctcggacgagcagtcttccaggcaaaaaagagggttcttgaacctctgggcctggttgaggaacctgttaagacggctccgggaaaaaagaggccggtagagcaatctcctgcggagccagactcctcctcgggaaccggaaaggcgggcaaccagcctgcaagaaagagattgaattttggtcagactggagacgcagactccgtacctgacccccagcctctcggacagccaccagcagccccctctggtctgggatctactacaatggctacaggcagtggcgcaccaatggcagacaataacgagggtgccgatggagtgggtaattcctcaggaaattggcattgcgattcccaatggttgggcgacagagtcatcaccaccagcacccgaacctgggccctgcccacctacaacaatcacctctacaagcaaatctccagccaatcaggagccagcaacgacaaccactactttggctacagcaccccctgggggtattttgacttcaacagattccactgccacttttcaccacgtgactggcaaagactcatcaacaacaactggggattccgacccaaaagactcaacttcaagctctttaacattcaagtcaaagaggtcacgcagaatgacggtacgacgacgattgccaataaccttaccagcacggttcaggtgtttactgactcggagtaccagctcccgtacgtcctcggctcggcgcatcaaggatgcctcccgccgtttccagcggacgtcttcatggtcccacagtatggatacctcaccctgaacaacgggagtcaggcggtaggacgctcttccttttactgcctggagtactttccttctcagatgcttcgtaccggaaacaactttaccttcagttacacctttgaagacgttcctttccacagcagctacgctcacagtcaaagtctggaccggctgatgaatcctctgatagaccagtacctgtattatctaaacaaaacacaatcaaatagtggaactcttcagcagtctcggctactgtttagtcaagctggacccaccagcatgtctcttcaagctaaaaactggctgcctggaccttgctacagacaacagcgtctgtcaaagcaggcaaacgacaacaacagcaactttccctggactgcggctacaaagtatcatctaaatggccgggactcgttggttaatccaggaccagctatggccagccacaaagacgatgaagaaaagtttttccccatgcatggaaccctgatatttggtaaacaaggaacaaatgctaacgacgcggatttggacaatgtcatgattacagatgaagaagaaatccgcaccaccaatcccgtggctacggagcagtacgggactgtgtcaaataatttgcaaaactcaaatactggtccaactactggaactgtcaatcaccaaggagcgttacctggtatggtgtggcaggatcgagacgtgtaccttcagggacccatttgggccaagattcctcacaccgatggacactttcatccttctccactgatgggaggttttggactcaaacacccgcctcctcagatcatgatcaaaaacactcccgttccagccaatcctcctacaaacttcagttctgccaagtttgcttctttcatcacacagtattccacggggcaggtcagcgtggagatagagtgggagctgcagaaggagaacagcaaacgctggaaccccgagatccagtatacttccaactacaacaagtctgttaatgtggactttactgtggacactaatggtgtgtattcagagcctcgccccattggcaccagatacctgactcgtaatctgtaa

SEQ ID NO: 1466 - DNA, 2208 bp, Artificial Sequence
  Synthetic Polynucleotide
atggctgccgatggttatcttccagattggctcgaggacactctctctgaaggaataagacagtggtggaagctcaaacctggcccaccaccgccaaagcccgcagagcggcataaggacgacagcaggggtcttgtgcttcctgggtataagtacctcggacccttcaacggactcgacaagggagagccggtcaacgaggcagacgccgcggccctcgagcacgacaaggcctacgaccggcagctcgacagcggagacaacccgtacctcaagtacaaccacgccgacgcggagtttcaggagcgccttaaagaagatacgtcttttgggggcaacctcggacgagcagtattccaggcgaaaaagagggttcttgaacctctgggcctggttgtggagcctgttaagacggctccgggaaaaaagaggccggtagagcactctcctgtggagccagactcctcctcgggaaccggaaaagcgggccagcagcctgcgagaaagagattgaattttgatcagactggaggcgcagactccgtacctgacccccagcctctcggacagccaccagcagcccccacaagtttgggatctactacaatggctacaggcagtggcgcaccaatggcagacaataacgagggtgccgatggagtgggtaattcctcaggaaattggcattgcgattcccaatggtcgggcgacagagtcatcaccaccagcacccgaacctgggccctgcccacctacaacaaccacctctacaagcaaatctccagccgatcaggagccagcaacgacaaccactactttggctacagcaccccctgggggtattttgacttcaacggattccactgccacttttcaccacgtgactggcaaagactcatcaacaacaactggggattccgacccaagagactcaacttcaagctctttaacattcaagtcaaagaggtcacgcagaatgacggtacgacgacgattgccaataaccttaccagcacggttcaggtgtttactgactcggagtaccagctcccgcacgtcctcggctcggcgcatcaaggatgcctcccgccgtttccagcggacgtcttcatggtcccacagtatggatacctcaccctgaacaacgggagtcaggcggtaggacgctcttccttttactgcccggggtactttccttctcagatgcttcgtaccggaaacaactttaccttcagttacacctttgaagacgttcctttccacagcagctacgctcacagtcaaagtctggaccggctgatgaatcctcttatcgaccagtacctgtattatctaaacaaaacacaatcaaatagtggaactcttcagcagtctcggctactgtttagtcaagctggacctaccagcatgtctcttcaagctaaaaactggctgcctggaccttgctacagacaacagcgtctgtcaaagcaggcaaacggcaacaacaacagcaactttccctggactgcggctacaaagtatcatctaaatggccgggactcgttggttaatccaggaccagctatggccagccacaaagacgatgaagaaaagtttttccccatgcatggaaccctgatatttggcaaacaaggaacaaatgctaacgacgcggatttggacaatgtcatgattacagatgaagaagaaatccgtaccaccaatcccgtggctacggagcagtacgggactgtgtcaaataatttgcaaaactcaaatactggtccaactactggaactgtcaatcaccaaggagcgttacctggtatggtgtggcaggatcgagacgtgtaccttcagggacccatttgggccaagattcctcacaccgatggacactttcacccttctccgctgatgggaggttttggactcaaacacccgcctcctcagatcatgatcaaaaacactcccgttccagccaatcctcccacaaacttcagttctgccaagtttgcttctttcatcacacagtattccacgggacaggttagcgtggagatcgagtgggagctgcagaaggagaacagcaaacgctggaaccccgagatccagtacacttccaactacaacaagtctgttaatgtggactttactgtggacactaatggtgtgtattcagagcctcgccccattggcaccagatacctgactcgtaatctgtaa

SEQ ID NO: 1467 - DNA, 2205 bp, Artificial Sequence
  Synthetic Polynucleotide
atggctgccgatggttatcttccagattggctcgaggacactctctctgaaggaataagacagtggtggaagctcaaacctggcccaccaccgccaaagcccgcagagcggcataaggacgacagcaggggtcttgtgcttcctgggtacaagtacctcggacccttcaacggactcgacaagggagagccggtcaacgaggcagacgccgcggccctcgagcacgacaaggcctacgaccggcagctcgacagcggagacaacccgtacctcaagtacaaccacgccgacgcggagtttcaggagcgccttaaagaagatacgtcttttgggggcaacctcggacgagcagtattccaggcgaaaaagagggttcttgaacctctgggcctggttgaggagcctgttaagacggctccgggaaaaaagaggccggtagagcactctcctgtggagccagactcctcctcgggaaccggaaaagcgggccagcagcctgcgagaaagagattgaattttggtcagactggagacgcagactccgtacctgacccccagcctctcggacagccaccagcagcccccacaagtttgggatctactacaatggctacaggcagtggcgcaccaatggcagacaataacgagggtgccgatggagtgggtaattcctcaggaaattggcattgcgattcccaatggtcgggcgacagagtcatcaccaccagcacccgaacctgggccctgcccacctacaacaaccacctctacaagcaaatctccagccaatcaggagccagcaacgacaaccactactttggctacagcaccccctgggggtattttgacttcaacagattccactgccacttttcaccacgtgactggcaaagactcatcaacaacaactggggattccgacccaagagactcaacttcaagctctttaacattcaagtcaaagaggtcacgcagaatgacggtacgacgacgattgccaataaccttaccagcacggttcaggtgtttactgactcggagtaccagctcccgtacgtcctcggctcggcgcatcaaggatgcctcccgccgtttccagcggacgtcttcatggtcccacagtatggatacctcaccctgaacaacgggagtcaggcggtaggacgctcttccttttactgcctggagtactttccttctcagatgcttcgtaccggaaacaactttaccttcagttacacctttgaagacgttcctttccacagcagctacgctcacagtcaaagtctggaccggctgatgaatcctcttatcgaccagtacctgtattatctaaacaaaacacaatcaaatagtggaactcttcagcagtctcggctactgtttagtcaagctggacctaccagcatgtctcttcaagctaaaaactggctgcctggaccttgctacagacaacagcgtctgtcaaagcaggcaaacgacaacaacagcaactttccctggactgcggctacaaagtatcatctaaatggccgggactcgttggttaatccaggaccagctatggccagccacaaagacgatgaagaaaagtttttccccatgcatggaaccctgatatttggcaaacaaggaacaaatgctaacgacgcggatttggacaatgtcatgattacagatgaagaagaaatccgtaccaccaatcccgtggctacggagcagtacgggactgtgtcaaataatttgcaaaactcaaatactggtccaactactggaactgtcaatcaccaaggagcgttacctggtatggtgtggcaggatcgagacgtgtaccttcagggacccatttgggccaagattcctcacaccgatggacactttcacccttctccgctgatgggaggttttggactcaaacacccgcctcctcagatcatgatcaaaaacactcccgttccagccaatcctcccacaaacttcagttctgccaagtttgcttctttcatcacacagtattccacgggacaggttagcgtggagatcgagtgggagctgcagaaggagaacagcaaacgctggaaccccgagatccagtacacttccaactacaacaagtctgttaatgtggactttactgtggacactaatggtgtgtattcagagcctcgccccattggcaccagatacctgactcgtaatctgtaa

SEQ ID NO: 1468 - DNA, 2208 bp, Artificial Sequence
  Synthetic Polynucleotide
atggctgccgatggttatcttccagattggctcgaggacattctctctgaaggaataagacagtggtggaagctcaaacctggcccaccaccaccaaagcccgcagagcggcataaggacgacagcaggggtcttgtgcttcctgggtacaagtacctcggacccttcaacggactcgacaaaggagagccggtcaacgaggcagacgccgcggccctcgagcacgacaaggcctacgaccggcagctcgacagcggagacaacccgtacctcaagtacaaccacgccgacgcggagtttcaggagcgtcttaaagaagatacgtcttttgggggcaacctcggacgagcagtcttccaggcaaaaaagagggttcttgaacctctgggcctggttgaggaacctgttaagacggctccgggaaaaaagaggccggtagagcaatctcctgcggagccagactcctcctcgggaaccggaaaggcgggcaaccagcctgcaagaaagagattgaattttggtcagactggagacgcagactccgtacctgacccccagcctctcggacagccaccagcagccccctctggtctgggatctactacaatggctacaggcagtggcgcaccaatggcagacaataacgagggtgccgatggagtgggtaattcctcaggaaattggcattgcgattcccaatggttgggcgacagagtcatcaccaccagcacccgaacctgggccctgcccacctacaacaatcacctctacaagcaaatctccagccaatcaggagccagcaacgacaaccactactttggctacagcaccccctgggggtattttgacttcaacagattccactgccacttttcaccacgtgactggcaaagactcatcaacaacaactggggattccgacccaaaagactcaacttcaagctctttaacattcaagtcaaagaggtcacgcagaatgacggtacgacgacgattgccaataaccttaccagcacggttcaggtgtttactgactcggagtaccagctcccgtacgtcctcggctcggcgcatcaaggatgcctcccgccgtttccagcggacgtcttcatggtcccacagtatggatacctcaccctgaacaacgggagtcaggcggtaggacgctcttccttttactgcctggagtactttccttctcagatgcttcgtaccggaaacaactttaccttcagttacacctttgaagacgttcctttccacagcagctacgctcacagtcaaagtctggaccggctgatgaatcctctgatagaccagtacctgtattatctaaacaaaacacaatcaaatagtggaactcttcagcagtctcggctactgtttagtcaagctggacccaccagcatgtctcttcaagctaaaaactggctgcctggaccttgctacagacaacagcgtctgtcaaagcaggcaaacgacaacaacaacagcaactttccctggactgcggctacaaagtatcatctaaatggccgggactcgttggttaatccaggaccagctatggccagccacaaagacgatgaagaaaagtttttccccatgcatggaaccctgatatttggtaaacaaggaacaaatgctaacgacgcggatttggacaatgtcatgattacagatgaagaagaaatccgcaccaccaatcccgtggctacggagcagtacgggactgtgtcaaataatttgcaaaactcaaatactggtccaactactggaactgtcaatcaccaaggagcgttacctggtatggtgtggcaggatcgagacgtgtaccttcagggacccatttgggccaagattcctcacaccgatggacactttcatccttccccactgatgggaggttttggactcaaacacccgcctcctcagatcatgatcaaaaacactcccgttccagccaatcctcctacaaacttcagttctgccaagtttgcttctttcatcacacagtattccacggggcaggtcagcgtggggatagagtgggtgctgcagaaggagaacagcaaacgctggaaccccgagatccagtatacttccaactacaacaagtctgttaatgtggactttactgtggacactaatggtgtgtattcagagcctcgccccattggcaccagatacctgactcgtaatctgtaa

SEQ ID NO: 1469 - DNA, 2208 bp, Artificial Sequence
  Synthetic Polynucleotide
atggctgccgatggttatcttccagattggctcgaggacactctctctgaaggaataagacagtggtggaagctcaaacctggcccaccaccgccaaagcccgcagagcggcataaggacgacagcaggggtcttgtgcttcctgggtacaagtacctcggacccttcaacggactcgacaaaggagagccggtcaacgaggcagacgccgcggccctcgagcacgacaaggcctacgaccggcagctcgacagcggagacaacccgtacctcaagtacaaccacgccgacgcggagtttcaggagcgccttaaagaagatacgtcttttgggggcaacctcgcaagagcagtattccaggcgaaaaagagggttcttgaacctctgggcctggttgaggagcctgttaagacggctccgggaaaaaagaggccggtagagcaatctcctgcggagccagactcctcctcgggaaccggaaaggcgggcaaccagcctgcaagaaagagattgaattttggtcagactggagacgcagactccgtacctgacccccagcctctcggacagccaccagcagccccctctggtctgggatctactacaatggctacaggcagtggcgcaccaatggcagacaataacgagggtgccgatggagtgggtaattcctcaggaaattggcattgcgattcccaatggttgggcgacagagtcatcaccaccagcacccgaacctgggccctgcccacctacaacaatcacctctacaagcaaatctccagccaatcaggagccagcaacgacaaccactactttggctacagcaccccctgggggtattttgacttcaacagattccactgccacttttcaccacgtgactggcaaagactcatcaacaacaactggggattccgacccaaaagactcaacttcaagctctttaacattcaagtcaaagaggtcacgcagaatgacggtacgacgacgattgccaataaccttaccagcacggttcaggtgtttactgactcggagtaccagctcccgtacgtcctcggctcggcgcatcaaggatgcctcccgccgtttccagcggacgtcttcatggtcccacagtatggatacctcaccctgaacaacgggagtcaggcggtaggacgctcttccttttactgcctggagtactttccttctcagatgcttcgtaccggaaacaactttaccttcagttacacctttgaagacgttcctttccacagcagctacgctcacagtcaaagtctggaccggctgatgaatcctctgatagaccagtacctgtattatctaaacaaaacacaatcaaatagtggaactcttcagcagtctcggctactgtttagtcaagctggacccaccagcatgtctcttcaagctaaaaactggctgcctggaccttgctacagacaacagcgtctgtcaaagcaggcaaacgacaacaacaacagcaactttccctggactgcggctacaaagtatcatctaaatggccgggactcgttggttaatccaggaccagctatggccagccacaaagacgatgaagaaaagtttttccccatgcatggaaccctgatatttggtaaacaaggaacaaatgctaacgacgcggatttggacaatgtcatgattacagatgaagaagaaatccgcaccaccaatcccgtggctacggagcagtacgggactgtgtcaaataatttgcaaaactcaaatactggtccaactactggaactgtcaatcaccaaggagcgttacctggtatggtgtggcaggatcgagacgtgtaccttcagggacccatttgggccaagattcctcacaccgatggacactttcatccttctccactgatgggaggttttggactcaaacacccgcctcctcagatcatgatcaaaaacactcccgttccagccaatcctcctacaaacttcagttctgccaagtttgcttctttcatcacacagtattccacggggcaggtcagcgtggagatagagtgggagctgcagaaggagaacagcaaacgctggaaccccgagatccagtatacttccaactacaacaagtctgttaatgtggactttactgtggacactaatggtgtgtattcagagcctcgccccattggcaccagatacctgactcgtaatctgtaa

SEQ ID NO: 1470 - DNA, 2208 bp, Artificial Sequence
  Synthetic Polynucleotide
atggctgccgatggttatcttccagattggctcgaggacattctctctgaaggaataagacagtggtggaagctcaaacctggcccaccaccaccaaagcccgcagagcggcataaggacgacagcaggggtcttgtgcttcctgggtacaagtacctcggacccttcaacggactcgacaaaggagagccggtcaacgaggcagacgccgcggccctcgagcacgacaaggcctacgaccggcagctcgacagcggagacaacccgtacctcaagtacaaccacgccgacgcggagtttcaggagcgtcttaaagaagatacgtcttttgggggcaacctcggacgagcagtcttccaggcaaaaaagagggttcttgaacctctgggcctggttgaggaacctgttaagacggctccgggaaaaaagaggccggtagagcaatctcctgcggagccagactcctcctcgggagccggaaaggcgggcaaccagcctgcaagaaagagattgaattttggtcagactggagacgcagactccgtacctgacccccagcctctcggacagccaccagcagccccctctggtctgggatctactacaatggctacaggcagtggcgcaccaatggcagacaataacgagggtgccgatggagtgggtaattcctcaggaaattggcattgcgattcccaatggttgggcgacagagtcatcaccaccagcacccgaacctgggccctgcccacctacaacaatcacctctacaagcaaatctccagccaatcaggagccagcaacgacaaccactactttggctacagcaccccctgggggtattttgacttcaacagattccactgccacttttcaccacgtgactggcaaagactcatcaacaacaactggggattccgacccaaaagactcaacttcaagctctttaacattcaagtcaaagaggtcacgcagaatgacggtacgacgacgattgccaataaccttaccagcacggttcaggtgtttactgactcggagtaccagctcccgtacgtcctcggctcggcgcatcaaggatgcctcccgccgtttccagcggacgtcttcatggtcccacagtatggatacctcaccctgaacaacgggagtcaggcggtaggacgctcttccttttactgcctggagtactttccttctcagatgcttcgtaccggaaacaactttaccttcagttacacctttgaagacgttcctttccacagcagctacgctcacagtcaaagtctggaccggctgatgaatcctctgatagaccagtacctgtattatctaaacaaaacacaatcaaatagtggaactcttcagcagtctcggctactgtttagtcaagctggacccaccagcatgtctcttcaagctaaaaactggctgcctggaccttgctacagacaacagcgtctgtcaaagcaggcaaacgacaacaacaacagcaactttccctggactgcggctacaaagtatcatctaaatggccgggactcgttggttaatccaggaccagctatggccagccacaaagacgatgaagaaaagtttttccccatgcatggaaccctgatatttggtaaacaaggaacaaatgctaacgacgcggatttggacaatgtcatgattacagatgaagaagaaatccgcaccaccaatcccgtggctacggagcagtacgggactgtgtcaaataatttgcaaaactcaaatactggtccaactactggaactgtcaatcaccaaggagcgttacctggtatggtgtggcaggatcgagacgtgtaccttcagggacccatttgggccaagattcctcacaccgatggacactttcatccttctccactgatgggaggttttggactcaaacacccgcctcctcagatcatgatcaaaaacactcccgttccagccaatcctcctacaaacttcagttctgccaagtttgcttctttcatcacacagtattccacggggcaggtcagcgtggagatagagtgggagctgcagaaggagaacagcaaacgctggaaccccgagatccagtatacttccaactacaacaagtctgttaatgtggactttactgtggacactaatggtgtgtattcagagcctcgccccattggcaccagatacctgactcgtaatctgtaa

SEQ ID NO: 1471 - DNA, 2208 bp, Artificial Sequence
  Synthetic Polynucleotide
atggctgccgatggttatcttccagattggctcaaggacattctctctgaaggaataagacagtggtggaagctcaaacctggcccaccaccaccaaagcccgcagagcggcataaggacgacagcaggggtcttgtgcttcctgggtacaagtacctcggacccttcaacggactcgacaaaggagagccggtcaacgaggcagacgccgcggccctcgagcacgacaaggcctacgaccggcagctcgacagcggagacaacccgtacctcaagtacaaccacgccgacgcggagtttcaggagcgtcttaaagaagatacgtcttttgggggcaacctcggacgagcagtcttccaggcaaaaaagagggttcttgaacctctgggcctggttgaggaacctgttaagacggctccgggaaaaaagaggccggtagagcaatctcctgcggagccagactcctcctcgggaaccggaaaggcgggcaaccagcctgcaagaaagagattgaattttggtcagactggagacgcagactccgtacctgacccccagcctctcggacagccaccagcagccccctctggtctgggatctactacaatggctacaggcagtggcgcaccaatggcagacaataacgagggtgccgatggagtgggtaattcctcaggaaattggcatcgcgattcccaatggttgggcgacagagtcatcaccaccagcacccgaacctgggccctgcccacctacaacaatcacctctacaagcaaatctccagccaatcaggagccagcaacgacaaccactactttggctacagcaccccctgggggtattttgacttcaacagattccactgccacttttcaccacgtgactggcaaagactcatcaacaacaactggggattccgacccaaaagactcaacttcaagctctttaacattcaagtcaaagaggtcacgcagaatgacggtacgacgacgattgccaataaccttaccagcacggttcaggtgtttactgactcggagtaccagctcccgtacgtcctcggctcggcgcatcaaggatgcctcccgccgtttccagcggacgtcttcatggtcccacagtatggatacctcaccctgaacaacgggagtcaggcggtaggacgctcttccttttactgcctggagtactttccttctcagatgcttcgtaccggaaacaactttaccttcagttacacctttgaagacgttcctttccacagcagctacgctcacagtcaaagtctggaccggctgatgaatcctctgatagaccagtacctgtattatctaaacaaaacacaatcaaatagtggaactcttcagcagtctcggctactgtttagtcaagctggacccaccagcatgtctcttcaagctaaaaactggctgcctggaccttgctacagacaacagcgtctgtcaaagcaggcaaacgacaacaacaacagcaactttccctggactgcggctacaaagtatcatctaaatggccgggactcgttggttaatccaggaccagctatggccagccacaaagacgatgaagaaaagtttttccccatgcatggaaccctgatatttggtaaacaaggaacaaatgctaacgacgcggatttggacaatgtcatgattacagatgaagaagaaatccgcaccaccaatcccgtggctacggagcagtacgggactgtgtcaaataatttgcaaaactcaaatactggtccaactactggaactgtcaatcaccaaggagcgttacctggtatggtgtggcaggatcgagacgtgtaccttcagggacccatttgggccaagattcctcacaccgatggacactttcatccttctccactgatgggaggttttggactcaaacacccgcctcctcagatcatgatcaaaaacactcccgttccagtcaatcctcctacaaacttcagttctgccaagtttgcttctttcatcacacagtattccacggggcaggtcagcgtggagatagagtgggagctgcagaaggagaacagcaaacgctggaaccccgagatccagtatacttccaactacaacaagtctgttaatgtggactttactgtggacactaatggtgtgtattcagagcctcgccccattggcaccagatacctgactcgtaatctgtaa

SEQ ID NO: 1472 - DNA, 2208 bp, Artificial Sequence
  Synthetic Polynucleotide
atggctgccgatggttatcttccagattggctcgaggacattctctctgaaggaataagacggtggtggaagctcaaacctggcccaccaccaccaaagcccgcagagcggcataaggacgacagcaggggtcttgtgcttcctgggtacaagtacctcggacccttcaacggactcgacaaaggagagccggtcaacgaggcagacgccgcggccctcgagcacgacaaggcctacgaccggcagctcgacagcggagacaacccgtacctcaagtacaaccacgccgacgcagagtttcaggagcgtcttaaagaagatacgtcttttgggggcaacctcggacgagcagtcttccaggcaaaaaagagggttcttgaacctctgggcctggttgaggaacctgttaagacggctccgggaaaaaagaggccggtagagcaatctcctgcggagccagactcctcctcgggaaccggaaaggcgggcaaccagcctgcaagaaagagattgaattttggtcagactggagacgcagactccgtacctgacccccagcctctcggacagccaccagcagccccctctggtctgggatctactacaatggctacaggcagtggcgcaccaatggcagacaataacgagggtgccgatggagtgggtaattcctcaggaaattggcattgcgattcccaatggttgggcgacagagtcatcaccaccagcacccgaacctgggccctgcccacctacaacaatcacctctacaagcaaatctccagccaatcaggagccagcaacgacaaccactactttggctacagcaccccctgggggtattttgacttcaacagattccactgccacttttcaccacgtgactggcaaagactcatcaacaacaactggggattccgacccaaaagactcaacttcaagctctttaacattcaagtcaaagaggtcacgcagaatgacggtacgacgacgattgccaataaccttaccagcacggttcaggtgtttactgactcggagtaccagctcccgtacgtcctcggctcggcgcatcaaggatgcctcccgccgtttccagcggacgtcttcatggtcccacagtatggatacctcaccctgaacaacgggagtcaggcggtaggacgctcttccttttactgcctggagtactttccttctcagatgcttcgtaccggaaacaactttaccttcagttacacctttgaagacgttcctttccacagcagctacgctcacagtcaaagtctggaccggctgatgaatcctctgatagaccagtacctgtattatctaaacaaaacacaatcaaatagtggaactcttcagcagtctcggctactgtttagtcaagctggacccaccagcatgtctcttcaagctaaaaactggctgcctggaccttgctacagacaacagcgtctgtcaaagcaggcaaacgacaacaacaacagcaactttccctggactgcggctacaaagtatcatctaaatggccgggactcgttggttaatccaggaccagctatggccagccacaaagacgatgaagaaaagtttttccccatgcatggaaccctgatatttggtaaacaaggaacaaatgctaacgacgcggatttggacaatgtcatgattacagatgaagaagaaatccgcaccaccaatcccgtggctacggagcggtacgggactgtgtcaaataatttgcaaaactcaaatactggtccaactactggaactgtcaatcaccaaggagcgttacctggtatggtgtggcaggatcgagacgtgtaccttcagggacccatttgggccaagattcctcacaccgatggacactttcatccttctccactgatgggaggttttggactcaaacacccgcctcctcagatcatgatcaaaaacactcccgttccagccaatcctcctacaaacttcagttctgccaagtttgcttctttcatcacacagtattccacggggcaggtcagcgtggagatagagtgggagctgcagaaggagaacagcaaacgctggaaccccgagatccagtatacttccaactacaacaagtctgttaatgtggactttactgtggacactaatggtgtgtattcagagcctcgccccattggcaccagatacctgactcgtaatctgtaa

SEQ ID NO: 1473 - DNA, 2208 bp, Artificial Sequence
  Synthetic Polynucleotide
atggctgccgatggttatcttccagattggctcgaggacactctctctgaaggaataagacagtggtggaagctcaaacctggcccaccaccgccaaagcccgcagagcggcataaggacgacagcaggggtcttgtgcttcctgggtacaagtacctcggacccttcaacggactcgacaaaggagagccggtcaacgaggcagacgccgcggccctcgagcacgacaaggcctacgaccggcagctcgacagcggagacaacccgtacctcaagtacaaccacgccgacgcggagtttcaggagcgccttaaagaagatacgtcttttgggggcaacctcgcaagagcagtattccaggcgaaaaagagggttcttgaacctctgggcctggttgaggagcctgttaagacggctccgggaaaaaagaggccggtagagcactctcctgcggagccagattcctcctccggaactggaaagtcgggccaacagcctgcaagaaagagattgaattttggtcagactggagacgcagactccgtacctgacccccagcctctcggacagccaccagcagccccctctggtctgggaactaatacgatggcttcaggcagtggcgcaccaatggcagacaataacgagggcgccgacggagtgggtaattcctcaggaaattggcattgcgattcccaatggttgggcgacagagtcatcaccaccagcacccgaacctgggccctgcccacctacaacaatcacctctacaagcaaatctccagccaatcaggagccagcaacgacaaccactactttggctacagcaccccctgggggtattttgacttcaacagattccactgccacttttcaccacgtgactggcaaagactcatcaacaacaactggggattccgacccaaaagactcaacttcaagctctttaacattcaagtcaaagaggtcacgcagaatgacggtacgacgacgattgccaataaccttaccagcacggttcaggtgtttactgactcggagtaccagctcccgtacgtcctcggctcggcgcatcaaggatgcctcccgccgtttccagcggacgtcttcatggtcccacagtatggatacctcaccctgaacaacgggagtcaggcggtaggacgctcttccttttactgcctggagtactttccttctcagatgcttcgtaccggaaacaactttaccttcagttacacctttgaagacgttcctttccacagcagctacgctcacagtcaaagtctggaccggctgatgaatcctctgatagaccagtacctgtattatctaaacaaaacacaatcaaatagtggaactcttcagcagtctcggctactgtttagtcaagctggacccaccagcatgtctcttcaagctaaaaactggctgcctggaccttgctacagacaacagcgtctgtcaaagcaggcaaacgacaacaacaacagcaactttccctggactgcggctacaaagtatcatctaaatggccgggactcgttggttaatccaggaccagctatggccagccacaaagacgatgaagaaaagtttttccccatgcatggaaccctgatatttggtaaacaaggaacaaatgctaacgacgcggatttggacaatgtcatgattacagatgaagaagaaatccgcaccaccaatcccgtggctacggagcagtacgggactgtgtcaaataatttgcaaaactcaaatactggtccaactactggaactgtcaatcaccaaggagcgttacctggtatggtgtggcaggatcgagacgtgtaccttcagggacccatttgggccaagattcctcacaccgatggacactttcatccttctccactgatgggaggttttggactcaaacacccgcctcctcagatcatgatcaaaaacactcccgttccagccaatcctcctacaaacttcagttctgccaagtttgcttctttcatcacacagtattccacggggcaggtcagcgtggagatagagtgggagctgcagaaggagaacagcaaacgctggaaccccgagatccagtatacttccaactacaacaagtctgttaatgtggactttactgtggacactaatggtgtgtattcagagcctcgccccattggcaccagatacctgactcgtaatctgtaa

SEQ ID NO: 1474 - DNA, 2208 bp, Artificial Sequence
  Synthetic Polynucleotide
atggctgccgatggttatcttccagattggctcgaggacactctctctgaaggaataagacagtggtggaagctcaaacctggcccaccaccgccaaagcccgcagagcggcataaggacgacagcaggggtcttgtgcttcctgggtacaagtacctcggacccttcaacggactcgacaaaggagagccggtcaacgaggcagacgccgcggccctcgagcacgacaaggcctacgaccggcagctcgacagcggagacaacccgtacctcaagtacaaccacgccgacgcggagtttcaggagcgccttaaagaagatacgtcttttgggggcaacctcgcaagagcagtattccaggcgaaaaagagggttcttgaacctctgggcctggttgaggagcctgttaagacggctccgggaaaaaagaggccggtagagcactctcctgcggagccagattcctcctccggaactggaaagtcgggccaacagcctgcaagaaagagattgaattttggtcagactggagacgcagactccgtacctgacccccagcctctcggacagccaccagcagccccctctggtctgggaactaatacgatggcttcaggcagtggcgcaccaatggcagacaataacgagggcgccgacggagtgggtaattcctcgggaaattggcattgcgattccacatggatgggcgacagagtcatcaccaccagcacccgcacctgggctctgcccacctacaacaaccatctgtacaagcaaatttccagccagtctggagccagcaacgacaaccactacttcggctacagcacccccttggggtattttgacttcaacagattccactgccacttctccccacgtgactggcaaagactcatcaacaacaattggggattccggcccaaaagactcaacttcaagctctttaacattcaagtcaaagaggtcacgcagaatgacggtacgacgacgattgccaataaccttaccagcacggttcaggtgtttactgactcggagtaccagctcccgtacgtcctcggctcggcgcatcaaggatgcctcccgccgtttccagcggacgtcttcatggtcccacagtatggatacctcaccctgaacaacgggagtcaggcggtaggacgctcttccttttactgcctggagtactttccttctcagatgcttcgtaccggaaacaactttaccttcagttacacctttgaagacgttcctttccacagcagctacgctcacagtcaaagtctggaccggctgatgaatcctctgatagaccagtacctgtattatctaaacaaaacacaatcaaatagtggaactcttcagcagtctcggctactgtttagtcaagctggacccaccagcatgtctcttcaagctaaaaactggctgcctggaccttgctacagacaacagcgtctgtcaaagcaggcaaacgacaacaacaacagcaactttccctggactgcggctacaaagtatcatctaaatggccgggactcgttggttaatccaggaccagctatggccagccacaaagacgatgaagaaaagtttttccccatgcatggaaccctgatatttggtaaacaaggaacaaatgctaacgacgcggatttggacaatgtcatgattacagatgaagaagaaatccgcaccaccaatcccgtggctacggagcagtacgggactgtgtcaaataatttgcaaaactcaaatactggtccaactactggaactgtcaatcaccaaggagcgttacctggtatggtgtggcaggatcgagacgtgtaccttcagggacccatttgggccaagattcctcacaccgatggacactttcatccttctccactgatgggaggttttggactcaaacacccgcctcctcagatcatgatcaaaaacactcccgttccagccaatcctcctacaaacttcagttctgccaagtttgcttctttcatcacacagtattccacggggcaggtcagcgtggagatagagtgggagctgcagaaggagaacagcaaacgctggaaccccgagatccagtatacttccaactacaacaagtctgttaatgtggactttactgtggacactaatggtgtgtattcagagcctcgccccattggcaccagatacctgactcgtaatctgtaa

SEQ ID NO: 1475 - DNA, 2208 bp, Artificial Sequence
  Synthetic Polynucleotide
atggctgccgatggttatcttccagattggctcgaggacactctctctgaaggaataagacagtggtggaagctcaaacctggcccaccaccgccaaagcccgcagagcggcataaggacgacagcaggggtcttgtgcttcctgggtacaagtacctcggacccttcaacggactcgacaaaggagagccggtcaacgaggcagacgccgcggccctcgagcacgacaaggcctacgaccggcagctcgacagcggagacaacccgtacctcaagtacaaccacgccgacgcggagtttcaggagcgccttaaagaagatacgtcttttgggggcaacctcgcaagagcagtattccaggcgaaaaagagggttcttgaacctctgggcctggttgaggagcctgttaagacggctccgggaaaaaagaggccggtagagcactctcctgcggagccagattcctcctccggaactggaaagtcgggccaacagcctgcaagaaagagattgaattttggtcagactggagacgcagactccgtacctgacccccagcctctcggacagccaccagcagccccctctggtctgggaactaatacgatggcttcaggcagtggcgcaccaatggcagacaataacgagggcgccgacggagtgggtaattcctcgggaaattggcattgcgattccacatggatgggcgacagagtcatcaccaccagcacccgcacctgggctctgcccacctacaacaaccatctgtacaagcaaatttccagccagtctggagccagcaacgacaaccactacttcggctacagcaccccttgggggtattttgacttcaacagattccactgccacttctccccacgtgactggcaaagactcatcaacaacaactggggattccgacccaaaagactcaacttcaagctctttaacattcaagtcaaagaggtcacgcagaatgacggtacgacgacgattgccaataaccttaccagcacggttcaggtgtttactgactcggagtaccagctcccgtacgtcctcggctcggcgcatcaaggatgcctcccgccgtttccagcggacgtcttcatggtcccacagtatggatacctcaccctgaacaacgggagtcaggcggtaggacgctcttccttttactgcctggagtactttccttctcagatgcttcgtaccggaaacaactttaccttcagttacacctttgaagacgttcctttccacagcagctacgctcacagtcaaagtctggaccggctgatgaatcctctgatagaccagtacctgtattatctaaacaaaacacaatcaaatagtggaactcttcagcagtctcggctactgtttagtcaagctggacccaccagcatgtctcttcaagctaaaaactggctgcctggaccttgctacagacaacagcgtctgtcaaagcaggcaaacgacaacaacaacagcaactttccctggactgcggctacaaagtatcatctaaatggccgggactcgttggttaatccaggaccagctatggccagccacaaagacgatgaagaaaagtttttccccatgcatggaaccctgatatttggtaaacaaggaacaaatgctaacgacgcggatttggacaatgtcatgattacagatgaagaagaaatccgcaccaccaatcccgtggctacggagcagtacgggactgtgtcaaataatttgcaaaactcaaatactggtccaactactggaactgtcaatcaccaaggagcgttacctggtatggtgtggcaggatcgagacgtgtaccttcagggacccatttgggccaagattcctcacaccgatggacactttcatccttctccactgatgggaggttttggactcaaacacccgcctcctcagatcatgatcaaaaacactcccgttccagccaatcctcctacaaacttcagttctgccaagtttgcttctttcatcacacagtattccacggggcaggtcagcgtggagatagagtgggagctgcagaaggagaacagcaaacgctggaaccccgagatccagtatacttccaactacaacaagtctgttaatgtggactttactgtggacactaatggtgtgtattcagagcctcgccccattggcaccagatacctgactcgtaatctgtaa

SEQ ID NO: 1476 - DNA, 2208 bp, Artificial Sequence
  Synthetic Polynucleotide
atggctgccgatggttatcttccagattggctcgaggacactctctctgaaggaataagacagtggtggaagctcaaacctggcccaccaccgccaaagcccgcagagcggcataaggacgacagcaggggtcttgtgcttcctgggtataagtacctcggacccttcaacggactcgacaagggagagccggtcaacgaggcagacgccgcggccctcgagcacgacaaggcctacgaccggcagctcgacagcggagacaacccgtacctcaagtacaaccacgccgacgcggagtttcaggagcgccttaaagaagatacgtcttttgggggcaacctcggacgagcagtattccaggcgaaaaagagggttcttgaacctctgggcctggttgtggagcctgttaagacggctccgggaaaaaagaggccggtagagcactctcctgtggagccagactcctcctcgggaaccggaaaagcgggccagcagcctgcgagaaagagattgaattttgatcagactggagacgcagactccgtacctgacccccagcctctcggacagccaccagcagcccccacaagtttgggatctactacaatggctacaggcagtggcgcaccaatggcagacaataacgagggtgccgatggagtgggtaattcctcaggaaattggcattgcgattcccaatggtcgggcgacagagtcatcaccaccagcacccgaacctgggccctgcccacctacaacaaccacctctacaagcaaatctccagccgatcaggagccagcaacgacaaccactactttggctacagcaccccctgggggtattttgacttcaacggattccactgccacttttcaccacgtgactggcaaagactcatcaacaacaactggggattccgacccaagagactcaacttcaagctctttaacattcaagtcaaagaggtcacgcagaatgacggtacgacgacgattgccaataaccttaccagcacggttcaggtgtttactgactcggagtaccagctcccgcacgtcctcggctcggcgcatcaaggatgcctcccgccgtttccagcggacgtcttcatggtcccacagtatggatacctcaccctgaacaacgggagtcaggcggtaggacgctcttccttttactgcccggggtactttccttctcagatgcttcgtaccggaaacaactttaccttcagttacacctttgaagacgttcctttccacagcagctacgctcacagtcaaagtctggaccggctgatgaatcctcttatcgaccagtacctgtattatctaaacaaaacacaatcaaatagtggaactcttcagcagtctcggctactgtttagtcaagctggacctaccagcatgtctcttcaagctaaaaactggctgcctggaccttgctacagacaacagcgtctgtcaaagcaggcaaacggcaacaacaacagcaactttccctggactgcggctacaaagtatcatctaaatggccgggactcgttggttaatccaggaccagctatggccagccacaaagacgatgaagaaaagtttttccccatgcatggaaccctgatatttggcaaacaaggaacaaatgctaacgacgcggatttggacaatgtcatgattacagatgaagaagaaatccgtaccaccaatcccgtggctacggagcagtacgggactgtgtcaaataatttgcaaaactcaaatactggtccaactactggaactgtcaatcaccaaggagcgttacctggtatggtgtggcaggatcgagacgtgtaccttcagggacccatttgggccaagattcctcacaccgatggacactttcacccttctccgctgatgggaggttttggactcaaacacccgcctcctcagatcatgatcaaaaacactcccgttccagccaatcctcccacaaacttcagttctgccaagtttgcttctttcatcacacagtattccacgggacaggttagcgtggagatcgagtgggagctgcagaaggagaacagcaaacgctggaaccccgagatccagtacacttccaactacaacaagtctgttaatgtggactttactgtggacactaatggtgtgtattcagagcctcgccccattggcaccagatacctgactcgtaatctgtaa

SEQ ID NO: 1477 - DNA, 2208 bp, Artificial Sequence
  Synthetic Polynucleotide
atggctgccgatggttatcttccagattggctcgaggacattctctctgaaggaataagacagtggtggaagctcaaacctggcccaccaccaccaaagcccgcagagcggcataaggacgacagcaggggtcttgtgcttcctgggtacaagtacctcggacccttcaacggactcgacaaaggagagccggtcaacgaggcagacgccgcggccctcgagcacgacaaggcctacgaccggcagctcgacagcggagacaacccgtacctcaagtacaaccacgccgacgcggagtttcaggggcgtcttaaagaagatacgtcttttgggggcaacctcggacgagcagtcttccaggcaaaaaagagggttcttgaacctctgggcctggttgaggaacctgttaagacggctccgggaaaaaagaggccggtagagcaatctcctgcggagccagactcctcctcgggaaccggaaaggcgggcaaccagcctgcaagaaagagattgaattttggtcagactggagacgcagactccgtacctgacccccagcctctcggacagccaccagcagccccctctggtctgggatctactacaatggctacaggcagtggcgcaccaatggcagacaataacgagggtgccgatggagtgggtaattcctcaggaaattggcattgcgattcccaatggttgggcgacagagtcatcaccaccagcacccgaacctgggccctgcccacctacaacaatcacctctacaagcaaatctccagccaatcaggagccagcaacgacaaccactactttggctacagcaccccctgggggtattttgacttcaacagattccactgccacttttcaccacgtgactggcaaagactcatcaacaacaactggggattccgacccaaaagactcaacttcaagctctttaacattcaagtcaaagaggtcacgcagaatgacggtacgacgacgattgccaataaccttaccagcacggttcaggtgtttactgactcggagtaccagctcccgtacgtcctcggctcggcgcatcaaggatgcctcccgccgtttccagcggacgtcttcatggtcccacagtatggatacctcaccctgaacaacgggagtcaggcggtaggacgctcttccttttactgcctggagtactttccttctcagatgcttcgtaccggaaacaactttaccttcagttacacctttgaagacgttcctttccacagcagctacgctcacagtcaaagtctggaccggctgatgaatcctctgatagaccagtacctgtattatctaaacaaaacacaatcaaatagtggaactcttcagcagtctcggctactgtttagtcaagctggacccaccagcatgtctcttcaagctaaaaactggctgcctggaccttgctacagacaacagcgtctgtcaaagcaggcaaacgacaacaacaacagcaactttccctggactgcggctacaaagtatcatctaaatggccgggactcgttggttaatccaggaccagctatggccagccacaaagacgatgaagaaaagtttttccccatgcatggaaccctgatatttggtaaacaaggaacaaatgctaacgacgcggatttggacaatgtcatgattacagatgaagaagaaatccgcaccaccaatcccgtggctacggagcagtacgggactgtgtcaaataatttgcaaaactcaaatactggtccaactactggaactgtcaatcaccaaggagcgttacctggtatggtgtggcaggatcgagacgtgtaccttcagggacccatttgggccaagattcctcacaccgatggacactttcatccttctccactgatgggaggttttggactcaaacacccgcctcctcagatcatgatcaaaaacactcccgttccagccaatcctcctacaaacttcagttctgccaagtttgcttctttcatcacacagtattccacggggcaggtcagcgtggagatagagtgggagctgcagaaggagaacagcaaacgctggaaccccgagatccagtatacttccaactacaacaagtctgttaatgtggactttactgtggacactaatggtgtgtattcagagcctcgccccattggcaccagatacctgactcgtaatctgtaa

SEQ ID NO: 1478 - DNA, 2208 bp, Artificial Sequence
  Synthetic Polynucleotide
atggctgccgatggttatcttccagattggctcgaggacattctctctgaaggaataagacagtggtggaagctcaaacctggcccaccaccaccaaagcccgcagagcggcataaggacgacagcaggggtcttgtgcttcctgggtacaagtacctcggacccttcaacggactcgacaaaggagagccggtcaacgaggcagacgccgcggccctcgagcacgacaaggcctacgaccggcagctcgacagcggagacaacccgtacctcaagtacaaccacgccgacgcggagtttcaggagcgtcttaaagaagatacgtcttttgggggcaacctcggacgagcagtcttccaggcaaaaaagagggctcttgaacctctgggcctggttgaggaacctgttaagacggctccgggaaaaaagaggccggtagagcaatctcctgcggagccagactcctcctcgggaaccggaaaggcgggcaaccagcctgcaagaaagagatcgaattttggtcagactggagacgcagactccgtacctgacccccagcctctcggacagccaccagcagccccctctggtctgggatctactacaatggctacaggcagtggcgcaccaatggcagacaataacgagggtgccgatggagtgggtaattcctcaggaaattggcattgcgattcccaatggttgggcgacagagtcatcaccaccagcacccgaacctgggccctgcccacctacaacaatcacctctacaagcaaatctccagccaatcaggagccagcaacgacaaccactactttggctacagcaccccctgggggtattttgacttcaacagattccactgccacttttcaccacgtgactggcaaagactcatcaacaacaactggggattccgacccaaaagactcaacttcaagctctttaacattcaagtcaaagaggtcacgcagaatgacggtacgacgacgattgccaataaccttaccagcacggttcaggtgtttactgactcggagtaccagctcccgtacgtcctcggctcggcgcatcaaggatgcctcccgccgtttccagcggacgtcttcatggtcccacagtatggatacctcaccctgaacaacggaagtcaggcggtaggacgctcttccttttactgcctggagtactttccttctcagatgcttcgtaccggaaacaactttaccttcagttacacctttgaagacgttcctttccacagcagctacgctcacagtcaaagtctggaccggctgatgaatcctctgataggccagtacctgtattatctaaacaaaacacaatcaaatagtggaactcttcagcagtctcggctactgtttagtcaagctggacccaccagcatgtctcttcaagctaaaaactggctgcctggaccttgctacagacaacagcgtctgtcaaagcaggcaaacgacaacaacaacagcaactttccctggactgcggctacaaagtatcatctaaatggccgggactcgttggttaatccaggaccagctatggccagccacaaagacgatgaagaaaagtttttccccatgcatggaaccctgatatttggtaaacaaggaacaaatgctaacgacgcggatttggacaatgtcatgattacagatgaagaagaaatccgcaccaccaatcccgtggctacggagcagtacgggactgtgtcaaataatttgcaaaactcaaatactggtccaactactggaactgtcaatcaccaaggagcgttacctggtatggtgtggcaggatcgagacgtgtaccttcagggacccatttgggccaagattcctcacaccgatggacactttcatccttctccactgatgggaggttttggactcaaacacccgcctcctcagatcatgatcaaaaacactcccgttccagccaatcctcctacaaacttcagttctgccaagtttgcttctttcatcacacagtattccacggggcaggtcagcgtggagatagagtgggagctgcagaaggagaacagcaaacgctggaaccccgagatccagtatacttccaactacaacaagtctgttaatgtggactttactgtggacactaatggtgtgtattcagagcctcgccccattggcaccagatacctgactcgtaatctgtaa

SEQ ID NO: 1479 - DNA, 2217 bp, Artificial Sequence
  Synthetic Polynucleotide
atggctgccgatggttatctcccagattggctcgaggacaacctctctgagggcattcgcgagtggtgggcactgaaacctggagccccgaagcccaaagccaaccagcaaaagcaggacgacggccggggtctggtgcttcctggctacaagtacctcggacccttcaacggactcgacaagggggagcccgtcaacgcggcggacgcggcggccctcgagcacgacaaggcctacgaccagcagctgcaggcgggtgacaatccgtacctgcggtataaccacgccgacgccgagtttcaggagcgtctgcaagaagatacgtcttttgggggcaacctcgggcgagcagtcttccaggccaagaagcgggttctcgaacctctcggtctggttgaggaaggcgctaagacggctcctggaaaggagagaccggtagagccatcaccccagcgttctccagactcctctacgggcatcggcaaggaaggccaacagcctgccagaaaaagactcaattttggtcagactggcgactcagagtcagttccagaccctcaacctctcggagaacctccagcagcgccctctggtgtgggacctaatacaatggctgcaggcggtggcgcaccaatggcagacaataacgaaggcgccgacggagtgggtagttcctcgggaaattggcattgcgattccacatggctgggcgacagagtcatcaccaccagcacccgaacctgggccctgcccacctacaacaaccacctctacaagcaaatctccaacgggacatcgggaggagccaccaacgacaacacctacttcggctacagcaccccctgggggtattttgactttaacagattccactgccacttttcaccacgtgactggcagcgactcatcaacaacaactggggattccggcccaagagactcagcttcaagctcttcaacatccaggtcaaggaggtcacgcagaatgaaggcaccaagaccaccgccaataacctcaccagcaccatccaggtgtttacggactcggagtaccagctgccgtacgttctcggctctgcccaccagggctgcctgcctccgttcccggcggacgtgttcacgattccccagtacggctacctaacactcaacaacggtagtcaggccgtgggacgctcctccttctactgcctggaatactttccttcgcagatgctgagaaccggcaacaacttccagtttacttacaccttcgaggacgtgcctttccacagcagctacgcccacagccagagcttggaccggctgatgaatcctctgattgaccagtacctgtactacttgtctcggattcaaacaacaggaggcacggcaaatacgcagactctgggcttcagccaaggtgggcctaatacaatggccaatcaggcaaagaactggctgccaggaccctgttaccgccaacaacgcgtctcaacgacaaccgggcaaaacaacaatagcaactttgcctggactgctgggaccaaataccatctgaatggaagaaattcattggctaatcctggcatcgctatggcaacacacaaagacgacgaggagcgtttttttcccagtaacgggatcctgatttttggcaaacaaaatgctgccagagacaatgcggattacagcgatgtcatgcccaccagcgaggaagaaatcaaaaccactaaccctgtggccacagaggaatacggtatcgtggcagataacttgcagcagcaaaacacggctcctcaaattggaactgtcaacagccagggggccttacccggtatggtctggcagaaccgggacgtgtacctgcagggtcccatctgggccaagattcctcacacggacggcaacttccacccgtctccgctgatgggcggctttggcctgaaacatcctccgcctcagatcctgatcaagaacacgcctgtacctgcggatcctccgaccaccttcaaccagtcaaagctgaactctttcatcacgcaatacagcaccggacaggtcagcgtggaaattgaatgggagctgcagaaggaaaacagcaagcgctggaaccccgagatccagtacacctccaactactacaaatctacaagtgtggactttgctgttaatacagaaggcgtgtactctgaaccccgccccattggcacccgttacctcactcgtaatctgtaa

SEQ ID NO: 1480 - DNA, 2217 bp, Artificial Sequence
  Synthetic Polynucleotide
atggctgccgatggttatcttccagattggctcgaggacaacctctctgagggcattcgcgagtggtgggcgctgaaacctggagccccgaagcccaaagccaaccagcaaaagcaggacgacggccggggtctggtgcttcctggctacaagtacctcggacccttcaacggactcgacaagggggagcccgtcaacgcggcggacgcggcggccctcgagcacgacaaggcctacgaccagcagctgcaggcgggtgacaatccgtacctgcggtataaccacgccgacgccgagtttcaggagcgtctgcaagaagatacgtcttttgggggcaacctcgggcgagcagtcttccaggccaagaagcgggttctcgaacctctcggtctggttgaggaaggcgctaagacggctcctggaaagaagagaccggtagagccatcaccccagcgttctccagactcctctacgggcatcggcaaggggggccaacagcccgccagaaaaagactcaattttggtcagactggcgactcagagtcagttccagaccctcaacctctcggagaacctccagcagcgccctctggtgtgggacctaatacaatggctgcaggcggtggcgcaccaatggcagacaataacgaaggcgccgacggagtgggtagttcctcgggaaattggcattgcgattccacatggctgggcgacagagtcatcaccaccagcacccgaacctgggccctgcccacctacaacaaccacctctacaagcaaatctccaacgggacatcgggaggagccaccaacgacaacacctacttcggctacagcaccccctgggggtattttgactttaacagattccactgccacttttcaccacgtgactggcagcgactcatcaacaacaactggggattccggcccaagagactcagcttcaagctcttcaacatccaggtcaaggaggtcacgcagaatgaaggcaccaagaccatcgccaataacctcaccagcaccatccaggtgtttacggactcggagtaccagctgccgtacgttctcggctctgcccaccagggctgcctgcctccgttcccggcggacgtgttcacgattccccagtacggctacctaacactcaacaacggtagtcaggccgtgggacgctcctccttctactgcctggaatactttccttcgcagatgctgagaaccggcaacaacttccagtttacttacaccttcgaggacgtgcctttccacagcagctacgcccacagccagagcttggaccggctgatgaatcctctgattgaccagtacctgtactacttgtctcggattcaaacaacaggaggcacggcaaatacgcagactctgggcttcagccaaggtgggcctaatacaatggccaatcaggcaaagaactggctgccaggaccctgttaccgccaacaacgcgtctcaacgacaaccgggcaaaacaacaatagcaactttgcctggactgctgggaccaaataccatctgaatggaagaaattcattggctaatcctggcatcgctatggcaacacacaaagacgacgaggagcgtttttttcccagtaacgggatcctgatttttggcaaacaaaatgctgccagagacaatgcggattacagcgatgtcatgcccaccagcgaggaagaaatcaaaaccactaaccctgtggccacagaggaatacggtatcgtggcagataacttgcagcagcaaaacacggctcctcaaattggaactgtcaacagccagggggccttacccggtatggtctggcagaaccgggacgtgtacctgcagggtcccatctgggccaagattcctcacacggacggcaacttccacccgtctccgctgatgggcggctttggcctgaaacatcctccgcctcagatcctgatcaagaacacgcctgtacctgcggatcctccgaccaccttcaaccagtcaaagctgaactctttcatcacgcaatacagtaccggacaggtcagcgtggaaattgaatgggagctgcagaaggaaaacagcaagcgctggaaccccgagatccagtacacctccaactactacaaatctacaagtgtggactttgctgttaatacagaaggcgtgtactctgaaccccgccccattggcacccgttacctcacccgtaatctgtaa

SEQ ID NO: 1481 - DNA, 2217 bp, Artificial Sequence
  Synthetic Polynucleotide
atggctgccgatggttatctcccagattggctcgaggacaacctctctgagggcattcgcgagtggtgggcactgaaacctggagccccgaagcccaaagccaaccagcaaaagcaggacgacggccggggtctggtgcttcctggctacaagtacctcggacccttcaacggactcgacaagggggagcccgtcaacgcggcggacgcggcggccctcgagcacgacaaggcctacgaccagcagctgcaggcgggtgacaatccgtacctgcggtataaccacgccgacgccgagtttcaggagcgtctgcaagaagatacgtcttttgggggcaacctcgggcgagcagtcttccaggccaagaagcgggttctcgaacctctcggtctggttgaggaaggcgctaagacggctcctggaaaggagagaccggtagagccatcaccccagcgttctccagactcctctacgggcatcggcaagaagggccaacagcctgccagaaaaagactcaattttggtcagactggcgactcagagtcagttccagaccctcaacctctcggagaacctccagcagcgccctctggtgtgggacctaatacaatggctgcaggcggtggcgcaccaatggcagacaataacgaaggcgccgacggagtgggtagttcctcgggaaattggcattgcgattccacatggctgggcgacagagtcatcaccaccagcacccgaacctgggccctgcccacctacaacaaccacctctacaagcaaatctccaacgggacatcgggaggagccaccaacgacaacacctacttcggctacagcaccccctgggggtattttgactttaacagattccactgccacttttcaccacgtgactggcagcgactcatcaacaacaactggggattccggcccaagagactcagcttcaagctcttcaacatccaggtcaaggaggtcacgcagaatgaaggcaccaagaccaccgccaataacctcaccagcaccatccaggtgtttacggactcggagtaccagctgccgtacgttctcggctctgcccaccagggctgcctgcctccgttcccggcggacgtgttcacgattccccagtacggctacctaacactcaacaacggtagtcaggccgtgggacgctcctccttctactgcctggaatactttccttcgcagatgctgagaaccggcaacaacttccagtttacttacaccttcgaggacgcgcctttccacagcagctacgcccacagccagagcttggaccggctgatgaatcctctgattgaccagtacctgtactacttgtctcggattcaaacaacaggaggcacggcaaatacgcagactctgggcttcagccaaggtgggcctaatacaatggccaatcaggcaaagaactggctgccaggaccctgttaccgccaacaacgcgtctcaacgacaaccgggcaaaacaacaatagcaactttgcctggactgctgggaccaaataccatctgaatggaagaaattcattggctaatcctggcatcgctatggcaacacacaaagacgacgaggagcgtttttttcccagtaacgggatcctgatttttggcaaacaaaatgctgccagagacaatgcggattacagcgatgtcatgcccaccagcgaggaagaaatcaaaaccactaaccctgtggccacagaggaatacggtatcgtggcagataacttgcagcagcaaaacacggctcctcaaattggaactgtcaacagccagggggccttacccggtatggtctggcagaaccgggacgtgtacctgcagggtcccatctgggccaagattcctcacacggacggcaacttccacccgtctccgctgatgggcggctttggcctgaaacatcctccgcctcagatcctgatcaagaacacgcctgtacctgcggatcctccgaccaccttcaaccagtcaaagctgaactctttcatcacgcaatacagcaccggacaggtcagcgtggaaattgaatgggagctgcagaaggaaaacagcaagcgctggaaccccgagatccagtacacctccaactactacaaatctacaagtgtggactttgctgttaatacagaaggcgtgtactctgaaccccgccccattggcacccgttacctcactcgtaatctgtaa

SEQ ID NO: 1482 - DNA, 2217 bp, Artificial Sequence
  Synthetic Polynucleotide
atggctgccgatggttatcttccagattggctcgaggacaacctctctgagggcattcgcgagtggtgggcgctgaaacctggagccccgaagcccaaagccaaccagcaaaagcaggacgacggccggggtctggtgcttcctggctacaagtacctcggacccttcaacggactcgacaagggggagcccgtcaacgcggcggacgcggcggccctcgagcacgacaaggcctacgaccagcagctgcaggcgggtgacaatccgtacctgcggtataaccacgccgacgccgagtttcaggagcgtctgcaagaagatacgtcttttgggggcaacctcgggcgagcagtcttccaggccaagaagcgggttctcgaacctctcggtctggttgaggaaggcgctaagacggctcctggaaagaagagaccggtagagccatcaccccagcgttctccagactcctctacgggcatcggcaaggagggccaacagcccgccagaaaaagactcaattttggtcagactggcgactcagagtcagttccagaccctcaacctctcggagaacctccagcagcgccctctggtgtgggacctaatacaatggctgcaggcggtggcgcaccaatggcagacaataacgaaggcgccgacggagtgggtagttcctcgggaaattggcattgcgattccacatggctgggcgacagagtcatcaccaccagcacccgaacctgggccctgcccacctacaacaaccacctctacaagcaaatctccaacgggacatcgggaggagccaccaacgacaacacctacttcggctacagcaccccctgggggtattttgactttaacagattccactgccacttttcaccacgtgactggcagcgactcatcaacaacaactggggattccggcccaagagactcagcttcaagctcttcaacatccaggtcaaggaggtcacgcagaatgaaggcaccaagaccatcgccaataacctcaccagcaccatccaggtgtttacggactcggagtaccagctgccgtacgttctcggctctgcccaccagggctgcctgcctccgttcccggcggacgtgttcacgattccccagtacggctacctaacactcaacaacggtagtcaggccgtgggacgctcctccttctactgcctggaatactttccttcgcagatgctgagaaccggcaacaacttccagtttacttacaccttcgaggacgtgcctttccacagcagctacgcccacagccagagcttggaccggctgatgaatcctctgattgaccagtacctgtactacttgtctcggattcaaacaacaggaggcacggcaaatacgcagactctgggcttcagccaaggtgggcctaatacaatggccaatcaggcaaagaactggctgccaggaccctgttaccgccaacaacgcgtctcaacgacaaccgggcaaaacaacaatagcaactttgcctggactgctgggaccaaataccatctgaatggaagaaattcattggctaatcctggcatcgctatggcaacacacaaagacgacgaggagcgtttttttcccagtaacgggatcctgatttttggcaaacaaaatgctgccagagacaatgcggattacagcgatgtcatgcccaccagcgaggaagaaatcaaaaccactaaccctgtggccacagaggaatacggtatcgtggcagataacttgcagcagcaaaacacggctcctcaaattggaactgtcaacagccagggggccttacccggtatggtctggcagaaccgggacgtgtacctgcagggtcccatctgggccaagattcctcacacggacggcaacttccacccgtctccgctgatgggcggctttggcctgaaacatcctccgcctcagatcctgatcaagaacacgcctgtacctgcggatcctccgaccaccttcaaccagtcaaagctgaactctttcatcacgcaatactgtaccggacaggtcagcgtggaaattgaatgggagctgcagaaggaaaacagcaagcgctggaaccccgagatccagtacacctccaactactacaaatctacaagtgtggactttgctgttaatacagaaggcgtgtactctgaaccccgccccattggcacccgttacctcactcgtaatctgtaa

SEQ ID NO: 1483 - DNA, 2217 bp, Artificial Sequence
  Synthetic Polynucleotide
atggctgccgatggttatcttccagattggctcgaggacaacctctctgagggcattcgcgagtggtgggcgctgaaacctggagccccgaagcccaaagccaaccagcaaaagcaggacgacggccggggtctggtgcttcctggctacaagtacctcggacccttcaacggactcgacaagggggagcccgtcaacgcggcggacgcggcggccctcgagcacgacaaggcctacgaccagcagctgcaggcgggtgacaatccgtacctgcggtataaccacgccgacgccgagtttcaggagcgtctgcaagaagatacgtcttttgggggcaacctcgggcgagcagtcttccaggccaagaagcgggttctcgaacctctcggtctggttgaggaaggcgctaagacggctcctggaaagaagagaccggtagagccatcaccccagcgttctccagactcctctacgggcatcggcaaggagggccaacagcccgccagaaaaagactcaattttggtcagactggcgactcagagtcagttccagaccctcaacctctcggagaacctccagcagcgccctctggtgtgggacctaatacaatggctgcaggcggtggcgcaccaatggcagacaataacgaaggcgccgacggagtgggtagttcctcgggaaattggcattgcgattccacatggctgggcgacagagtcatcaccaccagcacccgaacctgggccctgcccacctacaacaaccacctctacaagcaaatctccaacgggacatcgggaggagccaccaacgacaacacctacttcggctacagcaccccctgggggtattttgactttaacagattccactgccacttttcaccacgtgactggcagcgactcatcaacaacaactggggattccggcccaagagactcagcttcaagctcttcaacatccaggtcaaggaggtcacgcagaatgaaggcaccaagaccatcgccaataacctcaccagcaccatccaggtgtttacggactcggagtaccagctgccgtacgttctcggctctgcccaccagggctgcctgcctccgttcccggcggacgtgttcacgattccccagtacggctacctaacactcaacaacggtagtcaggccgtgggacgctcctccttctactgcctggaatactttccttcgcagatgctgagaaccggcaacaacttccagtttacttacaccttcgaggacgtgcctttccacagcagctacgcccacagccagagcttggaccggctgatgaatcctctgattgaccagtacctgtactacttgtctcggattcaaacaacaggaggcacggcaaatacgcagactctgggcttcagccaaggtgggcctaatacaatggccaatcaggcaaagaactggctgccaggaccctgttaccgccaacaacgcgtctcaacgacaaccgggcaaaacaacaatagcaactttgcctggactgctgggaccaaataccatctgaatggaagaaattcattggctaatcctggcatcgctatggcaacacacaaagacgacgaggagcgtttttttcccagtaacgggatcctgatttttggcaaacaaaatgctgccagagacaatgcggattacagcgatgtcatgcccaccagcgaggaagaaatcaaaaccactaaccctgtggccacagaggaatacggtatcgtggcagataacttgcagcagcaaaacacggctcctcaaattggaactgtcaacagccagggggccttacccggtatggtctggcagaaccgggacgtgtacctgcagggtcccatctgggccaagattcctcacacggacggcaacttccacccgtctccgctgatgggcggctttggcctgaaacatcctccgcctcagatcctgatcaagaacacgcctgtacctgcggatcctccgaccaccttcaaccagtcaaagctgaactctttcatcacgcaatacagcaccggacaggtcagcgtggaaattgaatgggagctgcagaaggaaaacagcaagcgctggaaccccgagatccagtacacctccaactactacaaatctacaagtgtggactttgctgttaatacagaaggcgtgtactctgaaccccgccccattggcacccgttacctcacccgtaatctgtaa

SEQ ID NO: 1484 - DNA, 2217 bp, Artificial Sequence
  Synthetic Polynucleotide
atggctgccgatggttatctcccagattggctcgaggacaacctctctgagggcattcgcgagtggtgggcactgaaacctggagccccgaagcccaaagccaaccagcaaaagcaggacgacggccggggtctggtgcttcctggctacaagtacctcggacccttcaacggactcgacaagggggagcccgtcaacgcggcggacgcggcggccctcgagcacgacaaggcctacgaccagcagctgcaggcgggtgacaatccgtacctgcggtataaccacgccgacgccgagtttcaggagcgtctgcaagaagatacgtcttttgggggcaacctcgggcgagcagtcttccaggccaagaagcgggttctcgaacctctcggtctggttgaggaaggcgctaagacggctcctggaaaggagagaccggtagagccatcaccccagcgttctccagactcctctacgggcatcggcaagaagggccaacagcctgccagaaaaagactcaattttggtcagactggcgactcagagtcagttccagaccctcaacctctcggagaacctccagcagcgccctctggtgtgggacctaatacaatggctgcaggcggtggcgcaccaatggcagacaataacgaaggcgccgacggagtgggtagttcctcgggaaattggcattgcgattccacatggctgggcgacagagtcatcaccaccagcacccgaacctgggccctgcccacctacaacaaccacctctacaagcaaatccccaacgggacatcgggaggagccaccaacgacaacacctacttcggctacagcaccccctgggggtattttgactttaacagattccactgccacttttcaccacgtgactggcagcgactcatcaacaacaactggggattccggcccaagagactcagcttcaagctcttcaacatccaggtcaaggaggtcacgcagaatgaaggcaccaagaccaccgccaataacctcaccagcaccatccaggtgtttacggactcggagtaccagctgccgtacgttctcggctctgcccaccagggctgcctgcctccgttcccggcggacgtgttcacgattccccagtacggctacctaacactcaacaacggtagtcaggccgtgggacgctcctccttctactgcctggaatactttccttcgcagatgctgagaaccggcaacaacttccagtttacttacaccttcgaggacgtgcctttccacagcagctacgcccacagccagagcttggaccggctgatgaatcctctgattgaccagtacctgtactacttgtctcggattcaaacaacaggaggcacggcaaatacgcagactctgggcttcagccaaggtgggcctaatacaatggccaatcaggcaaagaactggctgccaggaccctgttaccgccaacaacgcgtctcaacgacaaccgggcaaaacaacaatagcaactttgcctggactgctgggaccaaataccatctgaatggaagaaattcattggctaatcctggcatcgctatggcaacacacaaagacgacgaggagcgtttttttcccagtaacgggatcctgatttttggcaaacaaaatgctgccagagacaatgcggattacagcgatgtcatgcccaccagcgaggaagaaatcaaaaccactaaccctgtggccacagaggaatacggtatcgtggcagataacttgcagcagcaaaacacggctcctcaaattggaactgtcaacagccagggggccttacccggtatggtctggcagaaccgggacgtgtacctgcagggtcccatctgggccaagattcctcacacggacggcaacttccacccgtctccgctgatgggcggctttggcctgaaacatcctccgcctcagatcctgatcaagaacacgcctgtacctgcggatcctccgaccaccttcaaccagtcaaagctgaactctttcatcacgcaatacagcaccggacaggtcagcgtggaaattgaatgggagctgcagaaggaaaacagcaagcgctggaaccccgagatccagtacacctccaactactacaaatctacaagtgtggactttgctgttaatacagaaggcgtgtactctgaaccccgccccattggcacccgttacctcacccgtaatctgtaa

SEQ ID NO: 1485 - DNA, 2217 bp, Artificial Sequence
  Synthetic Polynucleotide
atggctgccgatggttatcttccagattggctcgaggacaacctctctgagggcattcgcgagtggtgggcgctgaaacctggagccccgaagcccaaagccaaccagcaaaagcaggacgacggccggggtctggtgcttcctggctacaagtacctcggacccttcaacggactcgacaagggggagcccgtcaacgcggcggacgcggcggccctcgagcacgacaaggcctacgaccagcagctgcaggcgggtgacaatccgtacctgcggtataaccacgccgacgccgagtttcaggagcgtctgcaagaagatacgtcttttgggggcaacctcgggcgagcagtcttccaggccaagaagcgggttctcgaacctctcggtctggttgaggaaggcgctaagacggctcctggaaagaagagaccggtagagccatcaccccagcgttctccagactcctctacgggcatcggcaaggagggccaacagcccgccagaaaaagactcaattttggtcagactggcgactcagagtcagttccagaccctcaacctctcggagaacctccagcagcgccctctggtgtgggacctaatacaatggctgcaggcggtggcgcaccaatggcagacaataacgaaggcgccgacggagtgggtagttcctcgggaaattggcattgcgattccacatggctgggcgacagagtcatcaccaccagcacccgaacctgggccctgcccacctacaacaaccacctctacaagcaaatctccaacgggacatcgggaggagccaccaacgacaacacctacttcggctacagcaccccctgggggtattttgactttaacagattccactgccacttttcaccacgtgactggcagcgactcatcaacaacaactggggattccggcccaagagactcagcttcaagctcttcaacatccaggtcaaggaggtcacgcagaatgaaggcaccaagaccaccgccaataacctcaccagcaccatccaggtgtttacggactcggagtaccagctgccgtacgttctcggctctgcccaccagggctgcctgcctccgttcccggcggacgtgttcacgattccccagtacggctacctaacactcaacaacggtagtcaggccgtgggacgctcctccttctactgcctggaatactttccttcgcagatgctgagaaccggcaacaacttccagtttacttacaccttcgaggacgtgcctttccacagcagctacgcccacagccagagcttggaccggctgatgaatcctctgattgaccagtacctgtactacttgtctcggattcaaacaacaggaggcacggcaaatacgcagactctgggcttcagccaaggtgggcctaatacaatggccaatcaggcaaagaactggctgccaggaccctgttaccgccaacaacgcgtctcaacgacaaccgggcaaaacaacaatagcaactttgcctggactgctgggaccaaataccatctgaatggaagaaattcattggctaatcctggcatcgctatggcaacacacaaagacgacgaggagcgtttttttcccagtaacgggatcctgatttttggcaaacaaaatgctgccagagacaatgcggattacagcgatgtcatgcccaccagcgaggaagaaatcaaaaccactaaccctgtggccacagaggaatacggtatcgtggcagataacttgcagcagcaaaacacggctcctcaaattggaactgtcaacagccagggggccttacccggtatggtctggcagaaccgggacgtgtacctgcagggtcccatctgggccaagattcctcacacggacggcaacttccacccgtctccgctgatgggcggctttggcctgaaacatcctccgcctcagatcctgatcaagaacacgcctgtacctgcggatcctccgaccaccttcaaccagtcaaagctgaactctttcatcacgcaatacagcaccggacaggtcagcgtggaaattgaatgggagctgcagaaggaaaacagcaagcgctggaaccccgagatccagtacacctccaactactacaaatctacaagtgtggactttgctgttaatacagaaggcgtgtactctgaaccccgccccattggcacccgttacctcacccgtaatctgtaa

SEQ ID NO: 1486 - DNA, 2217 bp, Artificial Sequence
  Synthetic Polynucleotide
atggctgccgatggttatctcccagattggctcgaggacaacctctctgagggcattcgcgagtggtgggcactgaaacctggagccccgaagcccaaagccaaccagcaaaagcaggacgacggccggggtctggtgcttcctggctacaagtacctcggacccttcaacggactcgacaagggggagcccgtcaacgcggcggacgcggcggccctcgagcacgacaaggcctacgaccagcagctgcaggcgggtgacaatccgtacctgcggtataaccacgccgacgccgagtttcaggagcgtctgcaagaagatacgtcttttgggggcaacctcgggcgagcagtcttccaggccaagaagcgggttctcgaacctctcggtctggttgaggaaggcgctaagacggctcctggaaaggagagaccggtagagccatcaccccagcgttctccagactcctctacgggcatcggcaagaagggccaacagcctgccagaaaaagactcaattttggtcagactggcgactcagagtcagttccagaccctcaacctctcggagaacctccagcagcgccctctggtgtgggacctaatacaatggctgcaggcggtggcgcaccaatggcagacaataacgaaggcgccgacggagtgggtagttcctcgggaaattggcattgcgattccacatggctgggcgacagagtcatcaccaccagcacccgaacctgggccctgcccacctacaacaaccacctctacaagcaaatctccaacgggacatcgggaggagccaccaacgacaacacctacttcggctacagcaccccctgggggtattttgactttaacagattccactgccacttttcaccacgtgactggcagcgactcatcaacaacaactggggattccggcccaagagactcagcttcaagctcttcaacatccaggtcaaggaggtcacgcagaatgaaggcaccaagaccaccgccaataacctcaccagcaccatccaggtgtttacggactcggagtaccagctgccgtacgttctcggctctgcccaccagggctgcctgcctccgttcccggcggacgtgttcacgattccccagtacggctacctaacactcaacaacggtagtcaggccgtgggacgctcctccttctactgcctggaatactttccttcgcagatgctgagaaccggcaacaacttccagtttacttacaccttcgaggacgtgcctttccacagcagctacgcccacagccagagcttggaccggctgatgaatcctctgattgaccagtacctgtactacttgtctcggattcaaacaacaggaggcacggcaaatacgcagactctgggcttcagccaaggtgggcctaatacaatggccaatcaggcaaagaactggctgccaggaccctgttaccgccaacaacgcgtctcaacgacaaccgggcaaaacaacaatagcaactttgcctggactgctgggaccaaataccatctgaatggaagaaattcattggctaatcctggcatcgctatggcaacacacaaagacgacgaggagcgtttttttcccagtaacgggatcctgatttttggcaaacaaaatgctgccagagacaatgcggattacagcgatgtcatgcccaccagcgaggaagaaatcaaaaccactaaccctgtggccacagaggaatacggtatcgtggcagataacttgcagcagcaaaacacggctcctcaaattggaactgtcaacagccagggggccttacccggtatggtctggcagaaccgggacgtgtacctgcagggtcccatctgggccaagattcctcacacggacggcaacttccacccgtctccgctgatgggcggctttggcctgaaacatcctccgcctcagatcctgatcaagaacacgcctgtacctgcggatcctccgaccaccttcaaccagtcaaagctgaactctttcatcacgcaatacagtaccggacaggtcagcgtggaaattgaatgggagctgcagaaggaaaacagcaagcgctggaaccccgagatccagtacacctccaactactacaaatctacaagtgtggactttgctgttaatacagaaggcgtgtactctgaaccccgccccattggcacccgttacctcacccgtaatctgtaa

SEQ ID NO: 1487 - DNA, 2217 bp, Artificial Sequence
  Synthetic Polynucleotide
atggctgccgatggttatctcccagattggctcgaggacaacctctctgagggcattcgcgagtggtgggcactgaaacctggagccccgaagcccaaagccaaccagcaaaagcaggacgacggccggggtctggtgcttcctggctacaagtacctcggacccttcaacggactcgacaagggggagcccgtcaacgcggcggacgcggcggccctcgagcacgacaaggcctacgaccagcagctgcaggcgggtgacaatccgtacctgcggtataaccacgccgacgccgagtttcaggagcgtctgcaagaagatacgtcttttgggggcaacctcgggcgagcagtcttccaggccaagaagcgggttctcgaacctctcggtctggttgaggaaggcgctaagacggctcctggaaaggagagaccggtagagccatcaccccagcgttctccagactcctctacgggcatcggcaagaagggccaacagcctgccagaaaaagactcaattttggtcagactggcgactcagagtcagttccagaccctcaacctctcggagaacctccagcagcgccctctggtgtgggacctaatacaatggctgcaggcggtggcgcaccaatggcagacaataacgaaggcgccgacggagtgggtagttcctcgggaaattggcattgcgattccacatggctgggcgacagagtcatcaccaccagcacccgaacctgggccctgcccacctacaacaaccacctctacaagcaaatctccaacgggacatcgggaggagccaccaacgacaacacctacttcggctacagcaccccctgggggtattttgactttaacagattccactgccacttttcaccacgtgactggcagcgactcatcaacaacaactggggattccggcccaagagactcagcttcaagctcttcaacatccaggtcaaggaggtcacgcagaatgaaggcaccaagaccatcgccaataacctcaccagcaccatccaggtgtttacggactcggagtaccagctgccgtacgttctcggctctgcccaccagggctgcctgcctccgttcccggcggacgtgttcacgattccccagtacggctacctaacactcaacaacggtagtcaggccgtgggacgctcctccttctactgcctggaatactttccttcgcagatgctgagaaccggcaacaacttccagtttacttacaccttcgaggacgtgcctttccacagcagctacgcccacagccagagcttggaccggctgatgaatcctctgattgaccagtacctgtactacttgtctcggattcaaacaacaggaggcacggcaaatacgcagactctgggcttcagccaaggtgggcctaatacaatggccaatcaggcaaagaactggctgccaggaccctgttaccgccaacaacgcgtctcaacgacaaccgggcaaaacaacaatagcaactttgcctggactgctgggaccaaataccatctgaatggaagaaattcattggctaatcctggcatcgctatggcaacacacaaagacgacgaggagcgtttttttcccagtaacgggatcctgatttttggcaaacaaaatgctgccagagacaatgcggattacagcgatgtcatgcccaccagcgaggaagaaatcaaaaccactaaccctgtggccacagaggaatacggtatcgtggcagataacttgcagcagcaaaacacggctcctcaaattggaactgtcaacagccagggggccttacccggtatggtctggcagaaccgggacgtgtacctgcagggtcccatctgggccaagattcctcacacggacggcaacttccacccgtctccgctgatgggcggctttggcctgaaacatcctccgcctcagatcctgatcaagaacacgcctgtacctgcggatcctccgaccaccttcaaccagtcaaagctgaactctttcatcacgcaatacagtaccggacaggtcagcgtggaaattgaatgggagctgcagaaggaaaacagcaagcgctggaaccccgagatccagtacacctccaactactacaaatctacaagtgtggactttgctgttaatacagaaggcgtgtactctgaaccccgccccattggcacccgttacctcacccgtaatctgtaa

SEQ ID NO: 1488 - DNA, 2217 bp, Artificial Sequence
  Synthetic Polynucleotide
atggctgccgatggttatcttccagattggctcgaggacaacctctctgagggcattcgcgagtggtgggcgctgaaacctggagccccgaagcccaaagccaaccagcaaaagcaggacgacggccggggtctggtgcttcctggctacaagtacctcggacccttcaacggactcgacaagggggagcccgtcaacgcggcggacgcggcggccctcgagcacgacaaggcctacgaccagcagctgcaggcgggtgacaatccgtacctgcggtataaccacgccgacgccgagtttcaggagcgtctgcaagaagatacgtcttttgggggcaacctcgggcgagcagtcttccaggccaagaagcgggttctcgaacctctcggtctggttgaggaaggcgctaagacggctcctggaaagaagagaccggtagagccatcaccccagcgttctccagactcctctacgggcatcggcaagaagggccaacagcccgccagaaaaagactcaattttggtcagactggcgactcagagtcagttccagaccctcaacctctcggagaacctccagcagcgccctctggtgtgggacctaatacaatggctgcaggcggtggcgcaccaatggcagacaataacgaaggcgccgacggagtgggtagttcctcgggaaattggcattgcgattccacatggctgggcgacagagtcatcaccaccagcacccgaacctgggccctgcccacctacaacaaccacctctacaagcaaatctccaacgggacatcgggaggagccaccaacgacaacacctacttcggctacagcaccccctgggggtattttgactttaacagattccactgccacttttcaccacgtgactggcagcgactcatcaacaacaactggggattccggcccaagagactcagcttcaagctcttcaacatccaggtcaaggaggtcacgcagaatgaaggcaccaagaccatcgccaataacctcaccagcaccatccaggtgtttacggactcggagtacccgctgccgtacgttctcggctctgcccaccagggctgcctgcctccgttcccggcggacgtgttcacgattccccagtacggctacctaacactcaacaacggtagtcaggccgtgggacgctcctccttctactgcctggaatactttccttcgcagatgctgagaaccggcaacaacttccagtttacttacaccttcgaggacgtgcctttccacagcagctacgcccacagccagagcttggaccggctgatgaatcctctgattgaccagtacctgtactacttgtctcggattcaaacaacaggaggcacggcaaatacgcagactctgggcttcagccaaggtgggcctaatacaatggccaatcaggcaaagaactggctgccaggaccctgttaccgccaacaacgcgtctcaacgacaaccgggcaaaacaacaatagcaactttgcctggactgctgggaccaaataccatctgaatggaagaaattcattggctaatcctggcatcgctatggcaacacacaaagacgacgaggagcgtttttttcccagtaacgggatcctgatttttggcaaacaaaatgctgccagagacaatgcggattacagcgatgtcatgcccaccagcgaggaagaaatcaaaaccactaaccctgtggccacagaggaatacggtatcgtggcagataacttgcagcagcaaaacacggctcctcaaattggaactgtcaacagccagggggccttacccggtatggtctggcagaaccgggacgtgtacctgcagggtcccatctgggccaagattcctcacacggacggcaacttccacccgtctccgctgatgggcggctttggcctgaaacatcctccgcctcagatcctgatcaagaacacgcctgtacctgcggaccctccgaccaccttcaaccagtcaaagctgaactctttcatcacgcaatacagcaccggacaggtcagcgtggaaattgaatgggagctgcagaaggaaaacagcaagcgctggaaccccgagatccagtacacctccaactactacaaatctacaagtgtggactttgctgttaatacagaaggcgtgtactctgaaccccgccccattggcacccgttacctcacccgtaatctgtaa

SEQ ID NO: 1489 - DNA, 2217 bp, Artificial Sequence
  Synthetic Polynucleotide
atggctgccgatggttatcttccagattggctcgaggacaacctctctgagggcattcgcgagtggtgggcgctgaaacctggagccccgaagcccaaagccaaccagcaaaagcaggacgacggccggggtctggtgcttcctggctacaagtacctcggacccttcaacggactcgacaagggggagcccgtcaacgcggcggacgcggcggccctcgagcacgacaaggcctacgaccagcagctgcaggcgggtgacaatccgtacctgcggtataaccacgccgacgccgagtttcaggagcgtctgcaagaagatacgtcttttgggggcaacctcgggcgagcagtcttccaggccaagaagcgggttctcgaacctctcggtctggttgaggaaggcgctaagacggctcctggaaagaagagaccggtagagccatcaccccagcgttctccagactcctctacgggcatcggcaagaagggccaacagcccgccagaaaaagactcaattttggtcagactggcgactcagagtcagttccagaccctcaacctctcggagaacctccagcagcgccctctggtgtgggacctaatacaatggctgcaggcggtggcgcaccaatggcagacaataacgaaggcgccgacggagtgggtagttcctcgggaaattggcattgcgattccacatggctgggcgacagagtcatcaccaccagcacccgaacctgggccctgcccacctacaacaaccacctctacaagcaaatctccaacgggacatcgggaggagccaccaacgacaacacctacttcggctacagcaccccctgggggtattttgactttaacagattccactgccacttttcaccacgtgactggcagcgactcatcaacaacaactggggattccggcccaagagactcagcttcaagctcttcaacatccaggtcaaggaggtcacgcagaatgaaggcaccaagaccatcgccaataacctcaccagcaccatccaggtgtttacggactcggagtaccagctgccgtacgttctcggctctgcccaccagggctgcctgcctccgttcccggcggacgtgttcacgattccccagtacggctacctaacactcaacaacggtagtcaggccgtgggacgctcctccttctactgcctggaatactttccttcgcagatgctgagaaccggcaacaacttccagtttacttacaccttcgaggacgtgcctttccacagcagctacgcccacagccagagcttggaccggctgatgaatcctctgattgaccagtacctgtactacttgtctcggattcaaacaacaggaggcacggcaaatacgcagactctgggcttcagccaaggtgggcctaatacaatggccaatcaggcaaagaactggctgccaggaccctgttaccgccaacaacgcgtctcaacgacaaccgggcaaaacaacaatagcaactttgcctggactgctgggaccaaataccatctgaatggaagaaattcattggctaatcctggcatcgctatggcaacacacaaagacgacgaggagcgtttttttcccagtaacgggatcctgatttttggcaaacaaaatgctgccagagacaatgcggattacagcgatgtcatgcccaccagcgaggaagaaatcaaaaccactaaccctgtggccacagaggaatacggtatcgtggcagataacttgcagcagcaaaacacggctcctcaaattggaactgtcaacagccagggggccttacccggtatggtctggcagaaccgggacgtgtacctgcagggtcccatctgggccaagattcctcacacggacggcaacttccacccgtctccgctgatgggcggctttggcctgaaacatcctccgcctcagatcctgatcaagaacacgcctgtacctgcggatcctccgaccaccttcaaccagtcaaagctgaactctttcatcacgcaatacggcaccggacaggtcagcgtggaaattgaatgggagctgcagaaggaaaacagcaagcgctggaaccccgagatccagtacacctccaactactacaaatctacaagtgtggactttgctgttaatacagaaggcgtgtactctgaaccccgccccattggcacccgttacctcacccgtaatctgtaa

SEQ ID NO: 1490 - DNA, 2217 bp, Artificial Sequence
  Synthetic Polynucleotide
atggctgccgatggttatcttccagattggctcgaggacaacctctctgagggcattcgcgagtggtgggcgctgaaacctggagccccgaagcccaaagccaaccagcaaaagcaggacgacggccggggtctggtgcttcctggctacaagtacctcggacccttcaacggactcgacaagggggagcccgtcaacgcggcggacgcggcggccctcgagcacgacaaggcctacgaccagcagctgcaggcgggtgacaatccgtacctgcggtataaccacgccgacgccgagtttcaggagcgtctgcaagaagatacgtcttttgggggcaacctcgggcgagcagtcttccaggccaagaagcgggttctcgaacctctcggtctggttgaggaaggcgctaagacggctcctggaaagaagagaccggtagagccatcaccccagcgttctccagactcctctacgggcatcggcaagaagggccaacagcccgccagaaaaagactcaattttggtcagactggcgactcagagtcagttccagaccctcaacctctcggagaacctccagcagcgccctctggtgtgggacctaatacaatggctgcaggcggtggcgcaccaatggcagacaataacgaaggcgccgacggagtgggtagttcctcgggaaattggcattgcgattccacatggctgggcgacagagtcatcaccaccagcacccgaacctgggccctgcccacctacaacaaccacctctacaagcaaatctccaacgggacatcgggaggagccaccaacgacaacacctacttcggctacagcaccccctgggggtattttgactttaacagattccactgccacttttcaccacgtgactggcagcgactcatcaacaacaactggggattccggcccaagagactcagcttcaagcccttcaacatccaggtcaaggaggtcacgcagaatgaaggcaccaagaccatcgccaataacctcaccagcaccatccaggtgtttacggactcggagtaccagctgccgtacgttctcggctctgcccaccagggctgcctgcctccgttcccggcggacgtgttcacgattccccagtacggctacctaacactcaacaacggtagtcaggccgtgggacgctcctccttctactgcctggaatactttccttcgcagatgctgagaaccggcaacaacttccagtttacttacaccttcgaggacgtgcctttccacagcagctacgcccacagccagagcttggaccggctgatgaatcctctgattgaccagtacctgtactacttgtctcggattcaaacaacaggaggcacggcaaatacgcagactctgggcttcagccaaggtgggcctaatacaatggccaatcaggcaaagaactggctgccaggaccctgttaccgccaacaacgcgtctcaacgacaaccgggcaaaacaacaatagcaactttgcctggactgctgggaccaaataccatctgaatggaagaaattcattggctaatcctggcatcgctatggcaacacacaaagacgacgaggagcgtttttttcccagtaacgggatcctgatttttggcaaacaaaatgctgccagagacaatgcggattacagcgatgtcatgcccaccagcgaggaagaaatcaaaaccactaaccctgtggccacagaggaatacggtatcgtggcagataacttgcagcagcaaaacacggctcctcaaattggaactgtcaacagccagggggccttacccggtatggtctggcagaaccgggacgtgtacctgcagggtcccatctgggccaagattcctcacacggacggcaacttccacccgtctccgctgatgggcggctttggcctgaaacatcctccgcctcagatcctgatcaagaacacgcctgtacctgcggatcctccgaccaccttcaaccagtcaaagctgaactctttcatcacgcaatacagcaccggacaggtcagcgtggaaattgaatgggagctgcagaaggaaaacagcaagcgctggaaccccgagatccagtacacctccaactactacaaatctacaagtgtggactttgctgttaatacagaaggcgtgtactctgaaccccgccccattggcacccgttacctcacccgtaatctgtaa

SEQ ID NO: 1491 - DNA, 2217 bp, Artificial Sequence
  Synthetic Polynucleotide
atggctgccgatggttatcttccagattggctcgaggacaacctctctgagggcattcgcgagtggtgggcgctgaaacctggagccccgaagcccaaagccaaccagcaaaagcaggacgacggccggggtctggtgcttcctggctacaagtacctcggacccttcaacggactcgacaagggggagcccgtcaacgcggcggacgcggcggccctcgagcacgacaaggcctacgaccagcagctgcaggcgggtgacaatccgtacctgcggtataaccacgccgacgccgagtttcaggagcgtctgcaagaagatacgtcttttgggggcaacctcgggcgagcagtcttccaggccaagaagcgggttctcgaacctctcggtctggttgaggaaggcgctaagacggctcctggaaagaagagaccggtagagccatcaccccagcgttctccagactcctctacgggcatcggcaagaagggccaacagcccgccagaaaaagactcaattttggtcagactggcgactcagagtcagttccagaccctcaacctctcggagaacctccagcagcgccctctggtgtgggacctaatacaatggctgcaggcggtggcgcaccaatggcagacaataacgaaggcgccgacggagtgggtagttcctcgggaaattggcattgcgattccacatggctgggcgacagagtcatcaccaccagcacccgaacctgggccctgcccacctacaacaaccacctctacaagcaaatctccaacgggacatcgggaggagccaccaacgacaacacctacttcggctacagcaccccctgggggtattttgactttaacagattccactgccacttttcaccacgtgactggcagcgactcatcaacaacaactggggattccggcccaagagactcagcttcaagctcttcaacatccaggtcaaggaggtcacgcagaatgaaggcaccaagaccatcgccaataacctcaccagcaccatccaggtgtttacggactcggagtaccagctgccgtacgttctcggctctgcccaccagggctgcctgcctccgttcccggcggacgtgttcacgattccccagtacggctacctaacactcaacaacggtagtcaggccgtgggacgctcctccttctactgcctggaatactttccttcgcagatgctgagaaccggcaacaacttccagtttacttacaccttcgaggacgtgcctttccacagcagctacgcccacagccagagcttggaccggctgatgaatcctctgattgaccagtacctgtactacttgtctcggattcaaacaacaggaggcacggcaaatacgcaggctctgggcttcagccaaggtgggcctaatacaatggccaatcaggcaaagaactggctgccaggaccctgttaccgccaacaacgcgtctcaacgacaaccgggcaaaacaacaatagcaactttgcctggactgctgggaccaaataccatctgaatggaagaaattcattggctaatcctggcatcgctatggcaacacacaaagacgacgaggagcgtttttttcccagtaacgggatcctgatttttggcaaacaaaatgctgccagagacaatgcggattacagcgatgtcatgcccaccagcgaggaagaaatcaaaaccactaaccctgtggccacagaggaatacggtatcgtggcagataacttgcagcagcaaaacacggctcctcaaattggaactgtcaacagccagggggccttacccggtatggtctggcagaaccgggacgtgtacctgcagggtcccatctgggccaagattcctcacacggacggcaacttccacccgtctccgctgatgggcggctttggcctgaaacatcctccgcctcagatcctgatcaagaacacgcctgtacctgcggatcctccgaccaccttcaaccagtcaaagctgaactctttcatcacgcaatacagcaccggacaggtcagcgtggaaattgaatgggagctgcagaaggaaaacagcaagcgctggaaccccgagatccagtacacctccaactactacaaatctacaagtgtggactttgctgttaatacagaaggcgtgtactctgaaccccgccccattggcacccgttacctcacccgtaatctgtaa

SEQ ID NO: 1492 - DNA, 2217 bp, Artificial Sequence
  Synthetic Polynucleotide
atggctgccgatggttatcttccagattggctcgaggacaacctctctgagggcattcgcgagtggtgggcgctgaaacctggagccccgaagcccaaagccaaccagcaaaagcaggacgacggccggggtctggtgcttcctggctacaagtacctcggacccttcaacggactcgacaagggggagcccgtcaacgcggcggacgcggcggccctcgagcacgacaaggcctacgaccagcagctgcaggcgggtgacaatccgtacctgcggtataaccacgccgacgccgagtttcaggagcgtctgcaagaagatacgtcttttgggggcaacctcgggcgagcagtcttccaggccaagaagcgggttctcgaacctctcggtctggttgaggaaggcgctaagacggctcctggaaagaagagaccggtagagccatcaccccagcgttctccagactcctctacgggcatcggcaagaagggccaacagcccgccagaaaaagactcaattttggtcagactggcgactcagagtcagttccagaccctcaacctctcggagaacctccagcagcgccctctggtgtgggacctaatacaatggctgcaggcggtggcgcaccaatggcagacaataacgaaggcgccgacggagtgggtagttcctcgggaaattggcattgcgattccacatggctgggcgacagagtcatcaccaccagcacccgaacctgggccctgcccacctacaacaaccacctctacaagcaaatctccaacgggacatcgggaggagccaccaacgacaacacctacttcggctacagcaccccctgggggtattttgactttaacagattccactgccacttttcaccacgtgactggcagcgactcatcaacaacaactggggattccggcccaagagactcagcttcaagctcttcaacatccaggtcaaggaggtcacgcagaatgaaggcaccaagaccatcgccaataacctcaccagcaccatccaggtgtttacggactcggagtaccagctgccgtacgttctcggctctgcccaccagggctgcctgcctccgttcccggcggacgtgttcacgattccccagtacggctacctaacactcaacaacggtagtcaggccgtgggacgctcctccttctactgcctggaatactttccttcgcagatgctgagaaccggcaacaacttccagtttacttacaccttcgaggacgtgcctttccacagcagctacgcccacagccagagcttggaccggctgatgaatcctctgattgaccagtacctgtactacttgtctcggattcaaacaacaggaggcacggcaaatacgcagactctgggcttcagccaaggtgggcctaatacaatggccaatcaggcaaagaactggctgccaggaccctgttaccgccaacaacgcgtctcaacgacaaccgggcaaaacaacaatagcaactttgcctggactgctgggaccaaataccatctgaatggaagaaattcattggctaatcctggcatcgctatggcaacacacaaagacgacgaggagcgtttttttcccagtaacgggatcctgatttttggcaaacaaaatgctgccagagacaatgcggattacagcgatgtcatgcccaccagcgaggaagaaatcaaaaccactaaccctgtggccacagagggatacggtatcgtggcagataacttgcagcagcaaaacacggctcctcaaattggaactgtcaacagccagggggccttacccggtatggtctggcagaaccgggacgtgtacctgcagggtcccatctgggccaagattcctcacacggacggcaacttccacccgtctccgctgatgggcggctttggcctgaaacatcctccgcctcagatcctgatcaagaacacgcctgtacctgcggatcctccgaccaccttcaaccagtcaaagctgaactctttcatcacgcaatacagcaccggacaggtcagcgtggaaattgaatgggagctgcagaaggaaaacagcaagcgctggaaccccgagatccagtacacctccaactactacaaatctacaagtgtggactttgctgttaatacagaaggcgtgtactctgaaccccgccccattggcacccgttacctcacccgtaatctgtaa

SEQ ID NO: 1493 - DNA, 2217 bp, Artificial Sequence
  Synthetic Polynucleotide
atggctgccgatggttatcttccagattggctcgaggacaacctctctgagggcattcgcgagtggtgggcgctgaaacctggagccccgaagcccaaagccaaccagcaaaagcaggacgacggccggggtctggtgcttcctggctacaagtacctcggacccttcaacggactcgacaagggggagcccgtcaacgcggcggacgcggcggccctcgagcacgacaaggcctacgaccagcagctgcaggcgggtgacaatccgtacctgcggtataaccacgccgacgccgagtttcaggagcgtctgcaagaagatacgtcttttgggggcaacctcgggcgagcagtcttccaggccaagaagcgggttctcgaacctctcggtctggttgaggaaggcgctaagacggctcctggaaagaagagaccggtagagccatcaccccagcgttctccagactcctctacgggcatcggcaagaagggccaacagcccgccagaaaaagactcaattttggtcagactggcgactcagagtcagttccagaccctcaacctctcggagaacctccagcagcgccctctggtgtgggacctaatacaatggctgcaggcggtggcgcaccaatggcagacaataacgaaggcgccgacggagtgggtagttcctcgggaaattggcattgcgattccacatggctgggcgacagagtcatcaccaccagcacccgaacctgggccctgcccacctacaacaaccacctctacaagcaaatctccaacgggacatcgggaggagccaccaacgacaacacctacttcggctacagcaccccctgggggtattttgactttaacagattccactgccacttttcaccacgtgactggcagcgactcatcaacaacaactggggattccggcccaagagactcagcttcaagctcttcaacatccaggtcaaggaggtcacgcagaatgaaggcaccaagaccatcgccaataacctcaccagcaccatccaggtgtttacggactcggagtaccagctgccgtacgttctcggctctgcccaccagggctgcctgcctccgttcccggcggacgtgttcacgattccccagtacggctacctaacactcaacaacggtagtcaggccgtgggacgctcctccttctactgcctggaatactttccttcgcagatgctgagaaccggcaacaacttccagtttacttacaccttcgaggacgtgcctttccacagcagctacgcccacagccagagcttggaccggctgatgaatcctctgattgaccagtacctgtactacttgtctcggattcaaacaacaggaggcacggcaaatacgcagactctgggcttcagccaaggtgggcctaatacaatggccaatcaggcaaagaactggctgccaggaccctgttaccgccaacaacgcgtctcaacgacaaccgggcaaaacaacaatagcaactttgcctggactgctgggaccaaataccatctgaatggaagaaattcattggctaatcctggcatcgctatggcaacacgcaaagacgacgaggagcgtttttttcccagtaacgggatcctgatttttggcaaacaaaatgctgccagagacaatgcggattacagcgatgtcatgcccaccagcgaggaagaaatcaaaaccactaaccctgtggccacagaggaatacggtatcgtggcagataacttgcagcagcaaaacacggctcctcaaattggaactgtcaacagccagggggccttacccggtatggtctggcagaaccgggacgtgtacctgcagggtcccatctgggccaagattcctcacacggacggcaacttccacccgtctccgctgatgggcggctttggcctgaaacatcctccgcctcagatcctgatcaagaacacgcctgtacctgcggatcctccgaccaccttcaaccagtcaaagctgaactctttcatcacgcaatacagcaccggacaggtcagcgtggaaattgaatgggagctgcagaaggaaaacagcaagcgctggaaccccgagatccagtacacctccaactactacaaatctacaagtgtggactttgctgttaatacagaaggcgtgtactctgaaccccgccccattggcacccgttacctcacccgtaatctgtaa

SEQ ID NO: 1494 - DNA, 2217 bp, Artificial Sequence
  Synthetic Polynucleotide
atggctgccgatggttatcttccagattggctcgaggacaacctctctgagggcattcgcgagtggtgggcgctgaaacctggagccccgaagcccaaagccaaccagcaaaagcaggacgacggccggggtctggtgcttcctggctacaagtacctcggacccttcaacggactcgacaagggggagcccgtcaacgcggcggacgcggcggccctcgagcacgacaaggcctacgaccagcagctgcaggcgggtgacaatccgtacctgcggtataaccacgccgacgccgagtttcaggagcgtctgcaagaagatacgtcttttgggggcaacctcgggcgagcagtcttccaggccaagaagcgggttctcgaacctctcggtctggttgaggaaggcgctaagacggctcctggaaagaagagaccggtagagccatcaccccagcgttctccagactcctctacgggcatcggcaagaagggccaacagcccgccagaaaaagactcaattttggtcagactggcgactcagagtcagttccagaccctcaacctctcggagaacctccagcagcgccctctggtgtgggacctaatacaatggctgcaggcggtggcgcaccaatggcagacaataacgaaggcgccgacggagtgggtagttcctcgggaaattggcattgcgattccacatggctgggcgacagagtcatcaccaccagcacccgaacctgggccctgcccacctacaacaaccacctctacaagcaaatctccaacgggacatcgggaggagccaccaacgacaacacctacttcggctacagcaccccctgggggtattttgactttaacagattccactgccacttttcaccacgtgactggcagcgactcatcaacaacaactggggattccggcccaagagactcagcttcaagctcttcaacatccaggtcaaggaggtcacgcagaatgaaggcaccaagaccatcgccaataacctcaccagcaccatccaggtgtttacggactcggagtaccagctgccgtacgttctcggctctgcccaccagggctgcctgcctccgttcccggcggacgtgttcacgattccccagtacggctacctaacactcaacaacggtagtcaggccgtgggacgctcctccttctactgcctggaatactttccttcgcagatgctgagaaccggcaacaacttccagtttacttacaccttcgaggacgtgcctttccacagcagctacgcccacagccagagcttggaccggctgatgaatcctctgattgaccagtacctgtactacttgtctcggattcaaacaacaggaggcacggcaaatacgcagactctgggcttcagccaaggtgggcctaatacaatggccaatcaggcaaagaactggctgccaggaccctgttaccgccaacaacgcgtctcaacgacaaccgggcaaaacaacaatagcaactttgcctggactgctgggaccaaataccatctgaatggaagaaattcattggctaatcctggcatcgctatggcaacacacaaagacgacgaggagcgtttttttcccagtaacgggatcctgatttttggcaaacaaaatgctgccagagacaatgcggattacagcgatgtcatgcccaccagcgaggaagaaatcaaaaccactaaccctgtggccacagaggaatacggtatcgtggcagataacttgcagcagcaaaacacggctcctcaaattggaactgtcaacagccagggggccttacccggtatggtctggcagaaccgggacgtgtacctgcagggtcccatctgggccaagattcctcacacggacggcaacttccacccgtctccgctgatgggcggctttggcctgaaacatcctccgcctcagatcctgatcaagaacacgcctgtacctgcggatcctccgaccaccttcaaccagtcaaagccgaactctttcatcacgcaatacagcaccggacaggtcagcgtggaaattgaatgggagctgcagaaggaaaacagcaagcgctggaaccccgagatccagtacacctccaactactacaaatctacaagtgtggactttgctgttaatacagaaggcgtgtactctgaaccccgccccattggcacccgttacctcacccgtaatctgtaa

SEQ ID NO: 1495 - DNA, 2217 bp, Artificial Sequence
  Synthetic Polynucleotide
atggctgccgatggttatcttccagattggctcgaggacaacctctctgagggcattcgcgagtggtgggcgctgaaacctggagccccgaagcccaaagccaaccagcaaaagcaggacgacggccggggtctggtgcttcctggctacaagtacctcggacccttcaacggactcgacaagggggagcccgtcaacgcggcggacgcggcggccctcgagcacgacaaggcctacgaccagcagctgcaggcgggtgacaatccgtacctgcggtataaccacgccgacgccgagtttcaggagcgtctgcaagaagatacgtcttttgggggcaacctcgggcgagcagtcttccaggccaagaagcgggttctcgaacctctcggtctggttgaggaaggcgctaagacggctcctggaaagaagagaccggtagagccatcaccccagcgttctccagactcctctacgggcatcggcaagaagggccaacagcccgccagaaaaagactcaattttggtcagactggcgactcagagtcagttccagaccctcaacctctcggagaacctccagcagcgccctctggtgtgggacctaatacaatggctgcaggcggtggcgcaccaatggcagacaataacgaaggcgccgacggagtgggtagttcctcgggaaattggcattgcgattccacatggctgggcgacagagtcatcaccaccagcacccgaacctgggccctgcccacctacaacaaccacctctacaagcaaatctccaacgggacatcgggaggagccaccaacgacaacacctacttcggctacagcaccccctgggggtattttgactttaacagattccactgccacttttcaccacgtgactggcagcgactcatcaacaacaactggggattccggcccaagagactcagcttcaagctcttcaacatccaggtcaaggaggtcacgcagaatgaaggcaccaagaccatcgccaataacctcaccagcaccatccaggtgtttacggactcggagtaccagctgccgtacgttctcggctctgcccaccagggctgcctgcctccgttcccggcggacgtgttcacgattccccagtacggctacctaacactcaacaacggtagtcaggccgtgggacgctcctccttctactgcctggaatactttccttcgcagatgctgagaaccggcaacaacttccagtttacttacaccttcgaggacgtgcctttccacagcagctacgcccacagccagagcttggaccggctgatgaatcctctgattgaccagtacctgtactacttgtctcggattcaaacaacaggaggcacggcaaatacgcagactctgggcttcagccaaggtgggcctaatacaatggccaatcaggcaaagaactggctgccaggaccctgttaccgccaacaacgcgtctcaacgacaaccgggcaaaacaacaatagcaactttgcctggactgctgggaccaaataccatctgaatggaagaaattcattggctaatcctggcatcgctatggcaacacacaaagacgacgaggagcgttttttttccagtaacgggatcctgatttttggcaaacaaaatgctgccagagacaatgcggattacagcgatgtcatgcccaccagcgaggaagaaatcaaaaccactaaccctgtggccacagaggaatacggtatcgtggcagataacttgcagcagcaaaacacggctcctcaaattggaactgtcaacagccagggggccttacccggtatggtctggcagaaccgggacgtgtacctgcagggtcccatctgggccaagattcctcacacggacggcaacttccacccgtctccgctgatgggcggctttggcctgaaacatcctccgcctcagatcctgatcaagaacacgcctgtacctgcggatcctccgaccaccttcaaccagtcaaagctgaactctttcatcacgcaatacagcaccggacaggtcagcgtggaaattgaatgggagctgcagaaggaaaacagcaagcgctggaaccccgagatccagtacacctccaactactacaaatctacaagtgtggactttgctgttaatacagaaggcgtgtactctgaaccccgccccattggcacccgttacctcacccgtaatctgtaa

SEQ ID NO: 1496 - DNA, 2217 bp, Artificial Sequence
  Synthetic Polynucleotide
atggctgccgatggttatcttccagattggctcgaggacaacctctctgagggcattcgcgagtggtgggcgctgaaacctggagccccgaagcccaaagccaaccagcaaaagcaggacgacggccggggtctggtgcttcctggctacaagtacctcggacccttcaacggactcgacaagggggagcccgtcaacgcggcggacgcggcggccctcgagcacgacaaggcctacgaccagcagctgcaggcgggtgacaatccgtacctgcggtataaccacgccgacgccgagtttcaggagcgtctgcaagaagatacgtcttttgggggcaacctcgggcgagcagtcttccaggccaagaagcgggttctcgaacctctcggtctggttgaggaaggcgctaagacggctcctggaaagaagagaccggtagagccatcaccccagcgttctccagactcctctacgggcatcggcaagaagggccaacagcccgccagaaaaagactcaattttggtcagactggcgactcagagtcagttccagaccctcaacctctcggagaacctccagcagcgccctctggtgtgggacctaatacaatggctgcaggcggtggcgcaccaatggcagacaataacgaaggcgccgacggagtgggtagttcctcgggaaattggcattgcgattccacatggctgggcgacagagtcatcaccaccagcacccgaacctgggccctgcccacctacaacaaccacctctacaagcaaatctccaacgggacatcgggaggagccaccaacgacaacacctacttcggctacagcaccccctgggggtattttgactttaacagattccactgccacttttcaccacgtgactggcagcgactcatcaacaacaactggggattccggcccaagagactcagcttcaagctcttcaacatccaggtcaaggaggtcacgcagaatgaaggcaccaagaccatcgccaataacctcaccagcaccatccaggtgtttacggactcggagtaccagctgccgtacgttctcggctctgcccaccagggctgcctgcctccgttcccggcggacgtgttcacgattccccagtacggctacctaacactcaacaacggtagtcaggccgtgggacgctcctccttctactgcctggaatactttccttcgcagatgctgagaaccggcaacaacttccagtttacttacaccttcgaggacgtgcctttccacagcagctacgcccacagccagagcttggaccggctgatgaatcctctgattgaccagtacctgtactacttgtctcggattcaaacaacaggaggcacggcaaatacgcagactctgggcttcagccaaggtgggcctaatacaatggccaatcaggcaaagaactggctgccaggaccctgttaccgccaacaacgcgtctcaacgacaaccgggcaaaacaacaatagcaactttgcctgggctgctgggaccaaataccatctgaatggaagaaattcattggctaatcctggcatcgctatggcaacacacaaagacgacgaggagcgtttttttcccagtaacgggatcctgatttttggcaaacaaaatgctgccagagacaatgcggattacagcgatgtcatgcccaccagcgaggaagaaatcaaaaccactaaccctgtggccacagaggaatacggtatcgtggcagataacttgcagcagcaaaacacggctcctcaaattggaactgtcaacagccagggggccttacccggtatggtctggcagaaccgggacgtgtacctgcagggtcccatctgggccaagattcctcacacggacggcaacttccacccgtctccgctgatgggcggctttggcctgaaacatcctccgcctcagatcctgatcaagaacacgcctgtacctgcggatcctccgaccaccttcaaccagtcaaagctgaaccctttcatcacgcaatacagcaccggacaggtcagcgtggaaattgaatgggagctgcagaaggaaaacagcaagcgctggaaccccgagatccagtacacctccaactactacaaatctacaagtgtggactttgctgttaatacagaaggcgtgtactctgaaccccgccccattggcacccgttacctcacccgtaatctgtaa

SEQ ID NO: 1497 - DNA, 2217 bp, Artificial Sequence
  Synthetic Polynucleotide
atggctgccgatggttatcttccagattggctcgaggacaacctctctgagggcattcgcgagtggtgggcgctgaaacctggagccccgaagcccaaagccaaccagcaaaagcaggacgacggccggggtctggtgcttcctggctacaagtacctcggacccttcaacggactcgacaagggggagcccgtcaacgcggcggacgcggcggccctcgagcacgacaaggcctacgaccagcagctgcaggcgggtgacaatccgtacctgcggtataaccacgccgacgccgagtttcaggagcgtctgcaagaagatacgtcttttgggggcaacctcgggcgagcagtcttccaggccaagaagcgggttctcgaacctctcggtctggttgaggaaggcgctaagacggctcctggaaagaagagaccggtagagccatcaccccagcgttctccagactcctctacgggcatcggcaagaagggccaacagcccgccagaaaaagactcaattttggtcagactggcgactcagagtcagttccagaccctcaacctctcggagaacctccagcagcgccctctggtgtgggacctaatacaatggctgcaggcggtggcgcaccaatggcagacaataacgaaggcgccgacggagtgggtagttcctcgggaaattggcattgcgattccacatggctgggcgacagagtcatcaccaccagcacccgaacctgggccctgcccacctacaacaaccacctctacaagcaaatctccaacgggacatcgggaggagccaccaacgacaacacctacttcggctacagcaccccctgggggtattttgactttaacagattccactgccacttttcaccacgtgactggcagcgactcatcaacaacaactggggattccggcccaagagactcagcttcaagctcttcaacatccaggtcaaggaggtcacgcagaatgaaggcaccaagaccatcgccaataaccccaccagcaccatccaggtgtttacggactcggagtaccagctgccgtacgttctcggctctgcccaccagggctgcctgcctccgttcccggcggacgtgttcacgattccccagtacggctacctaacactcaacaacggtagtcaggccgtgggacgctcctccttctactgcctggaatactttccttcgcagatgctgagaaccggcaacaacttccagtttacttacaccttcgaggacgtgcctttccacagcagctacgcccacagccagagcttggaccggctgatgaatcctctgattgaccagtacctgtactacttgtctcggattcaaacaacaggaggcacggcaaatacgcagactctgggcttcagccaaggtgggcctaatacaatggccaatcaggcaaagaactggctgccaggaccctgttaccgccaacaacgcgtctcaacgacaaccgggcaaaacaacaatagcaactttgcctggactgctgggaccaaataccatctgaatggaagaaattcattggctaatcctggcatcgctatggcaacacacaaagacgacgaggagcgtttttttcccagtaacgggatcctgatttttggcaaacaaaatgctgccagagacaatgcggattacagcgatgtcatgcccaccagcgaggaagaaatcaaaaccactaaccctgtggccacagaggaatacggtatcgtggcggataacttgcagcagcaaaacacggctcctcaaattggaactgtcaacagccagggggccttacccggtatggtctggcagaaccgggacgtgtacctgcagggtcccatctgggccaagattcctcacacggacggcaacttccacccgtctccgctgatgggcggctttggcctgaaacatcctccgcctcagatcctgatcaagaacacgcctgtacctgcggatcctccgaccaccttcaaccagtcaaagctgaactctttcatcacgcaatacagcaccggacaggtcagcgtggaaattgaatgggagctgcagaaggaaaacagcaagcgctggaaccccgagatccagtacacctccaactactacaaatctacaagtgtggactttgctgttaatacagaaggcgtgtactctgaaccccgccccattggcacccgttacctcacccgtaatctgtaa

SEQ ID NO: 1498 - DNA, 2217 bp, Artificial Sequence
  Synthetic Polynucleotide
atggctgccgatggttatcttccagattggctcgaggacaacctctctgagggcattcgcgagtggtgggcgctgaaacctggagccccgaagcccaaagccaaccagcaaaagcaggacgacggccggggtctggtgcttcctggctacaagtacctcggacccttcaacggactcgacaagggggagcccgtcaacgcggcggacgcggcggccctcgagcacgacaaggcctacgaccagcagctgcaggcgggtgacaatccgtacctgcggtataaccacgccgacgccgagtttcaggagcgtctgcaagaagatacgtcttttgggggcaacctcgggcgagcagtcttccaggccaagaagcgggttctcgaacctctcggtctggttgaggaaggcgctaagacggctcctggaaagaagagaccggtagagccatcaccccagcgttctccagactcctctacgggcatcggcaagaagggccaacagcccgccagaaaaagactcaattttggtcagactggcgactcagagtcagttccagaccctcaacctctcggagaacctccagcagcgccctctggtgtgggacctaatacaatggctgcaggcggtggcgcaccaatggcagacaataacgaaggcgccgacggagtgggtagttcctcgggaaattggcattgcgattccacatggctgggcgacagagtcatcaccaccagcacccgaacctgggccctgcccacctacaacaaccacctctacaagcaaatctccaacgggacatcgggaggagccaccaacgacaacacctacttcggctacagcaccccctgggggtattttgactttaacagattccactgccgcttttcaccacgtgactggcagcgactcatcaacaacaactggggattccggcccaagagactcagcttcaagctcttcaacatccaggtcaaggaggtcacgcagaatgaaggcaccaagaccatcgccaataacctcaccagcaccatccaggtgtttacggactcggagtaccagctgccgtacgttctcggctctgcccaccagggctgcctgcctccgttcccggcggacgtgttcacgattccccagtacggctacctaacactcaacaacggtagtcaggccgtgggacgctcctccttctactgcctggaatactttccttcgcagatgctgagaaccggcaacaacttccagtttacttacaccttcgaggacgtgcctttccacagcagctacgcccacagccagagcttggaccggctgatgaatcctctgattgaccagtacctgtactacttgtctcggattcaaacaacaggaggcacggcaaatacgcagactctgggcttcagccaaggtgggcctaatacaatggccaatcaggcaaagaactggctgccaggaccctgttaccgccaacaacgcgtctcaacgacaaccgggcaaaacaacaatagcaactttgcctggactgctgggaccaaataccatctgaatggaagaaattcattggctaatcctggcatcgctatggcaacacacaaagacgacgaggagcgtttttttcccagtaacgggatcctgatttttggcaaacaaaatgctgccagagacaatgcggattacagcgatgtcatgcccaccagcgaggaagaaatcaaaaccactaaccctgtggccacagaggaatacggtatcgtggcagataacttgcagcagcaaaacacggctcctcaaattggaactgtcaacagccagggggccttacccggtatggtctggcagaaccgggacgtgtacctgcagggtcccatctgggccaagattcctcacacggacggcaacttccacccgtctccgctgatgggcggctttggcctgaaacatcctccgcctcagatcctgatcaagaacacgcctgtacctgcggatcctccgaccaccttcaaccagtcaaagctgaactctttcatcacgcaatacagcaccggacaggtcagcgtggaaattgaatgggagctgcagaaggaaaacagcaagcgctggaaccccgagatccagtacacctccaactactacaaatctacaagtgtggactttgctgttaatacagaaggcgtgtactctgaaccccgccccattggcacccgttacctcacccgtaatctgtaa

SEQ ID NO: 1499 - DNA, 2217 bp, Artificial Sequence
  Synthetic Polynucleotide
atggctgccgatggttatcttccagattggctcgaggacaacctctctgagggcattcgcgagtggtgggcgctgaaacctggagccccgaagcccaaagccaaccagcaaaagcaggacgacggccggggtctggtgcttcctggctacaagtacctcggacccttcaacggactcgacaagggggagcccgtcaacgcggcggacgcggcggccctcgagcacgacaaggcctacgaccagcagctgcaggcgggtgacaatccgtacctgcggtataaccacgccgacgccgagtttcaggagcgtctgcaagaagatacgtcttttgggggcaacctcgggcgagcagtcttccaggccaagaagcgggttctcgaacctctcggtctggttgaggaaggcgctaagacggctcctggaaagaagagaccggtagagccatcaccccagcgttctccagactcctctacgggcatcggcaagaagggccaacagcccgccagaaaaagactcaattttggtcagactggcgactcagagtcagttccagaccctcaacctctcggagaacctccagcagcgccctctggtgtgggacctaatacaatggctgcaggcggtggcgcaccaatggcagacaataacgaaggcgccgacggagtgggtagttcctcgggaaattggcattgcgattccacatggctgggcgacagagtcatcaccaccagcacccgaacctgggccctgcccacctacaacaaccacctctacaagcaaatctccaacgggacatcgggaggagccaccaacgacaacacctacttcggctacagcaccccctgggggtattttgactttaacagattccactgccacttttcaccacgtgactggcagcgactcatcaacaacaactggggattccggcccaagagactcagcttcaagctcttcaacatccaggtcaaggaggtcacgcagaatgaaggcaccaagaccatcgccaataacctcaccagcaccatccaggtgtttacggactcggagtaccagctgccgtacgttctcggctctgcccaccagggctgcctgcctccgttcccggcggacgtgttcacgattccccagtacggctacctaacactcaacaacggtagtcaggccgtgggacgctcctccttctactgcctggaatactttccttcgcagatgctgagaaccggcaacaacttccagtttacttacaccttcgaggacgtgcctttccacagcagctacgcccacagccagagcttggaccggctgatgaatcctctgattgaccagtacctgtactacttgtctcggattcaaacaacaggaggcacggcaaatacgcagactctgggcttcagccaaggtgggcctaatacaatggccaatcaggcaaagaactggctgccaggaccctgttaccgccaacaacgcgtctcaacgacaaccgggcaaaacaacaatagcaactttgcctggactgctgggaccaaataccatctgaatggaagaaattcattggctaatcctggcatcgctatggcaacacacaaagacgacgaggagcgtttttttcccagtaacgggatcctgatttttggcaaacaaaatgctgccagagacaatgcggattacagcgatgtcatgcccaccagcgaggaagaaatcaaaaccactaaccctgtggccacagaggaatacggtatcgtggcagataacttgcagcagcaaaacgcggctcctcaaattggaactgtcaacagccagggggccttacccggtatggtctggcagaaccgggacgtgtacctgcagggtcccatctgggccaagattcctcacacggacggcaacttccacccgtctccgctgatgggcggctttggcctgaaacatcctccgcctcagatcctgatcaagaacacgcctgtacctgcggatcctccgaccaccttcaaccagtcaaagctgaactctttcatcacgcaatacagcaccggacaggtcagcgtggaaattgaatgggagctgcagaaggaaaacagcaagcgctggaaccccgagatccagtacacctccaactactacaaatctacaagtgtggactttgctgttaatacagaaggcgtgtactctgaaccccgccccattggcacccgttacctcacccgtaatctgtaa

SEQ ID NO: 1500 - DNA, 2217 bp, Artificial Sequence
  Synthetic Polynucleotide
atggctgccgatggttatcttccagattggctcgaggacaacctctctgagggcattcgcgagtggtgggcgctgaaacctggagccccgaagcccaaagccaaccagcaaaagcaggacgacggccggggtctggtgcttcctggctacaagtacctcggacccttcaacggactcgacaagggggagcccgtcaacgcggcggacgcggcggccctcgagcacgacaaggcctacgaccagcagctgcaggcgggtgacaatccgtacctgcggtataaccacgccgacgccgagtttcaggagcgtctgcaagaagatacgtcttttgggggcaacctcgggcgagcagtcttccaggccaagaagcgggttctcgaacctctcggtctggttgaggaaggcgctaagacggctcctggaaagaagagaccggtagagccatcaccccagcgttctccagactcctctacgggcatcggcaagaagggccaacagcccgccagaaaaagactcaattttggtcagactggcgactcagagtcagttccagaccctcaacctctcggagaacctccagcagcgccctctggtgtgggacctaatacaatggctgcaggcggtggcgcaccaatggcagacaataacgaaggcgccgacggagtgggtagttcctcgggaaattggcattgcgattccacatggctgggcgacagagtcatcaccaccagcacccgaacctgggccctgcccacctacaacaaccacctctacaagcaaatctccaacgggacatcgggaggagccaccaacgacaacacctacttcggctacagcaccccctgggggtattttgactttaacagattccactgccacttttcaccacgtgactggcagcgactcatcaacaacaactggggattccggcccaagagactcagcttcaagctcttcaacatccaggtcaaggaggtcacgcagaatgaaggcaccaagaccatcgccaatagcctcaccagcaccatccaggtgtttacggactcggagtaccagctgccgtacgttctcggctctgcccaccagggctgcctgcctccgttcccggcggacgtgttcacgattccccagtacggctacctaacactcaacaacggtagtcaggccgtgggacgctcctccttctactgcctggaatactttccttcgcagatgctgagaaccggcaacaacttccagtttacttacaccttcgaggacgtgcctttccacagcagctacgcccacagccagagcttggaccggctgatgaatcctctgattgaccagtacctgtactacttgtctcggattcaaacaacaggaggcacggcaaatacgcagactctgggcttcagccaaggtgggcctaatacaatggccaatcaggcaaagaactggctgccaggaccctgttaccgccaacaacgcgtctcaacgacaaccgggcaaaacaacaatagcaactttgcctggactgctgggaccaaataccatctgaatggaagaaattcattggctaatcctggcatcgctatggcaacacacaaagacgacgaggagcgtttttttcccagtaacgggatcctgatttttggcaaacaaaatgctgccagagacaatgcggattacagcgatgtcatgcccaccagcgaggaagaaatcaaaaccactaaccctgtggccacagaggaatacggtatcgtggcagataacttgcagcagcaaaacacggctcctcaaattggaactgtcaacagccagggggccttacccggtatggtctggcagaaccgggacgtgtacctgcagggtcccatctgggccaagattcctcacacggacggcaacttccacccgtctccgctgatgggcggctttggcctgaaacatcctccgcctcagatcctgatcaagaacacgcctgtacctgcggatcctccgaccaccttcaaccagtcaaagctgaactctttcatcacgcaatacagcaccggacaggtcagcgtggaaattgaatgggagctgcagaaggaaaacagcaagcgctggaaccccgagatccagtacacctccaactactacaaatctgcaagtgtggactttgctgttaatacagaaggcgtgtactctgaaccccgccccattggcacccgttacctcacccgtaatctgtaa

SEQ ID NO: 1501 - DNA, 2217 bp, Artificial Sequence
  Synthetic Polynucleotide
atggctgccgatggttatcttccagattggctcgaggacaacctctctgagggcattcgcgagtggtgggcgctgaaacctggagccccgaagcccaaagccaaccagcaaaagcaggacgacggccggggtctggtgcttcctggctacaagtacctcggacccttcaacggactcgacaagggggagcccgtcaacgcggcggacgcggcggccctcgagcacgacaaggcctacgaccagcagctgcaggcgggtgacaatccgtacctgcggtataaccacgccgacgccgagtttcaggagcgtctgcaagaagatacgtcttttgggggcaacctcgggcgagcagtcttccaggccaagaagcgggttctcgaacctctcggtctggttgaggaaggcgctaagacggctcctggaaagaagagaccggtagagccatcaccccagcgttctccagactcctctacgggcatcggcaagaagggccaacagcccgccagaaaaagactcaattttggtcagactggcgactcagagtcagttccagaccctcaacctctcggagaacctccagcagcgccctctggtgtgggacctaatacaatggctgcaggcggtggcgcaccaatggcagacaataacgaaggcgccgacggagtgggtagttcctcgggaaattggcattgcgattccacatggctgggcgacagagtcatcaccaccagcacccgaacctgggccctgcccacctacaacaaccacctctacaagcaaatctccaacgggacatcgggaggagccaccaacgacaacacctacttcggctacagcaccccctgggggtattttgactttaacagattccactgccacttttcaccacgtgactggcagcgactcatcaacaacaactggggattccggcccaagagactcagcttcaagctcttcaacatccaggtcaaggaggtcacgcagaatgaaggcaccaagaccatcgccaataacctcaccagcaccatccaggtgtttacggactcggagtaccagctgccgtacgttctcggctctgcccaccagggctgcctgcctccgttcccggcggacgtgttcacgattccccagtacggctacctaacactcaacaacggtagtcaggccgtgggacgctcctccttctactgcctggaatactttccttcgcagatgctgagaaccggcaacaacttccagtttacttacaccttcgaggacgtgcctttccacagcagctacgcccacagccagagcttggaccggctgatgaatcctctgattgaccagtacctgtactacttgtctcggattcaaacaacaggaggcacggcaaatacgcagactctgggcttcagccaaggtgggcctaatacaatggccaatcaggcaaagaactggctgccaggaccctgttaccgccaacaacgcgtctcaacgacaaccgggcaaaacaacaatagcaactttgcctggactgctgggaccaaataccatctgaatggaggaaattcattggctaatcctggcatcgctatggcaacacacaaagacgacgaggagcgtttttttcccagtaacgggatcctgatttttggcaaacaaaatgctgccagagacaatgcggattacagcgatgtcatgcccaccagcgaggaagaaatcaaaaccactaaccctgtggccacagaggaatacggtatcgtggcagataacttgcagcagcaaaacacggctcctcaaattggaactgtcaacagccagggggccttacccggtatggtctggcagaaccgggacgtgtacctgcagggtcccatctgggccaagattcctcacacggacggcaacttccacccgtctccgctgatgggcggctttggcctgaaacatcctccgcctcagatcctgatcaagaacacgcctgtacctgcggatcctccgaccaccttcaaccagtcaaagctgaactctttcatcacgcaatacagcaccggacaggtcagcgtggaaattgaatgggagctgcagaaggaaaacagcaagcgctggaaccccgagatccagtacacctccaactactacaaatctacaagtgtggactttgctgttaatacagaaggcgtgtactctgaaccccgccccattggcacccgttacctcacccgtaatctgtaa

SEQ ID NO: 1502 - DNA, 2217 bp, Artificial Sequence
  Synthetic Polynucleotide
atggctgccgatggttatcttccagattggctcgaggacaacctctctgagggcattcgcgagtggtgggcgctgaaacctggagccccgaagcccaaagccaaccagcaaaagcaggacgacggccggggtctggtgcttcctggctacaagtacctcggacccttcaacggactcgacaagggggagcccgtcaacgcggcggacgcggcggccctcgagcacgacaaggcctacgaccagcagctgcaggcgggtgacaatccgtacctgcggtataaccacgccgacgccgagtttcaggagcgtctgcaagaagatacgtcttttgggggcaacctcgggcgagcagtcttccaggccaagaagcgggttctcgaacctctcggtctggttgaggaaggcgctaagacggctcctggaaagaagagaccggtagagccatcaccccagcgttctccagactcctctacgggcatcggcaagaagggccaacagcccgccagaaaaagactcaattttggtcagactggcgactcagagtcagttccagaccctcaacctctcggagaacctccagcagcgccctctggtgtgggacctaatacaatggctgcaggcggtggcgcaccaatggcagacaataacgaaggcgccgacggagtgggtagttcctcgggaaattggcattgcgattccacatggctgggcgacagagtcatcaccaccagcacccgaacctgggccctgcccacctacaacaaccacctctacaagcaaatctccaacgggacatcgggaggagccaccaacgacaacacctacttcggctacagcaccccctgggggtattttgactttaacagattccactgccacttttcaccacgtgactggcagcgactcatcaacaacaactggggattccggcccaagagactcagcttcaagctcttcaacatccaggtcaaggaggtcacgcagaatgaaggcaccaagaccatcgccaataacctcaccagcaccatccaggtgtttacggactcggagtaccagctgccgtacgttctcggctctgcccaccagggctgcctgcctccgttcccggcggacgtgttcacgattccccagtacggctacctaacactcaacaacggtagtcaggccgtgggacgctcctccttctactgcctggaatactttccttcgcagatgctgagaaccggcaacaacttccagtttacttacaccttcgaggacgtgcctttccacagcagctacgcccacagccagagcttggaccggctgatgaatcctctgattgaccagtacctgtactacttgtctcggattcaaacaacaggaggcacggcaaatacgcagactctgggcttcagccaaggtgggcctaatacaatggccaatcaggcaaagaactggctgccaggaccctgttaccgccaacaacgcgtctcaacgacaaccgggcaaaacaacaatagcaactttgcctggactgctgggaccaaataccatctgaatggaagaaattcattggctaatcctggcatcgctatggcaacacacaaagacgacgaggagcgtttttttcccagtaacgggatcctgatttttggcaaacaaaatgctgccagagacaatgcggattacagcgatgtcatgcccaccagcgaggaagaaatcaaaaccactaaccctgtggccacagaggaatacggtatcgtggcagataacttgcagcagcaaaacacggctcctcaaattggaactgtcaacagccagggggccttacccggtatggtctggcagaaccgggacgtgtacctgcagggtcccatctgggccaagattcctcacacggacggcaacttccacccgtctccgctgatgggcggctttggcctgaaacatcctccgcctcagatcctgatcaagaacacgcctgtacctgcggatcctccgaccaccttcaaccagtcaaggctgaactctttcatcacgcaatacagcaccggacaggtcagcgtggaaattgaatgggagctgcagaaggaaaacagcaagcgctggaaccccgagatccagtacacctccaactactacaaatctacaagtgtggactttgctgttaatacagaaggcgtgtactctgaaccccgccccattggcacccgttacctcacccgtaatctgtaa

SEQ ID NO: 1503 - DNA, 2217 bp, Artificial Sequence
  Synthetic Polynucleotide
atggctgccgatggttatcttccagattggctcgaggacaacctctctgagggcattcgcgagtggtgggcgctgaaacctggagccccgaagcccaaagccaaccagcaaaagcaggacgacggccggggtctggtgcttcctggctacaagtacctcggacccttcaacggactcgacaagggggagcccgtcaacgcggcggacgcggcggccctcgagcacgacaaggcctacgaccagcagctgcaggcgggtgacaatccgtacctgcggtataaccacgccgacgccgagtttcaggagcgtctgcaagaagatacgtcttttgggggcaacctcgggcgagcagtcttccaggccaagaagcgggttctcgaacctctcggtctggttgaggaaggcgctaagacggctcctggaaagaagagaccggtagagccatcaccccagcgttctccagactcctctacgggcatcggcaagaagggccaacagcccgccagaaaaagactcaattttggtcagactggcgactcagagtcagttccagaccctcaacctctcggagaacctccagcagcgccctctggtgtgggacctaatacaatggctgcaggcggtggcgcaccaatggcagacaataacgaaggcgccgacggagtgggtagttcctcgggaaattggcattgcgattccacatggctgggcgacagagtcatcaccaccagcacccgaacctgggccctgcccacctacaacaaccacctctacaagcaaatctccaacgggacatcgggaggagccgccaacgacaacacctacttcggctacagcaccccctgggggtattttgactttaacagattccactgccacttttcaccacgtgactggcagcgactcatcaacaacaactggggattccggcccaagagactcagcttcaagctcttcaacatccaggtcaaggaggtcacgcagaatgaaggcaccaagaccatcgccaataacctcaccagcaccatccaggtgtttacggactcggagtaccagctgccgtacgttctcggctctgcccaccagggctgcctgcctccgttcccggcggacgtgttcacgattccccagtacggctacctaacactcaacaacggtagtcaggccgtgggacgctcctccttctactgcctggaatactttccttcgcagatgctgagaaccggcaacaacttccagtttacttacaccttcgaggacgtgcctttccacagcagctacgcccacagccagagcttggaccggctgatgaatcctctgattgaccagtacctgtactacttgtctcggattcaaacaacaggaggcacggcaaatacgcagactctgggcttcagccaaggtgggcctaatacaatggccaatcaggcaaagaactggctgccaggaccctgttaccgccaacaacgcgtctcaacgacaaccgggcaaaacaacaatagcaactttgcctggactgctgggaccaaataccatctgaatggaagaaattcattggctaatcctggcatcgctatggcaacacacaaagacgacgaggagcgtttttttcccagtaacgggatcctgatttttggcaaacaaaatgctgccagagacaatgcggattacagcgatgtcatgcccaccagcgaggaagaaatcaaaaccactaaccctgtggccacagaggaatacggtatcgtggcagataacttgcagcagcaaaacacggctcctcaaattggaactgtcaacagccagggggccttacccggtatggtctggcagaaccgggacgtgtacctgcagggtcccatctgggccaagattcctcacacggacggcaacttccacccgtctccgctgatgggcggctttggcctgaaacatcctccgcctcagatcctgatcaagaacacgcctgtacctgcggatcctccgaccaccttcaaccagtcaaagctgaactctttcatcacgcaatacagcaccggacaggtcagcgtggaaattgaatgggagctgcagaaggaaaacagcaagcgctggaaccccgagatccagtacacctccaactactacaaatctacaagtgtggactttgctgttaatacagaaggcgtgtactctgaaccccgccccattggcacccgttacctcacccgtaatctgtaa

SEQ ID NO: 1504 - DNA, 2217 bp, Artificial Sequence
  Synthetic Polynucleotide
atggctgccgatggttatcttccagattggctcgaggacaacctctctgagggcattcgcgagtggtgggcgctgaaacctggagccccgaagcccaaagccaaccagcaaaagcaggacgacggccggggtctggtgcttcctggctacaagtacctcggacccttcaacggactcgacaagggggagcccgtcaacgcggcggacgcggcggccctcgagcacgacaaggcctacgaccagcagctgcaggcgggtgacaatccgtacctgcggtataaccacgccgacgccgagtttcaggagcgtctgcaagaagatacgtcttttgggggcaacctcgggcgagcagtcttccaggccaagaagcgggttctcgaacctctcggtctggttgaggaaggcgctaagacggctcctggaaagaagagaccggtagagccatcaccccagcgttctccagactcctctacgggcatcggcaagaagggccaacagcccgccagaaaaagactcaattttggtcagactggcgactcagagtcagttccagaccctcaacctctcggagaacctccagcagcgccctctggtgtgggacctaatacaatggctgcaggcggtggcgcaccaatggcaggcaataacgaaggcgccgacggagtgggtagttcctcgggaaattggcattgcgattccacatggctgggcgacagagtcatcaccaccagcacccgaacctgggccctgcccacctacaacaaccacctctacaagcaaatctccaacgggacatcgggaggagccaccaacgacaacacctacttcggctacagcaccccctgggggtattttgactttaacagattccactgccacttttcaccacgtgactggcagcgactcatcaacaacaactggggattccggcccaagagactcagcttcaagctcttcaacatccaggtcaaggaggtcacgcagaatgaaggcaccaagaccatcgccaataacctcaccagcaccatccaggtgtttacggactcggagtaccagctgccgtacgttctcggctctgcccaccagggctgcctgcctccgttcccggcggacgtgttcacgattccccagtacggctacctaacactcaacaacggtagtcaggccgtgggacgctcctccttctactgcctggaatactttccttcgcagatgctgagaaccggcaacaacttccagtttacttacaccttcgaggacgtgcctttccacagcagctacgcccacagccagagcttggaccggctgatgaatcctctgattgaccagtacctgtactacttgtctcggattcaaacaacaggaggcacggcaaatacgcagactctgggcttcagccaaggtgggcctaatacaatggccaatcaggcaaagaactggctgccaggaccctgttaccgccaacaacgcgtctcaacgacaaccgggcaaaacaacaatagcaactttgcctggactgctgggaccaaataccatctgaatggaagaaattcattggctaatcctggcatcgctatggcaacacacaaagacgacgaggagcgtttttttcccagtaacgggatcctgatttttggcaaacaaaatgctgccagagacaatgcggattacagcgatgtcatgcccaccagcgaggaagaaatcaaaaccactaaccctgtggccacagaggaatacggtatcgtggcagataacttgcagcagcaaaacacggctcctcaaattggaactgtcaacagccagggggccttacccggtatggtctggcagaaccgggacgtgtacctgcagggtcccatctgggccaagattcctcacacggacggcaacttccacccgtctccgctgatgggcggctttggcctgaaacatcctccgcctcagatcctgatcaagaacacgcctgtacctgcggatcctccgaccaccttcaaccagtcaaagctgaactctttcatcacgcaatacagcaccggacaggtcagcgtggaaattgaatgggagctgcagaaggaaaacagcaagcgctggaaccccgagatccagtacacctccaactactacaaatctacaagtgtggactttgctgttaatacagaaggcgtgtactctgaaccccgccccattggcacccgttacctcacccgtaatctgtaa

SEQ ID NO: 1505 - DNA, 2217 bp, Artificial Sequence
  Synthetic Polynucleotide
atggctgccgatggttatcttccagattggctcgaggacaacctctctgagggcattcgcgagtggtgggcgctgaaacctggagccccgaagcccaaagccaaccagcaaaagcaggacgacggccggggtctggtgcttcctggctacaagtacctcggacccttcaacggactcgacaagggggagcccgtcaacgcggcggacgcggcggccctcgagcacgacaaggcctacgaccagcagctgcaggcgggtgacaatccgtacctgcggtataaccacgccgacgccgagtttcaggagcgtctgcaagaagatacgtcttttgggggcaacctcgggcgagcagtcttccaggccaagaagcgggttctcgaacctctcggtctggttgaggaaggcgctaagacggctcctggaaagaagagaccggtagagccatcaccccagcgttctccagactcctctacgggcatcggcaggaagggccaacagcccgccagaaaaagactcaattttggtcagactggcgactcagagtcagttccagaccctcaacctctcggagaacctccagcagcgccctctggtgtgggacctaatacaatggctgcaggcggtggcgcaccaatggcagacaataacgaaggcgccgacggagtgggtagttcctcgggaaattggcattgcgattccacatggctgggcgacagagtcatcaccaccagcacccgaacctgggccctgcccacctacaacaaccacctctacaagcaaatctccaacgggacatcgggaggagccaccaacgacaacacctacttcggctacagcaccccctgggggtattttgactttaacagattccactgccacttttcaccacgtgactggcagcgactcatcaacaacaactggggattccggcccaagagactcagcttcaagctcttcaacatccaggtcaaggaggtcacgcagaatgaaggcaccaagaccatcgccaataacctcaccagcaccatccaggtgtttacggactcggagtaccagctgccgtacgttctcggctctgcccaccagggctgcctgcctccgttcccggcggacgtgttcacgattccccagtacggctacctaacactcaacaacggtagtcaggccgtgggacgctcctccttctactgcctggaatactttccttcgcagatgctgagaaccggcaacaacttccagtttacttacaccttcgaggacgtgcctttccacagcagctacgcccacagccagagcttggaccggctgatgaatcctctgattgaccagtacctgtactacttgtctcggattcaaacaacaggaggcacggcaaatacgcagactctgggcttcagccaaggtgggcctaatacaatggccaatcaggcaaagaactggctgccaggaccctgttaccgccaacaacgcgtctcaacgacaaccgggcaaaacaacaatagcaactttgcctggactgctgggaccaaataccatctgaatggaagaaattcattggctaatcctggcatcgctatggcaacacacaaagacgacgaggagcgtttttttcccagtaacgggatcctgatttttggcaaacaaaatgctgccagagacaatgcggattacagcgatgtcatgcccaccagcgaggaagaaatcaaaaccactaaccctgtggccacagaggaatacggtatcgtggcagataacttgcagcagcaaaacacggctcctcaaattggaactgtcaacagccagggggccttacccggtatggtctggcagaaccgggacgtgtacctgcagggtcccatctgggccaagattcctcacacggacggcaacttccacccgtctccgctgatgggcggctttggcctgaaacatcctccgcctcagatcctgatcaagaacacgcctgtacctgcggatcctccgaccaccttcaaccagtcaaagctgaactctttcatcacgcaatacagcaccggacaggtcagcgtggaaattgaatgggagctgcagaaggaaaacagcaagcgctggaaccccgagatccagtacacctccaactactacaaatctacaagtgtggactttgctgttaatacagaaggcgtgtactctgaaccccgccccattggcacccgttacctcacccgtaatctgtaa

SEQ ID NO: 1506 - DNA, 2217 bp, Artificial Sequence
  Synthetic Polynucleotide
atggctgccgatggttatcttccagattggctcgaggacaacctctctgagggcattcgcgagtggtgggcgctgaaacctggagccccgaagcccaaagccaaccagcaaaagcaggacgacggccggggtctggtgcttcctggctacaagtacctcggacccttcaacggactcgacaagggggagcccgtcaacgcggcggacgcggcggccctcgagcacgacaaggcctacgaccagcagctgcaggcgggtgacaatccgtacctgcggtataaccacgccgacgccgagtttcaggagcgtctgcaagaagatacgtcttttgggggcaacctcgggcgagcagtcttccaggccaagaagcgggttctcgaacctctcggtctggttgaggaaggcgctaagacggctcctggaaagaagagaccggtagagccatcaccccagcgttctccagactcctctacgggcatcggcaagaagggccaacagcccgccagaaaaagactcaattttggtcagactggcgactcagagtcagttccagaccctcaacctctcggagaacctccagcagcgccctctggtgtgggacctaatacaatggctgcaggcggtggcgcaccaatggcagacaataacgaaggcgccgacggagtgggtagttcctcgggaaattggcattgcgattccacatggctgggcgacagagtcatcaccaccagcacccgaacctgggccctgcccacctacaacaaccacctctacaagcaaatctccaacgggacatcgggaggagccaccaacgacaacacctacttcggctacggcaccccctgggggtattttgactttaacagattccactgccacttttcaccacgtgactggcagcgactcatcaacaacaactggggattccggcccaagagactcagcttcaagctcttcaacatccaggtcaaggaggtcacgcagaatgaaggcaccaagaccatcgccaataacctcaccagcaccatccaggtgtttacggactcggagtaccagctgccgtacgttctcggctctgcccaccagggctgcctgcctccgttcccggcggacgtgttcacgattccccagtacggctacctaacactcaacaacggtagtcaggccgtgggacgctcctccttctactgcctggaatactttccttcgcagatgctgagaaccggcaacaacttccagtttacttacaccttcgaggacgtgcctttccacagcagctacgcccacagccagagcttggaccggctgatgaatcctctgattgaccagtacctgtactacttgtctcggattcaaacaacaggaggcacggcaaatacgcagactctgggcttcagccaaggtgggcctaatacaatggccaatcaggcaaagaactggctgccaggaccctgttaccgccaacaacgcgtctcaacgacaaccgggcaaaacaacaatagcaactttgcctggactgctgggaccaaataccatctgaatggaagaaattcattggctaatcctggcatcgctatggcaacacacaaagacgacgaggagcgtttttttcccagtaacgggatcctgatttttggcaaacaaaatgctgccagagacaatgcggattacagcgatgtcatgcccaccagcgaggaagaaatcaaaaccactaaccctgtggccacagaggaatacggtatcgtggcagataacttgcagcagcaaaacacggctcctcaaattggaactgtcaacagccagggggccttacccggtatggtctggcagaaccgggacgtgtacctgcagggtcccatctgggccaagattcctcacacggacggcaacttccacccgtctccgctgatgggcggctttggcctgaaacatcctccgcctcagatcctgatcaagaacacgcctgtacctgcggatcctccgaccaccttcaaccagtcaaagctgaactctttcatcacgcaatacagcaccggacaggtcagcgtggaaattgaatgggagctgcagaaggaaaacagcaagcgctggaaccccgagatccagtacacctccaactactacaaatctacaagtgtggactttgctgttaatacagaaggcgtgtactctgaaccccgccccattggcacccgttacctcacccgtaatctgtaa

SEQ ID NO: 1507 - DNA, 2217 bp, Artificial Sequence
  Synthetic Polynucleotide
atggctgccgatggttatcttccagattggctcgaggacaacctctctgagggcattcgcgagtggtgggcgctgaaacctggagccccgaagcccaaagccaaccagcaaaagcaggacgacggccggggtctggtgcttcctggctacaagtacctcggacccttcaacggactcgacaagggggagcccgtcaacgcggcggacgcggcggccctcgagcacgacaaggcctacgaccagcagctgcaggcgggtgacaatccgtacctgcggtataaccacgccgacgccgagtttcaggagcgtctgcaagaagatacgtcttttgggggcaacctcgggcgagcagtcttccaggccaagaagcgggttctcgaacctctcggtctggttgaggaaggcgctaagacggctcctggaaagaagagaccggtagagccatcaccccagcgttctccagactcctctacgggcatcggcaagaagggccaacagcccgccagaaaaagactcaattttggtcagactggcgactcagagtcagttccagaccctcaacctctcggagaacctccagcagcgccctctggtgtgggacctaatacaatggctgcaggcggtggcgcaccaatggcagacaataacgaaggcgccgacggagtgggtagttcctcgggaaattggcattgcgattccacatggctgggcgacagagtcatcaccaccagcacccgaacctgggccctgcccacctacaacaaccacctctacaagcaaatctccaacgggacatcgggaggagccaccaacgacaacacctacttcggctacagcaccccctgggggtattttgactttaacagattccactgccacttttcaccacgtgactggcagcgactcatcaacaacaactggggattccggcccaagagactcagcttcaagctcttcaacatccaggtcaaggaggtcacgcagaatgaaggcaccaagaccatcgccaataacctcaccagcaccatccaggtgtttacggactcggagtaccagctgccgtacgttctcggctctgcccaccagggctgcctgcctccgttcccggcggacgtgttcacgattccccagtacggctacctaacactcaacaacggtagtcaggccgtgggacgctcctccttctactgcctggaatactttccttcgcagatgctgagaaccggcaacaacttccagtttacttacaccttcgaggacgtgcctttccacagcagctacgcccacagccagagcttggaccggccgatgaatcctctgattgaccagtacctgtactacttgtctcggattcaaacaacaggaggcacggcaaatacgcagactctgggcttcagccaaggtgggcctaatacaatggccaatcaggcaaagaactggctgccaggaccctgttaccgccaacaacgcgtctcaacgacaaccgggcaaaacaacaatagcaactttgcctggactgctgggaccaaataccatctgaatggaagaaattcattggctaatcctggcatcgctatggcaacacacaaagacgacgaggagcgtttttttcccagtaacgggatcctgatttttggcaaacaaaatgctgccagagacaatgcggattacagcgatgtcatgcccaccagcgaggaagaaatcaaaaccactaaccctgtggccacagaggaatacggtatcgtggcagataacttgcagcagcaaaacacggctcctcaaattggaactgtcaacagccagggggccttacccggtatggtctggcagaaccgggacgtgtacctgcagggtcccatctgggccaagattcctcacacggacggcaacttccacccgtctccgctgatgggcggctttggcctgaaacatcctccgcctcagatcctgatcaagaacacgcctgtacctgcggatcctccgaccaccttcaaccagtcaaagctgaactctttcatcacgcaatacagcaccggacaggtcagcgtggaaattgaatgggagctgcagaaggaaaacagcaagcgctggaaccccgagatccagtacacctccaactactacaaatctacaagtgtggactttgctgttaatacagaaggcgtgtactctgaaccccgccccattggcacccgttacctcacccgtaatctgtaa

SEQ ID NO: 1508 - DNA, 2217 bp, Artificial Sequence
  Synthetic Polynucleotide
atggctgccgatggttatcttccagattggctcgaggacaacctctctgagggcattcgcgagtggtgggcgctgaaacctggagccccgaagcccaaagccaaccagcaaaagcaggacgacggccggggtctggtgcttcctggctacaagtacctcggacccttcaacggactcgacaagggggagcccgtcaacgcggcggacgcggcggccctcgagcacgacaaggcctacgaccagcagctgcaggcgggtgacaatccgtacctgcggtataaccacgccgacgccgagtttcaggagcgtctgcaagaagatacgtcttttgggggcaacctcgggcgagcagtcttccaggccaagaagcgggttctcgaacctctcggtctggttgaggaaggcgctaagacggctcctggaaagaagagaccggtagagccatcaccccagcgttctccagactcctctacgggcatcggcaagaagggccaacagcccgccagaaaaagactcaattttggtcagactggcgactcagagtcagttccagaccctcaacctctcggagaacctccagcagcgccctctggtgtgggacctaatacaatggctgcaggcggtggcgcaccaatggcagacaataacgaaggcgccgacggagtgggtagttcctcgggaaattggcattgcgattccacatggctgggcgacagagtcatcaccaccagcacccgaacctgggccctgcccacctacaacaaccacctctacaagcaaatctccaacgggacatcgggaggagccaccaacgacaacacctacttcggctacagcaccccctgggggtattttgactttaacagattccactgccacttttcaccacgtgactggcagcgactcatcaacaacaactggggattccggcccaagagactcagcctcaagctcttcaacatccaggtcaaggaggtcacgcagaatgaaggcaccaagaccatcgccaataacctcaccagcaccatccaggtgtttacggactcggagtaccagctgccgtacgttctcggctctgcccaccagggctgcctgcctccgttcccggcggacgtgttcacgattccccagtacggctacctaacactcaacaacggtagtcaggccgtgggacgctcctccttctactgcctggaatactttccttcgcagatgctgagaaccggcaacaacttccagtttacttacaccttcgaggacgtgcctttccacagcagctacgcccacagccagagcttggaccggctgatgaatcctctgattgaccagtacctgtactacttgtctcggattcaaacaacaggaggcacggcaaatacgcagactctgggcttcagccaaggtgggcctaatacaatggccaatcaggcaaagaactggctgccaggaccctgttaccgccaacaacgcgtctcaacgacaaccgggcaaaacaacaatagcaactttgcctggactgctgggaccaaataccatctgaatggaagaaattcattggctaatcctggcatcgctatggcaacacacaaagacgacgaggagcgtttttttcccagtaacgggatcctgatttttggcaaacaaaatgctgccagagacaatgcggattacagcgatgtcatgcccaccagcgaggaagaaatcaaaaccactaaccctgtggccacagaggaatacggtatcgtggcagataacttgcagcagcaaaacacggctcctcaaattggaactgtcaacagccagggggccttacccggtatggtctggcagaaccgggacgtgtacctgcagggtcccatctgggccaagattcctcacacggacggcaacttccacccgtctccgctgatgggcggctttggcctgaaacatcctccgcctcagatcctgatcaagaacacgcctgtacctgcggatcctccgaccaccttcaaccagtcaaagctgaactctttcatcacgcaatacagcaccggacaggtcagcgtggaaattgaatgggagctgcagaaggaaaacagcaagcgctggaaccccgagatccagtacacctccaactactacaaatctacaagtgtggactttgctgttaatacagaaggcgtgtactctgaaccccgccccattggcacccgttacctcacccgtaatctgtaa

SEQ ID NO: 1509 - DNA, 2217 bp, Artificial Sequence
  Synthetic Polynucleotide
atggctgccgatggttatcttccagattggctcgaggacaacctctctgagggcattcgcgagtggtgggcgctgaaacctggagccccgaagcccaaagccaaccagcaaaagcaggacgacggccggggtctggtgcttcctggctacaagtacctcggacccttcaacggactcgacaagggggagcccgtcaacgcggcggacgcggcggccctcgagcacgacaaggcctacgaccagcagctgcaggcgggtgacaatccgtacctgcggtataaccacgccgacgccgagtttcaggagcgtctgcaagaagatacgtcttttgggggcaacctcgggcgagcagtcttccaggccaagaagcgggttctcgaacctctcggtctggttgaggaaggcgctaagacggctcctggaaagaagagaccggtagagccatcaccccagcgttctccagactcctctacgggcatcggcaagaagggccaacagcccgccagaaaaagactcaattttggtcagactggcgactcagagtcagttccagaccctcaacctctcggagaacctccagcagcgccctctggtgtgggacctaatacaatggctgcaggcggtggcgcaccaatggcagacaataacgaaggcgccgacggagtgggtagttcctcgggaaattggcattgcgattccacatggctgggcgacagagtcatcaccaccagcacccgaacctgggccctgcccacctacaacaaccacctctacaagcaaatctccaacgggacatcgggaggagccaccaacgacaacacctacttcggctacagcaccccctgggggtattttgactttaacagattccactgccacttttcaccacgtgactggcagcgactcatcaacaacaactggggattccggcccaagagactcagcttcaagctcttcaacatccaggtcaaggaggtcacgcagaatgaaggcaccaagaccatcgccaataacctcaccagcaccatccaggtgtttacggactcggagtaccagctgccgtacgttctcggctctgcccaccagggctgcctgcctccgttcccggcggacgtgttcacgattccccagtacggctacctaacactcaacaacggtagtcaggccgtgggacgctcctccttctactgcctggaatactttccttcgcagatgctgagaaccggcaacaacttccagtttacttacaccttcgaggacgtgcctttccacagcagctacgcccacagccagagcttggaccggctgatgaatcctctgattgaccagtacctgtactacttgtctcggattcaaacaacaggaggcacggcaaatacgcagactctgggcttcagccaaggtgggcctaatacaatggccaatcaggcaaagaactggctgccaggaccctgttaccgccaacaacgcgtctcaacgacaaccgggcaaaacaacaatagcaactttgcctggactgctgggaccaaataccatctgaatggaagaaattcattggctaatcctggcatcgctatggcaacacacaaagacgacgaggagcgtttttttcccagtaacgggatcctgatttttggcaaacaaaatgctgccagagacaatgcggattacagcgatgtcacgcccaccagcgaggaagaaatcaaaaccactaaccctgtggccacagaggaatacggtatcgtggcagataacttgcagcagcaaaacacggctcctcaaattggaactgtcaacagccagggggccttacccggtatggtctggcagaaccgggacgtgtacctgcagggtcccatctgggccaagattcctcacacggacggcaacttccacccgtctccgctgatgggcggctttggcctgaaacatcctccgcctcagatcctgatcaagaacacgcctgtacctgcggatcctccgaccaccttcaaccagtcaaagctgaactctttcatcacgcaatacagcaccggacaggtcagcgtggaaattgaatgggagctgcagaaggaaaacagcaagcgctggaaccccgagatccagtacacctccaactactacaaatctacaagtgtggactttgctgttaatacagaaggcgtgtactctgaaccccgccccattggcacccgttacctcacccgtaatctgtaa

SEQ ID NO: 1510 - DNA, 2217 bp, Artificial Sequence
  Synthetic Polynucleotide
atggctgccgatggttatcttccagattggctcgaggacaacctctctgagggcattcgcgagtggtgggcgctgaaacctggagccccgaagcccaaagccaaccagcaaaagcaggacgacggccggggtctggtgcttcctggctacaagtacctcggacccttcaacggactcgacaagggggagcccgtcaacgcggcggacgcggcggccctcgagcacgacaaggcctacgaccagcagctgcaggcgggtgacaatccgtacctgcggtataaccacgccgacgccgagtttcaggagcgtctgcaagaagatacgtcttttgggggcaacctcgggcgagcagtcttccaggccaagaagcgggttctcgaacctctcggtctggttgaggaaggcgctaagacggctcctggaaagaagagaccggtagagccatcaccccagcgttctccagactcctctacgggcatcggcaagaagggccaacagcccgccagaaaaagactcaattttggtcagactggcgactcagagtcagttccagaccctcaacctctcggagaacctccagcagcgccctctggtgtgggacctaatacaatggctgcaggcggtggcgcaccaatggcagacaataacgaaggcgccgacggagtgggtagttcctcgggaaattggcattgcgattccacatggctgggcgacagagtcatcaccaccagcacccgaacctgggccctgcccacctacaacaaccacctctacaagcaaatctccaacgggacatcgggaggagccaccaacgacaacacctacttcggctacagcaccccctgggggtattttgactttaacagattccactgccacttttcaccacgtgactggcagcgactcatcaacaacaactggggattccggcccaagagactcagcttcaagctcttcaacatccaggtcaaggaggtcacgcagaatgaaggcaccaagaccatcgccaataacctcaccagcaccatccaggtgtttacggactcggagtaccagctgccgtacgttctcggctctgcccaccagggctgcctgcctccgttcccggcggacgtgttcacgattccccagtacggctacctaacactcaacaacggtagtcaggccgtgggacgctcctccttctactgcctggaatactttccttcgcagatgctgagaaccggcaacaacttccagtttacttacaccttcgaggacgtgcctttccacagcagctacgcccacagccagagcttggaccggctgatgaatcctctgattgaccagtacctgtactacttgtctcggattcaaacaacaggaggcacggcaaatacgcagactctgggcttcagccaaggtgggcctaatacaatggccaatcaggcaaagaactggctgccaggaccctgttaccgccaacaacgcgtctcaacgacaaccgggcaaaacaacaatagcaactttgcctggactgctgggaccaaataccatctgaatggaagaaattcattggctaatcctggcatcgctatggcaacacacaaagacgacgaggagcgtttttttcccagtaacgggatcctgatttttggcaaacaaaatgctgccagagacaatgcggattacagcgatgtcatgcccaccagcgaggaagaaatcaaaaccactaaccctgtggccacagaggaatacggtatcgtggcagataacttgcagcagcaaaacacggctcctcaaattggaactgtcaacagccagggggccttacccggtatggtccggcagaaccgggacgtgtacctgcagggtcccatctgggccaagattcctcacacggacggcaacttccacccgtctccgctgatgggcggctttggcctgaaacatcctccgcctcagatcctgatcaagaacacgcctgtacctgcggatcctccgaccaccttcaaccagtcaaagctgaactctttcatcacgcaatacagcaccggacaggtcagcgtggaaattgaatgggagctgcagaaggaaaacagcaagcgctggaaccccgagatccagtacacctccaactactacaaatctacaagtgtggactttgctgttaatacagaaggcgtgtactctgaaccccgccccattggcacccgttacctcacccgtaatctgtaa

SEQ ID NO: 1511 - DNA, 2217 bp, Artificial Sequence
  Synthetic Polynucleotide
atggctgccgatggttatcttccagattggctcgaggacaacctctctgagggcattcgcgagtggtgggcgctgaaacctggagccccgaagcccaaagccaaccagcaaaagcaggacgacggccggggtctggtgcttcctggctacaagtacctcggacccttcaacggactcgacaagggggagcccgtcaacgcggcggacgcggcggccctcgagcacgacaaggcctacgaccagcagctgcaggcgggtgacaatccgtacctgcggtataaccacgccgacgccgagtttcaggagcgtctgcaagaagatacgtcttttgggggcaacctcgggcgagcagtcttccaggccaagaagcgggttctcgaacctctcggtctggttgaggaaggcgctaagacggctcctggaaagaagagaccggtagagccatcaccccagcgttctccagactcctctacggacatcggcaagaagggccaacagcccgccagaaaaagactcaattttggtcagactggcgactcagagtcagttccagaccctcaacctctcggagaacctccagcagcgccctctggtgtgggacctaatacaatggctgcaggcggtggcgcaccaatggcagacaataacgaaggcgccgacggagtgggtagttcctcgggaaattggcattgcgattccacatggctgggcgacagagtcatcaccaccagcacccgaacctgggccctgcccacctacaacaaccacctctacaagcaaatctccaacgggacatcgggaggagccaccaacgacaacacctacttcggctacagcaccccctgggggtattttgactttaacagattccactgccacttttcaccacgtgactggcagcgactcatcaacaacaactggggattccggcccaagagactcagcttcaagctcttcaacatccaggtcaaggaggtcacgcagaatgaaggcaccaagaccatcgccaataacctcaccagcaccatccaggtgtttacggactcggagtaccagctgccgtacgttctcggctctgcccaccagggctgcctgcctccgttcccggcggacgtgttcacgattccccagtacggctacctaacactcaacaacggtagtcaggccgtgggacgctcctccttctactgcctggaatactttccttcgcagatgctgagaaccggcaacaacttccagtttacttacaccttcgaggacgtgcctttccacagcagctacgcccacagccagagcttggaccggctgatgaatcctctgattgaccagtacctgtactacttgtctcggattcaaacaacaggaggcacggcaaatacgcagactctgggcttcagccaaggtgggcctaatacaatggccaatcaggcaaagaactggctgccaggaccctgttaccgccaacaacgcgtctcaacgacaaccgggcaaaacaacaatagcaactttgcctggactgctgggaccaaataccatctgaatggaagaaattcattggctaatcctggcatcgctatggcaacacacaaagacgacgaggagcgtttttttcccagtaacgggatcctgatttttggcaaacaaaatgctgccagagacaatgcggattacagcgatgtcatgcccaccagcgaggaagaaatcaaaaccactaaccctgtggccacagaggaatacggtatcgtggcagataacttgcagcagcaaaacacggctcctcaaattggaactgtcaacagccagggggccttacccggtatggtctggcagaaccgggacgtgtacctgcagggtcccatctgggccaagattcctcacacggacggcaacttccacccgtctccgctgatgggcggctttggcctgaaacatcctccgcctcagatcctgatcaagaacacgcctgtacctgcggatcctccgaccaccttcaaccagtcaaagctgaactctttcatcacgcaatacagcaccggacaggtcagcgtggaaattgaatgggagctgcagaaggaaaacagcaagcgctggaaccccgagatccagtacacctccaactactacaaatctacaagtgtggactttgctgttaatacagaaggcgtgtactctgaaccccgccccattggcacccgttacctcacccgtaatctgtaa

SEQ ID NO: 1512 - DNA, 2217 bp, Artificial Sequence
  Synthetic Polynucleotide
atggctgccgatggttatcttccagattggctcgaggacaacctctctgagggcattcgcgagtggtgggcgctgaaacctggagccccgaagcccaaagccaaccagcaaaagcaggacgacggccggggtctggtgcttcctggctacaagtacctcggacccttcaacggactcgacaagggggagcccgtcaacgcggcggacgcggcggccctcgagcacgacaaggcctacgaccagcagctgcaggcgggtgacaatccgtacctgcggtataaccacgccgacgccgagtttcaggagcgtctgcaagaagatacgtcttttgggggcaacctcgggcgagcagtcttccaggccaagaagcgggttctcgaacctctcggtctggttgaggaaggcgctaagacggctcctggaaagaagagaccggtagagccatcaccccagcgttctccagactcctctacgggcatcggcaagaagggccaacagcccgccggaaaaagactcaattttggtcagactggcgactcagagtcagttccagaccctcaacctctcggagaacctccagcagcgccctctggtgtgggacctaatacaatggctgcaggcggtggcgcaccaatggcagacaataacgaaggcgccgacggagtgggtagttcctcgggaaattggcattgcgattccacatggctgggcgacagagtcatcaccaccagcacccgaacctgggccctgcccacctacaacaaccacctctacaagcaaatctccaacgggacatcgggaggagccaccaacgacaacacctacttcggctacagcaccccctgggggtattttgactttaacagattccactgccacttttcaccacgtgactggcagcgactcatcaacaacaactggggattccggcccaagagactcagcttcaagctcttcaacatccaggtcaaggaggtcacgcagaatgaaggcaccaagaccatcgccaataacctcaccagcaccatccaggtgtttacggactcggagtaccagctgccgtacgttctcggctctgcccaccagggctgcctgcctccgttcccggcggacgtgttcacgattccccagtacggctacctaacactcaacaacggtagtcaggccgtgggacgctcctccttctactgcctggaatactttccttcgcagatgctgagaaccggcaacaacttccagtttacttacaccttcgaggacgtgcctttccacagcagctacgcccacagccagagcttggaccggctgatgaatcctctgattgaccagtacctgtactacttgtctcggattcaaacaacaggaggcacggcaaatacgcagactctgggcttcagccaaggtgggcctaatacaatggccaatcaggcaaagaactggctgccaggaccctgttaccgccaacaacgcgtctcaacgacaaccgggcaaaacaacaatagcaactttgcctggactgctgggaccaaataccatctgaatggaagaaattcattggctaatcctggcatcgctatggcaacacacaaagacgacgaggagcgtttttttcccagtaacgggatcctgatttttggcaaacaaaatgctgccagagacaatgcggattacagcgatgtcatgcccaccagcgaggaagaaatcaaaaccactaaccctgtggccacagaggaatacggtatcgtggcagataacttgcagcagcaaaacacggctcctcaaattggaactgtcaacagccagggggccttacccggtatggtctggcagaaccgggacgtgtacctgcagggtcccatctgggccaagattcctcacacggacggcaacttccacccgtctccgctgatgggcggctttggcctgaaacatcctccgcctcagatcctgatcaagaacacgcctgtacctgcggatcctccgaccaccttcaaccagtcaaagctgaactctttcatcacgcaatacagcaccggacaggtcagcgtggaaattgaatgggagctgcagaaggaaaacagcaagcgctggaaccccgagatccagtacacctccaactactacaaatctacaagtgtggactttgctgttaatacagaaggcgtgtactctgaaccccgccccattggcacccgttacctcacccgtaatctgtaa

SEQ ID NO: 1513 - DNA, 2217 bp, Artificial Sequence
  Synthetic Polynucleotide
atggctgccgatggttatcttccagattggctcgaggacaacctctctgagggcattcgcgagtggtgggcgctgaaacctggagccccgaagcccaaagccaaccagcaaaagcaggacgacggccggggtctggtgcttcctggctacaagtacctcggacccttcaacggactcgacaagggggagcccgtcaacgcggcggacgcggcggccctcgagcacgacaaggcctacgaccagcagctgcaggcgggtgacaatccgtacctgcggtataaccacgccgacgccgagtttcaggagcgtctgcaagaagatacgtcttttgggggcaacctcgggcgagcagtcttccaggccaagaagcgggttctcgaacctctcggtctggttgaggaaggcgctaagacggctcctggaaagaagagaccggtagagccatcaccccagcgttctccagactcctctacgggcatcggcaagaagggccaacagcccgccagaaaaagactcaattttggtcagactggcgactcagagtcagttccagaccctcaacctctcggagaacctccagcagcgccctctggtgtgggacctaatacaatggctgcaggcggtggcgcaccaatggcagacaataacgaaggcgccgacggagtgggtagttcctcgggaaattggcattgcgattccacatggctgggcgacagagtcatcaccaccagcacccgaacctgggccctgcccacctacaacaaccacctctacaagcaaatctccaacgggacatcgggaggagccaccaacgacaacacctacttcggctacagcaccccctgggggtattttgactttaacagattccactgccacttttcaccacgtgactggcagcgactcatcaacaacaactggggattccggcccaagagactcagcttcaagctcttcaacatccaggtcaaggaggtcacgcagaatgaaggcaccaagaccatcgccaataacctcaccagcaccatccaggtgtttacggactcggagtaccagctgccgtacgttctcggctctgcccaccagggctgcctgcctccgttcccggcggacgtgttcacgattccccagtacggctacctaacactcaacaacggtagtcaggccgtgggacgcccctccttctactgcctggaatactttccttcgcagatgctgagaaccggcaacaacttccagtttacttacaccttcgaggacgtgcctttccacagcagctacgcccacagccagagcttggaccggctgatgaatcctctgattgaccagtacctgtactacttgtctcggattcaaacaacaggaggcacggcaaatacgcagactctgggcttcagccaaggtgggcctaatacaatggccaatcaggcaaagaactggctgccaggaccctgttaccgccaacaacgcgtctcaacgacaaccgggcaaaacaacaatagcaactttgcctggactgctgggaccaaataccatctgaatggaagaaattcattggctaatcctggcatcgctatggcaacacacaaagacgacgaggagcgtttttttcccagtaacgggatcctgatttttggcaaacaaaatgctgccagagacaatgcggattacagcgatgtcatgcccaccagcgaggaagaaatcaaaaccactaaccctgtggccacagaggaatacggtatcgtggcagataacttgcagcagcaaaacacggctcctcaaattggaactgtcaacagccagggggccttacccggtatggtctggcagaaccgggacgtgtacctgcagggtcccatctgggccaagattcctcacacggacggcaacttccacccgtctccgctgatgggcggctttggcctgaaacatcctccgcctcagatcctgatcaagaacacgcctgtacctgcggatcctccgaccaccttcaaccagtcaaagctgaactctttcatcacgcaatacagcaccggacaggtcagcgtggaaattgaatgggagctgcagaaggaaaacagcaagcgctggaaccccgagatccagtacacctccaactactacaaatctacaagtgtggactttgctgttaatacagaaggcgtgtactctgaaccccgccccattggcacccgttacctcacccgtaatctgtaa

SEQ ID NO: 1514 - DNA, 2217 bp, Artificial Sequence
  Synthetic Polynucleotide
atggctgccgatggttatcttccagattggctcgaggacaacctctctgagggcattcgcgagtggtgggcgctgaaacctggagccccgaagcccaaagccaaccagcaaaagcaggacgacggccggggtctggtgcttcctggctacaagtacctcggacccttcaacggactcgacaagggggagcccgtcaacgcggcggacgcggcggccctcgagcacgacaaggcctacgaccagcagctgcaggcgggtgacaatccgtacctgcggtataaccacgccgacgccgagtttcaggagcgtctgcaagaagatacgtcttttgggggcaacctcgggcgagcagtcttccaggccaagaagcgggttctcgaacctctcggtctggttgaggaaggcgctaagacggctcctggaaagaagagaccggtagagccatcaccccagcgttctccagactcctctacgggcatcggcaagaagggccaacagcccgccagaaaaagactcaattttggtcagactggcgactcagagtcagttccagaccctcaacctctcggagaacctccagcagcgccctctggtgtgggacctaatacaatggctgcaggcggtggcgcaccaatggcagacaataacgaaggcgccgacggagtgggtagttcctcgggaaattggcattgcgattccacatggctgggcgacagagtcatcaccaccagcacccgaacctgggccctgcccacctacaacaaccacctctacaagcaaatctccaacgggacatcgggaggagccaccaacgacaacacctacttcggctacagcaccccctgggggtattttgactttaacagattccactgccacttttcaccacgtgactggcagcgactcatcaacaacaactggggattccggcccaagagactcagcttcaagctcttcaacatccaggtcaaggcggtcacgcagaatgaaggcaccaagaccatcgccaataacctcaccagcaccatccaggtgtttacggactcggagtaccagctgccgtacgttctcggctctgcccaccagggctgcctgcctccgttcccggcggacgtgttcacgattccccagtacggctacctaacactcaacaacggtagtcaggccgtgggacgctcctccttctactgcctggaatactttccttcgcagatgctgagaaccggcaacaacttccagtttacttacaccttcgaggacgtgcctttccacagcagctacgcccacagccagagcttggaccggctgatgaatcctctgattgaccagtacctgtactacttgtctcggattcaaacaacaggaggcacggcaaatacgcagactctgggcttcagccaaggtgggcctaatacaatggccaatcaggcaaagaactggctgccaggaccctgttaccgccaacaacgcgtctcaacgacaaccgggcaaaacaacaatagcaactttgcctggactgctgggaccaaataccatctgaatggaagaaattcattggctaatcctggcatcgctatggcaacacacaaagacgacgaggagcgtttttttcccagtaacgggatcctgatttttggcaaacaaaatgctgccagagacaatgcggattacagcgatgtcatgcccaccagcgaggaagaaatcaaaaccactaaccctgtggccacagaggaatacggtatcgtggcagataacttgcagcagcaaaacacggctcctcaaattggaactgtcaacagccagggggccttacccggtatggtctggcagaaccgggacgtgtacctgcagggtcccatctgggccaagattcctcacacggacggcaacttccacccgtctccgctgatgggcggctttggcctgaaacatcctccgcctcagatcctgatcaagaacacgcctgtacctgcggatcctccgaccaccttcaaccagtcaaagctgaactctttcatcacgcaatacagcaccggacaggtcagcgtggaaattgaatgggagctgcagaaggaaaacagcaagcgctggaaccccgagatccagtacacctccaactactacaaatctacaagtgtggactttgctgttaatacagaaggcgtgtactctgaaccccgccccattggcacccgttacctcacccgtaatctgtaa

SEQ ID NO: 1515 - DNA, 2217 bp, Artificial Sequence
  Synthetic Polynucleotide
atggctgccgatggttatcttccagattggctcgaggacaacctctctgagggcattcgcgagtggtgggcgctgaaacctggagccccgaagcccaaagccaaccagcaaaagcaggacgacggccggggtctggtgcttcctggctacaagtacctcggacccttcaacggactcgacaagggggagcccgtcaacgcggcggacgcggcggccctcgagcacgacaaggcctacgaccagcagctgcaggcgggtgacaatccgtacctgcggtataaccacgccgacgccgagtttcaggagcgtctgcaagaagatacgtcttttgggggcaacctcgggcgagcagtcttccaggccaagaagcgggttctcgaacctctcggtctggttgaggaaggcgctaagacggctcctggaaagaagagaccggtagagccatcaccccagcgttctccagactcctctacgggcatcggcaagaagggccaacagcccgccagaaaaagactcaattttggtcagactggcgactcagagtcagttccagaccctcaacctctcggagaacctccagcagcgccctctggtgtgggacctaatacaatggctgcaggcggtggcgcaccaatggcagacaataacgaaggcgccgacggagtgggtagttcctcgggaaattggcattgcgattccacatggctgggcgacagagtcatcaccaccagcacccgaacctgggccctgcccacctacaacaaccacctctacaagcaaatctccaacgggacatcgggaggagccaccaacgacaacacctacttcggctacagcaccccctgggggtattttgactttaacagattccactgccacttttcaccacgtgactggcagcgactcatcaacaacaactggggattccggcccaagagactcagcttcaagctcttcaacatccaggtcaaggaggtcacgcagaatgaaggcaccaagaccatcgccaataacctcaccagcaccatccaggtgtttacggactcggagtaccagctgccgtacgttctcggctctgcccaccagggctgcctgcctccgttcccggcggacgtgttcacgattccccagtacggctacctaacactcaacaacggtagtcaggccgtgggacgctcctccttctactgcctggaatactttccttcgcagatgctgagaaccggcaacaacttccagtttacttacaccttcgaggacgtgcctttccacagcagctacgcccacagccagagcttggaccggctgatgaatcctctgattgaccagtacctgtactacttgtctcggattcaaacaacaggaggcacggcaaatacgcagactctgggcttcagccaaggtgggcctaatacaatggccaatcaggcaaagaactggctgccaggaccctgttaccgccaacaacgcgtctcaacgacaaccgggcaaaacaacaatagcaactttgcctggactgctgggaccaaataccatctgaatggaagaaattcattggctaatcctggcatcgctatggcaacacacaaagacgacgaggagcgtttttttcccagtaacgggatcctgatttttggcaaacaaaatgctgccagagacaatgcggattacagcgatgtcatgcccaccagcgaggaagaaatcaaaaccactaaccctgtggccacagaggaatacggtatcgtggcagataacttgcagcagcaaaacacggctcctcaaattggaactgtcaacagccagggggccttacccggtatggtctggcagaaccgggacgtgtacctgcagggtcccatctgggccaagattcctcacacggacggcaacttccacccgtctccgctgatgggcggctttggcctgaaacatcctccgcctcagatcctgatcaagaacacgcctgtacctgcggatcctccgaccgccttcaaccagtcaaagctgaactctttcatcacgcaatacagcaccggacaggtcagcgtggaaattgaatgggagctgcagaaggaaaacagcaagcgctggaaccccgagatccagtacacctccaactactacaaatctacaagtgtggactttgctgttaatacagaaggcgtgtactctgaaccccgccccattggcacccgttacctcacccgtaatctgtaa

SEQ ID NO: 1516 - DNA, 2217 bp, Artificial Sequence
  Synthetic Polynucleotide
atggctgccgatggttatcttccagattggctcgaggacaacctctctgagggcattcgcgagtggtgggcgctgaaacctggagccccgaagcccaaagccaaccagcaaaagcaggacgacggccggggtctggtgcttcctggctacaagtacctcggacccttcaacggactcgacaagggggagcccgtcaacgcggcggacgcggcggccctcgagcacgacaaggcctacgaccagcagctgcaggcgggtgacaatccgtacctgcggtataaccacgccgacgccgagtttcaggagcgtctgcaagaagatacgtcttttgggggcaacctcgggcgagcagtcttccaggccaagaagcgggttctcgaacctctcggtctggttgaggaaggcgctaagacggctcctggaaagaagagaccggtagagccatcaccccagcgttctccagactcctctacgggcatcggcaagaagggccaacagcccgccagaaaaagactcaattttggtcagactggcgactcagagtcagttccagaccctcaacctctcggagaacctccagcagcgccctctggtgtgggacctaatacaatggctgcaggcggtggcgcaccaatggcagacaataacgaaggcgccgacggagtgggtagttcctcgggaaattggcattgcgattccacatggctgggcgacagagtcatcaccaccagcacccgaacctgggccctgcccacctacaacaaccacctctacaagcaaatctccaacgggacatcgggaggagccaccaacgacaacacctacttcggctacagcaccccctgggggtattttgactttaacagattccgctgccacttttcaccacgtgactggcagcgactcatcaacaacaactggggattccggcccaagagactcagcttcaagctcttcaacatccaggtcaaggaggtcacgcagaatgaaggcaccaagaccatcgccaataacctcaccagcaccatccaggtgtttacggactcggagtaccagctgccgtacgttctcggctctgcccaccagggctgcctgcctccgttcccggcggacgtgttcacgattccccagtacggctacctaacactcaacaacggtagtcaggccgtgggacgctcctccttctactgcctggaatactttccttcgcagatgctgagaaccggcaacaacttccagtttacttacaccttcgaggacgtgcctttccacagcagctacgcccacagccagagcttggaccggctgatgaatcctctgattgaccagtacctgtactacttgtctcggattcaaacaacaggaggcacggcaaatacgcagactctgggcttcagccaaggtgggcctaatacaatggccaatcaggcaaagaactggctgccaggaccctgttaccgccaacaacgcgtctcaacgacaaccgggcaaaacaacaatagcaactttgcctggactgctgggaccaaataccatctgaatggaagaaattcattggctaatcctggcatcgctatggcaacacacaaagacgacgaggagcgtttttttcccagtaacgggatcctgatttttggcaaacaaaatgctgccagagacaatgcggattacagcgatgtcatgcccaccagcgaggaagaaatcaaaaccactaaccctgtggccacagaggaatacggtatcgtggcagataacttgcagcagcaaaacacggctcctcaaattggaactgtcaacagccagggggccttacccggtatggtctggcagaaccgggacgtgtacctgcagggtcccatctgggccaagattcctcacacggacggcaacttccacccgtctccgctgatgggcggctttggcctgaaacatcctccgcctcagatcctgatcaagaacacgcctgtacctgcggatcctccgaccaccttcaaccagtcaaagctgaactctttcatcacgcaatacagcaccggacaggtcagcgtggaaattgaatgggagctgcagaaggaaaacagcaagcgctggaaccccgagatccagtacacctccaactactacaaatctacaagtgtggactttgctgttaatacagaaggcgtgtactctgaaccccgccccattggcacccgttacctcacccgtaatctgtaa

SEQ ID NO: 1517 - DNA, 2217 bp, Artificial Sequence
  Synthetic Polynucleotide
atggctgccgatggttatcttccagattggctcgaggacaacctctctgagggcattcgcgagtggtgggcgctgaaacctggagccccgaagcccaaagccaaccagcaaaagcaggacgacggccggggtctggtgcttcctggctacaagtacctcggacccttcaacggactcgacaagggggagcccgtcaacgcggcggacgcggcggccctcgagcacgacaaggcctacgaccagcagctgcaggcgggtgacaatccgtacctgcggtataaccacgccgacgccgagtttcaggagcgtctgcaagaagatacgtcttttgggggcaacctcgggcgagcagtcttccaggccaagaagcgggttctcgaacctctcggtctggttgaggaaggcgctaagacggctcctggaaagaagagaccggtagagccatcaccccagcgttctccagactcctctacgggcatcggcaagaagggccaacagcccgccagaaaaagactcaattttggtcagactggcgactcagagtcagttccagaccctcaacctctcggagaacctccagcagcgccctctggtgtgggacctaatacaatggctgcaggcggtggcgcaccaatggcagacaataacgaaggcgccgacggagtgggtagttcctcgggaaattggcattgcgattccacatggctgggcgacagagtcatcaccaccagcacccgaacctgggccctgcccacctacaacaaccacctctacaagcaaatctccaacgggacatcgggaggagccaccaacgacaacacctacttcggctacagcaccccctgggggtattttgactttaacagattccactgccacttttcaccacgtgactggcagcgactcatcaacaacaactggggattccggcccaagagactcagcttcaagctcttcaacatccaggtcaaggaggtcacgcagaatgaaggcaccaagaccatcgccaataacctcaccagcaccatccaggtgtttacggactcggagtaccagctgccgtacgttctcggctctgcccaccagggctgcctgcctccgttcccggcggacgtgttcacgattccccagtacggctacctaacactcaacaacggtagtcaggccgtgggacgctcctccttctactgcctggaatactttccttcgcagatgctgagaaccggcaacaacttccagtttacttacaccctcgaggacgtgcctttccacagcagctacgcccacagccagagcttggaccggctgatgaatcctctgattgaccagtacctgtactacttgtctcggattcaaacaacaggaggcacggcaaatacgcagactctgggcttcagccaaggtgggcctaatacaatggccaatcaggcaaagaactggctgccaggaccctgttaccgccaacaacgcgtctcaacgacaaccgggcaaaacaacaatagcaactttgcctggactgctgggaccaaataccatctgaatggaagaaattcattggctaatcctggcatcgctatggcaacacacaaagacgacgaggagcgtttttttcccagtaacgggatcctgatttttggcaaacaaaatgctgccagagacaatgcggattacagcgatgtcatgcccaccagcgaggaagaaatcaaaaccactaaccctgtggccacagaggaatacggtatcgtggcagataacttgcagcagcaaaacacggctcctcaaattggaactgtcaacagccagggggccttacccggtatggtctggcagaaccgggacgtgtacctgcagggtcccatctgggccaagattcctcacacggacggcaacttccacccgtctccgctgatgggcggctttggcctgaaacatcctccgcctcagatcctgatcaagaacacgcctgtacctgcggatcctccgaccaccttcaaccagtcaaagctgaactctttcatcacgcaatacagcaccggacaggtcagcgtggaaattgaatgggagctgcagaaggaaaacagcaagcgctggaaccccgagatccagtacacctccaactactacaaatctacaagtgtggactttgctgttaatacagaaggcgtgtactctgaaccccgccccattggcacccgttacctcacccgtaatctgtaa

SEQ ID NO: 1518 - DNA, 2217 bp, Artificial Sequence
  Synthetic Polynucleotide
atggctgccgatggttatcttccagattggctcgaggacaacctctctgagggcattcgcgagtggtgggcgctgaaacctggagccccgaagcccaaagccaaccagcaaaagcaggacgacggccggggtctggtgcttcctggctacaagtacctcggacccttcaacggactcgacaagggggagcccgtcaacgcggcggacgcggcggccctcgagcacgacaaggcctacgaccagcagctgcaggcgggtgacaatccgtacctgcggtataaccacgccgacgccgagtttcaggagcgtctgcaagaagatacgtcttttgggggcaacctcgggcgagcagtcttccaggccaagaagcgggttctcgaacctctcggtctggttgaggaaggcgctaagacggctcctggaaagaagagaccggtagagccatcaccccagcgttctccagactcctctacgggcatcggcaagaagggccaacagcccgccagaaaaagactcaattttggtcagactggcgactcagagtcagttccagaccctcaacctctcggagaacctccagcagcgccctctggtgtgggacctaatacaatggctgcaggcggtggcgcaccaatggcagacaataacgaaggcgccgacggagtgggtagttcctcgggaaattggcattgcgattccacatggctgggcgacagagtcatcaccaccagcacccgaacctgggccctgcccacctacaacaaccacctctacaagcaaatctccaacgggacatcgggaggagccaccaacgacaacacctacttcggctacagcaccccctgggggtattttgactttaacagattccactgccacttttcaccacgtgactggcagcgactcatcaacaacaactggggattccggcccaagagactcagcttcaagctcttcaacatccaggtcaaggaggtcacgcagaatgaaggcaccaagaccatcgccaataacctcaccagcaccatccaggtgtttacggactcggagtaccagctgccgtacgttctcggctctgcccaccagggctgcctgcctccgttcccggcggacgtgttcacgattccccagtacggctacctaacactcaacaacggtagtcaggccgtgggacgctcctccttctactgcctggaatactttccttcgcagatgctgagaaccggcaacaacttccagtttacttacaccttcgaggacgtgcctttccacagcagctacgcccacagccagagcttggaccggctgatgaatcctctgattgaccagtacctgtactacttgtctcggattcaaacaacaggaggcacggcaaatacgcagactctgggcttcagccaaggtgggcctaatacaatggccaatcaggcaaagaactggctgccaggaccctgttaccgccaacaacgcgtctcaacgacaaccgggcaaaacaacaatagcaactttgcctggactgctgggaccaaataccatctgaatggaagaaattcattggctaatcctggcatcgctatggcaacacacaaagacgacgaggagcgtttttttcccagtaacgggatcctgatttttggcaaacaaaatgctgccagagacaatgcggattacagcgatgtcatgcccaccagcgaggaagaaatcaaaaccactaaccctgtggccacagaggaatacggtatcgtggcagataacttgcagcagcaaagcacggctcctcaaattggaactgtcaacagccagggggccttacccggtatggtctggcagaaccgggacgtgtacctgcagggtcccatctgggccaagattcctcacacggacggcaacttccacccgtctccgctgatgggcggctttggcctgaaacatcctccgcctcagatcctgatcaagaacacgcctgtacctgcggatcctccgaccaccttcaaccagtcaaagctgaactctttcatcacgcaatacagcaccggacaggtcagcgtggaaattgaatgggagctgcagaaggaaaacagcaagcgctggaaccccgagatccagtacacctccaactactacaaatctacaagtgtggactttgctgttaatacagaaggcgtgtactctgaaccccgccccattggcacccgttacctcacccgtaatctgtaa

SEQ ID NO: 1519 - DNA, 2217 bp, Artificial Sequence
  Synthetic Polynucleotide
atggctgccgatggttatcttccagattggctcgaggacaacctctctgagggcattcgcgagtggtgggcgctgaaacctggagccccgaagcccaaagccaaccagcaaaagcaggacgacggccggggtctggtgcttcctggctacaagtacctcggacccttcaacggactcgacaagggggagcccgtcaacgcggcggacgcggcggccctcgagcacgacaaggcctacgaccagcagctgcaggcgggtgacaatccgtacctgcggtataaccacgccgacgccgagtttcaggagcgtctgcaagaagatacgtcttttgggggcaacctcgggcgagcagtcttccaggccaagaagcgggttctcgaacctctcggtctggttgaggaaggcgctaagacggctcctggaaagaagagacyggtagagccatcaccccagcgttctccagactcctctacgggcatcggcaagaagggccaacagcccgccagaaaaagactcaattttggtcagactggcgactcagagtcagttccagaccctcaacctctcggagaacctccagcagcgccctctggtgtgggacctaatacaatggctgcaggcggtggcgcaccaatggcagacaataacgaaggcgccgacggagtgggtagttcctcgggaaattggcattgcgattccacatggctgggcgacagagtcatcaccaccagcacccgaacctgggccctgcccacctacaacaaccacctctacaagcaaatctccaacgggacatcgggaggagccaccaacgacaacacctacttcggctacagcaccccctgggggtattttgactttaacagattccactgccacttttcaccacgtgactggcagcgactcatcaacaacaactggggattccggcccaagagactcagcttcaagctcttcaacatccaggtcaaggaggtcacgcagaatgaaggcaccaagaccatcgccaataacctcaccagcaccatccaggtgtttacggactcggagtaccagctgccgtacgttctcggctctgcccaccagggctgcctgcctccgttcccggcggacgtgttcacgattccccagtacggctacctaacactcaacaacggtagtcaggccgtgggacgctcctccttctactgcctggaatactttccttcgcagatgctgagaaccggcaacaacttccagtttacttacaccttcgaggacgtgcctttccacagcagctacgcccacagccagagcttggaccggctgatgaatcctctgattgaccagtacctgtactacttgtctcggattcaaacaacaggaggcacggcaaatacgcagactctgggcttcagccaaggtgggcctaatacaatggccaatcaggcaaagaactggctgccaggaccctgttaccgccaacaacgcgtctcaacgacaaccgggcaaaacaacaatagcaactttgcctggactgctgggaccaaataccatctgaatggaagaaattcattggctaatcctggcatcgctatggcaacacacaaagacgacgaggagcgtttttttcccagtaacgggatcctgatttttggcaaacaaaatgctgccagagacaatgcggattacagcgatgtcatgcccaccagcgaggaagaaatcaaaaccactaaccctgtggccacagaggaatacggtatcgtggcagataacttgcagcagcaaaacacggctcctcaaattggaactgtcagcagccagggggccttacccggtatggtctggcagaaccgggacgtgtacctgcagggtcccatctgggccaagattcctcacacggacggcaacttccacccgtctccgctgatgggcggctttggcctgaaacatcctccgcctcagatcctgatcaagaacacgcctgtacctgcggatcctccgaccaccttcaaccagtcaaagctgaactctttcatcacgcaatacagcaccggacaggtcagcgtggaaattgaatgggagctgcagaaggaaaacagcaagcgctggaaccccgagatccagtacacctccaactactacaaatctacaagtgtggactttgctgttaatacagaaggcgtgtactctgaaccccgccccattggcacccgttacctcacccgtaatctgtaa

SEQ ID NO: 1520 - DNA, 2217 bp, Artificial Sequence
  Synthetic Polynucleotide
atggctgccgatggttatcttccagattggctcgaggacaacctctctgagggcattcgcgagtggtgggcgctgaaacctggagccccgaagcccaaagccaaccagcaaaagcaggacgacggccggggtctggtgcttcctggctacaagtacctcggacccttcaacggactcgacaagggggagcccgtcaacgcggcggacgcggcggccctcgagcacgacaaggcctacgaccagcagctgcaggcgggtgacaatccgtacctgcggtataaccacgccgacgccgagtttcaggagcgtctgcaagaagatacgtcttttgggggcaacctcgggcgagcagtcttccaggccaagaagcgggttctcgaacctctcggtctggttgaggaaggcgctaagacggctcctggaaagaagagaccggtagagccatcaccccagcgttctccagactcctctacgggcatcggcaagaagggccaacagcccgccagaaaaagactcaattttggtcagactggcgactcagagtcagttccagaccctcaacctctcggagaacctccagcagcgccctctggtgtgggacctaatacaatggctgcaggcggtggcgcaccaatggcagacaataacgaaggcgccgacggagtgggtagttcctcgggaaattggcattgcgattccacatggctgggcgacagagtcatcaccaccagcacccgaacctgggccctgcccacctacaacaaccacctctacaagcaaatctccaacgggacatcgggaggagccaccaacgacaacacctacttcggctacagcaccccctgggggtattttgactttaacagattccactgccacttttcaccacgtgactggcagcgactcatcaacaacaactggggattccggcccaagagactcagcttcaagctcttcaacatccaggtcaaggaggtcacgcagaatgaaggcaccaagaccatcgccaataacctcaccagcaccatccaggtgtttacggactcggagtaccagctgccgtacgttctcggctctgcccaccagggctgcctgcctccgttcccggcggacgtgttcacgattccccagtacggctacctaacactcaacaacggtagtcaggccgtgggacgctcctccttctactgcctggaatactttccttcgcagatgctgagaaccggcaacaacttccagtttacttacaccttcgaggacgtgcctttccacagcagctacgcccacagccagagcttggaccggctgatgaatcctctgattgaccagtacctgtactacttgtctcggattcaaacaacaggaggcacggcaaatacgcagactctgggcttcagccaaggtgggcctaatacaatggccaatcaggcaaagaactggctgccaggaccctgttaccgccaacaacgcgtctcaacgacaaccgggcaaaacaacaatagcaactttgcctggactgctgggaccaaataccatctgaatggaagaaattcattggctaatcctggcatcgctatggcaacacacaaagacgacgaggagcgtttttttcccagtaacgggatcctgatttttggcaaacaaagtgctgccagagacaatgcggattacagcgatgtcatgcccaccagcgaggaagaaatcaaaaccactaaccctgtggccacagaggaatacggtatcgtggcagataacttgcagcagcaaaacacggctcctcaaattggaactgtcaacagccagggggccttacccggtatggtctggcagaaccgggacgtgtacctgcagggtcccatctgggccaagattcctcacacggacggcaacttccacccgtctccgctgatgggcggctttggcctgaaacatcctccgcctcagatcctgatcaagaacacgcctgtacctgcggatcctccgaccaccttcaaccagtcaaagctgaactctttcatcacgcaatacagcaccggacaggtcagcgtggaaattgaatgggagctgcagaaggaaaacagcaagcgctggaaccccgagatccagtacacctccaactactacaaatctacaagtgtggactttgctgttaatacagaaggcgtgtactctgaaccccgccccattggcacccgttacctcacccgtaatctgtaa

SEQ ID NO: 1521 - DNA, 2217 bp, Artificial Sequence
  Synthetic Polynucleotide
atggctgccgatggttatcttccagattggctcgaggacaacctctctgagggcattcgcgagtggtgggcgctgaaacctggagccccgaagcccaaagccaaccagcaaaagcaggacgacggccggggtctggtgcttcctggctacaagtacctcggacccttcaacggactcgacaagggggagcccgtcaacgcggcggacgcggcggccctcgagcacgacaaggcctacgaccagcagctgcaggcgggtgacaatccgtacctgcggtataaccacgccgacgccgagtttcaggagcgtctgcaagaagatacgtcttttgggggcaacctcgggcgagcagtcttccaggccaagaagcgggttctcgaacctctcggtctggttgaggaaggcgctaagacggctcctggaaagaagagaccggtagagccatcaccccagcgttctccagactcctctacgggcatcggcaagaagggccaacagcccgccagaaaaagactcaattttggtcagactggcgactcagagtcagttccagaccctcaacctctcggagaacctccagcagcgccctctggtgtgggacctaatacaatggctgcaggcggtggcgcaccaatggcagacaataacgaaggcgccgacggagtgggtagttcctcgggaaattggcattgcgattccacatggctgggcgacagagtcatcaccaccagcacccgaacctgggccctgcccacctacaacaaccacctctacaagcaaatctccaacgggacatcgggaggagccaccaacgacaacacctacttcggctacagcaccccctgggggtattttgactttaacagattccactgccacttttcaccacgtgactggcagcgactcatcaacaacaactggggattccggcccaagagactcagcttcaagctcttcaacatccaggtcaaggaggtcacgcagaatgaaggcaccaagaccatcgccaataacctcaccagcaccatccaggtgtttacggactcggagtaccagctgccgtacgttctcggctctgcccaccagggctgcctgcctccgttcccggcggacgtgttcacgattccccagtacggctacctaacactcaacaacggtagtcaggccgtgggacgctcctccttctactgcctggaatactttccttcgcagatgctgagaaccggcaacaacttccagtttacttacaccttcgaggacgtgcctttccacagcagctacgcccacagccagagcttggaccggctgatgaatcctctgattgaccagtacctgtactacttgtctcggattcaaacagcaggaggcacggcaaatacgcagactctgggcttcagccaaggtgggcctaatacaatggccaatcaggcaaagaactggctgccaggaccctgttaccgccaacaacgcgtctcaacgacaaccgggcaaaacaacaatagcaactttgcctggactgctgggaccaaataccatctgaatggaagaaattcattggctaatcctggcatcgctatggcaacacacaaagacgacgaggagcgtttttttcccagtaacgggatcctgatttttggcaaacaaaatgctgccagagacaatgcggattacagcgatgtcatgcccaccagcgaggaagaaatcaaaaccactaaccctgtggccacagaggaatacggtatcgtggcagataacttgcagcagcaaaacacggctcctcaaattggaactgtcaacagccagggggccttacccggtatggtctggcagaaccgggacgtgtacctgcagggtcccatctgggccaagattcctcacacggacggcaacttccacccgtctccgctgatgggcggctttggcctgaaacatcctccgcctcagatcctgatcaagaacacgcctgtacctgcggatcctccgaccaccttcaaccagtcaaagctgaactctttcatcacgcaatacagcaccggacaggtcagcgtggaaattgaatgggagctgcagaaggaaaacagcaagcgctggaaccccgagatccagtacacctccaactactacaaatctacaagtgtggactttgctgttaatacagaaggcgtgtactctgaaccccgccccattggcacccgttacctcacccgtaatctgtaa

SEQ ID NO: 1522 - DNA, 2217 bp, Artificial Sequence
  Synthetic Polynucleotide
atggctgccgatggttatcttccagattggctcgaggacaacctctctgagggcattcgcgagtggtgggcgctgaaacctggagccccgaagcccaaagccaaccagcaaaagcaggacgacggccggggtctggtgcttcctggctacaagtacctcggacccttcaacggactcgacaagggggagcccgtcaacgcggcggacgcggcggccctcgagcacgacaaggcctacgaccagcagctgcaggcgggtgacaatccgtacctgcggtataaccacgccgacgccgagtttcaggagcgtctgcaagaagatacgtcttttgggggcaacctcgggcgagcagtcttccaggccaagaagcgggttctcgaacctctcggtctggttgaggaaggcgctaagacggctcctggaaagaagagaccggtagagccatcaccccagcgttctccagactcctctacgggcatcggcaagaagggccaacagcccgccagaaaaagactcaattttggtcagactggcgactcagagtcagttccagaccctcaacctctcggagaacctccagcagcgccctctggtgtgggacctaatacaatggctgcaggcggtggcgcaccaatggcagacaataacgaaggcgccgacggagtgggtagttcctcgggaaattggcattgcgattccacatggctgggcgacagagtcatcaccaccagcacccgaacctgggccctgcccacctacaacaaccacctctacaagcaaatctccaacgggacatcgggaggagccaccaacgacaacacctacttcggctacagcaccccctgggggtattttgactttaacagattccactgccacttttcaccacgtgactggcagcgactcatcaacaacaactggggattccggcccaagagactcagcttcaagctcttcaacatccaggtcaaggaggtcacgcagaatgaaggcaccaagaccatcgccaataacctcaccagcaccatccaggtgtttacggactcggagtaccagctgccgtacgttctcggctctgcccaccagggctgcctgcctccgttcccggcggacgtgttcacgattccccagtacggctacctaacactcaacaacggtagtcaggccgtgggacgctcctccttctactgcctggaatactttccttcgcagatgctgagaaccggcaacaacttccagtttacttacaccttcgaggacgtgcctttccacagcagctacgcccacagccagaacttggaccggctgatgaatcctctgattgaccagtacctgtactacttgtctcggattcaaacaacaggaggcacggcaaatacgcagactctgggcttcagccaaggtgggcctaatacaatggccaatcaggcaaagaactggctgccaggaccctgttaccgccaacaacgcgtctcaacgacaaccgggcaaaacaacaatagcaactttgcctggactgctgggaccaaataccatctgaatggaagaaattcattggctaatcctggcatcgctatggcaacacacaaagacgacgaggagcgtttttttcccagtaacgggatcctgatttttggcaaacaaaatgctgccagagacaatgcggattacagcgatgtcatgcccaccagcgaggaagaaatcaaaaccactaaccctgtggccacagaggaatacggtatcgtggcagataacttgcagcagcaaaacacggctcctcaaattggaactgtcaacagccagggggccttacccggtatggtctggcagaaccgggacgtgtacctgcagggtcccatctgggccaagattcctcacacggacggcaacttccacccgtctccgctgatgggcggctttggcctgaaacatcctccgcctcagatcctgatcaagaacacgcctgtacctgcggatcctccgaccaccttcaaccagtcaaagctgaactctttcatcacgcaatacagcaccggacaggtcagcgtggaaattgaatgggagctgcagaaggaaaacagcaagcgctggaaccccgagatccagtacacctccaactactacaaatctacaagtgtggactttgctgttaatacagaaggcgtgtactctgaaccccgccccattggcacccgttacctcacccgtaatctgtaa

SEQ ID NO: 1523 - DNA, 2217 bp, Artificial Sequence
  Synthetic Polynucleotide
atggctgccgatggttatcttccagattggctcgaggacaacctctctgagggcattcgcgagtggtgggcgctgaaacctggagccccgaagcccaaagccaaccagcaaaagcaggacgacggccggggtctggtgcttcctggctacaagtacctcggacccttcaacggactcgacaagggggagcccgtcaacgcggcggacgcggcggccctcgagcacgacaaggcctacgaccagcagctgcaggcgggtgacaatccgtacctgcggtataaccacgccgacgccgagtttcaggagcgtctgcaagaagatacgtcttttgggggcaacctcgggcgagcagtcttccaggccaagaagcgggttctcgaacctctcggtctggttgaggaaggcgctaagacggctcctggaaagaagagaccggtagagccatcaccccagcgttctccagactcctctacgggcatcggcaagaagggccaacagcccgccagaaaaagactcaattttggtcagactggcgactcagagtcagttccagaccctcaacctctcggagaacctccagcagcgccctctggtgtgggacctaatacaatggctgcaggcggtggcgcaccaatggcagacaataacgaaggcgccgacggagtgggtagttcctcgggaaattggcattgcgattccacatggctgggcgacagagtcatcaccaccagcacccgaacctgggccctgcccacctacaacaaccacctctacaagcaaatctccaacgggacatcgggaggagccaccaacgacaacacctacttcggctacagcaccccctgggggtattttgactttaacagattccactgccacttttcaccacgtgactggcagcgactcatcaacaacaactggggattccggcccaagagactcagcttcaagctcttcaacatccaggtcaaggcggtcacgcagaatgaaggcaccaagaccatcgccaataacctcaccagcaccatccaggtgtttacggactcggagtaccagctgccgtacgttctcggctctgcccaccagggctgcctgcctccgttcccggcggacgtgttcacgattccccagtacggctacctaacactcaacaacggtagtcaggccgtgggacgctcctccttctactgcctggaatactttccttcgcagatgctgagaaccggcaacaacttccagtttacttacaccttcgaggacgtgcctttccacagcagctacgcccacagccagagcttggaccggctgatgaatcctctgattgaccagtacctgtactacttgtctcggattcaaacaacaggaggcacggcaaatacgcagactctgggcttcagccaaggtgggcctaatacaatggccaatcaggcaaagaactggctgccaggaccctgttaccgccaacaacgcgtctcaacgacaaccgggcaaaacaacaatagcaactttgcctggactgctgggaccaaataccatctgaatggaagaaattcattggctaatcctagcatcgctatggcaacacacaaagacgacgaggagcgtttttttcccagtaacgggatcctgatttttggcaaacaaaatgctgccagagacaatgcggattacagcgatgtcatgcccaccagcgaggaagaaatcaaaaccactaaccctgtggccacagaggaatacggtatcgtggcagataacttgcagcagcaaaacacggctcctcaaattggaactgtcaacagccagggggccttacccggtatggtctggcagaaccgggacgtgtacctgcagggtcccatctgggccaagattcctcacacggacggcaacttccacccgtctccgctgatgggcggctttggcctgaaacatcctccgcctcagatcctgatcaagaacacgcctgtacctgcggatcctccgaccaccttcaaccagtcaaagctgaactctttcatcacgcaatacagcaccggacaggtcagcgtggaaattgaatgggagctgcagaaggaaaacagcaagcgctggaaccccgagatccagtacacctccaactactacaaatctacaagtgtggactttgctgttaatacagaaggcgtgtactctgaaccccgccccattggcacccgttacctcacccgtaatctgtaa

SEQ ID NO: 1524 - DNA, 2217 bp, Artificial Sequence
  Synthetic Polynucleotide
atggctgccgatggttatcttccagattggctcgaggacaacctctctgagggcattcgcgagtggtgggcgctgaaacctggagccccgaagcccaaagccaaccagcaaaagcaggacgacggccggggtctggtgcttcctggctacaagtacctcggacccttcaacggactcgacaagggggagcccgtcaacgcggcggacgcggcggccctcgagcacgacaaggcctacgaccagcagctgcaggcgggtgacaatccgtacctgcggtataaccacgccgacgccgagtttcaggagcgtctgcaagaagatacgtcttttgggggcaacctcgggcgagcagtcttccaggccaagaagcgggttctcgaacctctcggtctggttgaggaaggcgctaagacggctcctggaaagaagagaccggtagagccatcaccccagcgttctccagactcctctacgggcatcggcaagaagggccaacagcccgccagaaaaagactcaattttggtcagactggcgactcagagtcagttccagaccctcaacctctcggagaacctccagcagcgccctctggtgtgggacctaatacaatggctgcaggcggtggcgcaccaatggcagacaataacgaaggcgccgacggagtgggtagttcctcgggaaattggcattgcgattccacatggctgggcgacagagtcatcaccaccagcacccgaacctgggccctgcccacctacaacaaccacctctacaagcaaatctccaacgggacatcgggaggagccaccaacgacaacacctacttcggctacagcaccccctgggggtattttgactttaacagattccactgccacttttcaccacgtgactggcagcgactcatcaacaacaactggggattccggcccaagagactcagcttcaagctcttcaacatccaggtcaaggaggtcacgcagaatgaaggcaccaagaccatcgccaataacctcaccagcaccatccaggtgtttacggactcggagtaccagctgccgtacgttctcggctctgcccaccagggctgcctgcctccgttcccggcggacgtgttcacgattccccagtacggctacctaacactcaacaacggtagtcaggccgtgggacgctcctccttctactgcctggaatactttccttcgcagatgctgagaaccggcaacaacttccagtttacttacaccttcgaggacgtgcctttccacagcagctacgcccacagccagagcttggaccggctgatgaatcctctgattgaccagtacctgtactacttgtctcggattcaaacaacaggaggcacggcaaatacgcagactctgggcttcagccaaggtgggcctaatacaatggccaatcaggcaaagaactggctgccaggaccctgttaccgccaacaacgcgtctcaacgacaaccgggcaaaacaacaatagcaactttgcctggactgctgggaccaaataccatctgaatggaagaaattcattggctaatcctggcatcgctatggcaacacacaaagacgacgaggagcgtttttttcccagtaacgggatcctgatttttggcaaacaaaatgctgccagagacaatgcggattacagcgatgtcatgcccaccagcgaggaagaaatcaaaaccactaaccctgtggccacagaggaatacgatatcgtggcagataacttgcagcagcaaaacacggctcctcaaattggaactgtcaacagccagggggccttacccggtatggtctggcagaaccgggacgtgtacctgcagggtcccatctgggccaagattcctcacacggacggcaacttccacccgtctccgctgatgggcggctttggcctgaaacatcctccgcctcagatcctgatcaagaacacgcctgtacctgcggatcctccgaccaccttcaaccagtcaaagctgaactctttcatcacgcaatacagcaccggacaggtcagcgtggaaattgaatgggagctgcagaaggaaaacagcaagcgctggaaccccgagatccagtacacctccaactactacaaatctacaagtgtggactttgctgttaatacagaaggcgtgtactctgaaccccgccccattggcacccgttacctcacccgtaatctgtaa

SEQ ID NO: 1525 - DNA, 2217 bp, Artificial Sequence
  Synthetic Polynucleotide
atggctgccgatggttatcttccagattggctcgaggacaacctctctgagggcattcgcgagtggtgggcgctgaaacctggagccccgaagcccaaagccaaccagcaaaagcaggacgacggccggggtctggtgcttcctggctacaagtacctcggacccttcaacggactcgacaagggggagcccgtcaacgcggcggacgcggcggccctcgagcacgacaaggcctacgaccagcagctgcaggcgggtgacaatccgtacctgcggtataaccacgccgacgccgagtttcaggagcgtctgcaagaagatacgtcttttgggggcaacctcgggcgagcagtcttccaggccaagaagcgggttctcgaacctctcggtctggttgaggaaggcgctaagacggctcctggaaagaagagaccggtagagccatcaccccagcgttctccagactcctctacgggcatcggcaagaagggccaacagcccgccagaaaaagactcaattttggtcagactggcgactcagagtcagttccagaccctcaacctctcggagaacctccagcagcgccctctggtgtgggacctaatacaatggctgcaggcggtggcgcaccaatggcagacaataacgaaggcgccgacggagtgggtagttcctcgggaaattggcattgcgattccacatggctgggcgacagagtcatcaccaccagcacccgaacctgggccctgcccacctacaacaaccacctctacaagcaaatctccaacgggacatcgggaggagccaccaacgacaacacctacttcggctacagcaccccctgggggtattttgactttaacagattccactgccacttttcaccacgtgactggcagcgactcatcaacaacaactggggattccggcccaagagactcagcttcaagctcttcaacatccaggtcaaggaggtcacgcagaatgaaggcaccaagaccatcgccaataacctcaccagcaccatccaggtgtttacggactcggagtaccagctgccgtacgttctcggctctgcccaccagggctgcctgcctccgttcccggcggacgtgttcacgattccccagtacggctacctaacactcaacaacggtagtcaggccgtgggacgctcctccttctactgcctggaatactttccttcgcagatgctgagaaccggcaacaacttccagtttacttacaccttcgaggacgtgcctttccacagcagctacgcccacagccagagcttggaccggctgatgaatcctctgattgaccagtacctgtactacttgtctcggattcaaacaacaggaggcacggcaaatacgcagactccgggcttcagccaaggtgggcctaatacaatggccaatcaggcaaagaactggctgccaggaccctgttaccgccaacaacgcgtctcaacgacaaccgggcaaaacaacaatagcaactttgcctggactgctgggaccaaataccatctgaatggaagaaattcattggctaatcctggcatcgctatggcaacacacaaagacgacgaggagcgtttttttcccagtaacgggatcctgatttttggcaaacaaaatgctgccagagacaatgcggattacagcgatgtcatgcccaccagcgaggaagaaatcaaaaccactaaccctgtggccacagaggaatacggtatcgtggcagataacttgcagcagcaaaacacggctcctcaaattggaactgtcaacagccagggggccttacccggtatggtctggcagaaccgggacgtgtacctgcagggtcccatctgggccaagattcctcacacggacggcaacttccacccgtctccgctgatgggcggctttggcctgaaacatcctccgcctcagatcctgatcaagaacacgcctgtacctgcggatcctccgaccaccttcaaccagtcaaagctgaactctttcatcacgcaatacagcaccggacaggtcagcgtggaaattgaatgggagctgcagaaggaaaacagcaagcgctggaaccccgagatccagtacacctccaactactacaaatctacaagtgtggactttgctgttaatacagaaggcgtgtactctgaaccccgccccattggcacccgttacctcacccgtaatctgtaa

SEQ ID NO: 1526 - DNA, 2217 bp, Artificial Sequence
  Synthetic Polynucleotide
atggctgccgatggttatcttccagattggctcgaggacaacctctctgagggcattcgcgagtggtgggcgctgaaacctggagccccgaagcccaaagccaaccagcaaaagcaggacgacggccggggtctggtgcttcctggctacaagtacctcggacccttcaacggactcgacaagggggagcccgtcaacgcggcggacgcggcggccctcgagcacgacaaggcctacgaccagcagctgcaggcgggtgacaatccgtacctgcggtataaccacgccgacgccgagtttcaggagcgtctgcaagaagatacgtcttttgggggcaacctcgggcgagcagtcttccaggccaagaagcgggttctcgaacctctcggtctggttgaggaaggcgctaagacggctcctggaaagaagagaccggtagagccatcaccccagcgttctccagactcctctacgggcatcggcaagaagggccaacagcccgccagaaaaagactcaattttggtcagactggcgactcagagtcagttccagaccctcaacctctcggagaacctccagcagcgccctctggtgtgggacctaatacaatggctgcaggcggtggcgcaccaatggcagacaataacgaaggcgccgacggagtgggtagttcctcgggaaattggcattgcgattccacatggctgggcgacagagtcatcaccaccagcacccgaacctgggccctgcccacctacaacaaccacctctacaagcaaatctccaacgggacatcgggaggagccaccaacgacaacacctacttcggctacagcaccccctgggggtattttgactttaacagattccactgccacttttcaccacgtgactggcagcgactcatcaacaacaactggggattccggcccaagagactcagcttcaagctcttcaacatccaggtcaaggaggtcacgcagaatgaaggcaccaagaccatcgccaataacctcaccagcaccatccaggtgtttacggactcggagtaccagctgccgtacgttctcggctctgcccaccagggctgcctgcctccgttcccggcggacgtgttcacgattccccagtacggctacctaacactcaacaacggtagtcaggccgtgggacgctcctcctcctactgcctggaatactttccttcgcagatgctgagaaccggcaacaacttccagtttacttacaccttcgaggacgtgcctttccacagcagctacgcccacagccagagcttggaccggctgatgaatcctctgattgaccagtacctgtactacttgtctcggattcaaacaacaggaggcacggcaaatacgcagactctgggcttcagccaaggtgggcctaatacaatggccaatcaggcaaagaactggctgccaggaccctgttaccgccaacaacgcgtctcaacgacaaccgggcaaaacaacaatagcaactttgcctggactgctgggaccaaataccatctgaatggaagaaattcattggctaatcctggcatcgctatggcaacacacaaagacgacgaggagcgtttttttcccagtaacgggatcctgatttttggcaaacaaaatgctgccagagacaatgcggattacagcgatgtcatgcccaccagcgaggaagaaatcaaaaccactaaccctgtggccacagaggaatacggtatcgtggcagataacttgcagcagcaaaacacggctcctcaaattggaactgtcaacagccagggggccttacccggtatggtctggcagaaccgggacgtgtacctgcagggtcccatctgggccaagattcctcacacggacggcaacttccacccgtctccgctgatgggcggctttggcctgaaacatcctccgcctcagatcctgatcaagaacacgcctgtacctgcggatcctccgaccaccttcaaccagtcaaagctgaactctttcatcacgcaatacagcaccggacaggtcagcgtggaaattgaatgggagctgcagaaggaaaacagcaagcgctggaaccccgagatccagtacacctccaactactacaaatctacaagtgtggactttgctgttaatacagaaggcgtgtactctgaaccccgccccattggcacccgttacctcacccgtaatctgtaa

SEQ ID NO: 1527 - DNA, 2217 bp, Artificial Sequence
  Synthetic Polynucleotide
atggctgccgatggttatcttccagattggctcgaggacaacctctctgagggcattcgcgagtggtgggcgctgaaacctggagccccgaagcccaaagccaaccagcaaaagcaggacgacggccggggtctggtgcttcctggctacaagtacctcggacccttcaacggactcgacaagggggagcccgtcaacgcggcggacgcggcggccctcgagcacgacaaggcctacgaccagcagctgcaggcgggtgacaatccgtacctgcggtataaccacgccgacgccgagtttcaggagcgtctgcaagaagatacgtcttttgggggcaacctcgggcgagcagccttccaggccaagaagcgggttctcgaacctctcggtctggttgaggaaggcgctaagacggctcctggaaagaagagaccggtagagccatcaccccagcgttctccagactcctctacgggcatcggcaagaagggccaacagcccgccagaaaaagactcaattttggtcagactggcgactcagagtcagttccagaccctcaacctctcggagaacctccagcagcgccctctggtgtgggacctaatacaatggctgcaggcggtggcgcaccaatggcagacaataacgaaggcgccgacggagtgggtagttcctcgggaaattggcattgcgattccacatggctgggcgacagagtcatcaccaccagcacccgaacctgggccctgcccacctacaacaaccacctctacaagcaaatctccaacgggacatcgggaggagccaccaacgacaacacctacttcggctacagcaccccctgggggtattttgactttaacagattccactgccacttttcaccacgtgactggcagcgactcatcaacaacaactggggattccggcccaagagactcagcttcaagctcttcaacatccaggtcaaggaggtcacgcagaatgaaggcaccaagaccatcgccaataacctcaccagcaccatccaggtgtttacggactcggagtaccagctgccgtacgttctcggctctgcccaccagggctgcctgcctccgttcccggcggacgtgttcacgattccccagtacggctacctaacactcaacaacggtagtcaggccgtgggacgctcctccttctactgcctggaatactttccttcgcagatgctgagaaccggcaacaacttccagtttacttacaccttcgaggacgtgcctttccacagcagctacgcccacagccagagcttggaccggctgatgaatcctctgattgaccagtacctgtactacttgtctcggattcaaacaacaggaggcacggcaaatacgcagactctgggcttcagccaaggtgggcctaatacaatggccaatcaggcaaagaactggctgccaggaccctgttaccgccaacaacgcgtctcaacgacaaccgggcaaaacaacaatagcaactttgcctggactgctgggaccaaataccatctgaatggaagaaattcattggctaatcctggcatcgctatggcaacacacaaagacgacgaggagcgtttttttcccagtaacgggatcctgatttttggcaaacaaaatgctgccagagacaatgcggattacagcgatgtcatgcccaccagcgaggaagaaatcaaaaccactaaccctgtggccacagaggaatacggtatcgtggcagataacttgcagcagcaaaacacggctcctcaaattggaactgtcaacagccagggggccttacccggtatggtctggcagaaccgggacgtgtacctgcagggtcccatctgggccaagattcctcacacggacggcaacttccacccgtctccgctgatgggcggctttggcctgaaacatcctccgcctcagatcctgatcaagaacacgcctgtacctgcggatcctccgaccaccttcaaccagtcaaagctgaactctttcatcacgcaatacagcaccggacaggtcagcgtggaaattgaatgggagctgcagaaggaaaacagcaagcgctggaaccccgagatccagtacacctccaactactacaaatctacaagtgtggactttgctgttaatacagaaggcgtgtactctgaaccccgccccattggcacccgttacctcacccgtaatctgtaa

SEQ ID NO: 1528 - DNA, 2217 bp, Artificial Sequence
  Synthetic Polynucleotide
atggctgccgatggttatcttccagattggctcgaggacaacctctctgagggcattcgcgagtggtgggcgctgaaacctggagccccgaagcccaaagccaaccagcaaaagcaggacgacggccggggtctggtgcttcctggctacaagtacctcggacccttcaacggactcgacaagggggagcccgtcaacgcggcggacgcggcggccctcgagcacgacaaggcctacgaccagcagctgcaggcgggtgacaatccgtacctgcggtataaccacgccgacgccgagtttcaggagcgtctgcaagaagatacgtcttttgggggcaacctcgggcgagcagtcttccaggccaagaagcgggttctcgaacctctcggtctggttgaggaaggcgctaagacggctcctggaaagaagagaccggtagagccatcaccccagcgttctccagactcctctacgggcatcggcaagaagggccaacagcccgccagaaaaagactcaattttggtcagactggcgactcagagtcagttccagaccctcaacctctcggagaacctccagcagcgccctctggtgtgggacctaatacaatggctgcaggcggtggcgcaccaatggcagacaataacgaaggcgccgacggagtgggtagttcctcgggaaattggcattgcgattccacatggctgggcgacagagtcatcaccaccagcacccgaacctgggccctgcccacctacaacaaccacctctacaagcaaatctccaacgggacatcgggaggagccaccgacgacaacacctacttcggctacagcaccccctgggggtattttgactttaacagattccactgccacttttcaccacgtgactggcagcgactcatcaacaacaactggggattccggcccaagagactcagcttcaagctcttcaacatccaggtcaaggaggtcacgcagaatgaaggcaccaagaccatcgccaataacctcaccagcaccatccaggtgtttacggactcggagtaccagctgccgtacgttctcggctctgcccaccagggctgcctgcctccgttcccggcggacgtgttcacgattccccagtacggctacctaacactcaacaacggtagtcaggccgtgggacgctcctccttctactgcctggaatactttccttcgcagatgctgagaaccggcaacaacttccagtttacttacaccttcgaggacgtgcctttccacagcagctacgcccacagccagagcttggaccggctgatgaatcctctgattgaccagtacctgtactacttgtctcggattcaaacaacaggaggcacggcaaatacgcagactctgggcttcagccaaggtgggcctaatacaatggccaatcaggcaaagaactggctgccaggaccctgttaccgccaacaacgcgtctcaacgacaaccgggcaaaacaacaatagcaactttgcctggactgctgggaccaaataccatctgaatggaagaaattcattggctaatcctggcatcgctatggcaacacacaaagacgacgaggagcgtttttttcccagtaacgggatcctgatttttggcaaacaaaatgctgccagagacaatgcggattacagcgatgtcatgcccaccagcgaggaagaaatcaaaaccactaaccctgtggccacagaggaatacggtatcgtggcagataacttgcagcagcaaaacacggctcctcaaattggaactgtcaacagccagggggccttacccggtatggtctggcagaaccgggacgtgtacctgcagggtcccatctgggccaagattcctcacacggacggcaacttccacccgtctccgctgatgggcggctttggcctgaaacatcctccgcctcagatcctgatcaagaacacgcctgtacctgcggatcctccgaccaccttcaaccagtcaaagctgaactctttcatcacgcaatacagcaccggacaggtcagcgtggaaattgaatgggagctgcagaaggaaaacagcaagcgctggaaccccgagatccagtacacctccaactactacaaatctacaagtgtggactttgctgttaatacagaaggcgtgtactctgaaccccgccccattggcacccgttacctcacccgtaatctgtaa

SEQ ID NO: 1529 - DNA, 2217 bp, Artificial Sequence
  Synthetic Polynucleotide
atggctgccgatggttatcttccagattggctcgaggacaacctctctgagggcattcgcgagtggtgggcgctgaaacctggagccccgaagcccaaagccaaccagcaaaagcaggacgacggccggggtctggtgcttcctggctacaagtacctcggacccttcaacggactcgacaagggggagcccgtcaacgcggcggacgcggcggccctcgagcacgacaaggcctacgaccagcagctgcaggcgggtgacaatccgtacctgcggtataaccacgccgacgccgagtttcaggagcgtctgcaagaagatacgtcttttgggggcaacctcgggcgagcagtcttccaggccaagaagcgggttctcgaacctctcggtctggttgaggaaggcgctaagacggctcctggaaagaagagaccggtagagccatcaccccagcgttctccagactcctctacgggcatcggcaagaagggccaacagcccgccagaaaaagactcaattttggtcagactggcgactcagagtcagttccagaccctcaacctctcggagaacctccagcagcgccctctggtgtgggacctaatacaatggctgcaggcggtggcgcaccaatggcagacaataacgaaggcgccgacggagtgggtagttcctcgggaaattggcattgcgattccacatggctgggcgacagagtcatcaccaccagcacccgaacctgggccctgcccacctacaacaaccacctctacaagcaaatctccaacgggacatcgggaggagccaccaacgacaacacctacttcggctacagcaccccctgggggtattttgactttaacagattccactgccacttttcaccacgtgactggcagcgactcatcaacaacaactggggattccggcccaagagactcagcttcaagctcttcaacatccaggtcaaggaggtcacgcagaatgaaggcaccaagaccatcgccaataacctcaccagcaccatccaggtgtttacggactcggagtaccagctgccgtacgttctcggctctgcccaccagggctgcctgcctccgttcccggcggacgtgttcacgattccccagtacggctacctaacactcaacaacggtagtcaggccgtgggacgctcctccttctactgcctggaatactttccttcgcagatgctgagaaccggcaacaacttccagtttacttacaccttcgaggacgtgcctttccacagcagctacgcccacagccagagcttggaccggctgatgaatcctctgattgaccagtacctgtactacttgtctcggattcaaacaacaggaggcacggcaaatacgcagactctgggcttcagccaaggtgggcctaatacaatggccaatcaggcaaagaactggctgccaggaccctgttaccgccaacaacgcgtctcaacgacaaccgggcaaaacaacaatagcaactttgcctggactgctgggaccaaataccatctgaatggaagaaattcattggctaatcctggcatcgctatggcaacacacaaagacgacgaggagcgtttttttcccagtaacgggatcctgatttttggcaaacaaaatgctaccagagacaatgcggattacagcgatgtcatgcccaccagcgaggaagaaatcaaaaccactaaccctgtggccacagaggaatacggtatcgtggcagataacttgcagcagcaaaacacggctcctcaaattggaactgtcaacagccagggggccttacccggtatggtctggcagaaccgggacgtgtacctgcagggtcccatctgggccaagattcctcacacggacggcaacttccacccgtctccgctgatgggcggctttggcctgaaacatcctccgcctcagatcctgatcaagaacacgcctgtacctgcggatcctccgaccaccttcaaccagtcaaagctgaactctttcatcacgcaatacagcaccggacaggtcagcgtggaaattgaatgggagctgcagaaggaaaacagcaagcgctggaaccccgagatccagtacacctccaactactacaaatctacaagtgtggactttgctgttaatacagaaggcgtgtactctgaaccccgccccattggcacccgttacctcacccgtaatctgtaa

SEQ ID NO: 1530 - DNA, 2217 bp, Artificial Sequence
  Synthetic Polynucleotide
atggctgccgatggttatcttccagattggctcgaggacaacctctctgagggcattcgcgagtggtgggcgctgaaacctggagccccgaagcccaaagccaaccagcaaaagcaggacgacggccggggtctggtgcttcctggctacaagtacctcggacccttcaacggactcgacaagggggagcccgtcaacgcggcggacgcggcggccctcgagcacgacaaggcctacgaccagcagctgcaggcgggtgacaatccgtacctgcggtataaccacgccgacgccgagtttcaggagcgtctgcaagaagatacgtcttttgggggcaacctcgggcgagcagtcttccaggccaagaagcgggttctcgaacctctcggtctggttgaggaaggcgctaagacggctcctggaaagaagagaccggtagagccatcaccccagcgttctccagactcctctacgggcatcggcaagaagggccaacagcccgccagaaaaagactcaattttggtcagactggcgactcagagtcagttccagaccctcaacctctcggagaacctccagcagcgccctctggtgtgggacctaatacaatggctgcaggcggtggcgcaccaatggcagacaataacgaaggcgccgacggagtgggtagttcctcgggaaattggcattgcgattccacatggctgggcgacagagtcatcaccaccagcacccgaacctgggccctgcccacctacaacaaccacctctacaagcaaatctccaacgggacatcgggaggagccaccaacgacaacacctacttcggctacagcaccccctgggggtattttgactttaacagattccactgccacttttcaccacgtgactggcagcgactcatcaacaacaactggggattccggcccaagagactcagcttcaagctcttcaacatccaggtcaaggaggtcacgcagaatgaaggcaccaagaccatcgccaataacctcaccagcaccatccaggtgtttacggactcggagtaccagctgccgtacgttctcggctctgcccaccagggctgcctgcctccgttcccggcggacgtgttcacgattccccagtacggctacctaacactcaacaacggtagtcaggccgtgggacgctcctccttctactgcctggaatactttccttcgcagatgctgagaaccggcaacaacttccagtttacttacaccttcgaggacgtgcctttccacagcagctacgcccacagccagagcttggaccggctgatgaatcctctgattgaccagtacctgtactacttgtctcggattcaaacaacaggaggcacggcaaatacgcagactctgggcttcagccaaggtgggcctaatacaatggccaatcaggcaaagaactggctgccaggaccctgttaccgccaacaacgcgtctcaacgacaaccgggcaaaacaacaatagcaactttgcctggactgctgggaccaaataccatctgaatggaagaaattcattggctaatcctggcatcgctatggcaacacacaaagacgacgaggagcgtttttttcccagtaacgggatcctgatttttggcaaacaaaatgctgccagagacaatgcggattacagcgatgtcatgcccaccagcgaggaagaaatcaaaaccactaaccctgtggccacagaggaacacggtatcgtggcagataacttgcagcagcaaaacacggctcctcaaattggaactgtcaacagccagggggccttacccggtatggtctggcagaaccgggacgtgtacctgcagggtcccatctgggccaagattcctcacacggacggcaacttccacccgtctccgctgatgggcggctttggcctgaaacatcctccgcctcagatcctgatcaagaacacgcctgtacctgcggatcctccgaccaccttcaaccagtcaaagctgaactctttcatcacgcaatacagcaccggacaggtcagcgtggaaattgaatgggagctgcagaaggaaaacagcaagcgctggaaccccgagatccagtacacctccaactactacaaatctacaagtgtggactttgctgttaatacagaaggcgtgtactctgaaccccgccccattggcacccgttacctcacccgtaatctgtaa

SEQ ID NO: 1531 - DNA, 2217 bp, Artificial Sequence
  Synthetic Polynucleotide
atggctgccgatggttatcttccagattggctcgaggacaacctctctgagggcattcgcgagtggtgggcgctgaaacctggagccccgaagcccaaagccaaccagcaaaagcaggacgacggccggggtctggtgcttcctggctacaagtacctcggacccttcaacggactcgacaagggggagcccgtcaacgcggcggacgcggcggccctcgagcacgacaaggcctacgaccagcagctgcaggcgggtgacaatccgtacctgcggtataaccacgccgacgccgagtttcaggagcgtctgcaagaagatacgtcttttgggggcaacctcgggcgagcagtcttccaggccaagaagcgggttctcgaacctctcggtctggttgaggaaggcgctaagacggctcctggaaagaagagaccggtagagccatcaccccagcgttctccagactcctctacgggcatcggcaagaagggccaacagcccgccagaaaaagactcaattttggtcagactggcgactcagagtcagttccagaccctcaacctctcggagaacctccagcagcgccctctggtgtgggacctaatacaatggctgcaggcggtggcgcaccaatggcagacaataacgaaggcgccgacggagtgggtagttcctcgggaaattggcattgcgattccacatggctgggcgacagagtcatcaccaccagcacccgaacctgggccctgcccacctacaacaaccacctctacaagcaaatctccaacgggacatcgggaggagccaccaacgacaacacctacttcggctacagcaccccctgggggtattttgactttaacagattccactgccacttttcaccacgtgactggcagcgactcatcaacaacaactggggattccggcccaagagactcagcttcaagctcttcaacatccaggtcaaggaggtcacgcagaatgaaggcaccaagaccatcgccaataacctcaccagcaccatccaggtgtttacggactcggagtaccagctgccgtacgttctcggctctgcccaccagggctgcctgcctccgttcccggcggacgtgttcacgattccccagtacggctacctaacactcaacaacggtagtcaggccgtgggacgctcctccttctactgcctggaatactttccttcgcagatgctgagaaccggcaacaacttccagtttacttacaccttcgaggacgtgcctttccacagcagctacgcccgcagccagagcttggaccggctgatgaatcctctgattgaccagtacctgtactacttgtctcggattcaaacaacaggaggcacggcaaatacgcagactctgggcttcagccaaggtgggcctaatacaatggccaatcaggcaaagaactggctgccaggaccctgttaccgccaacaacgcgtctcaacgacaaccgggcaaaacaacaatagcaactttgcctggactgctgggaccaaataccatctgaatggaagaaattcattggctaatcctggcatcgctatggcaacacacaaagacgacgaggagcgtttttttcccagtaacgggatcctgatttttggcaaacaaaatgctgccagagacaatgcggattacagcgatgtcatgcccaccagcgaggaagaaatcaaaaccactaaccctgtggccacagaggaatacggtatcgtggcagataacttgcagcagcaaaacacggctcctcaaattggaactgtcaacagccagggggccttacccggtatggtctggcagaaccgggacgtgtacctgcagggtcccatctgggccaagattcctcacacggacggcaacttccacccgtctccgctgatgggcggctttggcctgaaacatcctccgcctcagatcctgatcaagaacacgcctgtacctgcggatcctccgaccaccttcaaccagtcaaagctgaactctttcatcacgcaatacagcaccggacaggtcagcgtggaaattgaatgggagctgcagaaggaaaacagcaagcgctggaaccccgagatccagtacacctccaactactacaaatctacaagtgtggactttgctgttaatacagaaggcgtgtactctgaaccccgccccattggcacccgttacctcacccgtaatctgtaa

SEQ ID NO: 1532 - DNA, 2217 bp, Artificial Sequence
  Synthetic Polynucleotide
atggctgccgatggttatcttccagattggctcgaggacaacctctctgagggcattcgcgagtggtgggcgctgaaacctggagccccgaagcccaaagccaaccagcaaaagcaggacgacggccggggtctggtgcttcctggctacaagtacctcggacccttcaacggactcgacaagggggagcccgtcaacgcggcggacgcggcggccctcgagcacgacaaggcctacgaccagcagctgcaggcgggtgacaatccgtacctgcggtataaccacgccgacgccgagtttcaggagcgtctgcaagaagatacgtcttttgggggcaacctcgggcgagcagtcttccaggccaagaagcgggttctcgaacctctcggtctggttgaggaaggcgctaagacggctcctggaaagaagagaccggtagagccatcaccccagcgttctccagactcctctacgggcatcggcaagaagggccaacagcccgccagaaaaagactcaattttggtcagactggcgactcagagtcagttccagaccctcaacctctcggagaacctccagcagcgccctctggtgtgggacctaatacaatggctgcaggcggtggcgcaccaatggcagacaataacgaaggcgccgacggagtgggtagttcctcgggaaattggcattgcgattccacatggctgggcgacagagtcatcaccaccagcacccgaacctgggccctgcccacctacaacaaccacctctacaagcaaatctccaacgggacatcgggaggagccaccaacgacaacacctacttcggctacagcaccccctgggggtattttgactttaacagattccactgccacttttcaccacgtgactggcagcgactcatcaacaacaactggggattccggcccaagagactcagcttcaagctcttcaacatccaggtcaaggaggtcacgcagaatgaaggcaccaagaccatcgccaataacctcaccagcaccatccaggtgtttacggactcggagtaccagctgccgtacgttctcggctctgcccaccagggctgcctgcctccgctcccggcggacgtgttcacgattccccagtacggctacctaacactcaacaacggtagtcaggccgtgggacgctcctccttctactgcctggaatactttccttcgcagatgctgagaaccggcaacaacttccagtttacttacaccttcgaggacgtgcctttccacagcagctacgcccacagccagagcttggaccggctgatgaatcctctgattgaccagtacctgtactacttgtctcggattcaaacaacaggaggcacggcaaatacgcagactctgggcttcagccaaggtgggcctaatacaatggccaatcaggcaaagaactggctgccaggaccctgttaccgccaacaacgcgtctcaacgacaaccgggcaaaacaacaatagcaactttgcctggactgctgggaccaaataccatctgaatggaagaaattcattggctaatcctggcatcgctatggcaacacacaaagacgacgaggagcgtttttttcccagtaacgggatcctgatttttggcaaacaaaatgctgccagagacaatgcggattacagcgatgtcatgcccaccagcgaggaagaaatcaaaaccactaaccctgtggccacagaggaatacggtatcgtggcagataacttgcagcagcaaaacacggctcctcaaattggaactgtcaacagccagggggccttacccggtatggtctggcagaaccgggacgtgtacctgcagggtcccatctgggccaagattcctcacacggacggcaacttccacccgtctccgctgatgggcggctttggcctgaaacatcctccgcctcagatcctgatcaagaacacgcctgtacctgcggatcctccgaccaccttcaaccagtcaaagctgaactctttcatcacgcaatacagcaccggacaggtcagcgtggaaattgaatgggagctgcagaaggaaaacagcaagcgctggaaccccgagatccagtacacctccaactactacaaatctacaagtgtggactttgctgttaatacagaaggcgtgtactctgaaccccgccccattggcacccgttacctcacccgtaatctgtaa

SEQ ID NO: 1533 - DNA, 2217 bp, Artificial Sequence
  Synthetic Polynucleotide
atggctgccgatggttatcttccagattggctcgaggacaacctctctgagggcattcgcgagtggtgggcgctgaaacctggagccccgaagcccaaagccaaccagcaaaagcaggacgacggccggggtctggtgcttcctggctacaagtacctcggacccttcaacggactcgacaagggggagcccgtcaacgcggcggacgcggcggccctcgagcacgacaaggcctacgaccagcagctgcaggcgggtgacaatccgtacctgcggtataaccacgccgacgccgagtttcaggagcgtctgcaagaagatacgtcttttgggggcaacctcgggcgagcagtcttccaggccaagaagcgggttctcgaacctctcggtctggttgaggaaggcgctaagacggctcctggaaagaagagaccggtagagccatcaccccagcgttctccagactcctctacgggcatcggcaagaagggccaacagcccgccagaaaaagactcaattttggtcagactggcgactcagagtcagttccagaccctcaacctctcggagaacctccagcagcgccctctggtgtgggacctaatacaatggctgcaggcggtggcgcaccaatggcagacaataacgaaggcgccgacggagtgggtagttcctcgggaaattggcattgcgattccacatggctgggcgacagagtcatcaccaccagcacccgaacccgggccctgcccacctacaacaaccacctctacaagcaaatctccaacgggacatcgggaggagccaccaacgacaacacctacttcggctacagcaccccctgggggtattttgactttaacagattccactgccacttttcaccacgtgactggcagcgactcatcaacaacaactggggattccggcccaagagactcagcttcaagctcttcaacatccaggtcaaggaggtcacgcagaatgaaggcaccaagaccatcgccaataacctcaccagcaccatccaggtgtttacggactcggagtaccagctgccgtacgttctcggctctgcccaccagggctgcctgcctccgttcccggcggacgtgttcacgattccccagtacggctacctaacactcaacaacggtagtcaggccgtgggacgctcctccttctactgcctggaatactttccttcgcagatgctgagaaccggcaacaacttccagtttacttacaccttcgaggacgtgcctttccacagcagctacgcccacagccagagcttggaccggctgatgaatcctctgattgaccagtacctgtactacttgtctcggattcaaacaacaggaggcacggcaaatacgcagactctgggcttcagccaaggtgggcctaatacaatggccaatcaggcaaagaactggctgccaggaccctgttaccgccaacaacgcgtctcaacgacaaccgggcaaaacaacaatagcaactttgcctggactgctgggaccaaataccatctgaatggaagaaattcattggctaatcctggcatcgctatggcaacacacaaagacgacgaggagcgtttttttcccagtaacgggatcctgatttttggcaaacaaaatgctgccagagacaatgcggattacagcgatgtcatgcccaccagcgaggaagaaatcaaaaccactaaccctgtggccacagaggaatacggtatcgtggcagataacttgcagcagcaaaacacggctcctcaaattggaactgtcaacagccagggggccttacccggtatggtctggcagaaccgggacgtgtacctgcagggtcccatctgggccaagattcctcacacggacggcaacttccacccgtctccgctgatgggcggctttggcctgaaacatcctccgcctcagatcctgatcaagaacacgcctgtacctgcggatcctccgaccaccttcaaccagtcaaagctgaactctttcatcacgcaatacagcaccggacaggtcagcgtggaaattgaatgggagctgcagaaggaaaacagcaagcgctggaaccccgagatccagtacacctccaactactacaaatctacaagtgtggactttgctgttaatacagaaggcgtgtactctgaaccccgccccattggcacccgttacctcacccgtaatctgtaa

SEQ ID NO: 1534 - DNA, 2217 bp, Artificial Sequence
  Synthetic Polynucleotide
atggctgccgatggttatcttccagattggctcgaggacaacctctctgagggcattcgcgagtggtgggcgctgaaacctggagccccgaagcccaaagccaaccagcaaaagcaggacgacggccggggtctggtgcttcctggctacaagtacctcggacccttcaacggactcgacaagggggagcccgtcaacgcggcggacgcggcggccctcgagcacgacaaggcctacgaccagcagctgcaggcgggtgacaatccgtacctgcggtataaccacgccgacgccgagtttcaggagcgtctgcaagaagatacgtcttttgggggcaacctcgggcgagcagtcttccaggccaagaagcgggttctcgaacctctcggtctggttgaggaaggcgctaagacggctcctggaaagaagagaccggtagagccatcaccccagcgttctccagactcctctacgggcatcggcaagaagggccaacagcccgccagaaaaagactcaattttggtcagactggcgactcagagtcagttccagaccctcaacctctcggagaacctccagcagcgccctctggtgtgggacctaatacaatggctgcaggcggtggcgcaccaatggcagacaataacgaaggcgccgacggagtgggtagttcctcgggaaattggcattgcgattccacatggctgggcgacagagtcatcaccaccagcacccgaacctgggccctgcccacctacaacaaccacctctacaagcaaatctccaacgggacatcgggaggagccaccaacgacaacacctacttcggctacagcaccccctgggggtattttgactttaacagattccactgccacttttcaccacgtgactggcagcgactcatcaacaacaactggggattccggcccaagagactcagcttcaagctcttcaacatccaggtcaaggaggtcacgcagaatgaaggcaccaagaccatcgccaataacctcaccagcaccatccaggtgtttacggactcggagtaccagctgccgtacgttctcggctctgcccaccagggctgcctgcctccgttcccggcggacgtgttcacgattccccagtacggctacctaacactcaacaacggtagtcaggccgtgggacgctcctccttctactgcctggaatactttccttcgcagatgctgagaaccggcaacaacttccagtttacttacaccttcgaggacgtgcctttccacagcagctacgcccacagccagagcttggaccggctgatgaatcctctgattgaccagtacctgtactacttgtctcggattcaaacaacaggaggcacggcaaatacgcagactctgggcttcagccaaggtgggcctaatacaatggccaatcaggcaaagaactggctgccaggaccctgttaccgccaacaacgcgtctcaacgacaaccgggcaaaacaacaatagcaactttgcctggactgctgggaccaaataccatctgaatggaagaaattcattggctaatcctggcatcgctatgacaacacacaaagacgacgaggagcgtttttttcccagtaacgggatcctgatttttggcaaacaaaatgctgccagagacaatgcggattacagcgatgtcatgcccaccagcgaggaagaaatcaaaaccactaaccctgtggccacagaggaatacggtatcgtggcagataacttgcagcagcaaaacacggctcctcaaattggaactgtcaacagccagggggccttacccggtatggtctggcagaaccgggacgtgtacctgcagggtcccatctgggccaagattcctcacacggacggcaacttccacccgtctccgctgatgggcggctttggcctgaaacatcctccgcctcagatcctgatcaagaacacgcctgtacctgcggatcctccgaccaccttcaaccagtcaaagctgaactctttcatcacgcaatacagcaccggacaggtcagcgtggaaattgaatgggagctgcagaaggaaaacagcaagcgctggaaccccgagatccagtacacctccaactactacaaatctacaagtgtggactttgctgttaatacagaaggcgtgtactctgaaccccgccccattggcacccgttacctcacccgtaatctgtaa

SEQ ID NO: 1535 - DNA, 2217 bp, Artificial Sequence
  Synthetic Polynucleotide
atggctgccgatggttatcttccagattggctcgaggacaacctctctgagggcattcgcgagtggtgggcgctgaaacctggagccccgaagcccaaagccaaccagcaaaagcaggacgacggccggggtctggtgcttcctggctacaagtacctcggacccttcaacggactcgacaagggggagcccgtcaacgcggcggacgcggcggccctcgagcacgacaaggcctacgaccagcagctgcaggcgggtgacaatccgtacctgcggtataaccacgccgacgccgagtttcaggagcgtctgcaagaagatacgtcttttgggggcaacctcgggcgagcagtcttccaggccaagaagcgggttctcgaacctctcggtctggttgaggaaggcgctaagacggctcctggaaagaagagaccggtagagccatcaccccagcgttctccagactcctctacgggcatcggcaagaagggccaacagcccgccagaaaaagactcaattttggtcagactggcgactcagagtcagttccagaccctcaacctctcggagaacctccagcagcgccctctggtgtgggacctaatacaatggctgcaggcggtggcgcaccaatggcagacaataacgaaggcgccgacggagtgggtagttcctcgggaaattggcattgcgattccacatggctgggcgacagagtcatcaccaccagcacccgaacctgggccctgcccacctacaacaaccacctctacaagcaaatctccaacgggacatcgggaggagccaccaacgacaacacctacttcggctacagcaccccctgggggtattttgactttaacagattccactgccacttttcaccacgtgactggcagcgactcatcaacaacaactggggattccggcccaagagactcagcttcaagctcttcaacatccaggtcaaggaggtcacgcagaatgaaggcaccaagaccatcgccaataacctcaccagcaccatccaggtgtttacggactcggagtaccagctgccgtacgttctcggctctgcccaccagggctgcctgcctccgttcccggcggacgtgttcacgattccccagtacggctacctaacactcaacaacggtagtcaggccgtgggacgctcctccttctactgcctggaatactttccttcgcagatgctgagaaccggcaacaacttccagtttacttacaccttcgaggacgtgcctttccacagcagctacgcccacagccagagcttggaccggctgatgaatcctctgattgaccagtacctgtactacttgtctcggattcaaacaacaggaggcacggcaaatacgcagactctgggcttcagccaaggtgggcctaatacaatggccaatcaggcaaagaactggctgccaggaccctgttaccgccaacaacgcgtctcaacgacaaccgggcaaaacaacaatagcaactttgcctggactgctgggaccaaataccatctgaatggaagaaattcattggctaatcctggcatcgctatggcaacacacaaagacgacgaggagcgtttttttcccagtaacgggatcctgatttttggcaaacaaaatgctgccagagacaatgcggattacagcgatgtcatgcccaccagcgaggaagaaatcaaaaccactaaccctgtggccacagaggaatacggtatcgtggcagataacttgcagcagcaaaacacggctcctcaaattggaactgtcaacagccagggggtcttacccggtatggtctggcagaaccgggacgtgtacctgcagggtcccatctgggccaagattcctcacacggacggcaacttccacccgtctccgctgatgggcggctttggcctgaaacatcctccgcctcagatcctgatcaagaacacgcctgtacctgcggatcctccgaccaccttcaaccagtcaaagctgaactctttcatcacgcaatacagcaccggacaggtcagcgtggaaattgaatgggagctgcagaaggaaaacagcaagcgctggaaccccgagatccagtacacctccaactactacaaatctacaagtgtggactttgctgttaatacagaaggcgtgtactctgaaccccgccccattggcacccgttacctcacccgtaatctgtaa

SEQ ID NO: 1536 - DNA, 2217 bp, Artificial Sequence
  Synthetic Polynucleotide
atggctgccgatggttatcttccagattggctcgaggacaacctctctgagggcattcgcgagtggtgggcgctgaaacctggagccccgaagcccaaagccaaccagcaaaagcaggacgacggccggggtctggtgcttcctggctacaagtacctcggacccttcaacggactcgacaagggggagcccgtcaacgcggcggacgcggcggccctcgagcacgacaaggcctacgaccagcagctgcaggcgggtgacaatccgtacctgcggtataaccacgccgacgccgagtttcaggagcgtctgcaagaagatacgtcttttgggggcaacctcgggcgagcagtcttccaggccaagaagcgggttctcgaacctctcggtctggttgaggaaggcgctaagacggctcctggaaagaagagaccggtagagccatcaccccagcgttctccagactcctctacgggcatcggcaagaagggccaacagcccgccagaaaaagactcaattttggtcagactggcgactcagagtcagttccagaccctcaacctctcggagaacctccagcagcgccctctggtgtgggacctaatacaatggctgcaggcggtggcgcaccaatggcagacaataacgaaggcgccgacggagtgggtagttcctcgggaaattggcattgcgattccacatggctgggcgacagagtcatcaccaccagcacccgaacctgggccctgcccacctacaacaaccacctctacaagcaaatctccaacgggacatcgggaggagccaccaacgacaacacctacttcggctacagcaccccctgggggtattttgactttaacagattccactgccacttttcaccacgtgactggcagcgactcgtcaacaacaactggggattccggcccaagagactcagcttcaagctcttcaacatccaggtcaaggaggtcacgcagaatgaaggcaccaagaccatcgccaataacctcaccagcaccatccaggtgtttacggactcggagtaccagctgccgtacgttctcggctctgcccaccagggctgcctgcctccgttcccggcggacgtgttcacgattccccagtacggctacctaacactcaacaacggtagtcaggccgtgggacgctcctccttctactgcctggaatactttccttcgcagatgctgagaaccggcaacaacttccagtttacttacaccttcgaggacgtgcctttccacagcagctacgcccacagccagagcttggaccggctgatgaatcctctgattgaccagtacctgtactacttgtctcggattcaaacaacaggaggcacggcaaatacgcagactctgggcttcagccaaggtgggcctaatacaatggccaatcaggcaaagaactggctgccaggaccctgttaccgccaacaacgcgtctcaacgacaaccgggcaaaacaacaatagcaactttgcctggactgctgggaccaaataccatctgaatggaagaaattcattggctaatcctggcatcgctatggcaacacacaaagacgacgaggagcgtttttttcccagtaacgggatcctgatttttggcaaacaaaatgctgccagagacaatgcggattacagcgatgtcatgcccaccagcgaggaagaaatcaaaaccactaaccctgtggccacagaggaatacggtatcgtggcrgataacttgcagcagcaaaacacggctcctcaaattggaactgtcaacagccagggggccttacccggtatggtctggcagaaccgggacgtgtacctgcagggtcccatctgggccaagattcctcacacggacggcaacttccacccgtctccgctgatgggcggctttggcctgaaacatcctccgcctcagatcctgatcaagaacacgcctgtacctgcggatcctccgaccaccttcaaccagtcaaagctgaactctttcatcacgcaatacagcaccggacaggtcagcgtggaaattgaatgggagctgcagaaggaaaacagcaagcgctggaaccccgagatccagtacacctccaactactacaaatctacaagtgtggactttgctgttaatacagaaggcgtgtactctgaaccccgccccattggcacccgttacctcacccgtaatctgtaa

SEQ ID NO: 1537 - DNA, 2217 bp, Artificial Sequence
  Synthetic Polynucleotide
atggctgccgatggttatcttccagattggctcgaggacaacctctctgagggcattcgcgagtggtgggcgctgaaacctggagccccgaagcccaaagccaaccagcaaaagcaggacgacggccggggtctggtgcttcctggctacaagtacctcggacccttcaacggactcgacaagggggagcccgtcaacgcggcggacgcggcggccctcgagcacgacaaggcctacgaccagcagctgcaggcgggtgacaatccgtacctgcggtataaccacgccgacgccgagtttcgggagcgtctgcaagaagatacgtcttttgggggcaacctcgggcgagcagtcttccaggccaagaagcgggttctcgaacctctcggtctggttgaggaaggcgctaagacggctcctggaaagaagagaccggtagagccatcaccccagcgttctccagactcctctacgggcatcggcaagaagggccaacagcccgccagaaaaagactcaattttggtcagactggcgactcagagtcagttccagaccctcaacctctcggagaacctccagcagcgccctctggtgtgggacctaatacaatggctgcaggcggtggcgcaccaatggcagacaataacgaaggcgccgacggagtgggtagttcctcgggaaattggcattgcgattccacatggctgggcgacagagtcatcaccaccagcacccgaacctgggccctgcccacctacaacaaccacctctacaagcaaatctccaacgggacatcgggaggagccaccaacgacaacacctacttcggctacagcaccccctgggggtattttgactttaacagattccactgccacttttcaccacgtgactggcagcgactcatcaacaacaactggggattccggcccaagagactcagcttcaagctcttcaacatccaggtcaaggaggtcacgcagaatgaaggcaccaagaccatcgccaataacctcaccagcaccatccaggtgtttacggactcggagtaccagctgccgtacgttctcggctctgcccaccagggctgcctgcctccgttcccggcggacgtgttcacgattccccagtacggctacctaacactcaacaacggtagtcaggccgtgggacgctcctccttctactgcctggaatactttccttcgcagatgctgagaaccggcaacaacttccagtttacttacaccttcgaggacgtgcctttccacagcagctacgcccacagccagagcttggaccggctgatgaatcctctgattgaccagtacctgtactacttgtctcggattcaaacaacaggaggcacggcaaatacgcagactctgggcttcagccaaggtgggcctaatacaatggccaatcaggcaaagaactggctgccaggaccctgttaccgccaacaacgcgtctcaacgacaaccgggcaaaacaacaatagcaactttgcctggactgctgggaccaaataccatctgaatggaagaaattcattggctaatcctggcatcgctatggcaacacacaaagacgacgaggagcgtttttttcccagtaacgggatcctgatttttggcaaacaaaatgctgccagagacaatgcggattacagcgatgtcatgcccaccagcgaggaagaaatcaaaaccactaaccctgtggccacagaggaatacggtatcgtggcagataacttgcagcagcaaaacacggctcctcaaattggaactgtcaacagccagggggccttacccggtatggtctggcagaaccgggacgtgtacctgcagggtcccatctgggccaagattcctcacacggacggcaacttccacccgtctccgctgatgggcggctttggcctgaaacatcctccgcctcagatcctgatcaagaacacgcctgtacctgcggatcctccgaccaccttcaaccagtcaaagctgaactctttcatcacgcaatacagcaccggacaggtcagcgtggaaattgaatgggagctgcagaaggaaaacagcaagcgctggaaccccgagatccagtacacctccaactactacaaatctacaagtgtggactttgctgttaatacagaaggcgtgtactctgaaccccgccccattggcacccgttacctcacccgtaatctgtaa

SEQ ID NO: 1538 - DNA, 2217 bp, Artificial Sequence
  Synthetic Polynucleotide
atggctgccgatggttatcttccagattggctcgaggacaacctctctgagggcattcgcgagtggtgggcgctgaaacctggagccccgaagcccaaagccaaccagcaaaagcaggacgacggccggggtctggtgcttcctggctacaagtacctcggacccttcaacggactcgacaagggggagcccgtcaacgcggcggacgcggcggccctcgagcacgacaaggcctacgaccagcagctgcaggcgggtgacaatccgtacctgcggtataaccacgccgacgccgagtttcaggagcgtctgcaagaagatacgtcttttgggggcaacctcgggcgagcagtcttccaggccaagaagcgggttctcgaacctctcggtctggttgaggaaggcgctaagacggctcctggaaagaagagaccggtagagccatcaccccagcgttctccagactcctctacgggcatcggcaagaagggccaacagcccgccagaaaaagactcaattttggtcagactggcgactcagagtcagttccagaccctcaacctctcggagaacctccagcagcgccctctggtgtgggacctaatacaatggctgcaggcggtggcgcaccaatggcagacaataacgaaggcgccgacggagtgggtagttcctcgggaaattggcattgcgattccacatggctgggcgacagagtcatcaccaccagcacccgaacctgggccctgcccacctacaacaaccacctctacaagcaaatctccaacgggacatcgggaggagccaccaacgacaacacctacttcggctacagcaccccctgggggtattttgactttaacagattccactgccacttttcaccacgtgactggcagcgactcatcaacaacaactggggattccggcccaagagactcagcttcaagctcttcaacatccaggtcaaggaggtcacgcagaatgaaggcaccaagaccatcgccaataacctcaccagcaccatccaggtgtttacggactcggagtaccagctgccgtacgttctcggctctgcccaccagggctgcctgcctccgttcccggcggacgtgttcacgattccccagtacggctacccaacactcaacaacggtagtcaggccgtgggacgctcctccttctactgcctggaatactttccttcgcagatgctgagaaccggcaacaacttccagtttacttacaccttcgaggacgtgcctttccacagcagctacgcccacagccagagcttggaccggctgatgaatcctctgattgaccagtacctgtactacttgtctcggattcaaacaacaggaggcacggcaaatacgcagactctgggcttcagccaaggtgggcctaatacaatggccaatcaggcaaagaactggctgccaggaccctgttaccgccaacaacgcgtctcaacgacaaccgggcaaaacaacaatagcaactttgcctggactgctgggaccaaataccatctgaatggaagaaattcattggctaatcctggcatcgctatggcaacacacaaagacgacgaggagcgtttttttcccagtaacgggatcctgatttttggcaaacaaaatgctgccagagacaatgcggattacagcgatgtcatgcccaccagcgaggaagaaatcaaaaccactaaccctgtggccacagaggaatacggtatcgtggcagataacttgcagcagcaaaacacggctcctcaaattggaactgtcaacagccagggggccttacccggtatggtctggcagaaccgggacgtgtacctgcagggtcccatctgggccaagattcctcacacggacggcaacttccacccgtctccgctgatgggcggctttggcctgaaacatcctccgcctcagatcctgatcaagaacacgcctgtacctgcggatcctccgaccaccttcaaccagtcaaagctgaactctttcatcacgcaatacagcaccggacaggtcagcgtggaaattgaatgggagctgcagaaggaaaacagcaagcgctggaaccccgagatccagtacacctccaactactacaaatctacaagtgtggactttgctgttaatacagaaggcgtgtactctgaaccccgccccattggcacccgttacctcacccgtaatctgtaa

SEQ ID NO: 1539 - DNA, 2217 bp, Artificial Sequence
  Synthetic Polynucleotide
atggctgccgatggttatcttccagattggctcgaggacaacctctctgagggcattcgcgagtggtgggcgctgaaacctggagccccgaagcccaaagccaaccagcaaaagcaggacgacggccggggtctggtgcttcctggctacaagtacctcggacccttcaacggactcgacaagggggagcccgtcaacgcggcggacgcggcggccctcgagcacgacaaggcctacgaccagcagctgcaggcgggtgacaatccgtacctgcggtataaccacgccgacgccgagtttcaggagcgtctgcaagaagatacgtcttttgggggcaacctcgggcgagcagtcttccaggccaagaagcgggttctcgaacctctcggtctggttgaggaaggcgctaagacggctcctggaaagaagagaccggtagagccatcaccccagcgttctccagactcctctacgggcatcggcaagaagggccaacagcccgccagaaaaagactcaattttggtcagactggcgactcagagtcagttccagaccctcaacctctcggagaacctccagcagcgccctctggtgtgggacctaatacaatgactgcaggcggtggcgcaccaatggcagacaataacgaaggcgccgacggagtgggtagttcctcgggaaattggcattgcgattccacatggctgggcgacagagtcatcaccaccagcacccgaacctgggccctgcccacctacaacaaccacctctacaagcaaatctccaacgggacatcgggaggagccaccaacgacaacacctacttcggctacagcaccccctgggggtattttgactttaacagattccactgccacttttcaccacgtgactggcagcgactcatcaacaacaactggggattccggcccaagagactcagcttcaagctcttcaacatccaggtcaaggaggtcacgcagaatgaaggcaccaagaccatcgccaataacctcaccagcaccatccaggtgtttacggactcggagtaccagctgccgtacgttctcggctctgcccaccagggctgcctgcctccgttcccggcggacgtgttcacgattccccagtacggctacctaacactcaacaacggtagtcaggccgtgggacgctcctccttctactgcctggaatactttccttcgcagatgctgagaaccggcaacaacttccagtttacttacaccttcgaggacgtgcctttccacagcagctacgcccacagccagagcttggaccggctgatgaatcctctgattgaccagtacctgtactacttgtctcggattcaaacaacaggaggcacggcaaatacgcagactctgggcttcagccaaggtgggcctaatacaatggccaatcaggcaaagaactggctgccaggaccctgttaccgccaacaacgcgtctcaacgacaaccgggcaaaacaacaatagcaactttgcctggactgctgggaccaaataccatctgaatggaagaaattcattggctaatcctggcatcgctatggcaacacacaaagacgacgaggagcgtttttttcccagtaacgggatcctgatttttggcaaacaaaatgctgccagagacaatgcggattacagcgatgtcatgcccaccagcgaggaagaaatcaaaaccactaaccctgtggccacagaggaatacggtatcgtggcagataacttgcagcagcaaaacacggctcctcaaattggaactgtcaacagccagggggccttacccggtatggtctggcagaaccgggacgtgtacctgcagggtcccatctgggccaagattcctcacacggacggcaacttccacccgtctccgctgatgggcggctttggcctgaaacatcctccgcctcagatcctgatcaagaacacgcctgtacctgcggatcctccgaccaccttcaaccagtcaaagctgaactctttcatcacgcaatacagcaccggacaggtcagcgtggaaattgaatgggagctgcagaaggaaaacagcaagcgctggaaccccgagatccagtacacctccaactactacaaatctacaagtgtggactttgctgttaatacagaaggcgtgtactctgaaccccgccccattggcacccgttacctcacccgtaatctgtaa

SEQ ID NO: 1540 - DNA, 2217 bp, Artificial Sequence
  Synthetic Polynucleotide
atggctgccgatggttatcttccagattggctcgaggacaacctctctgagggcattcgcgagtggtgggcgctgaaacctggagccccgaagcccaaagccaaccagcaaaagcaggacgacggccggggtctggtgcttcctggctacaagtacctcggacccttcaacggactcgacaagggggagcccgtcaacgcggcggacgcggcggccctcgagcacgacaaggcctacgaccagcagctgcaggcgggtgacaatccgtacctgcggtataaccacgccgacgccgagtttcaggagcgtctgcaagaagatacgtcttttgggggcaacctcgggcgagcagtcttccaggccaagaagcgggttctcgaacctctcggtctggttgaggaaggcgctaagacggctcctggaaagaagagaccggtagagccatcaccccagcgttctccagactcctctacgggcatcggcaagaagggccaacagcccgccagaaaaagactcaattttggtcagactggcgactcagagtcagttccagaccctcaacctctcggagaacctccagcagcgccctctggtgtgggacctaatacaatggctgcaggcggtggcgcaccaatggcagacaataacgaaggcgccgacggagtgggtagttcctcgggaaattggcattgcgattccacatggctgggcgacagagtcatcaccaccagcacccgaacctgggccctgcccacctacaacaaccacctctacaagcaaatctccaacgggacatcgggaggagccaccaacgacaacacctacttcggctacagcaccccctgggggtattttgactttaacagattccactgccacttttcaccacgtgactggcagcgactcatcaacaacaactggggattccggcccaagagactcagcttcaagctcttcaacatccaggtcaaggaggtcacgcagaatgaaggcaccaagaccatcgccaataacctcaccagcaccatccaggtgtttacggactcggagtaccagctgccgtacgttctcggctctgcccaccagggctgcctgcctccgttcccggcggacgtgttcacgattccccagtacggctacctaacactcaacaacggtagtcaggccgtgggacgctcctccttctactgcctggaatactttccttcgcagatgctgagaaccggcaacaacttccagtttacttacaccttcgaggacgtgcctttccacagcagctacgcccacagccagagcttggaccggctgatgaatcctctgattgaccagtacctgtactacttgtctcggattcaaacaacaggaggcacggcaaatacgcagactctgggcttcagccaaggtgggcctaatacaatggccaatcaggcaaagaactggctgccaggaccctgttaccgccaacaacgcgtctcaacgacaaccgggcaaaacaacaatagcaactttgcctggactgctgggaccaaataccatctgaatggaagaaattcattggctaatcctggcatcgctatggcaacacacaaagacgacgaggagcgtttttttcccagtaacgggatcctgatttttggcaaacaaaatgctgccagagacaatgcggattacagcgatgtcatgcccaccagcgaggaagaaatcaaaaccactaaccctgtggccacagaggaatacggtatcgtgacagataacttgcagcagcaaaacacggctcctcaaattggaactgtcaacagccagggggccttacccggtatggtctggcagaaccgggacgtgtacctgcagggtcccatctgggccaagattcctcacacggacggcaacttccacccgtctccgctgatgggcggctttggcctgaaacatcctccgcctcagatcctgatcaagaacacgcctgtacctgcggatcctccgaccaccttcaaccagtcaaagctgaactctttcatcacgcaatacagcaccggacaggtcagcgtggaaattgaatgggagctgcagaaggaaaacagcaagcgctggaaccccgagatccagtacacctccaactactacaaatctacaagtgtggactttgctgttaatacagaaggcgtgtactctgaaccccgccccattggcacccgttacctcacccgtaatctgtaa

SEQ ID NO: 1541 - DNA, 2217 bp, Artificial Sequence
  Synthetic Polynucleotide
atggctgccgatggttatcttccagattggctcgaggacaacctctctgagggcattcgcgagtggtgggcgctgaaacctggagccccgaagcccaaagccaaccagcaaaagcaggacgacggccggggtctggtgcttcctggctacaagtacctcggacccttcaacggactcgacaagggggagcccgtcaacgcggcggacgcggcggccctcgagcacgacaaggcctacgaccagcagctgcaggcgggtgacaatccgtacctgcggtataaccacgccgacgccgagtttcaggagcgtctgcaagaagatacgtcttttgggggcaacctcgggcgagcagtcttccaggccaagaagcgggttctcgaacctctcggtctggttgaggaaggcgctaagacggctcctggaaagaagagaccggtagagccatcaccccagcgttctccagactcctctacgggcatcggcaagaagggccaacagcccgccagaaaaagactcaattttggtcagactggcgactcagagtcagttccagaccctcaacctctcggagaacctccagcagcgccctctggtgtgggacctaatacaatggctgcaggcggtggcgcaccaatggcagacaataacgaaggcgccgacggagtgggtagttcctcgggaaattggcattgcgattccacatggctgggcgacagagtcatcaccaccagcacccgaacctgggccctgcccacctacaacaaccacctctacaagcaaatctccaacgggacatcgggaggagccaccaacgacaacacctacttcggctacagcaccccctgggggtattttgactttaacagattccactgccacttttcaccacgtgactggcagcgactcatcaacaacaactggggattccggcccaagagactcagcttcaagctcttcaacatccaggtcaaggaggtcacgcagaatgaaggcaccaagaccatcgccaataacctcaccagcaccatccaggtgtttacggactcggagtaccagctgccgtacgttctcggctctgcccaccagggctgcctgcctccgttcccggcggacgtgttcacgattccccagtacggctacctaacactcaacaacggtagtcaggccgtgggacgctcctccttctactgcctggaatactttccttcgcagatgctgagaaccggcaacaacttccagtttacttacaccttcgaggacgtgcctttccacagcagctacgcccacagccagagcttggaccggctgatgaatcctctgattgaccagtacctgtactacttgtctcggattcaaacaacaggaggcacggcaaatacgcagactctgggcttcagccaaggtgggcctaatacaatggccaatcaggcaaagaactggctgccaggaccctgttaccgccaacaacgcgtctcaacgacaaccgggcaaaacaacaatagcaactttgcctggactgctgggaccaaataccatctgaatggaagaaattcattggctaatcctggcatcgctatggcaacacacaaagacgacgaggagcgtttttttcccagtaacgggatcctgatttttggcaaacaaaatgctgccagagacaatgcggattacagcgatgtcatgcccaccagcgaggaagaaatcaaaaccactaaccctgtggccacagaggaatacggtatcgtggcagataacttgcagcagcaaaacacggctcctcaaattggaactgtcaacagccagggggccttacccggtatggtctggcagaaccgggacgtgtacctgcagggtcccatctgggccaagattcctcacacggacggcaacttccacccgtctccgctgatgggcggctttggcctgaaacatcctccgcctcagatcctgatcaagaacacgcctgtacctgcggatcctccgaccaccttcaaccagtcaaagctgaactctttcatcacgcaatacagcaccggacaggtcagcgtggaaattgaatgggagctgcagaaggaaaacagcaagcgctggaaccccgagatccagtacacctccaactactacaaatctacaagtgtggactttgctattaatacagaaggcgtgtactctgaaccccgccccattggcacccgttacctcacccgtaatctgtaa

SEQ ID NO: 1542 - DNA, 2217 bp, Artificial Sequence
  Synthetic Polynucleotide
atggctgccgatggttatcttccagattggctcgaggacaacctctctgagggcattcgcgagtggtgggcgctgaaacctggagccccgaagcccaaagccaaccagcaaaagcaggacgacggccggggtctggtgcttcctggctacaagtacctcggacccttcaacggactcgacaagggggagcccgtcaacgcggcggacgcggcggccctcgagcacgacaaggcctacgaccagcagctgcaggcgggtgacaatccgtacctgcggtataaccacgccgacgccgagtttcaggagcgtctgcaagaagatacgtcttttgggggcaacctcgggcgagcagtcttccaggccaagaagcgggttctcgaacctctcggtctggttgaggaaggcgctaagacggctcctggaaagaagagaccggtagagccatcaccccagcgttctccagactcctctacgggcatcggcaagaagggccaacagcccgccagaaaaagactcaattttggtcagactggcgactcagagtcagttccagaccctcaacctctcggagaacctccagcagcgccctctggtgtgggacctaatacaatggctgcaggcggtggcgcaccaatggcagacaataacgaaggcgccgacggagtgggtagttcctcgggaaattggcattgcgattccacatggctgggcgacagagtcatcaccaccagcacccgaacctgggccctgcccacctacaacaaccacctctacaagcaaatctccaacgggacatcgggaggagccaccaacgacaacacctacttcggctacagcaccccctgggggtattttgactttaacagattccactgccacttttcaccacgtgactggcagcgactcatcaacaacaactggggattccggcccaagagactcagcttcaagctcttcaacatccaggtcaaggaggtcacgcagaatgaaggcaccaagaccatcgccaataacctcaccagcaccatccaggtgtttacggactcggagtaccagctgccgtacgttctcggctctgcccaccagggctgcctgcctccgttcccggcggacgtgttcacgattccccagtacggctacctaacactcaacaacggtagtcaggccgtgggacgctcctccttctactgcctggaatactttccttcgcagatgctgagaaccggcaacaacttccagtttacttacaccttcgaggacgtgcctttccacagcagctacgcccacagccagagcttggaccggctgatgaatcctctgattgaccagtacctgtactacttgtctcggattcaaacaacaggaggcacggcaaatacgcagactctgggcttcagccaaggtgggcctaatacaatggccaatcaggcaaagaactggctgccaggaccctgttaccgccaacaacgcgtctcaacgacaaccgggcaaaacaacaatagcaactttgcctggactgctgggaccaaataccatctgaatggaagaaattcattggctaatcctggcatcgctatggcaacacacaaagacgacgaggagcgtttttttcccagtaacgggatcctgatttttggcaaacaaaatgctgccagagacaatgcggattacagcgatgtcatgcccaccagcgaggaagaaatcaaaaccactaaccctgtggccacagaggaatacggtatcgtggcagataacttgcagcagcaaaacacggctcctcaaattggaactgtcaacagccagggggccttacccggtatggtctggcagaaccgggacgtgtacctgcagggtcccatctgggccaagattcctcacgcggacggcaacttccacccgtctccgctgatgggcggctttggcctgaaacatcctccgcctcagatcctgatcaagaacacgcctgtacctgcggatcctccgaccaccttcaaccagtcaaagctgaactctttcatcacgcaatacagcaccggacaggtcagcgtggaaattgaatgggagctgcagaaggaaaacagcaagcgctggaaccccgagatccagtacacctccaactactacaaatctacaagtgtggactttgctgttaatacagaaggcgtgtactctgaaccccgccccattggcacccgttacctcacccgtaatctgtaa

SEQ ID NO: 1543 - DNA, 2217 bp, Artificial Sequence
  Synthetic Polynucleotide
atggctgccgatggttatcttccagattggctcgaggacaacctctctgagggcattcgcgagtggtgggcgctgaaacctggagccccgaagcccaaagccaaccagcaaaagcaggacgacggccggggtctggtgcttcctggctacaagtacctcggacccttcaacggactcgacaagggggagcccgtcaacgcggcggacgcggcggccctcgagcacgacaaggcctacgaccagcagctgcaggcgggtgacaatccgtacctgcggtataaccacgccgacgccgagtttcaggagcgtctgcaagaagatacgtcttttgggggcaacctcgggcgagcagtcttccaggccaagaagcgggttctcgaacctctcggtctggttgaggaaggcgctaagacggctcctggaaagaagagaccggtagagccatcaccccagcgttctccagactcctctacgggcatcggcaagaagggccaacagcccgccagaaaaagactcaattttggtcagactggcgactcagagtcagttccagaccctcaacctctcggagaacctccagcagcgccctctggtgtgggacctaatacaatggctgcaggcggtggcgcaccaatggcagacaataacgaaggcgccgacggagtgggtagttcctcgggaaattggcattgcaattccacatggctgggcgacagagtcatcaccaccagcacccgaacctgggccctgcccacctacaacaaccacctctacaagcaaatctccaacgggacatcgggaggagccaccaacgacaacacctacttcggctacagcaccccctgggggtattttgactttaacagattccactgccacttttcaccacgtgactggcagcgactcatcaacaacaactggggattccggcccaagagactcagcttcaagctcttcaacatccaggtcaaggaggtcacgcagaatgaaggcaccaagaccatcgccaataacctcaccagcaccatccaggtgtttacggactcggagtaccagctgccgtacgttctcggctctgcccaccagggctgcctgcctccgttcccggcggacgtgttcacgattccccagtacggctacctaacactcaacaacggtagtcaggccgtgggacgctcctccttctactgcctggaatactttccttcgcagatgctgagaaccggcaacaacttccagtttacttacaccttcgaggacgtgcctttccacagcagctacgcccacagccagagcttggaccggctgatgaatcctctgattgaccagtacctgtactacttgtctcggattcaaacaacaggaggcacggcaaatacgcagactctgggcttcagccaaggtgggcctaatacaatggccaatcaggcaaagaactggctgccaggaccctgttaccgccaacaacgcgtctcaacgacaaccgggcaaaacaacaatagcaactttgcctggactgctgggaccaaataccatctgaatggaagaaattcattggctaatcctggcatcgctatggcaacacacaaagacgacgaggagcgtttttttcccagtaacgggatcctgatttttggcaaacaaaatgctgccagagacaatgcggattacagcgatgtcatgcccaccagcgaggaagaaatcaaaaccactaaccctgtggccacagaggaatacggtatcgtggcagataacttgcagcagcaaaacacggctcctcaaattggaactgtcaacagccagggggccttacccggtatggtctggcagaaccgggacgtgtacctgcagggtcccatctgggccaagattcctcacacggacggcaacttccacccgtctccgctgatgggcggctttggcctgaaacatcctccgcctcagatcctgatcaagaacacgcctgtacctgcggatcctccgaccaccttcaaccagtcaaagctgaactctttcatcacgcaatacagcaccggacaggtcagcgtggaaattgaatgggagctgcagaaggaaaacagcaagcgctggaaccccgagatccagtacacctccaactactacaaatctacaagtgtggactttgctgttaatacagaaggcgtgtactctgaaccccgccccattggcacccgttacctcacccgtaatctgtaa

SEQ ID NO: 1544 - DNA, 2217 bp, Artificial Sequence
  Synthetic Polynucleotide
atggctgccgatggttatcttccagattggctcgaggacaacctctctgagggcattcgcgagtggtgggcgctgaaacctggagccccgaagcccaaagccaaccagcaaaagcaggacgacggccggggtctggtgcttcctggctacaagtacctcggacccttcaacggactcgacaagggggagcccgtcaacgcggcggacgcggcggccctcgagcacgacaaggcctacgaccagcagctgcaggcgggtgacaatccgtacctgcggtataaccacgccgacgccgagtttcaggagcgtctgcaagaagatacgtcttttgggggcaacctcgggcgagcagtcttccaggccaagaagcgggttctcgaacctctcggtctggttgaggaaggcgctaagacggctcctggaaagaagagaccggtagagccatcaccccagcgttctccagactcctctacgggcatcggcaagaagggccaacagcccgccagaaaaagactcaattttggtcagactggcgactcagagtcagttccagaccctcaacctctcggagaacctccagcagcgccctctggtgtgggacctaatacaatggctgcaggcggtggcgcaccaatggcagacaataacgaaggcgccgacggagtgggtagttcctcgggaaattggcattgcgattccacatggctgggcgacagagtcatcaccaccagcacccgaacctgggccctgcccacctacaacaaccacctctacaagcaaatctccaacgggacatcgggaggagccaccaacgacaacacctacttcggctacagcaccccctgggggtattttgactttaacagattccactgccacttttcaccacgtgactggcagcgactcatcaacaacaactggggattccggcccaagagactcagcttcaagctcttcaacatccaggtcaaggaggtcacgcagaatgaaggcaccaagaccatcgccaataacctcaccagcaccatccaggtgtttacggactcggagtaccagctgccgtacgttctcggctctgcccaccagggctgcctgcctccgttcccggcggacgtgttcacgattccccagtacggctacctaacactcaacaacggtagtcaggccgtgggacgctcctccttctactgcctggaatactttccttcgcagatgctgagaaccggcaacaacttccagtttacttacaccttcgaggacgtgcctttccacagcagctacgcccacagccagagcttggaccggctgatgaatcctctgattgaccagtacctgtactacttgtctcggattcaaacaacaggaggcacggcaaatacgcagactctgggcttcagccaaggtgggcctaatacaatggccaatcaggcaaagaactggctgccaggaccctgttaccgccaacaacgcgtctcaacgacaaccgggcaaaacaacaatagcaactttgcctggactgctgggaccaaataccatctgaatggaagaaattcattggctaatcctggcatcgctatggcaacacacaaagacgacgaggagcgtttttttcccagtaacgggatcctgatttttggcaaacaaaatgctgccagagacaatgcggattacagcgatgtcatgcccaccagcgaggaagaaatcaaaaccactaaccctgtggccacagaggaatacggtatcgtggcagataacttgcagcagcaaaacacggctcctcaaattggaactgtcaacagccagggggccttacccggtatggtctggcagaaccgggacgtgtacctgcagggtcccatctgggccaagattcctcacacggacggcaacttccacccgtctccgctgatgggcggctttggcctgaaacatcctccgcctcagatcctgatcaagaacacgcctgtacctgcggatcctccgaccaccttcaaccagtcaaagctgaactctttcatcacgcaatacagcaccggacaggtcagcgtggaaattgaatgggagctgcagaaggaaaacagcaagcgctggaaccccgagatccagtacacctccaactactacaaatctacaagtgtggactttgctgttaatacagaaggcgcgtactctgaaccccgccccattggcacccgttacctcacccgtaatctgtaa

SEQ ID NO: 1545 - DNA, 2217 bp, Artificial Sequence
  Synthetic Polynucleotide
atggctgccgatggttatcttccagattggctcgaggacaacctctctgagggcattcgcgagtggtgggcgctgaaacctggagccccgaagcccaaagccaaccagcaaaagcaggacgacggccggggtctggtgcttcctggctacaagtacctcggacccttcaacggactcgacaagggggagcccgtcaacgcggcggacgcggcggccctcgagcacgacaaggcctacgaccagcagctgcaggcgggtgacaatccgtacctgcggtataaccacgccgacgccgagtttcaggagcgtctgcaagaagatacgtcttttgggggcaacctcgggcgagcagtcttccaggccaagaagcgggttctcgaacctctcggtctggttgaggaaggcgctaagacggctcctggaaagaagagaccggtagagccatcaccccagcgttctccagactcctctacgggcatcggcaagaagggccaacagcccgccagaaaaagactcaattttggtcagactggcgactcagagtcagttccagaccctcaacctctcggagaacctccagcagcgccctctggtgtgggacctaatacaatggctgcaggcggtggcgcaccaatggcagacaataacgaaggcgccgacggagtgggtagttcctcgggaaattggcattgcgattccacatggctgggcgacagagtcatcaccaccagcacccgaacctgggccctgcccacctacaacaaccacctctacaagcaaatctccaacgggacatcgggaggagccaccaacgacaacacctacttcggctacagcaccccctgggggtattttgactttaacagattccactgccacttttcaccacgtgactggcagcgactcatcaacaacaactggggattccggcccaagagactcagcttcaagctcttcaacatccaggtcaaggaggtcacgcagaatgaaggcaccaagaccatcgccaataacctcaccagcaccatccaggtgtttacggactcggagtaccagctgccgtacgttctcggctctgcccaccagggctgcctgcctccgttcccggcggacgtgttcacgattccccagtacggctacctaacactcaacaacggtagtcaggccgtgggacgctcctccttctactgcctggaatactttccttcgcagatgctgagaaccggcaacaacttccagtttacttacaccttcgaggacgtgcctttccacagcagctacgcccacagccagagcttggaccggctgatgaatcctctgattgaccagtacctgtactacttgtctcggattcaaacaacaggaggcacggcaaatacgcagactctgggcttcagccaaggtgggcctaatacaatggccaatcaggcaaagaactggctgccaggaccctgttaccgccaacaacgcgtctcaacgacaaccgggcaaaacaacaatagcaactttgcctggactgctgggaccaaataccatctgaatggaagaaattcattggctaatcctggcatcgctatggcaacacacaaagacgacgaggagcgtttttttcccagtaacgggatcctgatttttggcaaacaaaatgctgccagagacaatgcggattacagcgatgtcatgcccaccagcgaggaagaaatcaaaaccactaaccctgtggccacagaggaatgcggtatcgtggcagataacttgcagcagcaaaacacggctcctcaaattggaactgtcaacagccagggggccttacccggtatggtctggcagaaccgggacgtgtacctgcagggtcccatctgggccaagattcctcacacggacggcaacttccacccgtctccgctgatgggcggctttggcctgaaacatcctccgcctcagatcctgatcaagaacacgcctgtacctgcggatcctccgaccaccttcaaccagtcaaagctgaactctttcatcacgcaatacagcaccggacaggtcagcgtggaaattgaatgggagctgcagaaggaaaacagcaagcgctggaaccccgagatccagtacacctccaactactacaaatctacaagtgtggactttgctgttaatacagaaggcgtgtactctgaaccccgccccattggcacccgttacctcacccgtaatctgtaa

SEQ ID NO: 1546 - DNA, 2217 bp, Artificial Sequence
  Synthetic Polynucleotide
atggctgccgatggttatcttccagattggctcgaggacaacctctctgagggcattcgcgagtggtgggcgctgaaacctggagccccgaagcccaaagccaaccagcaaaagcaggacgacggccggggtctggtgcttcctggctacaagtacctcggacccttcaacggactcgacaagggggagcccgtcaacgcggcggacgcggcggccctcgagcacgacaaggcctacgaccagcagctgcaggcgggtgacaatccgtacctgcggtataaccacgccgacgccgagtttcaggagcgtctgcaagaagatacgtcttttgggggcaacctcgggcgagcagtcttccaggccaagaagcgggttctcgaacctctcggtctggttgaggaaggcgctaagacggctcctggaaagaagagaccggtagagccatcaccccagcgttctccagactcctctacgggcatcggcaagaagggccaacagcccgccagaaaaagactcaattttggtcagactggcgactcagagtcagttccagaccctcaacctctcggagaacctccagcagcgccctctggtgtgggacctaatacaatggctgcaggcggtggcgcaccaatggcagacaataacgaaggcgccgacggagtgggtagttcctcgggaaattggcattgcgattccacatggctgggcgacagagtcatcaccaccagcacccgaacctgggccctgcccacctacaacaaccacctctacaagcaaatctccaacgggacatcgggaggagccaccaacgacaacacctacttcggctacagcaccccctgggggtattttgactttaacagattccactgccacttttcaccacgtgactggcagcgactcatcaacaacaactggggattccggcccaagagactcagcttcaagctcttcaacatccaggtcaaggaggtcacgcagaatgaaggcaccaagaccatcgccaataacctcaccagcaccatccaggtgtttacggactcggagtaccagctgccgtacgttctcggctctgcccaccagggctgcctgcctccgttcccggcggacgtgttcacgattccccagtacggctacctaacactcaacaacggtagtcaggccgtgggacgctcctccttctactgcctggaatactttccttcgcagatgctgagaaccggcaacaacttccagtttacttacaccttcgaggacgtgcctttccacagcagctacgcccacagccagagcttggaccggctgatgaatcctctgattgaccagtacctgtactacttgtctcggattcaaacaacaggaggcacggcaaatacgcagactctgggcttcagccaaggtgggcctaatacaatggccaatcaggcaaagaactggctgccaggaccctgttaccgccaacaacgcgtctcaacgacaaccgggcaaaacaacaatagcaactttgcctggactgctgggaccaaataccatctgaatggaagaaattcattggctaatcctggcatcgctatggcaacacacaaagacgacgaggagcgtttttttcccagtaacgggatcctgatttttggcaaacaaaatgctgccagagacaatgcggattacagcgatgtcatgcccaccagcgaggaagaaatcaaaaccactaaccctgtggccacagaggaatacggtatcgtggcagataacttgcagcagcaaaacacggctcctcaaattggaactgtcaacagccagggggccttacccggtatggtctggcagaaccgggacgtgtacctgcagggtcccatctgggccaagattcctcacacggacggcaacttccacccgtctccgctgatgggcggctttggcctgaaacatcctccgcctcagatcctgatcaagaacacgcctgtacctgcggatcctccgaccaccttcaaccagtcaaagctgaactctttcatcacgcaatacagcaccggacaggtcagcgtggaaattgaatgggagctgcagaaggaaaacagcaagcgctggaaccccgagatccggtacacctccaactactacaaatctacaagtgtggactttgctgttaatacagaaggcgtgtactctgaaccccgccccattggcacccgttacctcacccgtaatctgtaa

SEQ ID NO: 1547 - DNA, 2217 bp, Artificial Sequence
  Synthetic Polynucleotide
atggctgccgatggttatcttccagattggctcgaggacaacctctctgagggcattcgcgagtggtgggcgctgaaacctggagccccgaagcccaaagccaaccagcaaaagcaggacgacggccggggtctggtgcttcctggctacaagtacctcggacccttcaacggactcgacaagggggagcccgtcaacgcggcggacgcggcggccctcgagcacgacaaggcctacgaccagcagctgcaggcgggtgacaatccgtacctgcggtataaccacgccgacgccgagtttcaggagcgtctgcaagaagatacgtcttttgggggcaacctcgggcgagcagtcttccaggccaagaagcgggttctcgaacctctcggtctggttgaggaaggcgctaagacggctcctggaaagaagagaccggtagagccatcaccccagcgttctccagactcctctacgggcatcggcaagaagggccaacagcccgccagaaaaagactcaattttggtcagactggcgactcagagtcagttccagaccctcaacctctcggagaacctccagcagcgccctctggtgtgggacctaatacaatggctgcaggcggtggcgcaccaatggcagacaataacgaaggcgccgacggagtgggtagttcctcgggaaattggcattgcgattccacatggctgggcgacagagtcatcaccaccagcacccgaacctgggccctgcccacctacaacaaccacctctacaagcaaatctccaacgggacatcgggaggagccaccaacgacaacacctacttcggctacagcaccccctgggggtattttgactttaacagattccactgccacttttcaccacgtgactggcagcgactcatcaacaacaactggggattccggcccaagagactcagcttcaagctcttcaacatccaggtcaaggaggtcacgcagaatgaaggcaccaagaccatcgccaataacctcaccagcaccatccaggtgtttacggactcggagtaccagctgccgtacgttctcggctctgcccaccagggctgcctgcctccgttcccggcggacgtgttcacgattccccagtacggctacctaacactcaacaacggtagtcaggccgtgggacgctcctccttctactgcctggaatactttccttcgcagatgctgagaaccggcaacaacttccagtttacttacaccttcgaggacgtgcctttccacagcagctacgcccacagccagagcttggaccggctgatgaatcctctgattgaccagtacctgtactacttgtctcggattcaaacaacaggaggcacggcaaatacgcagactctgggcttcagccaaggtgggcctaatacaatggccaatcaggcaaagaactggctgccaggaccctgttaccgccaacaacgcgtctcaacgacaaccgggcaaaacaacaatagcaactttgcctggactgctgggaccaaataccatctgaatggaagaaattcattggctaatcctggcatcgctatggcaacacacaaagacgacgaggagcgtttttttcccagtaacgggatcctgatttttggcaaacaaaatgctgccagagacaatgcggattgcagcgatgtcatgcccaccagcgaggaagaaatcaaaaccactaaccctgtggccacagaggaatacggtatcgtggcagataacttgcagcagcaaaacacggctcctcaaattggaactgtcaacagccagggggccttacccggtatggtctggcagaaccgggacgtgtacctgcagggtcccatctgggccaagattcctcacacggacggcaacttccacccgtctccgctgatgggcggctttggcctgaaacatcctccgcctcagatcctgatcaagaacacgcctgtacctgcggatcctccgaccaccttcaaccagtcaaagctgaactctttcatcacgcaatacagcaccggacaggtcagcgtggaaattgaatgggagctgcagaaggaaaacagcaagcgctggaaccccgagatccagtacacctccaactactacaaatctacaagtgtggactttgctgttaatacagaaggcgtgtactctgaaccccgccccattggcacccgttacctcacccgtaatctgtaa

SEQ ID NO: 1548 - DNA, 2217 bp, Artificial Sequence
  Synthetic Polynucleotide
atggctgccgatggttatcttccagattggctcgaggacaacctctctgagggcattcgcgagtggtgggcgctgaaacctggagccccgaagcccaaagccaaccagcaaaagcaggacgacggccggggtctggtgcttcctggctacaagtacctcggacccttcaacggactcgacaagggggagcccgtcaacgcggcggacgcggcggccctcgagcacgacaaggcctacgaccagcagctgcaggcgggtgacaatccgtacctgcggtataaccacgccgacgccgagtttcaggagcgtctgcaagaagatacgtcttttgggggcaacctcgggcgagcagtcttccaggccaagaagcgggttctcgaacctctcggtctggttgaggaaggcgctaagacggctcctggaaagaagagaccggtagagccatcaccccagcgttctccagactcctctacgggcatcggcaagaagggccaacagcccgccagaaaaagactcaattttggtcagactggcgactcagagtcagttccagaccctcaacctctcggagaacctccagcagcgccctctggtgtgggacctaatacaatggctgcaggcggtggcgcaccaatggcagacaataacgaaggcgccgacggagtgggtagttcctcgggaaattggcattgcgattccacatggctgggcgacagagtcatcaccaccagcacccgaacctgggccctgcccacctacaacaaccacctctacaagcaaatctccaacgggacatcgggaggagccaccaacgacaacacctacttcggctacagcaccccctgggggtattttgactttaacagattccactgccacttttcaccacgtgactggcagcgactcatcaacaacaactggggattccggcccaagagactcagcttcaagctcttcaacatccaggtcaaggaggtcacgcagaatgaaggcaccaagaccatcgccaataacctcaccagcaccatccaggtgtttacggactcggagtaccagctgccgtacgttctcggctctgcccaccagggctgcctgcctccgttcccggcggacgtgttcacgattccccagtacggctacctaacactcaacaacggtagtcaggccgtgggacgctcctccttctactgcctggaatactttccttcgcagatgctgagaaccggcaacaacttccagtttacttacaccttcgaggacgtgcctttccacagcagctacgcccacagccagagcttggaccggctgatgaatcctctgattgaccagtacctgtactacttgtctcggattcaaacaacaggaggcacggcaaatacgcagactctgggcttcagccaaggtgggcctaatacaatggccaatcaggcaaagaactggctgccaggaccctgttaccgccaacaacgcgtctcaacgacaaccgggcaaaacaacaatagcaactttgcctggactgctgggaccaaataccatctgaatggaagaaattcattggctaatcctggcatcgctatggcaacacacaaagacgacgaggagcgtttttttcccagtaacgggatcctgatttttggcaaacaaaatgctgccagagacaatgcggattacagcgatgtcatgcccaccagcgaggaagaaatcaaaaccactaaccctgtggccacagaggaatacggtatcgcggcagataacttgcagcagcaaaacacggctcctcaaattggaactgtcaacagccagggggccttacccggtatggtctggcagaaccgggacgtgtacctgcagggtcccatctgggccaagattcctcacacggacggcaacttccacccgtctccgctgatgggcggctttggcctgaaacatcctccgcctcagatcctgatcaagaacacgcctgtacctgcggatcctccgaccaccttcaaccagtcaaagctgaactctttcatcacgcaatacagcaccggacaggtcagcgtggaaattgaatgggagctgcagaaggaaaacagcaagcgctggaaccccgagatccagtacacctccaactactacaaatctacaagtgtggactttgctgttaatacagaaggcgtgtactctgaaccccgccccattggcacccgttacctcacccgtaatctgtaa

SEQ ID NO: 1549 - DNA, 2217 bp, Artificial Sequence
  Synthetic Polynucleotide
atggctgccgatggttatcttccagattggctcgaggacaacctctctgagggcattcgcgagtggtgggcgctgaaacctggagccccgaagcccaaagccaaccagcaaaagcaggacgacggccggggtctggtgcttcctggctacaagtacctcggacccttcaacggactcgacaagggggagcccgtcaacgcggcggacgcggcggccctcgagcacgacaaggcctacgaccagcagctgcaggcgggtgacaatccgtacctgcggtataaccacgccgacgccgagtttcaggagcgtctgcaagaagatacgtcttttgggggcaacctcgggcgagcagtcttccaggccaagaagcgggttctcgaacctctcggtctggttgaggaaggcgctaagacggctcctggaaagaagagaccggtagagccatcaccccagcgttctccagactcctctacgggcatcggcaagaagggccaacagcccgccagaaaaagactcaattttggtcagactggcgactcagagtcagttccagaccctcaacctctcggagaacctccagcagcgccctctggtgtgggacctaatacaatggctgcaggcggtggcgcaccaatggcagacaataacgaaggcgccgacggagtgggtagttcctcgggaaattggcattgcgattccacatggctgggcgacagagtcatcaccaccagcacccgaacctgggccctgcccacctacaacaaccacctctacaagcaaatctccaacgggacatcgggaggagccaccaacgacaacacctacttcggctacagcaccccctgggggtattttgactttaacagattccactgccacttttcaccacgtgactggcagcgactcatcaacaacaactggggattccggcccaagagactcagcttcaagctcttcaacatccaggtcaaggaggtcacgcagaatgaaggcaccaagaccatcgccaataacctcaccagcaccatccaggtgtttacggactcggagtaccagctgccgtacgttctcggctctgcccaccagggctgcctgcctccgttcccggcggacgtgttcacgattccccagtacggctacctaacactcaacaacggtagtcaggccgtgggacgctcctccttctactgcctggaatactttccttcgcagatgctgagaaccggcaacaacttccagtttacttacaccttcgaggacgtgcctttccacagcagctacgcccacagccagagcttggaccggctgatgaatcctctgattgaccagtacctgtactacttgtctcggattcaaacaacaggaggcacggcaaatacgcagactctgggcttcagccaaggtgggcctaatacaatggccaatcaggcaaagaactggctgccaggaccctgttaccgccaacaacgcgtctcaacgacaaccgggcaaaacaacaatagcaactttgcctggactgctgggaccaaataccatctgaatggaagaaattcattggctaatcctggcatcgctatggcaacacacaaagacgacgaggagcgtttttttcccagtaacgggatcctgatttttggcaaacaaaatgctgccagagacaatgcggattacagcgatgtcatgcccaccagcgaggaagaaatcaaaaccactaaccctgtggccacagaggaatacggtatcgtggcagataacttgcagcagcaaaacacggctcctcaaattggaactgtcaacagccagggggccttacccggtatgatctggcagaaccgggacgtgtacctgcagggtcccatctgggccaagattcctcacacggacggcaacttccacccgtctccgctgatgggcggctttggcctgaaacatcctccgcctcagatcctgatcaagaacacgcctgtacctgcggatcctccgaccaccttcaaccagtcaaagctgaactctttcatcacgcaatacagcaccggacaggtcagcgtggaaattgaatgggagctgcagaaggaaaacagcaagcgctggaaccccgagatccagtacacctccaactactacaaatctacaagtgtggactttgctgttaatacagaaggcgtgtactctgaaccccgccccattggcacccgttacctcacccgtaatctgtaa

SEQ ID NO: 1550 - DNA, 2217 bp, Artificial Sequence
  Synthetic Polynucleotide
atggctgccgatggttatcttccagattggctcgaggacaacctctctgagggcattcgcgagtggtgggcgctgaaacctggagccccgaagcccaaagccaaccagcaaaagcaggacgacggccggggtctggtgcttcctggctacaagtacctcggacccttcaacggactcgacaagggggagcccgtcaacgcggcggacgcggcggccctcgagcacgacaaggcctacgaccagcggctgcaggcgggtgacaatccgtacctgcggtataaccacgccgacgccgagtttcaggagcgtctgcaagaagatacgtcttttgggggcaacctcgggcgagcagtcttccaggccaagaagcgggttctcgaacctctcggtctggttgaggaaggcgctaagacggctcctggaaagaagagaccggtagagccatcaccccagcgttctccagactcctctacgggcatcggcaagaagggccaacagcccgccagaaaaagactcaattttggtcagactggcgactcagagtcagttccagaccctcaacctctcggagaacctccagcagcgccctctggtgtgggacctaatacaatggctgcaggcggtggcgcaccaatggcagacaataacgaaggcgccgacggagtgggtagttcctcgggaaattggcattgcgattccacatggctgggcgacagagtcatcaccaccagcacccgaacctgggccctgcccacctacaacaaccacctctacaagcaaatctccaacgggacatcgggaggagccaccaacgacaacacctacttcggctacagcaccccctgggggtattttgactttaacagattccactgccacttttcaccacgtgactggcagcgactcatcaacaacaactggggattccggcccaagagactcagcttcaagctcttcaacatccaggtcaaggaggtcacgcagaatgaaggcaccaagaccatcgccaataacctcaccagcaccatccaggtgtttacggactcggagtaccagctgccgtacgttctcggctctgcccaccagggctgcctgcctccgttcccggcggacgtgttcacgattccccagtacggctacctaacactcaacaacggtagtcaggccgtgggacgctcctccttctactgcctggaatactttccttcgcagatgctgagaaccggcaacaacttccagtttacttacaccttcgaggacgtgcctttccacagcagctacgcccacagccagagcttggaccggctgatgaatcctctgattgaccagtacctgtactacttgtctcggattcaaacaacaggaggcacggcaaatacgcagactctgggcttcagccaaggtgggcctaatacaatggccaatcaggcaaagaactggctgccaggaccctgttaccgccaacaacgcgtctcaacgacaaccgggcaaaacaacaatagcaactttgcctggactgctgggaccaaataccatctgaatggaagaaattcattggctaatcctggcatcgctatggcaacacacaaagacgacgaggagcgtttttttcccagtaacgggatcctgatttttggcaaacaaaatgctgccagagacaatgcggattacagcgatgtcatgcccaccagcgaggaagaaatcaaaaccactaaccctgtggccacagaggaatacggtatcgtggcagataacttgcagcagcaaaacacggctcctcaaattggaactgtcaacagccagggggccttacccggtatggtctggcagaaccgggacgtgtacctgcagggtcccatctgggccaagattcctcacacggacggcaacttccacccgtctccgctgatgggcggctttggcctgaaacatcctccgcctcagatcctgatcaagaacacgcctgtacctgcggatcctccgaccaccttcaaccagtcaaagctgaactctttcatcacgcaatacagcaccggacaggtcagcgtggaaattgaatgggagctgcagaaggaaaacagcaagcgctggaaccccgagatccagtacacctccaactactacaaatctacaagtgtggactttgctgttaatacagaaggcgtgtactctgaaccccgccccattggcacccgttacctcacccgtaatctgtaa

SEQ ID NO: 1551 - DNA, 2217 bp, Artificial Sequence
  Synthetic Polynucleotide
atggctgccgatggttatcttccagattggctcgaggacaacctctctgagggcattcgcgagtggtgggcgctgaaacctggagccccgaagcccaaagccaaccagcaaaagcaggacgacggccggggtctggtgcttcctggctacaagtacctcggacccttcaacggactcgacaagggggagcccgtcaacgcggcggacgcggcggccctcgagcacgacaaggcctacgaccagcagctgcaggcgggtgacaatccgtacctgcggtataaccacgccgacgccgagtttcaggagcgtctgcaagaagatacgtcttttgggggcaacctcgggcgagcagtcttccaggccaagaagcgggttctcgaacctctcggtctggttgaggaaggcgctaagacggctcctggaaagaagagaccggtagagccatcaccccagcgttctccagactcctctacgggcatcggcaagaagggccaacagcccgccagaaaaagactcaattttggtcagactggcgactcagagtcagttccagaccctcaacctctcggagaacctccagcagcgccctctggtgtgggacctaatacaatggctgcaggcggtggcgcaccaatggcagacaataacgaaggcgccgacggagtgggtagttcctcgggaaattggcattgcgattccacatggctgggcgacagagtcatcaccaccagcacccgaacctgggccctgcccacctacaacaaccacctctacaagcaaatctccaacgggacatcgggaggagccaccaacgacaacacctacttcggctacagcaccccctgggggtattttgactttaacagattccactgccacttttcaccacgtgactggcagcgactcatcaacaacaactggggattccggcccaagagactcagcttcaagctcttcaacatccaggtcaaggaggtcacgcagaatgaaggcaccaagaccatcgccaataacctcaccagcaccatccaggtgtttacggactcggagtaccagctgccgtacgttctcggctctgcccaccagggctgcctgcctccgttcccggcggacgtgttcacgattccccagtacggctacctaacactcaacaacggtagtcaggccgtgggacgctcctccttctactgcctggaatactttccttcgcagatgctgagaaccggcaacaacttccagtttacttacaccttcgaggacgtgcctttccacagcagctacgcccacagccagagcttggaccggctgatgaatcctctgattgaccagtacctgtactacttgtctcggattcaaacaacaggaggcacggcaaatacgcagactctgggcttcagccaaggtgggcctaatacaatggccaatcaggcaaagaactggctgccaggaccctgttaccgccaacaacgcgtctcaacgacaaccgggcaaaacaacaatagcaactttgcctggactgctgggaccaaataccatctgaatggaagaaattcattggctaatcctggcatcgctatggcaacacacaaagacgacgaggagcgtttttttcccagtaacgggatcctgatttttggcaaacaaaatgctgccagagacaatgcggattacagcgatgtcatgcccaccagcgaggaagaaatcaaaaccactaaccctgtggccacagaggaatacggtatcgtggcagataacttgcagcagcaaaacacggctcctcaaattggaactgtcaacggccagggggccttacccggtatggtctggcagaaccgggacgtgtacctgcagggtcccatctgggccaagattcctcacacggacggcaacttccacccgtctccgctgatgggcggctttggcctgaaacatcctccgcctcagatcctgatcaagaacacgcctgtacctgcggatcctccgaccaccttcaaccagtcaaagctgaactctttcatcacgcaatacagcaccggacaggtcagcgtggaaattgaatgggagctgcagaaggaaaacagcaagcgctggaaccccgagatccagtacacctccaactactacaaatctacaagtgtggactttgctgttaatacagaaggcgtgtactctgaaccccgccccattggcacccgttacctcacccgtaatctgtaa

SEQ ID NO: 1552 - DNA, 2217 bp, Artificial Sequence
  Synthetic Polynucleotide
atggctgccgatggttatcttccagattggctcgaggacaacctctctgagggcattcgcgagtggtgggcgctgaaacctggagccccgaagcccaaagccaaccagcaaaagcaggacgacggccggggtctggtgcttcctggctacaagtacctcggacccttcaacggactcgacaagggggagcccgtcaacgcggcggacgcggcggccctcgagcacgacaaggcctacgaccagcagctgcaggcgggtgacaatccgtacctgcggtataaccacgccgacgccgagtttcaggagcgtctgcaagaagatacgtcttttgggggcaacctcgggcgagcagtcttccaggccaagaagcgggttctcgaacctctcggtctggttgaggaaggcgctaagacggctcctggaaagaagagaccggtagagccatcaccccagcgttctccagactcctctacgggcatcggcaagaagggccaacagcccgccagaaaaagactcaattttggtcagactggcgactcagagtcagttccagaccctcaacctctcggagaacctccagcagcgccctctggtgtgggacctaatacaatggctgcaggcggtggcgcaccaatggcagacaataacgaaggcgccgacggagtgggtagttcctcgggaaattggcattgcgattccacatggctgggcgacagagtcatcaccaccagcacccgaacctgggccctgcccacctacaacaaccacctctacaagcaaatctccaacgggacatcgggaggagccaccaacgacaacacctacttcggctacagcaccccctgggggtattttgactttaacagattccactgccacttttcaccacgtgactggcagcgactcatcaacaacaactggggattccggcccaagagactcagcttcaagctcttcaacatccaggtcaaggaggtcacgcagaatgaaggcaccaagaccatcgccaataacctcaccagcaccatccaggtgtttacggactcggagtaccagctgccgtacgttctcggctctgcccaccagggctgcctgcctccgttcccggcggacgtgttcacgattccccagtacggctacctaacactcaacaacggtagtcaggccgtgggacgctcctccttctactgcctggaatactttccttcgcagatgctgagaaccggcaacaacttccagtttacttacaccttcgaggacgtgcctttccacagcagctacgcccacagccagagcttggaccggctgatgaatcctctgattgaccagtacctgtactacttgtctcggattcaaacaacaggaggcacggcaaatacgcagactctgggcttcagccaaggtgggcctaatacaatggccaatcaggcaaagaactggctgccaggaccctgttaccgccaacaacgcgtctcaacgacaaccgggcaaaacaacaatagcaactttgcctggactgctgggaccaaataccatctgaatggaagaaattcattggctaatcctggcatcgctatggcaacacacaaagacgacgaggagtgtttttttcccagtaacgggatcctgatttttggcaaacaaaatgctgccagagacaatgcggattacagcgatgtcatgcccaccagcgaggaagaaatcaaaaccactaaccctgtggccacagaggaatacggtatcgtggcagataacttgcagcagcaaaacacggctcctcaaattggaactgtcaacagccagggggccttacccggtatggtctggcagaaccgggacgtgtacctgcagggtcccatctgggccaagattcctcacacggacggcaacttccacccgtctccgctgatgggcggctttggcctgaaacatcctccgcctcagatcctgatcaagaacacgcctgtacctgcggatcctccgaccaccttcaaccagtcaaagctgaactctttcatcacgcaatacagcaccggacaggtcagcgtggaaattgaatgggagctgcagaaggaaaacagcaagcgctggaaccccgagatccagtacacctccaactactacaaatctacaagtgtggactttgctgttaatacagaaggcgtgtactctgaaccccgccccattggcacccgttacctcacccgtaatctgtaa

SEQ ID NO: 1553 - DNA, 2217 bp, Artificial Sequence
  Synthetic Polynucleotide
atggctgccgatggttatcttccagattggctcgaggacaacctctctgagggcattcgcgagtggtgggcgctgaaacctggagccccgaagcccaaagccaaccagcaaaagcaggacgacggccggggtctggtgcttcctggctacaagtacctcggacccttcaacggactcgacaagggggagcccgtcaacgcggcggacgcggcggccctcgagcacgacaaggcctacgaccagcagctgcaggcgggtgacaatccgtacctgcggtataaccacgccgacgccgagtttcaggagcgtctgcaagaagatacgtcttttgggggcaacctcgggcgagcagtcttccaggccaagaagcgggttctcgaacctctcggtctggttgaggaaggcgctaagacggctcctggaaagaagagaccggtagagccatcaccccagcgttctccagactcctctacgggcatcggcaagaagggccaacagcccgccagaaaaagactcaattttggtcagactggcgactcagagtcagttccagaccctcaacctctcggagaacctccagcagcgccctctggtgtgggacctaatacaatggctgcaggcggtggcgcaccaatggcagacaataacgaaggcgccgacggagtgggtagttcctcgggaaattggcattgcgattccacatggctgggcgacagagtcatcaccaccagcacccgaacctgggccctgcccacctacaacaaccacctctacaagcaaatctccaacgggacatcgggaggagccaccaacgacaacacctacttcggctacagcaccccctgggggtattttgactttaacagattccactgccacttttcaccacgtgactggcagcgactcatcaacaacaactggggattccggcccaagagactcagcttcaagctcttcaacatccaggtcaaggaggtcacgcagaatgaaggcaccaagaccatcgccaataacctcaccagcaccatccaggtgtttacggactcggagtaccagctgccgtacgttctcggctctgcccaccagggctgcctgcctccgttcccggcggacgtgttcacgattccccagtacggctacctaacactcaacaacggtagtcaggccgtgggacgctcctccttctactgcctggaatactttccttcgcagatgctgagaaccggcaacaacttccagtttacttacaccttcgaggacgtgcctttccacagcagctacgcccacagccagagcttggaccggctgatgaatcctctgattgaccagtacctgtactacttgtctcggattcaaacaacaggaggcacggcaaatacgcagactctgggcttcagccaaggtgggcctaatacaatggccaatcaggcaaagaactggctgccaggaccctgttaccgccaacaacgcgtctcaacgacaaccgggcaaaacaacaatagcaactttgcctggactgctgggaccaaataccatctgaatggaagaaattcattggctaatcctggcatcgctatggcaacacacaaagacgacgaggagcgtttttttcccagtaacgggatcctgatttttggcaaacaaaatgctgccagagacaatgcggattacagcgatgtcatgcccaccagcgaggaagaaatcaaaaccactaaccctgtggccacagaggaatacggtatcgtggcagataacttgcagcagcaaaacacggctcctcaaattggaactgtcaacagccagggggccttacccggtatggtctggcagaaccgggacgcgtacctgcagggtcccatctgggccaagattcctcacacggacggcaacttccacccgtctccgctgatgggcggctttggcctgaaacatcctccgcctcagatcctgatcaagaacacgcctgtacctgcggatcctccgaccaccttcaaccagtcaaagctgaactctttcatcacgcaatacagcaccggacaggtcagcgtggaaattgaatgggagctgcagaaggaaaacagcaagcgctggaaccccgagatccagtacacctccaactactacaaatctacaagtgtggactttgctgttaatacagaaggcgtgtactctgaaccccgccccattggcacccgttacctcacccgtaatctgtaa

SEQ ID NO: 1554 - DNA, 2217 bp, Artificial Sequence
  Synthetic Polynucleotide
atggctgccgatggttatcttccagattggctcgaggacaacctctctgagggcattcgcgagtggtgggcgctgaaacctggagccccgaagcccaaagccaaccagcaaaagcaggacgacggccggggtctggtgcttcctggctacaagtacctcggacccttcaacggactcgacaagggggagcccgtcaacgcggcggacgcggcggccctcgagcacgacaaggcctacgaccagcagctgcaggcgggtgacaatccgtacctgcggtataaccacgccgacgccgagtttcaggagcgtctgcaagaagatacgtcttttgggggcaacctcgggcgagcagtcttccaggccaagaagcgggttctcgaacctctcggtctggttgaggaaggcgctaagacggctcctggaaagaagagaccggtagagccatcaccccagcgttctccagactcctctacgggcatcggcaagaagggccaacagcccgccagaaaaagactcaattttggtcagactggcgactcagagtcagttccagaccctcaacctctcggagaacctccagcagcgccctctggtgtgggacctaatacaatggctgcaggcggtggcgcaccaatggcagacaataacgaaggcgccgacggagtgggtagttcctcgggaaattggcattgcgattccacatggctgggcgacagagtcatcaccaccagcacccgaacctgggccctgcccacctacaacaaccacctctacaagcaaatctccaacgggacatcgggaggagccaccaacgacaacacctacttcggctacagcaccccctgggggtattttgactttaacagattccactgccacttttcaccacgtgactggcagcgactcatcaacaacaactggggattccggcccaagagactcagcttcaagctcttcaacatccaggtcaaggaggtcacgcagaatgaaggcaccaagaccatcgccaataacctcaccagcaccatccaggtgtttacggactcggagtaccagctgccgtacgttctcggctctgcccaccagggctgcctgcctccgttcccggcggacgtgttcacgattccccagtacggctacctaacactcaacaacggtagtcaggccgcgggacgctcctccttctactgcctggaatactttccttcgcagatgctgagaaccggcaacaacttccagtttacttacaccttcgaggacgtgcctttccacagcagctacgcccacagccagagcttggaccggctgatgaatcctctgattgaccagtacctgtactacttgtctcggattcaaacaacaggaggcacggcaaatacgcagactctgggcttcagccaaggtgggcctaatacaatggccaatcaggcaaagaactggctgccaggaccctgttaccgccaacaacgcgtctcaacgacaaccgggcaaaacaacaatagcaactttgcctggactgctgggaccaaataccatctgaatggaagaaattcattggctaatcctggcatcgctatggcaacacacaaagacgacgaggagcgtttttttcccagtaacgggatcctgatttttggcaaacaaaatgctgccagagacaatgcggattacagcgatgtcatgcccaccagcgaggaagaaatcaaaaccactaaccctgtggccacagaggaatacggtatcgtggcagataacttgcagcagcaaaacacggctcctcaaattggaactgtcaacagccagggggccttacccggtatggtctggcagaaccgggacgtgtacctgcagggtcccatctgggccaagattcctcacacggacggcaacttccacccgtctccgctgatgggcggctttggcctgaaacatcctccgcctcagatcctgatcaagaacacgcctgtacctgcggatcctccgaccaccttcaaccagtcaaagctgaactctttcatcacgcaatacagcaccggacaggtcagcgtggaaattgaatgggagctgcagaaggaaaacagcaagcgctggaaccccgagatccagtacacctccaactactacaaatctacaagtgtggactttgctgttaatacagaaggcgtgtactctgaaccccgccccattggcacccgttacctcacccgtaatctgtaa

SEQ ID NO: 1555 - DNA, 2217 bp, Artificial Sequence
  Synthetic Polynucleotide
atggctgccgatggttatcttccagattggctcgaggacaacctctctgagggcattcgcgagtggtgggcgctgaaacctggagccccgaagcccaaagccaaccagcaaaagcaggacgacggccggggtctggtgcttcctggctacaagtacctcggacccttcaacggactcgacaagggggagcccgtcaacgcggcggacgcggcggccctcgagcacgacaaggcctacgaccagcagctgcaggcgggtgacaatccgtacctgcggtataaccacgccgacgccgagtttcaggagcgtctgcaagaagatacgtcttttgggggcaacctcgggcgagcagtcttccaggccaagaagcgggttctcgaacctctcggtctggttgaggaaggcgctaagacggctcctggaaagaagagaccggtagagccatcaccccagcgttctccagactcctctacgggcatcggcaagaagggccaacagcccgccagaaaaagactcaattttggtcagactggcgactcagagtcagttccagaccctcaacctctcggagaacctccagcagcgccctctggtgtgggacctaatacaatggctgcaggcggtggcgcaccaatggcagacaataacgaaggcgccgacggagtgggtagttcctcgggaaattggcattgcgattccacatggctgggcgacagagtcatcaccaccagcacccgaacctgggccctgcccacctacaacaaccacctctacaagcaaatctccaacgggacatcgggaggagccaccaacgacaacacctacttcggctacagcaccccctgggggtattttgactttaacagattccactgccacttttcaccacgtgactggcagcgactcatcaacaacaactggggattccggcccaagagactcagcttcaagctcttcaacatccaggtcaaggaggtcacgcagaatgaaggcaccaagaccatcgccaataacctcaccagcaccatccaggtgtttacggactcggagtaccagctgccgtacgttctcggctctgcccaccagggctgcctgcctccgttcccggcggacgtgttcacgattccccagtacggctacctaacactcaacaacggtagtcaggccgtgggacgctcctccttctactgcctggaatactttccttcgcagatgctgagaaccggcaacaacttccagtttacttacaccttcgaggacgtgcctttccacagcagctacgcccacagccagagcttggaccggctgatgaatcctctgattgaccagtacctgtactacttgtctcggattcaaacaacaggaggcacggcaaatacgcagactctgggcttcagccaaggtgggcctaatacaatggccaatcaggcaaagaactggctgccaggaccctgttaccgccaacaacgcgtctcaacgacaaccgggcaaaacaacaatagcaactttgcctggactgctgggaccaaataccatctgaatggaagaaattcattggctaatcctggcatcgctatggcaacacacaaagacgacgaggagcgtttttttcccagtaacgggatcctgatttttggcaaacaaaatgctgccagagacaatgcggattacagcgatgtcatgcccaccagcgaggaagaaatcaaaaccactaaccctgtggccacagaggaatacggtatcgtggcagataacttgcagcagcaaaacacggctcctcaaattggaactgtcaacagccagggggccttacccggtatggtctggcagaaccgggacgtgtacctgcagggtcccatctgggccaagattcctcacacggacggcaacttccacccgtctccgctgatgggcggctttggcctgaaacatcctccgcctcagatcctgatcaagaacacgcctgtacctgcggatcctccgaccaccttcaaccagtcaaagctgaactctttcatcacgcaatacagcaccggacaggtcagcgtggaaattgaatgggagctgcagaaggaaaacagcaagcgctggaaccccgagatccagtacacctccaactactacaaatctacaagtgtggaccttgctgttaatacagaaggcgtgtactctgaaccccgccccattggcacccgttacctcacccgtaatctgtaa

SEQ ID NO: 1556 - DNA, 2217 bp, Artificial Sequence
  Synthetic Polynucleotide
atggctgccgatggttatcttccagattggctcgaggacaacctctctgagggcattcgcgagtggtgggcgctgaaacctggagccccgaagcccaaagccaaccagcaaaagcaggacgacggccggggtctggtgcttcctggctacaagtacctcggacccttcaacggactcgacaagggggagcccgtcaacgcggcggacgcggcggccctcgagcacgacaaggcctacgaccagcagctgcaggcgggtgacaatccgtacctgcggtataaccacgccgacgccgagtttcaggagcgtctgcaagaagatacgtcttttgggggcaacctcgggcgagcagtcttccaggccaagaagcgggttctcgaacctctcggtctggttgaggaaggcgctaagacggctcctggaaagaagagaccggtagagccatcaccccagcgttctccagactcctctacgggcatcggcaagaagggccaacagcccgccagaaaaagactcaattttggtcagactggcgactcagagtcagttccagaccctcaacctctcggagaacctccagcagcgccctctggtgtgggacctaatacaatggctgcaggcggtggcgcaccaatggcagacaataacgaaggcgccgacggagtgggtagttcctcgggaaattggcattgcgattccacatggctgggcgacagagtcatcaccaccagcacccgaacctgggccctgcccacctacaacaaccacctctacaagcaaatctccaacgggacatcgggaggagccaccaacgacaacacctacttcggctacagcaccccctgggggtattttgactttaacagattccactgccacttttcaccacgtgactggcagcgactcatcaacaacaactggggattccggcccaagagactcagcttcaagctcttcaacatccaggtcaaggaggtcacgcagaatgaaggcaccaagaccatcgccaataacctcaccagcaccatccaggtgtttacggactcggagtaccagctgccgtacgttctcggctctgcccaccagggctgcctgcctccgttcccggcggacgtgttcacgattccccagtacggctacctaacactcaacaacggtagtcaggccgtgggacgctcctccttctactgcctggaatactttccttcgcagatgctgagaaccggcaacaacttccagtttacttacaccttcgaggacgtgcctttccacagcagctacgcccacagccagagcttggaccggctgatgaatcctctgattgaccagtacctgtactacttgtctcggattcaaacaacaggaggcacggcaaatacgcagactctgggcttcagccaaggtgggcctaatacaatggccaatcaggcaaagaactggctgccaggaccctgttaccgccaacaacgcgtctcaacgacaaccgggcaaaacaacaatagcaactttgcctggactgctgggaccaaataccatctgaatggaagaaattcattggctaatcctggcatcgctatggcaacacacaaagacgacgaggagcgtttttttcccagtaacgggatcctgatttttggcaaacaaaatgctgccagagacaatgcggattacagcgatgtcatgcccaccagcgaggaagaaatcaaaaccactaaccctgtggccacagaggaatacggtatcgtggcagataacttgcagcagcaaaacacggctcctcaaattggaactgtcaacagccagggggccttacccggtatggtctggcagaaccgggacgtgtacctgcagggtcccatctgggccaagattcctcacacggacggcaacttccacccgtctccgctgatgggcggctttggcctgaaacatcctccgcctcagatcctgatcaagaacacgcctgtacctgcggatcctccgaccaccttcaaccagtcaaagctgaactctttcatcacgcaatacagcaccggacaggtcagcgtggaaattgaatgggagccgcagaaggaaaacagcaagcgctggaaccccgagatccagtacacctccaactactacaaatctacaagtgtggactttgctgttaatacagaaggcgtgtactctgaaccccgccccattggcacccgttacctcacccgtaatctgtaa

SEQ ID NO: 1557 - DNA, 2217 bp, Artificial Sequence
  Synthetic Polynucleotide
atggctgccgatggttatcttccagattggctcgaggacaacctctctgagggcattcgcgagtggtgggcgctgaaacctggagccccgaagcccaaagccaaccagcaaaagcaggacgacggccggggtctggtgcttcctggctacaagtacctcggacccttcaacggactcgacaagggggagcccgtcaacgcggcggacgcggcggccctcgagcacgacaaggcctacgaccagcagctgcaggcgggtgacaatccgtacctgcggtataaccacgccgacgccgagtttcaggagcgtctgcaagaagatacgtcttttgggggcaacctcgggcgagcagtcttccaggccaagaagcgggttctcgaacctctcggtctggttgaggaaggcgctaagacggctcctggaaagaagagaccggtagagccatcaccccagcgttctccagactcctctacgggcatcggcaagaagggccaacagcccgccagaaaaagactcaattttggtcagactggcgactcagagtcagttccagaccctcaacctctcggagaacctccagcagcgccctctggtgtgggacctaatacaatggctgcaggcggtggcgcaccaatggcagacaataacgaaggcgccgacggagtgggtagttcctcgggaaattggcattgcgattccacatggctgggcgacagagtcatcaccaccagcacccgaacctgggccctgcccacctacaacaaccacctctacaagcaaatctccaacgggacatcgggaggagccaccaacgacaacacctacttcggctacagcaccccctgggggtattttgactttaacagattccactgccacttttcaccacgtgactggcagcgacccatcaacaacaactggggattccggcccaagagactcagcttcaagctcttcaacatccaggtcaaggaggtcacgcagaatgaaggcaccaagaccatcgccaataacctcaccagcaccatccaggtgtttacggactcggagtaccagctgccgtacgttctcggctctgcccaccagggctgcctgcctccgttcccggcggacgtgttcacgattccccagtacggctacctaacactcaacaacggtagtcaggccgtgggacgctcctccttctactgcctggaatactttccttcgcagatgctgagaaccggcaacaacttccagtttacttacaccttcgaggacgtgcctttccacagcagctacgcccacagccagagcttggaccggctgatgaatcctctgattgaccagtacctgtactacttgtctcggattcaaacaacaggaggcacggcaaatacgcagactctgggcttcagccaaggtgggcctaatacaatggccaatcaggcaaagaactggctgccaggaccctgttaccgccaacaacgcgtctcaacgacaaccgggcaaaacaacaatagcaactttgcctggactgctgggaccaaataccatctgaatggaagaaattcattggctaatcctggcatcgctatggcaacacacaaagacgacgaggagcgtttttttcccagtaacgggatcctgatttttggcaaacaaaatgctgccagagacaatgcggattacagcgatgtcatgcccaccagcgaggaagaaatcaaaaccactaaccctgtggccacagaggaatacggtatcgtggcagataacttgcagcagcaaaacacggctcctcaaattggaactgtcaacagccagggggccttacccggtatggtctggcagaaccgggacgtgtacctgcagggtcccatctgggccaagattcctcacacggacggcaacttccacccgtctccgctgatgggcggctttggcctgaaacatcctccgcctcagatcctgatcaagaacacgcctgtacctgcggatcctccgaccaccttcaaccagtcaaagctgaactctttcatcacgcaatacagcaccggacaggtcagcgtggaaattgaatgggagctgcagaaggaaaacagcaagcgctggaaccccgagatccagtacacctccaactactacaaatctacaagtgtggactttgctgttaatacagaaggcgtgtactctgaaccccgccccattggcacccgttacctcacccgtaatctgtaa

SEQ ID NO: 1558 - DNA, 2217 bp, Artificial Sequence
  Synthetic Polynucleotide
atggctgccgatggttatcttccagattggctcgaggacaacctctctgagggcattcgcgagtggtgggcgctgaaacctggagccccgaagcccaaagccaaccagcaaaagcaggacgacggccggggtctggtgcttcctggctacaagtacctcggacccttcaacggactcgacaagggggagcccgtcaacgcggcggacgcggcggccctcgagcacgacaaggcctacgaccagcagctgcaggcgggtgacaatccgtacctgcggtataaccacgccgacgccgagtttcaggagcgtctgcaagaagatacgtcttttgggggcaacctcgggcgagcagtcttccaggccaagaagcgggttctcgaacctctcggtctggttgaggaaggcgctaagacggctcctggaaagaagagaccggtagagccatcaccccagcgttctccagactcctctacgggcatcggcaagaagggccaacagcccgccagaaaaagactcaattttggtcagactggcgactcagagtcagttccagaccctcaacctctcggagaacctccagcagcgccctctggtgtgggacctaatacaatggctgcaggcggtggcgcaccaatggcagacaataacgaaggcgccgacggagtgggtagttcctcgggaaattggcattgcgattccacatggctgggcgacagagtcatcaccaccagcacccgaacctgggccctgcccacctacaacaaccacctctacaagcaaatctccaacgggacatcgggaggagccaccaacgacaacacctacttcggctacagcaccccctgggggtattttgactttaacagattccactgccacttttcaccacgtgactggcagcgactcatcaacaacaactggggattccggcccaagagactcagcttcaagctcttcaacatccaggtcaaggaggtcacgcagaatgaaggcaccaagaccatcgccaataacctcaccagcaccatccaggtgtttacggactcggagtaccagctgccgtacgttctcggctctgcccaccagggctgcctgcctccgttcccggcggacgtgttcacgattccccagtacggctacctaacactcaacaacggtagtcaggccgtgggacgctcctccttctactgcctggaatactttccttcgcagatgctgagaaccggcaacaacttccagtttacttacaccttcgaggacgtgcctttccacagcagctacgcccacagccagagcttggaccggctgatgaatcctctgattgaccagtacctgtactacttgtctcggattcaaacaacaggaggcacggcaaatacgcagactctgggcttcagccaaggtgggcctaatacaatggccaatcaggcaaagaactggctgccaggaccctgttaccgccaacaacgcgtctcaacgacaaccgggcaaaacaacaatagcaactttgcctggactgctgggaccaaataccatctgaatggaagaaattcattggctaatcctggcatcgctatggcaacacacaaagacgacgaggagcgtttttttcccagtaacgggatcctgatttttggcaaacaaaatgctgccagagacaatgcggattacagcgatgtcatgcccaccagcgaggaagaaatcaaaaccactaaccctgcggccacagaggaatacggtatcgtggcagataacttgcagcagcaaaacacggctcctcaaattggaactgtcaacagccagggggccttacccggtatggtctggcagaaccgggacgtgtacctgcagggtcccatctgggccaagattcctcacacggacggcaacttccacccgtctccgctgatgggcggctttggcctgaaacatcctccgcctcagatcctgatcaagaacacgcctgtacctgcggatcctccgaccaccttcaaccagtcaaagctgaactctttcatcacgcaatacagcaccggacaggtcagcgtggaaattgaatgggagctgcagaaggaaaacagcaagcgctggaaccccgagatccagtacacctccaactactacaaatctacaagtgtggactttgctgttaatacagaaggcgtgtactctgaaccccgccccattggcacccgttacctcacccgtaatctgtaa

SEQ ID NO: 1559 - DNA, 2217 bp, Artificial Sequence
  Synthetic Polynucleotide
atggctgccgatggttatcttccagattggctcgaggacaacctctctgagggcattcgcgagtggtgggcgctgaaacctggagccccgaagcccaaagccaaccagcaaaagcaggacgacggccggggtctggtgcttcctggctacaagtacctcggacccttcaacggactcgacaagggggagcccgtcaacgcggcggacgcggcggccctcgagcacgacaaggcctacgaccagcagctgcaggcgggtgacaatccgtacctgcggtataaccacgccgacgccgagtttcaggagcgtctgcaagaagatacgtcttttgggggcaacctcgggcgagcagtcttccaggccaagaagcgggttctcgaacctctcggtctggttgaggaaggcgctaagacggctcctggaaagaagagaccggtagagccatcaccccagcgttctccagactcctctacgggcatcggcaagaagggccaacagcccgccagaaaaagactcaattttggtcagactggcgactcagagtcagttccagaccctcaacctctcggagaacctccagcagcgccctctggtgtgggacctaatacaatggctgcaggcggtggcgcaccaatggcagacaataacgaaggcgccgacggagtgggtagttcctcgggaaattggcattgcgattccacatggctgggcgacagagtcatcaccaccagcacccgaacctgggccctgcccacctacaacaaccacctctacaagcaaatctccaacgggacatcgggaggagccaccaacgacaacacctacttcggctacagcaccccctgggggtattttgactttaacagattccactgccacttttcaccacgtgactggcagcgactcatcaacaacaactggggattccggcccaagagactcagcttcaagctcttcaacatccaggtcaaggaggtcacgcagaatgaaggcaccaagaccatcgccaataacctcaccagcaccatccaggtgtttacggactcggagtaccagctgccgtacgttctcggctctgcccaccagggctgcctgcctccgttcccggcggacgtgttcacgattccccagtacgactacctaacactcaacaacggtagtcaggccgtgggacgctcctccttctactgcctggaatactttccttcgcagatgctgagaaccggcaacaacttccagtttacttacaccttcgaggacgtgcctttccacagcagctacgcccacagccagagcttggaccggctgatgaatcctctgattgaccagtacctgtactacttgtctcggattcaaacaacaggaggcacggcaaatacgcagactctgggcttcagccaaggtgggcctaatacaatggccaatcaggcaaagaactggctgccaggaccctgttaccgccaacaacgcgtctcaacgacaaccgggcaaaacaacaatagcaactttgcctggactgctgggaccaaataccatctgaatggaagaaattcattggctaatcctggcatcgctatggcaacacacaaagacgacgaggagcgtttttttcccagtaacgggatcctgatttttggcaaacaaaatgctgccagagacaatgcggattacagcgatgtcatgcccaccagcgaggaagaaatcaaaaccactaaccctgtggccacagaggaatacggtatcgtggcagataacttgcagcagcaaaacacggctcctcaaattggaactgtcaacagccagggggccttacccggtatggtctggcagaaccgggacgtgtacctgcagggtcccatctgggccaagattcctcacacggacggcaacttccacccgtctccgctgatgggcggctttggcctgaaacatcctccgcctcagatcctgatcaagaacacgcctgtacctgcggatcctccgaccaccttcaaccagtcaaagctgaactctttcatcacgcaatacagcaccggacaggtcagcgtggaaattgaatgggagctgcagaaggaaaacagcaagcgctggaaccccgagatccagtacacctccaactactacaaatctacaagtgtggactttgctgttaatacagaaggcgtgtactctgaaccccgccccattggcacccgttacctcacccgtaatctgtaa

SEQ ID NO: 1560 - DNA, 2217 bp, Artificial Sequence
  Synthetic Polynucleotide
atggctgccgatggttatcttccagattggctcgaggacaacctctctgagggcattcgcgagtggtgggcgctgaaacctggagccccgaagcccaaagccaaccagcaaaagcaggacgacggccggggtctggtgcttcctggctacaagtacctcggacccttcaacggactcgacaagggggagcccgtcaacgcggcggacgcggcggccctcgagcacgacaaggcctacgaccagcagctgcaggcgggtgacaatccgtacctgcggtataaccacgccgacgccgagtttcaggagcgtctgcaagaagatacgtcttttgggggcaacctcgggcgagcagtcttccaggccaagaagcgggttctcgaacctctcggtctggttgaggaaggcgctaagacggctcctggaaagaagagaccggtagagccatcaccccagcgttctccagactcctctacgggcatcggcaagaagggccaacagcccgccagaaaaagactcaattttggtcagactggcgactcagggtcagttccagaccctcaacctctcggagaacctccagcagcgccctctggtgtgggacctaatacaatggctgcaggcggtggcgcaccaatggcagacaataacgaaggcgccgacggagtgggtagttcctcgggaaattggcattgcgattccacatggctgggcgacagagtcatcaccaccagcacccgaacctgggccctgcccacctacaacaaccacctctacaagcaaatctccaacgggacatcgggaggagccaccaacgacaacacctacttcggctacagcaccccctgggggtattttgactttaacagattccactgccacttttcaccacgtgactggcagcgactcatcaacaacaactggggattccggcccaagagactcagcttcaagctcttcaacatccaggtcaaggaggtcacgcagaatgaaggcaccaagaccatcgccaataacctcaccagcaccatccaggtgtttacggactcggagtaccagctgccgtacgttctcggctctgcccaccagggctgcctgcctccgttcccggcggacgtgttcacgattccccagtacggctacctaacactcaacaacggtagtcaggccgtgggacgctcctccttctactgcctggaatactttccttcgcagatgctgagaaccggcaacaacttccagtttacttacaccttcgaggacgtgcctttccacagcagctacgcccacagccagagcttggaccggctgatgaatcctctgattgaccagtacctgtactacttgtctcggattcaaacaacaggaggcacggcaaatacgcagactctgggcttcagccaaggtgggcctaatacaatggccaatcaggcaaagaactggctgccaggaccctgttaccgccaacaacgcgtctcaacgacaaccgggcaaaacaacaatagcaactttgcctggactgctgggaccaaataccatctgaatggaagaaattcattggctaatcctggcatcgctatggcaacacacaaagacgacgaggagcgtttttttcccagtaacgggatcctgatttttggcaaacaaaatgctgccagagacaatgcggattacagcgatgtcatgcccaccagcgaggaagaaatcaaaaccactaaccctgtggccacagaggaatacggtatcgtggcagataacttgcagcagcaaaacacggctcctcaaattggaactgtcaacagccagggggccttacccggtatggtctggcagaaccgggacgtgtacctgcagggtcccatctgggccaagattcctcacacggacggcaacttccacccgtctccgctgatgggcggctttggcctgaaacatcctccgcctcagatcctgatcaagaacacgcctgtacctgcggatcctccgaccaccttcaaccagtcaaagctgaactctttcatcacgcaatacagcaccggacaggtcagcgtggaaattgaatgggagctgcagaaggaaaacagcaagcgctggaaccccgagatccagtacacctccaactactacaaatctacaagtgtggactttgctgttaatacagaaggcgtgtactctgaaccccgccccattggcacccgttacctcacccgtaatctgtaa

SEQ ID NO: 1561 - DNA, 2217 bp, Artificial Sequence
  Synthetic Polynucleotide
atggctgccgatggttatcttccagattggctcgaggacaacctctctgagggcattcgcgagtggtgggcgctgaaacctggagccccgaagcccaaagccaaccagcaaaagcaggacgacggccggggtctggtgcttcctggctacaagtacctcggacccttcaacggactcgacaagggggagcccgtcaacgcggcggacgcggcggccctcgagcacgacaaggcctacgaccagcagctgcaggcgggtgacaatccgtacctgcggtataaccacgccgacgccgagtttcaggagcgtctgcaagaagatacgtcttttgggggcaacctcgggcgagcagtcttccaggccaagaagcgggttctcgaacctctcggtctggttgaggaaggcgctaagacggctcctggaaagaagagaccggtagagccatcaccccagcgttctccagactcctctacgggcatcggcaagaagggccaacagcccgccagaaaaagactcaattttggtcagactggcgactcagagtcagttccagaccctcaacctctcggagaacctccagcagcgccctctggtgtgggacctaatacaatggctgcaggcggtggcgcaccaatggcagacaataacgaaggcgccgacggagtgggtagttcctcgggaaattggcattgcgattccacatggctgggcgacagagtcatcaccaccagcacccgaacctgggccctgcccacctacaacaaccacctctacaagcaaatctccaacgggacatcgggaggagccaccaacgacaacacctacttcggctacagcaccccctgggggtattttgactttaacagattccactgccacttttcaccacgtgactggcagcgactcatcaacaacaactggggattccggcccaagagactcagcttcaagctcttcaacatccaggtcaaggaggtcacgcagaatgaaggcaccaaggccatcgccaataacctcaccagcaccatccaggtgtttacggactcggagtaccagctgccgtacgttctcggctctgcccaccagggctgcctgcctccgttcccggcggacgtgttcacgattccccagtacggctacctaacactcaacaacggtagtcaggccgtgggacgctcctccttctactgcctggaatactttccttcgcagatgctgagaaccggcaacaacttccagtttacttacaccttcgaggacgtgcctttccacagcagctacgcccacagccagagcttggaccggctgatgaatcctctgattgaccagtacctgtactacttgtctcggattcaaacaacaggaggcacggcaaatacgcagactctgggcttcagccaaggtgggcctaatacaatggccaatcaggcaaagaactggctgccaggaccctgttaccgccaacaacgcgtctcaacgacaaccgggcaaaacaacaatagcaactttgcctggactgctgggaccaaataccatctgaatggaagaaattcattggctaatcctggcatcgctatggcaacacacaaagacgacgaggagcgtttttttcccagtaacgggatcctgatttttggcaaacaaaatgctgccagagacaatgcggattacagcgatgtcatgcccaccagcgaggaagaaatcaaaaccactaaccctgtggccacagaggaatacggtatcgtggcagataacttgcagcagcaaaacacggctcctcaaattggaactgtcaacagccagggggccttacccggtatggtctggcagaaccgggacgtgtacctgcagggtcccatctgggccaagattcctcacacggacggcaacttccacccgtctccgctgatgggcggctttggcctgaaacatcctccgcctcagatcctgatcaagaacacgcctgtacctgcggatcctccgaccaccttcaaccagtcaaagctgaactctttcatcacgcaatacagcaccggacaggtcagcgtggaaattgaatgggagctgcagaaggaaaacagcaagcgctggaaccccgagatccagtacacctccaactactacaaatctacaagtgtggactttgctgttaatacagaaggcgtgtactctgaaccccgccccattggcacccgttacctcacccgtaatctgtaa

SEQ ID NO: 1562 - DNA, 2217 bp, Artificial Sequence
  Synthetic Polynucleotide
atggctgccgatggttatcttccagattggctcgaggacaacctctctgagggcattcgcgagtggtgggcgctgaaacctggagccccgaagcccaaagccaaccagcaaaagcaggacgacggccggggtccggtgcttcctggctacaagtacctcggacccttcaacggactcgacaagggggagcccgtcaacgcggcggacgcggcggccctcgagcacgacaaggcctacgaccagcagctgcaggcgggtgacaatccgtacctgcggtataaccacgccgacgccgagtttcaggagcgtctgcaagaagatacgtcttttgggggcaacctcgggcgagcagtcttccaggccaagaagcgggttctcgaacctctcggtctggttgaggaaggcgctaagacggctcctggaaagaagagaccggtagagccatcaccccagcgttctccagactcctctacgggcatcggcaagaagggccaacagcccgccagaaaaagactcaattttggtcagactggcgactcagagtcagttccagaccctcaacctctcggagaacctccagcagcgccctctggtgtgggacctaatacaatggctgcaggcggtggcgcaccaatggcagacaataacgaaggcgccgacggagtgggtagttcctcgggaaattggcattgcgattccacatggctgggcgacagagtcatcaccaccagcacccgaacctgggccctgcccacctacaacaaccacctctacaagcaaatctccaacgggacatcgggaggagccaccaacgacaacacctacttcggctacagcaccccctgggggtattttgactttaacagattccactgccacttttcaccacgtgactggcagcgactcatcaacaacaactggggattccggcccaagagactcagcttcaagctcttcaacatccaggtcaaggaggtcacgcagaatgaaggcaccaagaccatcgccaataacctcaccagcaccatccaggtgtttacggactcggagtaccagctgccgtacgttctcggctctgcccaccagggctgcctgcctccgttcccggcggacgtgttcacgattccccagtacggctacctaacactcaacaacggtagtcaggccgtgggacgctcctccttctactgcctggaatactttccttcgcagatgctgagaaccggcaacaacttccagtttacttacaccttcgaggacgtgcctttccacagcagctacgcccacagccagagcttggaccggctgatgaatcctctgattgaccagtacctgtactacttgtctcggattcaaacaacaggaggcacggcaaatacgcagactctgggcttcagccaaggtgggcctaatacaatggccaatcaggcaaagaactggctgccaggaccctgttaccgccaacaacgcgtctcaacgacaaccgggcaaaacaacaatagcaactttgcctggactgctgggaccaaataccatctgaatggaagaaattcattggctaatcctggcatcgctatggcaacacacaaagacgacgaggagcgtttttttcccagtaacgggatcctgatttttggcaaacaaaatgctgccagagacaatgcggattacagcgatgtcatgcccaccagcgaggaagaaatcaaaaccactaaccctgtggccacagaggaatacggtatcgtggcagataacttgcagcagcaaaacacggctcctcaaattggaactgtcaacagccagggggccttacccggtatggtctggcagaaccgggacgtgtacctgcagggtcccatctgggccaagattcctcacacggacggcaacttccacccgtctccgctgatgggcggctttggcctgaaacatcctccgcctcagatcctgatcaagaacacgcctgtacctgcggatcctccgaccaccttcaaccagtcaaagctgaactctttcatcacgcaatacagcaccggacaggtcagcgtggaaattgaatgggagctgcagaaggaaaacagcaagcgctggaaccccgagatccagtacacctccaactactacaaatctacaagtgtggactttgctgttaatacagaaggcgtgtactctgaaccccgccccattggcacccgttacctcacccgtaatctgtaa

SEQ ID NO: 1563 - DNA, 2217 bp, Artificial Sequence
  Synthetic Polynucleotide
atggctgccgatggttatcttccagattggctcgaggacaacctctctgagggcattcgcgagtggtgggcgctgaaacctggagccccgaagcccaaagccaaccagcaaaagcaggacgacggccggggtctggtgcttcctggctacaagtacctcggacccttcaacggactcgacaagggggagcccgtcaacgcggcggacgcggcggccctcgagcacgacaaggcctacgaccagcagctgcaggcgggtgacaatccgtacctgcggtataaccacgccgacgccgagtttcaggagcgtctgcaagaagatacgtcttttgggggcaacctcgggcgagcagtcttccaggccaagaagcgggttctcgaacctctcggtctggttgaggaaggcgctaagacggctcctggaaagaagagaccggtagagccatcaccccagcgttctccagactcctctacgggcatcggcaagaagggccaacagcccgccagaaaaagactcaattttggtcagactggcgactcagagtcagttccagaccctcaacctctcggagaacctccagcagcgccctctggtgtgggacctaatacaatggctgcaggcggtggcgcaccaatggcagacaataacgaaggcgccgacggagtgggtagttcctcgggaaattggcattgcgattccacatggctgggcgacagagtcatcaccaccagcacccgaacctgggccctgcccacctacaacaaccacctctacaagcaaatctccaacgggacatcgggaggagccaccaacgacaacacctacttcggctacagcaccccctgggggtattttgactttaacagattccactgccacttttcaccacgtgactggcagcgactcatcaacaacaactggggattccggcccaagagactcagcttcaagctcttcaacatccaggtcaaggaggtcacgcagaatgaaggcaccaagaccatcgccaataacctcaccagcaccatccaggtgtttacggactcggagtaccagctgccgtacgttctcggctctgcccaccagggctgcctgcctccgttcccggcggacgtgttcacgattccccagtacggctacctaacactcaacaacggtagtcaggccgtgggacgctcctccttctactgcctggaatactttccttcgcagatgctgagaaccggcaacaacttccagtttacttacaccttcgaggacgtgcctttccacagcagctacgcccacagccagagcttggaccggctgatgaatcctctgattgaccagtacctgtactacttgtctcggattcaaacaacaggaggcacggcaaatacgcagactctgggcttcagccaaggtgggcctaatacaatggccaatcgggcaaagaactggctgccaggaccctgttaccgccaacaacgcgtctcaacgacaaccgggcaaaacaacaatagcaactttgcctggactgctgggaccaaataccatctgaatggaagaaattcattggctaatcctggcatcgctatggcaacacacaaagacgacgaggagcgtttttttcccagtaacgggatcctgatttttggcaaacaaaatgctgccagagacaatgcggattacagcgatgtcatgcccaccagcgaggaagaaatcaaaaccactaaccctgtggccacagaggaatacggtatcgtggcagataacttgcagcagcaaaacacggctcctcaaattggaactgtcaacagccagggggccttacccggtatggtctggcagaaccgggacgtgtacctgcagggtcccatctgggccaagattcctcacacggacggcaacttccacccgtctccgctgatgggcggctttggcctgaaacatcctccgcctcagatcctgatcaagaacacgcctgtacctgcggatcctccgaccaccttcaaccagtcaaagctgaactctttcatcacgcaatacagcaccggacaggtcagcgtggaaattgaatgggagctgcagaaggaaaacagcaagcgctggaaccccgagatccagtacacctccaactactacaaatctacaagtgtggactttgctgttaatacagaaggcgtgtactctgaaccccgccccattggcacccgttacctcacccgtaatctgtaa

SEQ ID NO: 1564 - DNA, 2217 bp, Artificial Sequence
  Synthetic Polynucleotide
atggctgccgatggttatcttccagattggctcgaggacaacctctctgagggcattcgcgagtggtgggcgctgaaacctggagccccgaagcccaaagccaaccagcaaaagcaggacgacggccggggtctggtgcttcctggctacaagtacctcggacccttcaacggactcgacaagggggagcccgtcaacgcggcggacgcggcggccctcgagcacgacaaggcctacgaccagcagctgcaggcgggtgacaatccgtacctgcggtataaccacgccgacgccgagtttcaggagcgtctgcaagaagatacgtcttttgggggcaacctcgggcgagcagtcttccaggccaagaagcgggttctcgaacctctcggtctggttgaggaaggcgctaagacggctcctggaaagaagagaccggtagagccatcaccccagcgttctccagactcctctacgggcatcggcaagaagggccaacagcccgccagaaaaagactcaattttggtcagactggcgactcagagtcagttccagaccctcaacctctcggagaacctccagcagcgccctctggtgtgggacctaatacaatggctgcaggcggtggcgcaccaatggcagacaataacgaaggcgccgacggagtgggtagttcctcgggaaattggcattgcgattccacatggctgggcgacagagtcatcaccaccagcacccgaacctgggccctgcccacctacaacaaccacctctacaagcaaatctccaacgggacatcgggaggagccaccaacgacaacacctacttcggctacagcaccccctgggggtattttgactttaacagattccactgccacttttcaccacgtgactggcagcgactcatcaacaacaactggggattccggcccaagagactcagcttcaagctcttcaacatccaggtcaaggaggtcacgcagaatgaaggcaccaagaccatcgccaataacctcaccagcaccatccaggtgtttacggactcggagtaccagctgccgtacgttctcggctctgcccaccagggctgcctgcctccgttcccggcggacgtgttcacgattccccagtacggctacctaacactcaacaacggtagtcaggccgtgggacgctcctccttctactgcctggaatactttccttcgcagatgctgagaaccggcaacaacttccagtttacttacaccttcgaggacgtgcctttccacagcagctacgcccacagccagagcttggaccggctgatgaatcctctgattgaccagtacctgtactacttgtctcggattcaaacaacaggaggcacggcaaatacgcagactctgggcttcagccaaggtgggcctaatacaatggccaatcaggcaaagaactggctgccaggaccctgttaccgccaacaacgcgtctcaacgacaaccgggcaaaacaacaatagcaactttgcccggactgctgggaccaaataccatctgaatggaagaaattcattggctaatcctggcatcgctatggcaacacacaaagacgacgaggagcgtttttttcccagtaacgggatcctgatttttggcaaacaaaatgctgccagagacaatgcggattacagcgatgtcatgcccaccagcgaggaagaaatcaaaaccactaaccctgtggccacagaggaatacggtatcgtggcagataacttgcagcagcaaaacacggctcctcaaattggaactgtcaacagccagggggccttacccggtatggtctggcagaaccgggacgtgtacctgcagggtcccatctgggccaagattcctcacacggacggcaacttccacccgtctccgctgatgggcggctttggcctgaaacatcctccgcctcagatcctgatcaagaacacgcctgtacctgcggatcctccgaccaccttcaaccagtcaaagctgaactctttcatcacgcaatacagcaccggacaggtcagcgtggaaattgaatgggagctgcagaaggaaaacagcaagcgctggaaccccgagatccagtacacctccaactactacaaatctacaagtgtggactttgctgttaatacagaaggcgtgtactctgaaccccgccccattggcacccgttacctcacccgtaatctgtaa

SEQ ID NO: 1565 - DNA, 2217 bp, Artificial Sequence
  Synthetic Polynucleotide
atggctgccgatggttatcttccagattggctcgaggacaacctctctgagggcattcgcgagtggtgggcgctgaaacctggagccccgaagcccaaagccaaccagcaaaagcaggacgacggccggggtctggtgcttcctggctacaagtacctcggacccttcaacggactcgacaagggggagcccgtcaacgcggcggacgcggcggccctcgagcacgacaaggcctacgaccagcagctgcaggcgggtgacaatccgtacctgcggtataaccacgccgacgccgagtttcaggagcgtctgcaagaagatacgtcttttgggggcaacctcgggcgagcagtcttccaggccaagaagcgggttctcgaacctctcggtctggttgaggaaggcgctaagacggctcctggaaagaagagaccggtagagccatcaccccagcgttctccagactcctctacgggcatcggcaagaagggccaacagcccgccagaaaaagactcaattttggtcagactggcgactcagagtcagttccagaccctcaacctctcggagaacctccagcagcgccctctggtgtgggacctaatacaatggctgcaggcggtggcgcaccaatggcagacaataacgaaggcgccgacggagtgggtagttcctcgggaaattggcattgcgattccacatggctgggcgacagagtcatcaccaccagcacccgaacctgggccctgcccacctacaacaaccacctctacaagcaaatctccaacgggacatcgggaggagccaccaacgacaacacctacttcggctacagcaccccctgggggtattttgactttaacagatcccactgccacttttcaccacgtgactggcagcgactcatcaacaacaactggggattccggcccaagagactcagcttcaagctcttcaacatccaggtcaaggaggtcacgcagaatgaaggcaccaagaccatcgccaataacctcaccagcaccatccaggtgtttacggactcggagtaccagctgccgtacgttctcggctctgcccaccagggctgcctgcctccgttcccggcggacgtgttcacgattccccagtacggctacctaacactcaacaacggtagtcaggccgtgggacgctcctccttctactgcctggaatactttccttcgcagatgctgagaaccggcaacaacttccagtttacttacaccttcgaggacgtgcctttccacagcagctacgcccacagccagagcttggaccggctgatgaatcctctgattgaccagtacctgtactacttgtctcggattcaaacaacaggaggcacggcaaatacgcagactctgggcttcagccaaggtgggcctaatacaatggccaatcaggcaaagaactggctgccaggaccctgttaccgccaacaacgcgtctcaacgacaaccgggcaaaacaacaatagcaactttgcctggactgctgggaccaaataccatctgaatggaagaaattcattggctaatcctggcatcgctatggcaacacacaaagacgacgaggagcgtttttttcccagtaacgggatcctgatttttggcaaacaaaatgctgccagagacaatgcggattacagcgatgtcatgcccaccagcgaggaagaaatcaaaaccactaaccctgtggccacagaggaatacggtatcgtggcagataacttgcagcagcaaaacacggctcctcaaattggaactgtcaacagccagggggccttacccggtatggtctggcagaaccgggacgtgtacctgcagggtcccatctgggccaagattcctcacacggacggcaacttccacccgtctccgctgatgggcggctttggcctgaaacatcctccgcctcagatcctgatcaagaacacgcctgtacctgcggatcctccgaccaccttcaaccagtcaaagctgaactctttcatcacgcaatacagcaccggacaggtcagcgtggaaattgaatgggagctgcagaaggaaaacagcaagcgctggaaccccgagatccagtacacctccaactactacaaatctacaagtgtggactttgctgttaatacagaaggcgtgtactctgaaccccgccccattggcacccgttacctcacccgtaatctgtaa

SEQ ID NO: 1566 - DNA, 2217 bp, Artificial Sequence
  Synthetic Polynucleotide
atggctgccgatggttatcttccagattggctcgaggacaacctctctgagggcattcgcgagtggtgggcgctgaaacctggagccccgaagcccaaagccaaccagcaaaagcaggacgacggccggggtctggtgcttcctggctacaagtacctcggacccttcaacggactcgacaagggggagcccgtcaacgcggcggacgcggcggccctcgagcacgacaaggcctacgaccagcagctgcaggcgggtgacaatccgtacctgcggtataaccacgccgacgccgagtttcaggagcgtctgcaagaagatacgtcttttgggggcaacctcgggcgagcagtcttccaggccaagaagcgggttctcgaacctctcggtctggttgaggaaggcgctaagacggctcctggaaagaagagaccggtagagccatcaccccagcgttctccagactcctctacgggcatcggcaagaagggccaacagcccgccagaaaaagactcaattttggtcagactggcgactcagagtcagttccagaccctcaacctctcggagaacctccagcagcgccctctggtgtgggacctaatacaatggctgcaggcggtggcgcaccaatggcagacaataacgaaggcgccgacggagtgggtagttcctcgggaaattggcattgcgattccacatggctgggcgacagagtcatcaccaccagcacccgaacctgggccctgcccacctacaacaaccacctctacaagcaaatctccaacgggacatcgggaggagccaccaacgacaacacctacttcggctacagcaccccctgggggtattttgactttaacagattccactgccacttttcaccacgtgactggcagcgactcatcaacaacaactggggattccggcccaagagactcagcttcaagctcttcaacatccaggtcaaggaggtcacgcagaatgaaggcaccaagaccatcgccaataacctcaccagcaccatccaggtgtttacggactcggagtaccagctgccgtacgttctcggctctgcccaccagggctgcctgcctccgttcccggcggacgtgttcacgattccccagtacggctacctaacactcaacaacggtagtcaggccgtgggacgctcctccttctactgcctggaatactttccttcgcagatgctgagaaccggcaacaacttccagtttacttacaccttcgaggacgtgcctttccacagcagctacgcccacagccagagcttggaccggctgatgaatcctctgattgaccagtacctgtactacttgtctcggattcaaacaacaggaggcacggcaaatacgcagactctgggcttcggccaaggtgggcctaatacaatggccaatcaggcaaagaactggctgccaggaccctgttaccgccaacaacgcgtctcaacgacaaccgggcaaaacaacaatagcaactttgcctggactgctgggaccaaataccatctgaatggaagaaattcattggctaatcctggcatcgctatggcaacacacaaagacgacgaggagcgtttttttcccagtaacgggatcctgatttttggcaaacaaaatgctgccagagacaatgcggattacagcgatgtcatgcccaccagcgaggaagaaatcaaaaccactaaccctgtggccacagaggaatacggtatcgtggcagataacttgcagcagcaaaacacggctcctcaaattggaactgtcaacagccagggggccttacccggtatggtctggcagaaccgggacgtgtacctgcagggtcccatctgggccaagattcctcacacggacggcaacttccacccgtctccgctgatgggcggctttggcctgaaacatcctccgcctcagatcctgatcaagaacacgcctgtacctgcggatcctccgaccaccttcaaccagtcaaagctgaactctttcatcacgcaatacagcaccggacaggtcagcgtggaaattgaatgggagctgcagaaggaaaacagcaagcgctggaaccccgagatccagtacacctccaactactacaaatctacaagtgtggactttgctgttaatacagaaggcgtgtactctgaaccccgccccattggcacccgttacctcacccgtaatctgtaa

SEQ ID NO: 1567 - DNA, 2217 bp, Artificial Sequence
  Synthetic Polynucleotide
atggctgccgatggttatcttccagattggctcgaggacaacctctctgagggcattcgcgagtggtgggcgctgaaacctggagccccgaagcccaaagccaaccagcaaaagcaggacgacggccggggtctggtgcttcctggctacaagtacctcggacccttcaacggactcgacaagggggagcccgtcaacgcggcggacgcggcggccctcgagcacgacaaggcctacgaccagcagctgcaggcgggtgacaatccgtacctgcggtataaccacgccgacgccgagtttcaggagcgtctgcaagaagatacgtcttttgggggcaacctcgggcgagcagtcttccaggccaagaagcgggttctcgaacctctcggtctggttgaggaaggcgctaagacggctcctggaaagaagagaccggtagagccatcaccccagcgttctccagactcctctacgggcatcggcaagaagggccaacagcccgccagaaaaagactcaattttggtcagactggcgactcagagtcagttccagaccctcaacctctcggagaacctccagcagcgccctctggtgtgggacctaatacaatggctgcaggcggtggcgcaccaatggcagacaataacgaaggcgccgacggagtgggtagttcctcgggaaattggcattgcgattccacatggctgggcgacagagtcatcaccaccagcacccgaacctgggccctgcccacctacaacaaccacctctacaagcaaatctccaacgggacatcgggaggagccaccaacgacaacacctacttcggctacagcaccccctgggggtattttgactttaacagattccactgccacttttcaccacgtgactggcagcgactcatcaacaacaactggggattccggcccaagagactcagcttcaagctcttcaacatccaggtcaaggaggtcacgcagaatgaaggcaccaagaccatcgccaataacctcaccagcaccatccaggtgtttacggactcggagtaccagctgccgtacgttctcggctctgcccaccagggctgcctgcctccgttcccggcggacgtgttcacgattccccagtacggctacctaacactcaacaacggtagtcaggccgtgggacgctcctccttctactgcctggaatactttccttcgcagatgctgagaaccggcaacaacttccagtttacttacaccttcgaggacgtgcctttccacagcagctacgcccacagccagagcttggaccggctgatgaatcctctgattgaccagtacctgtactacttgtctcggattcaaacaacaggaggcacggcaaatacgcagactctgggcttcagccaaggtgggcctaatacaatggccaatcaggcaaagaactggctgccaggaccctgttaccgccaacaacgcgcctcaacgacaaccgggcaaaacaacaatagcaactttgcctggactgctgggaccaaataccatctgaatggaagaaattcattggctaatcctggcatcgctatggcaacacacaaagacgacgaggagcgtttttttcccagtaacgggatcctgatttttggcaaacaaaatgctgccagagacaatgcggattacagcgatgtcatgcccaccagcgaggaagaaatcaaaaccactaaccctgtggccacagaggaatacggtatcgtggcagataacttgcagcagcaaaacacggctcctcaaattggaactgtcaacagccagggggccttacccggtatggtctggcagaaccgggacgtgtacctgcagggtcccatctgggccaagattcctcacacggacggcaacttccacccgtctccgctgatgggcggctttggcctgaaacatcctccgcctcagatcctgatcaagaacacgcctgtacctgcggatcctccgaccaccttcaaccagtcaaagctgaactctttcatcacgcaatacagcaccggacaggtcagcgtggaaattgaatgggagctgcagaaggaaaacagcaagcgctggaaccccgagatccagtacacctccaactactacaaatctacaagtgtggactttgctgttaatacagaaggcgtgtactctgaaccccgccccattggcacccgttacctcacccgtaatctgtaa

SEQ ID NO: 1568 - DNA, 2217 bp, Artificial Sequence
  Synthetic Polynucleotide
atggctgccgatggttatcttccagattggctcgaggacaacctctctgagggcattcgcgagtggtgggcgctgaaacctggagccccgaagcccaaagccaaccagcaaaagcaggacgacggccggggtctggtgcttcctggctacaagtacctcggacccttcaacggactcgacaagggggagcccgtcaacgcggcggacgcggcggccctcgagcacgacaaggcctacgaccagcagctgcaggcgggtgacaatccgtacctgcggtataaccacgccgacgccgagtttcaggagcgtctgcaagaagatacgtcttttgggggcaacctcgggcgagcagtcttccaggccaagaagcgggttctcgaacctctcggtctggttgaggaaggcgctaagacggctcctggaaagaagagaccggtagagccatcaccccagcgttctccagactcctctacgggcatcggcaagaagggccaacagcccgccagaaaaagactcaattttggtcagactggcgactcagagtcagttccagaccctcaacctctcggagaacctccagcagcgccctctggtgtgggacctaatacaatggctgcaggcggtggcgcaccaatggcagacaataacgaaggcgccgacggagtgggtagttcctcgggaaattggcattgcgattccacatggctgggcgacagagtcatcaccaccagcacccgaacctgggccctgcccacctacaacaaccacctctacaagcaaatctccaacgggacatcgggaggagccaccaacgacaacacctacttcggctacagcaccccctgggggtattttgactttaacagattccactgccacttttcaccacgtgactggcagcgactcatcaacaacaactggggattccggcccaagagactcagcttcaagctcttcaacatccaggtcaaggaggtcacgcagaatgaaggcaccaagaccatcgccaataacctcaccagcaccatccaggtgtttacggactcggagtaccagctgccgtacgttctcggctctgcccaccagggctgcctgcctccgttcccggcggacgtgttcacgattccccagtacggctacctaacactcaacaacggtagtcaggccgtgggacgctcctccttctactgcctggaatactttccttcgcagatgctgagaaccggcaacaacttccagtttacttacaccttcgaggacgtgcctttccacagcagctacgcccacagccagagcttggaccggctgatgaatcctctgattgaccagtacctgtactacttgtctcggattcaaacaacaggaggcacggcaaatacgcagactctgggcttcagccaaggtgggcctaatacaatggccaatcaggcaaagaactggctgccaggaccctgttaccgccaacaacgcgtctcaacgacaaccgggcaaaacaacaatagcaactttgcctggactgctgggaccaaataccatctgaatggaagaaattcattggctaatcctggcatcgctatggcaacacacaaagacgacgaggagcgtttttttcccagtaacgggatcctgatttttggcaaacaaaatgctgccagagacaatgcggattacagcgatgtcatacccaccagcgaggaagaaatcaaaaccactaaccctgtggccacagaggaatacggtatcgtggcagataacttgcagcagcaaaacacggctcctcaaattggaactgtcaacagccagggggccttacccggtatggtctggcagaaccgggacgtgtacctgcagggtcccatctgggccaagattcctcacacggacggcaacttccacccgtctccgctgatgggcggctttggcctgaaacatcctccgcctcagatcctgatcaagaacacgcctgtacctgcggatcctccgaccaccttcaaccagtcaaagctgaactctttcatcacgcaatacagcaccggacaggtcagcgtggaaattgaatgggagctgcagaaggaaaacagcaagcgctggaaccccgagatccagtacacctccaactactacaaatctacaagtgtggactttgctgttaatacagaaggcgtgtactctgaaccccgccccattggcacccgttacctcacccgtaatctgtaa

SEQ ID NO: 1569 - DNA, 2217 bp, Artificial Sequence
  Synthetic Polynucleotide
atggctgccgatggttatcttccagattggctcgaggacaacctctctgagggcattcgcgagtggtgggcgctgaaacctggagccccgaagcccaaagccaaccagcaaaagcaggacgacggccggggtctggtgcttcctggctacaagtacctcggacccttcaacggactcgacaagggggagcccgtcaacgcggcggacgcggcggccctcgagcacgacaaggcctacgaccagcagctgcaggcgggtgacaatccgtacctgcggtataaccacgccgacgccgagtttcaggagcgtctgcaagaagatacgtcttttgggggcaacctcgggcgagcagtcttccaggccaagaagcgggttctcgaacctctcggtctggttgaggaaggcgctaagacggctcctggaaagaagagaccggtagagccatcaccccagcgttctccagactcctctacgggcatcggcaagaagggccaacagcccgccagaaaaagactcaattttggtcagactggcgactcagagtcagttccagaccctcaacctctcggagaacctccagcagcgccctctggtgtgggacctaatacaatggctgcaggcggtggcgcaccaatggcagacaataacgaaggcgccgacggagtgggtagttcctcgggaaattggcattgcgattccacatggctgggcgacagagtcatcaccaccagcacccgaacctgggccctgcccacctacaacaaccacctctacaagcaaatctccaacgggacatcgggaggagccaccaacgacaacacctacttcggctacagcaccccctgggggtattttgactttaacagattccactgccacttttcaccacgtgactggcagcgactcatcaacaacaactggggattccggcccaagagactcagcttcaagctcttcaacatccaggtcaaggaggtcacgcagaatgaaggcaccaagaccatcgccaataacctcaccagcaccatccaggtgtttacggactcggagtaccagctgccgtacgttctcggctctgcccaccagggctgcctgcctccgttcccggcggacgtgttcacgattccccagtacggctacctaacactcaacaacggtagtcaggccgtgggacgctcctccttctactgcctggaatactttccttcgcagatgctgagaaccggcaacaacttccagtttacttacaccttcgaggacgtgcctttccacagcagctacgcccacagccagagcttggaccggctgatgaatcctctgattgaccagtacctgtactacttgtctcggattcaaacaacaggaggcacggcaaatacgcagactctgggcttcagccaaggtgggcctaatacaatggccaatcaggcaaagaactggctgccaggaccctgttaccgccaacaacgcgtctcaacgacaaccgggcaaaacaacaatagcaactttgcctggactgctgggaccaaataccatctgaatggaagaaattcattggctaatcctggcatcgctatggcaacacacaaagacgacgaggagcgtttttttcccagtaacgggatcctgatttttggcaaacaaaatgctgccagagacaatgcggattacagcgatgtcatgcccaccagcgaggaagaaatcaaaaccactaaccctgtggccacagaggaatacggtatcgtggcagataacttgcagcagcaaaacacggctcctcaaattggaactgccaacagccagggggccttacccggtatggtctggcagaaccgggacgtgtacctgcagggtcccatctgggccaagattcctcacacggacggcaacttccacccgtctccgctgatgggcggctttggcctgaaacatcctccgcctcagatcctgatcaagaacacgcctgtacctgcggatcctccgaccaccttcaaccagtcaaagctgaactctttcatcacgcaatacagcaccggacaggtcagcgtggaaattgaatgggagctgcagaaggaaaacagcaagcgctggaaccccgagatccagtacacctccaactactacaaatctacaagtgtggactttgctgttaatacagaaggcgtgtactctgaaccccgccccattggcacccgttacctcacccgtaatctgtaa

SEQ ID NO: 1570 - DNA, 2217 bp, Artificial Sequence
  Synthetic Polynucleotide
atggctgccgatggttatcttccagattggctcgaggacaacctctctgagggcattcgcgagtggtgggcgctgaaacctggagccccgaagcccaaagccaaccagcaaaagcaggacgacggccggggtctggtgcttcctggctacaagtacctcggacccttcaacggactcgacaagggggagcccgtcaacgcggcggacgcggcggccctcgagcacgacaaggcctacgaccagcagctgcaggcgggtgacaatccgtacctgcggtataaccacgccgacgccgagtttcaggagcgtctgcaagaagatacgtcttttgggggcaacctcgggcgagcagtcttccaggccaagaagcgggttctcgaacctctcggtctggttgaggaaggcgctaagacggctcctggaaagaagagaccggtagagccatcaccccagcgttctccagactcctctacgggcatcggcaagaagggccaacagcccgccagaaaaagactcaattttggtcagactggcgactcagagtcagttccagaccctcaacctctcggagaacctccagcagcgccctctggtgtgggacctaatacaatggctgcaggcggtggcgcaccaatggcagacaataacgaaggcgccgacggagtgggtagttcctcgggaaattggcattgcgattccacatggctgggcgacagagtcatcaccaccagcacccgaacctgggccctgcccacctacaacaaccacctctacaagcaaatctccaacgggacatcgggaggagccaccaacgacaacacctacttcggctacagcaccccctgggggtattttgactttaacagattccactgccacttttcaccacgtgactggcagcgactcatcaacaacaactggggattccggcccaagagactcagcttcaagctcttcaacatccaggtcaaggaggtcacgcagaatgaaggcaccaagaccatcgccaataacctcaccagcaccatccaggtgtttacggactcggagtaccagctgccgtacgttctcggctctgcccaccagggctgcctgcctccgttcccggcggacgtgttcacgattccccagtacggctacctaacactcaacaacggtagtcaggccgtgggacgctcctccttctactgcctggaatactttccttcgcagatgctgagaaccggcaacaacttccagtttacttacaccttcgaggacgtgcctttccacagcagctacgcccacagccagagcttggaccggctgatgaatcctctgattgaccagtacctgtactacttgtctcggattcaaacaacaggaggcacggcaaatacgcagactctgggcttcagccaaggtgggcctaatacaatggccaatcaggcaaagaactggctgccaggaccctgttaccgccaacaacgcgtctcaacgacaaccgggcaaaacaacaatagcaactttgcctggactgctgggaccaaataccatctgaatggaagaaattcattggctaatcctggcatcgctatggcaacacacaaagacgacgaggagcgtttttttcccagtaacgggatcctgatttttggcaaacaaaatgctgccagagacaatgcggattacagcgatgtcatgcccaccagcgaggaagaaatcaaaaccactaaccctgtggccacagaggaatacggtatcgtggcagataacttgcagcagcaaaacacggctcctcaaattggaactgtcaacagccagggggccttacccggtatggtctggcagaaccgggacgtgtacctgcagggtcccatctgggccaagattcctcacacggacggcaacttccacccgtctccgctgatgggcggctttggcctgaaacatcctccgcctcagatcctgatcaagaacacgcctgtacctgcggatcctccgaccaccttcaaccagtcaaagctgaactctttcatcacgcaatacagcaccggacaggtcggcgtggaaattgaatgggagctgcagaaggaaaacagcaagcgctggaaccccgagatccagtacacctccaactactacaaatctacaagtgtggactttgctgttaatacagaaggcgtgtactctgaaccccgccccattggcacccgttacctcacccgtaatctgtaa

SEQ ID NO: 1571 - DNA, 2217 bp, Artificial Sequence
  Synthetic Polynucleotide
atggctgccgatggttatcttccagattggctcgaggacaacctctctgagggcattcgcgagtggtgggcgctgaaacctggagccccgaagcccaaagccaaccagcaaaagcaggacgacggccggggtctggtgcttcctggctacaagtacctcggacccttcaacggactcgacaagggggagcccgtcaacgcggcggacgcggcggccctcgagcacggcaaggcctacgaccagcagctgcaggcgggtgacaatccgtacctgcggtataaccacgccgacgccgagtttcaggagcgtctgcaagaagatacgtcttttgggggcaacctcgggcgagcagtcttccaggccaagaagcgggttctcgaacctctcggtctggttgaggaaggcgctaagacggctcctggaaagaagagaccggtagagccatcaccccagcgttctccagactcctctacgggcatcggcaagaagggccaacagcccgccagaaaaagactcaattttggtcagactggcgactcagagtcagttccagaccctcaacctctcggagaacctccagcagcgccctctggtgtgggacctaatacaatggctgcaggcggtggcgcaccaatggcagacaataacgaaggcgccgacggagtgggtagttcctcgggaaattggcattgcgattccacatggctgggcgacagagtcatcaccaccagcacccgaacctgggccctgcccacctacaacaaccacctctacaagcaaatctccaacgggacatcgggaggagccaccaacgacaacacctacttcggctacagcaccccctgggggtattttgactttaacagattccactgccacttttcaccacgtgactggcagcgactcatcaacaacaactggggattccggcccaagagactcagcttcaagctcttcaacatccaggtcaaggaggtcacgcagaatgaaggcaccaagaccatcgccaataacctcaccagcaccatccaggtgtttacggactcggagtaccagctgccgtacgttctcggctctgcccaccagggctgcctgcctccgttcccggcggacgtgttcacgattccccagtacggctacctaacactcaacaacggtagtcaggccgtgggacgctcctccttctactgcctggaatactttccttcgcagatgctgagaaccggcaacaacttccagtttacttacaccttcgaggacgtgcctttccacagcagctacgcccacagccagagcttggaccggctgatgaatcctctgattgaccagtacctgtactacttgtctcggattcaaacaacaggaggcacggcaaatacgcagactctgggcttcagccaaggtgggcctaatacaatggccaatcaggcaaagaactggctgccaggaccctgttaccgccaacaacgcgtctcaacgacaaccgggcaaaacaacaatagcaactttgcctggactgctgggaccaaataccatctgaatggaagaaattcattggctaatcctggcatcgctatggcaacacacaaagacgacgaggagcgtttttttcccagtaacgggatcctgatttttggcaaacaaaatgctgccagagacaatgcggattacagcgatgtcatgcccaccagcgaggaagaaatcaaaaccactaaccctgtggccacagaggaatacggtatcgtggcagataacttgcagcagcaaaacacggctcctcaaattggaactgtcaacagccagggggccttacccggtatggtctggcagaaccgggacgtgtacctgcagggtcccatctgggccaagattcctcacacggacggcaacttccacccgtctccgctgatgggcggctttggcctgaaacatcctccgcctcagatcctgatcaagaacacgcctgtacctgcggatcctccgaccaccttcaaccagtcaaagctgaactctttcatcacgcaatacagcaccggacaggtcagcgtggaaattgaatgggagctgcagaaggaaaacagcaagcgctggaaccccgagatccagtacacctccaactactacaaatctacaagtgtggactttgctgttaatacagaaggcgtgtactctgaaccccgccccattggcacccgttacctcacccgtaatctgtaa

SEQ ID NO: 1572 - DNA, 2217 bp, Artificial Sequence
  Synthetic Polynucleotide
atggctgccgatggttatcttccagattggctcgaggacaacctctctgagggcattcgcgagtggtgggcgctgaaacctggagccccgaagcccaaagccaaccagcaaaagcaggacgacggccggggtctggtgcttcctggctacaagtacctcggacccttcaacggactcgacaagggggagcccgtcaacgcggcggacgcggcggccctcgagcacgacaaggcctacgaccagcagctgcaggcgggtgacaatccgtacctgcggtataaccacgccgacgccgagtttcaggagcgtctgcaagaagatacgtcttttgggggcaacctcgggcgagcagtcttccaggccaagaagcgggttctcgaacctctcggtctggttgaggaaggcgctaagacggctcctggaaagaagagaccggtagagccatcaccccagcgttctccagactcctctacgggcatcggcaagaagggccaacagcccgccagaaaaagactcaattttggtcagactggcgactcagagtcagttccagaccctcaacctctcggagaacctccagcagcgccctctggtgtgggacctaatacaatggctgcaggcggtggcgcaccaatggcagacaataacgaaggcgccgacggagtgggtagttcctcgggaaattggcattgcgattccacatggctgggcgacagagtcatcaccaccagcacccgaacctgggccctgcccacctacaacaaccacctctacaagcaaatctccaacgggacatcgggaggagccaccaacgacaacacctacttcggctacagcaccccctgggggtattttgactttaacagattccactgccacttttcaccacgtgactggcagcgactcatcaacaacaactggggattccggcccaagagactcagcttcaagctcttcaacatccaggtcaaggaggtcacgcagaatgaaggcaccaagaccatcgccaataacctcaccagcaccatccaggtgtttacggactcggagtaccagctgccgtacgttctcggctctgcccaccagggctgcctgcctccgttcccggcggacgtgttcacgattccccagtacggctacctaacactcaacaacggtagtcaggccgtgggacgctcctccttctactgcctggaatactttccttcgcagatgctgagaaccggcaacaacttccagtttacttacaccttcgaggacgtgcctttccacagcagctacgcccacagccagagcttggaccggctgatgaatcctctgattgaccagtacctgtactacttgtctcggattcaaacaacaggaggcacggcaaatacgcagactctgggcttcagccaaggtgggcctaatacaatggccaatcaggcaaagaactggctgccaggaccctgttaccgccaacaacgcgtctcaacgacaaccgggcaaaacaacaatagcaactttgcctggactgctgggaccaaataccatctgaatggaagaaattcattggctaatcctggcatcgctatggcaacacacaaagacgacgaggagcgtttttttcccagtaacgggatcctgatttttggcaaacaaaatgctgccagagacaatgcggattacagcgatgtcatgcccaccagcgaggaagaaatcaaaaccactaaccctgtggccacaggggaatacggtatcgtggcagataacttgcagcagcaaaacacggctcctcaaattggaactgtcaacagccagggggccttacccggtatggtctggcagaaccgggacgtgtacctgcagggtcccatctgggccaagattcctcacacggacggcaacttccacccgtctccgctgatgggcggctttggcctgaaacatcctccgcctcagatcctgatcaagaacacgcctgtacctgcggatcctccgaccaccttcaaccagtcaaagctgaactctttcatcacgcaatacagcaccggacaggtcagcgtggaaattgaatgggagctgcagaaggaaaacagcaagcgctggaaccccgagatccagtacacctccaactactacaaatctacaagtgtggactttgctgttaatacagaaggcgtgtactctgaaccccgccccattggcacccgttacctcacccgtaatctgtaa

SEQ ID NO: 1573 - DNA, 2217 bp, Artificial Sequence
  Synthetic Polynucleotide
atggctgccgatggttatcttccagattggctcgaggacaacctctctgagggcattcgcgagtggtgggcgctgaaacctggagccccgaagcccaaagccaaccagcaaaagcaggacgacggccggggtctggtgcttcctggctacaagtacctcggacccttcaacggactcgacaagggggagcccgtcaacgcggcggacgcggcggccctcgagcacgacaaggcctacgaccagcagctgcaggcgggtgacaatccgtacctgcggtataaccacgccgacgccgagtttcaggagcgtctgcaagaagatacgtcttttgggggcaacctcgggcgagcagtcttccaggccaagaagcgggttctcgaacctctcggtctggttgaggaaggcgctaagacggctcctggaaagaagagaccggtagagccatcaccccagcgttctccagactcctctacgggcatcggcaagaagggccaacagcccgccagaaaaagactcaattttggtcagactggcgactcagagtcagttccagaccctcaacctctcggagaacctccagcagcgccctctggtgtgggacctaatacaatggctgcaggcggtggcgcaccaatggcagacaataacgaaggcgccgacggagtgggtagttcctcgggaaattggcattgcgattccacatggctgggcgacagagtcatcaccaccagcacccgaacctgggccctgcccacccacaacaaccacctctacaagcaaatctccaacgggacatcgggaggagccaccaacgacaacacctacttcggctacagcaccccctgggggtattttgactttaacagattccactgccacttttcaccacgtgactggcagcgactcatcaacaacaactggggattccggcccaagagactcagcttcaagctcttcaacatccaggtcaaggaggtcacgcagaatgaaggcaccaagaccatcgccaataacctcaccagcaccatccaggtgtttacggactcggagtaccagctgccgtacgttctcggctctgcccaccagggctgcctgcctccgttcccggcggacgtgttcacgattccccagtacggctacctaacactcaacaacggtagtcaggccgtgggacgctcctccttctactgcctggaatactttccttcgcagatgctgagaaccggcaacaacttccagtttacttacaccttcgaggacgtgcctttccacagcagctacgcccacagccagagcttggaccggctgatgaatcctctgattgaccagtacctgtactacttgtctcggattcaaacaacaggaggcacggcaaatacgcagactctgggcttcagccaaggtgggcctaatacaatggccaatcaggcaaagaactggctgccaggaccctgttaccgccaacaacgcgtctcaacgacaaccgggcaaaacaacaatagcaactttgcctggactgctgggaccaaataccatctgaatggaagaaattcattggctaatcctggcatcgctatggcaacacacaaagacgacgaggagcgtttttttcccagtaacgggatcctgatttttggcaaacaaaatgctgccagagacaatgcggattacagcgatgtcatgcccaccagcgaggaagaaatcaaaaccactaaccctgtggccacagaggaatacggtatcgtggcagataacttgcagcagcaaaacacggctcctcaaattggaactgtcaacagccagggggccttacccggtatggtctggcagaaccgggacgtgtacctgcagggtcccatctgggccaagattcctcacacggacggcaacttccacccgtctccgctgatgggcggctttggcctgaaacatcctccgcctcagatcctgatcaagaacacgcctgtacctgcggatcctccgaccaccttcaaccagtcaaagctgaactctttcatcacgcaatacagcaccggacaggtcagcgtggaaattgaatgggagctgcagaaggaaaacagcaagcgctggaaccccgagatccagtacacctccaactactacaaatctacaagtgtggactttgctgttaatacagaaggcgtgtactctgaaccccgccccattggcacccgttacctcacccgtaatctgtaa

SEQ ID NO: 1574 - DNA, 2217 bp, Artificial Sequence
  Synthetic Polynucleotide
atggctgccgatggttatcttccagattggctcgaggacaacctctctgagggcattcgcgagtggtgggcgctgaaacctggagccccgaagcccaaagccaaccagcaaaagcaggacgacggccggggtctggtgcttcctggctacaagtacctcggacccttcaacggactcgacaagggggagcccgtcaacgcggcggacgcggcggccctcgagcacgacaaggcctacgaccagcagctgcaggcgggtgacaatccgtacctgcggtataaccacgccgacgccgagtttcaggagcgtctgcaagaagatacgtcttttgggggcaacctcgggcgagcagtcttccaggccaagaagcgggttctcgaacctctcggtctggttgaggaaggcgctaagacggctcctggaaagaagagaccggtagagccatcaccccagcgttctccagactcctctacgggcatcggcaagaagggccaacagcccgccagaaaaagactcaattttggtcagactggcgactcagagtcagttccagaccctcaacctctcggagaacctccagcagcgccctctggtgtgggacctaatacaatggctgcaggcggtggcgcaccaatggcagacaataacgaaggcgccgacggagtgggtagttcctcgggaaattggcattgcgattccacatggctgggcgacagagtcatcaccaccagcacccgaacctgggccctgcccacctacaacaaccacctctacaagcaaatctccaacgggacatcgggaggagccaccaacgacaacacctacttcggctacagcaccccctgggggtattttgactttaacagattccactgccacttttcaccacgtgactggcagcgactcatcaacaacaactggggattccggcccaagagactcagcttcaagctcttcaacatccaggtcaaggaggtcacgcagaatgaaggcaccaagaccatcgccaataacctcaccagcaccatccaggtgtttacggactcggagtaccagctgccgtacgttctcggctctgcccaccagggctgcctgcctccgttcccggcggacgtgttcacgattccccagtacggctacctaacactcaacaacggtagtcaggccgtgggacgctcctccttctactgcctggaatactttccttcgcagatgctgagaaccggcaacaacttccagtttacttacaccttcgaggacgtgcctttccacagcagctacgcccacagccagagcttggaccggctgatgaatcctctgattgaccagtacctgtactacttgtctcggattcaaacaacaggaggcacggcaaatacgcagactctgggcttcagccaaggtgggcctaatacaatggccaatcaggcaaagaactggctgccaggaccctgttaccgccaacaacgcgtctcaacgacaaccgggcaaaacaacaatagcaactttgcctggactgctgggaccaaataccatctgaatggaagaaattcattggctaatcctggcatcgctatggcaacacacaaagacgacgaggagcgtttttttcccagtaacgggatcctgatttttggcaaacaaaatgctgccatagacaatgcggattacagcgatgtcatgcccaccagcgaggaagaaatcaaaaccactaaccctgtggccacagaggaatacggtatcgtggcagataacttgcagcagcaaaacacggctcctcaaattggaactgtcaacagccagggggccttacccggtatggtctggcagaaccgggacgtgtacctgcagggtcccatctgggccaagattcctcacacggacggcaacttccacccgtctccgctgatgggcggctttggcctgaaacatcctccgcctcagatcctgatcaagaacacgcctgtacctgcggatcctccgaccaccttcaaccagtcaaagctgaactctttcatcacgcaatacagcaccggacaggtcagcgtggaaattgaatgggagctgcagaaggaaaacagcaagcgctggaaccccgagatccagtacacctccaactactacaaatctacaagtgtggactttgctgttaatacagaaggcgtgtactctgaaccccgccccattggcacccgttacctcacccgtaatctgtaa

SEQ ID NO: 1575 - DNA, 2217 bp, Artificial Sequence
  Synthetic Polynucleotide
atggctgccgatggttatcttccagattggctcgaggacaacctctctgagggcattcgcgagtggtgggcgctgaaacctggagccccgaagcccaaagccaaccagcaaaagcaggacgacggccggggtctggtgcttcctggctacaagtacctcggacccttcaacggactcgacaagggggagcccgtcaacgcggcggacgcggcggccctcgagcacgacaaggcctacgaccagcagctgcaggcgggtgacaatccgtacctgcggtataaccacgccgacgccgagtttcaggagcgtctgcaagaagatacgtcttttgggggcaacctcgggcgagcagtcttccaggccaagaagcgggttctcgaacctctcggtctggttgaggaaggcgctaagacggctcctggaaagaagagaccggtagagccatcaccccagcgttctccagactcctctacgggcatcggcaagaagggccaacagcccgccagaaaaagactcaattttggtcagactggcgactcagagtcagttccagaccctcaacctctcggagaacctccagcagcgccctctggtgtgggacctaatacaatggctgcaggcggtggcgcaccaatggcagacaataacgaaggcgccgacggagtgggtagttcctcgggaaattggcattgcgattccacatggctgggcgacagagtcatcaccaccagcacccgaacctgggccctgcccacctacaacaaccacctctacaagcaaatctccaacgggacatcgggaggagccaccaacgacaacacctacttcggctacagcaccccctgggggtattttgactttaacagattccactgccacttttcaccacgtgactggcagcgactcatcaacaacaactggggattccggcccaagagactcagcttcaagctcttcaacatccaggtcaaggaggtcacgcagaatgaaggcaccaagaccatcgccaataacctcaccagcaccatccaggtgtttacggactcggagtaccagctgccgtacgttctcggctctgcccaccagggctgcctgcctccgttcccggcggacgtgttcacgattccccagtacggctacctaacactcaacaacggtagtcaggccgtgggacgctcctccttctactgcctggaatactttccttcgcagatgctgagaaccggcaacaacttccagtttacttacaccttcgaggacgtgcctttccacagcagctacgcccacagccagagcttggaccggctgatgaatcctctgattgaccagtacctgtactacttgtctcggattcaaacaacaggaggcacggcaaatacgcagactctgggcttcagccaaggtgggcctaatacaatggccaatcaggcaaagaactggctgccaggaccctgttaccgccaacaacgcgtctcaacgacaaccgggcaaaacaacaatagcaactttgcctggactgctgggaccaaataccatctgaatggaagaaattcattggctaatcctggcatcgctatggcaacacacaaagacgacgaggggcgtttttttcccagtaacgggatcctgatttttggcaaacaaaatgctgccagagacaatgcggattacagcgatgtcatgcccaccagcgaggaagaaatcaaaaccactaaccctgtggccacagaggaatacggtatcgtggcagataacttgcagcagcaaaacacggctcctcaaattggaactgtcaacagccagggggccttacccggtatggtctggcagaaccgggacgtgtacctgcagggtcccatctgggccaagattcctcacacggacggcaacttccacccgtctccgctgatgggcggctttggcctgaaacatcctccgcctcagatcctgatcaagaacacgcctgtacctgcggatcctccgaccaccttcaaccagtcaaagctgaactctttcatcacgcaatacagcaccggacaggtcagcgtggaaattgaatgggagctgcagaaggaaaacagcaagcgctggaaccccgagatccagtacacctccaactactacaaatctacaagtgtggactttgctgttaatacagaaggcgtgtactctgaaccccgccccattggcacccgttacctcacccgtaatctgtaa

SEQ ID NO: 1576 - DNA, 2217 bp, Artificial Sequence
  Synthetic Polynucleotide
atggctgccgatggttatcttccagattggctcgaggacaacctctctgagggcattcgcgagtggtgggcgctgaaacctggagccccgaagcccaaagccaaccagcaaaagcaggacgacggccggggtctggtgcttcctggctacaagtacctcggacccttcaacggactcgacaagggggagcccgtcaacgcggcggacgcggcggccctcgagcacgacaaggcctacgaccagcagctgcaggcgggtgacaatccgtacctgcggtataaccacgccgacgccgagtttcaggagcgtctgcaagaagatacgtcttttgggggcaacctcgggcgagcagtcttccaggccaagaagcgggttctcgaacctctcggtctggttgaggaaggcgctaagacggctcctggaaagaagagaccggtagagccatcaccccagcgttctccagactcctctacgggcatcggcaagaagggccaacagcccgccagaaaaagactcaattttggtcagactggcgactcagagtcagttccagaccctcaacctctcggagaacctccagcagcgccctctggtgtgggacctaatacaatggctgcaggcggtggcgcaccaatggcagacaataacgaaggcgccgacggagtgggtagttcctcgggaaattggcattgcgattccacatggctgggcgacagagtcatcaccaccagcacccgaacctgggccctgcccacctacaacaaccacctctacaagcaaatctccaacgggacatcgggaggagccaccaacgacaacacctacttcggctacagcaccccctgggggtattttgactttaacagattccactgccacttttcaccacgtgactggcagcgactcatcaacaacaactggggattccggaccaagagactcagcttcaagctcttcaacatccaggtcaaggaggtcacgcagaatgaaggcaccaagaccatcgccaataacctcaccagcaccatccaggtgtttacggactcggagtaccagctgccgtacgttctcggctctgcccaccagggctgcctgcctccgttcccggcggacgtgttcacgattccccagtacggctacctaacactcaacaacggtagtcaggccgtgggacgctcctccttctactgcctggaatactttccttcgcagatgctgagaaccggcaacaacttccagtttacttacaccttcgaggacgtgcctttccacagcagctacgcccacagccagagcttggaccggctgatgaatcctctgattgaccagtacctgtactacttgtctcggattcaaacaacaggaggcacggcaaatacgcagactctgggcttcagccaaggtgggcctaatacaatggccaatcaggcaaagaactggctgccaggaccctgttaccgccaacaacgcgtctcaacgacaaccgggcaaaacaacaatagcaactttgcctggactgctgggaccaaataccatctgaatggaagaaattcattggctaatcctggcatcgctatggcaacacacaaagacgacgaggagcgtttttttcccagtaacgggatcctgatttttggcaaacaaaatgctgccagagacaatgcggattacagcgatgtcatgcccaccagcgaggaagaaatcaaaaccactaaccctgtggccacagaggaatacggtatcgtggcagataacttgcagcagcaaaacacggctcctcaaattggaactgtcaacagccagggggccttacccggtatggtctggcagaaccgggacgtgtacctgcagggtcccatctgggccaagattcctcacacggacggcaacttccacccgtctccgctgatgggcggctttggcctgaaacatcctccgcctcagatcctgatcaagaacacgcctgtacctgcggatcctccgaccaccttcaaccagtcaaagctgaactctttcatcacgcaatacagcaccggacaggtcagcgtggaaattgaatgggagctgcagaaggaaaacagcaagcgctggaaccccgagatccagtacacctccaactactacaaatctacaagtgtggactttgctgttaatacagaaggcgtgtactctgaaccccgccccattggcacccgttacctcacccgtaatctgtaa

SEQ ID NO: 1577 - DNA, 2217 bp, Artificial Sequence
  Synthetic Polynucleotide
atggctgccgatggttatcttccagattggctcgaggacaacctctctgagggcattcgcgagtggtgggcgctgaaacctggagccccgaagcccaaagccaaccagcaaaagcaggacgacggccggggtctggtgcttcctggctacaagtacctcggacccttcaacggactcgacaagggggagcccgtcaacgcggcggacgcggcggccctcgagcacgacaaggcctacgaccagcagctgcaggcgggtgacaatccgtacctgcggtataaccacgccgacgccgagtttcaggagcgtctgcaagaagatacgtcttttgggggcaacctcgggcgagcagtcttccaggccaagaagcgggttctcgaacctctcggtctggttgaggaaggcgctaagacggctcctggaaagaagagaccggtagagccatcaccccagcgttctccagactcctctacgggcatcggcaagaagggccaacagcccgccagaaaaagactcaattttggtcagactggcgactcagagtcagttccagaccctcaacctctcggagaacctccagcagcgccctctggtgtgggacctaatacaatggctgcaggcggtggcgcaccaatggcagacaataacgaaggcgccgacggagtgggtagttcctcgggaaattggcattgcgattccacatggctgggcgacagagtcatcaccaccagcacccgaacctgggccctgcccacctacaacaaccacctctacaagcaaatctccaacgggacatcgggaggagccaccaacgacaacacctacttcggctacagcaccccctgggggtattttgactttaacagattccactgccacttttcaccacgtgactggcagcgactcatcaacaacaactggggattccggcccaagagactcagcttcaagctcttcaacatccaggtcaaggaggtcacgcagaatgaaggcaccaagaccatcgccaataacctcaccagcaccatccaggtgtttacggactcggagtaccagctgccgtacgttctcggctctgcccaccagggctgcctgcctccgttcccggcggacgtgttcacgattccccagtacggctacctaacactcaacaacggtagtcaggccgtgggacgctcctccttctactgcctggaatactttccttcgcagatgctgagaaccggcaacaacttccagtttacttacaccttcgaggacgtgcctttccacagcagctacgcccacagccagagcttggaccggctgatgaatcctctgattgaccagtacctgtactacttgtctcggattcaaacaacaggaggcacggcaaatacgcagactctgggcttcagccaaggtgggcctaatacaatggccaatcaggcaaagaactggctgccaggaccctgttaccgccaacaacgcgtctcaacgacaaccgggcaaaacaacaatagcaactttgcctggactgctgggaccaaataccatctgaatggaagaaattcattggctaatcctggcatcgctatggcaacacacaaagacgacgaggagcgtttttttcccagtaacgggatcctgatttttggcaaacaaaatgctgccagagacaatgcggattacagcgatgtcatgcccaccagcgaggaagaaatcaaaaccactaaccctgtggccacagaggaatacggtatcgtggcagataacttgcagcagcaaaacacggctcctcaaattggaactgtcaacagccagggggccttacccggtatggtctggcagaaccgggacgtgtacctgcagggtcccatctgggccaagattcctcacacggacggcaacttccacccgtctccgctgatgggcggctttggcctgaaacatcctccgcctcagatcctgatcaagaacacgcctgtacctgcggatcctccgaccaccttcaaccagtcaaagctgaactctttcatcacgcaatgcagcaccggacaggtcagcgtggaaattgaatgggagctgcagaaggaaaacagcaagcgctggaaccccgagatccagtacacctccaactactacaaatctacaagtgtggactttgctgttaatacagaaggcgtgtactctgaaccccgccccattggcacccgttacctcacccgtaatctgtaa

SEQ ID NO: 1578 - DNA, 2217 bp, Artificial Sequence
  Synthetic Polynucleotide
atggctgccgatggttatcttccagattggctcgaggacaacctctctgagggcattcgcgagtggtgggcgctgaaacctggagccccgaagcccaaagccaaccagcaaaagcaggacgacggccggggtctggtgcttcctggctacaagtacctcggacccttcaacggactcgacaagggggagcccgtcaacgcggcggacgcggcggccctcgagcacgacaaggcctacgaccagcagctgcaggcgggtgacaatccgtacctgcggtataaccacgccgacgccgagtttcaggagcgtctgcaagaagatacgtcttttgggggcaacctcgggcgagcagtcttccaggccaagaagcgggttctcgaacctctcggtctggttgaggaaggcgctaagacggctcctggaaagaagagaccggtagagccatcaccccagcgttctccagactcctctacgggcatcggcaagaagggccaacagcccgccagaaaaagactcaattttggtcagactggcgactcagagtcagttccagaccctcaacctctcggagaacctccagcagcgccctctggtgtgggacctaatacaatggctgcaggcggtggcgcaccaatggcagacaataacgaaggcgccgacggagtgggtagttcctcgggaaattggcattgcgattccacatggctgggcgacagagtcatcaccaccagcacccgaacctgggccctgcccacctacaacaaccacctctacaagcaaatctccaacgggacatcgggaggagccaccaacgacaacacctacttcggctacagcaccccctgggggtattttgactttaacagattccactgccacttttcaccacgtgactggcagcgactcatcaacaacaactggggattccggcccaagagactcagcttcaagctcttcaacatccaggtcaaggaggtcacgcagaatgaaggcaccaagaccatcgccaataacctcaccagcaccatccaggtgtttacggactcggagtaccagctgccgtacgttctcggctctgcccaccagggctgcctgcctccgttcccggcggacgtgttcacgattccccagtacggctacctaacactcaacaacggtagtcaggccgtgggacgctcctccttctactgcctggaatactttccttcgcagatgctgagaaccggcaacaacttccagtttacttacaccttcgaggacgtgcctttccgcagcagctacgcccacagccagagcttggaccggctgatgaatcctctgattgaccagtacctgtactacttgtctcggattcaaacaacaggaggcacggcaaatacgcagactctgggcttcagccaaggtgggcctaatacaatggccaatcaggcaaagaactggctgccaggaccctgttaccgccaacaacgcgtctcaacgacaaccgggcaaaacaacaatagcaactttgcctggactgctgggaccaaataccatctgaatggaagaaattcattggctaatcctggcatcgctatggcaacacacaaagacgacgaggagcgtttttttcccagtaacgggatcctgatttttggcaaacaaaatgctgccagagacaatgcggattacagcgatgtcatgcccaccagcgaggaagaaatcaaaaccactaaccctgtggccacagaggaatacggtatcgtggcagataacttgcagcagcaaaacacggctcctcaaattggaactgtcaacagccagggggccttacccggtatggtctggcagaaccgggacgtgtacctgcagggtcccatctgggccaagattcctcacacggacggcaacttccacccgtctccgctgatgggcggctttggcctgaaacatcctccgcctcagatcctgatcaagaacacgcctgtacctgcggatcctccgaccaccttcaaccagtcaaagctgaactctttcatcacgcaatacagcaccggacaggtcagcgtggaaattgaatgggagctgcagaaggaaaacagcaagcgctggaaccccgagatccagtacacctccaactactacaaatctacaagtgtggactttgctgttaatacagaaggcgtgtactctgaaccccgccccattggcacccgttacctcacccgtaatctgtaa

SEQ ID NO: 1579 - DNA, 2217 bp, Artificial Sequence
  Synthetic Polynucleotide
atggctgccgatggttatcttccagattggctcgaggacaacctctctgagggcattcgcgagtggtgggcgctgaaacctggagccccgaagcccaaagccaaccagcaaaagcaggacgacggccggggtctggtgcttcctggctacaagcacctcggacccttcaacggactcgacaagggggagcccgtcaacgcggcggacgcggcggccctcgagcacgacaaggcctacgaccagcagctgcaggcgggtgacaatccgtacctgcggtataaccacgccgacgccgagtttcaggagcgtctgcaagaagatacgtcttttgggggcaacctcgggcgagcagtcttccaggccaagaagcgggttctcgaacctctcggtctggttgaggaaggcgctaagacggctcctggaaagaagagaccggtagagccatcaccccagcgttctccagactcctctacgggcatcggcaagaagggccaacagcccgccagaaaaagactcaattttggtcagactggcgactcagagtcagttccagaccctcaacctctcggagaacctccagcagcgccctctggtgtgggacctaatacaatggctgcaggcggtggcgcaccaatggcagacaataacgaaggcgccgacggagtgggtagttcctcgggaaattggcattgcgattccacatggctgggcgacagagtcatcaccaccagcacccgaacctgggccctgcccacctacaacaaccacctctacaagcaaatctccaacgggacatcgggaggagccaccaacgacaacacctacttcggctacagcaccccctgggggtattttgactttaacagattccactgccacttttcaccacgtgactggcagcgactcatcaacaacaactggggattccggcccaagagactcagcttcaagctcttcaacatccaggtcaaggaggtcacgcagaatgaaggcaccaagaccatcgccaataacctcaccagcaccatccaggtgtttacggactcggagtaccagctgccgtacgttctcggctctgcccaccagggctgcctgcctccgttcccggcggacgtgttcacgattccccagtacggctacctaacactcaacaacggtagtcaggccgtgggacgctcctccttctactgcctggaatactttccttcgcagatgctgagaaccggcaacaacttccagtttacttacaccttcgaggacgtgcctttccacagcagctacgcccacagccagagcttggaccggctgatgaatcctctgattgaccagtacctgtactacttgtctcggattcaaacaacaggaggcacggcaaatacgcagactctgggcttcagccaaggtgggcctaatacaatggccaatcaggcaaagaactggctgccaggaccctgttaccgccaacaacgcgtctcaacgacaaccgggcaaaacaacaatagcaactttgcctggactgctgggaccaaataccatctgaatggaagaaattcattggctaatcctggcatcgctatggcaacacacaaagacgacgaggagcgtttttttcccagtaacgggatcctgatttttggcaaacaaaatgctgccagagacaatgcggattacagcgatgtcatgcccaccagcgaggaagaaatcaaaaccactaaccctgtggccacagaggaatacggtatcgtggcagataacttgcagcagcaaaacacggctcctcaaattggaactgtcaacagccagggggccttacccggtatggtctggcagaaccgggacgtgtacctgcagggtcccatctgggccaagattcctcacacggacggcaacttccacccgtctccgctgatgggcggctttggcctgaaacatcctccgcctcagatcctgatcaagaacacgcctgtacctgcggatcctccgaccaccttcaaccagtcaaagctgaactctttcatcacgcaatacagcaccggacaggtcagcgtggaaattgaatgggagctgcagaaggaaaacagcaagcgctggaaccccgagatccagtacacctccaactactacaaatctacaagtgtggactttgctgttaatacagaaggcgtgtactctgaaccccgccccattggcacccgttacctcacccgtaatctgtaa

SEQ ID NO: 1580 - DNA, 2217 bp, Artificial Sequence
  Synthetic Polynucleotide
atggctgccgatggttatcttccagattggctcgaggacaacctctctgagggcattcgcgagtggtgggcgctgaaacctggagccccgaagcccaaagccaaccagcaaaagcaggacgacggccggggtctggtgcttcctggctacaagtacctcggacccttcaacggactcgacaagggggagcccgtcaacgcggcggacgcggcggccctcgagcacgacaaggcctacgaccagcagctgcaggcgggtgacaatccgtacctgcggtataaccacgccgacgccgagtttcaggagcgtctgcaagaagatacgtcttttgggggcaacctcgggcgagcagtcttccaggccaagaagcgggttctcgaacctctcggtctggttgaggaaggcgctaagacggctcctggaaagaagagaccggtagagccatcaccccagcgttctccagactcctctacgggcatcggcaagaagggccaacagcccgccagaaaaagactcaattttggtcagactggcgactcagagtcagttccagaccctcaacctctcggagaacctccagcagcgccctctggtgtgggacctaatacaatggctgcaggcggtggcgcaccaatggcagacaataacgaaggcgccgacggagtgggtagttcctcgggaaattggcattgcgattccacatggctgggcgacagagtcatcaccaccagcacccgaacctgggccctgcccacctacaacaaccacctctacaagcaaatctccaacgggacatcgggaggagccaccaacgacaacacctacttcggctacagcaccccctgggggtattttgactttaacagattccactgccacttttcaccacgtgactggcagcgactcatcaacaacaactggggattccggcccaagagactcagcttcaagctcttcaacatccaggtcaaggaggtcacgcagaatgaaggcaccaagaccatcgccaataacctcaccagcaccatccaggtgtttacggactcggagtaccagctgccgtacgttctcggctctgcccaccagggctgcctgcctccgttcccggcggacgtgttcacgattccccagtacggctacctaacactcaacaacggtagtcaggccgtgggacgctcctccttctactgcctggaatactttccttcgcagatgctgagaaccggcaacaacttccagtttacttacaccttcgaggacgtgcctttccacagcagctacgcccacagccagagcttggaccggctgatgaatcctctgattgaccagtacctgtactacttgtctcggattcaaacaacaggaggcacggcaaatacgcagactctgggcttcagccaaggtgggcctaatacaatggccaatcaggcaaagaactggctgccaggaccctgttaccgccaacaacgcgtctcagcgacaaccgggcaaaacaacaatagcaactttgcctggactgctgggaccaaataccatctgaatggaagaaattcattggctaatcctggcatcgctatggcaacacacaaagacgacgaggagcgtttttttcccagtaacgggatcctgatttttggcaaacaaaatgctgccagagacaatgcggattacagcgatgtcatgcccaccagcgaggaagaaatcaaaaccactaaccctgtggccacagaggaatacggtatcgtggcagataacttgcagcagcaaaacacggctcctcaaattggaactgtcaacagccagggggccttacccggtatggtctggcagaaccgggacgtgtacctgcagggtcccatctgggccaagattcctcacacggacggcaacttccacccgtctccgctgatgggcggctttggcctgaaacatcctccgcctcagatcctgatcaagaacacgcctgtacctgcggatcctccgaccaccttcaaccagtcaaagctgaactctttcatcacgcaatacagcaccggacaggtcagcgtggaaattgaatgggagctgcagaaggaaaacagcaagcgctggaaccccgagatccagtacacctccaactactacaaatctacaagtgtggactttgctgttaatacagaaggcgtgtactctgaaccccgccccattggcacccgttacctcacccgtaatctgtaa

SEQ ID NO: 1581 - DNA, 2217 bp, Artificial Sequence
  Synthetic Polynucleotide
atggctgccgatggttatcttccagattggctcgaggacaacctctctgagggcattcgcgagtggtgggcgctgaaacctggagccccgaagcccaaagccaaccagcaaaagcaggacgacggccggggtctggtgcttcctggctacaagtacctcggacccttcaacggactcgacaagggggagcccgtcaacgcggcggacgcggcggccctcgagcacgacaaggcctacgaccagcagctgcaggcgggtgacaatccgtacctgcggtataaccacgccgacgccgagtttcaggagcgtctgcaagaagatacgtcttttgggggcaacctcgggcgagcagtcttccaggccaagaagcgggttctcgaacctctcggtctggttgaggaaggcgctaagacggctcctggaaagaagagaccggtagagccatcaccccagcgttctccagactcctctacgggcatcggcaagaagggccaacagcccgccagaaaaagactcaattttggtcagactggcggctcagagtcagttccagaccctcaacctctcggagaacctccagcagcgccctctggtgtgggacctaatacaatggctgcaggcggtggcgcaccaatggcagacaataacgaaggcgccgacggagtgggtagttcctcgggaaattggcattgcgattccacatggctgggcgacagagtcatcaccaccagcacccgaacctgggccctgcccacctacaacaaccacctctacaagcaaatctccaacgggacatcgggaggagccaccaacgacaacacctacttcggctacagcaccccctgggggtattttgactttaacagattccactgccacttttcaccacgtgactggcagcgactcatcaacaacaactggggattccggcccaagagactcagcttcaagctcttcaacatccaggtcaaggaggtcacgcagaatgaaggcaccaagaccatcgccaataacctcaccagcaccatccaggtgtttacggactcggagtaccagctgccgtacgttctcggctctgcccaccagggctgcctgcctccgttcccggcggacgtgttcacgattccccagtacggctacctaacactcaacaacggtagtcaggccgtgggacgctcctccttctactgcctggaatactttccttcgcagatgctgagaaccggcaacaacttccagtttacttacaccttcgaggacgtgcctttccacagcagctacgcccacagccagagcttggaccggctgatgaatcctctgattgaccagtacctgtactacttgtctcggattcaaacaacaggaggcacggcaaatacgcagactctgggcttcagccaaggtgggcctaatacaatggccaatcaggcaaagaactggctgccaggaccctgttaccgccaacaacgcgtctcaacgacaaccgggcaaaacaacaatagcaactttgcctggactgctgggaccaaataccatctgaatggaagaaattcattggctaatcctggcatcgctatggcaacacacaaagacgacgaggagcgtttttttcccagtaacgggatcctgatttttggcaaacaaaatgctgccagagacaatgcggattacagcgatgtcatgcccaccagcgaggaagaaatcaaaaccactaaccctgtggccacagaggaatacggtatcgtggcagataacttgcagcagcaaaacacggctcctcaaattggaactgtcaacagccagggggccttacccggtatggtctggcagaaccgggacgtgtacctgcagggtcccatctgggccaagattcctcacacggacggcaacttccacccgtctccgctgatgggcggctttggcctgaaacatcctccgcctcagatcctgatcaagaacacgcctgtacctgcggatcctccgaccaccttcaaccagtcaaagctgaactctttcatcacgcaatacagcaccggacaggtcagcgtggaaattgaatgggagctgcagaaggaaaacagcaagcgctggaaccccgagatccagtacacctccaactactacaaatctacaagtgtggactttgctgttaatacagaaggcgtgtactctgaaccccgccccattggcacccgttacctcacccgtaatctgtaa

SEQ ID NO: 1582 - DNA, 2217 bp, Artificial Sequence
  Synthetic Polynucleotide
atggctgccgatggttatcttccagattggctcgaggacaacctctctgagggcattcgcgagtggtgggcgctgaaacctggagccccgaagcccaaagccaaccagcaaaagcaggacgacggccggggtctggtgcttcctggctacaagtacctcggacccttcaacggactcgacaagggggagcccgtcaacgcggcggacgcggcggccctcgagcacgacaaggcctacgaccagcagctgcaggcgggtgacaatccgtacctgcggtataaccacgccgacgccgagtttcaggagcgtctgcaagaagatacgtcttttgggggcaacctcgggcgagcagtcttccaggccaagaagcgggttctcgaacctctcggtctggttgaggaaggcgctaagacggctcctggaaagaagagaccggtagagccatcaccccagcgttctccagactcctctacgggcatcggcaagaagggccaacagcccgccagaaaaagactcaattttggtcagactggcgactcagagtcagttccagaccctcaacctctcggagaacctccagcagcgccctctggtgtgggacctaatacaatggctgcaggcggtggcgcaccaatggcagacaataacgaaggcgccgacggagtgggtagttcctcgggaaattggcattgcgattccgcatggctgggcgacagagtcatcaccaccagcacccgaacctgggccctgcccacctacaacaaccacctctacaagcaaatctccaacgggacatcgggaggagccaccaacgacaacacctacttcggctacagcaccccctgggggtattttgactttaacagattccactgccacttttcaccacgtgactggcagcgactcatcaacaacaactggggattccggcccaagagactcagcttcaagctcttcaacatccaggtcaaggaggtcacgcagaatgaaggcaccaagaccatcgccaataacctcaccagcaccatccaggtgtttacggactcggagtaccagctgccgtacgttctcggctctgcccaccagggctgcctgcctccgttcccggcggacgtgttcacgattccccagtacggctacctaacactcaacaacggtagtcaggccgtgggacgctcctccttctactgcctggaatactttccttcgcagatgctgagaaccggcaacaacttccagtttacttacaccttcgaggacgtgcctttccacagcagctacgcccacagccagagcttggaccggctgatgaatcctctgattgaccagtacctgtactacttgtctcggattcaaacaacaggaggcacggcaaatacgcagactctgggcttcagccaaggtgggcctaatacaatggccaatcaggcaaagaactggctgccaggaccctgttaccgccaacaacgcgtctcaacgacaaccgggcaaaacaacaatagcaactttgcctggactgctgggaccaaataccatctgaatggaagaaattcattggctaatcctggcatcgctatggcaacacacaaagacgacgaggagcgtttttttcccagtaacgggatcctgatttttggcaaacaaaatgctgccagagacaatgcggattacagcgatgtcatgcccaccagcgaggaagaaatcaaaaccactaaccctgtggccacagaggaatacggtatcgtggcagataacttgcagcagcaaaacacggctcctcaaattggaactgtcaacagccagggggccttacccggtatggtctggcagaaccgggacgtgtacctgcagggtcccatctgggccaagattcctcacacggacggcaacttccacccgtctccgctgatgggcggctttggcctgaaacatcctccgcctcagatcctgatcaagaacacgcctgtacctgcggatcctccgaccaccttcaaccagtcaaagctgaactctttcatcacgcaatacagcaccggacaggtcagcgtggaaattgaatgggagctgcagaaggaaaacagcaagcgctggaaccccgagatccagtacacctccaactactacaaatctacaagtgtggactttgctgttaatacagaaggcgtgtactctgaaccccgccccattggcacccgttacctcacccgtaatctgtaa

SEQ ID NO: 1583 - DNA, 2217 bp, Artificial Sequence
  Synthetic Polynucleotide
atggctgccgatggttatcttccagattggctcgaggacaacctctctgagggcattcgcgagtggtgggcgctgaaacctggagccccgaagcccaaagccaaccagcaaaagcaggacgacggccggggtctggtgcttcctggctacaagtacctcggacccttcaacggactcgacaagggggagcccgtcaacgcggcggacgcggcggccctcgagcacgacaaggcctacgaccagcagctgcaggcgggtgacaatccgtacctgcggtataaccacgccgacgccgagtttcaggagcgtctgcaagaagatacgtcttttgggggcaacctcgggcgagcagtcttccaggccaagaagcgggttctcgaacctctcggtctggttgaggaaggcgctaagacggctcctggaaagaagagaccggtagagccatcaccccagcgttctccagactcctctacgggcatcggcaagaagggccaacagcccgccagaaaaagactcaattttggtcagactggcgactcagagtcagttccagaccctcaacctctcggagaacctccagcagcgccctctggtgtgggacctaatacaatggctgcaggcggtggcgcaccaatggcagacaataacgaaggcgccgacggagtgggtagttcctcgggaaattggcattgcgattccacatggctgggcgacagagtcatcaccaccagcacccgaacctgggccctgcccacctacaacaaccacctctacaagcaaatctccaacgggacatcgggaggagccaccaacgacaacacctacttcggctacagcaccccctgggggtattttgactttaacagattccactgccacttttcaccacgtgactggcagcgactcatcaacaacaactggggattccggcccaagagactcagcttcaagctcttcaacatccaggtcaaggaggtcacgcagaatgaaggcaccaagaccatcgccaataacctcaccagcaccatccaggtgtttacggactcggagtaccagctgccgtacgttctcggctctgcccaccggggctgcctgcctccgttcccggcggacgtgttcacgattccccagtacggctacctaacactcaacaacggtagtcaggccgtgggacgctcctccttctactgcctggaatactttccttcgcagatgctgagaaccggcaacaacttccagtttacttacaccttcgaggacgtgcctttccacagcagctacgcccacagccagagcttggaccggctgatgaatcctctgattgaccagtacctgtactacttgtctcggattcaaacaacaggaggcacggcaaatacgcagactctgggcttcagccaaggtgggcctaatacaatggccaatcaggcaaagaactggctgccaggaccctgttaccgccaacaacgcgtctcaacgacaaccgggcaaaacaacaatagcaactttgcctggactgctgggaccaaataccatctgaatggaagaaattcattggctaatcctggcatcgctatggcaacacacaaagacgacgaggagcgtttttttcccagtaacgggatcctgatttttggcaaacaaaatgctgccagagacaatgcggattacagcgatgtcatgcccaccagcgaggaagaaatcaaaaccactaaccctgtggccacagaggaatacggtatcgtggcagataacttgcagcagcaaaacacggctcctcaaattggaactgtcaacagccagggggccttacccggtatggtctggcagaaccgggacgtgtacctgcagggtcccatctgggccaagattcctcacacggacggcaacttccacccgtctccgctgatgggcggctttggcctgaaacatcctccgcctcagatcctgatcaagaacacgcctgtacctgcggatcctccgaccaccttcaaccagtcaaagctgaactctttcatcacgcaatacagcaccggacaggtcagcgtggaaattgaatgggagctgcagaaggaaaacagcaagcgctggaaccccgagatccagtacacctccaactactacaaatctacaagtgtggactttgctgttaatacagaaggcgtgtactctgaaccccgccccattggcacccgttacctcacccgtaatctgtaa

SEQ ID NO: 1584 - DNA, 2217 bp, Artificial Sequence
  Synthetic Polynucleotide
atggctgccgatggttatcttccagattggctcgaggacaacctctctgagggcattcgcgagtggtgggcgctgaaacctggagccccgaagcccaaagccaaccagcaaaagcaggacgacggccggggtctggtgcttcctggctacaagtacctcggacccttcaacggactcgacaagggggagcccgtcaacgcggcggacgcggcggccctcgagcacgacaaggcctacgaccagcagctgcaggcgggtgacaatccgtacctgcggtataaccacgccgacgccgagtttcaggagcgtctgcaagaagatacgtcttttgggggcaacctcgggcgagcagtcttccaggccaagaagcgggttctcgaacctctcggtctggttgaggaaggcgctaagacggctcctggaaagaagagaccggtagagccatcaccccagcgttctccagactcctctacgggcatcggcaagaagggccaacagcccgccagaaaaagactcaattttggtcagactggcgactcagagtcagttccagaccctcaacctctcggagaacctccagcagcgccctctggtgtgggacctaatacaatggctgcaggcggtggcgcaccaatggcagacaataacgaaggcgccgacggagtgggtagttcctcgggaaattggcattgcgattccacatggctgggcgacagagtcatcaccaccagcacccgaacctgggccctgcccacctacaacaaccacctctacaagcaaatctccaacgggacatcgggaggagccaccaacgacaacacctacttcggctacagcaccccctgggggtattttgactttaacagattccactgccacttttcaccacgtgactggcagcgactcatcaacaacaactggggattccggcccaagagactcagcttcaagctcttcaacatccaggtcaaggaggtcacgcagaatgaaggcaccaagaccatcgccaataacctcaccagcaccatccaggtgtttacggactcggagtaccagctgccgtacgttctcggctctgcccaccagggctgcctgcctccgttcccggcggacgtgttcacgattccccagtacggctacctaacactcaacaacggtagtcaggccgtgggacgctcctccttctactgcctggaatactttccttcgcagatgctgagaaccggcaacaacttccagtttacttacaccttcgaggacgtgcctttccacagcagctacgcccacagccagagcttggaccggctgatgaatcctctgattgaccagtacctgtactacttgtctcggattcaaacaacaggaggcacggcaaatacgcagactctgggcttcagccaaggtgggcctaatacaatggccaatcaggcaaagaactggctgccaggaccctgttaccgccaacaacgcgtctcaacgacaaccgggcaaaacaacaatagcaactttgcctggactgctgggaccaaataccatctgaatggaagaaattcattggctaatcctggcatcgctatggcaacacacaaagacgacgaggagcgtttttttcccagtaacgggatcctgatttttggcaaacaaaatgctgccagagacaatgcggattacagcgatgtcatgcccaccagcgaggaagaaatcaaaaccactaaccctgtggccacagaggaatacggtatcgtggcagataacttgcagcagcaaaacacggctcctcaaattggaactgtcaacagccagggggccttacccggtatggtctggcagaaccgggacgtgtacctgcagggtcccatctgggccaagattcctcacacggacggcaacttccacccgtctccgctgatgggcggctttggcctgaaacatcctccgcctcagatcctgatcaagaacacgcctgtatctgcggatcctccgaccaccttcaaccagtcaaagctgaactctttcatcacgcaatacagcaccggacaggtcagcgtggaaattgaatgggagctgcagaaggaaaacagcaagcgctggaaccccgagatccagtacacctccaactactacaaatctacaagtgtggactttgctgttaatacagaaggcgtgtactctgaaccccgccccattggcacccgttacctcacccgtaatctgtaa

SEQ ID NO: 1585 - DNA, 2217 bp, Artificial Sequence
  Synthetic Polynucleotide
atggctgccgatggttatcttccagattggctcgaggacaacctctctgagggcattcgcgagtggtgggcgctgaaacctggagccccgaagcccaaagccaaccagcaaaagcaggacgacggccggggtctggtgcttcctggctacaggtacctcggacccttcaacggactcgacaagggggagcccgtcaacgcggcggacgcggcggccctcgagcacgacaaggcctacgaccagcagctgcaggcgggtgacaatccgtacctgcggtataaccacgccgacgccgagtttcaggagcgtctgcaagaagatacgtcttttgggggcaacctcgggcgagcagtcttccaggccaagaagcgggttctcgaacctctcggtctggttgaggaaggcgctaagacggctcctggaaagaagagaccggtagagccatcaccccagcgttctccagactcctctacgggcatcggcaagaagggccaacagcccgccagaaaaagactcaattttggtcagactggcgactcagagtcagttccagaccctcaacctctcggagaacctccagcagcgccctctggtgtgggacctaatacaatggctgcaggcggtggcgcaccaatggcagacaataacgaaggcgccgacggagtgggtagttcctcgggaaattggcattgcgattccacatggctgggcgacagagtcatcaccaccagcacccgaacctgggccctgcccacctacaacaaccacctctacaagcaaatctccaacgggacatcgggaggagccaccaacgacaacacctacttcggctacagcaccccctgggggtattttgactttaacagattccactgccacttttcaccacgtgactggcagcgactcatcaacaacaactggggattccggcccaagagactcagcttcaagctcttcaacatccaggtcaaggaggtcacgcagaatgaaggcaccaagaccatcgccaataacctcaccagcaccatccaggtgtttacggactcggagtaccagctgccgtacgttctcggctctgcccaccagggctgcctgcctccgttcccggcggacgtgttcacgattccccagtacggctacctaacactcaacaacggtagtcaggccgtgggacgctcctccttctactgcctggaatactttccttcgcagatgctgagaaccggcaacaacttccagtttacttacaccttcgaggacgtgcctttccacagcagctacgcccacagccagagcttggaccggctgatgaatcctctgattgaccagtacctgtactacttgtctcggattcaaacaacaggaggcacggcaaatacgcagactctgggcttcagccaaggtgggcctaatacaatggccaatcaggcaaagaactggctgccaggaccctgttaccgccaacaacgcgtctcaacgacaaccgggcaaaacaacaatagcaactttgcctggactgctgggaccaaataccatctgaatggaagaaattcattggctaatcctggcatcgctatggcaacacacaaagacgacgaggagcgtttttttcccagtaacgggatcctgatttttggcaaacaaaatgctgccagagacaatgcggattacagcgatgtcatgcccaccagcgaggaagaaatcaaaaccactaaccctgtggccacagaggaatacggtatcgtggcagataacttgcagcagcaaaacacggctcctcaaattggaactgtcaacagccagggggccttacccggtatggtctggcagaaccgggacgtgtacctgcagggtcccatctgggccaagattcctcacacggacggcaacttccacccgtctccgctgatgggcggctttggcctgaaacatcctccgcctcagatcctgatcaagaacacgcctgtacctgcggatcctccgaccaccttcaaccagtcaaagctgaactctttcatcacgcaatacagcactggacaggtcagcgtggaaattgaatgggagctgcagaaggaaaacagcaagcgctggaaccccgagatccagtacacctccaactactacaaatctacaagtgtggactttgctgttaatacagaaggcgtgtactctgaaccccgccccattggcacccgttacctcacccgtaatctgtaa

SEQ ID NO: 1586 - DNA, 2217 bp, Artificial Sequence
  Synthetic Polynucleotide
atggctgccgatggttatcttccagattggctcgaggacaacctctctgagggcattcgcgagtggtgggcgctgaaacctggagccccgaagcccaaagccaaccagcaaaagcaggacgacggccggggtctggtgcttcctggctacaagtacctcggacccttcaacggactcgacaagggggagcccgtcaacgcggcggacgcggcggccctcgagcacgacaaggcctacgaccagcagctgcaggcgggtgacaatccgtacctgcggtataaccacgccgacgccgagtttcaggagcgtctgcaagaagatacgtcttttgggggcaacctcgggcgagcagtcttccaggccaagaagcgggttctcgaacctctcggtctggttgaggaaggcgctaagacggctcctggaaagaagagaccggtagagccatcaccccagcgttctccagactcctctacgggcatcggcaagaagggccaacagcccgccagaaaaagactcaattttggtcagactggcgactcagagtcagttccagaccctcaacctctcggagaacctccagcagcgccctctggtgtgggacctaatacaatggctgcaggcggtggcgcaccaatggcagacaataacgaaggcgccgacggagtgggtagttcctcgggaaattggcattgcgattccacatggctgggcgacagagtcatcaccaccagcacccgaacctgggccctgcccacctacaacaaccacctctacaagcaaatctccaacgggacatcgggaggagccaccaacgacaacacctacttcggctacagcaccccctgggggtattttgactttaacagattccactgccacttttcaccacgtgactggcagcgactcatcaacaacaactggggattccggcccaagagactcagcttcaagctcttcaacatccaggtcaaggaggtcacgcagaatgaaggcaccaagaccatcgccaataacctcaccagcaccatccaggtgtttacggactcggagtaccagctgccgtacgttctcggctctgcccaccagggctgcctgcctccgttcccggcggacgtgttcacgattccccagtacggctacctaacactcaacaacggtagtcaggccgtgggacgctcctccttctactgcctggaatactttccttcgcagatgctgagaaccggcaacaacttccagtttacttacaccttcgaggacgtgcctttccacagcagctacgcccacagccagagcttggaccggctgatgaatcctctgattgaccagtacctgtactacttgtctcggattcaaacaacaggaggcacggcaaatacgcagactctgggcttcagccaaggtgggcctaatacaatggccaatcaggcaaagaactggctgccaggaccctgttaccgccaacaacgcgtctcaacgacaaccgggcaaaacaacaatagcaactttgcctggactgctgggaccaaataccgtctgaatggaagaaattcattggctaatcctggcatcgctatggcaacacacaaagacgacgaggagcgtttttttcccagtaacgggatcctgatttttggcaaacaaaatgctgccagagacaatgcggattacagcgatgtcatgcccaccagcgaggaagaaatcaaaaccactaaccctgtggccacagaggaatacggtatcgtggcagataacttgcagcagcaaaacacggctcctcaaattggaactgtcaacagccagggggccttacccggtatggtctggcagaaccgggacgtgtacctgcagggtcccatctgggccaagattcctcacacggacggcaacttccacccgtctccgctgatgggcggctttggcctgaaacatcctccgcctcagatcctgatcaagaacacgcctgtacctgcggatcctccgaccaccttcaaccagtcaaagctgaactctttcatcacgcaatacagcaccggacaggtcagcgtggaaattgaatgggagctgcagaaggaaaacagcaagcgctggaaccccgagatccagtacacctccaactactacaaatctacaagtgtggactttgctgttaatacagaaggcgtgtactctgaaccccgccccattggcacccgttacctcacccgtaatctgtaa

SEQ ID NO: 1587 - DNA, 2217 bp, Artificial Sequence
  Synthetic Polynucleotide
atggctgccgatggttatcttccagattggctcgaggacaacctctctgagggcattcgcgagtggtgggcgctgaaacctggagccccgaagcccaaagccaaccagcaaaagcaggacgacggccggggtctggtgcttcctggctacaagtacctcggacccttcaacggactcgacaagggggagcccgtcaacgcggcggacgcggcggccctcgagcacgacaaggcctacgaccagcagctgcaggcgggtgacaatccgtacctgcggtataaccacgccgacgccgagtttcaggagcgtctgcaagaagatacgtcttttgggggcaacctcgggcgagcagtcttccaggccaagaagcgggttctcgaacctctcggtctggttgaggaaggcgctaagacggctcctggaaagaagagaccggtagagccatcaccccagcgttctccagactcctctacgggcatcggcaagaagggccaacagcccgccagaaaaagactcaattttggtcagactggcgactcagagtcagctccagaccctcaacctctcggagaacctccagcagcgccctctggtgtgggacctaatacaatggctgcaggcggtggcgcaccaatggcagacaataacgaaggcgccgacggagtgggtagttcctcgggaaattggcattgcgattccacatggctgggcgacagagtcatcaccaccagcacccgaacctgggccctgcccacctacaacaaccacctctacaagcaaatctccaacgggacatcgggaggagccaccaacgacaacacctacttcggctacagcaccccctgggggtattttgactttaacagattccactgccacttttcaccacgtgactggcagcgactcatcaacaacaactggggattccggcccaagagactcagcttcaagctcttcaacatccaggtcaaggaggtcacgcagaatgaaggcaccaagaccatcgccaataacctcaccagcaccatccaggtgtttacggactcggagtaccagctgccgtacgttctcggctctgcccaccagggctgcctgcctccgttcccggcggacgtgttcacgattccccagtacggctacctaacactcaacaacggtagtcaggccgtgggacgctcctccttctactgcctggaatactttccttcgcagatgctgagaaccggcaacaacttccagtttacttacaccttcgaggacgtgcctttccacagcagctacgcccacagccagagcttggaccggctgatgaatcctctgattgaccagtacctgtactacttgtctcggattcaaacaacaggaggcacggcaaatacgcagactctgggcttcagccaaggtgggcctaatacaatggccaatcaggcaaagaactggctgccaggaccctgttaccgccaacaacgcgtctcaacgacaaccgggcaaaacaacaatagcaactttgcctggactgctgggaccaaataccatctgaatggaagaaattcattggctaatcctggcatcgctatggcaacacacaaagacgacgaggagcgtttttttcccagtaacgggatcctgatttttggcaaacaaaatgctgccagagacaatgcggattacagcgatgtcatgcccaccagcgaggaagaaatcaaaaccactaaccctgtggccacagaggaatacggtatcgtggcagataacttgcagcagcaaaacacggctcctcaaattggaactgtcaacagccagggggccttacccggtatggtctggcagaaccgggacgtgtacctgcagggtcccatctgggccaagattcctcacacggacggcaacttccacccgtctccgctgatgggcggctttggcctgaaacatcctccgcctcagatcctgatcaagaacacgcctgtacctgcggatcctccgaccaccttcaaccagtcaaagctgaactctttcatcacgcaatacagcaccggacaggtcagcgtggaaattgaatgggagctgcagaaggaaaacagcaagcgctggaaccccgagatccagtacacctccaactactacaaatctacaagtgtggactttgctgttaatacagaaggcgtgtactctgaaccccgccccattggcacccgttacctcacccgtaatctgtaa

SEQ ID NO: 1588 - DNA, 2217 bp, Artificial Sequence
  Synthetic Polynucleotide
atggctgccgatggttatcttccagattggctcgaggacaacctctctgagggcattcgcgagtggtgggcgctgaaacctggagccccgaagcccaaagccaaccagcaaaagcaggacgacggccggggtctggtgcttcctggctacaagtacctcggacccttcaacggactcgacaagggggagcccgtcaacgcggcggacgcggcggccctcgagcacgacaaggcctacgaccagcagctgcaggcgggtgacaatccgtacctgcggtataaccacgccgacgccgagtttcaggagcgtctgcaagaagatacgtcttttgggggcaacctcgggcgagcagtcttccaggccaagaagcgggttctcgaacctctcggtctggttgaggaaggcgctaagacggctcctggaaagaagagaccggtagagccatcaccccagcgttctccagacccctctacgggcatcggcaagaagggccaacagcccgccagaaaaagactcaattttggtcagactggcgactcagagtcagttccagaccctcaacctctcggagaacctccagcagcgccctctggtgtgggacctaatacaatggctgcaggcggtggcgcaccaatggcagacaataacgaaggcgccgacggagtgggtagttcctcgggaaattggcattgcgattccacatggctgggcgacagagtcatcaccaccagcacccgaacctgggccctgcccacctacaacaaccacctctacaagcaaatctccaacgggacatcgggaggagccaccaacgacaacacctacttcggctacagcaccccctgggggtattttgactttaacagattccactgccacttttcaccacgtgactggcagcgactcatcaacaacaactggggattccggcccaagagactcagcttcaagctcttcaacatccaggtcaaggaggtcacgcagaatgaaggcaccaagaccatcgccaataacctcaccagcaccatccaggtgtttacggactcggagtaccagctgccgtacgttctcggctctgcccaccagggctgcctgcctccgttcccggcggacgtgttcacgattccccagtacggctacctaacactcaacaacggtagtcaggccgtgggacgctcctccttctactgcctggaatactttccttcgcagatgctgagaaccggcaacaacttccagtttacttacaccttcgaggacgtgcctttccacagcagctacgcccacagccagagcttggaccggctgatgaatcctctgattgaccagtacctgtactacttgtctcggattcaaacaacaggaggcacggcaaatacgcagactctgggcttcagccaaggtgggcctaatacaatggccaatcaggcaaagaactggctgccaggaccctgttaccgccaacaacgcgtctcaacgacaaccgggcaaaacaacaatagcaactttgcctggactgctgggaccaaataccatctgaatggaagaaattcattggctaatcctggcatcgctatggcaacacacaaagacgacgaggagcgtttttttcccagtaacgggatcctgatttttggcaaacaaaatgctgccagagacaatgcggattacagcgatgtcatgcccaccagcgaggaagaaatcaaaaccactaaccctgtggccacagaggaatacggtatcgtggcagataacttgcagcagcaaaacacggctcctcaaattggaactgtcaacagccagggggccttacccggtatggtctggcagaaccgggacgtgtacctgcagggtcccatctgggccaagattcctcacacggacggcaacttccacccgtctccgctgatgggcggctttggcctgaaacatcctccgcctcagatcctgatcaagaacacgcctgtacctgcggatcctccgaccaccttcaaccagtcaaagctgaactctttcatcacgcaatacagcaccggacaggtcagcgtggaaattgaatgggagctgcagaaggaaaacagcaagcgctggaaccccgagatccagtacacctccaactactacaaatctacaagtgtggactttgctgttaatacagaaggcgtgtactctgaaccccgccccattggcacccgttacctcacccgtaatctgtaa

SEQ ID NO: 1589 - DNA, 2217 bp, Artificial Sequence
  Synthetic Polynucleotide
atggctgccgatggttatcttccagattggctcgaggacaacctctctgagggcattcgcgagtggtgggcgctgaaacctggagccccgaagcccaaagccaaccagcaaaagcaggacgacggccggggtctggtgcttcctggctacaagtacctcggacccttcaacggactcgacaagggggagcccgtcaacgcggcggacgcggcggccctcgagcacgacaaggcctacgaccagcagctgcaggcgggtgacaatccgtacctgcggtataaccacgccgacgccgagtttcaggagcgtctgcaagaagatacgtcttttgggggcaacctcgggcgagcagtcttccaggccaagaagcgggttctcgaacctctcggtctggttgaggaaggcgctaagacggctcctggaaagaagagaccggtagagccatcaccccagcgttctccagactcctctacgggcatcggcaagaagggccaacagcccgccagaaaaagactcaattttggtcagactggcgactcagagtcagttccagaccctcaacctctcggagaacctccagcagcgccctctggtgtgggacctaatacaatggctgcaggcggtggcgcaccaatggcagacaataacgaaggcgccgacggagtgggtagttcctcgggaaattggcattgcgattccacatggctgggcgacagagtcatcaccaccagcacccgaacctgggccctgcccacctacaacaaccacctctacaagcaaatctccaacgggacatcgggaggagccaccaacgacaacacctacttcggctacagcaccccctgggggtattttgactttaacagattccactgccacttttcaccacgtgactggcagcgactcatcaacaacaactggggattccggcccaagagactcagcttcaagctcttcaacatccaggtcaaggaggtcacgcagaatgaaggcaccaagaccatcgccaataacctcaccagcaccatccaggtgtttacggactcggagtaccggctgccgtacgttctcggctctgcccaccagggctgcctgcctccgttcccggcggacgtgttcacgattccccagtacggctacctaacactcaacaacggtagtcaggccgtgggacgctcctccttctactgcctggaatactttccttcgcagatgctgagaaccggcaacaacttccagtttacttacaccttcgaggacgtgcctttccacagcagctacgcccacagccagagcttggaccggctgatgaatcctctgattgaccagtacctgtactacttgtctcggattcaaacaacaggaggcacggcaaatacgcagactctgggcttcagccaaggtgggcctaatacaatggccaatcaggcaaagaactggctgccaggaccctgttaccgccaacaacgcgtctcaacgacaaccgggcaaaacaacaatagcaactttgcctggactgctgggaccaaataccatctgaatggaagaaattcattggctaatcctggcatcgctatggcaacacacaaagacgacgaggagcgtttttttcccagtaacgggatcctgatttttggcaaacaaaatgctgccagagacaatgcggattacagcgatgtcatgcccaccagcgaggaagaaatcaaaaccactaaccctgtggccacagaggaatacggtatcgtggcagataacttgcagcagcaaaacacggctcctcaaattggaactgtcaacagccagggggccttacccggtatggtctggcagaaccgggacgtgtacctgcagggtcccatctgggccaagattcctcacacggacggcaacttccacccgtctccgctgatgggcggctttggcctgaaacatcctccgcctcagatcctgatcaagaacacgcctgtacctgcggatcctccgaccaccttcaaccagtcaaagctgaactctttcatcacgcaatacagcaccggacaggtcagcgtggaaattgaatgggagctgcagaaggaaaacagcaagcgctggaaccccgagatccagtacacctccaactactacaaatctacaagtgtggactttgctgttaatacagaaggcgtgtactctgaaccccgccccattggcacccgttacctcacccgtaatctgtaa

SEQ ID NO: 1590 - DNA, 2217 bp, Artificial Sequence
  Synthetic Polynucleotide
atggctgccgatggttatcttccagattggctcgaggacaacctctctgagggcattcgcgagtggtgggcgctgaaacctggagccccgaagcccaaagccaaccagcaaaagcaggacgacggccggggtctggtgcttcctggctacaagtacctcggacccttcaacggactcgacaagggggagcccgtcaacgcggcggacgcggcggccctcgagcacgacaaggcctacgaccagcagctgcaggcgggtgacaatccgtacctgcggtataaccacgccgacgccgagtttcaggagcgtctgcaagaagatacgtcttttgggggcaacctcgggcgagcagtcttccaggccaagaagcgggttctcgaacctctcggtctggttgaggaaggcgctaagacggctcctggaaagaagagaccggtagagccatcaccccagcgttctccagactcctctacgggcatcggcaagaagggccaacagcccgccagaaaaagactcaattttggtcagactggcgactcagagtcagttccagaccctcaacctctcggagaacctccagcagcgccctctggtgtgggacctaatacaatggctgcaggcggtggcgcaccaatggcagacaataacgaaggcgccgacggagtgggtagttcctcgggaaattggcattgcgattccacatggctgggcgacagagtcatcaccaccagcacccgaacctgggccctgcccacctacaacaaccacctctacaagcaaatctccaacgggacatcgggaggagccaccaacgacaacacctacttcggctacagcaccccctgggggtattttgactttaacagattccactgccacttttcaccacgtgactggcagcgactcatcaacaacaactggggattccggcccaagagactcagcttcaagctcttcaacatccaggtcaaggaggtcacgcagaatgaaggcaccaagaccatcgccaataacctcaccagcaccatccaggtgtttacggactcggagtaccagctgccgtacgttctcggctctgcccaccagggctgcctgcctccgttcccggcggacgtgttcacgattccccagtacggctacctaacactcaacaacggtagtcaggccgtgggacgctcctccttctactgcctggaatactttccttcgcagatgctgagaaccggcaacaacttccagtttacttacaccttcgaggacgtgcctttccacagcagctacgcccacagccagagcttggaccggctgatgaatcctctgattgaccagtacctgtactacttgtctcggattcaaacaacaggaggcacggcaaatacgcagactctgggcttcagccaaggtgggcctaatacaatggccaatcaggcaaagaactggctgccaggaccctgttaccgccaacaacgcgtctcaacgacaaccgggcaaaacaacaatagcaactttgcctggactgctgggaccaaataccatctgaatggaagaaattcattggctaatcctggcatcgctatggcaacacacaaagacgacgaggagcgtttttttcccagtaacgggatcctgatttttggcaaacaaaatgctgccagagacaatgcggattacagcgatgtcatgcccaccagcgaggaagaaatcaaaaccactaaccctgtggccacagaggaatacggtatcgtggcagataacttgcagcagcaaaacacggctcctcaaattggaactgtcaacagccagggggccttacccggtatggtctggcagaaccgggacgtgtacctgcagggtcccatctgggccaagattcctcacacggacggcaacttccacccgtctccgctgatgggcggctttggcctgaaacatcctccgcctcagatcctgatcaagaacacgcctgtacctgcggatcctccgaccaccttcaaccagccaaagctgaactctttcatcacgcaatacagcaccggacaggtcagcgtggaaattgaatgggagctgcagaaggaaaacagcaagcgctggaaccccgagatccagtacacctccaactactacaaatctacaagtgtggactttgctgttaatacagaaggcgtgtactctgaaccccgccccattggcacccgttacctcacccgtaatctgtaa

SEQ ID NO: 1591 - DNA, 2217 bp, Artificial Sequence
  Synthetic Polynucleotide
atggctgccgatggttatcttccagattggctcgaggacaacctctctgagggcattcgcgagtggtgggcgctgaaacctggagccccgaagcccaaagccaaccagcaaaagcaggacgacggccggggtctggtgcttcctggctacaagtacctcggacccttcaacggactcgacaagggggagcccgtcaacgcggcggacgcggcggccctcgagcacgacaaggcctacgaccagcagctgcaggcgggtggcaatccgtacctgcggtataaccacgccgacgccgagtttcaggagcgtctgcaagaagatacgtcttttgggggcaacctcgggcgagcagtcttccaggccaagaagcgggttctcgaacctctcggtctggttgaggaaggcgctaagacggctcctggaaagaagagaccggtagagccatcaccccagcgttctccagactcctctacgggcatcggcaagaagggccaacagcccgccagaaaaagactcaattttggtcagactggcgactcagagtcagttccagaccctcaacctctcggagaacctccagcagcgccctctggtgtgggacctaatacaatggctgcaggcggtggcgcaccaatggcagacaataacgaaggcgccgacggagtgggtagttcctcgggaaattggcattgcgattccacatggctgggcgacagagtcatcaccaccagcacccgaacctgggccctgcccacctacaacaaccacctctacaagcaaatctccaacgggacatcgggaggagccaccaacgacaacacctacttcggctacagcaccccctgggggtattttgactttaacagattccactgccacttttcaccacgtgactggcagcgactcatcaacaacaactggggattccggcccaagagactcagcttcaagctcttcaacatccaggtcaaggaggtcacgcagaatgaaggcaccaagaccatcgccaataacctcaccagcaccatccaggtgtttacggactcggagtaccagctgccgtacgttctcggctctgcccaccagggctgcctgcctccgttcccggcggacgtgttcacgattccccagtacggctacctaacactcaacaacggtagtcaggccgtgggacgctcctccttctactgcctggaatactttccttcgcagatgctgagaaccggcaacaacttccagtttacttacaccttcgaggacgtgcctttccacagcagctacgcccacagccagagcttggaccggctgatgaatcctctgattgaccagtacctgtactacttgtctcggattcaaacaacaggaggcacggcaaatacgcagactctgggcttcagccaaggtgggcctaatacaatggccaatcaggcaaagaactggctgccaggaccctgttaccgccaacaacgcgtctcaacgacaaccgggcaaaacaacaatagcaactttgcctggactgctgggaccaaataccatctgaatggaagaaattcattggctaatcctggcatcgctatggcaacacacaaagacgacgaggagcgtttttttcccagtaacgggatcctgatttttggcaaacaaaatgctgccagagacaatgcggattacagcgatgtcatgcccaccagcgaggaagaaatcaaaaccactaaccctgtggccacagaggaatacggtatcgtggcagataacttgcagcagcaaaacacggctcctcaaattggaactgtcaacagccagggggccttacccggtatggtctggcagaaccgggacgtgtacctgcagggtcccatctgggccaagattcctcacacggacggcaacttccacccgtctccgctgatgggcggctttggcctgaaacatcctccgcctcagatcctgatcaagaacacgcctgtacctgcggatcctccgaccaccttcaaccagtcaaagctgaactctttcatcacgcaatacagcaccggacaggtcagcgtggaaattgaatgggagctgcagaaggaaaacagcaagcgctggaaccccgagatccagtacacctccaactactacaaatctacaagtgtggactttgctgttaatacagaaggcgtgtactctgaaccccgccccattggcacccgttacctcacccgtaatctgtaa

SEQ ID NO: 1592 - DNA, 2217 bp, Artificial Sequence
  Synthetic Polynucleotide
atggctgccgatggttatcttccagattggctcgaggacaacctctctgagggcattcgcgagtggtgggcgctgaaacctggagccccgaagcccaaagccaaccagcaaaagcaggacgacggccggggtctggtgcttcctggctacaagtacctcggacccttcaacggactcgacaagggggagcccgtcaacgcggcggacgcggcggccctcgagcacgacaaggcctacgaccagcagctgcaggcgggtgacaatccgtacctgcggtataaccacgccgacgccgagtttcaggagcgtctgcaagaagatacgtcttttgggggcaacctcgggcgagcagtcttccaggccaagaagcgggttctcgaacctctcggtctggttgaggaaggcgctaagacggctcctggaaagaagagaccggtagagccatcaccccagcgttctccagactcctctacgggcatcggcaagaagggccaacagcccgccagaaaaagactcaattttggtcagactggcgactcagagtcagttccagaccctcaacctctcggagaacctccagcagcgccctctggtgtgggacctaatacaatggctgcaggcggtggcgcaccaatggcagacaataacgaaggcgccgacggagtgggtagttcctcgggaaattggcattgcgattccacatggctgggcgacagagtcatcaccaccagcacccgaacctgggccctgcccacctacaacaaccacctctacaagcaaatctccaacgggacatcgggaggagccaccaacgacaacacctacttcggctacagcaccccctgggggtattttgactttaacagattccactgccacttttcaccacgtgactggcagcgactcatcaacaacaactggggattccggcccaagagactcagcttcaagctcttcaacatccaggtcaaggaggtcacgcagaatgaaggcaccaagaccatcgccaataacctcaccagcaccatccaggtgtttacggactcggagtaccagctgccgtacgttctcggctctgcccaccagggctgcctgcctccgttcccggcggacgtgttcacgattccccagtacggctacctaacactcaacaacggtagtcaggccgtgggacgctcctccttctactgcctggaatactttccttcgcagatgctgagaaccggcaacaacttccagtttacttacaccttcgaggacgtgcctttccacagcagctacgcccacagccagagcttggaccggctgatgaatcctctgattgaccagtacctgtactacttgtctcggattcaaacaacaggaggcacggcaaatacgcagactctgggcttcagccaaggtgggcctaatacaatggccaatcaggcaaagaactggctgccaggaccctgttaccgccaacaacgcgtctcaacggcaaccgggcaaaacaacaatagcaactttgcctggactgctgggaccaaataccatctgaatggaagaaattcattggctaatcctggcatcgctatggcaacacacaaagacgacgaggagcgtttttttcccagtaacgggatcctgatttttggcaaacaaaatgctgccagagacaatgcggattacagcgatgtcatgcccaccagcgaggaagaaatcaaaaccactaaccctgtggccacagaggaatacggtatcgtggcagataacttgcagcagcaaaacacggctcctcaaattggaactgtcaacagccagggggccttacccggtatggtctggcagaaccgggacgtgtacctgcagggtcccatctgggccaagattcctcacacggacggcaacttccacccgtctccgctgatgggcggctttggcctgaaacatcctccgcctcagatcctgatcaagaacacgcctgtacctgcggatcctccgaccaccttcaaccagtcaaagctgaactctttcatcacgcaatacagcaccggacaggtcagcgtggaaattgaatgggagctgcagaaggaaaacagcaagcgctggaaccccgagatccagtacacctccaactactacaaatctacaagtgtggactttgctgttaatacagaaggcgtgtactctgaaccccgccccattggcacccgttacctcacccgtaatctgtaa

SEQ ID NO: 1593 - DNA, 2217 bp, Artificial Sequence
  Synthetic Polynucleotide
atggctgccgatggttatcttccagattggctcgaggacaacctctctgagggcattcgcgagtggtgggcgctgaaacctggagccccgaagcccaaagccaaccagcaaaagcaggacgacggccggggtctggtgcttcctggctacaagtacctcggacccttcaacggactcgacaagggggagcccgtcaacgcggcggacgcggcggccctcgagcacgacaaggcctacgaccagcagctgcaggcgggtgacaatccgtacctgcggtataaccacgccgacgccgagtttcaggagcgtctgcaagaagatacgtcttttgggggcaacctcgggcgagcagtcttccaggccaagaagcgggttctcgaacctctcggtctggttgaggaaggcgctaagacggctcctggaaagaagagaccggtagagccatcaccccagcgttctccagactcctctacgggcatcggcaagaagggccaacagcccgccagaaaaagactcaattttggtcagactggcgactcagagtcagttccagaccctcaacctctcggagaacctccagcagcgccctctggtgtgggacctaatacaatggctgcaggcggtggcgcaccaatggcagacaataacgaaggcgccgacggagtgggtagttcctcgggaaattggcattgcgattccacatggctgggcgacagagtcatcaccaccagcacccgaacctgggccctgcccacctacaacaaccacctctacaagcaaatctccaacgggacatcgggaggagccaccaacgacaacacctacttcggctacagcaccccctgggggtattttgactttaacagattccactgccacttttcaccacgtgactggcagcgactcatcaacaacaactggggattccggcccaagagactcagcttcaagctcttcaacatccaggtcaaggaggtcacgcagaatgaaggcaccaagaccatcgccaataacctcaccagcaccatccaggtgtttacggactcggagtaccagctgccgtacgttctcggctctgcccaccagggctgcccgcctccgttcccggcggacgtgttcacgattccccagtacggctacctaacactcaacaacggtagtcaggccgtgggacgctcctccttctactgcctggaatactttccttcgcagatgctgagaaccggcaacaacttccagtttacttacaccttcgaggacgtgcctttccacagcagctacgcccacagccagagcttggaccggctgatgaatcctctgattgaccagtacctgtactacttgtctcggattcaaacaacaggaggcacggcaaatacgcagactctgggcttcagccaaggtgggcctaatacaatggccaatcaggcaaagaactggctgccaggaccctgttaccgccaacaacgcgtctcaacgacaaccgggcaaaacaacaatagcaactttgcctggactgctgggaccaaataccatctgaatggaagaaattcattggctaatcctggcatcgctatggcaacacacaaagacgacgaggagcgtttttttcccagtaacgggatcctgatttttggcaaacaaaatgctgccagagacaatgcggattacagcgatgtcatgcccaccagcgaggaagaaatcaaaaccactaaccctgtggccacagaggaatacggtatcgtggcagataacttgcagcagcaaaacacggctcctcaaattggaactgtcaacagccagggggccttacccggtatggtctggcagaaccgggacgtgtacctgcagggtcccatctgggccaagattcctcacacggacggcaacttccacccgtctccgctgatgggcggctttggcctgaaacatcctccgcctcagatcctgatcaagaacacgcctgtacctgcggatcctccgaccaccttcaaccagtcaaagctgaactctttcatcacgcaatacagcaccggacaggtcagcgtggaaattgaatgggagctgcagaaggaaaacagcaagcgctggaaccccgagatccagtacacctccaactactacaaatctacaagtgtggactttgctgttaatacagaaggcgtgtactctgaaccccgccccattggcacccgttacctcacccgtaatctgtaa

SEQ ID NO: 1594 - DNA, 2217 bp, Artificial Sequence
  Synthetic Polynucleotide
atggctgccgatggttatcttccagattggctcgaggacaacctctctgagggcattcgcgagtggtgggcgctgaaacctggagccccgaagcccaaagccaaccagcaaaagcaggacgacggccggggtctggtgcttcctggctacaagtacctcggacccttcaacggactcgacaagggggagcccgtcaacgcggcggacgcggcggccctcgagcacgacaaggcctacgaccagcagccgcaggcgggtgacaatccgtacctgcggtataaccacgccgacgccgagtttcaggagcgtctgcaagaagatacgtcttttgggggcaacctcgggcgagcagtcttccaggccaagaagcgggttctcgaacctctcggtctggttgaggaaggcgctaagacggctcctggaaagaagagaccggtagagccatcaccccagcgttctccagactcctctacgggcatcggcaagaagggccaacagcccgccagaaaaagactcaattttggtcagactggcgactcagagtcagttccagaccctcaacctctcggagaacctccagcagcgccctctggtgtgggacctaatacaatggctgcaggcggtggcgcaccaatggcagacaataacgaaggcgccgacggagtgggtagttcctcgggaaattggcattgcgattccacatggctgggcgacagagtcatcaccaccagcacccgaacctgggccctgcccacctacaacaaccacctctacaagcaaatctccaacgggacatcgggaggagccaccaacgacaacacctacttcggctacagcaccccctgggggtattttgactttaacagattccactgccacttttcaccacgtgactggcagcgactcatcaacaacaactggggattccggcccaagagactcagcttcaagctcttcaacatccaggtcaaggaggtcacgcagaatgaaggcaccaagaccatcgccaataacctcaccagcaccatccaggtgtttacggactcggagtaccagctgccgtacgttctcggctctgcccaccagggctgcctgcctccgttcccggcggacgtgttcacgattccccagtacggctacctaacactcaacaacggtagtcaggccgtgggacgctcctccttctactgcctggaatactttccttcgcagatgctgagaaccggcaacaacttccagtttacttacaccttcgaggacgtgcctttccacagcagctacgcccacagccagagcttggaccggctgatgaatcctctgattgaccagtacctgtactacttgtctcggattcaaacaacaggaggcacggcaaatacgcagactctgggcttcagccaaggtgggcctaatacaatggccaatcaggcaaagaactggctgccaggaccctgttaccgccaacaacgcgtctcaacgacaaccgggcaaaacaacaatagcaactttgcctggactgctgggaccaaataccatctgaatggaagaaattcattggctaatcctggcatcgctatggcaacacacaaagacgacgaggagcgtttttttcccagtaacgggatcctgatttttggcaaacaaaatgctgccagagacaatgcggattacagcgatgtcatgcccaccagcgaggaagaaatcaaaaccactaaccctgtggccacagaggaatacggtatcgtggcagataacttgcagcagcaaaacacggctcctcaaattggaactgtcaacagccagggggccttacccggtatggtctggcagaaccgggacgtgtacctgcagggtcccatctgggccaagattcctcacacggacggcaacttccacccgtctccgctgatgggcggctttggcctgaaacatcctccgcctcagatcctgatcaagaacacgcctgtacctgcggatcctccgaccaccttcaaccagtcaaagctgaactctttcatcacgcaatacagcaccggacaggtcagcgtggaaattgaatgggagctgcagaaggaaaacagcaagcgctggaaccccgagatccagtacacctccaactactacaaatctacaagtgtggactttgctgttaatacagaaggcgtgtactctgaaccccgccccattggcacccgttacctcacccgtaatctgtaa

SEQ ID NO: 1595 - DNA, 2217 bp, Artificial Sequence
  Synthetic Polynucleotide
atggctgccgatggttatcttccagattggctcgaggacaacctctctgagggcattcgcgagtggtgggcgctgaaacctggagccccgaagcccaaagccaaccagcaaaagcaggacgacggccggggtctggtgcttcctggctacaagtacctcggacccttcaacggactcgacaagggggagcccgtcaacgcggcggacgcggcggccctcgagcacgacaaggcctacgaccagcagctgcaggcgggtgacaatccgtacctgcggtataaccacgccgacgccgagtttcaggagcgtctgcaagaagatacgtcttttgggggcaacctcgggcgagcagtcttccaggccaagaagcgggttctcgaacctctcggtctggttgaggaaggcgctaagacggctcctggaaagaagagaccggtagagccatcaccccagcgttctccagactcctctacgggcatcggcaagaagggccaacagcccgccagaaaaagactcaattttggtcagactggcgactcagagtcagttccagaccctcaacctctcggagaacctccagcagcgccctctggtgtgggacctaatacaatggctgcaggcggtggcgcaccaatggcagacaataacgaaggcgccgacggagtgggtagttcctcgggaaattggcattgcgattccacatggctgggcgacagagtcatcaccaccagcacccgaacctgggccctgcccacctacaacaaccacctctacaagcaaatctccaacgggacatcgggaggagccaccaacgacaacacctacttcggctacagcaccccctgggggtattttgactttaacagattccactgccacttttcaccacgtgactggcagcgactcatcaacaacaactggggattccggcccaagagactcagcttcaagctcttcaacatccaggtcaaggaggtcacgcagaatgaaggcaccaagaccatcgccaataacctcaccagcaccatccaggtgtttacggactcggagtaccagctgccgtacgttctcggctctgcccaccagggctgcctgcctccgttcccggcggacgtgttcacgattccccagtacggctacctaacactcaacaacggtagtcaggccgtgggacgctcctccttctactgcctggaataccttccttcgcagatgctgagaaccggcaacaacttccagtttacttacaccttcgaggacgtgcctttccacagcagctacgcccacagccagagcttggaccggctgatgaatcctctgattgaccagtacctgtactacttgtctcggattcaaacaacaggaggcacggcaaatacgcagactctgggcttcagccaaggtgggcctaatacaatggccaatcaggcaaagaactggctgccaggaccctgttaccgccaacaacgcgtctcaacgacaaccgggcaaaacaacaatagcaactttgcctggactgctgggaccaaataccatctgaatggaagaaattcattggctaatcctggcatcgctatggcaacacacaaagacgacgaggagcgtttttttcccagtaacgggatcctgatttttggcaaacaaaatgctgccagagacaatgcggattacagcgatgtcatgcccaccagcgaggaagaaatcaaaaccactaaccctgtggccacagaggaatacggtatcgtggcagataacttgcagcagcaaaacacggctcctcaaattggaactgtcaacagccagggggccttacccggtatggtctggcagaaccgggacgtgtacctgcagggtcccatctgggccaagattcctcacacggacggcaacttccacccgtctccgctgatgggcggctttggcctgaaacatcctccgcctcagatcctgatcaagaacacgcctgtacctgcggatcctccgaccaccttcaaccagtcaaagctgaactctttcatcacgcaatacagcaccggacaggtcagcgtggaaattgaatgggagctgcagaaggaaaacagcaagcgctggaaccccgagatccagtacacctccaactactacaaatctacaagtgtggactttgctgttaatacagaaggcgtgtactctgaaccccgccccattggcacccgttacctcacccgtaatctgtaa

SEQ ID NO: 1596 - DNA, 2217 bp, Artificial Sequence
  Synthetic Polynucleotide
atggctgccgatggttatcttccagattggctcgaggacaacctctctgagggcattcgcgagtggtgggcgctgaaacctggagccccgaagcccaaagccaaccagcaaaagcaggacgacggccggggtctggtgcttcctggctacaagtacctcggacccttcaacggactcgacaagggggagcccgtcaacgcggcggacgcggcggccctcgagcacgacaaggcctacgaccagcagctgcgggcgggtgacaatccgtacctgcggtataaccacgccgacgccgagtttcaggagcgtctgcaagaagatacgtcttttgggggcaacctcgggcgagcagtcttccaggccaagaagcgggttctcgaacctctcggtctggttgaggaaggcgctaagacggctcctggaaagaagagaccggtagagccatcaccccagcgttctccagactcctctacgggcatcggcaagaaggaccaacagcccgccagaaaaagactcaattttggtcagactggcgactcagagtcagttccagaccctcaacctctcggagaacctccagcagcgccctctggtgtgggacctaatacaatggctgcaggcggtggcgcaccaatggcagacaataacgaaggcgccgacggagtgggtagttcctcgggaaattggcattgcgattccacatggctgggcgacagagtcatcaccaccagcacccgaacctgggccctgcccacctacaacaaccacctctacaagcaaatctccaacgggacatcgggaggagccaccaacgacaacacctacttcggctacagcaccccctgggggtattttgactttaacagattccactgccacttttcaccacgtgactggcagcgactcatcaacaacaactggggattccggcccaagagactcagcttcaagctcttcaacatccaggtcaaggaggtcacgcagaatgaaggcaccaagaccatcgccaataacctcaccagcaccatccaggtgtttacggactcggagtaccagctgccgtacgttctcggctctgcccaccagggctgcctgcctccgttcccggcggacgtgttcacgattccccagtacggctacctaacactcaacaacggtagtcaggccgtgggacgctcctccttctactgcctggaatactttccttcgcagatgctgagaaccggcaacaacttccagtttacttacaccttcgaggacgtgcctttccacagcagctacgcccacagccagagcttggaccggctgatgaatcctctgattgaccagtacctgtactacttgtctcggattcaaacaacaggaggcacggcaaatacgcagactctgggcttcagccaaggtgggcctaatacaatggccaatcaggcaaagaactggctgccaggaccctgttaccgccaacaacgcgtctcaacgacaaccgggcaaaacaacaatagcaactttgcctggactgctgggaccaaataccatctgaatggaagaaattcattggctaatcctggcatcgctatggcaacacacaaagacgacgaggagcgtttttttcccagtaacgggatcctgatttttggcaaacaaaatgctgccagagacaatgcggattacagcgatgtcatgcccaccagcgaggaagaaatcaaaaccactaaccctgtggccacagaggaatacggtatcgtggcagataacttgcagcagcaaaacacggctcctcaaattggaactgtcaacagccagggggccttacccggtatggtctggcagaaccgggacgtgtacctgcagggtcccatctgggccaagattcctcacacggacggcaacttccacccgtctccgctgatgggcggctttggcctgaaacatcctccgcctcagatcctgatcaagaacacgcctgtacctgcggatcctccgaccaccttcaaccagtcaaagctgaactctttcatcacgcaatacagcaccggacaggtcagcgtggaaattgaatgggagctgcagaaggaaaacagcaagcgctggaaccccgagatccagtacacctccaactactacaaatctacaagtgtggactttgctgttaatacagaaggcgtgtactctgaaccccgccccattggcacccgttacctcacccgtaatctgtaa

SEQ ID NO: 1597 - DNA, 2217 bp, Artificial Sequence
  Synthetic Polynucleotide
atggctgccgatggttatcttccagattggctcgaggacaacctctctgagggcattcgcgagtggtgggcgctgaaacctggagccccgaagcccaaagccaaccagcaaaagcaggacgacggccggggtctggtgcttcctggctacaagtacctcggacccttcaacggactcgacaagggggagcccgtcaacgcggcggacgcggcggccctcgagcacgacaaggcctacgaccagcagctgcaggcgggtgacaatccgtacctgcggtataaccacgccgacgccgagtttcaggagcgtctgcaagaagatacgtcttttgggggcaacctcgggcgagcagtcttccaggccaagaagcgggttctcgaacctctcggtctggttgaggaaggcgctaagacggctcctggaaagaagagaccggtagagccatcaccccagcgttctccagactcctctacgggcatcggcaagaagggccaacagcccgccagaaaaagactcaattttggtcagactggcgactcagagtcagttccagaccctcaacctctcggagaacctccagcagcgccctctggtgtgggacctaatacaatggctgcaggcggtggcgcaccaatggcagacaataacgaaggcgccgacggagtgggtagttcctcgggaaattggcattgcgattccacatggctgggcgacagagtcatcaccaccagcacccgaacctgggccctgcccacctacaacaaccacctctacaagcaaatctccaacgggacatcgggaggagccaccaacgacaacacctacttcggctacagcaccccctgggggtattttgactttaacagattccactgccacttttcaccacgtgactggcagcgactcatcaacaacaactggggattccggcccaagagactcagcttcaagctcttcaacatccaggtcaaggaggtcacgcagaatgaaggcaccaagaccatcgccaataacctcaccagcaccatccaggtgtttacggactcggagtaccagctgccgtacgttctcggctctgcccaccagggctgcctgcctccgttcccggcggacgtgttcacgattccccagtacggctacctaacactcaacaacggtagtcaggccgtgggacgctcctccttctactgcctggaatactttccttcgcagatgctgagaaccggcaacaacttccagtttacttacaccttcgaggacgtgcctttccacagcagctacgcccacagccagagcttggaccggctgatgaatcctctgattgaccagtacctgtactacttgtctcggattcaaacaacaggaggcacggcaaatacgcagactctgggcttcagccaaggtgggcctaatacaatggccaatcaggcaaagaactggctgccaggaccctgttaccgccaacaacgcgtctcaacgacaaccgggcaaaacaacaatagcaactttgcctggactgctgggaccaaataccatctgaatggaagaaattcattggctaatcctggcatcgctatggcaacacacaaagacgacgaggagcgtttttttcccagtaacgggatcctgatttttggcaaacaaaatgctgccagagacaatgcggattacagcgatgtcatgcccaccagcgaggaagaaatcaaaaccactaaccctgtggccacagaggaatacggtatcgtggcagataacttgcagcagcaaaacacggctcctcaaattggaactgtcaacagccagggggccttacccggtatggtctggcagaaccgggacgtgtacctgcagggtcccatctgggccaagattcctcgcacggacggcaacttccacccgtctccgctgatgggcggctttggcctgaaacatcctccgcctcagatcctgatcaagaacacgcctgtgcctgcggatcctccgaccaccttcaaccagtcaaagctgaactctttcatcacgcaatacagcaccggacaggtcagcgtggaaattgaatgggagctgcagaaggaaaacagcaagcgctggaaccccgagatccagtacacctccaactactacaaatctacaagtgtggactttgctgttaatacagaaggcgtgtactctgaaccccgccccattggcacccgttacctcacccgtaatctgtaa

SEQ ID NO: 1598 - DNA, 2217 bp, Artificial Sequence
  Synthetic Polynucleotide
atggctgccgatggttatcttccagattggctcgaggacaacctctctgagggcattcgcgagtggtgggcgctgaaacctggagccccgaagcccaaagccaaccagcaaaagcaggacgacggccggggtctggtgcttcctggctacaagtacctcggacccttcaacggactcgacaagggggagcccgtcaacgcggcggacgcggcggccctcgagcacgacaaggcctacgaccagcagctgcaggcgggtgacaatccgtacctgcggtataaccacgccgacgccgagtttcaggagcgtctgcaagaagatacgtcttttgggggcaacctcgggcgagcagtcttccaggccaagaagcgggttctcgaacctctcggtctggttgaggaaggcgctaagacggctcctggaaagaagagaccggtagagccatcaccccagcgttctccagactcctctacgggcatcggcaagaagggccaacagcccgccagaaaaagactcaattttggtcagactggcgactcagagtcagttccagaccctcaacctctcggagaacctccagcagcgccctctggtgtgggacctaatacaatggctgcaggcggtggcgcaccaatggcagacaataacgaaggcgccgacggagtgggtagttcctcgggaaattggcattgcgattccacatggctgggcgacagagtcatcaccaccagcacccgaacctgggccctgcccacctacaacaaccacctctacaagcaaatctccaacgggacatcgggaggagccaccaacgacaacacctacttcggctacagcaccccctgggggtattttgactttaacagattccactgccacttttcaccacgtgactggcagcgactcatcaacaacaactggggattccggcccaagagactcagcttcaagctcttcaacatccaggtcaaggaggtcacgcagaatgaaggcaccaagaccatcgccaataacctcaccagcaccatccaggtgtttacggactcggagtaccagctgccgtacgttctcggctctgcccaccagggctgcctgcctccgttcccggcggacgtgttcacgattccccagtacggctacctaacactcaacaacggtagtcaggccgtgggacgctcctccttctactgcctggaatactttccttcgcagatgctgagaaccggcaacaacttccagtttacttacaccttcgaggacgtgcctttccacagcagctacgcccacagccagagcttggaccggctgatgaatcctctgattgaccagtacctgtactacttgtctcggattcaaacaacaggaggcacggcaaatacgcagactctgggcttcagccaaggtgggcctaatacaatggccaatcaggcaaagaactggctgccaggaccctgttaccgccaacaacgcgtctcaacgacaaccgggcaaaacaacaatagcaactttgcctggactgctgggaccaaataccatctgaatggaagaaattcattggctaatcctggcatcgctatggcaacacacaaagacgacgaggagcgtttttttcccagtaacgggatcctgatttttggcaaacaaaatgctgccagagacaatgcggattacagcgatgtcatgcccaccagcgaggaagaaatcaaaaccactaaccctgtggccacagaggaatacggtatcgtggcagataacttgcagcagcaaaacacggctcctcaaattggaactgtcaacagccagggggccttacccggtatggtctggcagaaccgggacgtgtacctgcagggtcccatctgggccaagattcctcacacggacggcaacttccacccgtctccgctgatgggcggctttggcctgaaacatcctccgcctcagatcctgatcaagaacacgcctgtacctgcggatcctccgaccaccttcaaccagtcaaagctgaactctttcatcacgcaatacagcaccggacaggtcagcgtggaaattggatgggagctgcagaaggaaaacagcaagcgctggaaccccgagatccagtacacctccaactactacaaatctacaagtgtggactttgctgttaatacagaaggcgtgtactctgaaccccgccccattggcacccgttacctcacccgtaatctgtaa

SEQ ID NO: 1599 - DNA, 2217 bp, Artificial Sequence
  Synthetic Polynucleotide
atggctgccgatggttatcttccagattggctcgaggacaacctctctgagggcattcgcgagtggtgggcgctgaaacctggagccccgaagcccaaagccaaccagcaaaagcaggacgacggccggggtctggtgcttcctggctacaagtacctcggacccttcaacggactcgacaagggggagcccgtcaacgcggcggacgcggcggccctcgagcacgacaaggcctacgaccagcagctgcaggcgggtgacaatccgtacctgcggtataaccacgccgacgccgagtttcaggagcgtctgcaagaagatacgtcttttgggggcaacctcgggcgagcagtcttccaggccaagaagcgggttctcgaacctctcggtctggttgaggaaggcgctaagacggctcctggaaagaagagaccggtagagccatcaccccagcgttctccagactcctctacgggcatcggcaagaagggccaacagcccgccagaaaaagactcaattttggtcagactggcgactcagagtcagttccagaccctcaacctctcggagaacctccagcagcgccctctggtgtgggacctaatacaatggctacaggcggtggcgcaccaatggcagacaataacgaaggcgccgacggagtgggtagttcctcgggaaattggcattgcgattccacatggctgggcgacagagtcatcaccaccagcacccgaacctgggccctgcccacctacaacaaccacctctacaagcaaatctccaacgggacatcgggaggagccaccaacgacaacacctacttcggctacagcaccccctgggggtattttgactttaacagattccactgccacttttcaccacgtgactggcagcgactcatcaacaacaactggggattccggcccaagagactcagcttcaagctcttcaacatccaggtcaaggaggtcacgcagaatgaaggcaccaagaccatcgccaataacctcaccagcaccatccaggtgtttacggactcggagtaccagctgccgtacgttctcggctctgcccaccagggctgcctgcctccgttcccggcggacgtgttcacgattccccagtacggctacctaacactcaacaacggtagtcaggccgtgggacgctcctccttctactgcctggaatactttccttcgcagatgctgagaaccggcaacaacttccagtttacttacaccttcgaggacgtgcctttccacggcagctacgcccacagccagagcttggaccggctgatgaatcctctgattgaccagtacctgtactacttgtctcggattcaaacaacaggaggcacggcaaatacgcagactctgggcttcagccaaggtgggcctaatacaatggccaatcaggcaaagaactggctgccaggaccctgttaccgccaacaacgcgtctcaacgacaaccgggcaaaacaacaatagcaactttgcctggactgctgggaccaaataccatctgaatggaagaaattcattggctaatcctggcatcgctatggcaacacacaaagacgacgaggagcgtttttttcccagtaacgggatcctgatttttggcaaacaaaatgctgccagagacaatgcggattacagcgatgtcatgcccaccagcgaggaagaaatcaaaaccactaaccctgtggccacagaggaatacggtatcgtggcagataacttgcagcagcaaaacacggctcctcaaattggaactgtcaacagccagggggccttacccggtatggtctggcagaaccgggacgtgtacctgcagggtcccatctgggccaagattcctcacacggacggcaacttccacccgtctccgctgatgggcggctttggcctgaaacatcctccgcctcagatcctgatcaagaacacgcctgtacctgcggatcctccgaccaccttcaaccagtcaaagctgaactctttcatcacgcaatacagcaccggacaggtcagcgtggaaattgaatgggagctgcagaaggaaaacagcaagcgctggaaccccgagatccagtacacctccaactactacaaatctacaagtgtggactttgctgttaatacagaaggcgtgtactctgaaccccgccccattggcacccgttacctcacccgtaatctgtaa

SEQ ID NO: 1600 - DNA, 2217 bp, Artificial Sequence
  Synthetic Polynucleotide
atggctgccgatggttatcttccagattggctcgaggacaacctctctgagggcattcgcgagtggtgggcgctgaaacctggagccccgaagcccaaagccaaccagcaaaagcaggacgacggccggggtctggtgcttcctggctacaagtacctcggacccttcaacggactcgacaagggggagcccgtcaacgcggcggacgcggcggccctcgagcacgacaaggcctacgaccagcagctgcaggcgggtgacaatccgtacctgcggtataaccacgccgacgccgagtttcaggagcgtctgcaagaagatacgtcttttgggggcaacctcgggcgagcagtcttccaggccaagaagcgggttctcgaacctctcggtctggttgaggaaggcgctaagacggctcctggaaagaagagaccggtagagccatcaccccagcgttctccagactcctctacgggcatcggcaagaagggccaacagcccgccagaaaaagactcaattttggtcagactggcgactcagagtcagttccagaccctcaacctctcggagaacctccagcagcgccctctggtgtgggacctaatacaatggctgcaggcggtggcgcaccaatggcagacaataacgaaggcgccgacggagtgggtagttcctcgggaaattggcattgcgattccacatggctgggcgacagagtcatcaccaccagcacccgaacctgggccctgcccacctacaacaaccacctctacaagcaaatctccaacgggacatcgggaggagccaccaacgacaacacctacttcggctacagcaccccctgggggtattttgactttaacagattccactgccacttttcaccacgtgactggcagcgactcatcaacaacaactggggattccggcccaagagactcagcttcaagctcttcaacatccaggtcaaggaggtcacgcagaatgaaggcaccaagaccatcgccaataacctcaccagcaccatccaggtgtttacggactcggagtacctgctgccgtacgttctcggctctgcccaccagggctgcctgcctccgttcccggcggacgtgttcacgattccccagtacggctacctaacactcaacaacggtagtcaggccgtgggacgctcctccttctactgcctggaatactttccttcgcagatgctgagaaccggcaacaacttccagtttacttacaccttcgaggacgtgcctttccacagcagctacgcccacagccagagcttggaccggctgatgaatcctctgattgaccagtacctgtactacttgtctcggattcaaacaacaggaggcacggcaaatacgcagactctgggcttcagccaaggtgggcctaatacaatggccaatcaggcaaagaactggctgccaggaccctgttaccgccaacaacgcgtctcaacgacaaccgggcaaaacaacaatagcaactttgcctggactgctgggaccaaataccatctgaatggaagaaattcattggctaatcctggcatcgctatggcaacacacaaagacgacgaggagcgtttttttcccagtaacgggatcctgatttttggcaaacaaaatgctgccagagacaatgcggattacagcgatgtcatgcccaccagcgaggaagaaatcaaaaccactaaccctgtggccacagaggaatacggtatcgtggcagataacttgcagcagcaaaacacggctcctcaaattggaactgtcaacagccagggggccttacccggtatggtctggcagaaccgggacgtgtacctgcagggtcccatctgggccaagattcctcacacggacggcaacttccacccgtctccgctgatgggcggctttggcctgaaacatcctccgcctcagatcctgatcaagaacacgcctgtacctgcggatcctccgaccaccttcaaccagtcaaagctgaactctttcatcacgcaatacagcaccggacaggtcagcgtggaaattgaatgggagctgcagaaggaaaacagcaagcgctggaaccccgagatccagtacacctccaactactacaaatctacaagtgtggactttgctgttaatacagaaggcgtgtactctgaaccccgccccattggcacccgttacctcacccgtaatctgtaa

SEQ ID NO: 1601 - DNA, 2217 bp, Artificial Sequence
  Synthetic Polynucleotide
atggctgccgatggttatcctccagattggctcgaggacaacctctctgagggcattcgcgagtggtgggcgctgaaacctggagccccgaagcccaaagccaaccagcaaaagcaggacgacggccggggtctggtgcttcctggctacaagtacctcggacccttcaacggactcgacaagggggagcccgtcaacgcggcggacgcggcggccctcgagcacgacaaggcctacgaccagcagctgcaggcgggtgacaatccgtacctgcggtataaccacgccgacgccgagtttcaggagcgtctgcaagaagatacgtcttttgggggcaacctcgggcgagcagtcttccaggccaagaagcgggttctcgaacctctcggtctggttgaggaaggcgctaagacggctcctggaaagaagagaccggtagagccatcaccccagcgttctccagactcctctacgggcatcggcaagaagggccaacagcccgccagaaaaagactcaattttggtcagactggcgactcagagtcagttccagaccctcaacctctcggagaacctccagcagcgccctctggtgtgggacctaatacaatggctgcaggcggtggcgcaccaatggcagacaataacgaaggcgccgacggagtgggtagttcctcgggaaattggcattgcgattccacatggctgggcgacagagtcatcaccaccagcacccgaacctgggccctgcccacctacaacaaccacctctacaagcaaatctccaacgggacatcgggaggagccaccaacgacaacacctacttcggctacagcaccccctgggggtattttgactttaacagattccactgccacttttcaccacgtgactggcagcgactcatcaacaacaactggggattccggcccaagagactcagcttcaagctcttcaacatccaggtcaaggaggtcacgcagaatgaaggcaccaagaccatcgccaataacctcaccagcaccatccaggtgtttacggactcggagtaccagctgccgtacgttctcggctctgcccaccagggctgcctgcctccgttcccggcggacgtgttcacgattccccagtacggctacctaacactcaacaacggtagtcaggccgtgggacgctcctccttctactgcctggaatactttccttcgcagatgctgagaaccggcaacaacttccagtttacttacaccttcgaggacgtgcctttccacagcagctacgcccacagccagagcttggaccggctgatgaatcctctgattgaccagtacctgtactacttgtctcggattcaaacaacaggaggcacggcaaatacgcagactctgggcttcagccaaggtgggcctaatacaatggccaatcaggcaaagaactggctgccaggaccctgttaccgccaacaacgcgtctcaacgacaaccgggcaaaacaacaatagcaactttgcctggactgctgggaccaaataccatctgaatggaagaaattcattggctaatcctggcatcgctatggcaacacacaaagacgacgaggagcgtttttttcccagtaacgggatcctgatttttggcaaacaaaatgctgccagagacaatgcggattacagcgatgtcatgcccaccagcgaggaagaaatcaaaaccactaaccctgtggccacagaggaatacggtatcgtggcagataacttgcagcagcaaaacacggctcctcaaattggaactgtcaacagccagggggccttacccggtatggtctggcagaaccgggacgtgtacctgcagggtcccatctgggccaagattcctcacacggacggcaacttccacccgtctccgctgatgggcggctttggcctgaaacatcctccgcctcagatcctgatcaagaacacgcctgtacctgcggatcctccgaccaccttcaaccagtcaaagctgaactctttcatcacgcaatacagcaccggacaggtcagcgtggaaattgaatgggagctgcagaaggaaaacagcaagcgctggaaccccgagatccagtacacctccaactactacaaatctacaagtgtggactttgctgttaatacagaaggcgtgtactctgaaccccgccccattggcacccgttacctcacccgtaatctgtaa

SEQ ID NO: 1602 - DNA, 2217 bp, Artificial Sequence
  Synthetic Polynucleotide
atggctgccgatggttatcttccagattggctcgaggacaacctctctgagggcattcgcgagtggtgggcgctgaaacctggagccccgaagcccaaagccaaccagcaaaagcaggacgacggccggggtctggtgcttcctggctacaagtacctcggacccttcaacggactcgacaagggggagcccgtcaacgcggcggacgcggcggccctcgagcacgacaaggcctacgaccagcagctgcaggcgggtgacaatccgtacctgcggtataaccacgccgacgccgagtttcaggagcgtctgcaagaagatacgtcttttgggggcaacctcgggcgagcagtcttccaggccaagaagcgggttctcgaacctctcggtctggttgaggaaggcgctaagacggctcctggaaagaagagaccggtagagccatcaccccagcgttctccagactcctctacgggcatcggcaagaagggccaacagcccgccagaaaaagactcaattttggtcagactggcgactcagagtcagttccagaccctcaacctctcggagaacctccagcagcgccctctggtgtgggacctaatacaatggctgcaggcggtggcgcaccaatggcagacaataacgaaggcgccgacggagtgggtagttcctcgggaaattggcattgcgattccacatggctgggcgacagagtcatcaccaccagcacccgaacctgggccctgcccacctacaacaaccacctctacaagcaaatctccaacgggacatcgggaggagccaccaacgacaacacctacttcggctacagcaccccctgggggtattttgactttaacagattccactgccacttttcaccacgtgactggcagcgactcatcaacaacaactggggattccggcccaagagactcagcttcaagctcttcaacatccaggtcaaggaggtcacgcagaatgaaggcaccaagaccatcgccaataacctcaccagcaccatccaggtgtttacggactcggagtaccagctgccgtacgttctcggctctgcccaccagggctgcctgcctccgttcccggcggacgtgttcacgattccccagtacggctacctaacactcaacaacggtagtcaggccgtgggacgctcctccttctactgcctggaatactttccttcgcagatgctgagaaccggcaacaacttccagtttacttacaccttcgaggacgtgcctttccacagcagctacgcccacagccagagcttggaccggctgatgaatcctctgattgaccagtacctgtactacttgtctcggattcaaacaacaggaggcacggcaaatacgcagactctgggctccagccaaggtgggcctaatacaatggccaatcaggcaaagaactggctgccaggaccctgttaccgccaacaacgcgtctcaacgacaaccgggcaaaacaacaatagcaactttgcctggactgctgggaccaaataccatctgaatggaagaaattcattggctaatcctggcatcgctatggcaacacacaaagacgacgaggagcgtttttttcccagtaacgggatcctgatttttggcaaacaaaatgctgccagagacaatgcggattacagcgatgtcatgcccaccagcgaggaagaaatcaaaaccactaaccctgtggccacagaggaatacggtatcgtggcagataacttgcagcagcaaaacacggctcctcaaattggaactgtcaacagccagggggccttacccggtatggtctggcagaaccgggacgtgtacctgcagggtcccatctgggccaagattcctcacacggacggcaacttccacccgtctccgctgatgggcggctttggcctgaaacatcctccgcctcagatcctgatcaagaacacgcctgtacctgcggatcctccgaccaccttcaaccagtcaaagctgaactctttcatcacgcaatacagcaccggacaggtcagcgtggaaattgaatgggagctgcagaaggaaaacagcaagcgctggaaccccgagatccagtacacctccaactactacaaatctacaagtgtggactttgctgttaatacagaaggcgtgtactctgaaccccgccccattggcacccgttacctcacccgtaatctgtaa

SEQ ID NO: 1603 - DNA, 2217 bp, Artificial Sequence
  Synthetic Polynucleotide
atggctgccgatggttatcttccagattggctcgaggacaacctctctgagggcattcgcgagtggtgggcgctgaaacctggagccccgaagcccaaagccaaccagcaaaagcaggacgacggccggggtctggtgcttcctggctacaagtacctcggacccttcaacggactcgacaagggggagcccgtcaacgcggcggacgcggcggccctcgagcacgacaaggcctacgaccagcagctgcaggcgggtgacaatccgtacctgcggtataaccacgccgacgccgagtttcaggagcgtctgcaagaagatacgtcttttgggggcaacctcgggcgagcagtcttccaggccaagaagcgggttctcgaacctctcggtctggttgaggaaggcgctaagacggctcctggaaagaagagaccggtagagccatcaccccagcgttctccagactcctctacgggcatcggcaagaagggccaacagcccgccagaaaaagactcaattttggtcagactggcgactcagagtcagttccagaccctcaacctctcggagaacctccagcagcgccctctggtgtgggacctaatacaatggctgcaggcggtggcgcaccaatggcagacaataacgaaggcgccgacggagtgggtagttcctcgggaaattggcattgcgattccacatggctgggcgacagagtcatcaccaccagcacccgaacctgggccctgcccacctacaacaaccacctctacaagcaaatctccaacgggacatcgggaggagccaccaacgacaacacctacttcggctacagcaccccctgggggtattttgactttaacagattccactgccacttttcaccacgtgactggcagcgactcatcaacaacaactggggattccggcccaagagactcagcttcaagctcttcaacatccaggtcaaggaggtcacgcagaatgaaggcaccaagaccatcgccaataacctcaccagcaccatccaggtgtttacggactcggagtaccagctgccgtacgttctcggctctgcccaccagggctgcctgcctccgttcccggcggacgtgttcacgattccccagtacggctacctaacactcaacaacggtagtcaggccgtgggacgctcctccttctactgcctggaatactttccttcgcagatgctgagaaccggcaacaacttccagtttacttacaccttcgaggacgtgcctttccacagcagctacgcccacagccagagcttggaccggctgatgaatcctctgattggccagtacctgtactacttgtctcggattcaaacaacaggaggcacggcaaatacgcagactctgggcttcagccaaggtgggcctaatacaatggccaatcaggcaaagaactggctgccaggaccctgttaccgccaacaacgcgtctcaacgacaaccgggcaaaacaacaatagcaactttgcctggactgctgggaccaaataccatctgaatggaagaaattcattggctaatcctggcatcgctatggcaacacacaaagacgacgaggagcgtttttttcccagtaacgggatcctgatttttggcaaacaaaatgctgccagagacaatgcggattacagcgatgtcatgcccaccagcgaggaagaaatcaaaaccactaaccctgtggccacagaggaatacggtatcgtggcagataacttgcagcagcaaaacacggctcctcaaattggaactgtcaacagccagggggccttacccggtatggtctggcagaaccgggacgtgtacctgcagggtcccatctgggccaagattcctcacacggacggcaacttccacccgtctccgctgatgggcggctttggcctgaaacatcctccgcctcagatcctgatcaagaacacgcctgtacctgcggatcctccgaccaccttcaaccagtcaaagctgaactctttcatcacgcaatacagcaccggacaggtcagcgtggaaattgaatgggagctgcagaaggaaaacagcaagcgctggaaccccgagatccagtacacctccaactactacaaatctacaagtgtggactttgctgttaatacagaaggcgtgtactctgaaccccgccccattggcacccgttacctcacccgtaatctgtaa

SEQ ID NO: 1604 - DNA, 2217 bp, Artificial Sequence
  Synthetic Polynucleotide
atggctgccgatggttatcttccagattggctcgaggacaacctctctgagggcattcgcgagtggtgggcgctgaaacctggagccccgaagcccaaagccaaccagcaaaagcaggacgacggccggggtctggtgcttcctggctacaagtacctcggacccttcaacggactcgacaagggggagcccgtcaacgcggcggacgcggcggccctcgagcacgacaaggcctacgaccagcagctgcaggcgggtgacaatccgtacctgcggtataaccacgccgacgccgagtttcaggagcgtctgcaagaagatacgtcttttgggggcaacctcgggcgagcagtcttccaggccaagaagcgggttctcgaacctctcggtctggttgaggaaggcgctaagacggctcctggaaagaagagaccggtagagccatcaccccagcgttctccagactcctctacgggcatcggcaagaagggccaacagcccgccagaaaaagactcaattttggtcagactggcgactcagagtcagttccagaccctcaacctctcggagaacctccagcagcgccctctggtgtgggacctaatacaatggctgcaggcggtggcgcaccaatggcagacaataacgaaggcgccgacggagtgggtagttcctcgggaaattggcattgcgattccacatggctgggcgacagagtcatcaccaccagcacccgaacctgggccctgcccacctacaacaaccacctctacaagcaaatctccaacgggacatcgggaggagccaccaacgacaacacctacttcggctacagcaccccctgggggtattttgactttaacagattccactgccacttttcaccacgtgactggcagcgactcatcaacaacaactggggattccggcccaagagacccagcttcaagctcttcaacatccaggtcaaggaggtcacgcagaatgaaggcaccaagaccatcgccaataacctcaccagcaccatccaggtgtttacggactcggagtaccagctgccgtacgttctcggctctgcccaccagggctgcctgcctccgttcccggcggacgtgttcacgattccccagtacggctacctaacactcaacaacggtagtcaggccgtgggacgctcctccttctactgcctggaatactttccttcgcagatgctgagaaccggcaacaacttccagtttacttacaccttcgaggacgtgcctttccacagcagctacgcccacagccagagcttggaccggctgatgaatcctctgattgaccagtacctgtactacttgtctcggattcaaacaacaggaggcacggcaaatacgcagactctgggcttcagccaaggtgggcctaatacaatggccaatcaggcaaagaactggctgccaggaccctgttaccgccaacaacgcgtctcaacgacaaccgggcaaaacaacaatagcaactttgcctggactgctgggaccaaataccatctgaatggaagaaattcattggctaatcctggcatcgctatggcaacacacaaagacgacgaggagcgtttttttcccagtaacgggatcctgatttttggcaaacaaaatgctgccagagacaatgcggattacagcgatgtcatgcccaccagcgaggaagaaatcaaaaccactaaccctgtggccacagaggaatacggtatcgtggcagataacttgcagcagcaaaacacggctcctcaaattggaactgtcaacagccagggggccttacccggtatggtctggcagaaccgggacgtgtacctgcagggtcccatctgggccaagattcctcacacggacggcaacttccacccgtctccgctgatgggcggctttggcctgaaacatcctccgcctcagatcctgatcaagaacacgcctgtacctgcggatcctccgaccaccttcaaccagtcaaagctgaactctttcatcacgcaatacagcaccggacaggtcagcgtggaaattgaatgggagctgcagaaggaaaacagcaagcgctggaaccccgagatccagtacacctccaactactacaaatctacaagtgtggactttgctgttaatacagaaggcgtgtactctgaaccccgccccattggcacccgttacctcacccgtaatctgtaa

SEQ ID NO: 1605 - DNA, 2217 bp, Artificial Sequence
  Synthetic Polynucleotide
atggctgccgatggttatcttccagattggctcgaggacaacctctctgagggcattcgcgagtggtgggcgctgaaacctggagccccgaagcccaaagccaaccagcaaaagcaggacgacggccggggtctggtgcttcctggctacaagtacctcggacccttcaacggactcgacaagggggagcccgtcaacgcggcggacgcggcggccctcgagcacgacaaggcctacgaccagcagctgcaggcgggtgacaatccgtacctgcggtataaccacgccgacgccgagtttcaggagcgtctgcaagaagatacgtcttttgggggcaacctcgggcgagcagtcttccaggccaagaagcgggttctcgaacctctcggtctggttgaggaaggcgctaagacggctcctggaaagaagagaccggtagagccatcaccccagcgttctccagactcctctacgggcatcggcaagaagggccaacagcccgccagaaaaagactcaattttggtcagactggcgactcagagtcagttccagaccctcaacctctcggagaacctccagcagcgccctctggtgtgggacctaatacaatggctgcaggcggtggcgcaccaatggcagacaataacgaaggcgccgacggagtgggtagttcctcgggaaattggcattgcgattccacatggctgggcgacagagtcatcaccaccagcacccgaacctgggccctgcccacctacaacaaccacctctacaagcaaatctccaacgggacatcgggaggagccaccaacgacaacacctacttcggctacagcaccccctgggggtattttgactttaacagattccactgccacttttcaccacgtgactggcagcgactcatcaacaacaactggggattccggcccaagagactcagcttcaagctcttcaacatccaggtcaaggaggtcacgcagaatgaaggcaccaagaccatcgccaataacctcaccagcaccatccaggtgtttacggactcggagtaccagctgccgtacgttctcggctctgcccaccagggctgcctgcctccgttcccggcggacgtgttcacgattccccagtacggctacctaacactcaacaacggtagtcaggccgtgggacgctcctccttctactgcctggaatactttccttcgcagatgctgagaaccggcaacaacttccagtttacttacaccttcgaggacgtgcctttccacagcagctacgcccacagccagagcttggaccggctgatgaatcctctgattgaccagtacctgtactacttgtctcggattcaaacaacaggaggcacggcaaatacgcagactctgggcttcagccaaggtgggcctaatacaatggccaatcaggcaaagaactggctgccaggaccctgttaccgccaacaacgcgtctcaacgacaaccgggcaaaacaacaatagcaactttgcctggactgctgggaccaaataccatctgaatggaagaaattcattggctaatcctggcatcgctatggcaacacacaaagacgacggggagcgtttttttcccagtaacgggatcctgatttttggcaaacaaaatgctgccagagacaatgcggattacagcgatgtcatgcccaccagcgaggaagaaatcaaaaccactaaccctgtggccacagaggaatacggtatcgtggcagataacttgcagcagcaaaacacggctcctcaaattggaactgtcaacagccagggggccttacccggtatggtctggcagaaccgggacgtgtacctgcagggtcccatctgggccaagattcctcacacggacggcaacttccacccgtctccgctgatgggcggctttggcctgaaacatcctccgcctcagatcctgatcaagaacacgcctgtacctgcggatcctccgaccaccttcaaccagtcaaagctgaactctttcatcacgcaatacagcaccggacaggtcagcgtggaaattgaatgggagctgcagaaggaaaacagcaagcgctggaaccccgagatccagtacacctccaactactacaaatctacaagtgtggactttgctgttaatacagaaggcgtgtactctgaaccccgccccattggcacccgttacctcacccgtaatctgtaa

SEQ ID NO: 1606 - DNA, 2217 bp, Artificial Sequence
  Synthetic Polynucleotide
atggctgccgatggttatcttccagattggctcgaggacaacctctctgagggcattcgcgagtggtgggcgctgaaacctggagccccgaagcccaaagccaaccagcaaaagcaggacgacggccggggtctggtgcttcctggctacaagtacctcggacccttcaacggactcgacaagggggagcccgtcaacgcggcggacgcggcggccctcgagcacgacaaggcctacgaccagcagctgcaggcgggtgacaatccgtacctgcggtataaccacgccgacgccgagtttcaggagcgtctgcaagaagatacgtcttttgggggcaacctcgggcgagcagtcttccaggccaagaagcgggttctcgaacctctcggtctggttgaggaaggcgctaagacggctcctggaaagaagagaccggtagagccatcaccccagcgttctccagactcctctacgggcatcggcaagaagggccaacagcccgccagaaaaagactcaattttggtcagactggcgactcagagtcagttccagaccctcaacctctcggagaacctccagcagcgccctctggtgtgggacctaatacaatggctgcaggcggtggcgcaccaatggcagacaataacgaaggcgccgacggagtgggtagttcctcgggaaattggcattgcgattccacatggctgggcgacagagtcatcaccaccagcacccgaacctgggccccgcccacctacaacaaccacctctacaagcaaatctccaacgggacatcgggaggagccaccaacgacaacacctacttcggctacagcaccccctgggggtattttgactttaacagattccactgccacttttcaccacgtgactggcagcgactcatcaacaacaactggggattccggcccaagagactcagcttcaagctcttcaacatccaggtcaaggaggtcacgcagaatgaaggcaccaagaccatcgccaataacctcaccagcaccatccaggtgtttacggactcggagtaccagctgccgtacgttctcggctctgcccaccagggctgcctgcctccgttcccggcggacgtgttcacgattccccagtacggctacctaacactcaacaacggtagtcaggccgtgggacgctcctccttctactgcctggaatactttccttcgcagatgctgagaaccggcaacaacttccagtttacttacaccttcgaggacgtgcctttccacagcagctacgcccacagccagagcttggaccggctgatgaatcctctgattgaccagtacctgtactacttgtctcggattcaaacaacaggaggcacggcaaatacgcagactctgggcttcagccaaggtgggcctaatacaatggccaatcaggcaaagaactggctgccaggaccctgttaccgccaacaacgcgtctcaacgacaaccgggcaaaacaacaatagcaactttgcctggactgctgggaccaaataccatctgaatggaagaaattcattggctaatcctggcatcgctatggcaacacacaaagacgacgaggagcgtttttttcccagtaacgggatcctgatttttggcaaacaaaatgctgccagagacaatgcggattacagcgatgtcatgcccaccagcgaggaagaaatcaaaaccactaaccctgtggccacagaggaatacggtatcgtggcagataacttgcagcagcaaaacacggctcctcaaattggaactgtcaacagccagggggccttacccggtatggtctggcagaaccgggacgtgtacctgcagggtcccatctgggccaagattcctcacacggacggcaacttccacccgtctccgctgatgggcggctttggcctgaaacatcctccgcctcagatcctgatcaagaacacgcctgtacctgcggatcctccgaccaccttcaaccagtcaaagctgaactctttcatcacgcaatacagcaccggacaggtcagcgtggaaattgaatgggagctgcagaaggaaaacagcaagcgctggaaccccgagatccagtacacctccaactactacaaatctacaagtgtggactttgctgttaatacagaaggcgtgtactctgaaccccgccccattggcacccgttacctcacccgtaatctgtaa

SEQ ID NO: 1607 - DNA, 2217 bp, Artificial Sequence
  Synthetic Polynucleotide
atggctgccgatggttatcttccagattggctcgaggacaacctctctgagggcattcgcgagtggtgggcgctgaaacctggagccccgaagcccaaagccaaccagcaaaagcaggacgacggccggggtctggtgcttcctggctacaagtacctcggacccttcaacggactcgacaagggggagcccgtcaacgcggcggacgcggcggccctcgagcacgacaaggcctacgaccagcagctgcaggcgggtgacaatccgtacctgcggtataaccacgccgacgccgagtttcaggagcgtctgcaagaagatacgtcttttgggggcaacctcgggcgagcagtcttccaggccaagaagcgggttctcgaacctctcggtctggttgaggaaggcgctaagacggctcctggaaagaagagaccggtagagccatcaccccagcgttctccagactcctctacgggcatcggcaagaagggccaacagcccgccagaaaaagactcaattttggtcagactggcgactcagagtcagttccagaccctcaacctctcggagaacctccagcagcgccctctggtgtgggacctaatacaatggctgcaggcggtggcgcaccaatggcagacaataacgaaggcgccgacggagtgggtagttcctcgggaaattggcattgcgattccacatggctgggcgacagagtcatcaccaccagcacccgaacctgggccctgcccacctacaacaaccacctctacaagcaaatctccaacgggacatcgggaggagccaccaacgacaacacctacttcggctacagcaccccctgggggtattttgactttaacagattccactgccacttttcaccacgtgactggcagcgactcatcaacaacaactggggattccggcccaagagactcggcttcaagctcttcaacatccaggtcaaggaggtcacgcagaatgaaggcaccaagaccatcgccaataacctcaccagcaccatccaggtgtttacggactcggagtaccagctgccgtacgttctcggctctgcccaccagggctgcctgcctccgttcccggcggacgtgttcacgattccccagtacggctacctaacactcaacaacggtagtcaggccgtgggacgctcctccttctactgcctggaatactttccttcgcagatgctgagaaccggcaacaacttccagtttacttacaccttcgaggacgtgcctttccacagcagctacgcccacagccagagcttggaccggctgatgaatcctctgattgaccagtacctgtactacttgtctcggattcaaacaacaggaggcacggcaaatacgcagactctgggcttcagccaaggtgggcctaatacaatggccaatcaggcaaagaactggctgccaggaccctgttaccgccaacaacgcgtctcaacgacaaccgggcaaaacaacaatagcaactttgcctggactgctgggaccaaataccacctgaatggaagaaattcattggctaatcctggcatcgctatggcaacacacaaagacgacgaggagcgtttttttcccagtaacgggatcctgatttttggcaaacaaaatgctgccagagacaatgcggattacagcgatgtcatgcccaccagcgaggaagaaatcaaaaccactaaccctgtggccacagaggaatacggtatcgtggcagataacttgcagcagcaaaacacggctcctcaaattggaactgtcaacagccagggggccttacccggtatggtctggcagaaccgggacgtgtacctgcagggtcccatctgggccaagattcctcacacggacggcaacttccacccgtctccgctgatgggcggctttggcctgaaacatcctccgcctcagatcctgatcaagaacacgcctgtacctgcggatcctccgaccaccttcaaccagtcaaagctgaactctttcatcacgcaatacagcaccggacaggtcagcgtggaaattgaatgggagctgcagaaggaaaacagcaagcgctggaaccccgagatccagtacacctccaactactacaaatctacaagtgtggactttgctgttaatacagaaggcgtgtactctgaaccccgccccattggcacccgttacctcacccgtaatctgtaa

SEQ ID NO: 1608 - DNA, 2217 bp, Artificial Sequence
  Synthetic Polynucleotide
atggctgccgatggttatcttccagattggctcgaggacaacctctctgagggcattcgcgagtggtgggcgctgaaacctggagccccgaagcccaaagccaaccagcaaaagcaggacgacggccggggtctggtgcttcctggctacaagtacctcggacccttcaacggactcgacaagggggagcccgtcaacgcggcggacgcggcggccctcgagcacgacaaggcctacgaccagcagctgcaggcgggtgacaatccgtacctgcggtataaccacgccgacgccgagtttcaggagcgtctgcaagaagatacgtcttttgggggcaacctcgggcgagcagtcttccaggccaagaagcgggttctcgaacctctcggtctggttgaggaaggcgctaagacggctcctggaaagaagagaccggtagagccatcaccccagcgttctccagactcctctacgggcatcggcaagaagggccaacagcccgccagaaaaagactcaattttggtcggactggcgactcagagtcagttccagaccctcaacctctcggagaacctccagcagcgccctctggtgtgggacctaatacaatggctgcaggcggtggcgcaccaatggcagacaataacgaaggcgccgacggagtgggtagttcctcgggaaattggcattgcgattccacatggctgggcgacagagtcatcaccaccagcacccgaacctgggccctgcccacctacaacaaccacctctacaagcaaatctccaacgggacatcgggaggagccaccaacgacaacacctacttcggctacagcaccccctgggggtattttgactttaacagattccactgccacttttcaccacgtgactggcagcgactcatcaacaacaactggggattccggcccaagagactcagcttcaagctcttcaacatccaggtcaaggaggtcacgcagaatgaaggcaccaagaccatcgccaataacctcaccagcaccatccaggtgtttacggactcggagtaccagctgccgtacgttctcggctctgcccaccagggctgcctgcctccgttcccggcggacgtgttcacgattccccagtacggctacctaacactcaacaacggtagtcaggccgtgggacgctcctccttctactgcctggaatactttccttcgcagatgctgagaaccggcaacaacttccagtttacttacaccttcgaggacgtgcctttccacagcagctacgcccacagccagagcttggaccggctgatgaatcctctgattgaccagtacctgtactacttgtctcggattcaaacaacaggaggcacggcaaatacgcagactctgggcttcagccaaggtgggcctaatacaatggccaatcaggcaaagaactggctgccaggaccctgttaccgccaacaacgcgtctcaacgacaaccgggcaaaacaacaatagcaactttgcctggactgctgggaccaaataccatctgaatggaagaaattcattggctaatcctggcatcgctatggcaacacacaaagacgacgaggagcgtttttttcccagtaacgggatcctgatttttggcaaacaaaatgctgccagagacaatgcggattacagcgatgtcatgcccaccagcgaggaagaaatcaaaaccactaaccctgtggccacagaggaatacggtatcgtggcagataacttgcagcagcaaaacacggctcctcaaattggaactgtcaacagccagggggccttacccggtatggtctggcagaaccgggacgtgtacctgcagggtcccatctgggccaagattcctcacacggacggcaacttccacccgtctccgctgatgggcggctttggcctgaaacatcctccgcctcagatcctgatcaagaacacgcctgtacctgcggatcctccgaccaccttcaaccagtcaaagctgaactctttcatcacgcaatacagcaccggacaggtcagcgtggaaattgaatgggagctgcagaaggaaaacagcaagcgctggaaccccgagatccagtacacctccaactactacaaatctacaagtgtggactttgctgttaatacagaaggcgtgtactctgaaccccgccccattggcacccgttacctcacccgtaatctgtaa

SEQ ID NO: 1609 - DNA, 2217 bp, Artificial Sequence
  Synthetic Polynucleotide
atggctgccgatggttatcttccagattggctcgaggacaacctctctgagggcattcgcgagtggtgggcgctgaaacctggagccccgaagcccaaagccaaccagcaaaagcaggacgacggccggggtctggtgcttcctggctacaagtacctcggacccttcaacggactcgacaagggggagcccgtcaacgcggcggacgcggcggccctcgagcacgacaaggcctacgaccagcagctgcaggcgggtgacaatccgtacctgcggtataaccacgccgacgccgagtttcaggagcgtctgcaagaagatacgtcttttgggggcaacctcgggcgagcagtcttccaggccaagaagcgggttctcgaacctctcggtctggttgaggaaggcgctaagacggctcctggaaagaagagaccggtagagccatcaccccagcgttctccagactcctctacgggcatcggcaagaagggccaacagcccgccagaaaaagactcaattttggtcagactggcgactcagagtcagttccagaccctcaacctctcggagaacctccagcagcgccctctggtgtgggacctaatacaatggctgcaggcggtggcgcaccaatggcagacaataacgaaggcgccgacggagtgggtagttcctcgggaaattggcattgcgattccacatggctgggcgacagagtcatcaccaccagcacccgaacctgggccctgcccacctacaacaaccacctctacaagcaaatctccaacgggacatcgggaggagccaccaacgacaacacctacttcggctacagcaccccctgggggtattttgactttaacagattccactgccacttttcaccacgtgactggcagcgactcatcaacaacaactggggattccggcccaagagactcagcttcaagctcttcaacatccaggtcaaggaggtcacgcagaatgaaggcaccaagaccatcgccaataacctcaccagcaccatccaggtgtttacggactcggagtaccagctgccgtacgttctcggctctgcccaccagggctgcctgcctccgttcccggcggacgtgttcacgattccccagtacggctacctaacactcaacaacggtagtcaggccgtgggacgctcctccttctactgcctggaatactttccttcgcagatgctgagaaccggcaacaacttccagtttacttacaccttcgaggacgtgcctttccacagcagctacgcccacagccagagcttggaccggctgatgaatcctctgattgaccagtacctgtactacttgtctcggattcaaacaacaggaggcacggcaaatacgcagactctgggcttcagccaaggtgggcctaatacagtggccaatcaggcaaagaactggctgccaggaccctgttaccgccaacaacgcgtctcaacgacaaccgggcaaaacaacaatagcaactttgcctggactgctgggaccaaataccatctgaatggaagaaattcattggctaatcctggcatcgctatggcaacacacaaagacgacgaggagcgtttttttcccagtaacgggatcctgatttttggcaaacaaaatgctgccagagacaatgcggattacagcgatgtcatgcccaccagcgaggaagaaatcaaaaccactaaccctgtggccacagaggaatacggtatcgtggcagataacttgcagcagcaaaacacggctcctcaaattggaactgtcaacagccagggggccttacccggtatggtctggcagaaccgggacgtgtacctgcagggtcccatctgggccaagattcctcacacggacggcaacttccacccgtctccgctgatgggcggctttggcctgaaacatcctccgcctcagatcctgatcaagaacacgcctgtacctgcggatcctccgaccaccttcaaccagtcaaagctgaactctttcatcacgcaatacagcaccggacaggtcagcgtggaaattgaatgggagctgcagaaggaaaacagcaagcgctggaaccccgagatccagtacacctccaactactacaaatctacaagtgtggactttgctgttaatacagaaggcgtgtactctgaaccccgccccattggcacccgttacctcacccgtaatctgtaa

SEQ ID NO: 1610 - DNA, 2217 bp, Artificial Sequence
  Synthetic Polynucleotide
atggctgccgatggttatcttccagattggctcgaggacaacctctctgagggcattcgcgagtggtgggcgctgaaacctggagccccgaagcccaaagccaaccagcaaaagcaggacgacggccggggtctggtgcttcctggctacaagtacctcggacccttcaacggactcgacaagggggagcccgtcaacgcggcggacgcggcggccctcgagcacgacaaggcctacgaccagcagctgcaggcgggtgacaatccgtacctgcggtataaccacgccgacgccgagtttcaggagcgtctgcaagaagatacgtcttttgggggcaacctcgggcgagcagtcttccaggccaagaagcgggttctcgaacctctcggtctggttgaggaaggcgctaagacggctcctggaaagaagagaccggtagagccatcaccccagcgttctccagactcctctacgggcatcggcaagaagggccaacagcccgccagaaaaagactcaattttggtcagactggcgactcagagtcagttccagaccctcaacctctcggagaacctccagcagcgccctctggtgtgggacctaatacaatggctgcaggcggtggcgcaccaatggcagacaataacgaaggcgccgacggagtgggtagttcctcgggaaattggcattgcgattccacatggctgggcgacagagtcatcaccaccagcacccgaacctgggccctgcccacctacaacaaccacctctacaagcaaatctccaacgggacatcgggaggagccaccaacgacaacacctacttcggctacagcaccccctgggggtattttgactttaacagattccactgccacttttcaccacgtgactggcagcgactcatcaacaacaactggggattccggcccaagagactcagcttcaagctcttcaacatccaggtcaaggaggtcacgcagaatgaaggcaccaagaccatcgccaataacctcaccagcaccatccaggtgtttacggactcggagtaccagctgccgtacgttctcggctctgcccaccagggctgcctgcctccgttcccggcggacgtgttcacgattccccagtacggctacctaacactcaacaacggtagtcaggccgtgggacgctcctccttctactgcccggaatactttccttcgcagatgctgagaaccggcaacaacttccagtttacttacaccttcgaggacgtgcctttccacagcagctacgcccacagccagagcttggaccggctgatgaatcctctgattgaccagtacctgtactacttgtctcggattcaaacaacaggaggcacggcaaatacgcagactctgggcttcagccaaggtgggcctaatacaatggccaatcaggcaaagaactggctgccaggaccctgttaccgccaacaacgcgtctcaacgacaaccgggcaaaacaacaatagcaactttgcctggactgctgggaccaaataccatctgaatggaagaaattcattggctaatcctggcatcgctatggcaacacacaaagacgacgaggagcgtttttttcccagtaacgggatcctgatttttggcaaacaaaatgctgccagagacaatgcggattacagcgatgtcatgcccaccagcgaggaagaaatcaaaaccactaaccctgtggccacagaggaatacggtatcgtggcagataacttgcagcagcaaaacacggctcctcaaattggaactgtcaacagccagggggccttacccggtatggtctggcagaaccgggacgtgtacctgcagggtcccatctgggccaagattcctcacacggacggcaacttccacccgtctccgctgatgggcggctttggcctgaaacatcctccgcctcagatcctgatcaagaacacgcctgtacctgcggatcctccgaccaccttcaaccagtcaaagctgaactctttcatcacgcaatacagcaccggacaggtcagcgtggaaattgaatgggagctgcagaaggaaaacagcaagcgctggaaccccgagatccagtacacctccaactactacaaatctacaagtgtggactttgctgttaatacagaaggcgtgtactctgaaccccgccccattggcacccgttacctcacccgtaatctgtaa

SEQ ID NO: 1611 - DNA, 2217 bp, Artificial Sequence
  Synthetic Polynucleotide
atggctgccgatggttatcttccagattggctcgaggacaacctctctgagggcattcgcgagtggtgggcgctgaaacctggagccccgaagcccaaagccaaccagcaaaagcaggacgacggccggggtctggtgcttcctggctacaagtacctcggacccttcaacggactcgacaagggggagcccgtcaacgcggcggacgcggcggccctcgagcacgacaaggcctacgaccagcagctgcaggcgggtgacaatccgtacctgcggtataaccacgccgacgccgagtttcaggagcgtctgcaagaagatacgtcttttgggggcaacctcgggcgagcagtcttccaggccaagaagcgggttctcgaacctctcggtctggttgaggaaggcgctaagacggctcctggaaagaagagaccggtagagccatcaccccagcgttctccagactcctctacgggcatcggcaagaagggccaacagcccgccagaaaaagactcaattttggtcagactggcgactcagagtcagttccagaccctcaacctctcggagaacctccagcagcgccctctggtgtgggacctaatacaatggctgcaggcggtggcgcaccaatggcagacaataacgaaggcgccgacggagtgggtagttcctcgggaaattggcattgcgattccacatggctgggcgacagagtcatcaccaccagcacccgaacctgggccctgcccacctacaacaaccacctctacaagcaaatctccaacgggacatcgggaggagccaccaacgacaacacctacttcggctacagcaccccctgggggtattttgactttaacagattccactgccacttttcaccacgtgactggcagcgactcatcaacaacaactggggattccggcccaagagactcagcttcaagctcttcaacatccaggtcaaggaggtcacgcagaatgaaggcaccaagaccatcgccaataacctcaccagcaccatccaggtgtttacggactcggagtaccagctgccgtacgttctcggctctgcccaccagggctgcctgcctccgttcccggcggacgtgttcacgattccccagtacggctacctaacactcaacaacggtagtcaggccgtgggacgctcctccttctactgcctggaatactttccttcgcagatgctgagaaccggcaacaacttccagtttacttacaccttcgaggacgtgcctttccacagcagctacgcccacagccagagcttggaccggctgatgaatcctctgattgaccagtacctgtactacttgtctcggattcaaacaacaggaggcacggcaaatacgcagactctgggcttcagccaaggtgggcctaatacaatggccaatcaggcaaagaactggctgccaggaccctgttaccgccaacaacgcgtctcaacgacaaccgggcaaaacaacaatagcaactttgcctggactgctgggaccaaataccatctgaatggaagaaattcattggctaatcctggcatcgctatggcaacacacaaagacgacgaggagcgtttttttcccagtaacgggatcctgatttttggcaaacaaaatgctgccagagacaatgcggattacagcgatgtcatgcccaccagcgaggaagaaatcaaaaccactaaccctgtggccacagaggaatacggtatcgtggcagatagcttgcagcagcaaaacacggctcctcaaattggaactgtcaacagccagggggccttacccggtatggtctggcagaaccgggacgtgtacctgcagggtcccatctgggccaagattcctcacacggacggcaacttccacccgtctccgctgatgggcggctttggcctgaaacatcctccgcctcagatcctgatcaagaacacgcctgtacctgcggatcctccgaccaccttcaaccagtcaaagctgaactctttcatcacgcaatacagcaccggacaggtcagcgtggaaattgaatgggagctgcagaaggaaaacagcaagcgctggaaccccgagatccagtacacctccaactactacaaatctacaagtgtggactttgctgttaatacagaaggcgtgtactctgaaccccgccccattggcacccgttacctcacccgtaatctgtaa

SEQ ID NO: 1612 - DNA, 2217 bp, Artificial Sequence
  Synthetic Polynucleotide
atggctgccgatggttatcttccagattggctcgaggacaacctctctgagggcattcgcgagtggtgggcgctgaaacctggagccccgaagcccaaagccaaccagcaaaagcagggcgacggccggggtctggtgcttcctggctacaagtacctcggacccttcaacggactcgacaagggggagcccgtcaacgcggcggacgcggcggccctcgagcacgacaaggcctacgaccagcagctgcaggcgggtgacaatccgtacctgcggtataaccacgccgacgccgagtttcaggagcgtctgcaagaagatacgtcttttgggggcaacctcgggcgagcagtcttccaggccaagaagcgggttctcgaacctctcggtctggttgaggaaggcgctaagacggctcctggaaagaagagaccggtagagccatcaccccagcgttctccagactcctctacgggcatcggcaagaagggccaacagcccgccagaaaaagactcaattttggtcagactggcgactcagagtcagttccagaccctcaacctctcggagaacctccagcagcgccctctggtgtgggacctaatacaatggctgcaggcggtggcgcaccaatggcagacaataacgaaggcgccgacggagtgggtagttcctcgggaaattggcattgcgattccacatggctgggcgacagagtcatcaccaccagcacccgaacctgggccctgcccacctacaacaaccacctctacaagcaaatctccaacgggacatcgggaggagccaccaacgacaacacctacttcggctacagcaccccctgggggtattttgactttaacagattccactgccacttttcaccacgtgactggcagcgactcatcaacaacaactggggattccggcccaagagactcagcttcaagctcttcaacatccaggtcaaggaggtcacgcagaatgaaggcaccaagaccatcgccaataacctcaccagcaccatccaggtgtttacggactcggagtaccagctgccgtacgttctcggctctgcccaccagggctgcctgcctccgttcccggcggacgtgttcacgattccccagtacggctacctaacactcaacaacggtagtcaggccgtgggacgctcctccttctactgcctggaatactttccttcgcagatgctgagaaccggcaacaacttccagtttacttacaccttcgaggacgtgcctttccacagcagctacgcccacagccagagcttggaccggctgatgaatcctctgattgaccagtacctgtactacttgtctcggattcaaacaacaggaggcacggcaaatacgcagactctgggcttcagccaaggtgggcctaatacaatggccaatcaggcaaagaactggctgccaggaccctgttaccgccaacaacgcgtctcaacgacaaccgggcaaaacaacaatagcaactttgcctggactgctgggaccaaataccatctgaatggaagaaattcattggctaatcctggcatcgctatggcaacacacaaagacgacgaggagcgtttttttcccagtaacgggatcctgatttttggcaaacaaaatgctgccagagacaatgcggattacagcgatgtcatgcccaccagcgaggaagaaatcaaaaccactaaccctgtggccacagaggaatacggtatcgtggcagataacttgcagcagcaaaacacggctcctcaaattggaactgtcaacagccagggggccttacccggtatggtctggcagaaccgggacgtgtacctgcagggtcccatctgggccaagattcctcacacggacggcaacttccacccgtctccgctgatgggcggctttggcctgaaacatcctccgcctcagatcctgatcaagaacacgcctgtacctgcggatcctccgaccaccttcaaccagtcaaagctgaactctttcatcacgcaatacagcaccggacaggtcagcgtggaaattgaatgggagctgcagaaggaaaacagcaagcgctggaaccccgagatccagtacacctccaactactacaaatctacaagtgtggactttgctgttaatacagaaggcgtgtactctgaaccccgccccattggcacccgttacctcacccgtaatctgtaa

SEQ ID NO: 1613 - DNA, 2217 bp, Artificial Sequence
  Synthetic Polynucleotide
atggctgccgatggttatcttccagattggctcgaggacaacctctctgagggcattcgcgagtggtgggcgctgaaacctggagccccgaagcccaaagccaaccagcaaaagcaggacgacggccggggtctggtgcttcctggctacaagtacctcggacccttcaacggactcgacaagggggagcccgtcaacgcggcggacgcggcggccctcgagcacgacaaggcctacgaccagcagctgcaggcgggtgacaatccgtacctgcggtataaccacgccgacgccgagtttcaggagcgtctgcaagaagatacgtcttttgggggcaacctcgggcgagcagtcttccaggccaagaagcgggttctcgaacctctcggtctggttgaggaaggcgctaagacggctcctggaaagaagagaccggtagagccatcaccccagcgttctccagactcctctacgggcatcggcaagaagggccaacagcccgccagaaaaagactcaattttggtcagactggcgactcagagtcagttccagaccctcaacctctcggagaacctccagcagcgccctctggtgtgggacctaatacaatggctgcaggcggtggcgcaccaatggcagacaataacgaaggcgccgacggagtgggtagttcctcgggaaattggcattgcgattccacatggctgggcgacagagtcatcaccaccagcacccgaacctgggccctgcccacctacaacaaccacctctacaagcaaatctccaacgggacatcgggaggagccaccaacgacaacacctacttcggctacagcaccccctgggggtattttgactttaacagattccactgccacttttcaccacgtgactggcagcgactcatcaacaacaactggggattccggcccaagagactcagctccaagctcttcaacatccaggtcaaggaggtcacgcagaatgaaggcaccaagaccatcgccaataacctcaccagcaccatccaggtgtttacggactcggagtaccagctgccgtacgttctcggctctgcccaccagggctgcctgcctccgttcccggcggacgtgttcacgattccccagtacggctacctaacactcaacaacggtagtcaggccgtgggacgctcctccttctactgcctggaatactttccttcgcagatgctgagaaccggcaacaacttccagtttacttacaccttcgaggacgtgcctttccacagcagctacgcccacagccagagcttggaccggctgatgaatcctctgattgaccagtacctgtactacttgtctcggattcaaacaacaggaggcacggcaaatacgcagactctgggcttcagccaaggtgggcctaatacaatggccaatcaggcaaagaactggctgccaggaccctgttaccgccaacaacgcgtctcaacgacaaccgggcaaaacaacaatagcaactttgcctggactgctgggaccaaataccatctgaatggaagaaattcattggctaatcctggcatcgctatggcaacacacaaagacgacgaggagcgtttttttcccagtaacgggatcctgatttttggcaaacaaaatgctgccagagacaatgcggattacagcgatgtcatgcccaccagcgaggaagaaatcaaaaccactaaccctgtggccacagaggaatacggtatcgtggcagataacttgcagcagcaaaacacggctcctcaaattggaactgtcaacagccagggggccttacccggtatggtctggcagaaccgggacgtgtacctgcagggtcccatctgggccaagattcctcacacggacggcaacttccacccgtctccgctgatgggcggctttggcctgaaacatcctccgcctcagatcctgatcaagaacacgcctgtacctgcggatcctccgaccaccttcaaccagtcaaagctgaactctttcatcacgcaatacagcaccggacaggtcagcgtggaaattgaatgggagctgcagaaggaaaacagcaagcgctggaaccccgagatccagtacacctccaactactacaaatctacaagtgtggactttgctgttaatacagaaggcgtgtactctgaaccccgccccattggcacccgttacctcacccgtaatctgtaa

SEQ ID NO: 1614 - DNA, 2217 bp, Artificial Sequence
  Synthetic Polynucleotide
atggctgccgatggttatcttccagattggctcgaggacaacctctctgagggcattcgcgagtggtgggcgctgaaacctggagccccgaagcccaaagccaaccagcaaaagcaggacgacggccggggtctggtgcttcctggctacaagtacctcggacccttcaacggactcgacaagggggagcccgtcaacgcggcggacgcggcggccctcgagcacgacaaggcctacgaccagcagctgcaggcgggtgacaatccgtacctgcggtataaccacgccgacgccgagtttcaggagcgtctgcaagaagatacgtcttttgggggcaacctcgggcgagcagtcttccaggccaagaagcgggttctcgaacctctcggtctggttgaggaaggcgctaagacggctcctggaaagaagagaccggtagagccatcaccccagcgttctccagactcctctacgggcatcggcaagaagggccaacagcccgccagaaaaagactcaattttggtcagactggcgactcagagtcagttccagaccctcaacctctcggagaacctccagcagcgccctctggtgtgggacctaatacaatggctgcaggcggtggcgcaccaatggcagacaataacgaaggcgccgacggagtgggtagttcctcgggaaattggcattgcgattccacatggctgggcgacagagtcatcaccaccagcacccgaacctgggccctgcccacctacaacaaccacctctacaagcaaatctccaacgggacatcgggaggagccaccaacgacaacacctacttcggctacagcaccccctgggggtattttgactttaacagattccactgccacttttcaccacgtgactggcagcgactcatcaacaacaactggggattccggcccaagagactcagcttcaagctcttcaacatccaggtcaaggaggtcacgcagaatgaaggcaccaagaccatcgccaataacctcaccagcaccatccaggtgtttacggactcggagtaccagctgccgtacgttctcggctctgcccaccagggctgcctgcctccgttcccggcggacgtgttcacgattccccagtacggctacctaacactcaacaacggtagtcaggccgtgggacgctcctccttctactgcctggaatactttccttcgcagatgctgagaaccggcaacaacttccagtttacttacgccttcgaggacgtgcctttccacagcagctacgcccacagccagagcttggaccggctgatgaatcctctgattgaccagtacctgtactacttgtctcggattcaaacaacaggaggcacggcaaatacgcagactctgggcttcagccaaggtgggcctaatacaatggccaatcaggcaaagaactggctgccaggaccctgttaccgccaacaacgcgtctcaacgacaaccgggcaaaacaacaatagcaactttgcctggactgctgggaccaaataccatctgaatggaagaaattcattggctaatcctggcatcgctatggcaacacacaaagacgacgaggagcgtttttttcccagtaacgggatcctgatttttggcaaacaaaatgctgccagagacaatgcggattacagcgatgtcatgcccaccagcgaggaagaaatcaaaaccactaaccctgtggccacagaggaatacggtatcgtggcagataacttgcagcagcaaaacacggctcctcaaattggaactgtcaacagccagggggccttacccggtatggtctggcagaaccgggacgtgtacctgcagggtcccatctgggccaagattcctcacacggacggcaacttccacccgtctccgctgatgggcggctttggcctgaaacatcctccgcctcagatcctgatcaagaacacgcctgtacctgcggatcctccgaccaccttcaaccagtcaaagctgaactctttcatcacgcaatacagcaccggacaggtcagcgtggaaattgaatgggagctgcagaaggaaaacagcaagcgctggaaccccgagatccagtacacctccaactactacaaatctacaagtgtggactttgctgttaatacagaaggcgtgtactctgaaccccgccccattggcacccgttacctcacccgtaatctgtaa

SEQ ID NO: 1615 - DNA, 2217 bp, Artificial Sequence
  Synthetic Polynucleotide
atggctgccgatggttatcttccagattggctcgaggacaacctctctgagggcattcgcgagtggtgggcgctgaaacctggagccccgaagcccaaagccaaccagcaaaagcaggacgacggccggggtctggtgcttcctggctacaagtacctcggacccttcaacggactcgacaagggggagcccgtcaacgcggcggacgcggcggccctcgagcacgacaaggcctacgaccagcagctgcaggcgggtgacaatccgtacctgcggtataaccacgccgacgccgagtttcaggagcgtctgcaagaagatacgtcttttgggggcaacctcgggcgagcagtcttccaggccaagaagcgggttctcgaacctctcggtctggttgaggaaggcgctaagacggctcctggaaagaagagaccggtagagccatcaccccagcgttctccagactcctctacgggcatcggcaagaagggccaacagcccgccagaaaaagactcaattttggtcagactggcgactcagagtcagttccagaccctcaacctctcggagaacctccagcagcgccctctggtgtgggacctaatacaatggctgcaggcggtggcgcaccaatggcagacaataacgaaggcgccgacggagtgggtagttcctcgggaaattggcattgcgattccacatggctgggcgacagagtcatcaccaccagcacccgaacctgggccctgcccgcctacaacaaccacctctacaagcaaatctccaacgggacatcgggaggagccaccaacgacaacacctacttcggctacagcaccccctgggggtattttgactttaacagattccactgccacttttcaccacgtgactggcagcgactcatcaacaacaactggggattccggcccaagagactcagcttcaagctcttcaacatccaggtcaaggaggtcacgcagaatgaaggcaccaagaccatcgccaataacctcaccagcaccatccaggtgtttacggactcggagtaccagctgccgtacgttctcggctctgcccaccagggctgcctgcctccgttcccggcggacgtgttcacgattccccagtacggctacctaacactcaacaacggtagtcaggccgtgggacgctcctccttctactgcctggaatactttccttcgcagatgctgagaaccggcaacaacttccagtttacttacaccttcgaggacgtgcctttccacagcagctacgcccacagccagagcttggaccggctgatgaatcctctgattgaccagtacctgtactacttgtctcggattcaaacaacaggaggcacggcaaatacgcagactctgggcttcagccaaggtgggcctaatacaatggccaatcaggcaaagaactggctgccaggaccctgttaccgccaacaacgcgtctcaacgacaaccgggcaaaacaacaatagcaactttgcctggactgctgggaccaaataccatctgaatggaagaaattcattggctaatcctggcatcgctatggcaacacacaaagacgacgaggagcgtttttttcccagtaacgggatcctgatttttggcaaacaaaatgctgccagagacaatgcggattacagcgatgtcatgcccaccagcgaggaagaaatcaaaaccactaaccctgtggccacagaggaatacggtatcgtggcagataacttgcagcagcaaaacacggctcctcaaattggaactgtcaacagccagggggccttacccggtatggtctggcagaaccgggacgtgtacctgcagggtcccatctgggccaagattcctcacacggacggcaacttccacccgtctccgctgatgggcggctttggcctgaaacatcctccgcctcagatcctgatcaagaacacgcctgtacctgcggatcctccgaccaccttcaaccagtcaaagctgaactctttcatcacgcaatacagcaccggacaggtcagcgtggaaattgaatgggagctgcagaaggaaaacagcaagcgctggaaccccgagatccagtacacctccaactactacaaatctacaagtgtggactttgctgttaatacagaaggcgtgtactctgaaccccgccccattggcacccgttacctcacccgtaatctgtaa

SEQ ID NO: 1616 - DNA, 2217 bp, Artificial Sequence
  Synthetic Polynucleotide
atggctgccgatggttatcttccagattggctcgaggacaacctctctgagggcattcgcgagtggtgggcgctgaaacctggagccccgaagcccaaagccaaccagcaaaagcaggacgacggccggggtctggtgcttcctggctacaagtacctcggacccttcaacggactcgacaagggggagcccgtcaacgcggcggacgcggcggccctcgagcacgacaaggcctacgaccagcagctgcaggcgggtgacaatccgtacctgcggtataaccacgccgacgccgagtttcaggagcgtctgcaagaagatacgtcttttgggggcagcctcgggcgagcagtcttccaggccaagaagcgggttctcgaacctctcggtctggttgaggaaggcgctaagacggctcctggaaagaagagaccggtagagccatcaccccagcgttctccagactcctctacgggcatcggcaagaagggccaacagcccgccagaaaaagactcaattttggtcagactggcgactcagagtcagttccagaccctcaacctctcggagaacctccagcagcgccctctggtgtgggacctaatacaatggctgcaggcggtggcgcaccaatggcagacaataacgaaggcgccgacggagtgggtagttcctcgggaaattggcattgcgattccacatggctgggcgacagagtcatcaccaccagcacccgaacctgggccctgcccacctacaacaaccacctctacaagcaaatctccaacgggacatcgggaggagccaccaacgacaacacctacttcggctacagcaccccctgggggtattttgactttaacagattccactgccacttttcaccacgtgactggcagcgactcatcaacaacaactggggattccggcccaagagactcagcttcaagctcttcaacatccaggtcaaggaggtcacgcagaatgaaggcaccaagaccatcgccaataacctcaccagcaccatccaggtgtttacggactcggagtaccagctgccgtacgttctcggctctgcccaccagggctgcctgcctccgttcccggcggacgtgttcacgattccccagtacggctacctaacactcaacaacggtagtcaggccgtgggacgctcctccttctactgcctggaatactttccttcgcagatgctgagaaccggcaacaacttccagtttacttacaccttcgaggacgtgcctttccacagcagctacgcccacagccagagcttggaccggctgatgaatcctctgattgaccagtacctgtactacttgtctcggattcaaacaacaggaggcacggcaaatacgcagactctgggcttcagccaaggtgggcctaatacaatggccaatcaggcaaagaactggctgccaggaccctgttaccgccaacaacgcgtctcaacgacaaccgggcaaaacaacaatagcaactttgcctggactgctgggaccaaataccatctgaatggaagaaattcattggctaatcctggcatcgctatggcaacacacaaagacgacgaggagcgtttttttcccagtaacgggatcctgatttttggcaaacaaaatgctgccagagacaatgcggattacagcgatgtcatgcccaccagcgaggaagaaatcaaaaccactaaccctgtggccacagaggaatacggtatcgtggcagataacttgcagcagcaaaacacggctcctcaaattggaactgtcaacagccagggggccttacccggtatggtctggcagaaccgggacgtgtacctgcagggtcccatctgggccaagattcctcacacggacggcaacttccacccgtctccgctgatgggcggctttggcctgaaacatcctccgcctcagatcctgatcaagaacacgcctgtacctgcggatcctccgaccaccttcaaccagtcaaagctgaactctttcatcacgcaatacagcaccggacaggtcagcgtggaaattgaatgggagctgcagaaggaaaacagcaagcgctggaaccccgagatccagtacacctccaactactacaaatctacaagtgtggactttgctgttaatacagaaggcgtgtactctgaaccccgccccattggcacccgttacctcacccgtaatctgtaa

SEQ ID NO: 1617 - DNA, 2217 bp, Artificial Sequence
  Synthetic Polynucleotide
atggctgccgatggttatcttccagattggctcgaggacaacctctctgagggcattcgcgagtggtgggcgctgaaacctggagccccgaagcccaaagccaaccagcaaaagcaggacgacggccggggtctggtgcttcctggctacaagtacctcggacccttcaacggactcgacaagggggagcccgtcaacgcggcggacgcggcggccctcgagcacgacaaggcctacgaccagcagctgcaggcgggtgacaatccgtacctgcggtataaccacgccgacgccgagtttcaggagcgtctgcaagaagatacgtcttttgggggcaacctcgggcgagcagtcttccaggccaagaagcgggttctcgaacctctcggtctggttgaggaaggcgctaagacggctcctggaaagaagagaccggtagagccatcaccccagcgttctccagactcctctacgggcatcggcaagaagggccaacagcccgccagaaaaagactcaattttggtcagactggcgactcagagtcagttccagaccctcaacctctcggagaacctccagcagcgccctctggtgtgggacctaatacaatggctgcaggcggtggcgcaccaatggcagacaataacgaaggcgccgacggagtgggtagttcctcgggaaattggcattgcgattccacatggctgggcgacagagtcatcaccaccagcacccgaacctgggccctgcccacctacaacaaccacctctacaagcaaatctccaacgggacatcgggaggagccaccaacgacaacacctacttcggctacagcaccccctgggggtattttgactttaacagattccactgccacttttcaccacgtgactggcagcgactcatcaacaacaactggggattccggcccaagagactcagcttcaagctcttcaacatccaggtcaaggaggtcacgcagaatgaaggcaccaagaccatcgccaataacctcaccagcaccatccaggtgtttacggactcggagtaccagctgccgtacgttctcggctctgcccaccagggctgcctgcctccgttcccggcggacgtgttcacgattccccagtacggctacctaacactcaacaacggtagtcaggccgtgggacgctcctccttctactgcctggaatactttccttcgcagatgctgagaaccggcaacaacttccagtttacttacaccttcgaggacgtgcctttccacagcagctacgcccacagccagagcttggaccggctgatgaatcctctgattgaccagtacctgtactacttgtctcggattcaaacaacaggaggcacggcaaatacgcagactctgggcttcagccaaggtgggcctaatacaatggccaatcaggcaacgaactggctgccaggaccctgttaccgccaacaacgcgtctcaacgacaaccgggcaaaacaacaatagcaactttgcctggactgctgggaccaaataccatctgaatggaagaaattcattggctaatcctggcatcgctatggcaacacacaaagacgacgaggagcgtttttttcccagtaacgggatcctgatttttggcaaacaaaatgctgccagagacaatgcggattacagcgatgtcatgcccaccagcgaggaagaaatcaaaaccactaaccctgtggccacagaggaatacggtatcgtggcagataacttgcagcagcaaaacacggctcctcaaattggaactgtcaacagccagggggccttacccggtatggtctggcagaaccgggacgtgtacctgcagggtcccatctgggccaagattcctcacacggacggcaacttccacccgtctccgctgatgggcggctttggcctgaaacatcctccgcctcagatcctgatcaagaacacgcctgtacctgcggatcctccgaccaccttcaaccagtcaaagctgaactctttcatcacgcaatacagcaccggacaggtcagcgtggaaattgaatgggagctgcagaaggaaaacagcaagcgctggaaccccgagatccagtacacctccaactactacaaatctacaagtgtggactttgctgttaatacagaaggcgtgtactctgaaccccgccccattggcacccgttacctcacccgtaatctgtaa

SEQ ID NO: 1618 - DNA, 2217 bp, Artificial Sequence
  Synthetic Polynucleotide
atggctgccgatggttatcttccagattggctcgaggacaacctctctgagggcattcgcgagtggtgggcgctgaaacctggagccccgaagcccaaagccaaccagcaaaagcaggacgacggccggggtctggtgcttcctggctacaagtacctcggacccttcaacggactcgacaagggggagcccgtcaacgcggcggacgcggcggccctcgagcacgacaaggcctacggccagcagctgcaggcgggtgacaatccgtacctgcggtataaccacgccgacgccgagtttcaggagcgtctgcaagaagatacgtcttttgggggcaacctcgggcgagcagtcttccaggccaagaagcgggttctcgaacctctcggtctggttgaggaaggcgctaagacggctcctggaaagaagagaccggtagagccatcaccccagcgttctccagactcctctacgggcatcggcaagaagggccaacagcccgccagaaaaagactcaattttggtcagactggcgactcagagtcagttccagaccctcaacctctcggagaacctccagcagcgccctctggtgtgggacctaatacaatggctgcaggcggtggcgcaccaatggcagacaataacgaaggcgccgacggagtgggtagttcctcgggaaattggcattgcgattccacatggctgggcgacagagtcatcaccaccagcacccgaacctgggccctgcccacctacaacaaccacctctacaagcaaatctccaacgggacatcgggaggagccaccaacgacaacacctacttcggctacagcaccccctgggggtattttgactttaacagattccactgccacttttcaccacgtgactggcagcgactcatcaacaacaactggggattccggcccaagagactcagcttcaagctcttcaacatccaggtcaaggaggtcacgcagaatgaaggcaccaagaccatcgccaataacctcaccagcaccatccaggtgtttacggactcggagtaccagctgccgtacgttctcggctctgcccaccagggctgcctgcctccgttcccggcggacgtgttcacgattccccagtacggctacctaacactcaacaacggtagtcaggccgtgggacgctcctccttctactgcctggaatactttccttcgcagatgctgagaaccggcaacaacttccagtttacttacaccttcgaggacgtgcctttccacagcagctacgcccacagccagagcttggaccggctgatgaatcctctgattgaccagtacctgtactacttgtctcggattcaaacaacaggaggcacggcaaatacgcagactctgggcttcagccaaggtgggcctaatacaatggccaatcaggcaaagaactggctgccaggaccctgttaccgccaacaacgcgtctcaacgacaaccgggcaaaacaacaatagcaactttgcctggactgctgggaccaaataccatctgaatggaagaaattcattggctaatcctggcatcgctatggcaacacacaaagacgacgaggagcgtttttttcccagtaacgggatcctgatttttggcaaacaaaatgctgccagagacaatgcggattacagcgatgtcatgcccaccagcgaggaagaaatcaaaaccactaaccctgtggccacagaggaatacggtatcgtggcagataacttgcagcagcaaaacacggctcctcaaattggaactgtcaacagccagggggccttacccggtatggtctggcagaaccgggacgtgtacctgcagggtcccatctgggccaagattcctcacacggacggcaacttccacccgtctccgctgatgggcggctttggcctgaaacatcctccgcctcagatcctgatcaagaacacgcctgtacctgcggatcctccgaccaccttcaaccagtcaaagctgaactctttcatcacgcaatacagcaccggacaggtcagcgtggaaattgaatgggagctgcagaaggaaaacagcaagcgctggaaccccgagatccagtacacctccaactactacaaatctacaagtgtggactttgctgttaatacagaaggcgtgtactctgaaccccgccccattggcacccgttacctcacccgtaatctgtaa

SEQ ID NO: 1619 - DNA, 2217 bp, Artificial Sequence
  Synthetic Polynucleotide
atggctgccgatggttatcttccagattggctcgaggacaacctctctgagggcattcgcgagtggtgggcgctgaaacctggagccccgaagcccaaagccaaccagcaaaagcaggacgacggccggggtctggtgcttcctggctacaagtacctcggacccttcaacggactcgacaagggggagcccgtcaacgcggcggacgcggcggccctcgagcacgacaaggcctacgaccagcagctgcaggcgggtgacaatccgtacctgcggtataaccacgccgacgccgagtttcaggagcgtctgcaagaagatacgtcttttgggggcaacctcgggcgagcagtcttccaggccaagaagcgggttctcgaacctctcggtctggttgaggaaggcgctaagacggctcctggaaagaagagaccggtagagccatcaccccagcgttctccagactcctctacgggcatcggcaagaagggccaacagcccgccagaaaaagactcaattttggtcagactggcgactcagagtcagttccagaccctcaacctctcggagaacctccagcagcgccctctggtgtgggacctaatacaatggctgcaggcggtggcgcaccaatggcagacaataacgaaggcgccgacggagtgggtagttcctcgggaaattggcattgcgattccacatggctgggcgacagagtcatcaccaccagcacccgaacctgggccctgcccacctacaacaaccacctctacaagcaaatctccaacgggacatcgggaggagccaccaacgacaacacctacttcggctacagcaccccctgggggtattttgactttaacagattccactgccacttttcaccacgtgactggcagcgactcatcaacaacaactggggattccggcccaagagactcagcttcaagctcctcaacatccaggtcaaggaggtcacgcagaatgaaggcaccaagaccatcgccaataacctcaccagcaccatccaggtgtttacggactcggagtaccagctgccgtacgttctcggctctgcccaccagggctgcctgcctccgttcccggcggacgtgttcacgattccccagtacggctacctaacactcaacaacggtagtcaggccgtgggacgctcctccttctactgcctggaatactttccttcgcagatgctgagaaccggcaacaacttccagtttacttacaccttcgaggacgtgcctttccacagcagctacgcccacagccagagcttggaccggctgatgaatcctctgattgaccagtacctgtactacttgtctcggattcaaacaacaggaggcacggcaaatacgcagactctgggcttcagccaaggtgggcctaatacaatggccaatcaggcaaagaactggctgccaggaccctgttaccgccaacaacgcgtctcaacgacaaccgggcaaaacaacaatagcaactttgcctggactgctgggaccaaataccatctgaatggaagaaattcattggctaatcctggcatcgctatggcaacacacaaagacgacgaggagcgtttttttcccagtaacgggatcctgatttttggcaaacaaaatgctgccagagacaatgcggattacagcgatgtcatgcccaccagcgaggaagaaatcaaaaccactaaccctgtggccacagaggaatacggtatcgtggcagataacttgcagcagcaaaacacggctcctcaaattggaactgtcaacagccagggggccttacccggtatggtctggcagaaccgggacgtgtacctgcagggtcccatctgggccaagattcctcacacggacggcaacttccacccgtctccgctgatgggcggctttggcctgaaacatcctccgcctcagatcctgatcaagaacacgcctgtacctgcggatcctccgaccaccttcaaccagtcaaagctgaactctttcatcacgcaatacagcaccggacaggtcagcgtggaaattgaatgggagctgcagaaggaaaacagcaagcgctggaaccccgagatccagtacacctccaactactacaaatctacaagtgtggactttgctgttaatacagaaggcgtgtactctgaaccccgccccattggcacccgttacctcacccgtaatctgtaa

SEQ ID NO: 1620 - DNA, 2217 bp, Artificial Sequence
  Synthetic Polynucleotide
atggctgccgatggttatcttccagattggctcgaggacaacctctctgagggcattcgcgagtggtgggcgctgaaacctggagccccgaagcccaaagccaaccagcaaaagcaggacgacggccggggtctggtgcttcctggctacaagtacctcggacccttcaacggactcgacaagggggagcccgtcaacgcggcggacgcggcggccctcgagcacgacaaggcctacgaccagcagctgcaggcgggtgacaatccgtacctgcggtataaccacgccgacgccgagtttcaggagcgtctgcaagaagatacgtcttttgggggcaacctcgggcgagcagtcttccaggccaagaagcgggttctcgaacctctcggtctggttgaggaaggcgctaagacggctcctggaaagaagagaccggtagagccatcaccccagcgttctccagactcctctacgggcatcggcaagaagggccaacagcccgccagaaaaagactcaattttggtcagactggcgactcagagtcagttccagaccctcaacctctcggagaacctccagcagcgccctctggtgtgggacctaatacaatggctgcaggcggtggcgcaccaatggcagacaataacgaaggcgccgacggagtgggtagttcctcgggaaattggcattgcgattccacatggctgggcgacagagtcatcaccaccagcacccgaacctgggccctgcccacctacaacaaccacctctacaagcaaatctccaacgggacatcgggaggagccaccaacgacaacacctacttcggctacagcaccccctgggggtattttgactttaacagattccactgccacttttcaccacgtgactggcagcgactcatcaacaacaactggggattccggcccaagagactcagcttcaagctcttcaacatccaggtcaaggaggtcacgcagaatgaaggcaccaagaccatcgccaataacctcaccagcaccatccaggtgtttacggactcggagtaccagctgccgtacgttctcggctctgcccaccagggctgcctgcctccgttcccggcggacgtgttcacgattccccagtacggctacctaacactcaacaacggtagtcaggccgtgggacgctcctccttctactgcctggaatactttccttcgcagatgctgagaaccggcaacaacttccagtttacttacaccttcgaggacgtgcctttccacagcagctacgcccacagccagagcttggaccggctgatgaatcctctgattgaccagtacctgtactacttgtctcggattcaaacaacaggaggcacggcaaatacgcagactctgggcttcagccaaggtgggcctaatacaatggccaatcaggcaaagaactggctgccaggaccctgttaccgccaacaacgcgtctcaacgacaaccgggcaaaacaacaatagcaactttgcctggactgctgggaccaaataccatctgaatggaagaaattcattggctaatcctggcatcgctatggcaacacacaaagacgacgaggagcgtttttttcccagtaacgggatcctgatttttggcaaacaaaatgctgccagagacaatgcggattacagcgatgtcgtgcccaccagcgaggaagaaatcaaaaccactaaccctgtggccacagaggaatacggtatcgtggcagataacttgcagcagcaaaacacggctcctcaaattggaactgtcaacagccagggggccttacccggtatggtctggcagaaccgggacgtgtacctgcagggtcccatctgggccaagattcctcacacggacggcaacttccacccgtctccgctgatgggcggctttggcctgaaacatcctccgcctcagatcctgatcaagaacacgcctgtacctgcggatcctccgaccaccttcaaccagtcaaagctgaactctttcatcacgcaatacagcaccggacaggtcagcgtggaaattgaatgggagctgcagaaggaaaacagcaagcgctggaaccccgagatccagtacacctccaactactacaaatctacaagtgtggactttgctgttaatacagaaggcgtgtactctgaaccccgccccattggcacccgttacctcacccgtaatctgtaa

SEQ ID NO: 1621 - DNA, 2217 bp, Artificial Sequence
  Synthetic Polynucleotide
atggctgccgatggttatcttccagattggctcgaggacaacctctctgagggcattcgcgagtggtgggcgctgaaacctggagccccgaagcccaaagccaaccagcaaaagcaggacgacggccggggtctggtgcttcctggctacaagtacctcggacccttcaacggactcgacaagggggagcccgtcaacgcggcggacgcggcggccctcgagcacgacaaggcctacgaccagcagctgcaggcgggtgacaatccgtacctgcggtataaccacgccgacgccgagtttcaggagcgtctgcaagaagatacgtcttttgggggcaacctcgggcgagcagtcttccaggccaagaagcgggttctcgaacctctcggtctggttgaggaaggcgctaagacggctcctggaaagaagagaccggtagagccatcaccccagcgttctccagactcctctacgggcatcggcaagaagggccgacagcccgccagaaaaagactcaattttggtcagactggcgactcagagtcagttccagaccctcaacctctcggagaacctccagcagcgccctctggtgtgggacctaatacaatggctgcaggcggtggcgcaccaatggcagacaataacgaaggcgccgacggagtgggtagttcctcgggaaattggcattgcgattccacatggctgggcgacagagtcatcaccaccagcacccgaacctgggccctgcccacctacaacaaccacctctacaagcaaatctccaacgggacatcgggaggagccaccaacgacaacacctacttcggctacagcaccccctgggggtattttgactttaacagattccactgccacttttcaccacgtgactggcagcgactcatcaacaacaactggggattccggcccaagagactcagcttcaagctcttcaacatccaggtcaaggaggtcacgcagaatgaaggcaccaagaccatcgccaataacctcaccagcaccatccaggtgtttacggactcggagtaccagctgccgtacgttctcggctctgcccaccagggctgcctgcctccgttcccggcggacgtgttcacgattccccagtacggctacctaacactcaacaacggtagtcaggccgtgggacgctcctccttctactgcctggaatactttccttcgcagatgctgagaaccggcaacaacttccagtttacttacaccttcgaggacgtgcctttccacagcagctacgcccacagccagagcttggaccggctgatgaatcctctgattgaccagtacctgtactacttgtctcggattcaaacaacaggaggcacggcaaatacgcagactctgggcttcagccaaggtgggcctaatacaatggccaatcaggcaaagaactggctgccaggaccctgttaccgccaacaacgcgtctcaacgacaaccgggcaaaacaacaatagcaactttgcctggactgctgggaccaaataccatctgaatggaagaaattcattggctaatcctggcatcgctatggcaacacacaaagacgacgaggagcgtttttttcccagtaacgggatcctgatttttggcaaacaaaatgctgccagagacaatgcggattacagcgatgtcatgcccaccagcgaggaagaaatcaaaaccactaaccctgtggccacagaggaatacggtatcgtggcagataacttgcagcagcaaaacacggctcctcaaattggaactgtcaacagccagggggccttacccggtatggtctggcagaaccgggacgtgtacctgcagggtcccatctgggccaagattcctcacacggacggcaacttccacccgtctccgctgatgggcggctttggcctgaaacatcctccgcctcagatcctgatcaagaacacgcctgtacctgcggatcctccgaccaccttcaaccagtcaaagctgaactctttcatcacgcaatacagcaccggacaggtcagcgtggaaattgaatgggagctgcagaaggaaaacagcaagcgctggaaccccgagatccagtacacctccaactactacaaatctacaagtgtggactttgctgttaatacagaaggcgtgtactctgaaccccgccccattggcacccgttacctcacccgtaatctgtaa

SEQ ID NO: 1622 - DNA, 2217 bp, Artificial Sequence
  Synthetic Polynucleotide
atggctgccgatggttatcttccagattggctcgaggacaacctctctgagggcattcgcgagtggtgggcgctgaaacctggagccccgaagcccaaagccaaccagcaaaagcaggacgacggccggggtctggtgcttcctggctacaagtacctcggacccttcaacggactcgacaagggggagcccgtcaacgcggcggacgcggcggccctcgagcacgacaaggcctacgaccagcagctgcaggcgggtgacaatccgtacctgcggtataaccacgccgacgccgagtttcaggagcgtctgcaagaagatacgtcttttgggggcaacctcgggcgagcagtcttccaggccaagaagcgggttctcgaacctctcggtctggttgaggaaggcgctaagacggctcctggaaagaagagaccggtagagtcatcaccccagcgttctccagactcctctacgggcatcggcaagaagggccaacagcccgccagaaaaagactcaattttggtcagactggcgactcagagtcagttccagaccctcaacctctcggagaacctccagcagcgccctctggtgtgggacctaatacaatggctgcaggcggtggcgcaccaatggcagacaataacgaaggcgccgacggagtgggtagttcctcgggaaattggcattgcgattccacatggctgggcgacagagtcatcaccaccagcacccgaacctgggccctgcccacctacaacaaccacctctacaagcaaatctccaacgggacatcgggaggagccaccaacgacaacacctacttcggctacagcaccccctgggggtattttgactttaacagattccactgccacttttcaccacgtgactggcagcgactcatcaacaacaactggggattccggcccaagagactcagcttcaagctcttcaacatccaggtcaaggaggtcacgcagaatgaaggcaccaagaccatcgccaataacctcaccagcaccatccaggtgtttacggactcggagtaccagctgccgtacgttctcggctctgcccaccagggctgcctgcctccgttcccggcggacgtgttcacgattccccagtacggctacctaacactcaacaacggtagtcaggccgtgggacgctcctccttctactgcctggaatactttccttcgcagatgctgagaaccggcaacaacttccagtttacttacaccttcgaggacgtgcctttccacagcagctacgcccacagccagagcttggaccggctgatgaatcctctgattgaccagtacctgtactacttgtctcggattcaaacaacaggaggcacggcaaatacgcagactctgggcttcagccaaggtgggcctaatacaatggccaatcaggcaaagaactggctgccaggaccctgttaccgccaacaacgcgtctcaacgacaaccgggcaaaacaacaatagcaactttgcctggactgctgggaccaaataccatctgaatggaagaaattcattggctaatcctggcatcgctatggcaacacacaaagacgacgaggagcgtttttttcccagtaacgggatcctgatttttggcaaacaaaatgctgccagagacaatgcggattacagcgatgtcatgcccaccagcgaggaagaaatcaaaaccactaaccctgtggccacagaggaatacggtatcgtggcagataacttgcagcagcaaaacacggctcctcaaattggaactgtcaacagccagggggccttacccggtatggtctggcagaaccgggacgtgtacctgcagggtcccatctgggccaagattcctcacacggacggcaacttccacccgtctccgctgatgggcggctttggcctgaaacatcctccgcctcagatcctgatcaagaacacgcctgtacctgcggatcctccgaccaccttcaaccagtcaaagctgaactctttcatcacgcaatacagcaccggacaggtcagcgtggaaattgaatgggagctgcagaaggaaaacagcaagcgctggaaccccgagatccagtacacctccaactactacaaatctacaagtgtggactttgctgttaatacagaaggcgtgtactctgaaccccgccccattggcacccgttacctcacccgtaatctgtaa

SEQ ID NO: 1623 - DNA, 2217 bp, Artificial Sequence
  Synthetic Polynucleotide
atggctgccgatggttatcttccagattggctcgaggacaacctctctgagggcattcgcgagtggtgggcgctgaaacctggagccccgaagcccaaagccaaccagcaaaagcaggacgacggccggggtctggtgcttcctggctacaagtacctcggacccttcaacggactcgacaagggggagcccgtcaacgcggcggacgcggcggccctcgagcacgacaaggcctacgaccagcagctgcaggcgggtgacaatccgtacctgcggtataaccacgccgacgccgagtttcaggagcgtctgcaagaagatacgtcttttgggggcaacctcgggcgagcagtcttccaggccaagaagcgggttctcgaacctctcggtctggttgaggaaggcgctaagacggctcctggaaagaagagaccggtagagccatcaccccagcgttctccagactcctctacgggcatcggcaagaagggccaacagcccgccagaaaaagactcaattttggtcagactggcgactcagagtcagttccagaccctcaacctctcggagaacctccagcagcgccctctggtgcgggacctaatacaatggctgcaggcggtggcgcaccaatggcagacaataacgaaggcgccgacggagtgggtagttcctcgggaaattggcattgcgattccacatggctgggcgacagagtcatcaccaccagcacccgaacctgggccctgcccacctacaacaaccacctctacaagcaaatctccaacgggacatcgggaggagccaccaacgacaacacctacttcggctacagcaccccctgggggtattttgactttaacagattccactgccacttttcaccacgtgactggcagcgactcatcaacaacaactggggattccggcccaagagactcagcttcaagctcttcaacatccaggtcaaggaggtcacgcagaatgaaggcaccaagaccatcgccaataacctcaccagcaccatccaggtgtttacggactcggagtaccagctgccgtacgttctcggctctgcccaccagggctgcctgcctccgttcccggcggacgtgttcacgattccccagtacggctacctaacactcaacaacggtagtcaggccgtgggacgctcctccttctactgcctggaatactttccttcgcagatgctgagaaccggcaacaacttccagtttacttacaccttcgaggacgtgcctttccacagcagctacgcccacagccagagcttggaccggctgatgaatcctctgattgaccagtacctgtactacttgtctcggattcaaacaacaggaggcacggcaaatacgcagactctgggcttcagccaaggtgggcctaatacaatggccaatcaggcaaagaactggctgccaggaccctgttaccgccaacaacgcgtctcaacgacaaccgggcaaaacaacaatagcaactttgcctggactgctgggaccaaataccatctgaatggaagaaattcattggctaatcctggcatcgctatggcaacacacaaagacgacgaggagcgtttttttcccagtaacgggatcctgatttttggcaaacaaaatgctgccagagacaatgcggattacagcgatgtcatgcccaccagcgaggaagaaatcaaaaccactaaccctgtggccacagaggaatacggtatcgtggcagataacttgcagcagcaaaacacggctcctcaaattggaactgtcaacagccagggggccttacccggtatggtctggcagaaccgggacgtgtacctgcagggtcccatctgggccaagattcctcacacggacggcaacttccacccgtctccgctgatgggcggctttggcctgaaacatcctccgcctcagatcctgatcaagaacacgcctgtacctgcggatcctccgaccaccttcaaccagtcaaagctgaactctttcatcacgcaatacagcaccggacaggtcagcgtggaaattgaatgggagctgcagaaggaaaacagcaagcgctggaaccccgagatccagtacacctccaactactacaaatctacaagtgtggactttgctgttaatacagaaggcgtgtactctgaaccccgccccattggcacccgttacctcacccgtaatctgtaa

SEQ ID NO: 1624 - DNA, 2217 bp, Artificial Sequence
  Synthetic Polynucleotide
atggctgccgatggttatcttccagattggctcgaggacaacctctctgagggcattcgcgagtggtgggcgctgaaacctggagccccgaagcccaaagccaaccagcaaaagcaggacgacggccggggtctggtgcttcctggctacaagtacctcggacccttcaacggactcgacaagggggagcccgtcaacgcggcggacgcggcggccctcgagcacgacaaggcctacgaccagcagctgcaggcgggtgacaatccgtacctgcggtataaccacgccgacgccgagtttcaggagcgtctgcaagaagatacgtcttttgggggcaacctcgggcgagcagtcttccaggccaagaagcgggttctcgaacctctcggtctggttgaggaaggcgctaagacggctcctggaaagaagagaccggtagagccatcaccccagcgttctccagactcctctacgggcatcggcaagaagggccaacagcccgccagaaaaagactcaattttggtcagactggcgactcagagtcagttccagaccctcaacctctcggagaacctccagcagcgccctctggtgtgggacctaatacaatggctgcaggcggtggcgcaccaatggcagacaataacgaaggcgccgacggagtgggtagttcctcgggaaattggcattgcgattccacatggctgggcgacagagtcatcaccaccagcacccgaacctgggccctgcccacctacaacaaccacctctacaagcaaatctccaacgggacatcgggaggagccaccaacgacaacacctacttcggctacagcaccccctgggggtattttgactttaacagattccactgccacttttcaccacgtgactggcagcgactcatcaacaacaactggggattccggcccaagagactcagcttcaagctcttcaacatccaggtcaaggaggtcacgcagaatgaaggcaccaagaccatcgccaataacctcaccagcaccatccaggtgtttacggactcggagtaccagctgccgtacgttctcggctctgcccaccagggctgcctgcctccgttcccggcggacgtgttcacgattccccagtacggctacctaacactcaacaacggtagtcaggccgtgggacgctcctccttctactgcctggaatactttccttcgcagatgctgagaaccggcaacaacttccagtttacttacaccttcgaggacgtgcctttccacagcagctacgcccacagccagagcttggaccggctgatgaatcctctgattgaccagtacccgtactacttgtctcggattcaaacaacaggaggcacggcaaatacgcagactctgggcttcagccaaggtgggcctaatacaatggccaatcaggcaaagaactggctgccaggaccctgttaccgccaacaacgcgtctcaacgacaaccgggcaaaacaacaatagcaactttgcctggactgctgggaccaaataccatctgaatggaagaaattcattggctaatcctggcatcgctatggcaacacacaaagacgacgaggagcgtttttttcccagtaacgggatcctgatttttggcaaacaaaatgctgccagagacaatgcggattacagcgatgtcatgcccaccagcgaggaagaaatcaaaaccactaaccctgtggccacagaggaatacggtatcgtggcagataacttgcagcagcaaaacacggctcctcaaattggaactgtcaacagccagggggccttacccggtatggtctggcagaaccgggacgtgtacctgcagggtcccatctgggccaagattcctcacacggacggcaacttccacccgtctccgctgatgggcggctttggcctgaaacatcctccgcctcagatcctgatcaagaacacgcctgtacctgcggatcctccgaccaccttcaaccagtcaaagctgaactctttcatcacgcaatacagcaccggacaggtcagcgtggaaattgaatgggagctgcagaaggaaaacagcaagcgctggaaccccgagatccagtacacctccaactactacaaatctacaagtgtggactttgctgttaatacagaaggcgtgtactctgaaccccgccccattggcacccgttacctcacccgtaatctgtaa

SEQ ID NO: 1625 - DNA, 2217 bp, Artificial Sequence
  Synthetic Polynucleotide
atggctgccgatggttatcttccagattggctcgaggacaacctctctgagggcattcgcgagtggtgggcgctgaaacctggagccccgaagcccaaagccaaccagcaaaagcaggacgacggccggggtctggtgcttcctggctacaagtacctcggacccttcaacggactcgacaagggggagcccgtcaacgcggcggacgcggcggccctcgagcacgacaaggcctacgaccagcagctgcaggcgggtgacaatccgtacctgcggtataaccacgccgacgccgagtttcaggagcgtctgcaagaagatacgtcttttgggggcaacctcgggcgagcagtcttccaggccaagaagcgggttctcgaacctctcggtctggttgaggaaggcgctaagacggctcctggaaagaagagaccggtagagccatcaccccagcgttctccagactcctctacgggcatcggcaagaagggccaacagcccgccagaaaaagactcaattttggtcagactggcgactcagagtcagttccagaccctcaacctctcggagaacctccagcagcgccctctggtgtgggacctaatacaatggctgcaggcggtggcgcaccaatggcagacaataacgaaggcgccgacggagtgggtagttcctcgggaaattggcattgcgattccacatggctgggcgacagagtcatcaccaccagcacccgaacctgggccctgcccacctacaacaaccacctctacaagcaaatctccaacgggacatcgggaggagccaccaacgacaacacctacttcggctacagcaccccctgggggtattttgactttaacagattccactgccacttttcaccacgtgactggcagcgactcatcaacaacaactggggattccggcccaagagactcagcttcaagctcttcaacatccaggtcaaggaggtcacgcagaatgaaggcaccaagaccatcgccaataacctcaccagcaccatccaggtgtttacggactcggagtaccagctgccgtacgttctcggctctgcccaccagggctgcctgcctccgttcccggcggacgtgttcacgattccccagtacggctacctaacactcaacaacggtagtcaggccgtgggacgctcctccttctactgcctggaatactttccttcgcagatgctgagaaccggcaacaacttccagtttacttacaccttcgaggacgtgcctttccacagcagctacgcccacagccagagcttggaccggctgatgaatcctctgattgaccagtacctgtactacttgtctcggattcaaacaacaggaggcacggcaaatacgcagactctgggcttcagccaaggtgggcctaatacaatggccaatcaggcaaagaactggctgccaggaccctgttaccgccaacaacgcgtctcaacgacaaccgggcaaagcaacaatagcaactttgcctggactgctgggaccaaataccatctgaatggaagaaattcattggctaatcctggcatcgctatggcaacacacaaagacgacgaggagcgtttttttcccagtaacgggatcctgatttttggcaaacaaaatgctgccagagacaatgcggattacagcgatgtcatgcccaccagcgaggaagaaatcaaaaccactaaccctgtggccacagaggaatacggtatcgtggcagataacttgcagcagcaaaacacggctcctcaaattggaactgtcaacagccagggggccttacccggtatggtctggcagaaccgggacgtgtacctgcagggtcccatctgggccaagattcctcacacggacggcaacttccacccgtctccgctgatgggcggctttggcctgaaacatcctccgcctcagatcctgatcaagaacacgcctgtacctgcggatcctccgaccaccttcaaccagtcaaagctgaactctttcatcacgcaatacagcaccggacaggtcagcgtggaaattgaatgggagctgcagaaggaaaacagcaagcgctggaaccccgagatccagtacacctccaactactacaaatctacaagtgtggactttgctgttaatacagaaggcgtgtactctgaaccccgccccattggcacccgttacctcacccgtaatctgtaa

SEQ ID NO: 1626 - DNA, 2217 bp, Artificial Sequence
  Synthetic Polynucleotide
atggctgccgatggttatcttccagattggctcgaggacaacctctctgagggcattcgcgagtggtgggcgctgaaacctggagccccgaagcccaaagccaaccagcaaaagcaggacgacggccggggtctggtgcttcctggctacaagtacctcggacccttcaacggactcgacaagggggagcccgtcaacgcggcggacgcggcggccctcgagcacgacaaggcctacgaccagcagctgcaggcgggtgacaatccgtacctgcggtataaccacgccgacgccgagtttcaggagcgtctgcaagaagatacgtcttttgggggcaacctcgggcgagcagtcttccaggccaagaagcgggttctcgaacctctcggtctggttgaggaaggcgctaagacggctcctggaaagaagagaccggtagagccatcaccccagcgttctccagactcctctacgggcatcggcaagaagggccaacagcccgccagaaaaagactcaattttggtcagactggcgactcagagtcagttccagaccctcaacctctcggagaacctccagcagcgccctctggtgtgggacctaatacaatggctgcaggcggtggcgcaccaatggcagacaataacgaaggcgccgacggagtgggtagttcctcgggaaattggcattgcgattccacatggctgggcgacagagtcatcaccaccagcacccgaacctgggccctgcccacctacaacaaccacctctacaagcaaatctccaacgggacatcgggaggagccaccaacgacaacacctacttcggctacagcaccccctgggggtattttgactttaacagattccactgccacttttcaccacgtgactggcagcgactcatcaacaacaactggggattccggcccaagagactcagcttcaagctcttcaacatccaggtcaaggaggtcacgcagaatgaaggcaccaagaccatcgccaataacctcaccagcaccatccaggtgtttacggactcggagtaccagctgccgtacgttctcggctctgcccaccagggctgcctgcctccgttcccggcggacgtgttcacgattccccagtacggctacctaacactcaacaacggtagtcaggccgtgggacgctcctccttctactgcctggaatactttccttcgcagatgctgagaaccggcaacaacttccagtttacttacaccttcgaggacgtgcctttccacagcagctacgcccacagccagagcttggaccggctgatgaatcctctgattgaccagtacctgtactacttgtctcggattcaaacaacaggaggcacggcaaatacgcagactctgggcttcagccaaggtgggcctaatacaatggccaatcaggcaaagaactggctgccaggaccccgttaccgccaacaacgcgtctcaacgacaaccgggcaaaacaacaatagcaactttgcctggactgctgggaccaaataccatctgaatggaagaaattcattggctaatcctggcatcgctatggcaacacacaaagacgacgaggagcgtttttttcccagtaacgggatcctgatttttggcaaacaaaatgctgccagagacaatgcggattacagcgatgtcatgcccaccagcgaggaagaaatcaaaaccactaaccctgtggccacagaggaatacggtatcgtggcagataacttgcagcagcaaaacacggctcctcaaattggaactgtcaacagccagggggccttacccggtatggtctggcagaaccgggacgtgtacctgcagggtcccatctgggccaagattcctcacacggacggcaacttccacccgtctccgctgatgggcggctttggcctgaaacatcctccgcctcagatcctgatcaagaacacgcctgtacctgcggatcctccgaccaccttcaaccagtcaaagctgaactctttcatcacgcaatacagcaccggacaggtcagcgtggaaattgaatgggagctgcagaaggaaaacagcaagcgctggaaccccgagatccagtacacctccaactactacaaatctacaagtgtggactttgctgttaatacagaaggcgtgtactctgaaccccgccccattggcacccgttacctcacccgtaatctgtaa

SEQ ID NO: 1627 - DNA, 2217 bp, Artificial Sequence
  Synthetic Polynucleotide
atggctgccgatggttatcttccagattggctcgaggacaacctctctgagggcattcgcgagtggtgggcgctgaaacctggagccccgaagcccaaagccaaccagcaaaagcaggacgacggccggggtctggtgcttcctggctacaagtacctcggacccttcaacggactcgacaagggggagcccgtcaacgcggcggacgcggcggccctcgagcacgacaaggcctacgaccagcagctgcaggcgggtgacaatccgtacctgcggtataaccacgccgacgccgagtttcaggagcgtctgcaagaagatacgtcttttgggggcaacctcgggcgagcagtcttccaggccaagaagcgggttctcgaacctctcggtctggttgaggaaggcgctaagacggctcctggaaagaagagaccggtagagccatcaccccagcgttctccagactcctctacgggcatcggcaagaagggccaacagcccgccagaaaaagactcaattttggtcagactggcgactcagagtcagttccagaccctcaacctctcggagaacctccagcagcgccctctggtgtgggacctaatacaatggctgcaggcggtggcgcaccaatggcagacaataacgaaggcgccgacggagtgggtagttcctcgggaaattggcattgcgattccacatggctgggcgacagagtcatcaccaccagcacccgaacctgggccctgcccacctacaacaaccacctctacaagcaaatctccaacgggacatcgggaggagccaccaacgacaacacctacttcggctacagcaccccctgggggtattttgactttaacagattccactgccacttttcaccacgtgactggcagcgactcatcaacaacaactggggattccggcccaagagactcagcttcaagctcttcaacatccaggtcaaggaggtcacgcagaatgaaggcaccaagaccatcgccaataacctcaccagcaccatccaggtgtttacggactcggagtaccagctgccgtacgttctcggctctgcccaccagggctgcctgcctccgttcccggcggacgtgttcacgattccccagtacggctacctaacactcaacaacggtagtcaggccgtgggacgctcctccttctactgcctggaatactttccttcgcagatgctgagaaccggcaacaacttccagtttacttacaccttcgaggacgtgcctttccacagcagctacgcccacagccagagcttggaccggctgatgaatcctctgattgaccagtacctgtactacttgtctcggattcaaacaacaggaggcacggcaaatacgcagactctgggcttcagccaaggtgggcctaatacaatggccaatcaggcaaagaactggctgccaggaccctgttaccgccaacaacgcgtctcaacgacaaccgggcaaaacaacaatagcaactttgcctggactgctgggaccaaataccatctgaatggaagaaattcattggctaatcctggcatcgctatggcaacacacaaagacgacgaggagcgtttttttcccagtaacgggatcctgatttttggcaaacaaaatgctgccagagacaatgcggattacagcgatgtcatgcccaccagcgaggaagaaatcaaaaccactaaccctgtggccacagaggaatacggtatcgtggcagataacttgcagcagcaaaacacggctcctcaaattggaactgtcaacagccagggggccttacccggtatggtctggcagaaccgggacgtgtacctgcagggtcccatctgggccaagattcctcacacggacggcaacttccacccgtctccgctgatgggcggctttggcctgaaacatcctccgcctcagatcctgatcaagaacgcgcctgtacctgcggatcctccgaccaccttcaaccagtcaaagctgaactctttcatcacgcaatacagcaccggacaggtcagcgtggaaattgaatgggagctgcagaaggaaaacagcaagcgctggaaccccgagatccagtacacctccaactactacaaatctacaagtgtggactttgctgttaatacagaaggcgtgtactctgaaccccgccccattggcacccgttacctcacccgtaatctgtaa

SEQ ID NO: 1628 - DNA, 2217 bp, Artificial Sequence
  Synthetic Polynucleotide
atggctgccgatggttatcttccagattggctcgaggacaacctctctgagggcattcgcgagtggtgggcgctgaaacctggagccccgaagcccaaagccaaccagcaaaagcaggacgacggccggggtctggtgcttcctggctacaagtacctcggacccttcaacggactcgacaagggggagcccgtcaacgcggcggacgcggcggccctcgagcacgacaaggcctacgaccagcagctgcaggcgggtgacaatccgtacctgcggtataaccacgccgacgccgagtttcaggagcgtctgcaagaagatacgtcttttgggggcaacctcgggcgagcagtcttccaggccaagaagcgggttctcgaacctctcggtctggttgaggaaggcgctaagacggctcctggaaagaagagaccggtagagccatcaccccagcgttctccagactcctctacgggcatcggcaagaagggccaacagcccgccagaaaaagactcaattttggtcagactggcgactcagagtcagttccagaccctcaacctctcggagaacctccagcagcgccctctggtgtgggacctaatacaatggctgcaggcggtggcgcaccaatggcagacaataacgaaggcgccgacggagtgggtagttcctcgggaaattggcattgcgattccacatggctgggcgacagagtcatcaccaccagcacccgaacctgggccctgcccacctacaacaaccacctctacaagcaaatctccaacgggacatcgggaggagccaccaacgacaacacctacttcggctacagcaccccctgggggtattttgactttaacagattccactgccacttttcaccacgtgaccggcagcgactcatcaacaacaactggggattccggcccaagagactcagcttcaagctcttcaacatccaggtcaaggaggtcacgcagaatgaaggcaccaagaccatcgccaataacctcaccagcaccatccaggtgtttacggactcggagtaccagctgccgtacgttctcggctctgcccaccagggctgcctgcctccgttcccggcggacgtgttcacgattccccagtacggctacctaacactcaacaacggtagtcaggccgtgggacgctcctccttctactgcctggaatactttccttcgcagatgctgagaaccggcaacaacttccagtttacttacaccttcgaggacgtgcctttccacagcagctacgcccacagccagagcttggaccggctgatgaatcctctgattgaccagtacctgtactacttgtctcggattcaaacaacaggaggcacggcaaatacgcagactctgggcttcagccaaggtgggcctaatacaatggccaatcaggcaaagaactggctgccaggaccctgttaccgccaacaacgcgtctcaacgacaaccgggcaaaacaacaatagcaactttgcctggactgctgggaccaaataccatctgaatggaagaaattcattggctaatcctggcatcgctatggcaacacacaaagacgacgaggagcgtttttttcccagtaacgggatcctgatttttggcaaacaaaatgctgccagagacaatgcggattacagcgatgtcatgcccaccagcgaggaagaaatcaaaaccactaaccctgtggccacagaggaatacggtatcgtggcagataacttgcagcagcaaaacacggctcctcaaattggaactgtcaacagccagggggccttacccggtatggtctggcagaaccgggacgtgtacctgcagggtcccatctgggccaagattcctcacacggacggcaacttccacccgtctccgctgatgggcggctttggcctgaaacatcctccgcctcagatcctgatcaagaacacgcctgtacctgcggatcctccgaccaccttcaaccagtcaaagctgaactctttcatcacgcaatacagcaccggacaggtcagcgtggaaattgaatgggagctgcagaaggaaaacagcaagcgctggaaccccgagatccagtacacctccaactactacaaatctacaagtgtggactttgctgttaatacagaaggcgtgtactctgaaccccgccccattggcacccgttacctcacccgtaatctgtaa

SEQ ID NO: 1629 - DNA, 2217 bp, Artificial Sequence
  Synthetic Polynucleotide
atggctgccgatggttatcttccagattggctcgaggacaacctctctgagggcattcgcgagtggtgggcgctgaaacctggagccccgaagcccaaagccaaccagcaaaagcaggacgacggccggggtctggtgcttcctggctacaagtacctcggacccttcaacggactcgacaagggggagcccgtcaacgcggcggacgcggcggccctcgagcacgacaaggcctacgaccagcagctgcaggcgggtgacaatccgtacctgcggtataaccacgccgacgccgagtttcaggagcgtctgcaagaagatacgtcttttgggggcaacctcgggcgagcagtcttccaggccaagaagcgggttctcgaacctctcggtctggttgaggaaggcgctaagacggctcctggaaagaagagaccggtagagccatcaccccagcgttctccagactcctctacgggcatcggcaagaagggccaacagcccgccagaaaaagactcaattttggtcagactggcgactcagagtcagttccagaccctcaacctctcggagaacctccagcagcgccctctggtgtgggacctaatacaatggctgcaggcggtggcgcaccaatggcagacaataacgaaggcgccgacggagtgggtagttcctcgggaaattggcattgcgattccacatggctgggcgacagagtcatcaccaccagcacccgaacctgggccctgcccacctacaacaaccacctctacaagcaaatctccaacgggacatcgggaggagccaccaacgacaacacctacttcggctacagcaccccctgggggtattttgactttaacagattccactgccacttttcaccacgtgactggcagcgactcatcaacaacaactggggattccggcccaagagactcagcttcaagctcttcaacatccaggtcaaggaggtcacgcagaatgaaggcaccaagaccatcgccaataacctcaccagcaccatccaggtgtttacggactcggagtaccagctgccgtacgttctcggctctgcccaccagggctgcctgcctccgttcccggcggacgtgttcacgattccccagtacggctacctaacactcaacaacggtagtcaggccgtgggacgctcctccttctactgcctggaatactttccttcgcagatgctgagaaccggcaacaacttccagtttacttacaccttcgaggacgtgcctttccacagcagctacgcccacagccagagcttggaccggctgatgaatcctctgattgaccagtacctgtactacttgtctcggattcaaacaacaggaggcacggcaaatacgcagactctgggcttcagccaaggtgggcctaatacaatggccaatcaggcaaagaactggctgccaggaccctgttaccgccaacaacgcgtctcaacgacaaccgggcaaaacaacaatagcaactttgcctggactgctgggaccaaataccatctgaatggaagaaattcattggctaatcctggcatcgctatggcaacacacaaagacgacgaggagcgtttttttcccagtaacgggatcctgatttttggcaaacaaaatgctgccagagacaatgcggattacagcgatgtcatgcccaccagcgaggaagaaatcaaaaccactaaccctgtggccacagaggaatacggtatcgtggcagataacttgcagcagcaaaacacggctcctcaaattggaactgtcaacagccagggggccttacccggtatggtctggcagaaccgggacgtgtacctgcagggtcccatctgggccaagattcctcacacggacggcagcttccacccgtctccgctgatgggcggctttggcctgaaacatcctccgcctcagatcctgatcaagaacacgcctgtacctgcggatcctccgaccaccttcaaccagtcaaagctgaactctttcatcacgcaatacagcaccggacaggtcagcgtggaaattgaatgggagctgcagaaggaaaacagcaagcgctggaaccccgagatccagtacacctccaactactacaaatctacaagtgtggactttgctgttaatacagaaggcgtgtactctgaaccccgccccattggcacccgttacctcacccgtaatctgtaa

SEQ ID NO: 1630 - DNA, 2217 bp, Artificial Sequence
  Synthetic Polynucleotide
atggctgccgatggttatcttccagattggctcgaggacaacctctctgagggcattcgcgagtggtgggcgctgaaacctggagccccgaagcccaaagccaaccagcaaaagcaggacgacggccggggtctggtgcttcctggctacaagtacctcggacccttcaacggactcgacaagggggagcccgtcaacgcggcggacgcggcggccctcgagcacgacaaggcctacgaccagcagctgcaggcgggtgacaatccgtacctgcggtataaccacgccgacgccgagtttcaggagcgtctgcaagaagatacgtcttttgggggcaacctcgggcgagcagtcttccaggccaagaagcgggttctcgaacctctcggtctggttgaggaaggcgctaagacggctcctggaaagaagagaccggtagagccatcaccccagcgttctccagactcctctacgggcatcggcaagaagggccaacagcccgccagaaaaagactcaattttggtcagactggcgactcagagtcagttccagaccctcaacctctcggagaacctccaacagcgccctctggtgtgggacctaatacaatggctgcaggcggtggcgcaccaatggcagacaataacgaaggcgccgacggagtgggtagttcctcgggaaattggcattgcgattccacatggctgggcgacagagtcatcaccaccagcacccgaacctgggccctgcccacctacaacaaccacctctacaagcaaatctccaacgggacatcgggaggagccaccaacgacaacacctacttcggctacagcaccccctgggggtattttgactttaacagattccactgccacttttcaccacgtgactggcagcgactcatcaacaacaactggggattccggcccaagagactcagcttcaagctcttcaacatccaggtcaaggaggtcacgcagaatgaaggcaccaagaccatcgccaataacctcaccagcaccatccaggtgtttacggactcggagtaccagctgccgtacgttctcggctctgcccaccagggctgcctgcctccgttcccggcggacgtgttcacgattccccagtacggctacctaacactcaacaacggtagtcaggccgtgggacgctcctccttctactgcctggaatactttccttcgcagatgctgagaaccggcaacaacttccagtttacttacaccttcgaggacgtgcctttccacagcagctacgcccacagccagagcttggaccggctgatgaatcctctgattgaccagtacctgtactacttgtctcggattcaaacaacaggaggcacggcaaatacgcagactctgggcttcagccaaggtgggcctaatacaatggccaatcaggcaaagaactggctgccaggaccctgttaccgccaacaacgcgtctcaacgacaaccgggcaaaacaacaatagcaactttgcctggactgctgggaccaaataccatctgaatggaagaaattcattggctaatcctggcatcgctatggcaacacacaaagacgacgaggagcgtttttttcccagtaacgggatcctgatttttggcaaacaaaatgctgccagagacaatgcggattacagcgatgtcatgcccaccagcgaggaagaaatcaaaaccactaaccctgtggccacagaggaatacggtatcgtggcagataacttgcagcagcaaaacacggctcctcaaattggaactgtcaacagccagggggccttacccggtatggtctggcagaaccgggacgtgtacctgcagggtcccatctgggccaagattcctcacacggacggcaacttccacccgtctccgctgatgggcggctttggcctgaaacatcctccgcctcagatcctgatcaagaacacgcctgtacctgcggatcctccgaccaccttcaaccagtcaaagctgaactctttcatcacgcaatacagcaccggacaggtcagcgtggaaattgaatgggagctgcagaaggaaaacagcaagcgctggaaccccgagatccagtacacctccaactactacaaatctacaagtgtggactttgctgttaatacagaaggcgtgtactctgaaccccgccccattggcacccgttacctcacccgtaatctgtaa

SEQ ID NO: 1631 - DNA, 2217 bp, Artificial Sequence
  Synthetic Polynucleotide
atggctgccgatggttatcttccagattggctcgaggacaacctctctgagggcattcgcgagtggtgggcgctgaaacctggagccccgaagcccaaagccaaccagcaaaagcaggacgacggccggggtctggtgcttcctggctacaagtacctcggacccttcaacggactcgacaagggggagcccgtcaacgcggcggacgcggcggccctcgagcacgacaaggcctacgaccagcagctgcaggcgggtgacaatccgtacctgcggtataaccacgccgacgccgagtttcaggagcgtctgcaagaagatacgtcttttgggggcaacctcgggcgagcagtcttccaggccaagaagcgggttctcgaacctctcggtctggttgaggaaggcgctaagacggctcctggaaagaagagaccggtagagccatcaccccagcgttctccagactcctctacgggcatcggcaagaagggccaacagcccgccagaaaaagactcaattttggtcagactggcgactcagagtcagttccagaccctcaacctctcggagaacctccagcagcgccctctggtgtgggacctaatacaatggctgcaggcggtggcgcaccaatggcagacaataacgaaggcgccgacggagtgggtagttcctcgggaaattggcattgcgattccacatggctgggcgacagagtcatcaccaccagcacccgaacctgggccctgcccacctacaacaaccacctctacaagcaaatctccaacgggacatcgggaggagccaccaacgacaacacctacttcggctacagcaccccctgggggtattttgactttaacagattccactgccacttttcaccacgtgactggcagcgactcatcaacaacaactggggattccggcccaagagactcagcttcaagctcttcaacatccaggtcaaggaggtcacgcagaatgaaggcaccaagaccatcgccaataacctcaccagcaccatccaggtgtttacggactcggagtaccagctgccgtacgttctcggctctgcccaccagggctgcctgcctccgttcccggcggacgtgttcacgattccccagtacggctacctaacactcaacaacggtagtcaggccgtgggacgctcctccttctactgcctggaatactttccttcgcagatgctgagaaccggcaacaacttccagtttacttacaccttcgaggacgtgcctttccacagcagctacgcccacagccagagcttggaccggctgatgaatcctctgattgaccagtacctgtactacttgtctcggattcaaacaacaggaggcacggcaaatacgcagactctgggcttcagccaaggtgggcctaatacaatggccaatcaggcaaagaactggctgccaggaccctgttaccgccaacaacgcgtctcaacgacaaccgggcaaaacaacaatagcaactttgcctggactgctgggaccaaataccatctgaatggaagaaattcattggctaatcctggcatcgctatggcaacacacaaagacgacgaggagcgtttttttcccagtaacgggatcctgatttttggcaaacaaaatgctgccagagacaatgcggattacagcgatgtcatgcccaccagcgaggaagaaatcaaaaccactaaccctgtggccacagaggaatacggtatcgtggcagataacttgcagcagcaaaacacggctcctcaaattggaactgtcaacagccagggggccttacccggtatggtctggcagaaccgggacgtgtacctgcagggtcccatctgggccaagattcctcacacggacggcaacttccacccgtctccgctgatgggcggctttggcctgaaacatcctccgcctcagatcctgatcaagaacacgcctgtacctgcggatcctccgaccaccttcaaccagtcaaagctgaactctttcatcacgcaatacagcaccggacaggtcagcgtggaaattgaatgggagctgcagaaggaaaacagcaagcgctggaaccccgagatccagtacacctccaactactacaaatctacaagtgtggactttgctgttaatgcagaaggcgtgtactctgaaccccgccccattggcacccgttacctcacccgtaatctgtaa

SEQ ID NO: 1632 - DNA, 2217 bp, Artificial Sequence
  Synthetic Polynucleotide
atggctgccgatggttatcttccagattggctcgaggacaacctctctgagggcattcgcgagtggtgggcgctgaaacctggagccccgaagcccaaagccaaccagcaaaagcaggacgacggccggggtctggtgcttcctggctacaagtacctcggacccttcaacggactcgacaagggggagcccgtcaacgcggcggacgcggcggccctcgagcacgacaaggcctacgaccagcagctgcaggcgggtgacaatccgtacctgcggtataaccacgccgacgccgagtttcaggagcgtctgcaagaagatacgtcttttgggggcaacctcgggcgagcagtcttccaggccaagaagcgggttctcgaacctctcggtctggttgaggaaggcgctaagacggctcctggaaagaagagaccggtagagccatcaccccagcgttctccagactcctctacgggcatcggcaagaagggccaacagcccgccagaaaaagactcaattttggtcagactggcgactcagagtcagttccagaccctcaacctctcggagaacctccagcagcgccctctggtgtgggacctaatacaatggctgcaggcggtggcgcaccaatggcagacaataacgaaggcgccgacggagcgggtagttcctcgggaaattggcattgcgattccacatggctgggcgacagagtcatcaccaccagcacccgaacctgggccctgcccacctacaacaaccacctctacaagcaaatctccaacgggacatcgggaggagccaccaacgacaacacctacttcggctacagcaccccctgggggtattttgactttaacagattccactgccacttttcaccacgtgactggcagcgactcatcaacaacaactggggattccggcccaagagactcagcttcaagctcttcaacatccaggtcaaggaggtcacgcagaatgaaggcaccaagaccatcgccaataacctcaccagcaccatccaggtgtttacggactcggagtaccagctgccgtacgttctcggctctgcccaccagggctgcctgcctccgttcccggcggacgtgttcacgattccccagtacggctacctaacactcaacaacggtagtcaggccgtgggacgctcctccttctactgcctggaatactttccttcgcagatgctgagaaccggcaacaacttccagtttacttacaccttcgaggacgtgcctttccacagcagctacgcccacagccagagcttggaccggctgatgaatcctctgattgaccagtacctgtactacttgtctcggattcaaacaacaggaggcacggcaaatacgcagactctgggcttcagccaaggtgggcctaatacaatggccaatcaggcaaagaactggctgccaggaccctgttaccgccaacaacgcgtctcaacgacaaccgggcaaaacaacaatagcaactttgcctggactgctgggaccaaataccatctgaatggaagaaattcattggctaatcctggcatcgctatggcaacacacaaagacgacgaggagcgtttttttcccagtaacgggatcctgatttttggcaaacaaaatgctgccagagacaatgcggattacagcgatgtcatgcccaccagcgaggaagaaatcaaaaccactaaccctgtggccacagaggaatacggtatcgtggcagataacttgcagcagcaaaacacggctcctcaaattggaactgtcaacagccagggggccttacccggtatggtctggcagaaccgggacgtgtacctgcagggtcccatctgggccaagattcctcacacggacggcaacttccacccgtctccgctgatgggcggctttggcctgaaacatcctccgcctcagatcctgatcaagaacacgcctgtacctgcggatcctccgaccaccttcaaccagtcaaagctgaactctttcatcacgcaatacagcaccggacaggtcagcgtggaaattgaatgggagctgcagaaggaaaacagcaagcgctggaaccccgagatccagtacacctccaactactacaaatctacaagtgtggactttgctgttaatacagaaggcgtgtactctgaaccccgccccattggcacccgttacctcacccgtaatctgtaa

SEQ ID NO: 1633 - DNA, 2217 bp, Artificial Sequence
  Synthetic Polynucleotide
atggctgccgatggttatcttccagattggctcgaggacaacctctctgagggcattcgcgagtggtgggcgctgaaacctggagccccgaagcccaaagccaaccagcaaaagcaggacgacggccggggtctggtgcttcctggctacaagtacctcggacccttcaacggactcgacaagggggagcccgtcaacgcggcggacgcggcggccctcgagcacgacaaggcctacgaccagcagctgcaggcgggtgacaatccgtacctgcggtataaccacgccgacgccgagtttcaggagcgtctgcaagaagatacgtcttttgggggcaacctcgggcgagcagtcttccaggccaagaagcgggttctcgaacctctcggtctggttgaggaaggcgctaagacggctcctggaaagaagagaccggtagagccatcaccccagcgttctccagactcctctacgggcatcggcaagaagggccaacagcccgccagaaaaagactcaattttggtcagactggcgactcagagtcagttccagaccctcaacctctcggagaacctccagcagcgccctctggtgtgggacctaatacaatggctgcaggcggtggcgcaccaatggcagacaataacgaaggcgccgacggagtgggtagttcctcgggaaattggcattgcgattccacatggctgggcgacagagccatcaccaccagcacccgaacctgggccctgcccacctacaacaaccacctctacaagcaaatctccaacgggacatcgggaggagccaccaacgacaacacctacttcggctacagcaccccctgggggtattttgactttaacagattccactgccacttttcaccacgtgactggcagcgactcatcaacaacaactggggattccggcccaagagactcagcttcaagctcttcaacatccaggtcaaggaggtcacgcagaatgaaggcaccaagaccatcgccaataacctcaccagcaccatccaggtgtttacggactcggagtaccagctgccgtacgttctcggctctgcccaccagggctgcctgcctccgttcccggcggacgtgttcacgattccccagtacggctacctaacactcaacaacggtagtcaggccgtgggacgctcctccttctactgcctggaatactttccttcgcagatgctgagaaccggcaacaacttccagtttacttacaccttcgaggacgtgcctttccacagcagctacgcccacagccagagcttggaccggctgatgaatcctctgattgaccagtacctgtactacttgtctcggattcaaacaacaggaggcacggcaaatacgcagactctgggcttcagccaaggtgggcctaatacaatggccaatcaggcaaagaactggctgccaggaccctgttaccgccaacaacgcgtctcaacgacaaccgggcaaaacaacaatagcaactttgcctggactgctgggaccaaataccatctgaatggaagaaattcattggctaatcctggcatcgctatggcaacacacaaagacgacgaggagcgtttttttcccagtaacgggatcctgatttttggcaaacaaaatgctgccagagacaatgcggattacagcgatgtcatgcccaccagcgaggaagaaatcaaaaccactaaccctgtggccacagaggaatacggtatcgtggcagataacttgcagcagcaaaacacggctcctcaaattggaactgtcaacagccagggggccttacccggtatggtctggcagaaccgggacgtgtacctgcagggtcccatctgggccaagattcctcacacggacggcaacttccacccgtctccgctgatgggcggctttggcctgaaacatcctccgcctcagatcctgatcaagaacacgcctgtacctgcggatcctccgaccaccttcaaccagtcaaagctgaactctttcatcacgcaatacagcaccggacaggtcagcgtggaaattgaatgggagctgcagaaggaaaacagcaagcgctggaaccccgagatccagtacacctccaactactacaaatctacaagtgtggactttgctgttaatacagaaggcgtgtactctgaaccccgccccattggcacccgttacctcacccgtaatctgtaa

SEQ ID NO: 1634 - DNA, 2217 bp, Artificial Sequence
  Synthetic Polynucleotide
atggctgccgatggttatcttccagattggctcgaggacaacctctctgagggcattcgcgagtggtgggcgctgaaacctggagccccgaagcccaaagccaaccagcaaaagcaggacgacggccggggtctggtgcttcctggctacaagtacctcggacccttcaacggactcgacaagggggagcccgtcaacgcggcggacgcggcggccctcgagcacgacaaggcctacgaccagcagctgcaggcgggtgacaatccgtacctgcggtataaccacgccgacgccgagtttcaggagcgtctgcaagaagatacgtcttttgggggcaacctcgggcgagcagtcttccaggccaagaagcgggttctcgaacctctcggtctggttgaggaaggcgctaagacggctcctggaaagaagagaccggtagagccatcaccccagcgttctccagactcctctacgggcatcggcaagaagggccaacagcccgccagaaaaagactcaattttggtcagactggcgactcagagtcagttccagaccctcaacctctcggagaacctccagcagcgccctctggtgtgggacctaatacaatggctgcaggcggtggcgcaccaatggcagacaataacgaaggcgccgacggagtgggtagttcctcgggaaattggcattgcgattccacatggctgggcgacagagtcatcaccaccagcacccgaacctgggccctgcccacctacaacaaccacctctacaagcaaatctccaacgggacatcgggaggagccaccaacgacaacacctacttcggctacagcaccccctgggggtattttgactttaacagattccactgccacttttcaccacgtgactggcagcgactcatcaacaacaactggggattccggcccaagagactcagcttcaagctcttcaacatccaggtcaaggaggtcacgcagaatgaaggcaccaagaccatcgccaataacctcaccagcaccatccaggtgtttacggactcggagtaccagctgccgtacgttctcggctctgcccaccagggctgcctgcctccgttcccggcggacgtgttcacgattccccagtacggctacctaacactcaacaacggtagtcaggccgtgggacgctcctccttctactgcctggaatactttccttcgcagatgctgagaaccggcaacaacttccagtttacttacaccttcgaggacgtgcctttccacagcagctacgcccacagccagagcttggaccggctgatgaatcctctgattgaccagtacctgtactacttgtctcggattcaaacaacaggaggcacggcaaatacgcagactctgggcttcagccaaggtgggcctaatacaatggccaatcaggcaaagaactggctgccaggaccctgttaccgccaacaacgcgtctcaacgacaaccgggcaaaacaacaatagcaactttgcctggactgctgggaccaaataccatctgaatggaagaaattcattggctaatcctggcgtcgctatggcaacacacaaagacgacgaggagcgtttttttcccagtaacgggatcctgatttttggcaaacaaaatgctgccagagacaatgcggattacagcgatgtcatgcccaccagcgaggaagaaatcaaaaccactaaccctgtggccacagaggaatacggtatcgtggcagataacttgcagcagcaaaacacggctcctcaaattggaactgtcaacagccagggggccttacccggtatggtctggcagaaccgggacgtgtacctgcagggtcccatctgggccaagattcctcacacggacggcaacttccacccgtctccgctgatgggcggctttggcctgaaacatcctccgcctcagatcctgatcaagaacacgcctgtacctgcggatcctccgaccaccttcaaccagtcaaagctgaactctttcatcacgcaatacagcaccggacaggtcagcgtggaaattgaatgggagctgcagaaggaaaacagcaagcgctggaaccccgagatccagtacacctccaactactacaaatctacaagtgtggactttgctgttaatacagaaggcgtgtactctgaaccccgccccattggcacccgttacctcacccgtaatctgtaa

SEQ ID NO: 1635 - DNA, 2217 bp, Artificial Sequence
  Synthetic Polynucleotide
atggctgccgatggttatcttccagattggctcgaggacaacctctctgagggcattcgcgagtggtgggcgctgaaacctggagccccgaagcccaaagccaaccagcaaaagcaggacgacggccggggtctggtgcttcctggctacaagtacctcggacccttcaacggactcgacaagggggagcccgtcaacgcggcggacgcggcggccctcgagcacgacaaggcctacgaccagcagctgcaggcgggtgacaatccgtacctgcggtataaccacgccgacgccgagtttcaggagcgtctgcaagaagatacgtcttttgggggcaacctcgggcgagcagtcttccaggccaagaagcgggttctcgaacctctcggtctggttgaggaaggcgctaagacggctcctggaaagaagagaccggtagagccatcaccccagcgttctccagactcctctacgggcatcggcaagaagggccaacagcccgccagaaaaagactcaattttggtcagactggcgactcagagtcagttccagaccctcaacctctcggagaacctccagcagcgccctctggtgtgggacctaatacaatggctgcaggcggtggcgcaccaatggcagacaataacgaaggcgccgacggagtgggtagttcctcgggaaattggcattgcgattccacatggctgggcgacagagtcatcaccaccagcacccgaacctgggccctgcccacctacaacaaccacctctacaagcaaatctccaacgggacatcgggaggagccaccaacgacaacacctacttcggctacagcaccccctgggggtattttgactttaacagattccactgccacttttcaccacgtgactggcagcgactcatcaacaacaactggggattccggcccaagagactcagcttcaagctcttcaacatccaggtcaaggaggtcacgcagaatgaaggcaccaagaccatcgccaataacctcaccggcaccatccaggtgtttacggactcggagtaccagctgccgtacgttctcggctctgcccaccagggctgcctgcctccgttcccggcggacgtgttcacgattccccagtacggctacctaacactcaacaacggtagtcaggccgtgggacgctcctccttctactgcctggaatactttccttcgcagatgctgagaaccggcaacaacttccagtttacttacaccttcgaggacgtgcctttccacagcagctacgcccacagccagagcttggaccggctgatgaatcctctgattgaccagtacctgtactacttgtctcggattcaaacaacaggaggcacggcaaatacgcagactctgggcttcagccaaggtgggcctaatacaatggccaatcaggcaaagaactggctgccaggaccctgttaccgccaacaacgcgtctcaacgacaaccgggcaaaacaacaatagcaactttgcctggactgctgggaccaaataccatctgaatggaagaaattcattggctaatcctggcatcgctatggcaacacacaaagacgacgaggagcgtttttttcccagtaacgggatcctgatttttggcaaacaaaatgctgccagagacaatgcggattacagcgatgtcatgcccaccagcgaggaagaaatcaaaaccactaaccctgtggccacagaggaatacggtatcgtggcagataacttgcagcagcaaaacacggctcctcaaattggaactgtcaacagccagggggccttacccggtatggtctggcagaaccgggacgtgtacctgcagggtcccatctgggccaagattcctcacacggacggcaacttccacccgtctccgctgatgggcggctttggcctgaaacatcctccgcctcagatcctgatcaagaacacgcctgtacctgcggatcctccgaccaccttcaaccagtcaaagctgaactctttcatcacgcaatacagcaccggacaggtcagcgtggaaattgaatgggagctgcagaaggaaaacagcaagcgctggaaccccgagatccagtacacctccaactactacaaatctacaagtgtggactttgctgttaatacagaaggcgtgtactctgaaccccgccccattggcacccgttacctcacccgtaatctgtaa

SEQ ID NO: 1636 - DNA, 2217 bp, Artificial Sequence
  Synthetic Polynucleotide
atggctgccgatggttatcttccagattggctcgaggacaacctctctgagggcattcgcgagtggtgggcgctgaaacctggagccccgaagcccaaagccaaccagcaaaagcaggacgacggccggggtctggtgcttcctggctacaagtacctcggacccttcaacggactcgacaagggggagcccgtcaacgcggcggacgcggcggccctcgagcacgacaaggcctacgaccagcagctgcaggcgggtgacaatccgtacctgcggtataaccacgccgacgccgagtttcaggagcgtctgcaagaagatacgtcttttgggggcaacctcgggcgagcagtcttccaggccaagaagcgggttctcgaacctctcggtctggttgaggaaggcgctaagacggctcctggaaagaagagaccggtagagccatcaccccagcgttctccagactcctctacgggcatcggcaagaagggccaacagcccgccagaaaaagactcaattttggtcagactggcgactcagagtcagttccagaccctcaacctctcggagaacctccagcagcgccctctggtgtgggacctaatacaatggctgcaggcggtggcgcaccaatggcagacaataacgaaggcgccgacggagtgggtagttcctcgggaaattggcattgcgattccacatggctgggcgacagagtcatcaccaccagcacccgaacctgggccctgcccacctacaacaaccacctctacaagcaaatctccaacgggacatcgggaggagccaccaacgacaacacctacttcggctacagcaccccctgggggtattttgactttaacagattccactgccacttttcaccacgtgactggcagcgactcatcaacaacaactggggattccggcccaagagactcagcttcaagctcttcaacatccaggtcaaggaggtcacgcagaatgaaggcaccaagaccatcgccaataacctcaccagcaccatccaggtgtttacggactcggagtaccagctgccgtacgttctcggctctgcccaccagggctgcctgcctccgttcccggcggacgtgttcacgattccccagtacggctacctaacactcaacaacggtagtcaggccgtgggacgctcctccttctactgcctggaatactttccttcgcagatgctgagaaccggcaacaacttccagtttacttacaccttcgaggacgtgcctttccacagcagctacgcccacagccagagcttggaccggctgatgaatcctctgattgaccagtacctgtactacttgtctcggattcaaacaacaggaggcacggcaaatacgcagactctgggcttcagccaaggtgggcctaatacaatggccaatcaggcaaagaactggctgccaggaccctgttaccgccaacaacgcgtctcaacgacaaccgggcaaaacaacaatagcaactttgcctggactgctgggaccaaataccatctgaatggaagaaattcattggctaatcctggcatcgctatggcaacacacaaagacgacgaggagcgtttttttcccagtaacgggatcctgatttttggcaaacaaaatgctgtcagagacaatgcggattacagcgatgtcatgcccaccagcgaggaagaaatcaaaaccactaaccctgtggccacagaggaatacggtatcgtggcagataacttgcagcagcaaaacacggctcctcaaattggaactgtcaacagccagggggccttacccggtatggtctggcagaaccgggacgtgtacctgcagggtcccatctgggccaagattcctcacacggacggcaacttccacccgtctccgctgatgggcggctttggcctgaaacatcctccgcctcagatcctgatcaagaacacgcctgtacctgcggatcctccgaccaccttcaaccagtcaaagctgaactctttcatcacgcaatacagcaccggacaggtcagcgtggaaattgaatgggagctgcagaaggaaaacagcaagcgctggaaccccgagatccagtacacctccaactactacaaatctacaagtgtggactttgctgttaatacagaaggcgtgtactctgaaccccgccccattggcacccgttacctcacccgtaatctgtaa

SEQ ID NO: 1637 - DNA, 2217 bp, Artificial Sequence
  Synthetic Polynucleotide
atggctgccgatggttatcttccagattggctcgaggacaacctctctgagggcattcgcgagtggtgggcgctgaaacctggagccccgaagcccaaagccaaccagcaaaagcaggacgacggccggggtctggtgcttcctggctacaagtacctcggacccttcaacggactcgacaagggggagcccgtcaacgcggcggacgcggcggccctcgagcacgacaaggcctacgaccagcagctgcaggcgggtgacaatccgtacctgcggtataaccacgccgacgccgagtttcaggagcgtctgcaagaagatacgtcttttgggggcaacctcgggcgagcagtcttccaggccaagaagcgggttctcgaacctctcggtctggttgaggaaggcgctaagacggctcctggaaagaagagaccggtagagccatcaccccagcgttctccagactcctctacgggcatcggcaagaagggccaacagcccgccagaaaaagactcaattttggtcagactggcgactcagagtcagttccagaccctcaacctctcggagaacctccagcagcgccctctggtgtgggacctaatacaatggctgcaggcggtggcgcaccaatggcagacaataacgaaggcgccgacggagtgggtagttcctcgggaaattggcattgcgattccacatggctgggcgacagagtcatcaccaccagcacccgaacctgggccctgcccacctacaacaaccacctctacaagcaaatctccaacgggacatcgggaggagccaccaacgacaacacctacttcggctacagcaccccctgggggtattttgactttaacagattccactgccacttttcaccacgtgactggcagcgactcatcaacaacaactggggattccggcccaagagactcagcttcaagctcttcaacatccaggtcaaggaggtcacgcagaatgaaggcaccaagaccatcgccaataacctcaccagcaccatccaggtgtttacggactcggagtaccagctgccgtacgttctcggctctgcccaccagggctgcctgcctccgttcccggcggacgtgttcacgattccccagtacggctacctaacactcaacaacggtagtcaggccgtgggacgctcctccttctactgcctggaatactttccttcgcagatgctgagaaccggcaacaacttccagtttacttacaccttcgaggacgtgcctttccacagcagctacgcccacagccagagcttggaccggctgatgaatcctctgattgaccagtacctgtactacttgtctcggattcaaacaacaggaggcacggcaaatacgcagactctgggcttcagccaaggtgggcctaatacaatggccaatcaggcaaagaactggctgccaggaccctgttaccgccaacaacgcgtctcaacgacaaccgggcaaaacaacaatagcaactttgcctggactgctgggaccaaataccatctgaatggaagaaattcattggctaatcctggcatcgctatggcaacacacaaagacgacgaggagcgtttttttcccagtaacgggatcctgatttttggcaaacaaaatgctgccagagacaatgcggattacagcgatgtcatgcccaccagcgaggaagaaatcaaaaccactaaccctgtggccacagaggaatacggtatcgtggcagataacttgcagcagcaaaacacggctcctcaaattggaactgtcaacagccagggggccttacccggtatggtctggcagaaccgggacgtgtacctgcagggtcccatctgggccaagattcctcacacggacggcaacttccacccgtctccgctgatgggcggctttggcctgaaacatcctccgcctcagatcctgatcaagaacacgcctgtacctgcggatcctccgaccaccttcaaccagtcaaagctgaactctttcatcgcgcaatacagcaccggacaggtcagcgtggaaattgaatgggagctgcagaaggaaaacagcaagcgctggaaccccgagatccagtacacctccaactactacaaatctacaagtgtggactttgctgttaatacagaaggcgtgtactctgaaccccgccccattggcacccgttacctcacccgtaatctgtaa

SEQ ID NO: 1638 - DNA, 2217 bp, Artificial Sequence
  Synthetic Polynucleotide
atggctgccgatggttatcttccagattggctcgaggacaacctctctgagggcattcgcgagtggtgggcgctgaaacctggagccccgaagcccaaagccaaccagcaaaagcaggacgacggccggggtctggtgcttcctggctacaagtacctcggacccttcaacggactcgacaagggggagcccgtcaacgcggcggacgcggcggccctcgagcacgacaaggcctacgaccagcagctgcaggcgggtgacaatccgtacctgcggtataaccacgccgacgccgagtttcaggagcgtctgcaagaagatacgtcttttgggggcaacctcgggcgagcagtcttccaggccaagaagcgggttctcgaacctctcggtctggttgaggaaggcgctaagacggctcctggaaagaagagaccggtagagccatcaccccagcgttctccagactcctctacgggcatcggcaagaagggccaacagcccgccagaaaaagactcaattttggtcagactggcgactcagagtcagttccagaccctcaacctctcggagaacctccagcagcgccctctggtgtgggacctaatacaatggctgcaggcggtggcgcaccaatggcagacaataacgaaggcgccgacggagtgggtagttcctcgggaaattggcattgcgattccacatggctgggcgacagagtcatcaccaccagcacccgaacctgggccctgcccacctacaacaaccacctctacaagcaaatctccaacgggacatcgggaggagccaccaacgacaacacctacttcggctacagcaccccctgggggtattttgactttaacagattccactgccacttttcaccacgtgactggcagcgactcatcaacaacaactggggattccggcccaagagactcagcttcaagctcttcaacatccaggtcaaggaggtcacgcagaatgaaggcaccaagaccatcgccaataacctcaccagcaccatccaggtgtttacggactcggagtaccagctgccgtacgttctcggctctgcccaccagggctgcctgcctccgttcccggcggacgtgttcacgattccccagtacggctacctaacactcaacaacggtagtcaggccgtgggacgctcctccttctactgcctggaatactttccttcgcagatgctgagaaccggcaacaacttccagtttacttacaccttcgaggacgtgcctttccacagcagctacgcccacagccagagcttggaccggctgatgaatcctctgattgaccagtacctgtactacttgtctcggattcaaacaacaggaggcacggcaaatacgcagactctgggcttcagccaaggtgggcctaatacaatggccaatcaggcaaagaactggctgccaggaccctgttaccgccaacaacgcgtctcaacgacaaccgggcaaaacaacaatagcaactttgcctggactgctgggaccaaataccatctgaatggaagaaattcattggctaatcctggcatcgctatggcaacacacaaagacggcgaggagcgtttttttcccagtaacgggatcctgatttttggcaaacaaaatgctgccagagacaatgcggattacagcgatgtcatgcccaccagcgaggaagaaatcaaaaccactaaccctgtggccacagaggaatacggtatcgtggcagataacttgcagcagcaaaacacggctcctcaaattggaactgtcaacagccagggggccttacccggtatggtctggcagaaccgggacgtgtacctgcagggtcccatctgggccaagattcctcacacggacggcaacttccacccgtctccgctgatgggcggctttggcctgaaacatcctccgcctcagatcctgatcaagaacacgcctgtacctgcggatcctccgaccaccttcaaccagtcaaagctgaactctttcatcacgcaatacagcaccggacaggtcagcgtggaaattgaatgggagctgcagaaggaaaacagcaagcgctggaaccccgagatccagtacacctccaactactacaaatctacaagtgtggactttgctgttaatacagaaggcgtgtactctgaaccccgccccattggcacccgttacctcacccgtaatctgtaa

SEQ ID NO: 1639 - DNA, 2217 bp, Artificial Sequence
  Synthetic Polynucleotide
atggctgccgatggttatcttccagattggctcgaggacaacctctctgagggcattcgcgagtggtgggcgctgaaacctggagccccgaagcccaaagccaaccagcaaaagcaggacgacggccggggtctggtgcttcctggctacaagtacctcggacccttcaacggactcgacaagggggagcccgtcaacgcggcggacgcggcggccctcgagcacgacaaggcctacgaccagcagctgcaggcgggtgacaatccgtacctgcggtataaccacgccgacgccgagtttcaggagcgtctgcaagaagatacgtcttttgggggcaacctcgggcgagcagtcttccaggccaagaagcgggttctcgaacctctcggtctggttgaggaaggcgctaagacggctcctggaaagaagagaccggtagagccatcaccccagcgttctccagactcctctacgggcatcggcaagaagggccaacagcccgccagaaaaagactcaattttggtcagactggcgactcagagtcagttccagaccctcaacctctcggagaacctccagcagcgccctctggtgtgggacctaatacaatggctgcaggcggtggcgcaccaatggcagacaataacgaaggcgccgacggagtgggtagttcctcgggaaattggcattgcgattccacatggctgggcgacagagtcatcaccaccagcacccgaacctgggccctgcccacctacaacaaccacctctacaagcaaatctccaacgggacatcgggaggagccaccaacgacaacacctacttcggctacagcaccccctgggggtattttgactttaacagattccactgccacttttcaccacgtgactggcagcgactcatcaacaacaactggggattccggcccaagagactcagcttcaagctcttcaacatccaggtcaaggaggtcacgcagaatgaaggcaccaagaccatcgccaataacctcaccagcaccatccaggtgtttacggactcggagtaccagctgccgtacgttctcggctctgcccaccagggctgcctgcctccgttcccggcggacgtgttcacgattccccagtacggctacctaacactcaacaacggtagtcaggccgtgggacgctcctccttctactgcctggaatactttccttcgcagatgctgagaaccggcaacaacttccagtttacttacaccttcgaggacgtgcctttccacagcagctacgcccacagccagagcttggaccggctgatgaatcctctgattgaccagtacctgtactacttgtctcggattcaaacaacaggaggcacggcaaatacgcagactctgggcttcagccaaggtgggcctaatacaatggccaatcaggcaaagaactggctgccaggaccctgttaccgccaacaacgcgtctcaacgacaaccgggcaaaacaacaatagcaactttgcctggactgctgggaccaaataccatctgaatggaagaaattcattggctaatcctggcatcgctatggcaacacacaaaggcgacgaggagcgtttttttcccagtaacgggatcctgatttttggcaaacaaaatgctgccagagacaatgcggattacagcgatgtcatgcccaccagcgaggaagaaatcaaaaccactaaccctgtggccacagaggaatacggtatcgtggcagataacttgcagcagcaaaacacggctcctcaaattggaactgtcaacagccagggggccttacccggtatggtctggcagaaccgggacgtgtacctgcagggtcccatctgggccaagattcctcacacggacggcaacttccacccgtctccgctgatgggcggctttggcctgaaacatcctccgcctcagatcctgatcaagaacacgcctgtacctgcggatcctccgaccaccttcaaccagtcaaagctgaactctttcatcacgcaatacagcaccggacaggtcagcgtggaaattgaatgggagctgcagaaggaaaacagcaagcgctggaaccccgagatccagtacacctccaactactacaaatctacaagtgtggactttgctgttaatacagaaggcgtgtactctgaaccccgccccattggcacccgttacctcacccgtaatctgtaa

SEQ ID NO: 1640 - DNA, 2217 bp, Artificial Sequence
  Synthetic Polynucleotide
atggctgccgatggttatcttccagattggctcgaggacaacctctctgagggcattcgcgagtggtgggcgctgaaacctggagccccgaagcccaaagccaaccagcaaaagcaggacgacggccggggtctggtgcttcctggctacaagtacctcggacccttcaacggactcgacaagggggagcccgtcaacgcggcggacgcggcggccctcgagcacgacaaggcctacaaccagcagctgcaggcgggtgacaatccgtacctgcggtataaccacgccgacgccgagtttcaggagcgtctgcaagaagatacgtcttttgggggcaacctcgggcgagcagtcttccaggccaagaagcgggttctcgaacctctcggtctggttgaggaaggcgctaagacggctcctggaaagaagagaccggtagagccatcaccccagcgttctccagactcctctacgggcatcggcaagaagggccaacagcccgccagaaaaagactcaattttggtcagactggcgactcagagtcagttccagaccctcaacctctcggagaacctccagcagcgccctctggtgtgggacctaatacaatggctgcaggcggtggcgcaccaatggcagacaataacgaaggcgccgacggagtgggtagttcctcgggaaattggcattgcgattccacatggctgggcgacagagtcatcaccaccagcacccgaacctgggccctgcccacctacaacaaccacctctacaagcaaatctccaacgggacatcgggaggagccaccaacgacaacacctacttcggctacagcaccccctgggggtattttgactttaacagattccactgccacttttcaccacgtgactggcagcgactcatcaacaacaactggggattccggcccaagagactcagcttcaagctcttcaacatccaggtcaaggaggtcacgcagaatgaaggcaccaagaccatcgccaataacctcaccagcaccatccaggtgtttacggactcggagtaccagctgccgtacgttctcggctctgcccaccagggctgcctgcctccgttcccggcggacgtgttcacgattccccagtacggctacctaacactcaacaacggtagtcaggccgtgggacgctcctccttctactgcctggaatactttccttcgcagatgctgagaaccggcaacaacttccagtttacttacaccttcgaggacgtgcctttccacagcagctacgcccacagccagagcttggaccggctgatgaatcctctgattgaccagtacctgtactacttgtctcggattcaaacaacaggaggcacggcaaatacgcagactctgggcttcagccaaggtgggcctaatacaatggccaatcaggcaaagaactggctgccaggaccctgttaccgccaacaacgcgtctcaacgacaaccgggcaaaacaacaatagcaactttgcctggactgctgggaccaaataccatctgaatggaagaaattcattggctaatcctggcatcgctatggcaacacacaaagacgacgaggagcgtttttttcccagtaacgggatcctgatttttggcaaacaaaatgctgccagagacaatgcggattacagcgatgtcatgcccaccagcgaggaagaaatcaaaaccactaaccctgtggccacagaggaatacggtatcgtggcagataacttgcagcagcaaaacacggctcctcaaattggaactgtcaacagccagggggccttacccggtatggtctggcagaaccgggacgtgtacctgcagggtcccatctgggccaagattcctcacacggacggcaacttccacccgtctccgctgatgggcggctttggcctgaaacatcctccgcctcagatcctgatcaagaacacgcctgtacctgcggatcctccgaccaccttcaaccagtcaaagctgaactctttcatcacgcaatacagcaccggacaggtcagcgtggaaattgaatgggagctgcagaaggaaaacagcaagcgctggaaccccgagatccagtacacctccaactactacaaatctacaagtgtggactttgctgttaatacagaaggcgtgtactctgaaccccgccccattggcacccgttacctcacccgtaatctgtaa

SEQ ID NO: 1641 - DNA, 2217 bp, Artificial Sequence
  Synthetic Polynucleotide
atggctgccgatggttatcttccagattggctcgaggacaacctctctgagggcattcgcgagtggtgggcgctgaaacctggagccccgaagcccaaagccaaccagcaaaagcaggacgacggccggggtctggtgcttcctggctacaagtacctcggacccttcaacggactcgacaagggggagcccgtcaacgcggcggacgcggcggccctcgagcacgacaaggcctacgaccagcagctgcaggcgggtgacaatccgtacctgcggtataaccacgccgacgccgagtttcaggagcgtctgcaagaagatacgtcttttgggggcaacctcgggcgagcagtcttccaggccaagaagcgggttctcgaacctctcggtctggttgaggaaggcgctaagacggctcctggaaagaagagaccggtagagccatcaccccagcgttctccagactcctctacgggcatcggcaagaagggccaacagcccgccagaaaaagactcaattttggtcagactggcgactcagagtcagttccagaccctcaacctctcggagaacctccagcagcgccctctggtgtgggacctaatacaatggctgcaggcggtggcgcaccaatggcagacaataacgaaggcgccgacggagtgggtagttcctcgggaaattggcattgcgattccacatggctgggcgacagagtcatcaccaccagcacccgaacctgggccctgcccacctacaacaaccacctctacaagcaaatctccaacgggacatcgggaggagccaccaacgacaacacctacttcggctacagcaccccctgggggtattttgactttaacagattccactgccacttttcaccacgtgactggcagcgactcatcaacaacaactggggattccggcccaagagactcagcttcaagctcttcaacatccaggtcaaggaggtcacgcagaatgaaggcaccaagaccatcgccaataacctcaccagcaccatccaggtgtttacggactcggagtaccagctgccgtacgttctcggctctgcccaccagggctgcctgcctccgttcccggcggacgtgttcacgattccccagtacggctacctaacactcaacaacggtagtcaggccgtgggacgctcctccttctactgcctggaatactttccttcgcagatgctgagaaccggcaacaacttccagtttacttacaccttcgaggacgtgcctttccacagcagctacgcccacagccagagcttggaccggctgatgaatcctctgattgaccagtacctgtactacttgtctcggattcaaacaacaggaggcacggcaaatacgcagactctgggcttcagccaaggtgggcctaatacaatggccaatcaggcaaagaactggctgccaggaccctgttaccgccaacaacgcgtctcaacgacaaccgggcaaaacaacaatagcaactttgcctggactgctgggaccaaataccatctgaatggaagaaattcattggctaatcctggcatcgctatggcaacacacaaagacgacgaggagcgtttttttcccagtaacgggatcctgatttttggcaaacaaaatgctgccagagacaatgcggattacagcgatgtcatgcccaccagcgaggaagaaatcaaaaccactaaccctgtggccacagaggaatacggtatcgtggcagataacttgcagcagcaaaacacggctcctcaaattggaactgtcaacagccagggggccttacccggtatggtctggcagaaccgggacgtgtacctgcagggtcccacctgggccaagattcctcacacggacggcaacttccacccgtctccgctgatgggcggctttggcctgaaacatcctccgcctcagatcctgatcaagaacacgcctgtacctgcggatcctccgaccaccttcaaccagtcaaagctgaactctttcatcacgcaatacagcaccggacaggtcagcgtggaaattgaatgggagctgcagaaggaaaacagcaagcgctggaaccccgagatccagtacacctccaactactacaaatctacaagtgtggactttgctgttaatacagaaggcgtgtactctgaaccccgccccattggcacccgttacctcacccgtaatctgtaa

SEQ ID NO: 1642 - DNA, 2217 bp, Artificial Sequence
  Synthetic Polynucleotide
atggctgccgatggttatcttccagattggctcgaggacaacctctctgagggcattcgcgagtggtgggcgctgaaacctggagccccgaagcccaaagccaaccagcaaaagcaggacgacggccggggtctggtgcttcctggctacaagtacctcggacccttcaacggactcgacaagggggagcccgtcaacgcggcggacgcggcggccctcgagcacgacaaggcctacgaccagcagctgcaggcgggtgacaatccgtacctgcggtataaccacgccgacgccgagtttcaggagcgtctgcaagaagatacgtcttttgggggcaacctcgggcgagcagtcttccaggccaagaagcgggttctcgaacctctcggtctggttgaggaaggcgctaagacggctcctggaaagaagagaccggtagagccatcaccccagcgttctccagactcctctacgggcatcggcaagaagggccaacagcccgccagaaaaagactcaattttggtcagactggcgactcagagtcagttccagaccctcaacctctcggagaacctccagcagcgccctctggtgtgggacctaatacaatggctgcaggcggtggcgcaccaatggcagacaataacgaaggcgccgacggagtgggtagttcctcgggaaattggcattgcgattccacatggctgggcgacagagtcatcaccaccagcacccgaacctgggccctgcccacctacaacaaccacctctacaagcaaatctccaacgggacatcgggaggagccaccaacgacaacacctacttcggctacagcaccccctgggggtattttgactttaacagattccactgccacttttcaccacgtgactggcagcgactcatcaacaacaactggggattccggcccaagagactcagcttcaagctcttcaacatccaggtcaaggaggtcacgcagaatgaaggcaccaagaccatcgccaataacctcaccagcaccatccaggtgtttacggactcggagtaccagctgccgtacgttctcggctctgcccaccagggctgcctgcctccgttcccggcggacgtgttcacgattccccagtacggctacctaacactcaacaacggtagtcaggccgtgggacgctcctccttctactgcctggaatactttccttcgcagatgctgagaaccggcaacaacttccagtttacttacaccttcgaggacgtgcctttccacagcagctacgcccacagccagagcttggaccggctgatgaatcctctgattgaccagtacctgtactacttgtctcggattcaaacaacaggaggcacggcaaatacgcagactctgggcttcagccaaggtgggcctaatacaatggccaatcaggcaaagaactggctgccaggaccctgttaccgccaacaacgcgtctcaacgacaaccgggcaaaacaacaatagcaactttgcctggactgctgggaccaaataccatctgaatggaagaaattcattggctaatcctggcatcgctatggcaacacacaaagacgacgaggagcgtttttttcccagtaacgggatcctgatttttggcaaacaaaatgctgccagagacaatgcggattacagcgatgtcatgcccaccagcgaggaagaaatcaaaaccactaaccctgtggccacagaggaatacggtatcgtggcagataacttgcggcagcaaaacacggctcctcaaattggaactgtcaacagccagggggccttacccggtatggtctggcagaaccgggacgtgtacctgcagggtcccatctgggccaagattcctcacacggacggcaacttccacccgtctccgctgatgggcggctttggcctgaaacatcctccgcctcagatcctgatcaagaacacgcctgtacctgcggatcctccgaccaccttcaaccagtcaaagctgaactctttcatcacgcaatacagcaccggacaggtcagcgtggaaattgaatgggagctgcagaaggaaaacagcaagcgctggaaccccgagatccagtacacctccaactactacaaatctacaagtgtggactttgctgttaatacagaaggcgtgtactctgaaccccgccccattggcacccgttacctcacccgtaatctgtaa

SEQ ID NO: 1643 - DNA, 2217 bp, Artificial Sequence
  Synthetic Polynucleotide
atggctgccgatggttatcttccagattggctcgaggacaacctctctgagggcattcgcgagtggtgggcgctgaaacctggagccccgaagcccaaagccaaccagcaaaagcaggacgacggccggggtctggtgcttcctggctacaagtacctcggacccttcaacggactcgacaagggggagcccgtcaacgcggcggacgcggcggccctcgagcacgacaaggcctacgaccagcagctgcaggcgggtgacaatccgtacctgcggtataaccacgccgacgccgagtttcaggagcgtctgcaagaagatacgtcttttgggggcaacctcgggcgagcagtcttccaggccaagaagcgggttctcgaacctctcggtctggttgaggaaggcgctaagacggctcctggaaagaagagaccggtagagccatcaccccagcgttctccagactcctctacgggcatcggcaagaagggccaacagcccgccagaaaaagactcaattttggtcagactggcgactcagagtcagttccagaccctcaacctctcggagaacctccagcagcgccctctggtgtgggacctaatacaatggctgcaggcggtggcgcaccaatggcagacaataacgaaggcgccgacggagtgggtagttcctcgggaaattggcattgcgattccacatggctgggcgacagagtcatcaccaccagcacccgaacctgggccctgcccacctacaacaaccacctctacaagcaaatctccaacgggacatcgggaggagccaccaacgacaacacctacttcggctacagcaccccctgggggtattttgactttaacagattccactgccacttttcaccacgtgactggcagcgactcatcaacaacaactggggattccggcccaagagactcagcttcaagctcttcaacatccaggtcaaggaggtcacgcagaatgaaggcaccaagaccatcgccaataacctcaccagcaccatccaggtgtttacggactcggagtaccagctgccgtacgttctcggctctgcccaccagggctgcctgcctccgttcccggcggacgtgttcacgattccccagtacggctacctaacactcaacaacggtagtcaggccgtgggacgctcctccttctactgcctggaatactttccttcgcagatgctgagaaccggcaacaacttccagtttacttacaccttcgaggacgtgcctttccacagcagctacgcccacagccagagcttggaccggctgatgaatcctctgattgaccagtacctgtactacttgtctcggattcaaacaacaggaggcacggcaaatacgcagactctgggcttcagccaaggtgggcctaatacaatggccaatcaggcaaagaactggctgccaggaccctgttaccgccaacaacgcgtctcaacgacaaccgggcaaaacaacaatagcaactttgcctggactgctgggaccaaataccatctgaatggaagaaattcattggctaatcctggcatcgctatggcaacacacaaagacgacgaggagcgtttttttcccagtaacgggatcctgatttttggcaaacaaaatgctgccagagacaatgcggattacagcgatgccatgcccaccagcgaggaagaaatcaaaaccactaaccctgtggccacagaggaatacggtatcgtggcagataacttgcagcagcaaaacacggctcctcaaattggaactgtcaacagccagggggccttacccggtatggtctggcagaaccgggacgtgtacctgcagggtcccatctgggccaagattcctcacacggacggcaacttccacccgtctccgctgatgggcggctttggcctgaaacatcctccgcctcagatcctgatcaagaacacgcctgtacctgcggatcctccgaccaccttcaaccagtcaaagctgaactctttcatcacgcaatacagcaccggacaggtcagcgtggaaattgaatgggagctgcagaaggaaaacagcaagcgctggaaccccgagatccagtacacctccaactactacaaatctacaagtgtggactttgctgttaatacagaaggcgtgtactctgaaccccgccccattggcacccgttacctcacccgtaatctgtaa

SEQ ID NO: 1644 - DNA, 2217 bp, Artificial Sequence
  Synthetic Polynucleotide
atggctgccgatggttatcttccagattggctcgaggacaacctctctgagggcattcgcgagtggtgggcgctgaaacctggagccccgaagcccaaagccaaccagcaaaagcaggacgacggccggggtctggtgcttcctggctacaagtacctcggacccttcaacggactcgacaagggggagcccgtcaacgcggcggacgcggcggccctcgagcacgacaaggcctacgaccagcagctgcaggcgggtgacaatccgtacctgcggtataaccacgccgacgccgagtttcaggagcgtctgcaagaagatacgtcttttgggggcaacctcgggcgagcagtcttccaggccaagaagcgggttctcgaacctctcggtctggttgaggaaggcgctaagacggctcctggaaagaagagaccggtagagccatcaccccagcgttctccagactcctctacgggcatcggcaagaagggccaacagcccgccagaaaaagactcaattttggtcagactggcgactcagagtcagttccagaccctcaacctctcggagaacctccagcagcgccctctggtgtgggacctaatacaatggctgcaggcggtggcgcaccaatggcagacaataacgaaggcgccgacggagtgggtagttcctcgggaaattggcattgcgattccacatggctgggcgacagagtcatcaccaccagcacccgaacctgggccctgcccacctacaacaaccacctctacaagcaaatctccaacgggacatcgggaggagccaccaacggcaacacctacttcggctacagcaccccctgggggtattttgactttaacagattccactgccacttttcaccacgtgactggcagcgactcatcaacaacaactggggattccggcccaagagactcagcttcaagctcttcaacatccaggtcaaggaggtcacgcagaatgaaggcaccaagaccatcgccaataacctcaccagcaccatccaggtgtttacggactcggagtaccagctgccgtacgttctcggctctgcccaccagggctgcctgcctccgttcccggcggacgtgttcacgattccccagtacggctacctaacactcaacaacggtagtcaggccgtgggacgctcctccttctactgcctggaatactttccttcgcagatgctgagaaccggcaacaacttccagtttacttacaccttcgaggacgtgcctttccacagcagctacgcccacagccagagcttggaccggctgatgaatcctctgattgaccagtacctgtactacttgtctcggattcaaacaacaggaggcacggcaaatacgcagactctgggcttcagccaaggtgggcctaatacaatggccaatcaggcaaagaactggctgccaggaccctgttaccgccaacaacgcgtctcaacgacaaccgggcaaaacaacaatagcaactttgcctggactgctgggaccaaataccatctgaatggaagaaattcattggctaatcctggcatcgctatggcaacacacaaagacgacgaggagcgtttttttcccagtaacgggatcctgatttttggcaaacaaaatgctgccagagacaatgcggattacagcgatgtcatgcccaccagcgaggaagaaatcaaaaccactaaccctgtggccacagaggaatacggtatcgtggcagataacttgcagcagcaaaacacggctcctcaaattggaactgtcaacagccagggggccttacccggtatggtctggcagaaccgggacgtgtacctgcagggtcccatctgggccaagattcctcacacggacggcaacttccacccgtctccgctgatgggcggctttggcctgaaacatcctccgcctcagatcctgatcaagaacacgcctgtacctgcggatcctccgaccaccttcaaccagtcaaagctgaactctttcatcacgcaatacagcaccggacaggtcagcgtggaaattgaatgggagctgcagaaggaaaacagcaagcgctggaaccccgagatccagtacacctccaactactacaaatctacaagtgtggactttgctgttaatacagaaggcgtgtactctgaaccccgccccattggcacccgttacctcacccgtaatctgtaa

SEQ ID NO: 1645 - DNA, 2217 bp, Artificial Sequence
  Synthetic Polynucleotide
atggctgccgatggttatcttccagattggctcgaggacaacctctctgagggcattcgcgagtggtgggcgctgaaacctggagccccgaagcccaaagccaaccagcaaaagcaggacgacggccggggtctggtgcttcctggctacaagtacctcggacccttcaacggactcgacaagggggagcccgtcaacgcggcggacgcggcggccctcgagcacgacaaggcctacgaccagcagctgcaggcgggtgacaatccgtacctgcggtataaccacgccgacgccgagtttcaggagcgtctgcaagaagatacgtcttttgggggcaacctcgggcgagcagtcttccaggccaagaagcgggttctcgaacctctcggtctggttgaggaaggcgctaagacggctcctggaaagaagagaccggtagagccatcaccccagcgttctccagactcctctacgggcatcggcaagaagggccaacagcccgccagaaaaagactcaattttggtcagactggcgactcagagtcagttccagaccctcaacctctcggagaacctccagcagcgccctctggtgtgggacctaatacaatggctgcaggcggtggcgcaccaatggcagacaataacgaaggcgccgacggagtgggtagttcctcgggaaattggcattgcgattccacatggctgggcgacagagtcatcaccaccagcacccgaacctgggccctgcccacctacaacaaccacctctacaagcaaatctccaacgggacatcgggaggagccaccaacgacaacacctacttcggctacagcaccccctgggggtattttgactttaacagattccactgccacttttcaccacgtgactggcagcgactcatcaacaacaactggggattccggcccaagagactcagcttcaagctcttcaacatccaggtcaaggaggtcgcgcagaatgaaggcaccaagaccatcgccaataacctcaccagcaccatccaggtgtttacggactcggagtaccagctgccgtacgttctcggctctgcccaccagggctgcctgcctccgttcccggcggacgtgttcacgattccccagtacggctacctaacactcaacaacggtagtcaggccgtgggacgctcctccttctactgcctggaatactttccttcgcagatgctgagaaccggcaacaacttccagtttacttacaccttcgaggacgtgcctttccacagcagctacgcccacagccagagcttggaccggctgatgaatcctctgattgaccagtacctgtactacttgtctcggattcaaacaacaggaggcacggcaaatacgcagactctgggcttcagccaaggtgggcctaatacaatggccaatcaggcaaagaactggctgccaggaccctgttaccgccaacaacgcgtctcaacgacaaccgggcaaaacaacaatagcaactttgcctggactgctgggaccaaataccatctgaatggaagaaattcattggctaatcctggcatcgctatggcaacacacaaagacgacgaggagcgtttttttcccagtaacgggatcctgatttttggcaaacaaaatgctgccagagacaatgcggattacagcgatgtcatgcccaccagcgaggaagaaatcaaaaccactaaccctgtggccacagaggaatacggtatcgtggcagataacttgcagcagcaaaacacggctcctcaaattggaactgtcaacagccagggggccttacccggtatggtctggcagaaccgggacgtgtacctgcagggtcccatctgggccaagattcctcacacggacggcaacttccacccgtctccgctgatgggcggctttggcctgaaacatcctccgcctcagatcctgatcaagaacacgcctgtacctgcggatcctccgaccaccttcaaccagtcaaagctgaactctttcatcacgcaatacagcaccggacaggtcagcgtggaaattgaatgggagctgcagaaggaaaacagcaagcgctggaaccccgagatccagtacacctccaactactacaaatctacaagtgtggactttgctgttaatacagaaggcgtgtactctgaaccccgccccattggcacccgttacctcacccgtaatctgtaa

SEQ ID NO: 1646 - DNA, 2217 bp, Artificial Sequence
  Synthetic Polynucleotide
atggctgccgatggttatcttccagattggctcgaggacaacctctctgagggcattcgcgagtggtgggcgctgaaacctggagccccgaagcccaaagccaaccagcaaaagcaggacgacggccggggtctggtgcttcctggctacaagtacctcggacccttcaacggactcgacaagggggagcccgtcaacgcggcggacgcggcggccctcgagcacgacaaggcctacgaccagcagctgcaggcgggtgacaatccgtacctgcggtataaccacgccgacgccgagtttcaggagcgtctgcaagaagatacgtcttttgggggcaacctcgggcgagcagtcttccaggccaagaagcgggttctcgaacctctcggtctggttgaggaaggcgctaagacggctcctggaaagaagagaccggtagagccatcaccccagcgttctccagactcctctacgggcatcggcaagaagggccaacagcccgccagaaaaagactcaattttggtcagactggcgactcagagtcagttccagaccctcaacctctcggagaacctccagcagcgccctctggtgtgggacctaatacaatggctgcaggcggtggcgcaccaatggcagacaataacgaaggcgccgacggagtgggtagttcctcgggaaattggcattgcgattccacatggctgggcgacagagtcatcaccaccagcacccgaacctgggccctgcccacctacaacaaccacctctacaagcaaatctccaacgggacatcgggaggagccaccaacgacaacacctacttcggctacagcaccccctgggggtattttgactttaacagattccactgccacttttcaccacgtgactggcagcgactcatcaacaacaactggggattccggcccaagagactcagcttcaagctcttcaacatccaggtcaaggaggtcacgcagaatgaaggcaccaagaccatcgccaataacctcaccagcaccatccaggtgtttacggactcggagtaccagctgccgtacgttctcggctctgcccaccagggctgcctgcctccgttcccggcggacgtgttcacgattccccagtacggctacctaacactcaacaacggtagtcaggccgtgggacgctcctccttctactgcctggaatactttccttcgcagatgctgagaaccggcaacaacttccagtttacttacaccttcgaggacgtgcctttccacagcagctacgcccacagccagagcttggaccggctgatgaatcctctgattgaccagtacctgtactacttgtctcggattcaaacaacaggaggcacggcaaatacgcagactctgggcttcagccaaggtgggcctaatacaatggccaatcaggcaaagaactggctgccaggaccctgttaccgccaacaacgcgtctcaacgacaaccgggcaaaacaacaatagcaactttgcctggactgctgggaccaaataccatctgaatggaagaaattcattggctaatcctggcatcgctatggcaacacacaaagacgacgaggagcgtttttttcccagtaacgggatcctgatttttggcaaacaaaatgctgccagagacaatgcggattacagcgatgtcatgcccaccagcgaggaagaaatcaaaaccactaaccctgtggccacagaggaatacggtatcgtggcagataacttgcagcagcaaaacacggctcctcaaattggaactgtcaacagccagggggccttacccggtatggtctggcagaaccgggacgtgtacctgcagggtcccatctgggccaagattcctcacacggacggcaacttccacccgtctccgctgatgggcggctttggcctgaaacatcctccgcctcagatcctgatcaagaacacgcctgtacctgcggatcctccgaccaccttcaaccagtcaaagctgaactctttcatcacgcaatacagcaccggacaggtcagcgcggaaattgaatgggagctgcagaaggaaaacagcaagcgctggaaccccgagatccagtacacctccaactactacaaatctacaagtgtggactttgctgttaatacagaaggcgtgtactctgaaccccgccccattggcacccgttacctcacccgtaatctgtaa

SEQ ID NO: 1647 - DNA, 2217 bp, Artificial Sequence
  Synthetic Polynucleotide
atggctgccgatggttatcttccagattggctcgaggacaacctctctgagggcattcgcgagtggtgggcgctgaaacctggagccccgaagcccaaagccaaccagcaaaagcaggacgacggccggggtctggtgcttcctggctacaagtacctcggacccttcaacggactcgacaagggggagcccgtcaacgcggcggacgcggcggccctcgagcacgacaaggcctacgaccagcagctgcaggcgggtgacaatccgtacctgcggtataaccacgccgacgccgagtttcaggagcgtctgcaagaagatacgtcttttgggggcaacctcgggcgagcagtcttccaggccaagaagcgggttctcgaacctctcggtctggttgaggaaggcgctaagacggctcctggaaagaagagaccggtagagccatcaccccagcgttctccagactcctctacgggcatcggcaagaagggccaacagcccgccagaaaaagactcaattttggtcagactggcgactcagagtcagttccagaccctcaacctctcggagaacctccagcagcgccctctggtgtgggacctaatacaatggctgcaggcggtggcgcaccaatggcagacaataacgaaggcgccgacggagtgggtagttcctcgggaaattggcattgcgattccacatggctgggcgacagagtcatcaccaccagcacccgaacctgggccctgcccacctacaacaaccacctctacaagcaaatctccaacgggacatcgggaggagccaccaacgacaacacctacttcggctacagcaccccctgggggtattttgactttaacagattccactgccacttttcaccacgtgactggcagcgactcatcaacaacaactggggattccggcccaagagactcagcttcaagctcttcaacatccaggtcaaggaggtcacgcagaatgaaggcaccaagaccatcgccaataacctcaccagcaccatccaggtgtttacggactcggagtaccagctgccgtacgttctcggctctgcccaccagggctgcctgcctccgttcccggcggacgtgttcacgattccccagtacggctacctaacactcaacaacggtagtcaggccgtgggacgctcctccttctactgcctggaatactttccttcgcagatgctgagaaccggcaacaacttccagtttacttacaccttcgaggacgtgcctttccacagcagctacgcccacagccagggcttggaccggctgatgaatcctctgattgaccagtacctgtactacttgtctcggattcaaacaacaggaggcacggcaaatacgcagactctgggcttcagccaaggtgggcctaatacaatggccaatcaggcaaagaactggctgccaggaccctgttaccgccaacaacgcgtctcaacgacaaccgggcaaaacaacaatagcaactttgcctggactgctgggaccaaataccatctgaatggaagaaattcattggctaatcctggcatcgctatggcaacacacaaagacgacgaggagcgtttttttcccagtaacgggatcctgatttttggcaaacaaaatgctgccagagacaatgcggattacagcgatgtcatgcccaccagcgaggaagaaatcaaaaccactaaccctgtggccacagaggaatacggtatcgtggcagataacttgcagcagcaaaacacggctcctcaaattggaactgtcaacagccagggggccttacccggtatggtctggcagaaccgggacgtgtacctgcagggtcccatctgggccaagattcctcacacggacggcaacttccacccgtctccgctgatgggcggctttggcctgaaacatcctccgcctcagatcctgatcaagaacacgcctgtacctgcggatcctccgaccaccttcaaccagtcaaagctgaactctttcatcacgcaatacagcaccggacaggtcagcgtggaaattgaatgggagctgcagaaggaaaacagcaagcgctggaaccccgagatccagtacacctccaactactacaaatctacaagtgtggactttgctgttaatacagaaggcgtgtactctgaaccccgccccattggcacccgttacctcacccgtaatctgtaa

SEQ ID NO: 1648 - DNA, 2217 bp, Artificial Sequence
  Synthetic Polynucleotide
atggctgccgatggttatcttccagattggctcgaggacaacctctctgagggcattcgcgagtggtgggcgctgaaacctggagccccgaagcccaaagccaaccagcaaaagcaggacgacggccggggtctggtgcttcctggctacaagtacctcggacccttcaacggactcgacaagggggagcccgtcaacgcggcggacgcggcggccctcgagcacgacaaggcctacgaccagcagctgcaggcgggtgacaatccgtacctgcggtataaccacgccgacgccgagtttcaggagcgtctgcaagaagatacgtcttttgggggcaacctcgggcgagcagtcttccaggccaagaagcgggttctcgaacctctcggtctggttgaggaaggcgctaagacggctcctggaaagaagagaccggtagagccatcaccccagcgttctccagactcctctacgggcatcggcaagaagggccaacagcccgccagaaaaagactcaattttggtcagactggcgactcagagtcagttccagaccctcaacctctcggagaacctccagcagcgccctctggtgtgggacctaatacaatggctgcaggcggtggcgcaccaatggcagacaataacgaaggcgccgacggagtgggtagttcctcgggaaattggcattgcgattccacatggctgggcgacagagtcatcaccaccagcacccgaacctgggccctgcccacctacaacaaccacctctacaagcaaatctccaacgggacatcgggaggagccaccaacgacaacacctacttcggctacagcaccccctgggggtattttgactttaacagattccactgccacttttcaccacgtgactggcagcgactcatcaacaacaactggggattccggcccaagagactcagcttcaagctcttcaacatccaggtcaaggaggtcacgcagaatgaaggcaccaagaccatcgccaataacctcaccagcaccatccaggtgtttacggactcggagtaccagctgccgtacgttctcggctctgcccaccagggctgcctgcctccgttcccggcggacgtgttcacgattccccagtacggctacctaacactcaacaacggtagtcaggccgtgggacgctcctccttctactgcctggaatactttccttcgcagatgctgagaaccggcagcaacttccagtttacttacaccttcgaggacgtgcctttccacagcagctacgcccacagccagagcttggaccggctgatgaatcctctgattgaccagtacctgtactacttgtctcggattcaaacaacaggaggcacggcaaatacgcagactctgggcttcagccaaggtgggcctaatacaatggccaatcaggcaaagaactggctgccaggaccctgttaccgccaacaacgcgtctcaacgacaaccgggcaaaacaacaatagcaactttgcctggactgctgggaccaaataccatctgaatggaagaaattcattggctaatcctggcatcgctatggcaacacacaaagacgacgaggagcgtttttttcccagtaacgggatcctgatttttggcaaacaaaatgctgccagagacaatgcggattacagcgatgtcatgcccaccagcgaggaagaaatcaaaaccactaaccctgtggccacagaggaatacggtatcgtggcagataacttgcagcagcaaaacacggctcctcaaattggaactgtcaacagccagggggccttacccggtatggtctggcagaaccgggacgtgtacctgcagggtcccatctgggccaagattcctcacacggacggcaacttccacccgtctccgctgatgggcggctttggcctgaaacatcctccgcctcagatcctgatcaagaacacgcctgtacctgcggatcctccgaccaccttcaaccagtcaaagctgaactctttcatcacgcaatacagcaccggacaggtcagcgtggaaattgaatgggagctgcagaaggaaaacagcaagcgctggaaccccgagatccagtacacctccaactactacaaatctacaagtgtggactttgctgttaatacagaaggcgtgtactctgaaccccgccccattggcacccgttacctcacccgtaatctgtaa

SEQ ID NO: 1649 - DNA, 2217 bp, Artificial Sequence
  Synthetic Polynucleotide
atggctgccgatggttatcttccagattggctcgaggacaacctctctgagggcattcgcgagtggtgggcgctgaaacctggagccccgaagcccaaagccaaccagcaaaagcaggacgacggccggggtctggtgcttcctggctacaagtacctcggacccttcaacggactcgacaagggggagcccgtcaacgcggcggacgcggcggccctcgagcacgacaaggcctacgaccagcagctgcaggcgggtgacaatccgtacctgcggtataaccacgccgacgccgagtttcaggagcgtctgcaagaagatacgtcttttgggggcaacctcgggcgagcagtcttccaggccaagaagcgggttctcgaacctctcggtctggttgaggaaggcgctaagacggctcctggaaagaagagaccggtagagccatcaccccagcgttctccagactcctctacgggcatcggcaagaagggccaacagcccgccagaaaaagactcaattttggtcagactggcgactcagagtcagttccagaccctcaacctctcggagaacctccagcagcgccctctggtgtgggacctaatacaatggctgcaggcggtggcgcaccaatggcagacaataacgaaggcgccgacggagtgggtagttcctcgggaaattggcattgcgattccacatggctgggcgacagagtcatcaccaccagcacccgaacctgggccctgcccacctacaacaaccacctctacaagcaaatctccaacgggacatcgggaggagccaccaacgacaacacctacttcggctacagcaccccctgggggtattttgactttaacagattccactgccacttttcaccacgtgactggcagcgactcatcaacaacaactggggattccggcccaagagactcagcttcaagctcttcaacatccaggtcaaggaggtcacgcagaatgaaggcaccaagaccatcgccaataacctcaccagcaccatccaggtgtttacggactcggagtaccagctgccgtacgttctcggctctgcccaccagggctgcctgcctccgttcccggcggacgtgttcacgattccccagtacggctacctaacactcaacaacggtagtcaggccgtgggacgctcctccttctactgcctggaatactttccttcgcagatgctgagaaccggcaacaacttccagtttacttacaccttcgaggacgtgcctttccacagcagctacgcccacagccagagcttggaccggctgatgaatcctctgattgaccagtacctgtactacttgtctcggattcaaacaacaggaggcacggcaaatacgcagactctgggcttcagccaaggtgggcctaatacaatggccaatcaggcaaagaactggctgccaggaccctgttaccgccaacaacgcgtctcaacgacaaccgggcaaaacaacaatagcaactttgcctggactgctgggaccaaataccatctgaatggaagaaattcattggctaatcctggcatcgctatggcaacacacaaagacgacgaggagcgtttttttcccagtaacgggatcctgatttttggcaaacaaaatgctgccagagacaatgcggattacagcgatgtcatgcccaccagcgaggaagaaatcaaaaccactaaccctgtggccacagaggaatacggtatcgtggcagataacttgcagcagcaaaacacggctcctcaaattggaactgtcaacagccagggggccttacccggtatggtctggcagaaccgggacgtgtacctgcagggtcccatctgggccaagattcctcacacggacggcaacttccacccgtctccgctgatgggcggctttggcctgaaacatcctccgcctcagatcctgatcaagaacacgcctgtacctgcggatcctccgaccaccttcaaccagtcaaagctgaactctttcatcacgcaatacagcaccggacaggtcagcgtggaaattgaatgggagctgcggaaggaaaacagcaagcgctggaaccccgagatccagtacacctccaactactacaaatctacaagtgtggactttgctgttaatacagaaggcgtgtactctgaaccccgccccattggcacccgttacctcacccgtaatctgtaa

SEQ ID NO: 1650 - DNA, 2217 bp, Artificial Sequence
  Synthetic Polynucleotide
atggctgccgatggttatcttccagattggctcgaggacaacctctctgagggcattcgcgagtggtgggcgctgaaacctggagccccgaagcccaaagccaaccagcaaaagcaggacgacggccggggtctggtgcttcctggctacaagtacctcggacccttcaacggactcgacaagggggagcccgtcaacgcggcggacgcggcggccctcgagcacgacaaggcctacgaccagcagctgcaggcgggtgacaatccgtacctgcggtataaccacgccgacgccgagtttcaggagcgtctgcaagaagatacgtcttttgggggcaacctcgggcgagcagtcttccaggccaagaagcgggttctcgaacctctcggtctggttgaggaaggcgctaagacggctcctggaaagaagagaccggtagagccatcaccccagcgttctccagactcctctacgggcatcggcaagaagggccaacagcccgccagaaaaagactcaattttggtcagactggcgactcagagtcagttccagaccctcaacctctcggagaacctccagcagcgccctctggtgtgggacctaatacaatggctgcaggcggtggcgcaccaatggcagacaataacgaaggcgccgacggagtgggtagttcctcgggaaattggcattgcgattccacatggctgggcgacagagtcatcaccaccagcacccgaacctgggccctgcccacctacaacaaccacctctacaagcaaatctccaacgggacatcgggaggagccaccaacgacaacacctacttcggctacagcaccccctgggggtattttgactttaacagattccactgccacttttcaccacgtgactggcagcgactcatcaacaacaactggggattccggcccaagagactcagcttcaagctcttcaacatccaggtcaaggaggtcacgcagaatgaaggcaccaagaccatcgccaataacctcaccagcaccatccaggtgtttacggactcggagtaccagctgccgtacgttctcggctctgcccaccagggctgcctgcctccgttcccggcggacgtgttcacgattccccagtacggctacctaacactcaacaacggtagtcaggccgtgggacgctcctccttctactgcctggaatactttccttcgcagatgctgagaaccggcaacaacttccagtttacttacaccttcgaggacgcgcctttccacagcagctacgcccacagccagagcttggaccggctgatgaatcctctgattgaccagtacctgtactacttgtctcggattcaaacaacaggaggcacggcaaatacgcagactctgggcttcagccaaggtgggcctaatacaatggccaatcaggcaaagaactggctgccaggaccctgttaccgccaacaacgcgtctcaacgacaaccgggcaaaacaacaatagcaactttgcctggactgctgggaccaaataccatctgaatggaagaaattcattggctaatcctggcatcgctatggcaacacacaaagacgacgaggagcgtttttttcccagtaacgggatcctgatttttggcaaacaaaatgctgccagagacaatgcggattacagcgatgtcatgcccaccagcgaggaagaaatcaaaaccactaaccctgtggccacagaggaatacggtatcgtggcagataacttgcagcagcaaaacacggctcctcaaattggaactgtcaacagccagggggccttacccggtatggtctggcagaaccgggacgtgtacctgcagggtcccatctgggccaagattcctcacacggacggcaacttccacccgtctccgctgatgggcggctttggcctgaaacatcctccgcctcagatcctgatcaagaacacgcctgtacctgcggatcctccgaccaccttcaaccagtcaaagctgaactctttcatcacgcaatacagcaccggacaggtcagcgtggaaattgaatgggagctgcagaaggaaaacagcaagcgctggaaccccgagatccagtacacctccaactactacaaatctacaagtgtggactttgctgttaatacagaaggcgtgtactctgaaccccgccccattggcacccgttacctcacccgtaatctgtaa

SEQ ID NO: 1651 - DNA, 2217 bp, Artificial Sequence
  Synthetic Polynucleotide
atggctgccgatggttatcttccagattggctcgaggacaacctctctgagggcattcgcgagtggtgggcgctgaaacctggagccccgaagcccaaagccaaccagcaaaagcaggacgacggccggggtctggtgcttcctggctacaagtacctcggacccttcaacggactcgacaagggggagcccgtcaacgcggcggacgcggcggccctcgagcacgacaaggcctacgaccagcagctgcaggcgggtgacaatccgtacctgcggtataaccacgccgacgccgagtttcaggagcgtctgcaagaagatacgtcttttgggggcaacctcgggcgagcagtcttccaggccaagaagcgggttctcgaacctctcggtctggttgaggaaggcgctaagacggctcctggaaagaagagaccggtagagccatcaccccagcgttctccagactcctctacgggcatcggcaagaagggccaacagcccgccagaaaaagactcaattttggtcagactggcgactcagagtcagttccagaccctcaacctctcggagaacctccagcagcgccctctggtgtgggacctaatacaatggctgcaggcggtggcgcaccaatggcagacaataacgaaggcgccgacggagtgggtagttcctcgggaaattggcattgcgattccacatggctgggcgacagagtcatcaccgccagcacccgaacctgggccctgcccacctacaacaaccacctctacaagcaaatctccaacgggacatcgggaggagccaccaacgacaacacctacttcggctacagcaccccctgggggtattttgactttaacagattccactgccacttttcaccacgtgactggcagcgactcatcaacaacaactggggattccggcccaagagactcagcttcaagctcttcaacatccaggtcaaggaggtcacgcagaatgaaggcaccaagaccatcgccaataacctcaccagcaccatccaggtgtttacggactcggagtaccagctgccgtacgttctcggctctgcccaccagggctgcctgcctccgttcccggcggacgtgttcacgattccccagtacggctacctaacactcaacaacggtagtcaggccgtgggacgctcctccttctactgcctggaatactttccttcgcagatgctgagaaccggcaacaacttccagtttacttacaccttcgaggacgtgcctttccacagcagctacgcccacagccagagcttggaccggctgatgaatcctctgattgaccagtacctgtactacttgtctcggattcaaacaacaggaggcacggcaaatacgcagactctgggcttcagccaaggtgggcctaatacaatggccaatcaggcaaagaactggctgccaggaccctgttaccgccaacaacgcgtctcaacgacaaccgggcaaaacaacaatagcaactttgcctggactgctgggaccaaataccatctgaatggaagaaattcattggctaatcctggcatcgctatggcaacacacaaagacgacgaggagcgtttttttcccagtaacgggatcctgatttttggcaaacaaaatgctgccagagacaatgcggattacagcgatgtcatgcccaccagcgaggaagaaatcaaaaccactaaccctgtggccacagaggaatacggtatcgtggcagataacttgcagcagcaaaacacggctcctcaaattggaactgtcaacagccagggggccttacccggtatggtctggcagaaccgggacgtgtacctgcagggtcccatctgggccaagattcctcacacggacggcaacttccacccgtctccgctgatgggcggctttggcctgaaacatcctccgcctcagatcctgatcaagaacacgcctgtacctgcggatcctccgaccaccttcaaccagtcaaagctgaactctttcatcacgcaatacagcaccggacaggtcagcgtggaaattgaatgggagctgcagaaggaaaacagcaagcgctggaaccccgagatccagtacacctccaactactacaaatctacaagtgtggactttgctgttaatacagaaggcgtgtactctgaaccccgccccattggcacccgttacctcacccgtaatctgtaa

SEQ ID NO: 1652 - DNA, 2217 bp, Artificial Sequence
  Synthetic Polynucleotide
atggctgccgatggttatcttccagattggctcgaggacaacctctctgagggcattcgcgagtggtgggcgctgaaacctggagccccgaagcccaaagccaaccagcaaaagcaggacgacggccggggtctggtgcttcctggctacaagtacctcggacccttcaacggactcgacaagggggagcccgtcaacgcggcggacgcggcggccctcgagcacgacaaggcctacgaccagcagctgcaggcgggtgacaatccgtacctgcggtataaccacgccgacgccgagtttcaggagcgtctgcaagaagatacgtcttttgggggcaacctcgggcgagcagtcttccaggccaagaagcgggttctcgaacctctcggtctggttgaggaaggcgctaagacggctcctggaaagaagagaccggtagagccatcaccccagcgttctccagactcctctacgggcatcggcaagaagggccaacagcccgccagaaaaagactcaattttggtcagactggcgactcagagtcagttccagaccctcaacctctcggagaacctccagcagcgccctctggtgtgggacctaatacaatggctgcaggcggtggcgcaccaatggcagacaataacgaaggcgccgacggagtgggtagttcctcgggaaattggcattgcgattccacatggctgggcgacagagtcatcaccaccagcacccgaacctgggccctgcccacctacaacaaccacctctacaagcaaatctccaacgggacatcgggaggagccaccaacgacaacacctacttcggctacagcaccccctgggggtattttgactttaacagattccactgccacttttcaccacgtgactggcagcgactcatcaacaacaactggggattccggcccaagagactcagcttcaagctcttcaacatccaggtcaaggaggtcacgcagaatgaaggcaccaagaccatcgccaataacctcaccagcaccatccaggtgtttacggactcggagtaccagctgccgtacgttctcggctctgcccaccagggctgcctgcctccgttcccggcggacgtgttcacgattccccagtacggctacctaacactcaacaacggtagtcaggccgtgggacgctcctccttctactgcctggaatactttccttcgcagatgctgagaaccggcaacaacttccagtttacttacaccttcgaggacgtgcctttccacagcagctacgcccacagccagagcttggaccggctgatgaatcctctgattgaccagtacctgtactacttgtctcggattcaaacaacaggaggcacggcaaatacgcagactctgggcttcagccaaggtgggcctaatacaatggccaatcaggcaaagaactggctgccaggaccctgttaccgccaacaacgcgtctcaacgacaaccgggcaaaacaacaatagcaactttgcctggactgctgggaccaaataccatctgaatggaagaaattcattggctaatcctggcatcgctatggcaacacacaaagacgacgaggagcgtttttttcccagtaacgggatcctgatttttggcaaacaaaatgctgccagagacaatgcggattacagcgatgtcatgcccaccagcgaggaagaaatcaaaaccactaaccctgtggccacagaggaatacggtatcgtggcagataacttgcagcagcaaaacacggctcctcaaattggaactgtcaacagccagggggccttacccggtatggtctggcagaaccgggacgtgtacctgcagggtcccatctgggccaagattcctcacacggacggcaacttccacccgtctccgctgatgggcggctttggcctgaaacatcctccgcctcagatcctgatcaagaacacgcctgtacctgcggatcctccgaccaccttcaaccagtcaaagctgaactctttcatcacgcaatacagcaccggacaggtcagcgtggaaattgaatgggagctgcagaaggaaaacagcaagcgccggaaccccgagatccagtacacctccaactactacaaatctacaagtgtggactttgctgttaatacagaaggcgtgtactctgaaccccgccccattggcacccgttacctcacccgtaatctgtaa

SEQ ID NO: 1653 - DNA, 2217 bp, Artificial Sequence
  Synthetic Polynucleotide
atggctgccgatggttatcttccagattggctcgaggacaacctctctgagggcattcgcgagtggtgggcgctgaaacctggagccccgaagcccaaagccaaccagcaaaagcaggacgacggccggggtctggtgcttcctggctacaagtacctcggacccttcaacggactcgacaagggggagcccgtcaacgcggcggacgcggcggccctcgagcacgacaaggcctacgaccagcagctgcaggcgggtgacaatccgtacctgcggtataaccacgccgacgccgagtttcaggagcgtctgcaagaagatacgtcttttgggggcaacctcgggcgagcagtcttccaggccaagaagcgggttctcgaacctctcggtctggttgaggaaggcgctaagacggctcctggaaagaagagaccggtagagccatcaccccagcgttctccagactcctctacgggcatcggcaagaagggccaacagcccgccagaaaaagactcaattttggtcagactggcgactcagagccagttccagaccctcaacctctcggagaacctccagcagcgccctctggtgtgggacctaatacaatggctgcaggcggtggcgcaccaatggcagacaataacgaaggcgccgacggagtgggtagttcctcgggaaattggcattgcgattccacatggctgggcgacagagtcatcaccaccagcacccgaacctgggccctgcccacctacaacaaccacctctacaagcaaatctccaacgggacatcgggaggagccaccaacgacaacacctacttcggctacagcaccccctgggggtattttgactttaacagattccactgccacttttcaccacgtgactggcagcgactcatcaacaacaactggggattccggcccaagagactcagcttcaagctcttcaacatccaggtcaaggaggtcacgcagaatgaaggcaccaagaccatcgccaataacctcaccagcaccatccaggtgtttacggactcggagtaccagctgccgtacgttctcggctctgcccaccagggctgcctgcctccgttcccggcggacgtgttcacgattccccagtacggctacctaacactcaacaacggtagtcaggccgtgggacgctcctccttctactgcctggaatactttccttcgcagatgctgagaaccggcaacaacttccagtttacttacaccttcgaggacgtgcctttccacagcagctacgcccacagccagagcttggaccggctgatgaatcctctgattgaccagtacctgtactacttgtctcggattcaaacaacaggaggcacggcaaatacgcagactctgggcttcagccaaggtgggcctaatacaatggccaatcaggcaaagaactggctgccaggaccctgttaccgccaacaacgcgtctcaacgacaaccgggcaaaacaacaatagcaactttgcctggactgctgggaccaaataccatctgaatggaagaaattcattggctaatcctggcatcgctatggcaacacacaaagacgacgaggagcgtttttttcccagtaacgggatcctgatttttggcaaacaaaatgctgccagagacaatgcggattacagcgatgtcatgcccaccagcgaggaagaaatcaaaaccactaaccctgtggccacagaggaatacggtatcgtggcagataacttgcagcagcaaaacacggctcctcaaattggaactgtcaacagccagggggccttacccggtatggtctggcagaaccgggacgtgtacctgcagggtcccatctgggccaagattcctcacacggacggcaacttccacccgtctccgctgatgggcggctttggcctgaaacatcctccgcctcagatcctgatcaagaacacgcctgtacctgcggatcctccgaccaccttcaaccagtcaaagctgaactctttcatcacgcaatacagcaccggacaggtcagcgtggaaattgaatgggagctgcagaaggaaaacagcaagcgctggaaccccgagatccagtacacctccaactactacaaatctacaagtgtggactttgctgttaatacagaaggcgtgtactctgaaccccgccccattggcacccgttacctcacccgtaatctgtaa

SEQ ID NO: 1654 - DNA, 2217 bp, Artificial Sequence
  Synthetic Polynucleotide
atggctgccgatggttatcttccagattggctcgaggacaacctctctgagggcattcgcgagtggtgggcgctgaaacctggagccccgaagcccaaagccaaccagcaaaagcaggacgacggccggggtctggtgcttcctggctacaagtacctcggacccttcaacggactcgacaagggggagcccgtcaacgcggcggacgcggcggccctcgagcacgacaaggcctacgaccagcagctgcaggcgggtgacaatccgtacctgcggtataaccacgccgacgccgagtttcaggagcgtctgcaagaagatacgtcttttgggggcaacctcgggcgagcagtcttccaggccaagaagcgggttctcgaacctctcggtctggttgaggaaggcgctaagacggctcctggaaagaagagaccggtagagccatcaccccagcgttctccagactcctctacgggcatcggcaagaagggccaacagcccgccagaaaaagactcaattttggtcagactggcgactcagagtcagttccagaccctcaacctctcggagaacctccagcagcgccctctggtgtgggacctaatacaatggctgcaggcggtggcgcaccaatggcagacaataacgaaggcgccgacggagtgggtagttcctcgggaaattggcattgcgattccacatggctgggcgacagagtcatcaccaccagcacccgaacctgggccctgcccacctacaacaaccacctctacaagcaaatctccaacgggacatcgggaggagccaccaacgacaacacctacttcggctacagcaccccctgggggtattttgactttaacagattccactgccacttttcaccacgtgactggcagcgactcatcaacaacaactggggattccggcccaagagactcagcttcaagctcttcaacatccaggtcaaggaggtcacgcagaatgaaggcaccaagaccatcgccaataacctcaccagcaccatccaggtgtttacggactcggagtaccagctgccgtacgttctcggctctgcccaccagggctgcctgcctccgttcccggcggacgtgttcacgattccccagtacggctacctaacactcaacaacggtagtcaggccgtgggacgctcctccttctactgcctggaatactttccttcgcagatgctgagaaccggcaacaacttccagtttacttacaccttcgaggacgtgcctttccacagcagctacgcccacagccagagcttggaccggctgatgaatcctctgattgaccagtacctgtactacttgtctcggattcaaacaacaggaggcacggcaaatacgcagactctgggcttcagccaaggtgggcctaatacaatggccaatcaggcaaagaactggctgccaggaccctgttaccgccaacaacgcgtctcaacgacaaccgggcaaaacaacaatagcaactttgcctggactgctgggaccaaataccatctgaatggaagaaattcattggctaatcctggcatcgctatggcaacacacaaagacgacgaggagcgtttttttcccagtaacgggatcccgatttttggcaaacaaaatgctgccagagacaatgcggattacagcgatgtcatgcccaccagcgaggaagaaatcaaaaccactaaccctgtggccacagaggaatacggtatcgtggcagataacttgcagcagcaaaacacggctcctcaaattggaactgtcaacagccagggggccttacccggtatggtctggcagaaccgggacgtgtacctgcagggtcccatctgggccaagattcctcacacggacggcaacttccacccgtctccgctgatgggcggctttggcctgaaacatcctccgcctcagatcctgatcaagaacacgcctgtacctgcggatcctccgaccaccttcaaccagtcaaagctgaactctttcatcacgcaatacagcaccggacaggtcagcgtggaaattgaatgggagctgcagaaggaaaacagcaagcgctggaaccccgagatccagtacacctccaactactacaaatctacaagtgtggactttgctgttaatacagaaggcgtgtactctgaaccccgccccattggcacccgttacctcacccgtaatctgtaa

SEQ ID NO: 1655 - DNA, 2217 bp, Artificial Sequence
  Synthetic Polynucleotide
atggctgccgatggttatcttccagattggctcgaggacaacctctctgagggcattcgcgagtggtgggcgctgaaacctggagccccgaagcccaaagccaaccagcaaaagcaggacgacggccggggtctggtgcttcctggctacaagtacctcggacccttcaacggactcgacaagggggagcccgtcaacgcggcggacgcggcggccctcgagcacgacaaggcctacgaccagcagctgcaggcgggtgacaatccgtacctgcggtataaccacgccgacgccgagtttcaggagcgtctgcaagaagatacgtcttttgggggcaacctcgggcgagcagtcttccaggccaagaagcgggttctcgaacctctcggtctggttgaggaaggcgctaagacggctcctggaaagaagagaccggtagagccatcaccccagcgttctccagactcctctacgggcatcggcaagaagggccaacagcccgccagaaaaagactcaattttggtcagactggcgactcagagtcagttccagaccctcaacctctcggagaacctccagcagcgccctctggtgtgggacctaatacaatggctgcaggcggtggcgcaccaatggcagacaataacgaaggcgccgacggagtgggtagttcctcgggaaattggcattgcgattccacatggctgggcgacagagtcatcaccaccagcacccgaacctgggccctgcccacctacaacaaccacctctacaagcaaatctccaacgggacatcgggaggagccaccaacgacaacacctacttcggctacagcaccccctgggggtattttgactttaacagattccactgccacttttcaccacgtgactggcagcgactcatcaacaacaactggggattccggcccaagagactcagcttcaagctcttcaacatccaggtcaaggaggtcacgcagaatgaaggcaccaagaccatcgccaataacctcaccagcaccatccaggtgtttacggactcggagtaccagctgccgtacgttctcggctctgcccaccagggctgcctgcctccgttcccggcggacgtgttcacgattccccagtacggctacctaacactcaacaacggtagtcaggccgtgggacgctcctccttctactgcctggaatactttccttcgcagatgctgagaaccggcaacaacttccagtttacttacaccttcgaggacgtgcctttccacagcagctacgcccacagccagagcttggaccggctgatgaatcctctgattgaccagtacctgtactacttgtctcggattcaaacaacaggaggcacggcaaatacgcagactctgggcttcagccaaggtgggcctaatacaatggccaatcaggcaaagaactggctgccaggaccctgttaccgccaacaacgcgtctcaacgacaaccgggcaaaacaacaatagcaactttgcctggactgctgggaccaaataccatctgaatggaagaaattcattggctaatcctggcatcgctatggcaacacacaaagacgacgaggagcgtttttttcccagtaacgggatcctgatttttggcaaacaaaatgctgccagagacaatgcggattacagcgatgtcatgcccaccagcgaggaagaaatcaaaaccactaaccctgtggccacagaggaatacggtatcgtggcagataacttgcagcagcaaaacacggctcctcaaattggaactgtcaacagccagggggccttacccggtatggtctggcagaaccgggacgtgtacctgcagggtcccatctgggccaagattcctcacacggacggcaacttccacccgtctccgctgatgggcggctttggcctgaaacatcctccgcctcagatcctgatcaagaacacgcctgtacctgcggatcctccgaccaccttcaaccagtcaaagctgaactctttcatcacgcaatacagcaccggacaggtcagcgtggaaattgaatgggagctgcagaaggaaaacagcaagcgctggaaccccgagatccagcacacctccaactactacaaatctacaagtgtggactttgctgttaatacagaaggcgtgtactctgaaccccgccccattggcacccgttacctcacccgtaatctgtaa

SEQ ID NO: 1656 - DNA, 2217 bp, Artificial Sequence
  Synthetic Polynucleotide
atggctgccgatggttatcttccagattggctcgaggacaacctctctgagggcattcgcgagtggtgggcgctgaaacctggagccccgaagcccaaagccaaccagcaaaagcaggacgacggccggggtctggtgcttcctggctacaagtacctcggacccttcaacggactcgacaagggggagcccgtcaacgcggcggacgcggcggccctcgagcacgacaaggcctacgaccagcagctgcaggcgggtgacaatccgtacctgcggtataaccacgccgacgccgagtttcaggagcgtctgcaagaagatacgtcttttgggggcaacctcgggcgagcagtcttccaggccaagaagcgggttctcgaacctctcggtctggttgaggaaggcgctaagacggctcctggaaagaagagaccggtagagccatcaccccagcgttctccagactcctctacgggcatcggcaagaagggccaacagcccgccagaaaaagactcaattttggtcagactggcgactcagagtcagttccagaccctcaacctctcggagaacctccagcagcgccctctggtgtgggacctaatacaatggctgcaggcggtggcgcaccaatggcagacaataacgaaggcgccgacggagtgggtagttcctcgggaaattggcattgcgattccacatggctgggcgacagagtcatcaccaccagcacccgaacctgggccctgcccacctacaacaaccacctctacaagcaaatctccaacgggacatcgggaggagccaccaacgacaacacctacttcggctacagcaccccctgggggtattttgactttaacagattccactgccacttttcaccacgtgactggcagcgactcatcaacaacaactggggattccggcccaagagactcagcttcaagctcttcaacatccaggtcaaggaggtcacgcagaatgaaggcaccaagaccatcgccaataacctcaccagcaccatccaggtgtttacggactcggagtaccagctgccgtacgttctcggctctgcccaccagggctgcctgcctccgttcccggcggacgtgttcacgattccccagtacggctacctaacactcaacaacggtagtcaggccgtgggacgctcctccttctactgcctggaatactttccttcgcagatgctgagaaccggcaacaacttccagtttacttacaccttcgaggacgtgcctttccacagcagctacgcccacagccagagcttggaccggctgatgaatcctctgattgaccagtacctgtactacttgtctcggattcaaacaacaggaggcacggcaaatacgcagactctgggcttcagccaaggtgggcctaatacaatggccaatcaggcaaagaactggctgccaggaccctgttaccgccaacaacgcgtctcaacgacaaccgggcaaaacaacaatagcaactttgcctggactgctgggaccaaataccatctgaatggaagaaattcattggctaatcctggcatcgctatggcaacacacaaagacgacgaggagcgtttttttcccagtaacgggatcctgatttttggcaaacaaaatgctgccagagacaatgcggattacagcgatgtcatgcccaccagcgaggaagaaatcaaaaccactaaccctgtggccacagaggaatacggtatcgtggcagataacttgcagcagcaaaacacggctcctcaaattggaactgtcaacagccagggggccttacccggtatggtctggcagaaccgggacgtgtacctgcagggtcccatctgggccaagattcctcacacggacggcaacttccacccgtctccgctgatgggcggctttggcctgaaacatcctccgcctcagatcctgatcaagaacacgcctgtacctgcggatcctccgaccaccttcaaccagtcaaagctgaaccctttcatcacgcaatacagcaccggacaggtcagcgtggaaattgaatgggagctgcagaaggaaaacagcaagcgctggaaccccgagatccagtacacctccaactactacaaatctacaagtgtggactttgctgttaatacagaaggcgtgtactctgaaccccgccccattggcacccgttacctcacccgtaatctgtaa

SEQ ID NO: 1657 - DNA, 2217 bp, Artificial Sequence
  Synthetic Polynucleotide
atggctgccgatggttatcttccagattggctcgaggacaacctctctgagggcattcgcgagtggtgggcgctgaaacctggagccccgaagcccaaagccaaccagcaaaagcaggacgacggccggggtctggtgcttcctggctacaagtacctcggacccttcaacggactcgacaagggggagcccgtcaacgcggcggacgcggcggccctcgagcacgacaaggcctacgaccagcagctgcaggcgggtgacaatccgtacctgcggtataaccacgccgacgccgagtttcaggagcgtctgcaagaagatacgtcttttgggggcaacctcgggcgagcagtcttccaggccaagaagcgggttctcgaacctctcggtctggttgaggaaggcgctaagacggctcctggaaagaagagaccggtagagccatcaccccagcgttctccagactcctctacgggcatcggcaagaagggccaacagcccgccagaaaaagactcaattttggtcagactggcgactcagagtcagttccagaccctcaacctctcggagaacctccagcagcgccctctggtgtgggacctaatacaatggctgcaggcggtggcgcaccaatggcagacaataacgaaggcgccgacggagtgggtagttcctcgggaaattggcattgcgattccacatggctgggcgacagagtcatcaccaccagcacccgaacctgggccctgcccacctacaacaaccacctctacaagcaaatctccaacgggacatcgggaggagccaccaacgacaacacctacttcggctacagcaccccctgggggtattttgactttaacagattccactgccacttttcaccacgtgactggcagcgactcatcaacaacaactggggattccggcccaagagactcagcttcaagctcttcaacatccaggtcaaggaggtcacgcagaatgaaggcaccaagaccatcgccaataacctcaccagcaccatccaggtgtttacggactcggagtaccagctgccgtacgttctcggctctgcccaccagggctgcctgcctccgttcccggcggacgtgttcacgattccccagtacggctacctaacactcaacaacggtagtcaggccgtgggacgctcctccttctactgcctggaatactttccttcgcagatgctgagaaccggcaacaacttccagtttacttacaccttcgaggacgtgcctttccacagcagctacgcccacagccagagcttggaccggctgatgaatcctctgattgaccagtacctgtactacttgtctcggattcaaacaacaggaggcacggcaaatacgcagactctgggcttcagccaaggtgggcctaatacaatggccaatcaggcaaagaactggctgccaggaccctgttaccgccaacaacgcgtctcaacgacaaccgggcaaaacaacaatagcaactttgcctggactgctgggaccaaataccatctgaatggaagaaattcattggctaatcctggcatcgctatggcaacacacaaagacgacgaggagcgtttttttcccagtaacgggatcctgatttttggcaaacaaaatgctgccagagacaatgcggattacagcgatgtcatgcccaccagcgaggaagaaatcaaaaccactaaccctgtggccacagaggaatacggtatcgtggcagataacttgcagcagcaaaacacggctcctcaaattggaactgtcaacagccagggggccttacccggtatggtctggcagaaccgggacgtgtacctgcagggtcccatctgggccaagattcctcacacggacggcaacttccgcccgtctccgctgatgggcggctttggcctgaaacatcctccgcctcagatcctgatcaagaacacgcctgtacctgcggatcctccgaccaccttcaaccagtcaaagctgaactctttcatcacgcaatacagcaccggacaggtcagcgtggaaattgaatgggagctgcagaaggaaaacagcaagcgctggaaccccgagatccagtacacctccaactactacaaatctacaagtgtggactttgctgttaatacagaaggcgtgtactctgaaccccgccccattggcacccgttacctcacccgtaatctgtaa

SEQ ID NO: 1658 - DNA, 2217 bp, Artificial Sequence
  Synthetic Polynucleotide
atggctgccgatggttatcttccagattggctcgaggacaacctctctgagggcattcgcgagtggtgggcgctgaaacctggagccccgaagcccaaagccaaccagcaaaagcaggacgacggccggggtctggtgcttcctggctacaagtacctcggacccttcaacggactcgacaagggggagcccgtcaacgcggcggacgcggcggccctcgagcacgacaaggcctacgaccagcagctgcaggcgggtgacaatccgtacctgcggtataaccacgccgacgccgagtttcaggagcgtctgcaagaagatacgtcttttgggggcaacctcgggcgagcagtcttccaggccaagaagcgggttctcgaacctctcggtctggttgaggaaggcgctaagacggctcctggaaagaagagaccggtagagccatcaccccagcgttctccagactcctctacgggcatcggcaagaagggccaacagcccgccagaaaaagactcaattttggtcagactggcgactcagagtcagttccagaccctcaacctctcggagaacctccagcagcgccctctggtgtgggacctaatacaatggctgcaggcggtggcgcaccaatggcagacaataacgaaggcgccgacggagtgggtagttcctcgggaaattggcattgcgattccacatggctgggcgacagagtcatcaccaccagcacccgaacctgggccctgcccacctacaacaaccacctctacaagcaaatctccaacgggacatcgggaggagccaccaacgacaacacctacttcggctacagcaccccctgggggtattttgactttaacagattccactgccacttttcaccacgtgactggcagcgactcatcaacaacaactggggattccggcccaagagactcagcttcaagctcttcaacatccaggtcaaggaggtcacgcagaatgaaggcaccaagaccatcgccaataacctcaccagcaccatccaggtgtttacggactcggagtaccagctgccgtacgttctcggctctgcccaccagggctgcctgcctccgttcccggcggacgtgttcacgattccccagtacggctacctaacactcaacaacggtagtcaggccgtgggacgctcctccttctactgcctggaatactttccttcgcagatgctgagaaccggcaacaacttccagtttacttacaccttcgaggacgtgcctttccacagcagctacgcccacagccagagcttggaccggctgatgaatcctctgattgaccagtacctgtactacttgtctcggattcaaacaacaggaggcacggcaaatacgcagactctgggcttcagccaaggtgggcctaatacaatggccaatcaggcaaagaactggctgccaggaccctgttaccgccaacaacgcgtctcaacgacaaccgggcaaaacaacaatagcaactttgcctggactgctgggaccaaataccatctgaatggaagaaattcattggctaatcctggcatcgctatggcaacacacaaagacgacgaggagcgtttttttcccagtaacgggatcctgatttttggcaaacaaaatgctgccagagacaatgcggattacagcgatgtcatgcccaccagcgaggaagaaatcaaaaccactaaccctgtggccacagaggaatacggtatcgtggcagataacttgcagcagcaaaacacggctcctcaaattggaactgtcaacagccagggggccttacccggtatggtctggcagaaccgggacgtgtacctgcagggtcccatctgggccaagattcctcacacggacggcaacttccacccgtctccgctgatgggcggctttggcctgaaacatcctccgcctcagatcctgatcaagaacacgcctgtacctgcggatcctccgaccaccttcaaccagtcaaagctgaactctttcatcacgcaatacagcaccggacaggtcagcgtggaaattgaatgggagctgcagaaggaaaacagcaagcgctggaaccccgagatccagtacacctccaactactacaaatctacaagtgtggactttgctgttaatacagaaggcgtgtactctgaaccccgccccattggcgcccgttacctcacccgtaatctgtaa

SEQ ID NO: 1659 - DNA, 2217 bp, Artificial Sequence
  Synthetic Polynucleotide
atggctgccgatggttatcttccagattggctcgaggacaacctctctgagggcattcgcgagtggtgggcgctgaaacctggagccccgaagcccaaagccaaccagcaaaagcaggacgacggccggggtctggtgcttcctggctacaagtacctcggacccttcaacggactcgacaagggggagtccgtcaacgcggcggacgcggcggccctcgagcacgacaaggcctacgaccagcagctgcaggcgggtgacaatccgtacctgcggtataaccacgccgacgccgagtttcaggagcgtctgcaagaagatacgtcttttgggggcaacctcgggcgagcagtcttccaggccaagaagcgggttctcgaacctctcggtctggttgaggaaggcgctaagacggctcctggaaagaagagaccggtagagccatcaccccagcgttctccagactcctctacgggcatcggcaagaagggccaacagcccgccagaaaaagactcaattttggtcagactggcgactcagagtcagttccagaccctcaacctctcggagaacctccagcagcgccctctggtgtgggacctaatacaatggctgcaggcggtggcgcaccaatggcagacaataacgaaggcgccgacggagtgggtagttcctcgggaaattggcattgcgattccacatggctgggcgacagagtcatcaccaccagcacccgaacctgggccctgcccacctacaacaaccacctctacaagcaaatctccaacgggacatcgggaggagccaccaacgacaacacctacttcggctacagcaccccctgggggtattttgactttaacagattccactgccacttttcaccacgtgactggcagcgactcatcaacaacaactggggattccggcccaagagactcagcttcaagctcttcaacatccaggtcaaggaggtcacgcagaatgaaggcaccaagaccatcgccaataacctcaccagcaccatccaggtgtttacggactcggagtaccagctgccgtacgttctcggctctgcccaccagggctgcctgcctccgttcccggcggacgtgttcacgattccccagtacggctacctaacactcaacaacggtagtcaggccgtgggacgctcctccttctactgcctggaatactttccttcgcagatgctgagaaccggcaacaacttccagtttacttacaccttcgaggacgtgcctttccacagcagctacgcccacagccagagcttggaccggctgatgaatcctctgattgaccagtacctgtactacttgtctcggattcaaacaacaggaggcacggcaaatacgcagactctgggcttcagccaaggtgggcctaatacaatggccaatcaggcaaagaactggctgccaggaccctgttaccgccaacaacgcgtctcaacgacaaccgggcaaaacaacaatagcaactttgcctggactgctgggaccaaataccatctgaatggaagaaattcattggctaatcctggcatcgctatggcaacacacaaagacgacgaggagcgtttttttcccagtaacgggatcctgatttttggcaaacaaaatgctgccagagacaatgcggattacagcgatgtcatgcccaccagcgaggaagaaatcaaaaccactaaccctgtggccacagaggaatacggtatcgtggcagataacttgcagcagcaaaacacggctcctcaaattggaactgtcaacagccagggggccttacccggtatggtctggcagaaccgggacgtgtacctgcagggtcccatctgggccaagattcctcacacggacggcaacttccacccgtctccgctgatgggcggctttggcctgaaacatcctccgcctcagatcctgatcaagaacacgcctgtacctgcggatcctccgaccaccttcaaccagtcaaagctgaactctttcatcacgcaatacagcaccggacaggtcagcgtggaaattgaatgggagctgcagaaggaaaacagcaagcgctggaaccccgagatccagtacacctccaactactacaaatctacaagtgtggactttgctgttaatacagaaggcgtgtactctgaaccccgccccattggcacccgttacctcacccgtaatctgtaa

SEQ ID NO: 1660 - DNA, 2217 bp, Artificial Sequence
  Synthetic Polynucleotide
atggctgccgatggttatcttccagattggctcgaggacaacctctctgagggcattcgcgagtggtgggcgctgaaacctggagccccgaagcccaaagccaaccagcaaaagcaggacgacggccggggtctggtgcttcctggctacaagtacctcggacccttcaacggactcgacaagggggagcccgtcaacgcggcggacgcggcggccctcgagcacgacaaggcctacgaccagcagctgcaggcgggtgacaatccgtacctgcggtataaccacgccgacgccgagtttcaggagcgtctgcaagaagatacgtcttttgggggcaacctcgggcgagcagtcttccaggccaagaagcgggttctcgaacctctcggtctggttgaggaaggcgctaagacggctcctggaaagaagagaccggtagagccatcaccccagcgttctccagactcctctacgggcatcggcaagaagggccaacagcccgccagaaaaagactcaattttggtcagactggcgactcagagtcagttccagaccctcaacctctcggagaacctccagcagcgccctctggtgtgggacctaatacaatggctgcaggcggtggcgcaccaatggcagacaatagcgaaggcgccgacggagtgggtagttcctcgggaaattggcattgcgattccacatggctgggcgacagagtcatcaccaccagcacccgaacctgggccctgcccacctacaacaaccacctctacaagcaaatctccaacgggacatcgggaggagccaccaacgacaacacctacttcggctacagcaccccctgggggtattttgactttaacagattccactgccacttttcaccacgtgactggcagcgactcatcaacaacaactggggattccggcccaagagactcagcttcaagctcttcaacatccaggtcaaggaggtcacgcagaatgaaggcaccaagaccatcgccaataacctcaccagcaccatccaggtgtttacggactcggagtaccagctgccgtacgttctcggctctgcccaccagggctgcctgcctccgttcccggcggacgtgttcacgattccccagtacggctacctaacactcaacaacggtagtcaggccgtgggacgctcctccttctactgcctggaatactttccttcgcagatgctgagaaccggcaacaacttccagtttacttacaccttcgaggacgtgcctttccacagcagctacgcccacagccagagcttggaccggctgatgaatcctctgattgaccagtacctgtactacttgtctcggattcaaacaacaggaggcacggcaaatacgcagactctgggcttcagccaaggtgggcctaatacaatggccaatcaggcaaagaactggctgccaggaccctgttaccgccaacaacgcgtctcaacgacaaccgggcaaaacaacaatagcaactttgcctggactgctgggaccaaataccatctgaatggaagaaattcattggctaatcctggcatcgctatggcaacacacaaagacgacgaggagcgtttttttcccagtaacgggatcctgatttttggcaaacaaaatgctgccagagacaatgcggattacagcgatgtcatgcccaccagcgaggaagaaatcaaaaccactaaccctgtggccacagaggaatacggtatcgtggcagataacttgcagcagcaaaacacggctcctcaaattggaactgtcaacagccagggggccttacccggtatggtctggcagaaccgggacgtgtacctgcagggtcccatctgggccaagattcctcacacggacggcaacttccacccgtctccgctgatgggcggctttggcctgaaacatcctccgcctcagatcctgatcaagaacacgcctgtacctgcggatcctccgaccaccttcaaccagtcaaagctgaactctttcatcacgcaatacagcaccggacaggtcagcgtggaaattgaatgggagctgcagaaggaaaacagcaagcgctggaaccccgagatccagtacacctccaactactacaaatctacaagtgtggactttgctgttaatacagaaggcgtgtactctgaaccccgccccattggcacccgttacctcacccgtaatctgtaa

SEQ ID NO: 1661 - DNA, 2217 bp, Artificial Sequence
  Synthetic Polynucleotide
atggctgccgatggttatcttccagattggctcgaggacaacctctctgagggcattcgcgagtggtgggcgctgaaacctggagccccgaagcccaaagccaaccagcaaaagcaggacgacggccggggtctggtgcttcctggctacaagtacctcggacccttcaacggactcgacaagggggagcccgtcaacgcggcggacgcggcggccctcgagcacgacaaggcctacgaccagcagctgcaggcgggtgacaatccgtacctgcggtataaccacgccgacgccgagtttcaggagcgtctgcaagaagatacgtcttttgggggcaacctcgggcgagcagtcttccaggccaagaagcgggttctcgaacctctcggtctggttgaggaaggcgctaagacggctcctggaaagaagagaccggtagagccatcaccccagcgttctccagactcctctacgggcatcggcaagaagggccaacagcccgccagaaaaagactcaattttggtcagactggcgactcagagtcagttccagaccctcaacctctcggagaacctccagcagcgccctctggtgtgggacctaatacaatggctgcaggcggtggcgcaccaatggcagacaataacgaaggcgccgacggagtgggtagttcctcgggaaattggcattgcgattccacatggctgggcgacagagtcatcaccaccagcacccgaacctgggccctgcccacctacaacaaccacctctacaagcaaatctccaacgggacatcgggaggagccaccaacgacaacacctacttcggctacagcaccccctgggggtattttgactttaacagattccactgccacttttcaccacgtgactggcagcgactcatcaacaacaactggggattccggcccaagagactcagcttcaagctcttcaacatccaggtcaaggaggtcacgcagaatgaaggcaccaagaccatcgccaataacctcaccagcaccatccaggtgtttacggactcggagtaccagctgccgtacgttctcggctctgcccaccagggctgcctgcctccgttcccggcggacgtgttcacgattccccagtacggctacctaacactcaacaacggtagtcaggccgtgggacgctcctccttctactgcctggaatactttccttcgcagatgctgagaaccggcaacaacttccagtttacttacaccttcgaggacgtgcctttccacagcagctacgcccacagccagagcttggaccggctgatgaatcctctgattgaccagtacctgtactacttgtctcggattcaaacaacaggaggcacggcaaatacgcagactctgggcttcagccaaggtgggcctaatacaatggccaatcaggcaaagaactggctgccaggaccctgttaccgccaacaacgcgtctcaacgacaaccgggcaaaacaacaatagcaactttgcctggactgctgggaccaaataccatctgaatggaagaaattcattggctaatcctggcatcgctatggcaacacacaaagacgacgaggagcgtttttttcccagtaacgggatcctgatttttggcaaacaaaatgctgccagagacaatgcggattacggcgatgtcatgcccaccagcgaggaagaaatcaaaaccactaaccctgtggccacagaggaatacggtatcgtggcagataacttgcagcagcaaaacacggctcctcaaattggaactgtcaacagccagggggccttacccggtatggtctggcagaaccgggacgtgtacctgcagggtcccatctgggccaagattcctcacacggacggcaacttccacccgtctccgctgatgggcggctttggcctgaaacatcctccgcctcagatcctgatcaagaacacgcctgtacctgcggatcctccgaccaccttcaaccagtcaaagctgaactctttcatcacgcaatacagcaccggacaggtcagcgtggaaattgaatgggagctgcagaaggaaaacagcaagcgctggaaccccgagatccagtacacctccaactactacaaatctacaagtgtggactttgctgttaatacagaaggcgtgtactctgaaccccgccccattggcacccgttacctcacccgtaatctgtaa

SEQ ID NO: 1662 - DNA, 2217 bp, Artificial Sequence
  Synthetic Polynucleotide
atggctgccgatggttatcttccagattggctcgaggacaacctctctgagggcattcgcgagtggtgggcgctgaaacctggagccccgaagcccaaagccaaccagcaaaagcaggacgacggccggggtctggtgcttcctggctacaagtacctcggacccttcaacggactcgacaagggggagcccgtcaacgcggcggacgcggcggccctcgagcacgacaaggcctacgaccagcagctgcaggcgggtgacaatccgtacctgcggtataaccacgccgacgccgagtttcaggagcgtctgcaagaagatacgtcttttgggggcaacctcgggcgagcagtcttccaggccaagaagcgggttctcgaacctctcggtctggttgaggaaggcgctaagacggctcctggaaagaggagaccggtagagccatcaccccagcgttctccagactcctctacgggcatcggcaagaagggccaacagcccgccagaaaaagactcaattttggtcagactggcgactcagagtcagttccagaccctcaacctctcggagaacctccagcagcgccctctggtgtgggacctaatacaatggctgcaggcggtggcgcaccaatggcagacaataacgaaggcgccgacggagtgggtagttcctcgggaaattggcattgcgattccacatggctgggcgacagagtcatcaccaccagcacccgaacctgggccctgcccacctacaacaaccacctctacaagcaaatctccaacgggacatcgggaggagccaccaacgacaacacctacttcggctacagcaccccctgggggtattttgactttaacagattccactgccacttttcaccacgtgactggcagcgactcatcaacaacaactggggattccggcccaagagactcagcttcaagctcttcaacatccaggtcaaggaggtcacgcagaatgaaggcaccaagaccatcgccaataacctcaccagcaccatccaggtgtttacggactcggagtaccagctgccgtacgttctcggctctgcccaccagggctgcctgcctccgttcccggcggacgtgttcacgattccccagtacggctacctaacactcaacaacggtagtcaggccgtgggacgctcctccttctactgcctggaatactttccttcgcagatgctgagaaccggcaacaacttccagtttacttacaccttcgaggacgtgcctttccacagcagctacgcccacagccagagcttggaccggctgatgaatcctctgattgaccagtacctgtactacttgtctcggattcaaacaacaggaggcacggcaaatacgcagactctgggcttcagccaaggtgggcctaatacaatggccaatcaggcaaagaactggctgccaggaccctgttaccgccaacaacgcgtctcaacgacaaccgggcaaaacaacaatagcaactttgcctggactgctgggaccaaataccatctgaatggaagaaattcattggctaatcctggcatcgctatggcaacacacaaagacgacgaggagcgtttttttcccagtaacgggatcctgatttttggcaaacaaaatgctgccagagacaatgcggattacagcgatgtcatgcccaccagcgaggaagaaatcaaaaccactaaccctgtggccacagaggaatacggtatcgtggcagataacttgcagcagcaaaacacggctcctcaaattggaactgtcaacagccagggggccttacccggtatggtctggcagaaccgggacgtgtacctgcagggtcccatctgggccaagattcctcacacggacggcaacttccacccgtctccgctgatgggcggctttggcctgaaacatcctccgcctcagatcctgatcaagaacacgcctgtacctgcggatcctccgaccaccttcaaccagtcaaagctgaactctttcatcacgcaatacagcaccggacaggtcagcgtggaaattgaatgggagctgcagaaggaaaacagcaagcgctggaaccccgagatccagtacacctccaactactacaaatctacaagtgtggactttgctgttaatacagaaggcgtgtactctgaaccccgccccattggcacccgttacctcacccgtaatctgtaa

SEQ ID NO: 1663 - DNA, 2217 bp, Artificial Sequence
  Synthetic Polynucleotide
atggctgccgatggttatcttccagattggctcgaggacaacctctctgagggcattcgcgagtggtgggcgctgaaacctggagccccgaagcccaaagccaaccagcaaaagcaggacgacggccggggtctggtgcttcctggctacaagtacctcggacccttcaacggactcgacaagggggagcccgtcaacgcggcggacgcggcggccctcgagcacgacaaggcctacgaccagcagctgcaggcgggtgacaatccgtacctgcggtataaccacgccgacgccgagtttcaggagcgtctgcaagaagatacgtcttttgggggcaacctcgggcgagcagtcttccaggccaagaagcgggttctcgaacctctcggtctggttgaggaaggcgctaagacggctcctggaaagaagagaccggtagagccatcaccccagcgttctccagactcctctacgggcatcggcaagaagggccaacagcccgccagaaaaagactcaattttggtcagactggcgactcagagtcagttccagaccctcaacctctcggagaacctccagcagcgccctctggtgtgggacctaatacaatggctgcaggcggtggcgcaccaatggcagacaataacgaaggcgccgacggagtgggtagttcctcgggaaattggcattgcgattccacatggctgggcgacagagtcatcaccaccagcacccgaacctgggccctgcccacctacaacaaccacctctacaagcaaatctccaacgggacatcgggaggagccaccaacgacaacacctacttcggctacagcaccccctgggggtattttgactttaacagattccactgccacttttcaccacgtgactggcagcgactcatcaacaacaactggggattccggcccaagagactcagcttcaagctcttcaacatccaggtcaaggaggtcacgcagaatgaaggcaccaagaccatcgccaataacctcaccagcaccatccaggtgtttacggactcggagtaccagctgccgtacgttctcggctctgcccaccagggctgcctgcctccgttcccggcggacgtgttcacgattccccagtacggctacctaacactcaacaacggtagtcaggccgtgggacgctcctccttctactgcctggaatactttccttcgcagatgctgagaaccggcaacaacttccagtttacttacaccttcgaggacgtgcctttccacagcagctacgcccacagccagagcttggaccggctgatgaatcctctgattgaccagtacctgtactacttgtctcggattcaaacaacaggaggcacggcaaatacgcagactctgggcttcagccaaggtgggcctaatacaatggccaatcaggcaaagaactggctgccaggaccctgttaccgccaacaacgcgtcccaacgacaaccgggcaaaacaacaatagcaactttgcctggactgctgggaccaaataccatctgaatggaagaaattcattggctaatcctggcatcgctatggcaacacacaaagacgacgaggagcgtttttttcccagtaacgggatcctgatttttggcaaacaaaatgctgccagagacaatgcggattacagcgatgtcatgcccaccagcgaggaagaaatcaaaaccactaaccctgtggccacagaggaatacggtatcgtggcagataacttgcagcagcaaaacacggctcctcaaattggaactgtcaacagccagggggccttacccggtatggtctggcagaaccgggacgtgtacctgcagggtcccatctgggccaagattcctcacacggacggcaacttccacccgtctccgctgatgggcggctttggcctgaaacatcctccgcctcagatcctgatcaagaacacgcctgtacctgcggatcctccgaccaccttcaaccagtcaaagctgaactctttcatcacgcaatacagcaccggacaggtcagcgtggaaattgaatgggagctgcagaaggaaaacagcaagcgctggaaccccgagatccagtacacctccaactactacaaatctacaagtgtggactttgctgttaatacagaaggcgtgtactctgaaccccgccccattggcacccgttacctcacccgtaatctgtaa

SEQ ID NO: 1664 - DNA, 2217 bp, Artificial Sequence
  Synthetic Polynucleotide
atggctgccgatggttatcttccagattggctcgaggacaacctctctgagggcattcgcgagtggtgggcgctgaaacctggagccccgaagcccaaagccaaccagcaaaagcaggacgacggccggggtctggtgcttcctggctacaagtacctcggacccttcaacggactcgacaagggggagcccgtcaacgcggcggacgcggcggccctcgagcacgacaaggcctacgaccagcagctgcaggcgggtgacaatccgtacctgcggtataaccacgccgacgccgagtttcaggagcgtctgcaagaagatacgtcttttgggggcaacctcgggcgagcagtcttccaggccaagaagcgggttctcgaacctctcggtctggttgaggaaggcgctaagacggctcctggaaagaagagaccggtagagccatcaccccagcgttctccagactcctctacgggcatcggcaagaagggccaacagcccgccagaaaaagactcaattttggtcagactggcgactcagagtcagttccagaccctcaacctctcggagaacctccagcagcgccctctggtgtgggacctaatacaatggctgcaggcggtggcgcaccaatggcagacaataacgaaggcgccgacggagtgggtagttcctcgggaaattggcattgcgattccacatggctgggcgacagagtcatcaccaccagcacccgaacctgggccctgcccacctacaacaaccacctctacaagcaaatctccaacgggacatcgggaggagccaccaacgacaacacctacttcggctacagcaccccctgggggtattttgactttaacagattccactgccacttttcaccacgtgactggcagcgactcatcaacaacaactggggattccggcccaagagactcagcttcaagctcttcaacatccaggtcaaggaggtcacgcagaatgaaggcaccaagaccatcgccaataacctcaccagcaccatccaggtgtttacggactcggagtaccagctgccgtacgttctcggctctgcccaccagggctgcctgcctccgttcccggcggacgtgttcacgattccccagtacggctacctaacactcaacaacggtagtcaggccgtgggacgctcctccttctactgcctggaatactttccttcgcagatgctgagaaccggcaacaacttccagtttacttacaccttcgaggacgtgcctttccacagcagctacgcccacagccagagcttggaccggctgatgaatcctctgattgaccagtacctgtactacttgtctcggattcaaacaacaggaggcacggcaaatacgcagactctgggcttcagccaaggtgggcctaatacaatggccaatcaggcaaagaactggctgccaggaccctgttaccgccaacaacgcgtctcaacgacaaccgggcaaaacaacaatagcaactttgcctggactgctgggaccaaataccatctgaatggaagaaattcattggctaatcctggcatcgctatggcaacacacaaagacgacgaggagcgtttttttcccagtaacgggatcctgatttttggcaaacaaaatgctgccagagacaatgcggattacagcgatgtcatgcccaccagcgaggaagaaatcaaaaccactaaccctgtggccacagaggaatacggtatcgtggcagataacttgcagcagcaaaacacggctcctcaaattggaactgtcaacagccagggggccttacccggtatggtctggcagaaccgggacgtgtacctgcagggtcccatctgggccaagattcctcacacggacggcaacttccacccgtctccgctgatgggcggctttggcctgaaacatcctccgcctcagatcctgatcaagaacacgcctgtacctgcggatcctccgaccaccttcaaccagtcaaagctgaactctttcatcacgcaatacagcaccggacaggtcagcgtggaaattgaatgggagctgcagaaggaaaacagcaagcgctggaaccccgagatccagtacacctccaactactacaaatctacaagtgtggactttgctgttaatacagaaggcgtgtactctgaaccccgccccattggcacccgttacctcacccgtaatctgtaa

SEQ ID NO: 1665 - DNA, 2217 bp, Artificial Sequence
  Synthetic Polynucleotide
atggctgccgatggttatcttccagattggctcgaggacaacctctctgagggcattcgcgagtggtgggcgctgaaacctggagccccgaagcccaaagccaaccagcaaaagcaggacgacggccggggtctggtgcttcctggctacaagtacctcggacccttcaacggactcgacaagggggagcccgtcaacgcggcggacgcggcggccctcgagcacgacaaggcctacgaccagcagctgcaggcgggtgacaatccgtacctgcggtataaccacgccgacgccgagtttcaggagcgtctgcaagaagatacgtcttttgggggcaacctcgggcgagcagtcttccaggccaagaagcgggttctcgaacctctcggtctggttgaggaaggcgctaagacggctcctggaaagaagagaccggtagagccatcaccccagcgttctccagactcctctacgggcatcggcaagaagggccaacagcccgccagaaaaagactcaattttggtcagactggcgactcagagtcagttccagaccctcaacctctcggagaacctccagcagcgccctctggtgtgggacctaatacaatggctgcaggcggtggcgcaccaatggcagacaataacgaaggcgccgacggagtgggtagttcctcgggaaattggcattgcgattccacatggctgggcgacagagtcatcaccaccagcacccgaacctgggccctgcccacctacaacaaccacctctacaagcaaatctccaacgggacatcgggaggagccaccaacgacaacacctacttcggctacagcaccccctgggggtattttgactttaacagattccaccgccacttttcaccacgtgactggcagcgactcatcaacaacaactggggattccggcccaagagactcagcttcaagctcttcaacatccaggtcaaggaggtcacgcagaatgaaggcaccaagaccatcgccaataacctcaccagcaccatccaggtgtttacggactcggagtaccagctgccgtacgttctcggctctgcccaccagggctgcctgcctccgttcccggcggacgtgttcacgattccccagtacggctacctaacactcaacaacggtagtcaggccgtgggacgctcctccttctactgcctggaatactttccttcgcagatgctgagaaccggcaacaacttccagtttacttacaccttcgaggacgtgcctttccacagcagctacgcccacagccagagcttggaccggctgatgaatcctctgattgaccagtacctgtactacttgtctcggattcaaacaacaggaggcacggcaaatacgcagactctgggcttcagccaaggtgggcctaatacaatggccaatcaggcaaagaactggctgccaggaccctgttaccgccaacaacgcgtctcaacgacaaccgggcaaaacaacaatagcaactttgcctggactgctgggaccaaataccatctgaatggaagaaattcattggctaatcctggcatcgctatggcaacacacaaagacgacgaggagcgtttttttcccagtaacgggatcctgatttttggcaaacaaaatgctgccagagacaatgcggattacagcgatgtcatgcccaccagcgaggaagaaatcaaaaccactaaccctgtggccacagaggaatacggtatcgtggcagataacttgcagcagcaaaacacggctcctcaaattggaactgtcaacagccagggggccttacccggtatggtctggcagaaccgggacgtgtacctgcagggtcccatctgggccaagattcctcacacggacggcaacttccacccgtctccgctgatgggcggctttggcctgaaacatcctccgcctcagatcctgatcaagaacacgcctgtacctgcggatcctccgaccaccttcaaccagtcaaagctgaactctttcatcacgcaatacagcaccggacaggtcagcgtggaaattgaatgggagctgcagaaggaaaacagcaagcgctggaaccccgagatccagtacacctccaactactacaaatctacaagtgtggactttgctgttaatacagaaggcgtgtactctgaaccccgccccattggcacccgttacctcacccgtaatctgtaa

SEQ ID NO: 1666 - DNA, 2217 bp, Artificial Sequence
  Synthetic Polynucleotide
atggctgccgatggttatcttccagattggctcgaggacaacctctctgagggcattcgcgagtggtgggcgctgaaacctggagccccgaagcccaaagccaaccagcaaaagcaggacgacggccggggtctggtgcttcctggctacaagtacctcggacccttcaacggactcgacaagggggagcccgtcaacgcggcggacgcggcggccctcgagcacgacaaggcctacgaccagcagctgcaggcgggtgacaatccgtacctgcggtataaccacgccgacgccgagtttcaggagcgtctgcaagaagatacgtcttttgggggcaacctcgggcgagcagtcttccaggccaagaagcgggttctcgaacctctcggtctggttgaggaaggcgctaagacggctcctggaaagaagagaccggtagagccatcaccccagcgttctccagactcctctacgggcatcggcaagaagggccaacagcccgccagaaaaagactcaattttggtcagactggcgactcagagtcagttccagaccctcaacctctcggagaacctccagcagcgccctctggtgtgggacctaatacaatggctgcaggcggtggcgcaccaatggcagacaataacgaaggcgccgacggagtgggtagttcctcgggaaattggcattgcgattccacatggctgggcgacagagtcatcaccaccagcacccgaacctgggccctgcccacctacaacaaccacctctacaagcaaatctccaacgggacatcgggaggagccaccaacgacaacacctacttcggctacagcaccccctgggggtattttgactttaacagattccactgccacttttcaccacgtgactggcagcgactcatcaacaacaactggggattccggcccaagagactcagcttcaagctcttcaacatccaggtcaaggaggtcacgcagaatgaaggcaccaagaccatcgccaataacctcaccagcaccatccaggtgtttacggactcggagtgccagctgccgtacgttctcggctctgcccaccagggctgcctgcctccgttcccggcggacgtgttcacgattccccagtacggctacctaacactcaacaacggtagtcaggccgtgggacgctcctccttctactgcctggaatactttccttcgcagatgctgagaaccggcaacaacttccagtttacttacaccttcgaggacgtgcctttccacagcagctacgcccacagccagagcttggaccggctgatgaatcctctgattgaccagtacctgtactacttgtctcggattcaaacaacaggaggcacggcaaatacgcagactctgggcttcagccaaggtgggcctaatacaatggccaatcaggcaaagaactggctgccaggaccctgttaccgccaacaacgcgtctcaacgacaaccgggcaaaacaacaatagcaactttgcctggactgctgggaccaaataccatctgaatggaagaaattcattggctaatcctggcatcgctatggcaacacacaaagacgacgaggagcgtttttttcccagtaacgggatcctgatttttggcaaacaaaatgctgccagagacaatgcggattacagcgatgtcatgcccaccagcgaggaagaaatcaaaaccactaaccctgtggccacagaggaatacggtatcgtggcagataacttgcagcagcaaaacacggctcctcaaattggaactgtcaacagccagggggccttacccggtatggtctggcagaaccgggacgtgtacctgcagggtcccatctgggccaagattcctcacacggacggcaacttccacccgtctccgctgatgggcggctttggcctgaaacatcctccgcctcagatcctgatcaagaacacgcctgtacctgcggatcctccgaccaccttcaaccagtcaaagctgaactctttcatcacgcaatacagcaccggacaggtcagcgtggaaattgaatgggagctgcagaaggaaaacagcaagcgctggaaccccgagatccagtacacctccaactactacaaatctacaagtgtggactttgctgttaatacagaaggcgtgtactctgaaccccgccccattggcacccgttacctcacccgtaatctgtaa

SEQ ID NO: 1667 - DNA, 2217 bp, Artificial Sequence
  Synthetic Polynucleotide
atggctgccgatggttatcttccagattggctcgaggacaacctctctgagggcattcgcgagtggtgggcgctgaaacctggagccccgaagcccaaagccaaccagcaaaagcaggacgacggccggggtctggtgcttcctggctacaagtacctcggacccttcaacggactcgacaagggggagcccgtcaacgcggcggacgcggcggccctcgagcacgacaaggcctacgaccagcagctgcaggcgggtgacaatccgtacctgcggtataaccacgccgacgccgagtttcaggagcgtctgcaagaagatacgtcttttgggggcaacctcgggcgagcagtcttccaggccaagaagcgggttctcgaacctctcggtctggttgaggaaggcgctaagacggctcctggaaagaagagaccggtagagccatcaccccagcgttctccagactcctctacgggcatcggcaagaagggccaacagcccgccagaaaaagactcaattttggtcagactggcgactcagagtcagttccagaccctcaacctctcggagaacctccagcagcgccctctggtgtgggacctaatacaatggctgcaggcggtggcgcaccaatggcagacaataacgaaggcgccgacggagtgggtagttcctcgggaaattggcattgcgattccacatggctgggcgacagagtcatcaccaccagcacccgaacctgggccctgcccacctacaacaaccacctctacaagcaaatctccaacgggacatcgggaggagccaccaacgacaacgcctacttcggctacagcaccccctgggggtattttgactttaacagattccactgccacttttcaccacgtgactggcagcgactcatcaacaacaactggggattccggcccaagagactcagcttcaagctcttcaacatccaggtcaaggaggtcacgcagaatgaaggcaccaagaccatcgccaataacctcaccagcaccatccaggtgtttacggactcggagtaccagctgccgtacgttctcggctctgcccaccagggctgcctgcctccgttcccggcggacgtgttcacgattccccagtacggctacctaacactcaacaacggtagtcaggccgtgggacgctcctccttctactgcctggaatactttccttcgcagatgctgagaaccggcaacaacttccagtttacttacaccttcgaggacgtgcctttccacagcagctacgcccacagccagagcttggaccggctgatgaatcctctgattgaccagtacctgtactacttgtctcggattcaaacaacaggaggcacggcaaatacgcagactctgggcttcagccaaggtgggcctaatacaatggccaatcaggcaaagaactggctgccaggaccctgttaccgccaacaacgcgtctcaacgacaaccgggcaaaacaacaatagcaactttgcctggactgctgggaccaaataccatctgaatggaagaaattcattggctaatcctggcatcgctatggcaacacacaaagacgacgaggagcgtttttttcccagtaacgggatcctgatttttggcaaacaaaatgctgccagagacaatgcggattacagcgatgtcatgcccaccagcgaggaagaaatcaaaaccactaaccctgtggccacagaggaatacggtatcgtggcagataacttgcagcagcaaaacacggctcctcaaattggaactgtcaacagccagggggccttacccggtatggtctggcagaaccgggacgtgtacctgcagggtcccatctgggccaagattcctcacacggacggcaacttccacccgtctccgctgatgggcggctttggcctgaaacatcctccgcctcagatcctgatcaagaacacgcctgtacctgcggatcctccgaccaccttcaaccagtcaaagctgaactctttcatcacgcaatacagcaccggacaggtcagcgtggaaattgaatgggagctgcagaaggaaaacagcaagcgctggaaccccgagatccagtacacctccaactactacaaatctacaagtgtggactttgctgttaatacagaaggcgtgtactctgaaccccgccccattggcacccgttacctcacccgtaatctgtaa

SEQ ID NO: 1668 - DNA, 2217 bp, Artificial Sequence
  Synthetic Polynucleotide
atggctgccgatggttatcttccagattggctcgaggacaacctctctgagggcattcgcgagtggtgggcgctgaaacctggagccccgaagcccaaagccaaccagcaaaagcaggacgacggccggggtctggtgcttcctggctacaagtacctcggacccttcaacggactcgacaagggggagcccgtcaacgcggcggacgcggcggccctcgagcacgacaaggcctacgaccagcagctgcaggcgggtgacaatccgtacctgcggtataaccacgccgacgccgagtttcaggagcgtctgcaagaagatacgtcttttgggggcaacctcgggcgagcagtcttccaggccaagaagcgggttctcgaacctctcggtctggttgaggaaggcgctaagacggctcctggaaagaagagaccggtagagccatcaccccagcgttctccagactcctctacgggcatcggcaagaagggccaacagcccgccagaaaaagactcaattttggtcagactggcgactcagagtcagttccagaccctcaacctctcggagaacctccagcagcgccctctggtgtgggacctaatacaatggctgcaggcggtggcgcaccaatggcagacaataacgaaggcgccgacggagtgggtagttcctcgggaaattggcattgcgattccacatggctgggcgacagagtcatcaccaccagcacccgaacctgggccctgcccacctacaacaaccacctctacaagcaaatctccaacgggacatcgggaggagccaccaacgacaacacctacttcggctacagcaccccctgggggtattttgactttaacagattccactgccacttttcaccacgtgactggcagcgactcatcaacaacaactggggattccggcccaagagactcagcttcaagctcttcaacatccaggtcaaggaggtcacgcagaatgaaggcaccaagaccatcgccaataacctcaccagcaccatccaggtgtttacggactcggagtaccagctgccgtacgttctcggctctgcccaccagggctgcctgcctccgttcccggcggacgtgttcacgattccccagtacggctacctaacactcaacaacggtagtcaggccgtgggacgctcctccttctactgcctggaatactttccttcgcagatgctgagaaccggcaacaacttccagtttacttacaccttcgaggacgtgcctttccacagcagctacgcccacagccagagcttggaccggctgatgaatcctctgattgaccagtacctgtactacttgtctcggattcaaacaacaggaggcacggcaaatacgcagactctgggcttcagccaaggtgggcctaatacaatggccaatcaggcaaagaactggctgccaggaccctgttaccgccaacaacgcgtctcaacgacaaccgggcaaaacaacaatagcaactttgcctggactgctgggaccaaataccatctgaatggaagaaattcattggctaatcctggcatcgctatggcaacacacaaagacgacgaggagcgtttttttcccagtaacgggatcctgatttttggcaaacaaaatgctgccagaggcaatgcggattacagcgatgtcatgcccaccagcgaggaagaaatcaaaaccactaaccctgtggccacagaggaatacggtatcgtggcagataacttgcagcagcaaaacacggctcctcaaattggaactgtcaacagccagggggccttacccggtatggtctggcagaaccgggacgtgtacctgcagggtcccatctgggccaagattcctcacacggacggcaacttccacccgtctccgctgatgggcggctttggcctgaaacatcctccgcctcagatcctgatcaagaacacgcctgtacctgcggatcctccgaccaccttcaaccagtcaaagctgaactctttcatcacgcaatacagcaccggacaggtcagcgtggaaattgaatgggagctgcagaaggaaaacagcaagcgctggaaccccgagatccagtacacctccaactactacaaatctacaagtgtggactttgctgttaatacagaaggcgtgtactctgaaccccgccccattggcacccgttacctcacccgtaatctgtaa

(The sequence listing continues in the following parts.)
